United States Patent Application Publication US 2021/0199660 A1 - sequence listing, part 47

SEQ ID NO: 671348 - DNA, 120 bp, Artificial Sequence
  ENSG00000185633_6 (sequence is synthesized)
cgaagggtgtggcacaggctacgtgttgagcgtggcctacgtgagccaacaagaagcaggggcctctgagtgccaagcgacgtggcgggctccacgttagcccaggctctgagagccagc

SEQ ID NO: 671349 - DNA, 120 bp, Artificial Sequence
  ENSG00000185633_7 (sequence is synthesized)
ccaggggcggcgctgctcagcttgggctggtccagggcctgcccaggctggggcacctttgcctcctgaggcgcagcgcactcctcccctgcccaagcctactgcctcccgctgccgcca

SEQ ID NO: 671350 - DNA, 120 bp, Artificial Sequence
  ENSG00000185633_8 (sequence is synthesized)
gtaccccctccagccccacacctgggcctccccctgccactcccctcccttgctcccctctgtccccagggatcaaacagaagcagccgtgggcaaaatacaatttcatttaacaaattg

SEQ ID NO: 671351 - DNA, 120 bp, Artificial Sequence
  ENSG00000185633_9 (sequence is synthesized)
cggggagtgtgtgttgccatcgcgtctccgcctgcagctcggcttcgccatccgcatcatctccatccattattgaagaaacagccgcgtccgctccaatcacatcaacacccccgcccc

SEQ ID NO: 671352 - DNA, 120 bp, Artificial Sequence
  ENSG00000185633_10 (sequence is synthesized)
ctttccgttccgctcgcccagcggccctctgggtgctgaggagaggggaagccaaggcgcggtgggggcgccgggtgggaatgggcttatgacccttgccccaagcccggccaggagccg

SEQ ID NO: 671353 - DNA, 120 bp, Artificial Sequence
  ENSG00000185633_11 (sequence is synthesized)
ggacgccggggtccccggcggagagcgctttgcataaacagatggcgcgggcggctttgtctcactcgttcgctcaccgcgcagctcccggctccgcttctgtctggctgatgcaatcat

SEQ ID NO: 671354 - DNA, 120 bp, Artificial Sequence
  ENSG00000185633_12 (sequence is synthesized)
gatcatctcggtgcctcgggaccaggcgcccttaataatggcagaggggggtcaggggccccggggctcccgagcagatgctgggccctgtgtcttcctttccgggcgcccctccacgtc

SEQ ID NO: 671355 - DNA, 120 bp, Artificial Sequence
  ENSG00000185633_13 (sequence is synthesized)
tgcgcggagttgacgggcatgtggaggtgaccaggatgaggaccccgggcagtgccccgaggcgtctccgggctgccctgttgggctgcttcagtccccagaggcagcaacccagagaat

SEQ ID NO: 671356 - DNA, 120 bp, Artificial Sequence
  ENSG00000185633_14 (sequence is synthesized)
aggaatagagctggggagtggggttggggagagacagagataaagacagagacaaagagaggcattagtaaagagagacacagtgagatggagagatgtggagggagggagcgagacaca

SEQ ID NO: 671357 - DNA, 120 bp, Artificial Sequence
  ENSG00000185633_15 (sequence is synthesized)
aagagacacagaaaaaccgatgcagagggacaaagccaggtagggaaggcagcaagagggagagcagacagacacagccagaatagggaagagagagatggacatacccagagacaggaa

SEQ ID NO: 671358 - DNA, 120 bp, Artificial Sequence
  ENSG00000185633_16 (sequence is synthesized)
gcagacagaaggcagaaagaacaagaggcagaaagaagggcagccagaggctaggacaggccgggtcagagggcttagggcaatctcgaatctgcagcccagaagcagagatgaagcccc

SEQ ID NO: 671359 - DNA, 120 bp, Artificial Sequence
  ENSG00000185633_17 (sequence is synthesized)
cccccatcctcttatctcctggtcctggcacccacaactcccgtactagaagcaaagggaggcttggggtactcagcgcaaccccctttccctctcctcttagttccttgcagtttccac

SEQ ID NO: 671360 - DNA, 120 bp, Artificial Sequence
  ENSG00000185633_18 (sequence is synthesized)
gatggcctccttgggcggccccacctttaccctaccccaggtgcagacatctggaggagagagtcggagagcagaaaccacttggctcccagacaattcccctacaggctttgggcctgg

SEQ ID NO: 671361 - DNA, 120 bp, Artificial Sequence
  ENSG00000185633_19 (sequence is synthesized)
ctcgcccttcgcagccccgacgtctggtaaaggcacggcttgggatgctcacgggggcctgggtgaggcaagatggggtggaaataggcggccctagtggggatcccgtgccctgctgca

SEQ ID NO: 671362 - DNA, 120 bp, Artificial Sequence
  ENSG00000185633_20 (sequence is synthesized)
ccctccagcccacctggccgctcactcctcagcttggcccgccctgaaatgcggaacccgcgcctctcccggccgggttgccatgacgacgccgctcagccagcggtgggcttgggcttt

SEQ ID NO: 671363 - DNA, 120 bp, Artificial Sequence
  ENSG00000185633_21 (sequence is synthesized)
tgggtacctctaagtcctcaccagagcactggggttgtggccgggtgagctgctgggggtggcattggggaccagtgtggggcggagatttcacacccggccgcggagagggtccggaag

SEQ ID NO: 671364 - DNA, 120 bp, Artificial Sequence
  ENSG00000185634_0 (sequence is synthesized)
attcacagatttattagcttgcacacacacagagaaattcattcggcaaagttcattcataaaaatttcaacacgctgcgtatcatcctgcacatctcagctttcggctgcaaatgggct

SEQ ID NO: 671365 - DNA, 120 bp, Artificial Sequence
  ENSG00000185634_1 (sequence is synthesized)
tctgaaaaaagctccgagaggaatccaggagggagggaagctctgagcgagggtaggcaggctgggaggggatctgaggaacacggacccatcacaagtcagtgaaacaatgcggagcag

SEQ ID NO: 671366 - DNA, 120 bp, Artificial Sequence
  ENSG00000185634_2 (sequence is synthesized)
cgcccgtcagtagtactcctggctggtggcccagaacgggatgcaagacaagatcttccaagagagggcagcctttggaatcaacgaacccaggcaaaagggcctttggttcatagatac

SEQ ID NO: 671367 - DNA, 120 bp, Artificial Sequence
  ENSG00000185634_3 (sequence is synthesized)
atttttttttcctttttaaatgaacaatcactggaacaaataaagggttaataggccagtcatttgccccgccctgtgagagccgaagggagcaggttcgaaagttcctgtgtgcagaac

SEQ ID NO: 671368 - DNA, 120 bp, Artificial Sequence
  ENSG00000185634_4 (sequence is synthesized)
agaaggctggggtgagggtgggagtcgggtgctaaatatttctactaggctcctgcaaggctagtgatgcagcgggccccccgaccggcgctcgcccgggttctgcgcctaagagttggc

SEQ ID NO: 671369 - DNA, 120 bp, Artificial Sequence
  ENSG00000185634_5 (sequence is synthesized)
cgtgagcgacccgcgccgccgggagcctgggtctaggctctcccgacaaggattccaaggcgagaacactggtgcctctgcctgggccagggagagactgaaatcagagcaggggaggcg

SEQ ID NO: 671370 - DNA, 120 bp, Artificial Sequence
  ENSG00000185634_6 (sequence is synthesized)
tttcccccatgggctgtcacccttaaggggccgggagccgaggtgggcgagctcgagagcagagttggagaggtggctgctgtgagttgcatcgggcgttgaggtatctgatgtctgcac

SEQ ID NO: 671371 - DNA, 120 bp, Artificial Sequence
  ENSG00000185634_7 (sequence is synthesized)
cgtttatctaccagacgacgaggcgatttatgcaacagtatcctgtttcagcactgccaaggctatgcgagaacgcggccaggacagcctggcaggactcgtgctgtatgtaggactctt

SEQ ID NO: 671372 - DNA, 120 bp, Artificial Sequence
  ENSG00000185634_8 (sequence is synthesized)
cgggcaccccgggatgctgcacagggccaagtacagccgctttcggaacgagtcgatcacgtccttggacgaaggtagctccggaggctcggtcgggaacaagggctcgccgcagcctcc

SEQ ID NO: 671373 - DNA, 120 bp, Artificial Sequence
  ENSG00000185634_9 (sequence is synthesized)
ccaccccgccctggcacctcacctgccgactgaagatgccaccttgccgtcgcaggagagccccaccccactgtgcaccttgatcccccgcatggcaagcatgaagctggccaacccggc

SEQ ID NO: 671374 - DNA, 120 bp, Artificial Sequence
  ENSG00000185634_10 (sequence is synthesized)
cactttgctgagtctgaaaaacttttgcctgggtaccaaagaggtgcctcggctgaagctccaggaaagccgggacccaggttccagcggcccctcttccccagaaaccagtttaagtag

SEQ ID NO: 671375 - DNA, 120 bp, Artificial Sequence
  ENSG00000185634_11 (sequence is synthesized)
gtccgggactgcacctccaccgcagcaggacctggtgggacacagggcaaccgccctaacccctgattcgtgcccgcttcctggccctggggagccaacacttaggagcaggcaggacag

SEQ ID NO: 671376 - DNA, 120 bp, Artificial Sequence
  ENSG00000185634_12 (sequence is synthesized)
gcactttctacagcacctgttggggatgggcatgaactactgtgtgaggtacatgggctgtgttgaagtgctgcaatcaatgagatcactggattttggaatgagaacccaagttacaag

SEQ ID NO: 671377 - DNA, 120 bp, Artificial Sequence
  ENSG00000185634_13 (sequence is synthesized)
ggaagcaataagtcgcctgtgtgaagctgtccccggggcaaatggagccattaaaaagcgaaagcctccagttaagttcctatcaacagtccttggcaaaagtaatcttcagttttcagg

SEQ ID NO: 671378 - DNA, 120 bp, Artificial Sequence
  ENSG00000185634_14 (sequence is synthesized)
aatgaatataaaactgaccatctcaacatgcagtctcacattgatgaatcttgacaaccaacagattattgcaaatcatcatatgcagtctatttcatttgcctctggaggggatcctga

SEQ ID NO: 671379 - DNA, 120 bp, Artificial Sequence
  ENSG00000185634_15 (sequence is synthesized)
tactacagactatgttgcctacgtagctaaagatccagttaatcaacgagcctgtcacatattggaatgccacaatggaatggcccaagacgtcataagtaccatagggcaggcttttga

SEQ ID NO: 671380 - DNA, 120 bp, Artificial Sequence
  ENSG00000185634_16 (sequence is synthesized)
actccggtttaaacagtacttgaaaaatccttctttgaatacttcttgtgaaagtgaggaggtgcatattgatagccatgccgaggagagagaagatcatgaatattacaatgaaattcc

SEQ ID NO: 671381 - DNA, 120 bp, Artificial Sequence
  ENSG00000185634_17 (sequence is synthesized)
agggaagcagccaccagtaggtggtgtttcagatatgcggatcaaagttcaagccacggaacaaatggcttactgccccatacagtgtgaaaagttgtgctatttgcctggaaactccaa

SEQ ID NO: 671382 - DNA, 120 bp, Artificial Sequence
  ENSG00000185634_18 (sequence is synthesized)
gtgcagcagtgtatatgagaactgtttagaacaaagcagggcaataggtaatgtccatccaagaggggtgcagtcccagcgagatacctcattattgaagcacacgtgccgagtggatct

SEQ ID NO: 671383 - DNA, 120 bp, Artificial Sequence
  ENSG00000185634_19 (sequence is synthesized)
ctttgatgacccctgctacattaatacacaggctcttcaaagtacacctggctctgctggaaatcaaaggtcagcccaaccactggggagcccatggcactgcggaaaggcaccagaaac

SEQ ID NO: 671384 - DNA, 120 bp, Artificial Sequence
  ENSG00000185634_20 (sequence is synthesized)
cggcagagagcctcttggtaaaggatggggactttttggttcgagagagtgcaacatcccctggccaatatgtgctgagtggactacagggaggccaagcaaaacatcttctcctggtgg

SEQ ID NO: 671385 - DNA, 120 bp, Artificial Sequence
  ENSG00000185634_21 (sequence is synthesized)
atcctgaaggcaaggtgaggaccaaggatcatgtatttgataatgtcggccaccttatcagataccatatggataacagtttgccaatcatctcctctggaagcgaagtaagccttaaac

SEQ ID NO: 671386 - DNA, 120 bp, Artificial Sequence
  ENSG00000185634_22 (sequence is synthesized)
aaccagtgagaaaagataataatccagcacttttgcattccaacaaatgacagtattgaagcaccatcacactgatatttcaagaaaccccattttgtattaggacacaaagataattta

SEQ ID NO: 671387 - DNA, 120 bp, Artificial Sequence
  ENSG00000185634_23 (sequence is synthesized)
aactttgtttgtagataaaatagagcacaaactgtgaagtgcatctttccaagaccatcatggaccaggtcctctataaaatgaagaactaacaaaaattagtcttcagaaatgaaaatc

SEQ ID NO: 671388 - DNA, 120 bp, Artificial Sequence
  ENSG00000185634_24 (sequence is synthesized)
agaaaagaggaagagggttggtcattttaaaagaaattatatgtatgcacggatgtcactttttaaggccatattgcattgataacaagctaaaagcacaactaaaatttcacatgctaa

SEQ ID NO: 671389 - DNA, 120 bp, Artificial Sequence
  ENSG00000185634_25 (sequence is synthesized)
cgacaacttgaatgaactgctggggcagtggtatgtgcctttcaacttgataatttgggggacattttcatattgggagattaattctaagtatcttcatgttctatgactatagaacca

SEQ ID NO: 671390 - DNA, 120 bp, Artificial Sequence
  ENSG00000185634_26 (sequence is synthesized)
tttgccaaaaaaaaaagcttttcttgctacaaaaaataagcaattttcttgagccttattgactttattacattttctgtttagcagcatttttcactgcaatgttaaaataaatatgac

SEQ ID NO: 671391 - DNA, 120 bp, Artificial Sequence
  ENSG00000185634_27 (sequence is synthesized)
attgaattcgaactgtgtgtatgtcagtggaatcaaatcaaaagccactaacatggctgtctgtttcattggactgtcccatttgctggttaaaaggattggggcccaaatcctctggcc

SEQ ID NO: 671392 - DNA, 120 bp, Artificial Sequence
  ENSG00000185634_28 (sequence is synthesized)
tagcatttctcagtgtttgctattcagactgtctaaatacagcatgtgacaagctgaagaagccaaatctatcagtcatttctgatttcattatattctccccctcttcctgctaaaaag

SEQ ID NO: 671393 - DNA, 120 bp, Artificial Sequence
  ENSG00000185634_29 (sequence is synthesized)
caaaaaacaaaaaaaacaaaaaaaacctcatgagtgcatggatttaaaagagggcaaacaaaaccagtattcttcatatttactattcaaattggtttcattcttagtaaaagtacagaa

SEQ ID NO: 671394 - DNA, 120 bp, Artificial Sequence
  ENSG00000185634_30 (sequence is synthesized)
gtacagaatctatttgaaattatagtaaaatttcttcttgattggctgacactgaatcatagtttctcacctacatatatccttagcacctcgtatagatatgatcagacaaaatgcaga

SEQ ID NO: 671395 - DNA, 120 bp, Artificial Sequence
  ENSG00000185634_31 (sequence is synthesized)
aggaaaaaaaaacatattgaatgaagcacttggaaagattttccacatgtagaccaactggtaaactaacagagtgattaagcatggtgtacagaaaagcattacgctgagtcttaccag

SEQ ID NO: 671396 - DNA, 120 bp, Artificial Sequence
  ENSG00000185634_32 (sequence is synthesized)
tgtgaccttcagcaagttgctgaatctgtttgggttccagtttccttggcaataaaatgagctaaatgggctaggtgaatttggaggactacttcagtcctaacttatagtatgagtctc

SEQ ID NO: 671397 - DNA, 120 bp, Artificial Sequence
  ENSG00000185634_33 (sequence is synthesized)
taaaaagcaagtttttcatttgttagaggtcgttattgataaccagtctgtatagttaaggtaaaaaattaagcttttcttctatagtctgtgtccatactcacagaatgaatggcacac

SEQ ID NO: 671398 - DNA, 120 bp, Artificial Sequence
  ENSG00000185634_34 (sequence is synthesized)
ctgagatcaacattcacatagtttagactccaaaccattcagtctaaaatactgaaactttggaatatagggaatgatgataaaagtggatttggtttgagtagcagaaaactacttatg

SEQ ID NO: 671399 - DNA, 120 bp, Artificial Sequence
  ENSG00000185634_35 (sequence is synthesized)
tccttttcttgcctttccaagaaaaatgttttttgtttttttttttaatcttgagttatctggatattgccttgactccatttcattttggctatgtagatacaacttagtctttgtgat

SEQ ID NO: 671400 - DNA, 120 bp, Artificial Sequence
  ENSG00000185634_36 (sequence is synthesized)
tgtgatatatttgctaagttttaaataaaacttcttttggatagaaatcattagaaaccaagcatactgcactctaatattttactgtaaaggcttatgatttttatttctactgccatt

SEQ ID NO: 671401 - DNA, 120 bp, Artificial Sequence
  ENSG00000185634_37 (sequence is synthesized)
aattttttagatggatttgtttcctcttacacaactagaattaatgtatttttcaccagttttccatataccttaggtcttgatcgtttgtccttaaaaaggggatcagcatgagtatag

SEQ ID NO: 671402 - DNA, 120 bp, Artificial Sequence
  ENSG00000185634_38 (sequence is synthesized)
acagtagaaatgtatgggtagtctaaccacttttatcagagacagagcagggctgtggtctcactctagctgagcagagtattaacttggtagcaagagttcctgatacaaatagatgca

SEQ ID NO: 671403 - DNA, 120 bp, Artificial Sequence
  ENSG00000185634_39 (sequence is synthesized)
atgactgtaaatggtgtcagcagtacacatggataatcagtatttgactgtaatagtatagtagttaaatacagcacttaaaaataccacagacacagttaaagcaaaaggaaacaataa

SEQ ID NO: 671404 - DNA, 120 bp, Artificial Sequence
  ENSG00000185634_40 (sequence is synthesized)
aaggaatgtctgcatgctattttaatctcacattctttatctgtcttaaagtggaaatccatttgcctataaatacctgtaaacgactttaaaaaataaatgattattgctttgtgacaa

SEQ ID NO: 671405 - DNA, 120 bp, Artificial Sequence
  ENSG00000185634_41 (sequence is synthesized)
aggtaccgcctcctacttggcgcgccactgtggttggagtagctcagtgttttctccggggtgttggcgtcgccttttgagctacgtttccatcgattcgaacttcgtatctagggaccc

SEQ ID NO: 671406 - DNA, 120 bp, Artificial Sequence
  ENSG00000185634_42 (sequence is synthesized)
tgcatgcaagagcttatagtgaagaaatacttggtcccatttcttttcgcctgggaggtatctttccactattagcaatgcgattattgcaaatcatcatatgcagtctatttcatttgc

SEQ ID NO: 671407 - DNA, 120 bp, Artificial Sequence
  ENSG00000185634_43 (sequence is synthesized)
ctagatggtcccatctgggggtgatgagacacagtgacacccgaggtgtgttccttatgtccggtctattctgtaatctcattttggttgctgttactgtggaaaatcctgcctcacaaa

SEQ ID NO: 671408 - DNA, 120 bp, Artificial Sequence
  ENSG00000185634_44 (sequence is synthesized)
aatcctgcctcacaaagataggatgttgaaaatggaaggaggcttttcagtacttttgtggcaatctcaggatgttccgccttgactttaatcgagaacgtatggagatttgaagttgtc

SEQ ID NO: 671409 - DNA, 120 bp, Artificial Sequence
  ENSG00000185634_45 (sequence is synthesized)
tcaaacatacttttaaggccaccgtcatttgcaatatcaagcagttgatcctcttctagcgtggacaaagtggattcacctggcttattcacaaatgggtcacagatccattccgtcttt

SEQ ID NO: 671410 - DNA, 64 bp, Artificial Sequence
  ENSG00000185634_46 (sequence is synthesized)
ttgatcacgaaaggcagacccacccttaatctggttgggcacaatctaatcagctgccagcttg

SEQ ID NO: 671411 - DNA, 77 bp, Artificial Sequence
  ENSG00000185634_47 (sequence is synthesized)
ttaacatttgagtcagtgggctgcgaaaggcagacccacccttaatctggttgggcacaatctaatcagctgccagc

SEQ ID NO: 671412 - DNA, 120 bp, Artificial Sequence
  ENSG00000185634_48 (sequence is synthesized)
tgcttcctgccctcgaacattggattcccaagttcttcagtttcagaactcggactggctctcctctctccttagcctgcagacagcctattgtaggaccttgtgatcatattattgcaa

SEQ ID NO: 671413 - DNA, 120 bp, Artificial Sequence
  ENSG00000185634_49 (sequence is synthesized)
atcatcatatgcagtctatttcatttgcctctggaggggatcctgtaagtatggattcacagaagttctttttatgagttaaaataacttcttgacatttggggctggatgataataaaa

SEQ ID NO: 671414 - DNA, 120 bp, Artificial Sequence
  ENSG00000185634_50 (sequence is synthesized)
tgcaagagcgtaacagtttctgtgttacttaaccctactgctgcttgtaatgctgcaaaccggaaaataaccttacatggccttcgtaacatttaatgctccttcccccccttcctcttc

SEQ ID NO: 671415 - DNA, 120 bp, Artificial Sequence
  ENSG00000185634_51 (sequence is synthesized)
ccctgggcaatttaccgatgtactgatgacttgtaaatccacgtctccaaaccagacaacatccataaccacagatcagcatattaagaactaatccattttgtccttttagtgttttca

SEQ ID NO: 671416 - DNA, 120 bp, Artificial Sequence
  ENSG00000185634_52 (sequence is synthesized)
tttttaaaaacatgttttacctgtttttaccttcaacttaaaagcctcaggttttaagttgtatatacttatatgaattatatgactgtgtatacttacaggattcaagcacatttcatt

SEQ ID NO: 671417 - DNA, 120 bp, Artificial Sequence
  ENSG00000185640_0 (sequence is synthesized)
acggcactcccttcctgccctctcatcctgccctccggcccctctgcagctatgaggtcctccgtctctcggcaaacatactccacaaaagggggcttcagctccaactctgccagcgga

SEQ ID NO: 671418 - DNA, 120 bp, Artificial Sequence
  ENSG00000185640_1 (sequence is synthesized)
gggagtgggtcccaggcccgcaccagcttcagctcagtgacggtgtctcggagcagtggcagtggtggcggggcccactgtggccccggcacaggtggctttggcagccgaagcctctat

SEQ ID NO: 671419 - DNA, 120 bp, Artificial Sequence
  ENSG00000185640_2 (sequence is synthesized)
aacttggggggccacaagagtatctctgtcagtgtggccggaggggccttgttggggcgggctctggggggctttggctttggcagcagggcatttatgggacagggggctggcaggcag

SEQ ID NO: 671420 - DNA, 120 bp, Artificial Sequence
  ENSG00000185640_3 (sequence is synthesized)
acgtttgggcctgcttgtcctcctggggggatccaggaggtcactgtcaaccagagcctgctgacccccctccatgtggagattgaccccgagatccagcgagtgcgcactcaggagcgg

SEQ ID NO: 671421 - DNA, 120 bp, Artificial Sequence
  ENSG00000185640_4 (sequence is synthesized)
gagcagatcaagaccctcaacaacaagttcgcctccttcatcgacaaggtgcggttcctggagcaacagaataaggtgctggagaccaagtgggcactgctgcaggagcagggccagaac

SEQ ID NO: 671422 - DNA, 120 bp, Artificial Sequence
  ENSG00000185640_5 (sequence is synthesized)
ttgggtgtcaccaggaacaacctggagcccctctttgaggcctacctgggtagcatgcggagcacgctggacagacttcagagcgagcgggggaggctggactcagagctcaggaacgtg

SEQ ID NO: 671423 - DNA, 120 bp, Artificial Sequence
  ENSG00000185640_6 (sequence is synthesized)
caggaccttgtggaggacttcaagaacaagtacgaggatgaaatcaacaagcacactgctgcagagaacgagtttgtggtgctcaagaaggatgtggatgcagcatacatgggccggatg

SEQ ID NO: 671424 - DNA, 120 bp, Artificial Sequence
  ENSG00000185640_7 (sequence is synthesized)
gatctgcatggcaaagtgggcaccttgacccaggagattgacttcctgcagcaactctatgaaatggagctgagccaagtgcagacccacgtgtctaacaccaatgtggtgctgtccatg

SEQ ID NO: 671425 - DNA, 120 bp, Artificial Sequence
  ENSG00000185640_8 (sequence is synthesized)
tgaggccgaggcctggtaccagaccaagtatgaggagctgcaggtgactgctgggaagcatggggacaacctgcgggacaccaagaacgagattgctgagctcacccgcactatccagag

SEQ ID NO: 671426 - DNA, 120 bp, Artificial Sequence
  ENSG00000185640_9 (sequence is synthesized)
gctgcagggggaggctgatgcagccaagaagcagtgtcagcagctgcagacggccattgcggaagcggagcagcgtggggagctggcactcaaggatgctcagaagaagcttggggatct

SEQ ID NO: 671427 - DNA, 120 bp, Artificial Sequence
  ENSG00000185640_10 (sequence is synthesized)
ggatgtggccctgcaccaggccaaggaggacctgacacggctgctgcgtgactaccaggagctgatgaatgtcaagctggccctggacgtggagattgccacctaccgcaagcttctgga

SEQ ID NO: 671428 - DNA, 120 bp, Artificial Sequence
  ENSG00000185640_11 (sequence is synthesized)
gagcgaggagagcaggatgtctggagaatgtcccagtgcagtcagcatttctgtgactggcaactccaccactgtgtgcggaggtggcgcagccagctttggaggtggcatctccctggg

SEQ ID NO: 671429 - DNA, 120 bp, Artificial Sequence
  ENSG00000185640_12 (sequence is synthesized)
tgggagtgggggggccaccaagggtggattcagcacaaatgtgggctatagcaccgtcaagggagggccagtctctgcgggcacctccatcctgcggaagaccactacggtcaagacgtc

SEQ ID NO: 671430 - DNA, 120 bp, Artificial Sequence
  ENSG00000185640_13 (sequence is synthesized)
cagccagaggtattagctgctgagccctgcaagggcccctgcaatcctgtccctgccctcctcaccccacctctgctgtcctttccagtcacttctcaggagcaggaacagccaggggac

SEQ ID NO: 671431 - DNA, 120 bp, Artificial Sequence
  ENSG00000185640_14 (sequence is synthesized)
ctcagacccagggtattttcataccagactatttgcatcttgggaagcgctcaaatctactcaggttttctccttggtcctgcagtaggatgggagggaaggttaaagttgccagcttga

SEQ ID NO: 671432 - DNA, 120 bp, Artificial Sequence
  ENSG00000185640_15 (sequence is synthesized)
gtgatgtgcttgggtgacttgggggtgaccttttgaccaccgagaggaggctgaatttctcaagccattaggagagagagaaattgggagtggtccccaaagacccttcaacctccccag

SEQ ID NO: 671433 - DNA, 120 bp, Artificial Sequence
  ENSG00000185640_16 (sequence is synthesized)
tcccccaccagacccaccctctccctgaatctacccacatcccccttccctgtctgtgtctcaataaatggtgcaactgcagctagctgtctgtggctgcagtctgtcctgcctggggaa

SEQ ID NO: 671434 - DNA, 120 bp, Artificial Sequence
  ENSG00000185640_17 (sequence is synthesized)
atcaaggcagaccccatgtttcttcactggttggctacattaaagaactgctccccagaggtgttcttgatcagtgagggacccatcagggcttctgtaaggctgagtgggtcccatgcc

SEQ ID NO: 671435 - DNA, 120 bp, Artificial Sequence
  ENSG00000185640_18 (sequence is synthesized)
agcaggatgtctggagaatgtcccagtgcagtcagcatttgtgagtatttactccccacttcctgctccacccctggccaggccccagaactctgctcagtttatgcaacctgtacctgt

SEQ ID NO: 671436 - DNA, 120 bp, Artificial Sequence
  ENSG00000185640_19 (sequence is synthesized)
cctaaagcatgctctcctccattcgagcccctggagacaggttcagagggtcctagttctgggcttctctatccatttcccatagctctgctgcttgattttgttctgattccccactga

SEQ ID NO: 671437 - DNA, 120 bp, Artificial Sequence
  ENSG00000185650_0 (sequence is synthesized)
gtgtgttgggggtggtgagaatgcgctctcttcggcccgccccgtcctttccaaagaaacgtgctcataatggggtgacctaattacatcgcaatggaactcaatcttagccactccgca

SEQ ID NO: 671438 - DNA, 120 bp, Artificial Sequence
  ENSG00000185650_1 (sequence is synthesized)
gcaccgggtttcataacagactcggcggcctcgagtgctgggaagaaacgtgcgagggccgaggggggcggcggagcccgcgtggaaatcggaaagaagcgcagccctgcgacttccgcc

SEQ ID NO: 671439 - DNA, 120 bp, Artificial Sequence
  ENSG00000185650_2 (sequence is synthesized)
tgggtcatcacgccagcagtcgggccaaggcgcagggggcgggtgggggactcgttaactttttatttgggtgggcggcatccaaacctaacagtatatattttatcattttcaagggag

SEQ ID NO: 671440 - DNA, 120 bp, Artificial Sequence
  ENSG00000185650_3 (sequence is synthesized)
tcatgctccattgcgggcccttcggtttcgtggctcccatgtccccctctccacctcccgccaaaacggcgcagcgtgacaagccatatgttccactccggtgggggcgagagagaagca

SEQ ID NO: 671441 - DNA, 120 bp, Artificial Sequence
  ENSG00000185650_4 (sequence is synthesized)
acaataagttaaaagtgccgcctccctccacctctttaccttcattcttaccaaagtaaccttttttcattgttctagagtcttgaggtgtgtgtggggaggatggaggaggagggaggg

SEQ ID NO: 671442 - DNA, 120 bp, Artificial Sequence
  ENSG00000185650_5 (sequence is synthesized)
ttgtggcgccgcccagaattcggagcgcgcgtggaaagtagtgagttgctcggtgggctttttctgggaggaaggggcattcaggaaggattagggttttcttgactaaaaagtttaaag

SEQ ID NO: 671443 - DNA, 120 bp, Artificial Sequence
  ENSG00000185650_6 (sequence is synthesized)
attggatgcgtgaaaagaaacggcacgcctaggcctggtaaaacaaacaatcgtcccgggttgtggtctttttttgcggcgccccccacccgcccacacccggagagcgccggctgcaaa

SEQ ID NO: 671444 - DNA, 120 bp, Artificial Sequence
  ENSG00000185650_7 (sequence is synthesized)
gcgagcgcgagtgtcgacgcgtgcggcgcactaaattgtgccgcgctcgcccccgccagaccatgtcctcctggggaaaaagtttccctagtccccccagcagcgcgccccaccctacgc

SEQ ID NO: 671445 - DNA, 120 bp, Artificial Sequence
  ENSG00000185650_8 (sequence is synthesized)
cccgctggaaaaaaaacagcaacataaaatcctaggcttgaacattctgtgcgtcccaaatttctaatgtcctcggcctgcccggtttgccgaagggagccgagtgtcgaagagaagtcg

SEQ ID NO: 671446 - DNA, 120 bp, Artificial Sequence
  ENSG00000185650_9 (sequence is synthesized)
ggaaaaggtaagttgtgcagacacttggggaagtttcaaggagaccgccagctcaagatggaaaccgcggcccgggcgctaaggacgggcttcagctcccgctggcaaaaagagaaagtc

SEQ ID NO: 671447 - DNA, 120 bp, Artificial Sequence
  ENSG00000185650_10 (sequence is synthesized)
gagcccgccttcctgcccaacaaaaaacaacaacatgacaacaagaaccccggagggagtggaatgagtgacgtcacagccgcgctctgaggctgacaaaggagggggcgcgcccctccc

SEQ ID NO: 671448 - DNA, 120 bp, Artificial Sequence
  ENSG00000185650_11 (sequence is synthesized)
gctctgcgcccgcgcggccccggagagggggcgcctgaagcgccgggtagggaagtcagccgacttgaaacttttcctcttaaagaaaaaaaaaaaaaagttgtgcgcggctcacagtgg

SEQ ID NO: 671449 - DNA, 120 bp, Artificial Sequence
  ENSG00000185650_12 (sequence is synthesized)
cgtctcccctcccccttcttccttttgaaagtttcttctcctccccctgccccccctccccgcctgaccgcatggctgattcaactccagtgtcaatcaacttctttttcctcctcttcc

SEQ ID NO: 671450 - DNA, 120 bp, Artificial Sequence
  ENSG00000185650_13 (sequence is synthesized)
tcatttaaataagtttaaagctcctcctccccccggcccaccaaatctgaactttataaattgggctttgcgcgccccagcccggagtcagaaaggcgaggggcgccgggaactggcgtg

SEQ ID NO: 671451 - DNA, 120 bp, Artificial Sequence
  ENSG00000185650_14 (sequence is synthesized)
tgggactccagacaggagaggctgcgccttccccgcaccgggaccttcgcgacacaccagatcctcgcccctggctcgcgcgaacgcacaggatgaccaccaccctcgtgtctgccacca

SEQ ID NO: 671452 - DNA, 120 bp, Artificial Sequence
  ENSG00000185650_15 (sequence is synthesized)
tcttcgacttgagcgaagttttatgcaagggtaacaagatgctcaactatagtgctcccagtgcagggggttgcctgctggacagaaaggcagtgggcacccctgctggtgggggcttcc

SEQ ID NO: 671453 - DNA, 120 bp, Artificial Sequence
  ENSG00000185650_16 (sequence is synthesized)
ctcggaggcactcagtcaccctgcccagctccaagttccaccagaaccagctcctcagcagcctcaagggtgagccagcccccgctctgagctcgcgagacagccgcttccgagaccgct

SEQ ID NO: 671454 - DNA, 120 bp, Artificial Sequence
  ENSG00000185650_17 (sequence is synthesized)
ccttctcggaagggggcgagcggctgctgcccacccagaagcagcccgggggcggccaggtcaactccagccgctacaagacggagctgtgccgcccctttgaggaaaacggtgcctgta

SEQ ID NO: 671455 - DNA, 120 bp, Artificial Sequence
  ENSG00000185650_18 (sequence is synthesized)
agtacggggacaagtgccagttcgcacacggcatccacgagctccgcagcctgacccgccaccccaagtacaagacggagctgtgccgcaccttccacaccatcggcttttgcccctacg

SEQ ID NO: 671456 - DNA, 120 bp, Artificial Sequence
  ENSG00000185650_19 (sequence is synthesized)
ggccccgctgccacttcatccacaacgctgaagagcgccgtgccctggccggggcccgggacctctccgctgaccgtccccgcctccagcatagctttagctttgctgggtttcccagtg

SEQ ID NO: 671457 - DNA, 120 bp, Artificial Sequence
  ENSG00000185650_20 (sequence is synthesized)
ccgctgccaccgccgctgccaccgggctgctggacagccccacgtccatcaccccaccccctattctgagcgccgatgacctcctgggctcacctaccctgcccgatggcaccaataacc

SEQ ID NO: 671458 - DNA, 120 bp, Artificial Sequence
  ENSG00000185650_21 (sequence is synthesized)
cttttgccttctccagccaggagctggcaagcctctttgcccctagcatggggctgcccgggggtggctccccgaccaccttcctcttccggcccatgtccgagtcccctcacatgtttg

SEQ ID NO: 671459 - DNA, 120 bp, Artificial Sequence
  ENSG00000185650_22 (sequence is synthesized)
actctccccccagccctcaggattctctctcggaccaggagggctacctgagcagctccagcagcagccacagtggctcagactccccgaccttggacaactcaagacgcctgcccatct

SEQ ID NO: 671460 - DNA, 120 bp, Artificial Sequence
  ENSG00000185650_23 (sequence is synthesized)
tcagcagactttccatctcagatgactaagccagggtctgcaggaaggaaggctgaaaaagcggacgaagattttgacttaagtgggactttgtgatttaattttttcttttttttaagt

SEQ ID NO: 671461 - DNA, 120 bp, Artificial Sequence
  ENSG00000185650_24 (sequence is synthesized)
ggggaggaaggggaagctagatggactaggagagacttgattttggtgctaaagttccccagttcatatgtgacatctttttaaaaaaaataacaacaaaaaaaaaatgagagaaaagct

SEQ ID NO: 671462 - DNA, 120 bp, Artificial Sequence
  ENSG00000185650_25 (sequence is synthesized)
ccagggtagggagggacctcctgcctactccagcccctaccctgcacccacatcccataccctcttctccctacccatcccattccccacaggccctacattaacaaggttaagctcaac

SEQ ID NO: 671463 - DNA, 120 bp, Artificial Sequence
  ENSG00000185650_26 (sequence is synthesized)
ccctttcccccagcacctcagaatgtgccctccctctccccctcataaccccacctaacataaggacaagtcaatttgtcagtagcttcttctggcttgaaaccccctccctggatttta

SEQ ID NO: 671464 - DNA, 120 bp, Artificial Sequence
  ENSG00000185650_27 (sequence is synthesized)
agccttaagtgccaaatcacaagagaaaaagcagtaacagtttacagaagcaacttagtgccttgtaatctaactttgtcactgtgactacattacctcttcagcgccagagggcacccg

SEQ ID NO: 671465 - DNA, 120 bp, Artificial Sequence
  ENSG00000185650_28 (sequence is synthesized)
tgggcctcccggagcctctgcccatggcggggtggagacccggaaccagcagccccctccactggcgacacaactgcaccttccctcatttcagtctcccgcacacttattcctcctccc

SEQ ID NO: 671466 - DNA, 120 bp, Artificial Sequence
  ENSG00000185650_29 (sequence is synthesized)
gcccccccaccccccccacccctgccccttggaagagttgttgccagaccagggttttgggggaaacctgtcttgacattcaaaacctttttcttcccgatctgaacccctgttgactaa

SEQ ID NO: 671467 - DNA, 120 bp, Artificial Sequence
  ENSG00000185650_30 (sequence is synthesized)
agaataccgtaggtctatccttagagcactcacgccatgctttcttccctgggttttaaacttcatataactttcagaaattggagagcaaaaattttgcttgtcactgcacatcaatat

SEQ ID NO: 671468 - DNA, 120 bp, Artificial Sequence
  ENSG00000185650_31 (sequence is synthesized)
aaaaaagcttatttaacttatcaaaacgtatttattgccaaactatgcttttttttgttaattttgttcatatttatcgggatgacaaatccatagaatatattcttttatgttaaatta

SEQ ID NO: 671469 - DNA, 120 bp, Artificial Sequence
  ENSG00000185650_32 (sequence is synthesized)
tgatcttcatattaatcttaaaattttgtgacgtgtctttttcctttttttccacagttttaatatattattcttcaacgacattttttgtaactttacacttttttggttattttattt

SEQ ID NO: 671470 - DNA, 120 bp, Artificial Sequence
  ENSG00000185650_33 (sequence is synthesized)
taaaaaaatgaaaaattaatttaaaaaaatgcaaaaaactgttggattatttattttagaaattcccccctttgtgttggactgcaaattgagtttctttctctttaggcctttcacaac

SEQ ID NO: 671471 - DNA, 120 bp, Artificial Sequence
  ENSG00000185650_34 (sequence is synthesized)
taggactgagaatgtatgtaaaagttctgtgacagtacagaaggaaaacaactttttatgtatagcttctaaaaggggaaaaaaaaaaaaagagaaaccctttgacttccacgtgcccat

SEQ ID NO: 671472 - DNA, 120 bp, Artificial Sequence
  ENSG00000185650_35 (sequence is synthesized)
ctcaagacattccactcacagatttgaggttctggattccaggtctggagttttccaatgttaatgtaaacagaactggcacacacacattaagatgaatgtaattattattcctcttgc

SEQ ID NO: 671473 - DNA, 120 bp, Artificial Sequence
  ENSG00000185650_36 (sequence is synthesized)
tggtcactaccgtcgctttctatttctctttctttgtgtgaatttatttaaaagaaaaaaaaactttttgtaacgactatttgcagtttaaaaatcaataaaccccgttttttcaagaaa

SEQ ID NO: 671474 - DNA, 120 bp, Artificial Sequence
  ENSG00000185650_37 (sequence is synthesized)
tttcactttcccccttgcacaaaaccgaacatcccaccccaccaccacctccaagctaaaatacctgggccgcccctccccacgaagggacgcgctccaggcgaatggggagggcccgga

SEQ ID NO: 671475 - DNA, 120 bp, Artificial Sequence
  ENSG00000185650_38 (sequence is synthesized)
aattgcaaaggcatcttctcagtgaagggggcggggtgggctagggctgagtggaaatggtgagagagattattgtagaaaatatctcttccgggaacttagggcaaagagttttatttt

SEQ ID NO: 671476 - DNA, 120 bp, Artificial Sequence
  ENSG00000185650_39 (sequence is synthesized)
caggaatcacatccctgtctcccccaacctcagaccaggcccccaatctcctccccacaagaaaaagcaaaggcagtctgaaaacctgttgccaaaggaagggaacacttctgaaggagg

SEQ ID NO: 671477 - DNA, 120 bp, Artificial Sequence
  ENSG00000185651_0 (sequence is synthesized)
aaacgctgaggcccagtctgtgcggttcacttgcgttcctccacgcgccccccagcacagtgggaagcacacagtaggtgctccgctctgctcctgtgccccgccccgcggcccctcccc

SEQ ID NO: 671478 - DNA, 120 bp, Artificial Sequence
  ENSG00000185651_1 (sequence is synthesized)
cgctccaggaagtgcgggggctccagccgcccggccggccgcgatgcattctggggaaggagcagcaccaaatccaagatggcggccagcaggaggctgatgaaggagcttgaagaaatc

SEQ ID NO: 671479 - DNA, 120 bp, Artificial Sequence
  ENSG00000185651_2 (sequence is synthesized)
cgcaaatgtgggatgaaaaacttccgtaacatccaggttgatgaagctaatttattgacttggcaagggcttattgttcctgacaaccctccatatgataagggagccttcagaatcgaa

SEQ ID NO: 671480 - DNA, 120 bp, Artificial Sequence
  ENSG00000185651_3 (sequence is synthesized)
atcaactttccagcagagtacccattcaaaccaccgaagatcacatttaaaacaaagatctatcacccaaacatcgacgaaaaggggcaggtctgtctgccagtaattagtgccgaaaac

SEQ ID NO: 671481 - DNA, 120 bp, Artificial Sequence
  ENSG00000185651_4 (sequence is synthesized)
tggaagccagcaaccaaaaccgaccaagtaatccagtccctcatagcactggtgaatgacccccagcctgagcacccgcttcgggctgacctagctgaagaatactctaaggaccgtaaa

SEQ ID NO: 671482 - DNA, 120 bp, Artificial Sequence
  ENSG00000185651_5 (sequence is synthesized)
aaattctgtaagaatgctgaagagtttacaaagaaatatggggaaaagcgacctgtggactaaaatctgccacgattggttccagcaagtgtgagcagagaccccgtgcagtgcattcag

SEQ ID NO: 671483 - DNA, 120 bp, Artificial Sequence
  ENSG00000185651_6 (sequence is synthesized)
acaccccgcaaagcaggactctgtggaaattgacacgtgccaccgcctggcgttcgcttgtggcagttactaactttctacagttttcttaatcaaaagtggtctaggtaacctgtaaag

SEQ ID NO: 671484 - DNA, 120 bp, Artificial Sequence
  ENSG00000185651_7 (sequence is synthesized)
aaaggattaaaaatttaagatgttctagttctgctctctttgttttaaaaatcactgcttcaatctacttcaaaagaatggtgtttcttttcttgtccaattttatccaaaatcttcaag

SEQ ID NO: 671485 - DNA, 120 bp, Artificial Sequence
  ENSG00000185651_8 (sequence is synthesized)
ttacatttaacccataaggtttaaaaaaaaggaaaaaaaacggttgtggttccctttcttccctacccttgccactcccactttctggcaccgagtttatttttcacttacttacttccc

SEQ ID NO: 671486 - DNA, 120 bp, Artificial Sequence
  ENSG00000185651_9 (sequence is synthesized)
cagaccccgggctcgcctccacaaaggagaagagactgccctggcggtcctggtggcttttcttagcatgtgtggcactgttgcccagtgtgggagttggtttaaattctcctgactcca

SEQ ID NO: 671487 - DNA, 120 bp, Artificial Sequence
  ENSG00000185651_10 (sequence is synthesized)
gtttataacatccttttaaaaaatttaaaaacaaacagccacacccctcctccagtccttctcctcagttcttgtgtgaaactccagctgatgttaccacagtaacatcagttaattggg

SEQ ID NO: 671488 - DNA, 120 bp, Artificial Sequence
  ENSG00000185651_11 (sequence is synthesized)
caagccctgatgtcagtgtgtgtaactgacctctggcctggcctgcacagagaagccctataatcacaggtctgtggtggccccgaaatggggggcctgctagtcaggaggatgctgtgc

SEQ ID NO: 671489 - DNA, 120 bp, Artificial Sequence
  ENSG00000185651_12 (sequence is synthesized)
aggctcctgaggtcccaggttggcacttctccctgcagccattgtagaagatctgctggtccttgcaggcaaagctacagccagaatgtccgtttgaaactcctagctcatctgtcaccg

SEQ ID NO: 671490 - DNA, 120 bp, Artificial Sequence
  ENSG00000185651_13 (sequence is synthesized)
agcttcatccgaatgtgccacggagcttgctctccacttcctccgtgcagtggccctgccacagccctccctcggcacactttgaccctttgtaggattggaattagcaggactcggcta

SEQ ID NO: 671491 - DNA, 120 bp, Artificial Sequence
  ENSG00000185651_14 (sequence is synthesized)
tttaaagcaccagtctggggtcgcctgggcccctgctgaccccctcctccagagcagccagcccagcccgggaacaagacggacttcctctcccttcggactcacagcctttgcagagtc

SEQ ID NO: 671492 - DNA, 120 bp, Artificial Sequence
  ENSG00000185651_15 (sequence is synthesized)
aagctccacttgaagctcactcagtaatatcctttcaatgtgttttatattgttttgactgcctttttttgtagaaataaaaattgaccttagaatttatcgtcagataaacttgtaaag

SEQ ID NO: 671493 - DNA, 120 bp, Artificial Sequence
  ENSG00000185651_16 (sequence is synthesized)
atttgaatattaatgtcttttcaaggcaaatgggattgtccccgcactagtagagaatccatgtcgctctgacaccccaaggaagccgacgatccaaatgccgtgtgtcaccaaccccgc

SEQ ID NO: 671494 - DNA, 120 bp, Artificial Sequence
  ENSG00000185651_17 (sequence is synthesized)
ttctgccactggcggcttcccttcttggctcttgggggggactagatcctgtggagaagatgacttaaactttgctttttgttttaattttaattctataacttgagatctttccggggc

SEQ ID NO: 671495 - DNA, 120 bp, Artificial Sequence
  ENSG00000185651_18 (sequence is synthesized)
ctacaggcgtgtaagacagcttggtctggtctgtgcagaagtggggagtgatgggcaggttcggcagcctaacattgttcaggcgcatggcccctgcggtgtgtacacgaactcggcttc

SEQ ID NO: 671496 - DNA, 120 bp, Artificial Sequence
  ENSG00000185651_19 (sequence is synthesized)
ttttgtcctaggtacgccaagggcaggtttctggagactcccttgtgcccgggatggcaagggcaccgggctggcgtttccacatctgtcttcattagcagaaaagtgatgatggatttt

SEQ ID NO: 671497 - DNA, 120 bp, Artificial Sequence
  ENSG00000185651_20 (sequence is synthesized)
atttcactcacactccagtttgtaataaaatgccaaattctgtcagctatccaaacaagccaccatttgttcttgttgcttctctggatccagaaatgttgccattcttggaaactgtcc

SEQ ID NO: 671498 - DNA, 120 bp, Artificial Sequence
  ENSG00000185651_21 (sequence is synthesized)
cattgcttcgtatttctgccaacgtagctctgcctgcctgtcaacccctcactgcactctgctcatcacgggaggatacctgtgtgccggcagcccctcagggactctcagccctggcac

SEQ ID NO: 671499 - DNA, 120 bp, Artificial Sequence
  ENSG00000185651_22 (sequence is synthesized)
tggcaccccagggttggccccgtcagcagaggcttggctttcgagccagtgggtgtctctcctttgggcctgggcggcttgctcctgccagccatgccttcagggtaggctctgagcaag

SEQ ID NO: 671500 - DNA, 120 bp, Artificial Sequence
  ENSG00000185651_23 (sequence is synthesized)
ctggcgaacagccctggctgctccaaaaccaaaaagctgggtcctctggaggaggggcgagctgtggagcagccacccactgctgccccaagctcactcaggaattcacacccgcctggt

SEQ ID NO: 671501 - DNA, 120 bp, Artificial Sequence
  ENSG00000185651_24 (sequence is synthesized)
ttcttgaagtgtgctgggtccttccctctgctccctactccccaccacggcagagaataggctttctaagatgctgcgatcccgttctgctgcccgtaataaaaatgctctcagacactg

SEQ ID NO: 671502 - DNA, 120 bp, Artificial Sequence
  ENSG00000185651_25 (sequence is synthesized)
agtatgcaggtcgctgcagggacccgaggcgacacgcgcctgcaggaggtggcactcctgccgcagctcttcgatctgcttgtccttggccagcggcgcgctcgcctgctccgacaggtc

SEQ ID NO: 671503 - DNA, 120 bp, Artificial Sequence
  ENSG00000185651_26 (sequence is synthesized)
agcaccaaatccaagatggcggccagcaggaggctgatgaaggtaaaagccattctctggcagcggccgggcgtggggcggcgtcctaggctccggatccccgaggcaggcggcggcttc

SEQ ID NO: 671504 - DNA, 120 bp, Artificial Sequence
  ENSG00000185651_27 (sequence is synthesized)
tcagggcgctgccgtctggcttcctgccctacacggcctcgtcggttccctgggccgcgcgcaggctcaaggtgctaacggggctggcctaggccgcagcctgggcgggagcgcaaggcc

SEQ ID NO: 671505 - DNA, 120 bp, Artificial Sequence
  ENSG00000185651_28 (sequence is synthesized)
gcgctgggagccgctgtcggcccctcagcccggcccggggcgttcacgccactctccgcccggagcttggccgcgtccccctgtcgcggaggccgcggtccgatctgagggcgtcgttaa

SEQ ID NO: 671506 - DNA, 120 bp, Artificial Sequence
  ENSG00000185651_29 (sequence is synthesized)
gtcgttaatgtgagagcccggttgggaggctccaaaccgggcgccttcggggaaggcccgagcgccggagcccctgcccggagcccgcgccgcggaaccgccccgccctgggccgcagcg

SEQ ID NO: 671507 - DNA, 120 bp, Artificial Sequence
  ENSG00000185651_30 (sequence is synthesized)
ttgcagctccgcttggcccggccgcagctcgggagtctgggaggttcgggctaggaaagagagaaggaggccaggcggccaaagttaggtcagtttgttggtgggtcgtttggaattgcg

SEQ ID NO: 671508 - DNA, 120 bp, Artificial Sequence
  ENSG00000185652_0 (sequence is synthesized)
tgccagaataacacagactcagctgccagagcctgctcttaacacctgtgtttccttttcagatcttacaggtgaacaaggtgatgtccatcttgttttatgtgatatttctcgcttatc

SEQ ID NO: 671509 - DNA, 120 bp, Artificial Sequence
  ENSG00000185652_1 (sequence is synthesized)
tccgtggcatccaaggtaacaacatggatcaaaggagtttgccagaagactcgctcaattccctcattattaagctgatccaggcagatattttgaaaaacaagctctccaagcagatgg

SEQ ID NO: 671510 - DNA, 120 bp, Artificial Sequence
  ENSG00000185652_2 (sequence is synthesized)
tggacgttaaggaaaattaccagagcaccctgcccaaagctgaggctccccgagagccggagcggggagggcccgccaagtcagcattccagccggtgattgcaatggacaccgaactgc

SEQ ID NO: 671511 - DNA, 120 bp, Artificial Sequence
  ENSG00000185652_3 (sequence is synthesized)
tgcgacaacagagacgctacaactcaccgcgggtcctgctgagcgacagcacccccttggagcccccgcccttgtatctcatggaggattacgtgggcagccccgtggtggcgaacagaa

SEQ ID NO: 671512 - DNA, 120 bp, Artificial Sequence
  ENSG00000185652_4 (sequence is synthesized)
agtctgtgggtgaccgacaagtcatcggccatcgacattcggggacaccaggtcacggtgctgggggagatcaaaacgggcaactctcccgtcaaacaatatttttatgaaacgcgatgt

SEQ ID NO: 671513 - DNA, 120 bp, Artificial Sequence
  ENSG00000185652_5 (sequence is synthesized)
aaggaagccaggccggtcaaaaacggttgcaggggtattgatgataaacactggaactctcagtgcaaaacatcccaaacctacgtccgagcactgacttcagagaacaataaactcgtg

SEQ ID NO: 671514 - DNA, 120 bp, Artificial Sequence
  ENSG00000185652_6 (sequence is synthesized)
ggctggcggtggatacggatagacacgtcctgtgtgtgtgccttgtcgagaaaaatcggaagaacatgaattggcatctctccccatatataaattattactttaaattatatgatatgc

SEQ ID NO: 671515 - DNA, 120 bp, Artificial Sequence
  ENSG00000185652_7 (sequence is synthesized)
atgtagcatataaatgtttatattgtttttatatattataagttgacctttatttattaaacttcagcaaccctacagtatataagcttttttctcaataaaatcagtgtgcttgccttc

SEQ ID NO: 671516 - DNA, 120 bp, Artificial Sequence
  ENSG00000185652_8 (sequence is synthesized)
actcagagttgaagctcctctcccttccgaacagctccgcgcaccgccccgcgacgcagcccggcgcaactactttcttctctctcctttctttcttcctctcctttttcccctgctggg

SEQ ID NO: 671517 - DNA, 120 bp, Artificial Sequence
  ENSG00000185652_9 (sequence is synthesized)
tagtggctgcggcggggtgggggagactttgaatgaccgagctcgcgtccacctttctcttcatgtcgacgtccctggaaacggccacacggatgccatggttacttttgccacgatctt

SEQ ID NO: 671518 - DNA, 120 bp, Artificial Sequence
  ENSG00000185652_10 (sequence is synthesized)
ttaaaacttgttttgtgatccggctctcaggagtcactctgtaaaatctgtgtacaccagtattttgcattcagtattgtcaaggccatgactgttgttttagtaaacttgttaaaatca

SEQ ID NO: 671519 - DNA, 120 bp, Artificial Sequence
  ENSG00000185652_11 (sequence is synthesized)
cccacccggtggccaccccaccctgggcctttgcgcagatgttggagctccgtacgcagcccgcacatctgggacccctccggggagcggcgggcacccgggcccggccatcccagggga

SEQ ID NO: 671520 - DNA, 120 bp, Artificial Sequence
  ENSG00000185652_12 (sequence is synthesized)
tctccttgcggtatcgtccagcctgttctcggactttgagcggtggcgtgggaggccgggagacctgggcacccgcgcagccagccagatcttacaggtgaacaaggtgatgtccatctt

SEQ ID NO: 671521 - DNA, 120 bp, Artificial Sequence
  ENSG00000185652_13 (sequence is synthesized)
cagtaaggacaaaattaaatgaaatgtgcaaaataactgcacaaactctgtgctgggtgcctggtgacgcggaaccgtcggctggcacgctgcgcccccacgtggaagcttgcaaggact

SEQ ID NO: 671522 - DNA, 120 bp, Artificial Sequence
  ENSG00000185652_14 (sequence is synthesized)
gtgttctggacaaggacctcctgaggcacccatgctgcagttcccagaggcttaaggacggctgcgggacgtgtgggcgtctgggttgggtcacctctccaaggatgccttctctgacca

SEQ ID NO: 671523 - DNA, 120 bp, Artificial Sequence
  ENSG00000185652_15 (sequence is synthesized)
cccagcgtagttccccaggcactccgtcactgtcctgctgtaaccccttcctggcgatcctcttcgcctgatatttttgtgctcactgatggatgagctctgctcatgaaaatgcaaagt

SEQ ID NO: 671524 - DNA, 120 bp, Artificial Sequence
  ENSG00000185652_16 (sequence is synthesized)
cccttaagagcagagtccgtgtctgttcttttggctgcactgttacctgcacagagaagagtgcccaaccgagattgtgcattcaatacgtatattttattagttgaaataaatgaatga

SEQ ID NO: 671525 - DNA, 120 bp, Artificial Sequence
  ENSG00000185652_17 (sequence is synthesized)
gaggagaagaatctggaccagcaaagaaaaagaattccaattttccttccctcaaggacaacctgcccatagataagcgccttgagaccaaagcccattatggttgctgccaggcagctt

SEQ ID NO: 671526 - DNA, 120 bp, Artificial Sequence
  ENSG00000185652_18 (sequence is synthesized)
ggagacacaggaatggcctcccaacatccctgacctcggtttttgatacctttgtaaatgatatccctaatctgtctgctcctgaaatccctacctcgtttttaaaatgttttcctaaaa

SEQ ID NO: 671527 - DNA, 120 bp, Artificial Sequence
  ENSG00000185652_19 (sequence is synthesized)
aagccaagggagaagatgtggcagctccagtgcagacctcaggatcctctgtgacatctctggagaatggacatgctgaaagtcagatggaagggagagacctggacaggcatgctgctg

SEQ ID NO: 671528 - DNA, 120 bp, Artificial Sequence
  ENSG00000185652_20 (sequence is synthesized)
ccgtataataaccacgtgaataccttgctaggatgccctgcagtctttggaaggacaggggcaagtgaagaaacctgaagctgaagctccattagctttgtggcgagtcaaccctggtca

SEQ ID NO: 671529 - DNA, 120 bp, Artificial Sequence
  ENSG00000185652_21 (sequence is synthesized)
aggttggaggtggggctcagaagaactaaaccaacagatacttccagctgtacacactcatcccagccagcgacacccactcttcaggtccatggtcccaggccgcagcaaagttctgag

SEQ ID NO: 671530 - DNA, 120 bp, Artificial Sequence
  ENSG00000185652_22 (sequence is synthesized)
actaaggactgtgttctggacaaggacctcctgaggcacccatgctgcagttcccagaggcttaaggacggctgcgggacgtgtgggcgtctgggttgcactctgaaggactgcgttccc

SEQ ID NO: 671531 - DNA, 120 bp, Artificial Sequence
  ENSG00000185652_23 (sequence is synthesized)
cattgcatgagggaagaaactgagggtggagaggctccaggacagagcaggatggtgctggtgttgaactctgagacgacgtgactacaatgcctgtgccctttgctgggaggctaatca

SEQ ID NO: 671532 - DNA, 120 bp, Artificial Sequence
  ENSG00000185658_0 (sequence is synthesized)
aggtctttgcctccgcgtcactttctcctcatcgagtccccggaggcagagagctgagcgaggttcgcctccccgggcgggacacgagctccggtcctctcttggcgcaaacccccgccc

SEQ ID NO: 671533 - DNA, 120 bp, Artificial Sequence
  ENSG00000185658_1 (sequence is synthesized)
cccgcggagggactacttttcgtctcccgcggaggaactacttcctcccccgcggaggcgtcggtccaggcggcgcgcacggtatggcggcggcggcggcggcggcggcgcgcgcctgag

SEQ ID NO: 671534 - DNA, 120 bp, Artificial Sequence
  ENSG00000185658_2 (sequence is synthesized)
ccggtcaggcctcggcgcggcctacacgctccgctcgctcgctcgctcccgcctcccgccccgcgcccggccatggcggagccgtcgtccgcccgacgcccggtgcctctcatcgagtcg

SEQ ID NO: 671535 - DNA, 120 bp, Artificial Sequence
  ENSG00000185658_3 (sequence is synthesized)
gcctctcatcgagtcggagctgtacttccttatcgcccggtacctatcggcgggcccgtgtcggagagcggcccaggtgctggtgcaggagctggagcagtaccagttgttgccgaagag

SEQ ID NO: 671536 - DNA, 120 bp, Artificial Sequence
  ENSG00000185658_4 (sequence is synthesized)
attggactgggagggcaacgagcacaacaggagctacgaggagttggtcttgtccaataagcatgtggctcctgatcatcttttgcaaatctgccagcgcatcggtcctatgttggataa

SEQ ID NO: 671537 - DNA, 120 bp, Artificial Sequence
  ENSG00000185658_5 (sequence is synthesized)
agaaattccacccagtatttcaagagtcacttctttacttggtgcaggaaggcagtctttgctacgtacagcaaaagactgcaggcacacagtttggaagggctctgcctttgctgctct

SEQ ID NO: 671538 - DNA, 120 bp, Artificial Sequence
  ENSG00000185658_6 (sequence is synthesized)
tcatagaggaagacctcctgaaatgccagtgaattatggttccccaccaaatcttgtggagatacatcgaggaaaacaactcacagggtgttccacttttagtacagcatttccaggaac

SEQ ID NO: 671539 - DNA, 120 bp, Artificial Sequence
  ENSG00000185658_7 (sequence is synthesized)
tatgtatcagcatataaaaatgcacagaaggattctcggacatctatctgctgtttactgtgtagcatttgataggacaggacatagaatctttacaggttcagatgactgtttggtaaa

SEQ ID NO: 671540 - DNA, 120 bp, Artificial Sequence
  ENSG00000185658_8 (sequence is synthesized)
gatttggtcaacacataatggccgcttgttatctacattaagaggtcattctgcagaaatttcagatatggcagtaaactatgagaatacaatgattgctgcggggagctgtgataaaat

SEQ ID NO: 671541 - DNA, 120 bp, Artificial Sequence
  ENSG00000185658_9 (sequence is synthesized)
tattagagtgtggtgcttgagaacttgtgccccagttgctgtgctccaaggacacacaggatcaattacatctttacagtttagcccgatggccaaaggctctcaaagatacatggtttc

SEQ ID NO: 671542 - DNA, 120 bp, Artificial Sequence
  ENSG00000185658_10 (sequence is synthesized)
cactggtgctgatgggacagtttgcttttggcaatgggatttagaatccttaaaatttagcccacgtcccctgaagttcactgaaaagcctaggccaggcgttcaaatgctttgttcttc

SEQ ID NO: 671543 - DNA, 120 bp, Artificial Sequence
  ENSG00000185658_11 (sequence is synthesized)
ttttagtgttggtggtatgtttttagccacaggtagtactgatcatgtaatcagaatgtattttttgggttttgaagcacccgaaaaaatcgcagaacttgaaagccacactgataaagt

SEQ ID NO: 671544 - DNA, 120 bp, Artificial Sequence
  ENSG00000185658_12 (sequence is synthesized)
agatagtatccaattttgtaacaatggtgatcggttcctaagtggtagcagagatggaacagcacggatttggagatttgagcagttagaatggaggagcattttattggatatggctac

SEQ ID NO: 671545 - DNA, 120 bp, Artificial Sequence
  ENSG00000185658_13 (sequence is synthesized)
cagaatctcaggggacttatcttccgaagaggaaaggtttatgaaacctaaagtaacaatgatagcttggaatcaaaatgatagcattgttgtcacagctgtgaatgatcatgtcctcaa

SEQ ID NO: 671546 - DNA, 120 bp, Artificial Sequence
  ENSG00000185658_14 (sequence is synthesized)
agtgtggaattcttacactggacaactgcttcataacttaatgggacatgctgatgaagtatttgttctggagacacatccctttgattccagaattatgttatctgcaggacatgatgg

SEQ ID NO: 671547 - DNA, 120 bp, Artificial Sequence
  ENSG00000185658_15 (sequence is synthesized)
cagcatatttatatgggatattacaaaaggtaccaagatgaaacattattttaatatgattgaaggacaaggacatggagctgtgtttgactgtaagttttcacaggatggacagcattt

SEQ ID NO: 671548 - DNA, 120 bp, Artificial Sequence
  ENSG00000185658_16 (sequence is synthesized)
tgcctgtacagattctcatgggcaccttctgatatttggttttggatgcagcaaaccatatgaaaagattcctgatcagatgttcttccatactgactatcgaccacttattagagattc

SEQ ID NO: 671549 - DNA, 120 bp, Artificial Sequence
  ENSG00000185658_17 (sequence is synthesized)
taataattatgtcttagatgagcaaactcagcaggctcctcatcttatgcctccaccattcttggtagatgtagatggaaatcctcatccaaccaagtatcagagattagtaccaggccg

SEQ ID NO: 671550 - DNA, 120 bp, Artificial Sequence
  ENSG00000185658_18 (sequence is synthesized)
agaaaattctgcagatgaacatttgattccacagctgggctatgtggcaacaagtgatggagaggtgattgaacaaattataagcctgcaaaccaatgataatgatgaacgcagcccaga

SEQ ID NO: 671551 - DNA, 120 bp, Artificial Sequence
  ENSG00000185658_19 (sequence is synthesized)
atcgagtattcttgatggaatgataagacagttgcagcagcagcaagatcagagaatgggagcagatcaggatactattccaagaggactttcaaatggtgaagaaacaccccggagagg

SEQ ID NO: 671552 - DNA, 120 bp, Artificial Sequence
  ENSG00000185658_20 (sequence is synthesized)
ttttagaaggctgagcttagacattcagtcccctccaaatattggtctgcgtcgtagtggacaagttgaaggtgttcgtcagatgcatcaaaacgctccacgcagtcagattgctacaga

SEQ ID NO: 671553 - DNA, 120 bp, Artificial Sequence
  ENSG00000185658_21 (sequence is synthesized)
acgtgacctgcaggcttggaaacgaagagtggttgtaccagaggtaccactaggcatatttaggaagctggaagacttccgattagagaaaggtgaagaggaaagaaatctttatataat

SEQ ID NO: 671554 - DNA, 120 bp, Artificial Sequence
  ENSG00000185658_22 (sequence is synthesized)
aggaagaaaaagaaagactcttcagctctcacataagtcggattcagtggttttggtatcacagtctagacaaaggacatgtaggcgtaaatatccaaattatggtagaagaaatcgtag

SEQ ID NO: 671555 - DNA, 120 bp, Artificial Sequence
  ENSG00000185658_23 (sequence is synthesized)
ctggcgtgagttatcttctggaaatgagtcttcaagctctgtaagacatgagacttcctgtgatcagagtgaaggttctggttcttcagaagaggatgaatggagaagtgacagaaaaag

SEQ ID NO: 671556 - DNA, 120 bp, Artificial Sequence
  ENSG00000185658_24 (sequence is synthesized)
tgagagttacagcgaaagttcaagtgactcttcatctagatattccgattggacagctgatgcgggcatcaatttgcagcctcctttaagaacatcatgtcgtcgacgaattactcgatt

SEQ ID NO: 671557 - DNA, 120 bp, Artificial Sequence
  ENSG00000185658_25 (sequence is synthesized)
ttgtagtagttcagaagatgaaatatctactgagaatttatctcctccaaaaagaagacgaaagagaaagaaagaaaataagcctaagaaggagaatttgcggaggatgactccagcaga

SEQ ID NO: 671558 - DNA, 120 bp, Artificial Sequence
  ENSG00000185658_26 (sequence is synthesized)
gcttgcaaatatggagcatttatatgaatttcaccctccagtttggattactgacaccacacttagaaaatctccttttgttcctcaaatgggtgatgaggtaatatattttcgacaggg

SEQ ID NO: 671559 - DNA, 120 bp, Artificial Sequence
  ENSG00000185658_27 (sequence is synthesized)
tcatgaagcttatattgaggctgtaagaagaaataatatttatgaactgaaccctaataaggagccatggagaaaaatggatcttagggatcaagaattggttaaaatagttggaatacg

SEQ ID NO: 671560 - DNA, 120 bp, Artificial Sequence
  ENSG00000185658_28 (sequence is synthesized)
atatgaagttgggccccctacactctgttgcctaaaactagcatttatagatccagcaactggaaaacttatggacaaatctttctctattagatatcatgatatgccagatgttattga

SEQ ID NO: 671561 - DNA, 120 bp, Artificial Sequence
  ENSG00000185658_29 (sequence is synthesized)
ctttcttgtattgcgtcaattttatgatgaagcaagacagaggaattggcagtcttgtgacagattccgctctattattgatgatgcttggtggtttggaacagtgttaagtcaagagcc

SEQ ID NO: 671562 - DNA, 120 bp, Artificial Sequence
  ENSG00000185658_30 (sequence is synthesized)
atatcaaccacagtatcctgatagtcatttccagtgttatattgttaggtgggataatactgaaattgaaaaacttagcccatgggacatggaaccaattcctgataatgttgatccacc

SEQ ID NO: 671563 - DNA, 120 bp, Artificial Sequence
  ENSG00000185658_31 (sequence is synthesized)
tgaagaattaggagctagtatttctgtcacaacagatgagctagagaaattgctctataaaccacaagctggtgaatggggtcagaaatcaagagatgaagaatgtgatagaattatcag

SEQ ID NO: 671564 - DNA, 120 bp, Artificial Sequence
  ENSG00000185658_32 (sequence is synthesized)
tggtatagatcaacttttgaatcttgatatagcagcagcttttgcaggccctgttgatttgtgtacatacccgaagtactgtactgtagtagcttatccaaccgatctttacacaattcg

SEQ ID NO: 671565 - DNA, 120 bp, Artificial Sequence
  ENSG00000185658_33 (sequence is synthesized)
aatgagacttgttaatcgattttacaggaggctgtctgcgttagtttgggaagtcagatatatagaacataatgccagaacatttaacgaacctgagagtgtaattgcaagatcagctaa

SEQ ID NO: 671566 - DNA, 120 bp, Artificial Sequence
  ENSG00000185658_34 (sequence is synthesized)
aaagataactgaccaacttttaaaatttatcaagaatcaacactgtacaaatatctcagaactttctaacacatctgaaaatgatgagcaaaatgctgaggatttggatgatagtgatct

SEQ ID NO: 671567 - DNA, 120 bp, Artificial Sequence
  ENSG00000185658_35 (sequence is synthesized)
tcctaaaacatcttctggaaggaggagagtccatgatgggaaaaaaagcatcagagctacgaactatgttgaaagcaactggaagaaacagtgtaaggaactagtgaacttaatttttca

SEQ ID NO: 671568 - DNA, 120 bp, Artificial Sequence
  ENSG00000185658_36 (sequence is synthesized)
gtgtgaagattctgaaccatttagacaacctgttgatttggttgaatatccagactacagagatattatagataccccaatggattttggaacagtaagggaaactctagatgcgggaaa

SEQ ID NO: 671569 - DNA, 120 bp, Artificial Sequence
  ENSG00000185658_37 (sequence is synthesized)
ttatgacagccctttggagttttgcaaagacatccggctgatatttagcaatgcaaaagcgtatacaccaaacaaaagatcaaagatttatagtatgaccttgagattatctgccttatt

SEQ ID NO: 671570 - DNA, 120 bp, Artificial Sequence
  ENSG00000185658_38 (sequence is synthesized)
tgaagaaaaaatgaagaaaatctcttctgattttaaaattggtcaaaaattcaatgaaaaacttcgaagaagccagaggttcaagcaacggcaaaattgtaaaggtgacagtcagcctaa

SEQ ID NO: 671571 - DNA, 120 bp, Artificial Sequence
  ENSG00000185658_39 (sequence is synthesized)
caaaagtatcagaaacctcaagccgaagaggttaaaatctcagacaaaaataattcctgagttggtaggttctcctacccagtctacctcaagtaggacagcttatcttggaacccacaa

SEQ ID NO: 671572 - DNA, 120 bp, Artificial Sequence
  ENSG00000185658_40 (sequence is synthesized)
gacaagtgctggtatctcttcaggtgttacttctggtgactcttcagattcagcagaatcatcagaaaggaggaaaagaaatagacctataacaaatggttctacattatctgaaagtga

SEQ ID NO: 671573 - DNA, 120 bp, Artificial Sequence
  ENSG00000185658_41 (sequence is synthesized)
agtggaagattctttagctacctctttgtcatcgtcagcttccagtagttctgaggaaagcaaagagagttccagagctcgtgaatcctcctcacgcagtgggctatccagaagcagcaa

SEQ ID NO: 671574 - DNA, 120 bp, Artificial Sequence
  ENSG00000185658_42 (sequence is synthesized)
ggatgtggcagaaaagccactcgaaagagagtctatttaagtgattctgataacaattcattggagactggtgaaattctaaaagccagagctggaaataaccgaaaagtcttaaggaag

SEQ ID NO: 671575 - DNA, 120 bp, Artificial Sequence
  ENSG00000185658_43 (sequence is synthesized)
tgtgctgctgtggctgccaataaaataaagctaatgagtgatgtagaagagaattctagctctgaaagtgtctgttctggtcggaagctgcctcaccgcaatgcttctgctgtagctaga

SEQ ID NO: 671576 - DNA, 120 bp, Artificial Sequence
  ENSG00000185658_44 (sequence is synthesized)
aaaaagttattacataattctgaagatgaacagagcttaaagtcagaaattgaagaagaggagctaaaagatgaaaatcaactattaccagtgtccagttctcacactgcccagagcaat

SEQ ID NO: 671577 - DNA, 120 bp, Artificial Sequence
  ENSG00000185658_45 (sequence is synthesized)
gttgatgaatctgaaaacagagactcagagtcagaaagtgatttgcgggtagcccggaaaaattggcatgctaatggttacaagtcccatactccagcaccttcaaagacaaaatttctt

SEQ ID NO: 671578 - DNA, 120 bp, Artificial Sequence
  ENSG00000185658_46 (sequence is synthesized)
aaaatagagtcttctgaggaagactctaaaagtcatgattcagatcatgcatgtaacagaactgctggcccatcaacgtctgtgcagaaacttaaggcagagagcatctcagaggaagca

SEQ ID NO: 671579 - DNA, 120 bp, Artificial Sequence
  ENSG00000185658_47 (sequence is synthesized)
gattctgaaccaggaagatctggtggtaggaaatacaatacatttcacaagaatgcgagtttctttaaaaaaaccaagattctgagtgactcagaagactctgaatctgaagagcaagat

SEQ ID NO: 671580 - DNA, 120 bp, Artificial Sequence
  ENSG00000185658_48 (sequence is synthesized)
agagaagatgggaaatgtcataaaatggaaatgaacccaatttcaggaaatctgaactgtgaccctattgctatgtcccagtgttcctcagatcatggatgtgaaactgatttagattca

SEQ ID NO: 671581 - DNA, 120 bp, Artificial Sequence
  ENSG00000185658_49 (sequence is synthesized)
gatgatgacaaaatagaaaaaccaaacaattttatgaaagattctgcatcacaagacaatggactaagcagaaaaatttccaggaaaagggtctgttccagtgactcagacagtagttta

SEQ ID NO: 671582 - DNA, 120 bp, Artificial Sequence
  ENSG00000185658_50 (sequence is synthesized)
caggtggttaagaaatcatcaaaagccagaacaggtctcctgaggattactcgaagatgtgcagctacggctgccaataagatcaagctcatgagtgatgtagaagatgtcagtttagaa

SEQ ID NO: 671583 - DNA, 120 bp, Artificial Sequence
  ENSG00000185658_51 (sequence is synthesized)
aatgtgcacactagaagcaaaaatggaaggaaaaaacctctccatcttgcttgtactacagctaagaagaaattgagtgattgtgaaggaagtgtacattgtgaagtaccaagtgaacag

SEQ ID NO: 671584 - DNA, 120 bp, Artificial Sequence
  ENSG00000185658_52 (sequence is synthesized)
tatgcctgtgaaggcaagccacctgatcctgactccgaaggtagtacaaaagtgcttagtcaggctctaaatggagactcagactctgaagatatgttgaattcagaacacaagcacagg

SEQ ID NO: 671585 - DNA, 120 bp, Artificial Sequence
  ENSG00000185658_53 (sequence is synthesized)
cataccaatattcacaaaatagatgcaccttctaaaagaaaaagttcctctgttacatcttcaggagaagattcaaaaagtcatattccagggagtgagactgataggacattttcttca

SEQ ID NO: 671586 - DNA, 120 bp, Artificial Sequence
  ENSG00000185658_54 (sequence is synthesized)
gagtcaaccttggcacaaaaagctactgcagagaataattttgaagtggaactgaattatgggctgcgcaggtggaatggcagaagactcaggacctatggaaaggctccttttagtaag

SEQ ID NO: 671587 - DNA, 120 bp, Artificial Sequence
  ENSG00000185658_55 (sequence is synthesized)
acaaaagtgattcatgattcacaggaaacagcagagaaggaagtaaaaaggaagagatcgcatcctgaattggaaaatgtgaaaatctctgaaacaactgggaattcaaagtttagacct

SEQ ID NO: 671588 - DNA, 120 bp, Artificial Sequence
  ENSG00000185658_56 (sequence is synthesized)
gatactagttccaaatcatcagatttgggatctgtaactgaatcagatattgactgtactgataatacaaaaaccaaaaggaggaaaacgaaaggaaaagcaaaagtagttagaaaagaa

SEQ ID NO: 671589 - DNA, 120 bp, Artificial Sequence
  ENSG00000185658_57 (sequence is synthesized)
tttgttcctagagacagagaacccaatacaaaagtgagaacatgtatgcataatcagaaggatgcagtgcagatgcctagtgaaactctgaaagcaaaaatggtacctgagaaagttccc

SEQ ID NO: 671590 - DNA, 120 bp, Artificial Sequence
  ENSG00000185658_58 (sequence is synthesized)
cgcagatgtgctactgttgctgcaaataaaataaagataatgagtaatctaaaagaaacgatctcaggaccagaaaatgtctggattaggaagagtagcagaaaactgccccatcgaaat

SEQ ID NO: 671591 - DNA, 120 bp, Artificial Sequence
  ENSG00000185658_59 (sequence is synthesized)
gcttctgctgcggctaagaaaaaattactgaatgtttataaagaggatgatacaaccataaattctgaaagtgaaaaagagctagaagatattaatagaaaaatgctttttttaaggggg

SEQ ID NO: 671592 - DNA, 120 bp, Artificial Sequence
  ENSG00000185658_60 (sequence is synthesized)
ttcagatcctggaaagaaaatgcacaatagtgactatgagaatgtagaagtggcatctgaaaacaattggtacacaagtaaactggcagttacattctgctcccagctctaaaattactc

SEQ ID NO: 671593 - DNA, 120 bp, Artificial Sequence
  ENSG00000185658_61 (sequence is synthesized)
ccttattggcatctttggaggaattttctaaaagccataatccagtgggttcctcccagtcagctcttgtacagacatgtgctctggggaattctgaggaggaaataaattgcagagtct

SEQ ID NO: 671594 - DNA, 120 bp, Artificial Sequence
  ENSG00000185658_62 (sequence is synthesized)
gtaggtggagaggtggaaagaaaagacaaatggcctgctataagactactattcctttccagaatgcaaggccttgaagacatgattccttagaggaagaatataatgggaagtgtacag

SEQ ID NO: 671595 - DNA, 120 bp, Artificial Sequence
  ENSG00000185658_63 (sequence is synthesized)
gctaggaagaacttgaagtgaacaaatttcaaaatcttaacctgatgctaattttcagggttctccattacagtgtaaaaattcagaccacgacaactatggtgtcatgaggaaaaaaaa

SEQ ID NO: 671596 - DNA, 120 bp, Artificial Sequence
  ENSG00000185658_64 (sequence is synthesized)
tcaggcatttttccaaaggaagtgctaatgggcctatttgacttctgagtgaagcaaaaactacccagatccattccctacaattcacatccccaaaggtcaaaaacaaactaggaggac

SEQ ID NO: 671597 - DNA, 120 bp, Artificial Sequence
  ENSG00000185658_65 (sequence is synthesized)
ctgggaatttcagctggagatactgattattgagttctgaagtagagtgttggaaataggcaattagagaaagtccattgatgtcattttgtttataatattgcagttcatactgaatga

SEQ ID NO: 671598 - DNA, 120 bp, Artificial Sequence
  ENSG00000185658_66 (sequence is synthesized)
ccacttgatatgactaattcagggaatatatatttttctatgaaagctatgaatgttactatcacggcttttccttatttttacttgtatgtagcagcatttacagaaatgccaaaaatg

SEQ ID NO: 671599 - DNA, 120 bp, Artificial Sequence
  ENSG00000185658_67 (sequence is synthesized)
tgcctcattaagaggcaggtcttaatcagttagataaaaataaaatgtatagcttaagatcaaaacagtcatatttttagatacagtgaaatcttttatgtttctctacagcaccttaaa

SEQ ID NO: 671600 - DNA, 120 bp, Artificial Sequence
  ENSG00000185658_68 (sequence is synthesized)
aattagaacttgaatactttgagtaaacttactacaatctcatcccaacaaactttaatggtagcatgtttggcctatttcattgtggcctgtactaggattagaaaatttggtcgtggt

SEQ ID NO: 671601 - DNA, 120 bp, Artificial Sequence
  ENSG00000185658_69 (sequence is synthesized)
ataacaaagaagtgtatttacaataggatttaatttgttgttaatatgtatttgttgaaattaaaattgccagattaaatgaatatactgtcgcatctttttaacatagtaacgtgttac

SEQ ID NO: 671602 - DNA, 120 bp, Artificial Sequence
  ENSG00000185658_70 (sequence is synthesized)
tggaaaaattaagttgttgaaagtaagttgttttcccatttaaaaatatctgaatatatgatttgcatgtgtaaatctgaaaaactaaactacagaaacctagggttttctatttctttt

SEQ ID NO: 671603 - DNA, 120 bp, Artificial Sequence
  ENSG00000185658_71 (sequence is synthesized)
ttaagtcaaatgcatttttttttttttgttatacagatgaaccaagtgtctaaaatacttgagaaatttgtggttgcatgtctgttttaaaaaaaaggctttttgttttttagcataagc

SEQ ID NO: 671604 - DNA, 120 bp, Artificial Sequence
  ENSG00000185658_72 (sequence is synthesized)
cagaatattctaacctactaagtctgtgtcctttgctccttttgtagtatactttcatctaaattactgatccccaatatgttgatacacaggtgagaaagggaagaattcctaataaac

SEQ ID NO: 671605 - DNA, 120 bp, Artificial Sequence
  ENSG00000185658_73 (sequence is synthesized)
tgctattacttttaggtgcatggggtttgatttttgagctctaatgaaatgcttaaacttctttccagttcaaattttacacttaatttataatatttattgagtatattatgtcctcaa

SEQ ID NO: 671606 - DNA, 80 bp, Artificial Sequence
  ENSG00000185658_74 (sequence is synthesized)
atatttattgagtatattatgtcctcaacaagtaactataaaatgaaatacttaactcggtgaagactattttatgcagt

SEQ ID NO: 671607 - DNA, 120 bp, Artificial Sequence
  ENSG00000185658_75 (sequence is synthesized)
ataatttgctgtggtggggttaatttctgtcagtatttgagattgtattatcagtcttgcataatgaaatccttttttggctaagtatttaattcgaacatatttgcctttttaaaaagt

SEQ ID NO: 671608 - DNA, 120 bp, Artificial Sequence
  ENSG00000185658_76 (sequence is synthesized)
gcttggcctaaacttattgtaactgcatgaaataagcatttgcttaaaacttaacattgtaaaattgttctctctgaaatgtgtgcagaatttaaatcatggccaaatgtattactatta

SEQ ID NO: 671609 - DNA, 120 bp, Artificial Sequence
  ENSG00000185658_77 (sequence is synthesized)
ccctatttacagtaatttgctttgcagaaaatatttcttcatcatggaactgtgaaatcaaattgaagatcttactggtaaaaatgacaaattaacaaaaggactaagacaagtggtgcc

SEQ ID NO: 671610 - DNA, 120 bp, Artificial Sequence
  ENSG00000185658_78 (sequence is synthesized)
caaacaacctttttattctgcagttccatcatcataatagaccagttaacccaggagtcctaatgttttaaaacatcattgtggtgatcttgtttattctatctcactaaggatatccag

SEQ ID NO: 671611 - DNA, 120 bp, Artificial Sequence
  ENSG00000185658_79 (sequence is synthesized)
tttcctaagctcttactggctagcaatttcgtcttaattttattgctaaatgttcaaattttgcttccaaactcactttatttttgcagatgtgtacatctgctaagtactaattttatg

SEQ ID NO: 671612 - DNA, 120 bp, Artificial Sequence
  ENSG00000185658_80 (sequence is synthesized)
taaatgattttgttgattatctttccacatcttaaaatgtttctaacagctttgagattttatctcaacaggctctctctgaccccaaagtagtacttaccttcgtgactactgacaaag

SEQ ID NO: 671613 - DNA, 120 bp, Artificial Sequence
  ENSG00000185658_81 (sequence is synthesized)
tcacaaaatgcaggcgatgtcatgtatttcggtacaactaaatctaggaaacggttttttcattgcattactgcatattttcattttcatttaaattatgtcccctttttctcttgcttg

SEQ ID NO: 671614 - DNA, 120 bp, Artificial Sequence
  ENSG00000185658_82 (sequence is synthesized)
aaacagtgctcctcgaactttgtcttccagcacattttaaagagaaccaattaaagaacaatcacacattctgcttattaaaggctatttaaaaagaaacattttgtattagaaaatggc

SEQ ID NO: 671615 - DNA, 120 bp, Artificial Sequence
  ENSG00000185658_83 (sequence is synthesized)
caactttaaaacactattttttacactcataaaaatgttttttaaatcgccttgacaatcatcagcttttgaaatgtgaattcctattgccagagtaaaggtctcgtttttataccacca

SEQ ID NO: 671616 - DNA, 120 bp, Artificial Sequence
  ENSG00000185658_84 (sequence is synthesized)
gtcaaagacaaagcaaacgccctaggttaagtgtggatgataatgactgggaggatttggactatgcaaaatctaaaagagttcttcgacgttcaaaaataaaaacgagaaatcagggta

SEQ ID NO: 671617 - DNA, 120 bp, Artificial Sequence
  ENSG00000185658_85 (sequence is synthesized)
gaaggactgtgagataccatgatggggatgatgacagaagtttagaaaatgtgttagatttcaatggttgcaccttatgaccttgagggaaagccagttcatttaagaggaaatggactg

SEQ ID NO: 671618 - DNA, 120 bp, Artificial Sequence
  ENSG00000185658_86 (sequence is synthesized)
gcatttatggtgaaagctggctgttaaaattatttttttgtcttacaattcagggaatatatttatatttttctatgaaaagttatgaatgtgactaaatcatgactgttatttttattt

SEQ ID NO: 671619 - DNA, 120 bp, Artificial Sequence
  ENSG00000185658_87 (sequence is synthesized)
gcacttgctggtctttgtagcagcattcagcacaggtgccaaaatatgcttcattttgggggcagatctattttgacagtatttgactacatatagcaagagtttgaaatatgttaaaca

SEQ ID NO: 671620 - DNA, 120 bp, Artificial Sequence
  ENSG00000185658_88 (sequence is synthesized)
ctagacatcctggttatcaaaaccaatgagcattactttcatggcagcaagtgtcatgcagttattttctgaatttgtcaaagaggcagtagtttctaacccctgttctatagtagttac

SEQ ID NO: 671621 - DNA, 120 bp, Artificial Sequence
  ENSG00000185658_89 (sequence is synthesized)
aacaatttcacaacctatgtttacagattcttcataaatacatgcatactgacactataatcatgggaggtgtaaccatgattagtaggcgaggtacctaccacttttttttttttcttc

SEQ ID NO: 671622 - DNA, 120 bp, Artificial Sequence
  ENSG00000185658_90 (sequence is synthesized)
ccctggctacttgagtagaatgcattataccagatctggtcactttcattgaaatggtttctaattttcttcccaagtgctgttgggtttttttcttcttaaggaaaacgttgtcacttt

SEQ ID NO: 671623 - DNA, 120 bp, Artificial Sequence
  ENSG00000185658_91 (sequence is synthesized)
tatgttataaacttgaatttataaagtgctggtaaattatttttaatgatttgagtgcatgttttaaacctctaggaccagagcatagtcagagcattttcttttaaattgtgcactaac

SEQ ID NO: 671624 - DNA, 120 bp, Artificial Sequence
  ENSG00000185658_92 (sequence is synthesized)
aaaatgctatataatctgtcttctgtccaagatctcctggtttccattgtaagggatttaaccaaaatcttgctcttccataatcttactctgtgaaatagaggaattcgtgtgccttag

SEQ ID NO: 671625 - DNA, 120 bp, Artificial Sequence
  ENSG00000185658_93 (sequence is synthesized)
atttagaagtgtgttctttaatagagtgtacagggctaaaagagtatttaagttaatatgtaggtttcccccatctgtattccaattgtagaggtgagttttgttaagagtacaattgca

SEQ ID NO: 671626 - DNA, 120 bp, Artificial Sequence
  ENSG00000185658_94 (sequence is synthesized)
aatcttatctatataggaaaatagctaaatgtcattctccatctctttgttttagtttactgcttccatgtgcaatcctaagcattctttgctggggcaactaaatgtatctttattagt

SEQ ID NO: 671627 - DNA, 120 bp, Artificial Sequence
  ENSG00000185658_95 (sequence is synthesized)
gacttctagtccaaatataagaaactgtcatgttttgtgggaaaataattttataatccatttaaagtgaaagtttatcacacaaatagtacacttattttctaaccaaatacttgatag

SEQ ID NO: 671628 - DNA, 120 bp, Artificial Sequence
  ENSG00000185658_96 (sequence is synthesized)
gttatgctactccagtgtagatggccattcctaacttgtttgtgcctgaagatggacttgattcaaatggtttacatatttagtgggtaagggatatgttacagtaccccacctgtaagt

SEQ ID NO: 671629 - DNA, 120 bp, Artificial Sequence
  ENSG00000185658_97 (sequence is synthesized)
tatttattagccctaattgtgtttgatttcagacaaaattaacccttttctcctgtgtatctttgaagtggcagataaggtgaagcatcagactggtatcaatattagacaatgttattt

SEQ ID NO: 671630 - DNA, 120 bp, Artificial Sequence
  ENSG00000185658_98 (sequence is synthesized)
attagccctaattgtgtttggtttcagacaaaaccttttctcctgtgtatctttgaagtggcagacaaggcgaagcatcagactggtattaatgttagagaatgttctgaagtgttccta

SEQ ID NO: 671631 - DNA, 120 bp, Artificial Sequence
  ENSG00000185658_99 (sequence is synthesized)
ttttgtagttatctattccatttgacatagtagaaggtacattttctttctactctgatgcatggggaaggatgtttttggacattatcaactgagataggtgggaaacctcctctcatt

SEQ ID NO: 671632 - DNA, 120 bp, Artificial Sequence
  ENSG00000185658_100 (sequence is synthesized)
tgtggcttagagagctatcaccatttcagaactatgatgcttttcttctcagaacttgtgttaagtagatagtaaacagattgattcatgataattgtccttgactaagactgaaaagac

SEQ ID NO: 671633 - DNA, 120 bp, Artificial Sequence
  ENSG00000185658_101 (sequence is synthesized)
taatgggatgccttttactttgctaattttaaaaactggtgatagatgtcaaatccattaatttatttaaactcttcttaaccttctcttttataatctgttctcaggttttaactccat

SEQ ID NO: 671634 - DNA, 120 bp, Artificial Sequence
  ENSG00000185658_102 (sequence is synthesized)
gtttaccatcatttgcaaaaaggtaccaaaaaaatccataaataaatatggaatacattcataagtacatacattcttttggtataaaacaatattttgacagtttaggcttcattaata

SEQ ID NO: 671635 - DNA, 120 bp, Artificial Sequence
  ENSG00000185658_103 (sequence is synthesized)
gaactattctgattatttggactgcattaattggtcattgactggccatccaattaccattttttctttcagtccaaaatagttagacccttgcatacagaagtggtattttggttttta

SEQ ID NO: 671636 - DNA, 120 bp, Artificial Sequence
  ENSG00000185658_104 (sequence is synthesized)
atcagatttggtttcatcagaagcagcaagaatggacctgatgtctttaaaagcatagccgacaatggtagcttctcaagttatgaaataaaactgagagataatggagaaaataatttt

SEQ ID NO: 671637 - DNA, 120 bp, Artificial Sequence
  ENSG00000185658_105 (sequence is synthesized)
tatgggtttttttggttatggtgctattcctaaggttaactttgaatatgtgacacacacactcctaagtacctttaaggaaaattaataaatcattaatagttaaaatgtttacattga

SEQ ID NO: 671638 - DNA, 120 bp, Artificial Sequence
  ENSG00000185658_106 (sequence is synthesized)
gcactagaacatgtttggccttttttttctacgttatgcaaaatgcccagggatttaatgcacaggtgtactttaatgtttagggtcagtttgtagtattcttgagaaaaagataaaggg

SEQ ID NO: 671639 - DNA, 120 bp, Artificial Sequence
  ENSG00000185658_107 (sequence is synthesized)
ttataatttgaatgtgaactgatccagaaataagtgctgtacctttccactgcacttgaagttcaacttaatggtgtatgtgaaaaacaaaaactactttggttgtgtatgtccaaagtc

SEQ ID NO: 671640 - DNA, 120 bp, Artificial Sequence
  ENSG00000185658_108 (sequence is synthesized)
ctatggttttattcatttatggttttacaggctttgaagtactcagatttgatttttgctttcttggaaagactcactttaccaagcatataaaggaaaaatgatttcaaacattgacaa

SEQ ID NO: 671641 - DNA, 120 bp, Artificial Sequence
  ENSG00000185658_109 (sequence is synthesized)
gatagatgagtgttaacaaagctttcttttttcgtgtcctccttatttaaaaaggtatacttacaatgtgaagtaacttatgaataaaaggaaaagtttatcccatattcaaataattcc

SEQ ID NO: 671642 - DNA, 120 bp, Artificial Sequence
  ENSG00000185658_110 (sequence is synthesized)
taaggtcagcctccctttttgtaagtggcaaatatctgattaaatcatttctcagtttattaatccttggaaacaatgatatagcagttactcacagcttgtaaattacaacagaaaggt

SEQ ID NO: 671643 - DNA, 120 bp, Artificial Sequence
  ENSG00000185658_111 (sequence is synthesized)
tcctttcaaatagtagagctgcacctaaagaggaaattgggtttataagaaaatggaggcaaagaacttaagttttaagaaaaagcacttcaaaacagaagggcaaatggaaaaggggaa

SEQ ID NO: 671644 - DNA, 120 bp, Artificial Sequence
  ENSG00000185658_112 (sequence is synthesized)
tataaaacaaaccaataaaaataccatctgagggtgttactgtccaaaagtaaagaataagatgcatcactaagccctttgcactcgttatgacctcgtaagtaaaaattatcacttaga

SEQ ID NO: 671645 - DNA, 120 bp, Artificial Sequence
  ENSG00000185658_113 (sequence is synthesized)
ataaggggtgcacactacattccctctgtcttctagacttttttttttgtagaagaatcagaaaacaatttactaacctccctgtttgatattaaaaataggaagaattttaatattttc

SEQ ID NO: 671646 - DNA, 120 bp, Artificial Sequence
  ENSG00000185658_114 (sequence is synthesized)
tgttagtacaagttgaacttgattgtgccaactgaaaccccagaggtttgtatatcagtagaatgcaagaacattgttaaaggtgcttacgatcttttttgttttcctttccactccatt

SEQ ID NO: 671647 - DNA, 120 bp, Artificial Sequence
  ENSG00000185658_115 (sequence is synthesized)
gtatcaattttttgagtaacttttaaatggctagaaaatggtctttttgctttgcccttttaaagctgaaataaccagctccattcttttcatgaatagtaagttgatatatttatttat

SEQ ID NO: 671648 - DNA, 120 bp, Artificial Sequence
  ENSG00000185658_116 (sequence is synthesized)
caggtatcttgcagttgtcaccaaatactgtagttttcttatgttgtatggaaattatagttcaattattttaatgtgatagagtgcaacaagtcattgtagaacttttcacctgttaat

SEQ ID NO: 671649 - DNA, 120 bp, Artificial Sequence
  ENSG00000185658_117 (sequence is synthesized)
gttgaagttatacctctgaatttctgctgtggatatcaaggaaataataaagcagaaaccccaagaaatttgcaacttaacagtttgagactgtctcttatcctagtatttgggaagaga

SEQ ID NO: 671650 - DNA, 120 bp, Artificial Sequence
  ENSG00000185658_118 (sequence is synthesized)
aggaataaatttgtcaaaactaggtgagaaaatagagcattgtgggaaaaactgagtccaactagattagcaaatgttaattcctagctcaaactgtgaatagtaaggattgaaaagtaa

SEQ ID NO: 671651 - DNA, 120 bp, Artificial Sequence
  ENSG00000185658_119 (sequence is synthesized)
agtatgtaatgctaagggctgtgttgtcttttcttacgattttaagttttaaaggctgttaaattacagagatgttgcccaaggatacatggggattctcaaaagtaagagatttttacc

SEQ ID NO: 671652 - DNA, 120 bp, Artificial Sequence
  ENSG00000185658_120 (sequence is synthesized)
tttttcataatctgccaagctggttcctaatatattgttaaattggtagaaaaatatctttaaattggtgtctgctcaagaattgcttttctagatttgatggagggagggggagagtca

SEQ ID NO: 671653 - DNA, 120 bp, Artificial Sequence
  ENSG00000185658_121 (sequence is synthesized)
catcatttggattctaccaatctgcaggctctatctttggcaacatgtaaataattagactatacatctgtttctcaagtatggcaagaccaatagtttgaatttaattatcaatgctat

SEQ ID NO: 671654 - DNA, 120 bp, Artificial Sequence
  ENSG00000185658_122 (sequence is synthesized)
ggtatactttctggtcatattttagttatgtcagttttaaggtaagttttttcatttattaaagcccttaaatgagattttagactgccaaagagaagaggcagtccaattgacctaact

SEQ ID NO: 671655 - DNA, 120 bp, Artificial Sequence
  ENSG00000185658_123 (sequence is synthesized)
gaaatgagatgaccagtatatagagcctagatggactgtagcagctctacccctttgttttacaaggtaaatcattttaaaaattaccttttttgatcagtgggtaaaagttaaagggat

SEQ ID NO: 671656 - DNA, 120 bp, Artificial Sequence
  ENSG00000185658_124 (sequence is synthesized)
ctttaatttttgatatattcaagttaattttctaaatgtgaatcagtccttggactgcaactatatattcacctacaaaatcccaatcaaaaaattacatgagcctgtcaagcagatctt

SEQ ID NO: 671657 - DNA, 120 bp, Artificial Sequence
  ENSG00000185658_125 (sequence is synthesized)
tagttttccacttcacataagatcgttaatgttctaaattaatctattcatttagatgatttttgtcagttcttaaatgggatataataaatttagcattttcatcttaacaagcaaaag

SEQ ID NO: 671658 - DNA, 120 bp, Artificial Sequence
  ENSG00000185658_126 (sequence is synthesized)
agttaaaaaacaaaacaaaacactactccaagccaaatacattctagctggttaattccagacttgtcccaagtggttccccaacctcttttccactggtaatttcttttcatgcaggca

SEQ ID NO: 671659 - DNA, 120 bp, Artificial Sequence
  ENSG00000185658_127 (sequence is synthesized)
gaatataggggtgcgagcgctgtgagttttacatatgagcttggataggggaactgaagcgagtcaggagccctgctggaaaaggggtttgccattggattgtctgtggcctggtttctt

SEQ ID NO: 671660 - DNA, 120 bp, Artificial Sequence
  ENSG00000185658_128 (sequence is synthesized)
tccagtagtacagtaatagggtagattgaaaacaagtatttacttctgattctgcctgcatttagtgtgaaatgctcttaaggtattgcttctaaaaagcaaattaagcagttaagtata

SEQ ID NO: 671661 - DNA, 120 bp, Artificial Sequence
  ENSG00000185658_129 (sequence is synthesized)
aagtccctgaattcatatttcaaaataaggcttttatgagatttttattaaaaattgcaatagccatcacaaatctgagtttttctaggggtgagagaaaactgtattgtgatgagctag

SEQ ID NO: 671662 - DNA, 120 bp, Artificial Sequence
  ENSG00000185658_130 (sequence is synthesized)
attagttgtagttccagaataagaacaaaaattcagagttgtgtggtgcccatcattgagtaaatgaaccctaaaaatgaataagctaatgaactagttcatggaattatttctgatggt

SEQ ID NO: 671663 - DNA, 120 bp, Artificial Sequence
  ENSG00000185658_131 (sequence is synthesized)
cttttgacctgatgctgccatactgcagtgttaccagctccccctagaaaacggaactgtttaaaaacacagcaagttacagaaaccattttattctacagccattggggtacttcagtt

SEQ ID NO: 671664 - DNA, 120 bp, Artificial Sequence
  ENSG00000185658_132 (sequence is synthesized)
tatgggatgtttttggaaacttctgctttgggagggatgaagatcattgataaatgttatttgctttctgagttttggggtcatttcattgcttatcaatgaagggcagacagaggagag

SEQ ID NO: 671665 - DNA, 120 bp, Artificial Sequence
  ENSG00000185658_133 (sequence is synthesized)
aatatctcaagtcttttctgataaaaggcttgcttgagggagcttataacttgcacctagagggtttacccactttgtggatttgatttatccaccaaccacagcaaccaataatgtcaa

SEQ ID NO: 671666 - DNA, 120 bp, Artificial Sequence
  ENSG00000185658_134 (sequence is synthesized)
gattctaggagtttatgaaagaggctagtatgttttcattttgagtcagacattcttttctcattctcaaatctgttttaaatgctccaattttaaaaatgccaatgaaaattttataat

SEQ ID NO: 671667 - DNA, 120 bp, Artificial Sequence
  ENSG00000185658_135 (sequence is synthesized)
gcttctgtagtaaccatatgcagtttactttgaatttaggaaaacagttttgtatgatgaaatattgtgcagaatctgtaaataaggtagcttaaaaattaaaaaaaagtctaattagaa

SEQ ID NO: 671668 - DNA, 120 bp, Artificial Sequence
  ENSG00000185658_136 (sequence is synthesized)
caccgccccccgcccccgccccttcccctcgcggggaccccggcccgtggggtgcaaagtgtgacccgcactggggggcggcccggggatagctgcgttcccggctgaagattttgtttt

SEQ ID NO: 671669 - DNA, 120 bp, Artificial Sequence
  ENSG00000185658_137 (sequence is synthesized)
gtttttgaggcggccaggtttgttttggcaggaaacagtcattgggggcggcgcggggcggagcggtgggggcgactcgcggaggtcctgcggcaggggtggggctccaggtgcggccgc

SEQ ID NO: 671670 - DNA, 120 bp, Artificial Sequence
  ENSG00000185658_138 (sequence is synthesized)
aaaagcgtatacaccaaacaaaagatcaaaggtaattttttatgtggtttattgaaaaaaactgcctgatctgtgtagataattttccaatgtaatagtaattttttccagtgtaatttt

SEQ ID NO: 671671 - DNA, 120 bp, Artificial Sequence
  ENSG00000185658_139 (sequence is synthesized)
ccactgtgtaatagaggttagaacattaaagataagtgaataaattaagactattataaagaaaagagcttctgctactgctcatatagcttcagtttttgcctttcatcagttgatgtt

SEQ ID NO: 671672 - DNA, 120 bp, Artificial Sequence
  ENSG00000185658_140 (sequence is synthesized)
acttcttcacatttttttcttagttttttttttttaaacatctattaaatgaccacttggttgctaagaacttttattagctacatggtaaatgacttctggtgtttatttcattaggtt

SEQ ID NO: 671673 - DNA, 120 bp, Artificial Sequence
  ENSG00000185658_141 (sequence is synthesized)
caatttatgatgtttattttgttagccttgttcttccagtcctccagtctgcctttctctgatttctggtagtaatcagtgatataagagatggctggtaaaagggaggcttgaggtgtc

SEQ ID NO: 671674 - DNA, 120 bp, Artificial Sequence
  ENSG00000185658_142 (sequence is synthesized)
agagaggccagatcgtgtggacttggccttttcctctgggtctgatgggagcctctggaggattttgagagaggaaggacaagtccgtctttagtttgtttttttttttttcttgagatg

SEQ ID NO: 671675 - DNA, 120 bp, Artificial Sequence
  ENSG00000185658_143 (sequence is synthesized)
attacaggcatgagccactacgcctggccctgtcttaagttttaacaggatccctccagctgcctgagaatacacagaaataggatgaaggtagaagcagtaagacataagaggttgtgg

SEQ ID NO: 671676 - DNA, 120 bp, Artificial Sequence
  ENSG00000185658_144 (sequence is synthesized)
tgctacgtacagcaaaaggtaccttaatttgaagaagtgttctgctttgtattaatagcctaataattattataattgtgaagtaatgtaagcattgtggaagaaaggtgataatgtaac

SEQ ID NO: 671677 - DNA, 120 bp, Artificial Sequence
  ENSG00000185658_145 (sequence is synthesized)
tataaatcatgctgtggactataaaattctctgcatttagcatagaacattgaattttattacataagtgtttaatgggtccttctgcattaaaaagttgataaagatatagatgttaag

SEQ ID NO: 671678 - DNA, 120 bp, Artificial Sequence
  ENSG00000185658_146 (sequence is synthesized)
ctaaaaagcttgaatttattctgagatgttgtttgaggttttatcaatgtgagttcttaattttccattttgtagctcactcataacttcattgaatgtaattgtatgtgtctaataaac

SEQ ID NO: 671679 - DNA, 120 bp, Artificial Sequence
  ENSG00000185658_147 (sequence is synthesized)
tgcatggttctttttttactaatttaatttttttgccaagttatgtgctagcaaaatgtttgaaattgctattctttttctgttagcttggtatatatgacttagactaagtatatgtat

SEQ ID NO: 671680 - DNA, 120 bp, Artificial Sequence
  ENSG00000185658_148 (sequence is synthesized)
gtgatataatatatgtgtacatgtggctaaactgctaatgggcaaagattgttggttcttctgatgctgagtatacatcaagttcatcccatgattattttttattacgagctattgctg

SEQ ID NO: 671681 - DNA, 120 bp, Artificial Sequence
  ENSG00000185658_149 (sequence is synthesized)
ttagttgtttcttagtgctctagccatgtcaccctgtggcactaatcaggacactgtttatattcttcctcttctgtgtccctattcactttgtaattattctattttagctggttatat

SEQ ID NO: 671682 - DNA, 120 bp, Artificial Sequence
  ENSG00000185658_150 (sequence is synthesized)
ggtagttaattggtagcctgttttcctttgttttctttacttgtgtcaagctccatgtcgttgttttgtgatgagcagtgatttagaactggccagaccttagaagagtcttcagcaagc

SEQ ID NO: 671683 - DNA, 120 bp, Artificial Sequence
  ENSG00000185658_151 (sequence is synthesized)
tgccctagggtaggggcgtattctctgtttgttttgtactggtaccccaggaggatgccttgtaactgctctttggtcatgatagtggtaatgaatccattcatgtaaaatgcaatatgt

SEQ ID NO: 671684 - DNA, 120 bp, Artificial Sequence
  ENSG00000185658_152 (sequence is synthesized)
ctgttagtttggggcacccgaggctcagtagaggtttagtatgatgccttccctttcttctttgagttatgaagaaactaatttctggcacagtgtgactgcttcaaacctatgttctgc

SEQ ID NO: 671685 - DNA, 120 bp, Artificial Sequence
  ENSG00000185658_153 (sequence is synthesized)
tgctatctcctatagaggagggcagacttttttttcttagtgcatttgctggtaggtcaaggagggatggactttgaattagtgttcagagtcacagatcctacgtatgtgctcttcagt

SEQ ID NO: 671686 - DNA, 120 bp, Artificial Sequence
  ENSG00000185658_154 (sequence is synthesized)
agaggattttctgtgatcctacaatgaagggaaagctatataatttattggtacttcctaaagatagagactaaagtcatggtagtattggccaaattaattttaaaactgaacaagtca

SEQ ID NO: 671687 - DNA, 120 bp, Artificial Sequence
  ENSG00000185658_155 (sequence is synthesized)
tgaattttcatataaatcaaagaactttttccttataaaagcttccatttttgaaaagttggatcagttgtaagacctttcatctttagtattgtatgatataattctacattgaaaaat

SEQ ID NO: 671688 - DNA, 120 bp, Artificial Sequence
  ENSG00000185658_156 (sequence is synthesized)
aaacacttggcattaaatgggacttggagtcaaaagatctggttttatggtccatcttttaccaatcatttgctgtggatctctttaaaggtcctggaacctttgagcctcagttacctc

SEQ ID NO: 671689 - DNA, 120 bp, Artificial Sequence
  ENSG00000185658_157 (sequence is synthesized)
acttgtaaattggcaaaaatacctacctcacagggttgttgtgaggattcaatgagctaatgtatgttgaaagcactttgtgaattgtaaagtgctacacaaatgttagttgttgttgct

SEQ ID NO: 671690 - DNA, 120 bp, Artificial Sequence
  ENSG00000185658_158 (sequence is synthesized)
gctgtatctgagatgtcttaattttctttttcttcagaaatagtctaataaacctccagggcttttctgttaaagtatactagttggtaaaatgttgaataaacagtttattacaatata

SEQ ID NO: 671691 - DNA, 120 bp, Artificial Sequence
  ENSG00000185662_0 (sequence is synthesized)
gaggccatggcaacccagcaagtggacagcagaaggcaggtggcagcagagcaggtggcagcccagctgcttgaacggagaaggggcagccactgtgatgacgagaagcagacgctgttg

SEQ ID NO: 671692 - DNA, 120 bp, Artificial Sequence
  ENSG00000185662_1 (sequence is synthesized)
gcattgctgatcttggtgctgtacttgagcacagagatatggggaagcagttgggaggtgtcagaaaggatcagagaatgtaactactaccagaatcttgcagttccccaggggcttgaa

SEQ ID NO: 671693 - DNA, 120 bp, Artificial Sequence
  ENSG00000185662_2 (sequence is synthesized)
gaggtgcagcagctggagcagctagcgtgggacctggaactgtggctggatgctcttctgggagagccacaccaggaggagcactgctccacatataaaagtcacttgtgggagtgggcc

SEQ ID NO: 671694 - DNA, 120 bp, Artificial Sequence
  ENSG00000185662_3 (sequence is synthesized)
tgggccctggggagagagcacaaaggtggggaggggttgctagagatttctctaagcggggcagagctctgactcttgaagttccagtcaggcaagaaaataaagtagttgggaaatgaa

SEQ ID NO: 671695 - DNA, 120 bp, Artificial Sequence
  ENSG00000185662_4 (sequence is synthesized)
ctttcttgagacgttgtgtaaatttccttaacctgagactcagtttcctcacatataaaaatcggggaaacacactttgccttataggaagacaatgtatgtagggtgtgtatacagagt

SEQ ID NO: 671696 - DNA, 120 bp, Artificial Sequence
  ENSG00000185662_5 (sequence is synthesized)
gcgtctggcacagagcaggaggttgggaccagaatctattttttcacatttccagctatttcaccaagagttctacgggaaaggcacctggagcatgaggtcagcatcagagatcattgg

SEQ ID NO: 671697 - DNA, 120 bp, Artificial Sequence
  ENSG00000185662_6 (sequence is synthesized)
ctggggcctcctgtgccaagccaggctctacacggcagcctgcctttgggatgaccttggggcacctggagcatgaggtcagcatcagagatcattaaaaatgtttaattaattttaatt

SEQ ID NO: 671698 - DNA, 120 bp, Artificial Sequence
  ENSG00000185662_7 (sequence is synthesized)
ggtggccatctcccccatctctcttttacttcatgggcatattgggcaaccttcctcatactccctcaggtgtataatgaggagaaaaaagccacaaccattcaggttattcatgtttta

SEQ ID NO: 671699 - DNA, 120 bp, Artificial Sequence
  ENSG00000185662_8 (sequence is synthesized)
aagataagaatctgatactctagacaaaaactggatgtggtaaagactacctgtgtgtctgcatgtgtatttcttaagaacataaggcttatttggaagaaataataaaatcgtgatagc

SEQ ID NO: 671700 - DNA, 120 bp, Artificial Sequence
  ENSG00000185662_9 (sequence is synthesized)
ggagagtaacgttcccaacagaaactaacagtgccggccttgccgggcagttaggagaattagatgaaataacgtgtggaagggacttaccctgggtcaggcgcacagtaggtacttcgt

SEQ ID NO: 671701 - DNA, 120 bp, Artificial Sequence
  ENSG00000185662_10 (sequence is synthesized)
tcatgacacccactaattccgatacccttccctagccaccccggacctcggcttcttcaaaacgtaaaaatcataccacctgctttactcattcggcaaatatttactgagccaagtact

SEQ ID NO: 671702 - DNA, 120 bp, Artificial Sequence
  ENSG00000185664_0 (sequence is synthesized)
tcaacgtcagagccggggggcgagcccagcgctcctccccgcaaatgatcccgccccaggggcctatcccagtccccccagtgcctttggttgctggagggaagaacacaatggatctgg

SEQ ID NO: 671703 - DNA, 120 bp, Artificial Sequence
  ENSG00000185664_1 (sequence is synthesized)
tgctaaaaagatgccttcttcatttggctgtgataggtgctttgctggctgtgggggctacaaaagtacccagaaaccaggactggcttggtgtctcaaggcaactcagaaccaaagcct

SEQ ID NO: 671704 - DNA, 120 bp, Artificial Sequence
  ENSG00000185664_2 (sequence is synthesized)
ggaacaggcagctgtatccagagtggacagaagcccagagacttgactgctggagaggtggtcaagtgtccctcaaggtcagtaatgatgggcctacactgattggtgcaaatgcctcct

SEQ ID NO: 671705 - DNA, 120 bp, Artificial Sequence
  ENSG00000185664_3 (sequence is synthesized)
tctctattgccttgaacttccctggaagccaaaaggtattgccagatgggcaggttatctgggtcaacaataccatcatcaatgggagccaggtgtggggaggacagccagtgtatcccc

SEQ ID NO: 671706 - DNA, 120 bp, Artificial Sequence
  ENSG00000185664_4 (sequence is synthesized)
aggaaactgacgatgcctgcatcttccctgatggtggaccttgcccatctggctcttggtctcagaagagaagctttgtttatgtctggaagacctggggccaatactggcaagttctag

SEQ ID NO: 671707 - DNA, 120 bp, Artificial Sequence
  ENSG00000185664_5 (sequence is synthesized)
ggggcccagtgtctgggctgagcattgggacaggcagggcaatgctgggcacacacaccatggaagtgactgtctaccatcgccggggatcccggagctatgtgcctcttgctcattcca

SEQ ID NO: 671708 - DNA, 120 bp, Artificial Sequence
  ENSG00000185664_6 (sequence is synthesized)
gctcagccttcaccattactgaccaggtgcctttctccgtgagcgtgtcccagttgcgggccttggatggagggaacaagcacttcctgagaaatcagcctctgacctttgccctccagc

SEQ ID NO: 671709 - DNA, 120 bp, Artificial Sequence
  ENSG00000185664_7 (sequence is synthesized)
tccatgaccccagtggctatctggctgaagctgacctctcctacacctgggactttggagacagtagtggaaccctgatctctcgggcacttgtggtcactcatacttacctggagcctg

SEQ ID NO: 671710 - DNA, 120 bp, Artificial Sequence
  ENSG00000185664_8 (sequence is synthesized)
gcccagtcactgcccaggtggtcctgcaggctgccattcctctcacctcctgtggctcctccccagttccaggcaccacagatgggcacaggccaactgcagaggcccctaacaccacag

SEQ ID NO: 671711 - DNA, 120 bp, Artificial Sequence
  ENSG00000185664_9 (sequence is synthesized)
caggcgccaactgcagagccctctggaaccacatctgtgcaggtgccaaccactgaagtcataagcactgcacctgtgcagatgccaactgcagagagcacaggtatgacacctgagaag

SEQ ID NO: 671712 - DNA, 120 bp, Artificial Sequence
  ENSG00000185664_10 (sequence is synthesized)
gtgccagtttcagaggtcatgggtaccacactggcagagatgtcaactccagaggctacaggtatgacacctgcagaggtatcaattgtggtgctttctggaaccacagctgcacaggta

SEQ ID NO: 671713 - DNA, 120 bp, Artificial Sequence
  ENSG00000185664_11 (sequence is synthesized)
acaactacagagtgggtggagaccacagctagagagctacctatccctgagcctgaaggtccagatgccagctcaatcatgtctacggaaagtattacaggttccctgggccccctgctg

SEQ ID NO: 671714 - DNA, 120 bp, Artificial Sequence
  ENSG00000185664_12 (sequence is synthesized)
gatggtacagccaccttaaggctggtgaagagacaagtccccctggattgtgttctgtatcgatatggttccttttccgtcaccctggacattgtccagggtattgaaagtgccgagatc

SEQ ID NO: 671715 - DNA, 120 bp, Artificial Sequence
  ENSG00000185664_13 (sequence is synthesized)
ctgcaggctgtgccgtccggtgagggggatgcatttgagctgactgtgtcctgccaaggcgggctgcccaaggaagcctgcatggagatctcatcgccagggtgccagccccctgcccag

SEQ ID NO: 671716 - DNA, 120 bp, Artificial Sequence
  ENSG00000185664_14 (sequence is synthesized)
cggctgtgccagcctgtgctacccagcccagcctgccagctggttctgcaccagatactgaagggtggctcggggacatactgcctcaatgtgtctctggctgataccaacagcctggca

SEQ ID NO: 671717 - DNA, 120 bp, Artificial Sequence
  ENSG00000185664_15 (sequence is synthesized)
gtggtcagcacccagcttatcatgcctggtcaagaagcaggccttgggcaggttccgctgatcgtgggcatcttgctggtgttgatggctgtggtccttgcatctctgatatataggcgc

SEQ ID NO: 671718 - DNA, 120 bp, Artificial Sequence
  ENSG00000185664_16 (sequence is synthesized)
agacttatgaagcaagacttctccgtaccccagttgccacatagcagcagtcactggctgcgtctaccccgcatcttctgctcttgtcccattggtgagaacagccccctcctcagtggg

SEQ ID NO: 671719 - DNA, 120 bp, Artificial Sequence
  ENSG00000185664_17 (sequence is synthesized)
cagcaggtctgagtactctcatatgatgctgtgattttcctggagttgacagaaacacctatatttcccccagtcttccctgggagactactattaactgaaataaatactcagagcctg

SEQ ID NO: 671720 - DNA, 120 bp, Artificial Sequence
  ENSG00000185664_18 (sequence is synthesized)
agtttggttcttgggggctagacaagtttcttccccggtggggcggctgaacactcttcccaagtacctgctttgggtccaagtttcctacctatgtctctagtctgtagggatttcttg

SEQ ID NO: 671721 - DNA, 120 bp, Artificial Sequence
  ENSG00000185664_19 (sequence is synthesized)
atttctaactcactattttcaccaatcctggggaaaatatgtatcgacctaaggttaaattccacctggcccaggagcctcctttggaaaccaggaagccgggaatctcgttgcaaagga

SEQ ID NO: 671722 - DNA, 120 bp, Artificial Sequence
  ENSG00000185664_20 (sequence is synthesized)
atcctgggcctcagaggagtcgttgcctctgcctcatagcataccccgacactgtctctgttttgggatgcagggttctgtttctgtctttttgagaagttcctggtttaattcactctc

SEQ ID NO: 671723 - DNA, 120 bp, Artificial Sequence
  ENSG00000185664_21 (sequence is synthesized)
ccatgataaactgttgtgtctggtatgtgttacgcagctgcctttcagttagctcttgcccgggagtgcatcaagatgagagtgacccagtgaaaccagaaactgtcattgagtagcagg

SEQ ID NO: 671724 - DNA, 120 bp, Artificial Sequence
  ENSG00000185664_22 (sequence is synthesized)
atgggaaagcaatgtctagggaccaggatccctttgtcagtttttcctttttcctctcctccggcccctcccaggccttctctgagggagaagaggaagggctatgcaaatgagcaccct

SEQ ID NO: 671725 - DNA, 120 bp, Artificial Sequence
  ENSG00000185664_23 (sequence is synthesized)
agtgcctttggttgctggagggaagaacacaatggatctggtgctaaaaagatgccttcttcatttggctgtgataggtgctttgctggctgtgggggctacaaaagggagccaggtgtg

SEQ ID NO: 671726 - DNA, 120 bp, Artificial Sequence
  ENSG00000185664_24 (sequence is synthesized)
gaaacagtgatgcttaaatgagttaacacacgttgaatgtctagcctaggacctgacatagtgtggggtgtgataaacatttgaggattttttaaaactccaatgccacccctaactgtg

SEQ ID NO: 671727 - DNA, 120 bp, Artificial Sequence
  ENSG00000185664_25 (sequence is synthesized)
actctggaggagtcattttcttcttctgggcctcagtttccttatctatagaataaggtttcccaggtcttatctgattccaagcctgtgactccagaatccagtaactctggttcaacc

SEQ ID NO: 671728 - DNA, 120 bp, Artificial Sequence
  ENSG00000185664_26 (sequence is synthesized)
tatgtctggaagacctggggtgagggactcccttctcagcctatcatccacacttgtgtttacttctttctacctgatcacctttcttttggccgccccttccaccttaacttctgtgat

SEQ ID NO: 671729 - DNA, 120 bp, Artificial Sequence
  ENSG00000185664_27 (sequence is synthesized)
tttctctaatcttcattttcctcttagatcttttctctttcttagcacctagcccccttcaactctatcataattctttctggcaactcttcctcaattgtagtcctaccccatggaatg

SEQ ID NO: 671730 - DNA, 120 bp, Artificial Sequence
  ENSG00000185664_28 (sequence is synthesized)
gagggaagaacacaatggatctggtgctaaaaagatgccttcttcatttggctgtgataggtgctttgctggctgtgggggctacaaaaggtggtcaagtgtccctcaaggtcagtaatg

SEQ ID NO: 671731 - DNA, 120 bp, Artificial Sequence
  ENSG00000185664_29 (sequence is synthesized)
aagtttggttcttgggggctagacaagtttcttccccggtggggcggctgaacactcttcccaagggcctatcccagtccccccagtgcctttggttgctggagggaagaacacaatgga

SEQ ID NO: 671732 - DNA, 120 bp, Artificial Sequence
  ENSG00000185664_30 (sequence is synthesized)
atggtgagtacttctctattctaggtccttattcctagggctcaggttccctggtatgcccagtgagctcagggaatgccccttccttctctacttttttttttttttcttttttgagac

SEQ ID NO: 671733 - DNA, 120 bp, Artificial Sequence
  ENSG00000185664_31 (sequence is synthesized)
ggaaaacttttctgtctgtgatatgaaacagaaaggaaaaacggcgggcttactgggaaatgcagtgtcgaaagagttggctggccaagactagaagagtccgaaagatccggaagagct

SEQ ID NO: 671734 - DNA, 120 bp, Artificial Sequence
  ENSG00000185664_32 (sequence is synthesized)
ggtcaatctcagaatctccagggaatagggcccggcgagtcacctgaaaatggggaaagaggaaataccaagacccacgttgacgtcagtcaaaactctcctctatacaaaggagttccc

SEQ ID NO: 671735 - DNA, 120 bp, Artificial Sequence
  ENSG00000185666_0 (sequence is synthesized)
gctcccgggacccggagcggatcgactggcgggcgccgcgccgaggcaccaccgggcgccgagttcctggcggctcgcacgcaggtaaataaaggcagctaaagctgactgctggttgcg

SEQ ID NO: 671736 - DNA, 120 bp, Artificial Sequence
  ENSG00000185666_1 (sequence is synthesized)
caaaatccccctggctcttctggctaaagtcctaccactccctgtacctggcagcagcctgtcttctgggcctcacctacacacgtctgggtaggagccagtcatctccatccatccaca

SEQ ID NO: 671737 - DNA, 120 bp, Artificial Sequence
  ENSG00000185666_2 (sequence is synthesized)
gccatgaatttcctccggcgacgtctctctgacagcagcttcatggccaacctgcctaatggctatatgacggacctgcaacgcccagatagctccaccagctcacctgcttcccccgcc

SEQ ID NO: 671738 - DNA, 120 bp, Artificial Sequence
  ENSG00000185666_3 (sequence is synthesized)
atggagaggaggcacccccagcccctggctgcctccttctcctctccaggatccagcctttttagctccctctccagtgccatgaagcaggcccctcaggccacctcaggactgatggag

SEQ ID NO: 671739 - DNA, 120 bp, Artificial Sequence
  ENSG00000185666_4 (sequence is synthesized)
cctccaggtccctccacgcccattgttcaaagacccaggatcctgttggtgatcgatgatgcccatacagactggtcgaagtatttccatgggaagaaggtgaatggagagattgagatc

SEQ ID NO: 671740 - DNA, 120 bp, Artificial Sequence
  ENSG00000185666_5 (sequence is synthesized)
cgagtggagcaggctgaattctcagagttgaacctagctgcctatgtgaccgggggctgcatggtggacatgcaggtcgtgagaaatgggaccaaagtggtgagcagatccttcaagcca

SEQ ID NO: 671741 - DNA, 120 bp, Artificial Sequence
  ENSG00000185666_6 (sequence is synthesized)
gacttcatcctggtccgccagcatgcctacagcatggccctgggggaagactaccgcagcctggtcatcggcctgcagtatggagggctgcctgctgtcaactctctctactccgtctac

SEQ ID NO: 671742 - DNA, 120 bp, Artificial Sequence
  ENSG00000185666_7 (sequence is synthesized)
aacttctgcagcaagccctgggtgttctctcagctcattaagatcttccattccctgggtcctgagaagttcccgcttgtggagcaaacatttttccccaaccataagccaatggtcaca

SEQ ID NO: 671743 - DNA, 120 bp, Artificial Sequence
  ENSG00000185666_8 (sequence is synthesized)
gccccacacttcccggtggtagtcaagctgggacatgcccacgctggaatgggaaagatcaaagtggaaaaccagcttgacttccaggacatcaccagcgtggtcgccatggccaaaacc

SEQ ID NO: 671744 - DNA, 120 bp, Artificial Sequence
  ENSG00000185666_9 (sequence is synthesized)
tacgccaccaccgaggccttcatcgactccaagtacgacatccgcatccagaaaattggatccaactacaaggcttacatgagaacctccatctctgggaactggaaggccaacacaggc

SEQ ID NO: 671745 - DNA, 120 bp, Artificial Sequence
  ENSG00000185666_10 (sequence is synthesized)
tctgccatgctggagcaggtggccatgacagagaggtacaggctgtgggtggacagctgctcggaaatgtttggcggcctggacatctgtgccgtcaaggctgtccacagcaaggatggc

SEQ ID NO: 671746 - DNA, 120 bp, Artificial Sequence
  ENSG00000185666_11 (sequence is synthesized)
agagattacatcatcgaggtaatggacagctcaatgccgctgattggagagcatgtggaagaggacagacagctgatggccgaccttgttgtctccaaaatgagccagctcccgatgcca

SEQ ID NO: 671747 - DNA, 120 bp, Artificial Sequence
  ENSG00000185666_12 (sequence is synthesized)
ggaggcacagcgccctcccccctcagaccttgggctccacagattaaatcagcgaaatccccagggcaagcccagctggggcctcagctaggccagccccagccacgcccacctccgcaa

SEQ ID NO: 671748 - DNA, 120 bp, Artificial Sequence
  ENSG00000185666_13 (sequence is synthesized)
cctcgccaagctcagtctcctcagccccagagatctggaagcccctcccaacagaggctctccccacaaggccagcagcccctgagcccccagtccggatctccacagcagcaaaggtca

SEQ ID NO: 671749 - DNA, 120 bp, Artificial Sequence
  ENSG00000185666_14 (sequence is synthesized)
ccaggctctccgcagctatcccgggcatccagtggcagctccccaaaccaggcctccaagccaggtgccaccctcgcctcacagccccggccccctgtgcagggccgtagtacctcccag

SEQ ID NO: 671750 - DNA, 120 bp, Artificial Sequence
  ENSG00000185666_15 (sequence is synthesized)
cagggtgaagagtccaagaagccagcaccaccccatccgcatctcaacaaatctcagtccctgactaacagcctcagcacatccgacacctcccagcgtgggaccccaagtgaagacgag

SEQ ID NO: 671751 - DNA, 120 bp, Artificial Sequence
  ENSG00000185666_16 (sequence is synthesized)
gccaaggctgaaaccatccgcaacctgaggaagtcttttgccagcctgttctctgactaacgccatccaggctgggaggggaagagtgctctgctacactcgtccccctcctgcctcatc

SEQ ID NO: 671752 - DNA, 120 bp, Artificial Sequence
  ENSG00000185666_17 (sequence is synthesized)
ttccttctcagccttggttcctgatgggaacagaatggagggcctgagaacatactttctaaatgcctttgacccaggaaccgattatctatatttgttcccattttccttcaccgtgac

SEQ ID NO: 671753 - DNA, 120 bp, Artificial Sequence
  ENSG00000185666_18 (sequence is synthesized)
attccagcattgtctgactgtgaggtgggcctttgagagcctccaggttcctcaaaacaggcctgagcgatgggcatcacaccctctgcctacccacgtgcctgcttacctgccagataa

SEQ ID NO: 671754 - DNA, 120 bp, Artificial Sequence
  ENSG00000185666_19 (sequence is synthesized)
ccaagtgagatgtctgcgagtggctagttttcacattcttactagtgtttggctcacctttgggcaaaggccccctctaggccttgccccacctccatcaaacgcagacactgtagtcag

SEQ ID NO: 671755 - DNA, 120 bp, Artificial Sequence
  ENSG00000185666_20 (sequence is synthesized)
acctcagcaatataggaggcaataatcttttaacagtgttttgcaaacaaacaaaaagagaaaaatcccagccaggggaactcgccacctgcccacgctagttccatccacgctcaagac

SEQ ID NO: 671756 - DNA, 120 bp, Artificial Sequence
  ENSG00000185666_21 (sequence is synthesized)
ccgcccttagaccaggcaggcaaaggcccccatcacactcggccactagtggggtcctgaggccaagaaagaaaccagaccctgtatgacaagtggggtctttcagaacacgacagaaac

SEQ ID NO: 671757 - DNA, 120 bp, Artificial Sequence
  ENSG00000185666_22 (sequence is synthesized)
aggggggcccttgtaatgccactcatactcagagcattattcttatttggacagccaagggcagatcacaggttattgtaggaataaagactagtttacaaaggagaaagaggccctgga

SEQ ID NO: 671758 - DNA, 120 bp, Artificial Sequence
  ENSG00000185666_23 (sequence is synthesized)
cttcccaaggaaagggtcaggttagggctcctgtacccattctgttccaccactgtttgatctctctggcctcccaccaggaatgccgtttcctttttatggatctgttgggaaccagag

SEQ ID NO: 671759 - DNA, 120 bp, Artificial Sequence
  ENSG00000185666_24 (sequence is synthesized)
agaatcaacagatcaatgacataggatccgaagtgcaatgatagtcacttctagtttggcatttcacaaactctgtacagcaaggtattggtaggttactcaatttcaaaagggccccat

SEQ ID NO: 671760 - DNA, 120 bp, Artificial Sequence
  ENSG00000185666_25 (sequence is synthesized)
ggccaaatatgtttaggaaccgctgtttgtatttctttttttggagacgcattgtatataatatatgtcaaaggctttcggaattcctgcaggaaagaaatcagctttgttaaatccaaa

SEQ ID NO: 671761 - DNA, 120 bp, Artificial Sequence
  ENSG00000185666_26 (sequence is synthesized)
agccagcaccaccccatccgcatctcaagtctgttgcctcccctcctatgactgagcctcctgaggcagggcctgaatcatattcgtcttacacccctgtcccctagcacaggggaagtg

SEQ ID NO: 671762 - DNA, 120 bp, Artificial Sequence
  ENSG00000185666_27 (sequence is synthesized)
ctcagcaagcagttgctacaggctggcatttaggaagcactcagaatggcatctgccattcaaaaagatggcactaaaagaattccaaaagcgggtgggggacagaattagccataaaga

SEQ ID NO: 671763 - DNA, 120 bp, Artificial Sequence
  ENSG00000185666_28 (sequence is synthesized)
ggattacaggcgtgagccaccctgtccggcgggaatgtaaattaatacggccattatggaaaacggcatggaggttcctcagaaaactaaaaatagaactaccatatgatccagcaggct

SEQ ID NO: 671764 - DNA, 120 bp, Artificial Sequence
  ENSG00000185666_29 (sequence is synthesized)
cttgattgttgggggccttggaattctactcaaagtcatttctgggtggctacaacatccccaagcttagatgcctcttggcttgcttgtggaagcctgtgtgccctgtacggtgagagg

SEQ ID NO: 671765 - DNA, 120 bp, Artificial Sequence
  ENSG00000185666_30 (sequence is synthesized)
gagaaaccaagattctctttgagctttctgtggctcctcttccaactgggaaaccttaataagactcagtctccacctctatgtggtgagaagaatggtatcttccctactgacctctct

SEQ ID NO: 671766 - DNA, 120 bp, Artificial Sequence
  ENSG00000185666_31 (sequence is synthesized)
ctggccctgatcatccagctctgttcccctccagggtacatgctcttaaccaccccactatgtggcctctcccagtcaagggcaccatcaggattcaaagagctttgaaggaggtgactt

SEQ ID NO: 671767 - DNA, 120 bp, Artificial Sequence
  ENSG00000185666_32 (sequence is synthesized)
atactgggagctggacgagaaggaagattgcaaagaggctcccaggggatggctctggcaaaatacaaagaaaaaagtttataaagcgtttaaataaacctgtgaaagacaagaaagata

SEQ ID NO: 671768 - DNA, 120 bp, Artificial Sequence
  ENSG00000185666_33 (sequence is synthesized)
gtacactgaccacgcagactctaaggcggagtcacagtgtcctgtgggagtgcctggatttcctaagggaagtcgtctctccaggtgaaattcaggcaatagggcaaataacaaaggtga

SEQ ID NO: 671769 - DNA, 120 bp, Artificial Sequence
  ENSG00000185666_34 (sequence is synthesized)
accacattccttggaacttggagattttcagcaaatcaggggacacgttctgggggcatgttagaaccagaggctgattataaaggtaaaagatgttttcaaggtgggatgttgttttac

SEQ ID NO: 671770 - DNA, 120 bp, Artificial Sequence
  ENSG00000185666_35 (sequence is synthesized)
ttgggtttgggaggtcaggtttgtcatgccatttccgatttccagtcatcctgggggcaggatgaaatttcagagtggtttcctggccaagctagaagcagagaatagctatggatacag

SEQ ID NO: 671771 - DNA, 120 bp, Artificial Sequence
  ENSG00000185666_36 (sequence is synthesized)
cacctcgtgtatctatccagcacttacttggctttttctgagtgccaggaactgtgccaagccctagcagcatgaagaatggcctttggggagcttctggggctaagagggacagtagga

SEQ ID NO: 671772 - DNA, 120 bp, Artificial Sequence
  ENSG00000185666_37 (sequence is synthesized)
ggagcaattgcagtgcagggtagtgcggaagactcgagatggagaagaggacggtgaggaagccaggaaggtttcagagaggagcaggtaaataaaggcagctaaagctgactgctggtt

SEQ ID NO: 671773 - DNA, 120 bp, Artificial Sequence
  ENSG00000185666_38 (sequence is synthesized)
gtcttattcctccactaaacaggtgtctgtggagggcacacctgcttagcaggacacggggcccattcctaaccttgggggctcccagtctggtggtggagacatagtaagcaaggggtg

SEQ ID NO: 671774 - DNA, 120 bp, Artificial Sequence
  ENSG00000185666_39 (sequence is synthesized)
acctgtgcttttgttcctggaaacttaggttgagcctttcccctgctctctgcctgaaaacatcctccttgtcacagtctggaggccctggcaatgcagtttcagaaggctgaattctca

SEQ ID NO: 671775 - DNA, 120 bp, Artificial Sequence
  ENSG00000185666_40 (sequence is synthesized)
gagttgaacctagctgcctatgtgaccgggggctgcatggtggacatgcaggtcgtgagaaatgggaccaaagtggtgaggtaagtaggattaaaatatgcagaaccttctgagaattgc

SEQ ID NO: 671776 - DNA, 120 bp, Artificial Sequence
  ENSG00000185666_41 (sequence is synthesized)
tgaccagcggcacatatcatacgtgcagcacctgtggtgtccccaagtgagccctgggcttggagagaaaagacttgggttccatttctggctttgaggctctgctctggcatattattt

SEQ ID NO: 671777 - DNA, 120 bp, Artificial Sequence
  ENSG00000185666_42 (sequence is synthesized)
agtcccttttgtcctctacttctcatctgcagcatgatgatatgcactgaagttagaggctgctaaagtttacagaaactcacatgtatgacagcaccctgttaactctgaagtgcggta

SEQ ID NO: 671778 - DNA, 80 bp, Artificial Sequence
  ENSG00000185668_0 (sequence is synthesized)
ggcggcatggccaccaccgcgcagtacctgccgcggggccccggtggcggagccgggggcaccgggccgcttatgcaccc

SEQ ID NO: 671779 - DNA, 120 bp, Artificial Sequence
  ENSG00000185668_1 (sequence is synthesized)
gcttatgcacccggacgccgcggcggcggcggcggcggcggcggccgcggagcgattgcatgcaggggccgcgtaccgcgaagtgcagaagctgatgcaccacgagtggctgggcgcggg

SEQ ID NO: 671780 - DNA, 120 bp, Artificial Sequence
  ENSG00000185668_2 (sequence is synthesized)
cacgagtggctgggcgcgggcgcgggccaccccgtgggcctagcgcacccccagtggctacccacgggaggaggcggcggcggcgattgggccggcggcccgcacctagaacacggcaag

SEQ ID NO: 671781 - DNA, 80 bp, Artificial Sequence
  ENSG00000185668_3 (sequence is synthesized)
gcaccagggggcggcccacgcgggcgcggcatgggcgcagggcagcacagcgcaccacttgggcccggccatgtcgccct

SEQ ID NO: 671782 - DNA, 80 bp, Artificial Sequence
  ENSG00000185668_4 (sequence is synthesized)
ccatgtcgccctcgcccggggccagcgggggccaccagccccagccgctcgggctgtacgcgcaggcggcctacccgggg

SEQ ID NO: 671783 - DNA, 120 bp, Artificial Sequence
  ENSG00000185668_5 (sequence is synthesized)
ggccgggcctgcaccacgcgctgcacgaggatggccacgaggcgcagctggagccgtcgccgccgccgcatctgggcgcccacggacacgcacacggacatgcacacgcgggcggcctgc

SEQ ID NO: 671784 - DNA, 120 bp, Artificial Sequence
  ENSG00000185668_6 (sequence is synthesized)
acgcggcggcggcgcacctgcacccgggcgcgggcggcggcggctcatcggtgggcgagcactcggacgaggatgcgcccagctcggacgacctggagcagttcgccaagcagttcaagc

SEQ ID NO: 671785 - DNA, 120 bp, Artificial Sequence
  ENSG00000185668_7 (sequence is synthesized)
agcggcgcatcaagctgggctttacgcaggccgacgtggggctggcgctgggcacgctctacggtaacgtgttctcgcagaccaccatctgccgcttcgaggccctgcagctgagcttca

SEQ ID NO: 671786 - DNA, 120 bp, Artificial Sequence
  ENSG00000185668_8 (sequence is synthesized)
agaacatgtgcaagctcaagccgctgctcaacaagtggctggaggagaccgactcgtccagcggcagccccaccaacctggacaagatcgcggcgcagggccgcaagcgcaagaagcgca

SEQ ID NO: 671787 - DNA, 120 bp, Artificial Sequence
  ENSG00000185668_9 (sequence is synthesized)
cgtccatcgaggtgggggtcaaaggcgcgctcgagagccactttctcaagtgccccaagccctcggcgcacgagatcaccggcttggcagacagcctgcagctggagaaggaggtggtgc

SEQ ID NO: 671788 - DNA, 120 bp, Artificial Sequence
  ENSG00000185668_10 (sequence is synthesized)
gcgtctggttctgcaaccggcggcagaaggagaagcgcatgacccctgcggccggcgcgggccacccgcccatggacgatgtatacgcgcctggggagctagggcctggcgggggcggcg

SEQ ID NO: 671789 - DNA, 120 bp, Artificial Sequence
  ENSG00000185668_11 (sequence is synthesized)
gtatacgcgcctggggagctagggcctggcgggggcggcgcatcgccaccctccgcgcccccaccgcccccgccggcggcgctgcaccaccaccaccaccacacactgcccggctcagtg

SEQ ID NO: 671790 - DNA, 120 bp, Artificial Sequence
  ENSG00000185668_12 (sequence is synthesized)
aactttcgaacaaaaccaaacacccggacgaccctctccggtgagcggcgaagacagcccggtaggctgcgtcgcccgagccccgggagagaggagcgaagatccggaactcgccaactc

SEQ ID NO: 671791 - DNA, 120 bp, Artificial Sequence
  ENSG00000185668_13 (sequence is synthesized)
cgggcatcctgcccgccgcctgctctctgcccccatcccctcgacgacccccgcccctgcccccccgggctgttcggggccggatcccggcagcggcctccccaaagcgacaggtaacgc

SEQ ID NO: 671792 - DNA, 120 bp, Artificial Sequence
  ENSG00000185668_14 (sequence is synthesized)
acgcagtgcggggttagggattccccgggagagaggacgaagcgaggagagttctccatcccctctccccgcgtggactcctgagcctgcgggtccagggtggggggctgtcactttatt

SEQ ID NO: 671793 - DNA, 120 bp, Artificial Sequence
  ENSG00000185668_15 (sequence is synthesized)
cgctacacgcctcttctctcctataaggatgcgccccaccccgctttcccctttctccgggcttggttttttacggtttttatttattcgtggagcctctcggctcctggggtccttcta

SEQ ID NO: 671794 - DNA, 120 bp, Artificial Sequence
  ENSG00000185668_16 (sequence is synthesized)
actccgcccgcgcccttaatttaaatcgcagtatactgtatttatcggggccccggaggggaggtcgcgagagccgcgtctgtgtataaaagcaggaaatagccaaagctttaatctagc

SEQ ID NO: 671795 - DNA, 82 bp, Artificial Sequence
  ENSG00000185668_17 (sequence is synthesized)
tgtgtataaaagcaggaaatagccaaagctttaatctagcctaatttatttttccccttatatttccctaccctaccctccc

SEQ ID NO: 671796 - DNA, 120 bp, Artificial Sequence
  ENSG00000185668_18 (sequence is synthesized)
gccccggcttggttcccggccacgccggaggggtctgcgctcccacacacccagacgggaaggggcttctgccctgctgcagaccgaccgccgcatagcgcggcccctgctccccgcggg

SEQ ID NO: 671797 - DNA, 120 bp, Artificial Sequence
  ENSG00000185668_19 (sequence is synthesized)
gccctgccctcctggccacaccaaacgaaacttggaaaagttagagagattgttttttaaccagctgtagaaataagccgttccctgagaaccctccgcctgattccctgcagcttccct

SEQ ID NO: 671798 - DNA, 120 bp, Artificial Sequence
  ENSG00000185668_20 (sequence is synthesized)
ctgctccctttccagcccgccgggatgcgggatgccaggggaggccgggagagaaattccccaagtttggggtgaggtgggaaccatgtaaatatgtgagatatgtacacactggcgggg

SEQ ID NO: 671799 - DNA, 120 bp, Artificial Sequence
  ENSG00000185668_21 (sequence is synthesized)
agaagaaacattttgtgcttggtttttatttttggttttccgggttacccttccttcctaccctaaaggattttgtacactgactaatccgaaaaagatattttaatatgatttccgaat

SEQ ID NO: 671800 - DNA, 120 bp, Artificial Sequence
  ENSG00000185668_22 (sequence is synthesized)
ttctgacccatctctatttattttctggatgtgtttggagcttcccccttctccgtttcttcttctgtttgttaaggtttgaatttaaattttgttattttatttttattattttttgaa

SEQ ID NO: 671801 - DNA, 120 bp, Artificial Sequence
  ENSG00000185668_23 (sequence is synthesized)
acaatgtttcggtgcattctctttgtatctttattgaaaaaaaaataatgtagactgggaagttccctttatatttatgttatagtaaatattttattactcacataaacatgtacccca

SEQ ID NO: 671802 - DNA, 120 bp, Artificial Sequence
  ENSG00000185669_0 (sequence is synthesized)
aatgagcctgaccccttcaagcgccggcggacgcagcagtccggacccaggcgcgcccctcccgccccagcccaccccggcctgccgcccgggaggggaacatgccgcgctccttcctgg

SEQ ID NO: 671803 - DNA, 120 bp, Artificial Sequence
  ENSG00000185669_1 (sequence is synthesized)
tgaaaacgcactccagccacagggtccccaactaccggcggctggagacgcagagagaaatcaatggtgcctgctctgcctgtggggggctggtggtgcccctcctcccccgagacaagg

SEQ ID NO: 671804 - DNA, 120 bp, Artificial Sequence
  ENSG00000185669_2 (sequence is synthesized)
aggccccttctgtgcccggtgaccttccccagccctgggaccgctcctcggccgtcgcctgcatctccctgcccctcctgccacggatcgaggaagctctgggggcctctgggctggacg

SEQ ID NO: 671805 - DNA, 120 bp, Artificial Sequence
  ENSG00000185669_3 (sequence is synthesized)
ccttggaagtcagcgaggtcgaccctcgggccagccgggccgccattgtacccctcaaagacagcctgaaccacctcaacctgcccccactgctggtgctgcccacacggtggtccccga

SEQ ID NO: 671806 - DNA, 120 bp, Artificial Sequence
  ENSG00000185669_4 (sequence is synthesized)
ccttgggcccagaccggcacggggctccggaaaaactgcttggggctgagcggatgccccgagccccgggcggctttgagtgcttccactgccacaaaccctaccacacgctggccgggc

SEQ ID NO: 671807 - DNA, 120 bp, Artificial Sequence
  ENSG00000185669_5 (sequence is synthesized)
tggccaggcaccggcagctgcactgccacctgcaggtggggcgtgtcttcacctgcaagtactgcgacaaggagtacaccagcctgggtgccctcaagatgcacatccgcactcacacgc

SEQ ID NO: 671808 - DNA, 120 bp, Artificial Sequence
  ENSG00000185669_6 (sequence is synthesized)
tgccctgcacctgcaagatctgtggcaaggccttctccaggccctggttactgcagggccatgtccgcacccacacaggggagaagccctatgcctgctcgcactgcagcagggcctttg

SEQ ID NO: 671809 - DNA, 120 bp, Artificial Sequence
  ENSG00000185669_7 (sequence is synthesized)
gccggcgctgcaccaagaccttctcccgcatgtccctcctggcgcggcatgaggagtctggctgctgcccgggcccctgagaggcacgtggtcggcgcaggtaggagggatggtcctcac

SEQ ID NO: 671810 - DNA, 120 bp, Artificial Sequence
  ENSG00000185669_8 (sequence is synthesized)
cgggagagctggcgtccctcctgcccccagaggagccaggagtctgggagggcggggcctggcctcacacttggtgcgtcctccacatctgcgtccaatcagaaccaaagaagtccagcg

SEQ ID NO: 671811 - DNA, 120 bp, Artificial Sequence
  ENSG00000185669_9 (sequence is synthesized)
ggggccactgggccggaggacactcccccaggcatcccaccgcgcggagcccactcagaggagactcctctcccggggaaggctttcatcagaacaagagccatggttccatttcgacac

SEQ ID NO: 671812 - DNA, 120 bp, Artificial Sequence
  ENSG00000185669_10 (sequence is synthesized)
ggccaggtctccggggctacccttccaagagtcagagcctcggggaggtggccgccagcatgggccggcactgccgccggatggctggcaaggctgcctagttccattgcagcagaaatg

SEQ ID NO: 671813 - DNA, 120 bp, Artificial Sequence
  ENSG00000185669_11 (sequence is synthesized)
aacagttctgacttatagtgagcaccgccctgtggcccttcctcagtaggcacaactacctctcagccagcccccgccagcctttggtttggggtctgggacgagctgccccatgtcaca

SEQ ID NO: 671814 - DNA, 120 bp, Artificial Sequence
  ENSG00000185669_12 (sequence is synthesized)
cgtctatgtgcatgtgcacacacactcaaacatgtacacacacgtgccctccccacctcactagactctccgggagatggggcaggactgggagagcccacgattggtgatttgggtgtg

SEQ ID NO: 671815 - DNA, 120 bp, Artificial Sequence
  ENSG00000185669_13 (sequence is synthesized)
ttgggatgaggcggagtgcctgtgggatttgtcccggtcagagcctcagggggctggggtctcagggcactcagcttcccaggcaataacagccgtggggtaataaatggtctctgcaca

SEQ ID NO: 671816 - DNA, 120 bp, Artificial Sequence
  ENSG00000185670_0 (sequence is synthesized)
ggagctcgccctgtggctgctcggtggtgggtgaggtatcagctttctccgctagttcccaccctggtagtccttagcccctggaatgcgtgagggagatgcttagggagttctcgaagt

SEQ ID NO: 671817 - DNA, 120 bp, Artificial Sequence
  ENSG00000185670_1 (sequence is synthesized)
ggggcgtagaggcatcgcctggcaaggcctgggagcgaaaaagatctctacttcgtggagccgttggacgctaccggggagccactggtggggaccttttttgggccccctttccttcgt

SEQ ID NO: 671818 - DNA, 120 bp, Artificial Sequence
  ENSG00000185670_2 (sequence is synthesized)
ggggtactatggagttcccagaacacagtcagcagctgctgcagagcctccgggagcagcggtcccagggtttcctttgtgactgcaccgtgatggtgggtagtacccagttcttggccc

SEQ ID NO: 671819 - DNA, 120 bp, Artificial Sequence
  ENSG00000185670_3 (sequence is synthesized)
atcgggctgtgctggcctcctgcagcccattcttccagcttttctacaaggagcgggaattggacaagagggatctggtgtgtattcacaatgaaattgtcacagccccagcctttgggc

SEQ ID NO: 671820 - DNA, 120 bp, Artificial Sequence
  ENSG00000185670_4 (sequence is synthesized)
tgcttctggactttatgtatgctggccagctgaccctgagaggggatacccctgtggaggatgtgctggcagctgccagctacttgcacatgaatgacatcgtcaaggtgtgtaagcggc

SEQ ID NO: 671821 - DNA, 120 bp, Artificial Sequence
  ENSG00000185670_5 (sequence is synthesized)
ggcttcaagcccgggccctggcagaggcagacagtaccaagaaggaggaggaaaccaactcacagcttcctagtttggagtttttgtctagtacttcccgtggcacccaaccttcgttgg

SEQ ID NO: 671822 - DNA, 120 bp, Artificial Sequence
  ENSG00000185670_6 (sequence is synthesized)
catctgctgagacatcaggccactggggcaaaggggaatggaaaggctctgctgctccctcacctactgtccgtcctccagatgagccaccaatgtctagtggggctgacactacacagc

SEQ ID NO: 671823 - DNA, 120 bp, Artificial Sequence
  ENSG00000185670_7 (sequence is synthesized)
ctggcatggaggttgacgcaccacatctgcgggcacctcatccaccagtggctgatgtctctcttgccagccctagtagctccactgagaccattcctacaaactacttctcttctggca

SEQ ID NO: 671824 - DNA, 120 bp, Artificial Sequence
  ENSG00000185670_8 (sequence is synthesized)
tctcagcagtttcattggagccactgccatctcttgatgtgggtcctgagagtctgagggtggtggaaccaaaggatcctggaggaccactgcaaggcttctatcccccagcctcagccc

SEQ ID NO: 671825 - DNA, 120 bp, Artificial Sequence
  ENSG00000185670_9 (sequence is synthesized)
caacgtcagccccagcccctgtctcagctccagttccatcccaggctccagccccagctgaagctgagctggtccaggtgaaagttgaagctattgtgatctctgatgaagagactgatg

SEQ ID NO: 671826 - DNA, 120 bp, Artificial Sequence
  ENSG00000185670_10 (sequence is synthesized)
tgtcagatgaacagcctcagggtcctgagagagctttcccatctggaggagcagtgtatggggcacagccctcccagccagaggcttttgaagacccaggggcagcaggactggaggagg

SEQ ID NO: 671827 - DNA, 120 bp, Artificial Sequence
  ENSG00000185670_11 (sequence is synthesized)
tggggccaagtgaccacttcctgccaacagaccctcatctaccctaccatctgctgccaggtgcagggcagtatcatcgaggactggtgacctcacctctgcctgcacccgcatccctgc

SEQ ID NO: 671828 - DNA, 120 bp, Artificial Sequence
  ENSG00000185670_12 (sequence is synthesized)
tcccacctgcaagacatgtgggaagaccttctcatgctcttacacactacggcgacatgccacggtgcacacacgtgagcgaccctatgagtgccgctactgcctgcggagctacacgca

SEQ ID NO: 671829 - DNA, 120 bp, Artificial Sequence
  ENSG00000185670_13 (sequence is synthesized)
gtcaggggacctctaccgccacatccgcaaggctcacaatgaggacctggccaaacgcagcaaaccagatccagaagtgggaccccttctaggggtgcagcctctccctggctccccaac

SEQ ID NO: 671830 - DNA, 120 bp, Artificial Sequence
  ENSG00000185670_14 (sequence is synthesized)
agcagacagacagagcagcagtggtggagggccacctaaagattttgtattggccccaaaaactaacatctaagggagcatgagctgatgctaggctgctcttaccatccttagatggca

SEQ ID NO: 671831 - DNA, 120 bp, Artificial Sequence
  ENSG00000185670_15 (sequence is synthesized)
gctcagaaggttggtggcaccttatcacccctgctgggtgacaagaataaaggctctgcccaggctgaaagttcctacccttttttttttttaatcttttatttttttgagacagagtct

SEQ ID NO: 671832 - DNA, 64 bp, Artificial Sequence
  ENSG00000185670_16 (sequence is synthesized)
gctcactgcaagctcagcctcccctcaccatgcctggctaattttttttgatttttagtagaga

SEQ ID NO: 671833 - DNA, 65 bp, Artificial Sequence
  ENSG00000185670_17 (sequence is synthesized)
agatctgacctcgtgatccgcccatctccacctcccgcagtgctgggattacaggcatgagccac

SEQ ID NO: 671834 - DNA, 78 bp, Artificial Sequence
  ENSG00000185670_18 (sequence is synthesized)
ccgcccatctccacctcccgtttttttttttgagtcttgctctgtcactgaggctggagtgcagtggcgcaatttcag

SEQ ID NO: 671835 - DNA, 90 bp, Artificial Sequence
  ENSG00000185670_19 (sequence is synthesized)
cttgagccaccgtgcctggcctcaagcgattctcttaaaacgcgccaccacgcccagctaattcctgtatttttagtagagacagggttt

SEQ ID NO: 671836 - DNA, 80 bp, Artificial Sequence
  ENSG00000185670_20 (sequence is synthesized)
ttaatcctacccttttctttgcccagccagataagcaggactttatggggcaaagcctatgtcagctctctccaagggca

SEQ ID NO: 671837 - DNA, 120 bp, Artificial Sequence
  ENSG00000185670_21 (sequence is synthesized)
ctttatggggcaaagcctatgtcagctctctccaagggcactgggaattttcctgaggtgtaatcgcttctcactgtatgttctggaacataaagctagcaatgaaggtatttctttgaa

SEQ ID NO: 671838 - DNA, 120 bp, Artificial Sequence
  ENSG00000185670_22 (sequence is synthesized)
atgacaagtaaatattcttctctctttttgagtctgtgtcatattcagcactgtgaacccttaccagcaagtgactatttttgagttacaggaaggaaaggtgagcagccatgtggctaa

SEQ ID NO: 671839 - DNA, 120 bp, Artificial Sequence
  ENSG00000185670_23 (sequence is synthesized)
agaaagctccttaactaggacatatgggaagcaaaagatggttaacatttttctgctgaatgaattctacattctttcacattctttgtgttgaaataaacttctagcttatctttcaaa

SEQ ID NO: 671840 - DNA, 120 bp, Artificial Sequence
  ENSG00000185674_0 (sequence is synthesized)
gtaaaagcttgaagtgcagtttgctgctgagtacagaagacctttgcaaacagagaggggagattttctctgtaaggttgcaaacaaggtcctggaagataagattccccgccatgttat

SEQ ID NO: 671841 - DNA, 120 bp, Artificial Sequence
  ENSG00000185674_1 (sequence is synthesized)
cctccgtggtgttttggggactaattgccctcattggcacttccaggggctcataccccttcagtcactcaatgaagcctcacctacatccacgcctgtaccacggctgctatggggaca

SEQ ID NO: 671842 - DNA, 120 bp, Artificial Sequence
  ENSG00000185674_2 (sequence is synthesized)
tcatgaccatgaagacctctggggccacttgtgatgcaaacagtgtgatgaactgcgggatccgtggttctgaaatgtttgctgagatggatttgagggccataaaaccttaccagactc

SEQ ID NO: 671843 - DNA, 120 bp, Artificial Sequence
  ENSG00000185674_3 (sequence is synthesized)
acattgcgtggaccctgctgtcatcgcagccatcatctccagggaaagccatggcggatctgtcctgcaagacggctgggaccacaggggacttaaatttggcttgatgcagcttgataa

SEQ ID NO: 671844 - DNA, 120 bp, Artificial Sequence
  ENSG00000185674_4 (sequence is synthesized)
acaaacgtaccaccctgtcggtgcctgggatagcaaagagcacctttcacaggctactgggattctaacagagagaattaaggcaatccagaaaaaattccccacgtggagtgttgctca

SEQ ID NO: 671845 - DNA, 120 bp, Artificial Sequence
  ENSG00000185674_5 (sequence is synthesized)
gcacctcaaaggtggtctctcagcttttaagtcaggaattgaagcgattgccaccccatcggacatagacaatgacttcgtcaatgatatcattgctcgagctaagttctataaaagaca

SEQ ID NO: 671846 - DNA, 120 bp, Artificial Sequence
  ENSG00000185674_6 (sequence is synthesized)
aagcttctaggcaaagctctgtgggtgggccaggttggcagagtgctcagatggccgcctttgagagttttacgtgaatgtgttgtatacaacactggcaaagaaatgattaaaatcatg

SEQ ID NO: 671847 - DNA, 120 bp, Artificial Sequence
  ENSG00000185674_7 (sequence is synthesized)
gggtcagcagtggccctgggaggagctgtctagaggctgcatttgcattccctgaaccactgagttactttgagaggtcctccatcctcaacctccatttcctcttctgcagaatgttgg

SEQ ID NO: 671848 - DNA, 120 bp, Artificial Sequence
  ENSG00000185681_0 (sequence is synthesized)
gtcatagtgatgccgtatccactgagactccggatcctaacagctggaagctaaaaacaggcgccatggagtacacagggagcaaatatatcggggaatatgtagatgggaggatggagg

SEQ ID NO: 671849 - DNA, 120 bp, Artificial Sequence
  ENSG00000185681_1 (sequence is synthesized)
gcaaagccaagtacatcctccctaccgaaacaatatatgttggggaaatgaaggatggcatgtttcacggcgagggaaccctgtacttccccagcggaagccaatacgacgccatttggg

SEQ ID NO: 671850 - DNA, 120 bp, Artificial Sequence
  ENSG00000185681_2 (sequence is synthesized)
agagatcctcaatggcttgaagcctgcaggtatggctcaactcaccaatatggacccacctagaaaaatccccaagggctattacgattgtggagacggcttctataacccagtcacgag

SEQ ID NO: 671851 - DNA, 120 bp, Artificial Sequence
  ENSG00000185681_3 (sequence is synthesized)
ggtagtcaaggactataggaaccgctttctaagaaacgcagatgatgacgagcatgagtggatcacccgtacctgtcgaaagggctaggatgagatcgtgggtcacaggcccgagccgtg

SEQ ID NO: 671852 - DNA, 120 bp, Artificial Sequence
  ENSG00000185681_4 (sequence is synthesized)
aactctgtggctgcctccaccagaggtttccatctgccctactagcattggctgccctgggggacgggctgtagttctagaacctgattttaactcaggaataaagactttctgcggtca

SEQ ID NO: 671853 - DNA, 120 bp, Artificial Sequence
  ENSG00000185681_5 (sequence is synthesized)
tcttccgacactgcagcacgttttctcttcacccacatatgagtatgtgcatctgtatgtacaaatgtatgcacacacttgatgagaaagaagcttttgctgatagaagatgaaagttga

SEQ ID NO: 671854 - DNA, 120 bp, Artificial Sequence
  ENSG00000185686_0 (sequence is synthesized)
aatgtagggaaagcagggcggagtcctctgcaggctcgggggaggggaggggcgtgaatgcgtggatttctgtggagagtggaaacacggggagtcgaggggagcatgcgcgggcctcag

SEQ ID NO: 671855 - DNA, 120 bp, Artificial Sequence
  ENSG00000185686_1 (sequence is synthesized)
aaagttctgggaaaccgactcccgggagcagggaggaacgcgcgctccagagacaacttcgcggtgtggtgaactctctgaggaaaaaccattttgattattactctcagacgtgcgtgg

SEQ ID NO: 671856 - DNA, 120 bp, Artificial Sequence
  ENSG00000185686_2 (sequence is synthesized)
caacaagtgactgagacctagaaatccaagcgttggaggtcctgaggccagcctaagtcgcttcaaaatggaacgaaggcgtttgtggggttccattcagagccgatacatcagcatgag

SEQ ID NO: 671857 - DNA, 120 bp, Artificial Sequence
  ENSG00000185686_3 (sequence is synthesized)
tgtgtggacaagcccacggagacttgtggagctggcagggcagagcctgctgaaggatgaggccctggccattgccgccctggagttgctgcccagggagctcttcccgccactcttcat

SEQ ID NO: 671858 - DNA, 120 bp, Artificial Sequence
  ENSG00000185686_4 (sequence is synthesized)
ggcagcctttgacgggagacacagccagaccctgaaggcaatggtgcaggcctggcccttcacctgcctccctctgggagtgctgatgaagggacaacatcttcacctggagaccttcaa

SEQ ID NO: 671859 - DNA, 88 bp, Artificial Sequence
  ENSG00000185686_5 (sequence is synthesized)
tgctgatgaagggacaacatcttcacctggagaccttcaaagctgtgcttgatggacttgatgtgctccttgcccaggaggttcgccc

SEQ ID NO: 671860 - DNA, 120 bp, Artificial Sequence
  ENSG00000185686_6 (sequence is synthesized)
aaacagggccagtctgtactcatttccagagccagaagcagctcagcccatgacaaagaagcgaaaagtagatggtttgagcacagaggcagagcagcccttcattccagtagaggtgct

SEQ ID NO: 671861 - DNA, 120 bp, Artificial Sequence
  ENSG00000185686_7 (sequence is synthesized)
cgtagacctgttcctcaaggaaggtgcctgtgatgaattgttctcctacctcattgagaaagtgaagcgaaagaaaaatgtactacgcctgtgctgtaagaagctgaagatttttgcaat

SEQ ID NO: 671862 - DNA, 120 bp, Artificial Sequence
  ENSG00000185686_8 (sequence is synthesized)
gcccatgcaggatatcaagatgatcctgaaaatggtgcagctggactctattgaagatttggaagtgacttgtacctggaagctacccaccttggcgaaattttctccttacctgggcca

SEQ ID NO: 671863 - DNA, 120 bp, Artificial Sequence
  ENSG00000185686_9 (sequence is synthesized)
atcttcctacatttccccggagaaggaagagcagtatatcgcccagttcacctctcagttcctcagtctgcagtgcctgcaggctctctatgtggactctttatttttccttagaggccg

SEQ ID NO: 671864 - DNA, 120 bp, Artificial Sequence
  ENSG00000185686_10 (sequence is synthesized)
cctggatcagttgctcaggcacgtgatgaaccccttggaaaccctctcaataactaactgccggctttcggaaggggatgtgatgcatctgtcccagagtcccagcgtcagtcagctaag

SEQ ID NO: 671865 - DNA, 120 bp, Artificial Sequence
  ENSG00000185686_11 (sequence is synthesized)
tgtcctgagtctaagtggggtcatgctgaccgatgtaagtcccgagcccctccaagctctgctggagagagcctctgccaccctccaggacctggtctttgatgagtgtgggatcacgga

SEQ ID NO: 671866 - DNA, 120 bp, Artificial Sequence
  ENSG00000185686_12 (sequence is synthesized)
tgatcagctccttgccctcctgccttccctgagccactgctcccagcttacgaccttaagcttctacgggaattccatctccatatctgccctgcagagtctcctgcagcacctcatcgg

SEQ ID NO: 671867 - DNA, 120 bp, Artificial Sequence
  ENSG00000185686_13 (sequence is synthesized)
gctgagcaatctgacccacgtgctgtatcctgtccccctggagagttatgaggacatccatggtaccctccacctggagaggcttgcctatctgcatgccaggctcagggagttgctgtg

SEQ ID NO: 671868 - DNA, 120 bp, Artificial Sequence
  ENSG00000185686_14 (sequence is synthesized)
tgagttggggcggcccagcatggtctggcttagtgccaacccctgtcctcactgtggggacagaaccttctatgacccggagcccatcctgtgcccctgtttcatgcctaattagctggg

SEQ ID NO: 671869 - DNA, 120 bp, Artificial Sequence
  ENSG00000185686_15 (sequence is synthesized)
tgcacatatcaaatgcttcattctgcatacttggacactaaagccaggatgtgcatgcatcttgaagcaacaaagcagccacagtttcagacaaatgttcagtgtgagtgaggaaaacat

SEQ ID NO: 671870 - DNA, 120 bp, Artificial Sequence
  ENSG00000185686_16 (sequence is synthesized)
gttcagtgaggaaaaaacattcagacaaatgttcagtgaggaaaaaaaggggaagttgggggtaggcagatgttgacttgaggagttaatgtgatctttggggagatacatcttatagag

SEQ ID NO: 671871 - DNA, 120 bp, Artificial Sequence
  ENSG00000185686_17 (sequence is synthesized)
ttagaaatagaatctgaatttctaaagggagattctggcttgggaagtacatgtaggagttaatccctgtgtagactgttgtaaagaaactgttgaaaataaagagaagcaatgtgaagc

SEQ ID NO: 671872 - DNA, 120 bp, Artificial Sequence
  ENSG00000185686_18 (sequence is synthesized)
gttttgcatacagtccctgttgactctagtgccccctgctggccccagacgcgagttccggcgaggcttcagggtacagctcccccgcagccagaagccgggcctgcagcgcctcagcac

SEQ ID NO: 671873 - DNA, 120 bp, Artificial Sequence
  ENSG00000185686_19 (sequence is synthesized)
acagctcccccgcagccagaagccgggcctgcagcgcctcagcaccgctccgggacaccccacccgcttcccaggcgtgacctgtcaacaggtctgtattggcgacaaaaggagcagccc

SEQ ID NO: 671874 - DNA, 120 bp, Artificial Sequence
  ENSG00000185686_20 (sequence is synthesized)
tcgcggtgtggtgaactctctgaggaaaaacgtaagttcgagccctgattcctccgcttccccgcagggtgaccttgggcttgtgcccccagcaccacccctgtcccgggtccctgtttt

SEQ ID NO: 671875 - DNA, 120 bp, Artificial Sequence
  ENSG00000185686_21 (sequence is synthesized)
ctctctggaaatgggttgaagaccaaagaaaataatgtgcgccacttgggtcaccccgggccgcctgccccggaaaattggccccagttgaggagttgtggctgtaaggatgccttgaac

SEQ ID NO: 671876 - DNA, 120 bp, Artificial Sequence
  ENSG00000185686_22 (sequence is synthesized)
cgaggcggcggtgctcgtggttggagctctccagggtgggtgcgcatttgtaatgcggtggatgctctgggactcggcccctctgaaggtgctgggggttggggacggcccaggcagtgg

SEQ ID NO: 671877 - DNA, 120 bp, Artificial Sequence
  ENSG00000185686_23 (sequence is synthesized)
cgtaggcgtcctaggaaggcgggagcagaggcagaaatgtcgctgcaagaccgtagtcagggtccttgaccacaggggtcacttgtgaccaaccacatggtctgttgttcctcctgcccc

SEQ ID NO: 671878 - DNA, 120 bp, Artificial Sequence
  ENSG00000185686_24 (sequence is synthesized)
ctggttcagcccaggaaacactggtgctcaggtttggagccagagatttgcactgaaagggcgggattgagtcgccagttgtcagtttcctcagcagtatttgcggaggttttcacagga

SEQ ID NO: 671879 - DNA, 120 bp, Artificial Sequence
  ENSG00000185686_25 (sequence is synthesized)
agacgcaaaagcccacacttccagtggtgtcagagagtatgagctccaggaggctttgatctcactgccccatgggcttgggccattagggggttccattcagagccgatacatcagcat

SEQ ID NO: 671880 - DNA, 120 bp, Artificial Sequence
  ENSG00000185686_26 (sequence is synthesized)
agcaccagtgggtgatcaggcccaggataggaatcatccctaagcagatccttaaatgccaaatataacttcaattttttgtgacggaaaatgtatttgtgcactgtgcctagcatggaa

SEQ ID NO: 671881 - DNA, 120 bp, Artificial Sequence
  ENSG00000185686_27 (sequence is synthesized)
atagagaaaaactgagtctaattgataggcctgattgcatctcgctgaccagaatctctgtacctgagcagcttaggggcaagaaagaacagctgttttcttgaagtgtggaaacattag

SEQ ID NO: 671882 - DNA, 120 bp, Artificial Sequence
  ENSG00000185686_28 (sequence is synthesized)
ctcgactctctgggcgacctcactggatctcgtgagattttgccctggaaggactgagaaacggggattggtcagaccaggctgcccagccccccggtccccaccgccgccccccccgcc

SEQ ID NO: 671883 - DNA, 80 bp, Artificial Sequence
  ENSG00000185689_0 (sequence is synthesized)
gcgcggagcctctcgggggtcacccggccgccgggcccgcgggacgcacggggccgccaggggaggacaacaagcctcag

SEQ ID NO: 671884 - DNA, 120 bp, Artificial Sequence
  ENSG00000185689_1 (sequence is synthesized)
ccgcccggcctcccccgcggggctgcgcagcccactcggccatcctggcctgaaggggccgcccccggcctcgcgggaaagcctgagcctcccgggccttctcgggccttctcggacttt

SEQ ID NO: 671885 - DNA, 120 bp, Artificial Sequence
  ENSG00000185689_2 (sequence is synthesized)
ggccttctcggactttcccccaggcgtcctggaccttcttcggccttcctgggcctcctcgggcttccttgaccctccccaggccttccccgaggcctccaggcccttccctgggcctct

SEQ ID NO: 671886 - DNA, 120 bp, Artificial Sequence
  ENSG00000185689_3 (sequence is synthesized)
ccaggctgagctctccgcgacatggccagtgggcctctgggacccggggcccggcccacccgcctccaccctccattcccaccgcctgctcacatcaagccaggagcaccgcccggatga

SEQ ID NO: 671887 - DNA, 120 bp, Artificial Sequence
  ENSG00000185689_4 (sequence is synthesized)
acacgcagggttccggaccaatacctgggccattgtgactctcagaatgccaggcaataagagatcagaaagctggttccacttcatcttggagatggaggaaagcttgccagaacaact

SEQ ID NO: 671888 - DNA, 120 bp, Artificial Sequence
  ENSG00000185689_5 (sequence is synthesized)
gcacaccccatccactcctcatgttctcagtttgttcttctctgtgatacaaccagcatcacgagaacagccagcagcagctccagcgtgataaaattttcactccttgacaagtgtaag

SEQ ID NO: 671889 - DNA, 120 bp, Artificial Sequence
  ENSG00000185689_6 (sequence is synthesized)
gagacgctttattcccgcaagagtgaagaggacaagaaaaaatgtgagaatcctgaactctctggcttagaaagaatcttagcaagacatcagttgccaaaagagattaatctgacccca

SEQ ID NO: 671890 - DNA, 120 bp, Artificial Sequence
  ENSG00000185689_7 (sequence is synthesized)
aagccgaacagaatgcccccgtggaaaagaaaaatcatcaacaatgtaactgacgggtggaagaaatgtcacttgttgaagagaaacacgaaagagcctccaatgtccaccatagttgtc

SEQ ID NO: 671891 - DNA, 120 bp, Artificial Sequence
  ENSG00000185689_8 (sequence is synthesized)
agaaaacttattcaaaaaaatgtacccagaagacacagcctaaggaatacaagcaggaaactgagaaacctgccaacaacagctaaagggacacaaacaggaaaatcacagtgccttctg

SEQ ID NO: 671892 - DNA, 120 bp, Artificial Sequence
  ENSG00000185689_9 (sequence is synthesized)
ggtatatcagaacctacctgaaattcacaaactctaaacaatgaatgctcaactctgttgtatgaagtagccacaattaccaaccttcctgcacaaatcaaacaagagatatcttaaaat

SEQ ID NO: 671893 - DNA, 120 bp, Artificial Sequence
  ENSG00000185689_10 (sequence is synthesized)
aggaatgatgctgaaactctacagcttttgtgtgaaacacatagaagaagaaagtaaaacaggacaaactccgtgggcaggctccacctgactagaggattccaatgaaggactcaaact

SEQ ID NO: 671894 - DNA, 120 bp, Artificial Sequence
  ENSG00000185689_11 (sequence is synthesized)
ggacaccaaatccacatagttctgcctggcagcttcctgaacggacgatgacaaacaacctcagcccatggtcaatgaataagcactttgagaaagttactatactaataactaacacct

SEQ ID NO: 671895 - DNA, 120 bp, Artificial Sequence
  ENSG00000185689_12 (sequence is synthesized)
tgcaatgaagaaagaatagaagcacatcaagatcttgaagactccatttacaatggcttaatgagaagcacaaacttctttagaagtacagcaaataaaagcacagtaactagtaaactc

SEQ ID NO: 671896 - DNA, 120 bp, Artificial Sequence
  ENSG00000185689_13 (sequence is synthesized)
tcagccactgtttgtggacgtcaaagtgctatagtggcattcaaagacatgacttcagcctgtaatgctgtgagtgcttttcaaagtaggaccccaggcaccatgttccagtgttcctgg

SEQ ID NO: 671897 - DNA, 120 bp, Artificial Sequence
  ENSG00000185689_14 (sequence is synthesized)
caacaacgattcatgtcaaaagacaaaacttattcaaaaaaatgtacccagaagacacagcctaaggaatacaagcaggaaactgagaaacctgccaacaacagctaaagggacacaaac

SEQ ID NO: 671898 - DNA, 120 bp, Artificial Sequence
  ENSG00000185689_15 (sequence is synthesized)
agtgtctcctgaatctttcagaataacatgaaagctgtatacctattgtggaatttgattagaatccggaacagtcagagttggaacaatgttcacaacaaaatgcaagttaataatgaa

SEQ ID NO: 671899 - DNA, 120 bp, Artificial Sequence
  ENSG00000185689_16 (sequence is synthesized)
ggaaaaataaaatcagtcaaatcagcctaatgctttgggaaaaatctaaattcagttaattctaccacaaacaacatgtaacctgcttatgactggcaacgctgaaggaggattcaaagg

SEQ ID NO: 671900 - DNA, 120 bp, Artificial Sequence
  ENSG00000185689_17 (sequence is synthesized)
ctctcatctcgcgctgcttgcctgacctcttgctttctaggagctgacttaccctgtcagatgcatacacggcatcgaatagcccaaggagggtgacggagatgcccacagctggaccat

SEQ ID NO: 671901 - DNA, 120 bp, Artificial Sequence
  ENSG00000185689_18 (sequence is synthesized)
catgactaaagcatgggcaagacagtctgactctgagataaagccttctgtcaggctgggtgtttccacagccaccaccagcagtgcctccttgtcctgccacttccctggtcttccgca

SEQ ID NO: 671902 - DNA, 120 bp, Artificial Sequence
  ENSG00000185689_19 (sequence is synthesized)
ccagattcatccagggcatccgtctgaatggcagtggatggaagaccaaccagtgagacctatgggtcaaccctggtttgaatcttgtattctggacagtgagttcagggctgtaaacca

SEQ ID NO: 671903 - DNA, 120 bp, Artificial Sequence
  ENSG00000185689_20 (sequence is synthesized)
gccgcagtcttagagattaggttgggtgactgagcacatgctgcaatatcacaacaagtgggaattacagatttggcaggaataaagagaaaagccttcatgacctcctcctgtgtttac

SEQ ID NO: 671904 - DNA, 120 bp, Artificial Sequence
  ENSG00000185689_21 (sequence is synthesized)
aagactcctccgagtctcctaccttcagcgttcatggaaatctcccattcctctggctggatgagaatttgctaaattcctctgcctcagtgcaagataattttgtttacaactatagct

SEQ ID NO: 671905 - DNA, 120 bp, Artificial Sequence
  ENSG00000185689_22 (sequence is synthesized)
cacttttatgttttccagtcaaatctcatgagaccagcaggatgaacaggtaacagaggtcaaagagaaagaatgaatgcccacctatggatggaggcagtttagagaaatatgcttgtc

SEQ ID NO: 671906 - DNA, 120 bp, Artificial Sequence
  ENSG00000185689_23 (sequence is synthesized)
caaagtcacaattaactgcactgacacagagaagcagatattgcacttttgctcaactaaataccactttgatgactaagaacgggccctctgggatcagacaaaggaaaatcacagtgc

SEQ ID NO: 671907 - DNA, 120 bp, Artificial Sequence
  ENSG00000185689_24 (sequence is synthesized)
ctggtttgggcatgttacaaggtccttcagtggcctgtgaaaaggagaggggcaatatgttcaaatgtccatgtaaactagacccctaaatatttaagatccataaaatctgtaagtaca

SEQ ID NO: 671908 - DNA, 120 bp, Artificial Sequence
  ENSG00000185697_0 (sequence is synthesized)
ggacaaaaccctgcaggagactgcgagccctgcagaactgctagctgcgggggagagggcaggggtcgggcgcctgtggcggagccgggctggggccagggcagggaggctgacaagcgg

SEQ ID NO: 671909 - DNA, 120 bp, Artificial Sequence
  ENSG00000185697_1 (sequence is synthesized)
cgggagaagccggcggagggcgggatcgcgcctcctgacatgttgggggtatccctggccgggccgggccggggctaagagcggcgctgcgggccggggtcggggtcgggtcgcggtccg

SEQ ID NO: 671910 - DNA, 120 bp, Artificial Sequence
  ENSG00000185697_2 (sequence is synthesized)
cccccgctgtccctccgtcctgccctgtcgaggacgtgcgttccgcactcggccgcctccagagggagcgagggaagcggctagaggatcggggagaaggagcattcgccggaggctgga

SEQ ID NO: 671911 - DNA, 120 bp, Artificial Sequence
  ENSG00000185697_3 (sequence is synthesized)
ggaggctgacccgcgtccccgcccagcctgctcctatgcggtacttgaaggatggcgaagaggtcgcgcagtgaggatgaggatgatgaccttcagtatgccgatcatgattatgaagta

SEQ ID NO: 671912 - DNA, 120 bp, Artificial Sequence
  ENSG00000185697_4 (sequence is synthesized)
ccacaacaaaaaggactgaagaaactctggaacagagtaaaatggacaagggacgaggatgataaattaaagaagttggttgaacaacatggaactgatgattggactctaattgctagt

SEQ ID NO: 671913 - DNA, 120 bp, Artificial Sequence
  ENSG00000185697_5 (sequence is synthesized)
catcttcaaaatcgctctgattttcagtgccagcatcgatggcagaaagttttaaatcctgaattgataaagggtccttggactaaagaagaagatcagagggttattgaattagttcag

SEQ ID NO: 671914 - DNA, 120 bp, Artificial Sequence
  ENSG00000185697_6 (sequence is synthesized)
aaatatgggccaaaaagatggtctttaattgcaaaacatttaaaaggaagaataggcaagcagtgtagagaaagatggcataatcatctgaatcctgaggtaaagaaatcttcctggaca

SEQ ID NO: 671915 - DNA, 120 bp, Artificial Sequence
  ENSG00000185697_7 (sequence is synthesized)
gaagaggaggacaggatcatctatgaagcacataagcggttgggaaatcgttgggcagaaattgccaaactacttccaggaaggactgataattctatcaaaaatcattggaattctact

SEQ ID NO: 671916 - DNA, 120 bp, Artificial Sequence
  ENSG00000185697_8 (sequence is synthesized)
atgcgaagaaaagtggaacaggagggctatttacaagatggaataaaatcagaacgatcttcatctaaacttcaacacaaaccttgtgcagctatggatcatatgcaaacccagaatcag

SEQ ID NO: 671917 - DNA, 120 bp, Artificial Sequence
  ENSG00000185697_9 (sequence is synthesized)
ttttacatacctgttcagatccctgggtatcagtatgtgtcacctgaaggcaattgtatagaacatgttcagcctacttctgcctttattcagcaacccttcattgatgaagatcctgat

SEQ ID NO: 671918 - DNA, 120 bp, Artificial Sequence
  ENSG00000185697_10 (sequence is synthesized)
aaggaaaagaaaataaaggaacttgagatgcttcttatgtcagctgagaatgaagttagaagaaagcgaattccatcacagcctggaagtttttctagctggtctggtagtttcctcatg

SEQ ID NO: 671919 - DNA, 120 bp, Artificial Sequence
  ENSG00000185697_11 (sequence is synthesized)
gatgataacatgtctaatactctaaatagccttgacgagcacactagtgagttttacagtatggatgaaaatcagcctgtgtctgctcagcagaattcacccacaaagttcctggccgtg

SEQ ID NO: 671920 - DNA, 120 bp, Artificial Sequence
  ENSG00000185697_12 (sequence is synthesized)
gaggcaaacgctgtgttatcctctttgcagaccatcccagaatttgcagagactctagaacttattgaatctgatcctgtagcatggagtgacgttaccagttttgatatttctgatgct

SEQ ID NO: 671921 - DNA, 120 bp, Artificial Sequence
  ENSG00000185697_13 (sequence is synthesized)
gctgcttctcctatcaaatccaccccagttaaattaatgagaattcagcacaatgaaggagccatggaatgccaatttaacgtcagtcttgtacttgaagggaaaaaaaacacttgtaat

SEQ ID NO: 671922 - DNA, 120 bp, Artificial Sequence
  ENSG00000185697_14 (sequence is synthesized)
ggtggcaacagtgaagctgttcctttaacatccccaaatatagccaagtttagcactccaccagccatcctcagaaagaagagaaaaatgcgagtgggtcattccccaggcagcgaactt

SEQ ID NO: 671923 - DNA, 120 bp, Artificial Sequence
  ENSG00000185697_15 (sequence is synthesized)
agggatggctcattgaacgatggtggtaatatggcgctaaaacatacaccactgaaaacactaccattttctccttcacagtttttcaacacatgtcctggtaatgaacaacttaatata

SEQ ID NO: 671924 - DNA, 120 bp, Artificial Sequence
  ENSG00000185697_16 (sequence is synthesized)
gaaaatccttcatttacatcaacccctatttgtgggcagaaagctctcattacaactcctcttcataaggaaacaactcccaaagatcaaaaggaaaatgtagggtttagaacacctact

SEQ ID NO: 671925 - DNA, 120 bp, Artificial Sequence
  ENSG00000185697_17 (sequence is synthesized)
attagaagatctatactgggtaccacaccaagaactcctactccttttaagaatgcgcttgctgctcaggagaaaaaatatggacctcttaaaattgtgtcccagccacttgctttcttg

SEQ ID NO: 671926 - DNA, 120 bp, Artificial Sequence
  ENSG00000185697_18 (sequence is synthesized)
gaagaagatattcgggaagttttaaaagaagaaactggaacagacctattcctcaaagaggaagatgaacctgcttacaaaagctgcaaacaagagaataccgcttctgggaagaaagtc

SEQ ID NO: 671927 - DNA, 120 bp, Artificial Sequence
  ENSG00000185697_19 (sequence is synthesized)
agaaaatcactagtcttagataattgggaaaaagaagaatcaggcactcaactgttgactgaagacatttcagacatgcagtcagaaaatagatttactacatccttattaatgatacca

SEQ ID NO: 671928 - DNA, 120 bp, Artificial Sequence
  ENSG00000185697_20 (sequence is synthesized)
ttattggaaatacatgacaataggtgcaacttgattcctgaaaaacaagatataaattcaaccaacaaaacatatacacttactaaaaagaaaccaaaccctaacacttccaaagttgtc

SEQ ID NO: 671929 - DNA, 120 bp, Artificial Sequence
  ENSG00000185697_21 (sequence is synthesized)
atgggaaacagtggtttatgggaagacagaagaccaacttattatgactgaacaagcaagaagatatctgagtacttacacagctaccagtagtacttcaagagctctcatactgtaatt

SEQ ID NO: 671930 - DNA, 120 bp, Artificial Sequence
  ENSG00000185697_22 (sequence is synthesized)
gttattaaaattgatgaaatgccccactcccttactgcagtctctactaaattaggttgcagtgaaatttttctcaattagttgtttttaaagttgtaagatagcccttttaatacagca

SEQ ID NO: 671931 - DNA, 120 bp, Artificial Sequence
  ENSG00000185697_23 (sequence is synthesized)
tcttttttctattctatatagtaggcagaaagctagtaagtcacttaaggggtagatagtttcatagtttattttttaagagatgagatttttaaaaattgtttttaaagaacaagatgg

SEQ ID NO: 671932 - DNA, 120 bp, Artificial Sequence
  ENSG00000185697_24 (sequence is synthesized)
gaaaataatagaatgttcatggatttctaaaagtaaattctcatatattttcttcacaagatatatgttgctactctcttgatgctgcagttttgttatagataggtgtatgagtatata

SEQ ID NO: 671933 - DNA, 120 bp, Artificial Sequence
  ENSG00000185697_25 (sequence is synthesized)
tgatttctgaaattagtctatgtatggaaagcacacatgattttatgaagtacttttgcccatgtgctgatttacttaggctaccatttacaaagaaacacattgaaaaggaatttaaag

SEQ ID NO: 671934 - DNA, 120 bp, Artificial Sequence
  ENSG00000185697_26 (sequence is synthesized)
gaaggatagaaagttgcactactaattttttgttttttttttcagaagcagtaaaattaactacagtgttaaatgtatttatttgagcatagtactgaaaacaaaaagcattcaaaaaag

SEQ ID NO: 671935 - DNA, 120 bp, Artificial Sequence
  ENSG00000185697_27 (sequence is synthesized)
agttttttctttattagtaaatagtattttcttaatctcagaggagctgagagttttgttgaatgtattgtacagtatgtaggagcaggagaactttgtaaattggaaagaagtctgttt

SEQ ID NO: 671936 - DNA, 120 bp, Artificial Sequence
  ENSG00000185697_28 (sequence is synthesized)
ttataatttatttttatttttaaagcttaaatgtagatatttatacgtatacagggtgcctagaagccaatgttgtttcctgttattacagctaacacagtaaagaataattttgacttt

SEQ ID NO: 671937 - DNA, 120 bp, Artificial Sequence
  ENSG00000185697_29 (sequence is synthesized)
aagtatgaaacagtagtaagttatagctgcaaagaatacaatatctatactgtatgtcacatctacctaaatgttgcactatgccctttaaatcatgctggttataaagtagttctaaaa

SEQ ID NO: 671938 - DNA, 120 bp, Artificial Sequence
  ENSG00000185697_30 (sequence is synthesized)
aaaaatgtactaaataataatttaatattttctttttaaattatatcgggggtggtcatatacattaatctggtgatttgtatatgtgtttgaaatttttgcattttgtttaaaaaataa

SEQ ID NO: 671939 - DNA, 120 bp, Artificial Sequence
  ENSG00000185697_31 (sequence is synthesized)
gtaccttggtccctaaaaacagtctgcacttagaagtttatatttactcagtgtttcagaagtggagaacattatcttttatttataaaaatattttgtccttttttaaatgttttgtgt

SEQ ID NO: 671940 - DNA, 120 bp, Artificial Sequence
  ENSG00000185697_32 (sequence is synthesized)
ttctctacaggttacaacagttgcttcagttgcctgttttaggtgtttgcacttattttatttcttcttgaaagaatttttatttgcttttgtggtagagattatatgtaattttttttc

SEQ ID NO: 671941 - DNA, 120 bp, Artificial Sequence
  ENSG00000185697_33 (sequence is synthesized)
agtcatataatggtgtgctgtcaacttaaacactgacaggtaaatagaattgtacactgtagtttgaattatttataattgacacactctctccctctccactcctgaagtatgctgcta

SEQ ID NO: 671942 - DNA, 120 bp, Artificial Sequence
  ENSG00000185697_34 (sequence is synthesized)
tagaaaatagcagaatcggcttgctgctacgagagaaggaaagagcgaccaccacttgcactgtgtgaaaagataaaaaacaaatgatggcaagttctcaagttaactaaatggaatcaa

SEQ ID NO: 671943 - DNA, 120 bp, Artificial Sequence
  ENSG00000185697_35 (sequence is synthesized)
ccattaccaggcaaattcttgcaaataccaaaatactactatgccttataaaacaaaatgaaagcaggttaagattttctgctctgtttgtatgttaatagaaatggaaatactaagtat

SEQ ID NO: 671944 - DNA, 120 bp, Artificial Sequence
  ENSG00000185697_36 (sequence is synthesized)
aatagaaatggaaatactaagtattttaatgcttagctcttgaacagtagacctaaaagggttttaagctatttaaatctacttgctagtttttgcatattttatatatatatatattta

SEQ ID NO: 671945 - DNA, 120 bp, Artificial Sequence
  ENSG00000185697_37 (sequence is synthesized)
gaaaatgtatggtactaagattatgccttattgataaatagataaaccaatttgaatcctcttagcatgtttaagtatgttgattgctttctaattaatgaacttctcacagaaatttca

SEQ ID NO: 671946 - DNA, 120 bp, Artificial Sequence
  ENSG00000185697_38 (sequence is synthesized)
cttagtgaaaccaatgattgtagcaaactcatactggatcatttcagttaccttgaactaatagcacataatggttttttgttgttgttgtttttaatgtagcccttacctggatataca

SEQ ID NO: 671947 - DNA, 120 bp, Artificial Sequence
  ENSG00000185697_39 (sequence is synthesized)
tagtctgcaatcaccaaagtataatatcttgtaaggctatattttttaaagcatattttttcttgagcattaaattatcctaaatggtaatatattgtggataagtctgggcttattgga

SEQ ID NO: 671948 - DNA, 120 bp, Artificial Sequence
  ENSG00000185697_40 (sequence is synthesized)
cataatacatatttgggttggtactggttgaatccttcagttaactgctttgttgctttttgcaagattttttatcttaaacatgtcaggcatcttaagtcacctttatactgttttgtt

SEQ ID NO: 671949 - DNA, 120 bp, Artificial Sequence
  ENSG00000185697_41 (sequence is synthesized)
cctctgagtttctttcagtatgttatacaaatgccagacataacatgtagcagccatacttgcatggaaactgactacacatacataatactgcattttattgtaaggttttcacattaa

SEQ ID NO: 671950 - DNA, 120 bp, Artificial Sequence
  ENSG00000185697_42 (sequence is synthesized)
tacagcaattaccctgactaaattgagttttgtgatatatggaaaacttcattgtaagagaatcttgcatacaatgttgacatattaacatccaaaataaagcatctgtgtacaagctga

SEQ ID NO: 671951 - DNA, 120 bp, Artificial Sequence
  ENSG00000185697_43 (sequence is synthesized)
tagttattagactggaacctcaagtagctgcaaccgctagaaactcctccggtggttcccccctccctggtctctccagagggaagaaggtcaccttctacacttaactaccatgctcat

SEQ ID NO: 671952 - DNA, 120 bp, Artificial Sequence
  ENSG00000185697_44 (sequence is synthesized)
tcatctggacgaaatgcccagtccactgtcttcttcacgcgttattctccaggacagggctcctccgccgcgcacgttatttcctgtagagcgggcacgaaattaagcaccttgaagacc

SEQ ID NO: 671953 - DNA, 120 bp, Artificial Sequence
  ENSG00000185697_45 (sequence is synthesized)
agcggtagacacagattatctccggttccaagcacgtctcccgctaggaacttttttcacttgtcactcttctgctgctttttgaggaaaacaggtgatatttggtttcctgccagagtc

SEQ ID NO: 671954 - DNA, 120 bp, Artificial Sequence
  ENSG00000185697_46 (sequence is synthesized)
ttcgtcactctcgtaactatgatgtctgggtaaaaatagctcacatttttgcttaaaaaataacggccgcgcaaatttatggttagatttgtctcaagtctgaagaccgcgcatcctaac

SEQ ID NO: 671955 - DNA, 120 bp, Artificial Sequence
  ENSG00000185697_47 (sequence is synthesized)
tagtgaggcggaagacacctaaggagccaggagctgtcgccgaggcgaggctgcggagacgttcccttggtgggccgcgggaccacccaccccgccagaaactcggttcgctcaccctaa

SEQ ID NO: 671956 - DNA, 120 bp, Artificial Sequence
  ENSG00000185697_48 (sequence is synthesized)
gaattttggggcaactggacttctccaccgcccgcttccggacccgctccggcgccgcttccggacccactcctcggcgagcgcaggaactcgctctcccagcaggccccgcgcggtgcg

SEQ ID NO: 671957 - DNA, 120 bp, Artificial Sequence
  ENSG00000185697_49 (sequence is synthesized)
cctctcggcgcgttccgggtcctatgacagctcggctcgcatgcgccacctacggccccacccgcggccccaccccctggctcccggctccttccccgactcccgcgagttccagtccca

SEQ ID NO: 671958 - DNA, 120 bp, Artificial Sequence
  ENSG00000185697_50 (sequence is synthesized)
gcttccagctccccagccccgccctcagccgcgcgcgctctcccctccccgccctcgcttcttcgcgtgcggcccccacagccaatgaggttcagggccgcgtgcgcagattcaaacggc

SEQ ID NO: 671959 - DNA, 120 bp, Artificial Sequence
  ENSG00000185697_51 (sequence is synthesized)
gcctgctcctatgcggtacttgaaggatggcgaagaggtcgcgcaggtgggtggcacccctttcgcccaggcctgtcggcgccgtctcggctcagattctctttcctatcccgctgcccc

SEQ ID NO: 671960 - DNA, 120 bp, Artificial Sequence
  ENSG00000185697_52 (sequence is synthesized)
ctcccgccataaggccctccctggcgagggcagaggtttttcttcccgcgtccccgcggccgcttggcctcgatgaccggagggcagctgcgacgtgtggagagttggggaccagggtgt

SEQ ID NO: 671961 - DNA, 120 bp, Artificial Sequence
  ENSG00000185697_53 (sequence is synthesized)
ttgaggcgcgggacgtaagagatgcccaggtttctcggtgactctccccgtaatgcgcgtccagatttctgacctcatgctgccacttcttcgaggcaggtttcttgccaggtaagtcga

SEQ ID NO: 671962 - DNA, 120 bp, Artificial Sequence
  ENSG00000185697_54 (sequence is synthesized)
gcgcttttagggagtccgctacgcagagaaaactgactgtgtcctgccgggaggacttgaaaatggtgttcgggcgactcttttctgaatgacggtacagtcaaaataggaactccgcgg

SEQ ID NO: 671963 - DNA, 120 bp, Artificial Sequence
  ENSG00000185697_55 (sequence is synthesized)
tgaacctgggcggccacccctctgccaacttggctatcttgaaacgttgtggaaaatcctctggggaatagctgagaggacttttttgatgttttctgtaattcctatacccatatgctc

SEQ ID NO: 671964 - DNA, 120 bp, Artificial Sequence
  ENSG00000185697_56 (sequence is synthesized)
agctttatgtatatatgtatattttaatatcctctcttgggaccatgtcacatagtaacaactagtagtaacaactagtagcttgatcttgaaataaaacaatgtgtttgattcacttaa

SEQ ID NO: 671965 - DNA, 120 bp, Artificial Sequence
  ENSG00000185697_57 (sequence is synthesized)
aatgatttgagttcctggcgtttaattaacatagaacttttggggaaagttattatatagaagatcacatctataacatagtaatctttaaaataagggaaggaaaaaaacataagcttg

SEQ ID NO: 671966 - DNA, 120 bp, Artificial Sequence
  ENSG00000185697_58 (sequence is synthesized)
attttttgttatgaatatatttcctaatttgtaaataaagcattcttggctcattttttgacattacatcctctctttaaatcttttgcaaaattttgaagcaataaagactaacattta

SEQ ID NO: 671967 - DNA, 120 bp, Artificial Sequence
  ENSG00000185697_59 (sequence is synthesized)
aggcgcgggacgtaagagatgcccaggtttctcggtgactctccccgtaatgcgcgtccagatttctgacctcatgctgccacttcttcgaggcaggtttcttgccagtgaggatgagga

SEQ ID NO: 671968 - DNA, 120 bp, Artificial Sequence
  ENSG00000185716_0 (sequence is synthesized)
gcccatggggcgggaggcgtgaggccgctgcctgtccggggctcggggggtggggggagcggggcggggagatggataaactgaccatcatctcaggatgtctctttctggccgccgata

SEQ ID NO: 671969 - DNA, 120 bp, Artificial Sequence
  ENSG00000185716_1 (sequence is synthesized)
tcttcgccatcgccagcatcgccaacccggactggatcaacaccggggagtctgcgggagcactcactgtgggcctcgtgcgacagtgtcaaacaatccatggacgagaccggacgtgca

SEQ ID NO: 671970 - DNA, 120 bp, Artificial Sequence
  ENSG00000185716_2 (sequence is synthesized)
tccctccccggcttcccccggagtgggtcaccacactgttttttatcatcatgggaatcatttcattgactgtcacatgtggtttgctggtggcttcccactggcgaagagaagctacaa

SEQ ID NO: 671971 - DNA, 120 bp, Artificial Sequence
  ENSG00000185716_3 (sequence is synthesized)
aatatgctcgatggatagcattcactggaatgatccttttctgtatggctgccctaatatttccaataggattttacatcaatgaagtcggaggtcaaccttataaattacccaacaaca

SEQ ID NO: 671972 - DNA, 120 bp, Artificial Sequence
  ENSG00000185716_4 (sequence is synthesized)
cagtagttgggtcatcatatgtactttttgtcttatcaattttctttacaatagtaggacttctatttgctggcaaagtttgtttaccaggctgatgaatgtctaaattgcttgactctt

SEQ ID NO: 671973 - DNA, 120 bp, Artificial Sequence
  ENSG00000185716_5 (sequence is synthesized)
ttattttattttatttttttatttttggagggtggagaggacaaaggcgaggcatctgagcaggcctctcatgggaagatgctcagatgaaactgatgctgagaaggaaaaaaaaatgct

SEQ ID NO: 671974 - DNA, 120 bp, Artificial Sequence
  ENSG00000185716_6 (sequence is synthesized)
aaaatgctttggtttgttctcactatgcactttggatttaaaaaaaaaaaaaaaaaggagagccttttccataaccaaatacagacaatattgactaaatctcctgagcatattcaggca

SEQ ID NO: 671975 - DNA, 120 bp, Artificial Sequence
  ENSG00000185716_7 (sequence is synthesized)
gtcaggtctgcactgtgatagcaacctagagaaggagaatgctttataccgaaaagcatgtggccctttgtgactctgttattccgtttttaatgtctaatgattcattagaggaaaaaa

SEQ ID NO: 671976 - DNA, 120 bp, Artificial Sequence
  ENSG00000185716_8 (sequence is synthesized)
aaaagtctaagtatttatgtgtcatggtggaccagagggatgcaagagaagttcatgtggggctggcctcacctcctaagaaattagtgttcacaacttccttgtaatagtatgagcctt

SEQ ID NO: 671977 - DNA, 120 bp, Artificial Sequence
  ENSG00000185716_9 (sequence is synthesized)
tggcaccagaatggattgccgttgcattactgcaccaagaagccaatagatcaaaacttgtttgctaaaatgtatgtaaaaattctgaaattccctctctctgtgtacaaaaaaaaaaaa

SEQ ID NO: 671978 - DNA, 120 bp, Artificial Sequence
  ENSG00000185716_10 (sequence is synthesized)
aaatcaaacactaagacacatgttttgggtgggtgggtgggggaaatcttccttatatttatataaatatatataatatatatattttgctgatgcagtatacagtgtgtatatatgtgt

SEQ ID NO: 671979 - DNA, 120 bp, Artificial Sequence
  ENSG00000185716_11 (sequence is synthesized)
gtgtgtgtgtgtgtgtatgtgtgtgtaaatttatatacacacacatgcaaacagttcctggaagagaattctgaatgctttgctagcaaaacactgtggtgtgcaaacctagaacccaat

SEQ ID NO: 671980 - DNA, 120 bp, Artificial Sequence
  ENSG00000185716_12 (sequence is synthesized)
agaaaaaaaagccatttatctgaaggctgcatagtggagagagtcttcagtttacctcattctttgtagcagcccttgattttaacaggtttttgtaataggtacagataatcccatacc

SEQ ID NO: 671981 - DNA, 120 bp, Artificial Sequence
  ENSG00000185716_13 (sequence is synthesized)
tttctaggtgcgattttaagttaagctaaaaattatttgtagggttaatttatttgtatatgatagtagaaggtaagatcatgtcaaaccttataatttggggaatctgacactatttaa

SEQ ID NO: 671982 - DNA, 120 bp, Artificial Sequence
  ENSG00000185716_14 (sequence is synthesized)
attattggcaactgttgtctgttgtacagagattctttttctactggctcagtctgttacattaataatgcattttatatgttcaggcacactttacataaatacaaagttcgctagtaa

SEQ ID NO: 671983 - DNA, 120 bp, Artificial Sequence
  ENSG00000185716_15 (sequence is synthesized)
atatctggctattttggctatttacaacactaatttcattatttttatctgtaagcattattaatacatctttaccaaaacctgagcaatacaatattttctttatatgttatatgcctt

SEQ ID NO: 671984 - DNA, 120 bp, Artificial Sequence
  ENSG00000185716_16 (sequence is synthesized)
tgtttgctaaaagctaatatttttgcatttactttaaagggctgtactaaacccacagctttaagttcttccctaaaagaagcattgcagctaacccttgaactcacagttttaaaatac

SEQ ID NO: 671985 - DNA, 120 bp, Artificial Sequence
  ENSG00000185716_17 (sequence is synthesized)
ttcgcatcaatgcttgtttttcctggtgaacactatagataatctcctgtttgaaatgtgggacagggtgtttcatggcagtggagctaagtttctcctctttatagtgaactggtgacc

SEQ ID NO: 671986 - DNA, 120 bp, Artificial Sequence
  ENSG00000185716_18 (sequence is synthesized)
caaatgtccctgtcatttatagtgaactgatgacccaaatgactccctgtcagtagagtcccatgtggcccatgcttcacacaagcagaaatgaacgcactgtttttaaggctagattat

SEQ ID NO: 671987 - DNA, 120 bp, Artificial Sequence
  ENSG00000185716_19 (sequence is synthesized)
cagttctagaatgattacttcaaagatgggagctacctcctcagatattcacactatgaaatggaggtgcttgatgtgtttcacactggcttgtttgacagtcttctatcttactgttaa

SEQ ID NO: 671988 - DNA, 120 bp, Artificial Sequence
  ENSG00000185716_20 (sequence is synthesized)
ttcagcagtattttattgtgaaagaaaaccccagtgtttgagctcactcaggaattggggagagagatggaccaccactgtggtgcatttcttaagtgttctgggagaatgtcatacttt

SEQ ID NO: 671989 - DNA, 120 bp, Artificial Sequence
  ENSG00000185716_21 (sequence is synthesized)
tccttcccagagtaaaagaaacctttgggagatcctgagggagactgtttctccccaagtatgatgatgtctagtcaagtctaagaataccactggacatgttctatggacatttgggat

SEQ ID NO: 671990 - DNA, 120 bp, Artificial Sequence
  ENSG00000185716_22 (sequence is synthesized)
tgcagttgctattctgatttgattggtcctcagtcaaatggatcactttgaaggaaagctttggttgtcaccgttatataccactgagataaagtgttagcaaagtatggttcaaattaa

SEQ ID NO: 671991 - DNA, 120 bp, Artificial Sequence
  ENSG00000185716_23 (sequence is synthesized)
cttatgacatgaccaagagcttttctcttccaaaagatgaattgtattgtaaatagtttctcaaaatatttttaactggatcatgagcatggggagagaaagtttctcagctgctaagaa

SEQ ID NO: 671992 - DNA, 120 bp, Artificial Sequence
  ENSG00000185716_24 (sequence is synthesized)
tttccccactgtttacttctttcacttatggtggtattgcatttaagattacaaaatttaaggttttatttgtatctattacccaaaccattaaattgtctttaatttcattgttgtctt

SEQ ID NO: 671993 - DNA, 120 bp, Artificial Sequence
  ENSG00000185716_25 (sequence is synthesized)
ggaggtccagtgcatacagggctgatgggggaaaactccctctagccagtcagcactctaacccaggattaaaccatcccatcaagtagtatgtgaagtcaagtcttcgtactcttgcag

SEQ ID NO: 671994 - DNA, 120 bp, Artificial Sequence
  ENSG00000185716_26 (sequence is synthesized)
accagacattgaaatggattcattcatatagatttctataaatcctataagtgaaaagatagacaactgtccgcagttgcttttaaaaaaggtcactataataagtactatatagtacag

SEQ ID NO: 671995 - DNA, 120 bp, Artificial Sequence
  ENSG00000185716_27 (sequence is synthesized)
tattaatttatagcaggaaatcgtatcttgtaaactgtatataaaacactgttttatggtgcaatcatttgtcaaacttttgtctgtttcattgtttttagagtgtgtgcattcttctca

SEQ ID NO: 671996 - DNA, 120 bp, Artificial Sequence
  ENSG00000185716_28 (sequence is synthesized)
tacctaagaatatcactgtaaaatctgctgaaaactatttttaggttttatttgcacaagactgaattagtttgacatttttggaagctcctattgaacatacccaaacatctgtaaaca

SEQ ID NO: 671997 - DNA, 120 bp, Artificial Sequence
  ENSG00000185716_29 (sequence is synthesized)
tgaaaaatcttcaatttattaaaagcaaacatttcagtatgattctttccaaaggtaatccatgttctatgttgttaatgtgtgtatgtaatttttctgactcttccacctcttataaac

SEQ ID NO: 671998 - DNA, 120 bp, Artificial Sequence
  ENSG00000185716_30 (sequence is synthesized)
ctattttctgtttcatttgttttgtttttgaaggatggctcttttttctttttaatgttctagatgaccaaaacactattggtttttacccttttgcctaaagctttgatatccccactt

SEQ ID NO: 671999 - DNA, 120 bp, Artificial Sequence
  ENSG00000185716_31 (sequence is synthesized)
gatgttctgtgaattcactgtttaatctattaagtgaaataataaatagtcctggtgacaaacaatctgttgatttagaggaaaggccctgaaaaatacagtattggaaactaactttgc

SEQ ID NO: 672000 - DNA, 120 bp, Artificial Sequence
  ENSG00000185716_32 (sequence is synthesized)
atatgctgttagctattattttgcatcatgggcttcatgggaagaacatgttgcatttattttgtctttattaaaagactactagccacaagttactctgattatagtaactgttttatc

SEQ ID NO: 672001 - DNA, 120 bp, Artificial Sequence
  ENSG00000185716_33 (sequence is synthesized)
aacccacttcatctttaaaaaattaaatttacattcacaattcaaaacagtaagctgtctttcagaaaatttttgaaggataaaaacatgaaggaaaaaagtggcccgtgtaggtaggat

SEQ ID NO: 672002 - DNA, 120 bp, Artificial Sequence
  ENSG00000185716_34 (sequence is synthesized)
tccctacacaggacttttagttgtatcacctcaagagattttgaagtttgtgatcaaggtctgtatattatcccaaactttattaagaattgttttctaattggttataacatttttcaa

SEQ ID NO: 672003 - DNA, 120 bp, Artificial Sequence
  ENSG00000185716_35 (sequence is synthesized)
ttaatagtttcaaaacaaattgttaatacaactgtataaaatgaacataattttcctcacttgtatttttgttattgagcaagtttatcaaaataaattgtctactaaagaaactaaaaa

SEQ ID NO: 672004 - DNA, 120 bp, Artificial Sequence
  ENSG00000185716_36 (sequence is synthesized)
gaggattaagacatgccactatgagaagattataggaaaaacaccaagactagaggactctgggttccttttatgcaaagtcaactcttctgggtcacagttacccagcaacaaaaataa

SEQ ID NO: 672005 - DNA, 120 bp, Artificial Sequence
  ENSG00000185716_37 (sequence is synthesized)
agaatttccccatggactccagatcctttactactgaactcacagggctgtaacactgttactgtacagagaggaccaggacgatgccagcaccccgtttatcctgagtgaactctccgg

SEQ ID NO: 672006 - DNA, 120 bp, Artificial Sequence
  ENSG00000185716_38 (sequence is synthesized)
aggcctcttcaagcttgtgggttctctgctgtcttgaagccatccatccatttgataggttttgcaaagacttggtcctgccaagatggttttaatcatttctgctaaaaggaatggact

SEQ ID NO: 672007 - DNA, 120 bp, Artificial Sequence
  ENSG00000185716_39 (sequence is synthesized)
cgaggatttgatctcattttagatgcagttgtcctcacttggccattttacagcactttagtaaatatggccagtgtatttggtcactattaaatcaatccccattcattatctgtcagg

SEQ ID NO: 672008 - DNA, 120 bp, Artificial Sequence
  ENSG00000185716_40 (sequence is synthesized)
gcaactcagtgaactaaatactatgttctgacctctggcactctttctcatgttgtttaaatatttaatattgtctaaggcaattcaagtattttcttaaataaaaaatatgaaaactca

SEQ ID NO: 672009 - DNA, 120 bp, Artificial Sequence
  ENSG00000185716_41 (sequence is synthesized)
atcactttgtatgaaatgctattttaatgaattttatttttgctcagattgtgacataagtgttccaggtttgtgactcagagttaccagtagcctgagtcttttcctcttcttgaagct

SEQ ID NO: 672010 - DNA, 120 bp, Artificial Sequence
  ENSG00000185716_42 (sequence is synthesized)
attggtatcatctatcaaaataaagataagtatagaacaaatacataaaaatataaattagatgaaggtggaaatattttttaatattgattttgagtttctgctgtatgttgtaaccat

SEQ ID NO: 672011 - DNA, 120 bp, Artificial Sequence
  ENSG00000185716_43 (sequence is synthesized)
tgaaaaatcaacacattttgttatttaataattgtttatcaatatttcttactccattaagctctgcccaagggtataagcttatatattacacattctcttgtactttgcaaaattggt

SEQ ID NO: 672012 - DNA, 120 bp, Artificial Sequence
  ENSG00000185716_44 (sequence is synthesized)
ttaatttcacaacacatcagagatttatctcaagttaaacagaagaaacaaaaatgcacaaagaaaagacatttctgcaattctgctttcgtgcttctttttctccaaagcaattttgca

SEQ ID NO: 672013 - DNA, 120 bp, Artificial Sequence
  ENSG00000185716_45 (sequence is synthesized)
gaagtaagtaacctgtgcttactaaatttgtctagaaggcacccacccacactggtatttttatgaagataatcaagaatcagtaataaggacttcataatcatcaaagagcaccacttg

SEQ ID NO: 672014 - DNA, 120 bp, Artificial Sequence
  ENSG00000185716_46 (sequence is synthesized)
tgtcacagcttaactatagctctctctgggggtgtcaagattagcccaaccgaataataataataaaatatttacagtttgctgctgattcttccttgtgtggccttttgaggagcctcc

SEQ ID NO: 672015 - DNA, 120 bp, Artificial Sequence
  ENSG00000185716_47 (sequence is synthesized)
ctgaccatcatctcaggatgtctctttctggccgccgatatcttcgccatcgccagcatcgccaacccggactggatcaacaccggggagtctgcgggttcactttgtatgttaaactaa

SEQ ID NO: 672016 - DNA, 120 bp, Artificial Sequence
  ENSG00000185716_48 (sequence is synthesized)
gtattactacgttatgaactacagcagatgctgaagagtaggacttaggatgtgcttgaatgacccacgaagagataaatgagatttaagaactaaaggggtggtggtgaggaatattcc

SEQ ID NO: 672017 - DNA, 120 bp, Artificial Sequence
  ENSG00000185721_0 (sequence is synthesized)
agtagcgcctggtggcggtggcagtttgcccgcgggtgtgtgaagggagacagtgtggaggccacagggtactcgccacgatgagcagcaccttagctaagatcgcggagatagaagcag

SEQ ID NO: 672018 - DNA, 120 bp, Artificial Sequence
  ENSG00000185721_1 (sequence is synthesized)
agatggctcggactcaaaagaacaaggccacagcacaccacttagggctgcttaaggctcgtcttgctaagcttcgtcgagaactcattactccaaagggtggtggtggtggaggtccag

SEQ ID NO: 672019 - DNA, 120 bp, Artificial Sequence
  ENSG00000185721_2 (sequence is synthesized)
gagaaggttttgatgtggccaagacaggtgatgctcgaattggatttgttggttttccatctgtggggaagtcaacactgcttagtaacctggcaggggtatattctgaggtggcagcct

SEQ ID NO: 672020 - DNA, 120 bp, Artificial Sequence
  ENSG00000185721_3 (sequence is synthesized)
atgaattcactactctgaccactgtgcctggtgtcatcagatacaaaggtgccaagatccagctcctggatctcccaggtatcattgaaggtgccaaggatgggaaaggtagaggtcgtc

SEQ ID NO: 672021 - DNA, 120 bp, Artificial Sequence
  ENSG00000185721_4 (sequence is synthesized)
aagtcattgcagtggcccgaacctgtaacttgatcttgattgttctggatgtcctgaaacctttgggacataagaagataattgaaaatgagctggaaggctttggcattcgcttgaaca

SEQ ID NO: 672022 - DNA, 120 bp, Artificial Sequence
  ENSG00000185721_5 (sequence is synthesized)
gcaaaccccccaacattggctttaagaagaaggacaagggaggcattaatctcacagccacttgcccccagagtgagctggatgctgaaactgtgaagagcattctggctgaatacaaga

SEQ ID NO: 672023 - DNA, 120 bp, Artificial Sequence
  ENSG00000185721_6 (sequence is synthesized)
agattgaccaaatctccattgaggaattggatatcatctataaggtgcctcactgtgtacccatctctgcccatcaccgctggaattttgatgacctattggaaaagatctgggactatc

SEQ ID NO: 672024 - DNA, 120 bp, Artificial Sequence
  ENSG00000185721_7 (sequence is synthesized)
tgaaactagtgagaatttacaccaaacccaaaggccagttaccagattacacatccccagtggtgcttccttactccaggaccacagtggaggatttctgcatgaagattcacaaaaatc

SEQ ID NO: 672025 - DNA, 120 bp, Artificial Sequence
  ENSG00000185721_8 (sequence is synthesized)
ttatcaaagaatttaaatatgctctggtctggggtctctctgtgaaacacaatcctcagaaagtgggtaaagaccatacgttggaggatgaggatgtcattcaaattgtgaagaagtgaa

SEQ ID NO: 672026 - DNA, 120 bp, Artificial Sequence
  ENSG00000185721_9 (sequence is synthesized)
acctttcccttttcccatctgccggacgaaccacaacagcgttccccatgatcaagcaccctaccccagttctttctggttttggcagtcactggatcaggatccaggggagggagatgg

SEQ ID NO: 672027 - DNA, 120 bp, Artificial Sequence
  ENSG00000185721_10 (sequence is synthesized)
aggcacccaaactggaacttcatttgtcttaccttggtgtcaccttgtatgtcgaactgcataaaagatctggtaggctggtcagctacatgcagctcatgtgtcattgtcagaatttgt

SEQ ID NO: 672028 - DNA, 120 bp, Artificial Sequence
  ENSG00000185721_11 (sequence is synthesized)
tttgggatgggctgaatgaggaagggtatatacggtgaagcagctacagaagggatccttgggaacttcatcttgagtgtgaaatggataaaaatatgacatgctgcatcttacttgatg

SEQ ID NO: 672029 - DNA, 120 bp, Artificial Sequence
  ENSG00000185721_12 (sequence is synthesized)
tttacttatgggaaccccttccaaactagatatggctttcagtcctttcaagtagtctttcccacatgatactggagagaggaaggactttatgtaagttaattgatcactccccgcaag

SEQ ID NO: 672030 - DNA, 120 bp, Artificial Sequence
  ENSG00000185721_13 (sequence is synthesized)
ttttggcctcaagctgtctcctgcttcggtctcccaaagtgttgggattacagtgcccccagagtgagctggatgctgaaactgtgaagagcattctggctgaatacaagattcataatg

SEQ ID NO: 672031 - DNA, 120 bp, Artificial Sequence
  ENSG00000185721_14 (sequence is synthesized)
gtgtatatcaagccacaatttccatcaaaaagtgattaagcagagaatggagaagaaggttgattccaggtattttaaggatggtgcagttaagaaaccttattctgcaaagacactgtc

SEQ ID NO: 672032 - DNA, 120 bp, Artificial Sequence
  ENSG00000185721_15 (sequence is synthesized)
agtaccagtcatctagtgcagtatcgtggcacacatacttgtacccgacagggccggttaagagaactgcgcatcaggggctcacagtgcagagggaatgacagacaccctgtgagctga

SEQ ID NO: 672033 - DNA, 120 bp, Artificial Sequence
  ENSG00000185721_16 (sequence is synthesized)
tgggagcgccagttgggtctgggtgagggtgtgctgttcaacagtctgacagttctgtcaacaactccagactaataccctgtttttcttcactttctgtagagtttatatcccctgtat

SEQ ID NO: 672034 - DNA, 120 bp, Artificial Sequence
  ENSG00000185722_0 (sequence is synthesized)
agtgccgggccagacatggcggaagaggaggtggccaagttggagaagcacttgatgcttctgcggcaggagtatgtcaagctgcagaagaagctggcggagacagagaagcgctgcgct

SEQ ID NO: 672035 - DNA, 120 bp, Artificial Sequence
  ENSG00000185722_1 (sequence is synthesized)
ctcttggctgcgcaggcaaacaaggagagcagcagcgagtccttcatcagccgtctgctggccatcgtggcagacctctacgagcaggagcagtacagcgatctgaagataaaggttggg

SEQ ID NO: 672036 - DNA, 120 bp, Artificial Sequence
  ENSG00000185722_2 (sequence is synthesized)
gacaggcacatcagtgctcacaagtttgtcctggcagcccgcagtgacagctggagtctggctaacttgtcttccactaaagagttggacctgtcagatgctaatcctgaggtgacgatg

SEQ ID NO: 672037 - DNA, 120 bp, Artificial Sequence
  ENSG00000185722_3 (sequence is synthesized)
acaatgcttcgctggatctatacagatgagctggagttcagagaggatgatgtgttcctgactgaactgatgaaactagcaaatcggtttcagctacagctcctcagggagagatgtgag

SEQ ID NO: 672038 - DNA, 120 bp, Artificial Sequence
  ENSG00000185722_4 (sequence is synthesized)
aagggtgttatgtctctagtgaatgtcaggaactgtattcgcttctaccagacggcagaggagctgaatgccagcacactgatgaactactgtgcagaaattattgcaagtcattgggac

SEQ ID NO: 672039 - DNA, 120 bp, Artificial Sequence
  ENSG00000185722_5 (sequence is synthesized)
gacctgaggaaggaggatttcagcagcatgagcgctcagttgttatacaaaatgatcaaatccaagacagagtacccgctacataaagccatcaaagtggagagagaagacgtggtcttc

SEQ ID NO: 672040 - DNA, 120 bp, Artificial Sequence
  ENSG00000185722_6 (sequence is synthesized)
ctgtatctgattgaaatggattcccagctccctgggaagctgaatgaagcggatcataacggagatctggcattagatctagccctctcacgacgactggagagtattgccaccacgctg

SEQ ID NO: 672041 - DNA, 120 bp, Artificial Sequence
  ENSG00000185722_7 (sequence is synthesized)
gttagtcacaaagctgatgtggacatggtggacaagagtggctggagcttgttacacaaaggaatccaaagaggagatctctttgctgccactttcctcattaagaatggggcctttgtc

SEQ ID NO: 672042 - DNA, 120 bp, Artificial Sequence
  ENSG00000185722_8 (sequence is synthesized)
aacgctgctacactgggtgcccaggagacaccactgcaccttgtggccttgtacagttcaaagaaacactcagcagatgtgatgtctgagatggcgcagattgcagaggcccttctgcag

SEQ ID NO: 672043 - DNA, 120 bp, Artificial Sequence
  ENSG00000185722_9 (sequence is synthesized)
gctggtgccaaccccaacatgcaggacagcaaggggaggactcctttacatgtgtccatcatggccgggaatgaatatgtgttcagtcagctgctgcagtgcaaacaactagatttagaa

SEQ ID NO: 672044 - DNA, 120 bp, Artificial Sequence
  ENSG00000185722_10 (sequence is synthesized)
ctcaaagaccacgagggcagcacggctctgtggctggcagtgcagcatatcacagtgtcttctgaccagtctgtgaaccccttcgaagatgtccccgtggtaaatgggacttcatttgat

SEQ ID NO: 672045 - DNA, 120 bp, Artificial Sequence
  ENSG00000185722_11 (sequence is synthesized)
gagaacagctttgcagccagactcatccagcgcggcagccacacagacgcacctgacacggcgacaggaaactgtttactacagcgggcagctggagcaggaaacgaggcagcagctctt

SEQ ID NO: 672046 - DNA, 120 bp, Artificial Sequence
  ENSG00000185722_12 (sequence is synthesized)
ttcctggcaaccaacggtgcccatgtcaaccacagaaacaagtggggagaaaccccgttgcacacagcgtgtcggcatggcctggccaacctcacggcagagctcctgcagcaaggcgcc

SEQ ID NO: 672047 - DNA, 120 bp, Artificial Sequence
  ENSG00000185722_13 (sequence is synthesized)
aacccaaacctgcagacggaggaagctctgcctctgccaaaggaggccgcatccctgaccagcttggcggacagcgtccatctgcagacgccactgcacatggcgatcgcctataaccat

SEQ ID NO: 672048 - DNA, 120 bp, Artificial Sequence
  ENSG00000185722_14 (sequence is synthesized)
ccggatgtggtgtctgtcatcctggagcagaaagccaatgctcttcatgccaccaacaacttgcagatcattccggacttcagcctcaaagattcccgagaccagactgtgctgggcctg

SEQ ID NO: 672049 - DNA, 120 bp, Artificial Sequence
  ENSG00000185722_15 (sequence is synthesized)
gcattatggactggcatgcacacgatcgcagcccagctgctgggctctggagccgccatcaatgacaccatgtcggatgggcagacgctactgcacatggccatacagcggcaggacagc

SEQ ID NO: 672050 - DNA, 120 bp, Artificial Sequence
  ENSG00000185722_16 (sequence is synthesized)
aagagcgcactcttcctgctggagcaccaggcagatataaatgtcagcaggactcaggacggggagacagccctccagctggccatcagaaaccagcttccactcgtagttgatgccata

SEQ ID NO: 672051 - DNA, 120 bp, Artificial Sequence
  ENSG00000185722_17 (sequence is synthesized)
tgcacccgaggagctgacatgtctgtgccagatgagaaggggaaccccccgctgtggcttgcattggcaaacaatctggaggacatcgcatccactctggtcagacatggctgtgatgcc

SEQ ID NO: 672052 - DNA, 120 bp, Artificial Sequence
  ENSG00000185722_18 (sequence is synthesized)
acatgctggggtccgggacctggtgggtgccttcagacgctcctgcacagagccattgatgaaaacaacgagcccaccgcctgctttcttattcgcagtggctgtgacgtgaacagtccc

SEQ ID NO: 672053 - DNA, 120 bp, Artificial Sequence
  ENSG00000185722_19 (sequence is synthesized)
agacaaccaggcgccaatggagaaggagaggaagaggctagagatgggcagacccctttgcatttggcagcctcttgggggctggaagagacagtacagtgtcttctggagtttggtgcc

SEQ ID NO: 672054 - DNA, 120 bp, Artificial Sequence
  ENSG00000185722_20 (sequence is synthesized)
acgagacagacaagggctgaccccgtttgcctgtgccatgactttcaagaacaacaagtcagccgaggccattctcaaacgagagtccggggctgctgagcaggtggataacaagggccg

SEQ ID NO: 672055 - DNA, 120 bp, Artificial Sequence
  ENSG00000185722_21 (sequence is synthesized)
gaatttccttcatgtggcagttcagaactctgatattgaaagtgtgctgttcctgatcagtgtccacgctaatgtgaattcaagagtccaggatgcctccaagttgacccccctgcacct

SEQ ID NO: 672056 - DNA, 120 bp, Artificial Sequence
  ENSG00000185722_22 (sequence is synthesized)
cgctgtccaagcaggctcagaaattattgtccgcaatttgcttcttgcgggagccaaagtgaacgaattaaccaagcatcgccagactgccctccatcttgctgcccagcaggacctgcc

SEQ ID NO: 672057 - DNA, 120 bp, Artificial Sequence
  ENSG00000185722_23 (sequence is synthesized)
caccatctgctcagtcctcctagagaatggcgtggactttgctgccgtggatgagaatggaaacaatgctcttcatcttgctgtcatgcacggccggctcaacaacatccgggttctcct

SEQ ID NO: 672058 - DNA, 120 bp, Artificial Sequence
  ENSG00000185722_24 (sequence is synthesized)
gacagagtgcacagtggacgccgaagcctttaatctcagaggccagtcaccactgcacattttgggacaatatggcaaggagaatgcagcggccatctttgatctcttcctagaatgcat

SEQ ID NO: 672059 - DNA, 120 bp, Artificial Sequence
  ENSG00000185722_25 (sequence is synthesized)
gccggggtatcctctggacaagccggatgcagacggcagcacggtgctgctcctggcatacatgaaagggaacgccaacttgtgccgcgccatcgtccggtcgggggctcgcctcggggt

SEQ ID NO: 672060 - DNA, 120 bp, Artificial Sequence
  ENSG00000185722_26 (sequence is synthesized)
gaataacaaccagggagtcaacatcttcaactaccaggtcgccaccaagcagctcctgttccgactgctggatatgctgtccaaggagcctccgtggtgtgacggctcctactgctatga

SEQ ID NO: 672061 - DNA, 120 bp, Artificial Sequence
  ENSG00000185722_27 (sequence is synthesized)
gtgcactgccaggttcggagtcaccactcgcaaacaccactgtcgtcactgcggacgtcttctttgccataaatgctcgaccaaggagattcctattataaagtttgatctgaacaagcc

SEQ ID NO: 672062 - DNA, 120 bp, Artificial Sequence
  ENSG00000185722_28 (sequence is synthesized)
tgtgcgggtttgcaacatttgttttgatgtactgactctgggtggggtttcttagtgagccccccggagggtccaggccacgtccttggtcacctccccagcagctgctctgctcaccag

SEQ ID NO: 672063 - DNA, 120 bp, Artificial Sequence
  ENSG00000185722_29 (sequence is synthesized)
cctgaccccacccagagcaggagctggcgggtgtcttcctgcggcaatagactggaacgattaaggaccatggtgtgatagatcccatttcaaatgattccatatgattgtcagtgtgtg

SEQ ID NO: 672064 - DNA, 120 bp, Artificial Sequence
  ENSG00000185722_30 (sequence is synthesized)
tgtcagactgtgatcgatttcactagatgtctcactcatcagaccaggccattgggcctaagtggtaaatgtgattaggaattagacctctccccattctgctagcaacatacagggaca

SEQ ID NO: 672065 - DNA, 120 bp, Artificial Sequence
  ENSG00000185722_31 (sequence is synthesized)
cttggaaaaccatttccccttccagtagcttggtgtccatcccagagcattcatgaagtcttcccgcctgggctgactgatgaggcagagcctctcagcgtaggaagctggctgcttaat

SEQ ID NO: 672066 - DNA, 120 bp, Artificial Sequence
  ENSG00000185722_32 (sequence is synthesized)
gagctggctttactctagggtaagtggctgtggacttttctgcacagtgttttcataaagataataggatcctcttgccctgaagtctttttttctttttacgctaagctgtatttttag

SEQ ID NO: 672067 - DNA, 120 bp, Artificial Sequence
  ENSG00000185722_33 (sequence is synthesized)
tgagctaccccttttaaaaaggtgaaatctttcttaacagggttcaaagatgagagctgaaaaatcgtggccttaacaactgaaagctttacagtgttcatgctactgaggtgtcaggag

SEQ ID NO: 672068 - DNA, 120 bp, Artificial Sequence
  ENSG00000185722_34 (sequence is synthesized)
tgcagctgggccgcttgacacctcgtagcagccgtctcattctctcgtcttgctgcgtcctgtctgtggagtcctcagtcactctgctgttggagagtgctggaggaaatgcacttttac

SEQ ID NO: 672069 - DNA, 120 bp, Artificial Sequence
  ENSG00000185722_35 (sequence is synthesized)
tgtgctgcactttttatagagctgcattgtcggtgattccaatttaaaaatccatattcaaaaataccctcacacatccctgcatcagtgattctaatgatcagctttgactggacctca

SEQ ID NO: 672070 - DNA, 120 bp, Artificial Sequence
  ENSG00000185722_36 (sequence is synthesized)
gctcacacgaatctccaaggaaaaactctacagagcatcttttagagcaagagattcatacaggccaagtgatgagagggggagtcaccaaggcttcagccccaagggcatctccagcct

SEQ ID NO: 672071 - DNA, 120 bp, Artificial Sequence
  ENSG00000185722_37 (sequence is synthesized)
caggccggcaggtcctatgtccttgacacaaatgcttcttgctgaaatcctccctagtgatgctgcgagtgctgttggtcccagttctgtgtagcttgccctgccccatgaagggccacc

SEQ ID NO: 672072 - DNA, 120 bp, Artificial Sequence
  ENSG00000185722_38 (sequence is synthesized)
agccaagggccctggccacgtgtgcgccaccttactttggaagtctctggcttgtgtgctggatgaggctgccagaacttgttgggcgttcatcgctgttagtacatatattaaccgtga

SEQ ID NO: 672073 - DNA, 120 bp, Artificial Sequence
  ENSG00000185722_39 (sequence is synthesized)
ggtgttaaacttttcttttgaaggtttggccagtttctaaaaaatgcacatttaaagagaagcatctaccacggctttaaaacaaaacaactctgagatgaacaatatgtgttatactca

SEQ ID NO: 672074 - DNA, 120 bp, Artificial Sequence
  ENSG00000185722_40 (sequence is synthesized)
gagattaacaatctcaatcatacatactgattctttcagacatttaataaccactacatttttttgcattaatgaagtttgactatatgtgtaaagggactaaatatttttgcaacagcc

SEQ ID NO: 672075 - DNA, 120 bp, Artificial Sequence
  ENSG00000185722_41 (sequence is synthesized)
tatacattctgttgcctaaatatgtgtgtaaaatgagctgataaactggagtactacttaaaaaaaagtctgtgatttataagatgtatatgctttctatgtgaatataagcttgtgcac

SEQ ID NO: 672076 - DNA, 120 bp, Artificial Sequence
  ENSG00000185722_42 (sequence is synthesized)
aatgtttaaaagaaaaacaatgaattagaagagatcccccgtcccccagtctgacatatttcatacagaatgtttaaaagaaaaactctgctagtcttggcaaacatttggccatgtgag

SEQ ID NO: 672077 - DNA, 120 bp, Artificial Sequence
  ENSG00000185722_43 (sequence is synthesized)
gcatgtggtcagtttccattttctattacctggaaagggccataaggaagcaggcagggcttaggtagcttggttacctaagttagaaagtaagagaatcatgattcggatatgaattga

SEQ ID NO: 672078 - DNA, 120 bp, Artificial Sequence
  ENSG00000185722_44 (sequence is synthesized)
agtggttggtacatggatacctgttctttaaaaggaatgtgggagatgagtcaagggtgaggccgattgttctgcccatgccctaccataccaatttcaataacaatcttgcctgtcatt

SEQ ID NO: 672079 - DNA, 120 bp, Artificial Sequence
  ENSG00000185722_45 (sequence is synthesized)
gcactcagaatcttaagatcatgtttcaaatatgttgattcaaacttgcttctaagcctgagtccagggatagcaatggtactgaccagctatggactgggagaacattgagtcctgttt

SEQ ID NO: 672080 - DNA, 120 bp, Artificial Sequence
  ENSG00000185722_46 (sequence is synthesized)
tccattggcttcagggcgcatccatgtggatataggaaaagcctctttccacagacttaggaagccccccgaccacgcggacgctcgctgggctgcactcagcaggctgcttgagtggga

SEQ ID NO: 672081 - DNA, 120 bp, Artificial Sequence
  ENSG00000185722_47 (sequence is synthesized)
gctgactccaacatgccctgccctggctgggactaggcatgcttccagcccttcccgtgctctccctgctgtcaacacttgcgtacaaacctgcctagctgttgtaagttttcatcagta

SEQ ID NO: 672082 - DNA, 120 bp, Artificial Sequence
  ENSG00000185722_48 (sequence is synthesized)
gcttaagtactagtagcaaaaacttaaattcattcagaaagttgccacttctgaatgagtagagcaggaaaagtaaactttactgaaacataatttgctgcaacagtcaacattgttatg

SEQ ID NO: 672083 - DNA, 120 bp, Artificial Sequence
  ENSG00000185722_49 (sequence is synthesized)
ctgaatgtgctctcaactgccctttgctcatcgccagatttattatccagtgtattcctaacagtcttttgttgtcgttgtttttaaaacaaaggtacggaccatgtgctatatataaat

SEQ ID NO: 672084 - DNA, 120 bp, Artificial Sequence
  ENSG00000185722_50 (sequence is synthesized)
cgaatggcttaaactaatttgctatgatcctctaacaccgaaatttcccataaacttaagtgcctacacttaggacttttgaactttcagtcatctttttcgtggtgtctcactgaacga

SEQ ID NO: 672085 - DNA, 120 bp, Artificial Sequence
  ENSG00000185722_51 (sequence is synthesized)
tgtgttagaacatgtgttccatttggagttttgggcctgtgcacggtcaaccccaattaccaatttagttgaggctggattcgattgctcagttcacctgccacgttctctccaaggagt

SEQ ID NO: 672086 - DNA, 120 bp, Artificial Sequence
  ENSG00000185722_52 (sequence is synthesized)
ggggtctacgtgacctttagtcctctacctcagagccccgagtcatttctgaccaccccgttctgtgtcctcactcttgtccctgaatgggtccctgtgtggatctcagtgtgtgtgtgg

SEQ ID NO: 672087 - DNA, 120 bp, Artificial Sequence
  ENSG00000185722_53 (sequence is synthesized)
tttctccactcctccccgctcatgtcccacacctgccatattgaaccgtttctgcactaatcttctccacgggcacggagtggagggaacgtcttgggaaaggggagagcttgacctcca

SEQ ID NO: 672088 - DNA, 120 bp, Artificial Sequence
  ENSG00000185722_54 (sequence is synthesized)
tctaggtttcttttatctggagaaaaagaacacttttgaactatgtaatgcttcaccctgaaaggcaagctaacgctaacttcccaggtgacagtagcaggaacaaggaagggtaatgtt

SEQ ID NO: 672089 - DNA, 120 bp, Artificial Sequence
  ENSG00000185722_55 (sequence is synthesized)
tccatgacagacacttgcttcccttgggacaagtcccagaagaactacctgaagcaccaaagctccccaccccagcctggtggcagaggaagcaggtggcaccaactcaccaaagggact

SEQ ID NO: 672090 - DNA, 120 bp, Artificial Sequence
  ENSG00000185722_56 (sequence is synthesized)
tgggagccaccttctcactctgtggaagtactttagtgagagctgactggcaagataaaaaccctgaaattcccagaagttacagatgccttaaagactttctttggaagatcattgcct

SEQ ID NO: 672091 - DNA, 120 bp, Artificial Sequence
  ENSG00000185722_57 (sequence is synthesized)
gtactattccttttttgtgtggcataaataatatattaacctgttacaactgacaacattggttttctgcagctagggagtcttgagtcgagactgctcgccttgatgacttgctctttt

SEQ ID NO: 672092 - DNA, 120 bp, Artificial Sequence
  ENSG00000185722_58 (sequence is synthesized)
ttggcagatgtgtggagttggctgttacgacatccctgtgtgatcccagaggaggggcagtagctgggcagaaactgcaggcacacatttgggtggatcacctggcttccagccccttcg

SEQ ID NO: 672093 - DNA, 120 bp, Artificial Sequence
  ENSG00000185722_59 (sequence is synthesized)
gggtggtgctcagtgtggggtgatggtatcatagaggaccacggcgcttatcagcattgtttctttggagtctgtgtaatggaatgtatttttcaaatactgatatttgcattttctgta

SEQ ID NO: 672094 - DNA, 120 bp, Artificial Sequence
  ENSG00000185722_60 (sequence is synthesized)
acaattccttataataaaatgaagtaaaattgtgcatttaaagtggaaactttaataagacatttgtagttacttctaatgcagaagtaccaataagcattaaaaacaaattttagaaaa

SEQ ID NO: 672095 - DNA, 120 bp, Artificial Sequence
  ENSG00000185722_61 (sequence is synthesized)
aaggtgttcctttaaaggcgatgctggggacagatgttacctcccttgctttgtgttatcttgtagctaaattttgctaaagcttttgctattctcttttctttcactggtctgttacct

SEQ ID NO: 672096 - DNA, 120 bp, Artificial Sequence
  ENSG00000185722_62 (sequence is synthesized)
gaaattacataatcgtataaactgaaaaattaaatatgaaataatataatccaatgtccaaactttcagctttccttccctttctgtttcccttgacattttactctattttctgatata

SEQ ID NO: 672097 - DNA, 120 bp, Artificial Sequence
  ENSG00000185722_63 (sequence is synthesized)
tcaagttgaatgaaatccttagtcatagtctctttgttggaaacaatgagtgcctaaatgaatatgtgaaaatattgtccaaataagtgtcatagccagtgttccagagatctcacttca

SEQ ID NO: 672098 - DNA, 120 bp, Artificial Sequence
  ENSG00000185722_64 (sequence is synthesized)
ggccgggcgtggttgcatgggggctccgcgggtctcgcgagccttcctgtctagcctctccggagcttctcgggccggggtccggagcgcggttcctatgacaacgtccctcccgcgatg

SEQ ID NO: 672099 - DNA, 120 bp, Artificial Sequence
  ENSG00000185722_65 (sequence is synthesized)
ccgggctggcaggtcccgcgccggtgctgcgtgcagccgcggggccccgagggcagcacgggaggctcttgattgccggcggtgccgggacgccgggggaaaggaggtggccaagttgga

SEQ ID NO: 672100 - DNA, 120 bp, Artificial Sequence
  ENSG00000185722_66 (sequence is synthesized)
gattagagcaaccatcaactaggcgtctccagattaaccatcaactaggagtctccagattagagcagccatcaactaggagtctccagtatagagcaaccatcaactaggagtcggatt

SEQ ID NO: 672101 - DNA, 120 bp, Artificial Sequence
  ENSG00000185722_67 (sequence is synthesized)
ccaggacaggccgtgaacttgcctgggtcctgcacattgatgggcaaaccttgaccaaatggagggatgagatgagcacacccaaggatcctactgaggaacagagatgtagggaaggca

SEQ ID NO: 672102 - DNA, 120 bp, Artificial Sequence
  ENSG00000185722_68 (sequence is synthesized)
gggagcctgcagacgggtggctttcctgctggaggctgaaggtgcacagtttccaggcagcctgccaggcctgtgccatccttcctgacttcctgcctgcaccaaagctgagatgagcta

SEQ ID NO: 672103 - DNA, 120 bp, Artificial Sequence
  ENSG00000185722_69 (sequence is synthesized)
ctgccctcatggtgtgcctcagtatgggccgctttgccgagaactaaggggctgttcccattaaaatgagatagataggcgtgagccaccatgcctggcctgagctgctcttgatcttcc

SEQ ID NO: 672104 - DNA, 120 bp, Artificial Sequence
  ENSG00000185722_70 (sequence is synthesized)
actgctcaggtgacgggtgcactaacattaagaaatcaccaccgaagaacttatccgtggaaccagaaaccacctgtaccccaaagacactgaaatacgaatttaaaaaaaacagttgcg

SEQ ID NO: 672105 - DNA, 120 bp, Artificial Sequence
  ENSG00000185722_71 (sequence is synthesized)
gcgaacccatggaaaaacagaggaaactggccaggaggaggagcctgtgtgtgggaataaattccattgtgatttttgaatttctacacatttaagggagaaaccccgttgcacacagcg

SEQ ID NO: 672106 - DNA, 120 bp, Artificial Sequence
  ENSG00000185722_72 (sequence is synthesized)
ctgcaggcgccaggaaatggcatgtaaatgccttcaccccaaatttagaaactgaacggcatactatgaggataattattttgtacttaattttatatacagtaaaagcctgggttgtca

SEQ ID NO: 672107 - DNA, 120 bp, Artificial Sequence
  ENSG00000185722_73 (sequence is synthesized)
tttttaaaaatcctgtgcttcaaacaattgagcagacatcaagtccctgaaactgaaacttccatttatttaatgcggcgactcgcagactctttggactcaagaattcctttgaccgtc

SEQ ID NO: 672108 - DNA, 120 bp, Artificial Sequence
  ENSG00000185722_74 (sequence is synthesized)
ttaaaaattgtaccccagagagcttttctttaggtgggttataacttcagtatttaccatattagactacactttgagaacactgttttaatgtatttccttgatctgactaaataaaat

SEQ ID NO: 672109 - DNA, 120 bp, Artificial Sequence
  ENSG00000185722_75 (sequence is synthesized)
aacagggatattttaaggagagggatttggtgtaattcagtattgagtactggcaatgcataaaacatgggtaggtgtcactcacacaggaagacttgaccaaaaaaaaaaaaaaaaaaa

SEQ ID NO: 672110 - DNA, 71 bp, Artificial Sequence
  ENSG00000185722_76 (sequence is synthesized)
ttgttgcccagggtggagtgcaatggggcaatctcggctcaccacaacctctgccagcagggatgcaccac

SEQ ID NO: 672111 - DNA, 120 bp, Artificial Sequence
  ENSG00000185722_77 (sequence is synthesized)
ggattgcagggatgcaccaccacgcccagctaaatgcttattagcataatatctgagacattaggtactatttgatagttatttttactttattattttcagaccatgaggatgtgcttg

SEQ ID NO: 672112 - DNA, 120 bp, Artificial Sequence
  ENSG00000185722_78 (sequence is synthesized)
tcttcaagatcacatttattttacggtcactttctgctagcagctttaaggctattatcccttttaattttcacagtggacctggaagcagcatgtatcgttaggattgaagaagccttt

SEQ ID NO: 672113 - DNA, 120 bp, Artificial Sequence
  ENSG00000185722_79 (sequence is synthesized)
cccacatcaatcaattctctattttggagtcaaggaccttgaggttctgagaggttaagtggcttataaataatgaggtgtccacattaagactccagcacaaggctatctagttgcaca

SEQ ID NO: 672114 - DNA, 120 bp, Artificial Sequence
  ENSG00000185722_80 (sequence is synthesized)
ctgtctcaacagcactgggcaaggcagtaaacagtgagcttggtatctgagccagacaagtgtatcttggtacaggacagagggcagtgccatcctttccactgctgactccactatgtg

SEQ ID NO: 672115 - DNA, 120 bp, Artificial Sequence
  ENSG00000185722_81 (sequence is synthesized)
tctgcacacagccaactctccagccagagtgacagcgcggccccgtgcgcaccggccagagtgacggcatggcctcgtgcccaccggccagagtgatggcatggccccatgcccaccaga

SEQ ID NO: 672116 - DNA, 120 bp, Artificial Sequence
  ENSG00000185722_82 (sequence is synthesized)
ggctgctgcttgttttgggctcagcatctcagcatctcgtgccctctcaccttctccatgcctctgctcttgccatcgtgtgtctctgtctctttcttttcctcctgcatcattagcttt

SEQ ID NO: 672117 - DNA, 120 bp, Artificial Sequence
  ENSG00000185722_83 (sequence is synthesized)
tctctttcttttcctcctgcatcattagctttgcccattattcatttctaatagcatagagacatgctctactatctcctaacttaaaatcttctgctgggcacggtggctcacgcctgt

SEQ ID NO: 672118 - DNA, 120 bp, Artificial Sequence
  ENSG00000185722_84 (sequence is synthesized)
tgggaggcagaggttgcagtgagtggcgattgcgctgctgcactccagcctggggcacagagtgagattttgtctcggaaaacaaaaaacaaacaaaaaaaaacctcccttgggcccaca

SEQ ID NO: 672119 - DNA, 120 bp, Artificial Sequence
  ENSG00000185722_85 (sequence is synthesized)
acctcccttgggcccacattgtctacccgctgttgttccttctctgaatacccttcatagcaaaactaggtcaaacccaagctgtagagaaacgggaggcctcacttgaaagcactggag

SEQ ID NO: 672120 - DNA, 120 bp, Artificial Sequence
  ENSG00000185722_86 (sequence is synthesized)
accagcactgcagaagggcctggaacactggcttccgctgtgtgggctttatcctgtggggacagaagagccattggagggttttgggcagagaagtagtgtgattcttctggagctgag

SEQ ID NO: 672121 - DNA, 120 bp, Artificial Sequence
  ENSG00000185722_87 (sequence is synthesized)
aaaactgcctgggatggctggcatggtgggtgtgccgtggagtccaggctggagccaagtgggagtcatcttgacaagcaatgacctgtcctgtcctgtcctctcacactgcatttggat

SEQ ID NO: 672122 - DNA, 120 bp, Artificial Sequence
  ENSG00000185722_88 (sequence is synthesized)
ccaaaggaacaggtttcacaggaattgcagaatcagtctgtgacacgcatgcttgaggctcccagaagcgagggcaagagagctgttaaaacccctgtggtgcaagaatgacgtaatgga

SEQ ID NO: 672123 - DNA, 120 bp, Artificial Sequence
  ENSG00000185722_89 (sequence is synthesized)
ccttgcagataatggcagaagccgtggagtagatcagcacacccaaggagaatgcgtaggaagaaggtctggaacagaagacagccccgaggaggaggggtagaggagcgggaggagcag

SEQ ID NO: 672124 - DNA, 120 bp, Artificial Sequence
  ENSG00000185722_90 (sequence is synthesized)
gggaggaggaggaagaggacatacttgggcgggctcacactgcaattacagttcccctgtatggggaggatttgggatgggaagcgcgcactctgggtcaaggcgtaaaagtactcaatc

SEQ ID NO: 672125 - DNA, 120 bp, Artificial Sequence
  ENSG00000185722_91 (sequence is synthesized)
cttatctgccacagtggaaagtcccacagataatgttcaaagctggaaaatcaagaggcagcaataaaaacatgttggttagaaatatggagagttacaaaacccagctggaagagttaa

SEQ ID NO: 672126 - DNA, 120 bp, Artificial Sequence
  ENSG00000185722_92 (sequence is synthesized)
gggaggtgggatgggcgcgcaccaccacgcccggttaatttttgtgtttttagcagagagggggtttcgtcacgttggccaggctggtcgtggactcctgacctgaggtgatccacctgc

SEQ ID NO: 672127 - DNA, 120 bp, Artificial Sequence
  ENSG00000185722_93 (sequence is synthesized)
gctgggattagaggcatgagccaccgcatccggctggttctcaggctttaaatgtatgcatatcccctgggaagtttctaacaattctgatgcccgggttgcccacccccaagaccagtc

SEQ ID NO: 672128 - DNA, 120 bp, Artificial Sequence
  ENSG00000185722_94 (sequence is synthesized)
acccccaagaccagtcacagaagaatctatgggagtggaaccccgactctggtatttgaggccagggaccaaggacagcagacccggccacagcagacgctgttggattggatgaggctc

SEQ ID NO: 672129 - DNA, 120 bp, Artificial Sequence
  ENSG00000185722_95 (sequence is synthesized)
gtcgtttctcttttccggggagagaggtgtagccccagcatgagggaagcctcctcctatggcagaggaccttgcacagtccccagttccaggcgctgctgcttcatgaacacacgacct

SEQ ID NO: 672130 - DNA, 120 bp, Artificial Sequence
  ENSG00000185722_96 (sequence is synthesized)
ccctagcagcgttcatgatttcaggctgactgtgcttctctgtgcctttgtccttactacaacaggaggaagatttgtttcagctctttctctttgcctcctattcccccttagttacag

SEQ ID NO: 672131 - DNA, 120 bp, Artificial Sequence
  ENSG00000185722_97 (sequence is synthesized)
atttcctctgagagtttagtcccaaatcgcatactgtatttaggaaaatgtcccagtagctcacttgagcacccctgagttacgccctttgatgcttttcaacattcgagcctgtgcaga

SEQ ID NO: 672132 - DNA, 120 bp, Artificial Sequence
  ENSG00000185722_98 (sequence is synthesized)
tttatatataaggccctatagccagataaggagtggtggcttagagcggagactcactgcagatgtgaaacacatgtttgtgctggtcctacggtcaccactgggtcactggaacgtggt

SEQ ID NO: 672133 - DNA, 120 bp, Artificial Sequence
  ENSG00000185722_99 (sequence is synthesized)
cctcttcaaaagctgagtcaaacacagggtggtagtattgatcgattctcataactgaaatttgatttaaaagttataccctttcatatttttcctgagttttatcttgcaattgaacat

SEQ ID NO: 672134 - DNA, 120 bp, Artificial Sequence
  ENSG00000185722_100 (sequence is synthesized)
taaattctgtgccttgttccataggatgcagaaggaagaacccccatccacgtggccatcagcagccaacacggtgtcatcattcagctgttggtttctcaccccgatatccatttgaat

SEQ ID NO: 672135 - DNA, 120 bp, Artificial Sequence
  ENSG00000185722_101 (sequence is synthesized)
ctgaccttctccacatggtcctgggcgtcgcggaacctggagactagacagatgtcaccgactaaacaggtctcctcatggaaagagctttgttttgaagttgtactcctgtcctaagat

SEQ ID NO: 672136 - DNA, 120 bp, Artificial Sequence
  ENSG00000185722_102 (sequence is synthesized)
gtggctgttgagatgtcccatccgtgcaggatgagatccggctcctctgcctgtgtgtcagcgcctgacagtgcccggcttcgatggaagcggaggcagtgggctccatcgtaggaattc

SEQ ID NO: 672137 - DNA, 120 bp, Artificial Sequence
  ENSG00000185722_103 (sequence is synthesized)
tgtggcatgtacagttgagctcattctttgcttttgctaggttggttaactgtcctagtgaggagtgtctttgaaagagcttgtgttgtgatgttggggcaacttcctgagtgtttccga

SEQ ID NO: 672138 - DNA, 120 bp, Artificial Sequence
  ENSG00000185722_104 (sequence is synthesized)
ggagttcagttgctcagtagcctcggctgtccttgttctttgtggttctttaccagctgctacatcgggatggtgaactgttgatctgcaacaagcagttggctgggaaatgacaatcac

SEQ ID NO: 672139 - DNA, 120 bp, Artificial Sequence
  ENSG00000185722_105 (sequence is synthesized)
aactgatctgagtaggagggggtgggtttatcaggtcagtcctgcaggaacttggctctccagccagcacctagagtactggcgcatttatcagtggcattcatgaaggtgagatggaac

SEQ ID NO: 672140 - DNA, 120 bp, Artificial Sequence
  ENSG00000185722_106 (sequence is synthesized)
ttgggacccgcgtgaagtgagatcctcgcatgggtggagatgattgcttggtgtcttaggcttccgtaaccaccgtcttcagcattttcacaagtgtgactggattgcgtaggtggtgac

SEQ ID NO: 672141 - DNA, 120 bp, Artificial Sequence
  ENSG00000185722_107 (sequence is synthesized)
ctcacgtttgctcaggtggtgtgaaatggcctctcccgtttcttctctccagtgtgaaactggactgctgatgaaagcgctttgtggatccgctgcttatgagactggcacgtgccgtgt

SEQ ID NO: 672142 - DNA, 120 bp, Artificial Sequence
  ENSG00000185722_108 (sequence is synthesized)
gtgacgtgtgggcctgtgaagcggcgtgccgtgtgtgtggcactggggtcgccctcgctgccgcctccacactcatgctaagacggctctgggaactacaggagacggtgtgctttgatt

SEQ ID NO: 672143 - DNA, 120 bp, Artificial Sequence
  ENSG00000185722_109 (sequence is synthesized)
tcttattcgcaggtctgagagtccccagtatctctccacagctttttagtgagcttgttgcaaactggctctttcctttttaaatccgtctatagtcttggcatgccagtagccggcttg

SEQ ID NO: 672144 - DNA, 120 bp, Artificial Sequence
  ENSG00000185722_110 (sequence is synthesized)
actttcacagttaaggttatcagagagtcactgttctgtcatgtcaagtcagccaggagccaggctcacttgtgacgggaggagctcacagccctgaatcaaagaatctgaaagctggag

SEQ ID NO: 672145 - DNA, 120 bp, Artificial Sequence
  ENSG00000185728_0 (sequence is synthesized)
agagagcgagagggggaagaggagcgtgcaagcggaaaagacgggcctcttcctccgactcccgagcgcgaggccctcattttgggttctcagcgaacggcggcagcggcggcggctgga

SEQ ID NO: 672146 - DNA, 120 bp, Artificial Sequence
  ENSG00000185728_1 (sequence is synthesized)
acaatcactcggccaagggcgacagccaactgctgtgagtgcacggggagaggcccaggcagcggcggcggcggcggctctcgggttgcggtgaagaatgtcagccactagcgtggatca

SEQ ID NO: 672147 - DNA, 120 bp, Artificial Sequence
  ENSG00000185728_2 (sequence is synthesized)
gagacctaaagggcaaggaaataaaggtggggaaacatgatgcacagatctgttgactttcctaacttgatgtagtcaggaccagagcaaagaatcacctggctcctaaggcccatgttc

SEQ ID NO: 672148 - DNA, 120 bp, Artificial Sequence
  ENSG00000185728_3 (sequence is synthesized)
tatcttgatttgactctgtttcatagagcagaggaaacaggcgaagaatcattttcagtacaaaacggttcgattcatcaaaaagatgctgtaaatgatgatgattttgagccatactta

SEQ ID NO: 672149 - DNA, 120 bp, Artificial Sequence
  ENSG00000185728_4 (sequence is synthesized)
agtagccagacaaatcagagtaacagctatccaccaatgtcagatccatacatgcctagttactatgctccatccattggatttccatattctcttggggaagcagcgtggtccacagct

SEQ ID NO: 672150 - DNA, 120 bp, Artificial Sequence
  ENSG00000185728_5 (sequence is synthesized)
ggagaccagcctatgccatatctgacaacctatggacaaatgagtaatggagaacatcactatataccagatggtgtatttagtcaacctggggcattaggaaatacccctccatttctt

SEQ ID NO: 672151 - DNA, 120 bp, Artificial Sequence
  ENSG00000185728_6 (sequence is synthesized)
ggtcaacatggatttaacttttttcctggtaatgctgatttctctacatgggggacaagtggatctcagggacaatcaacacaaagttctgcttatagtagcagttatggctatccacct

SEQ ID NO: 672152 - DNA, 120 bp, Artificial Sequence
  ENSG00000185728_7 (sequence is synthesized)
agttctcttgggagagctattactgatggacaggctggatttggcaatgatactttgagtaaggtgcctggcattagcagtattgagcaaggcatgactggactgaaaattggtggtgac

SEQ ID NO: 672153 - DNA, 120 bp, Artificial Sequence
  ENSG00000185728_8 (sequence is synthesized)
ctgacagctgcagtgacaaaaactgtaggtacagctttgagcagcagtggtatgactagcattgcaaccaatagtgtgcccccagttagcagtgcagcacctaaaccaacctcctgggct

SEQ ID NO: 672154 - DNA, 120 bp, Artificial Sequence
  ENSG00000185728_9 (sequence is synthesized)
ataaaacacaacatgaatattggaacttgggatgaaaaagggtcagtggtaaaggctccaccaacccaaccagttctgcctcctcaaactataatccagcagcctcagccattaattcaa

SEQ ID NO: 672155 - DNA, 120 bp, Artificial Sequence
  ENSG00000185728_10 (sequence is synthesized)
ccaccaccattggtgcaaagccaactgcctcaacagcagcctcaaccaccacaaccacagcagcaacaaggacctcagccacaggcccagcctcaccaagtgcagcctcaacagcagcag

SEQ ID NO: 672156 - DNA, 120 bp, Artificial Sequence
  ENSG00000185728_11 (sequence is synthesized)
ctgcagaatcgctgggtagctcctcgtaacaggggagcaggcttcaaccagaacaatggagcgggcagtgaaaactttggtttaggtgttgtacctgtcagtgcttcaccttctagtgta

SEQ ID NO: 672157 - DNA, 120 bp, Artificial Sequence
  ENSG00000185728_12 (sequence is synthesized)
gaagtgcatcccgtgctggaaaagctaaaggccataaacaactataatcccaaagactttgattggaatctgaagaatggacgtgtgtttataattaaaagctactctgaggatgacata

SEQ ID NO: 672158 - DNA, 120 bp, Artificial Sequence
  ENSG00000185728_13 (sequence is synthesized)
catcgttccattaaatactctatctggtgtagtactgagcatggtaataagcgtttggatgcagcttaccgttccctgaatgggaaaggcccactctatttactcttcagtgtgaatggc

SEQ ID NO: 672159 - DNA, 120 bp, Artificial Sequence
  ENSG00000185728_14 (sequence is synthesized)
agtggacatttttgtggagtggctgaaatgaagtctgttgtggactataatgcgtatgctggtgtctggtctcaggataagtggaagggcaaatttgaagttaaatggatctttgtcaaa

SEQ ID NO: 672160 - DNA, 120 bp, Artificial Sequence
  ENSG00000185728_15 (sequence is synthesized)
gatgttcccaataaccaattacggcatattcgcttagaaaataatgacaacaaaccggttaccaattcaagggacactcaagaggtacccctagaaaaagctaagcaagtgcttaaaata

SEQ ID NO: 672161 - DNA, 120 bp, Artificial Sequence
  ENSG00000185728_16 (sequence is synthesized)
attgctactttcaagcataccacctcaatctttgatgactttgcacattatgaaaagcgtcaagaagaggaggaagccatgcgtagggagagaaatagaaacaaacaataaccgtatgaa

SEQ ID NO: 672162 - DNA, 120 bp, Artificial Sequence
  ENSG00000185728_17 (sequence is synthesized)
gatgtcctgttaaatttacaacactaacgatgtagactctggaaatgcctaataagtcaaagaagacgtattaaagctcttttctgcttaaggtgacatctttgaacactttaacacaaa

SEQ ID NO: 672163 - DNA, 120 bp, Artificial Sequence
  ENSG00000185728_18 (sequence is synthesized)
gttgactcttctcgtaatggttttcatcagcgcatctgcccttatactcttcaccaaacacacttgagaactgtaacttcgtcaagcactttctgtcctgaagcttttaccagtatctgc

SEQ ID NO: 672164 - DNA, 120 bp, Artificial Sequence
  ENSG00000185728_19 (sequence is synthesized)
gcacagaagactgaatgaatgcaaggattcattaactctttgaatttgttaaatactaacagttaaccattagaagtggttcaatgatgtaagagtcacactgcttcaactttttctttg

SEQ ID NO: 672165 - DNA, 120 bp, Artificial Sequence
  ENSG00000185728_20 (sequence is synthesized)
tgaaacataatctgaaattatattagaacatttcccttgtcttcaaactgtttggtgtaacagaatattgatatgcagcttggtggatttcaccagttaatgcacattcttcttccctcc

SEQ ID NO: 672166 - DNA, 120 bp, Artificial Sequence
  ENSG00000185728_21 (sequence is synthesized)
tccccccattaatatgtatactgaaaaatgtgcatttgtctgaggaattattttgtttgctaccacttaatgaatctcaaaattttgagtaaatgtacctcagtctaatcagacttttta

SEQ ID NO: 672167 - DNA, 120 bp, Artificial Sequence
  ENSG00000185728_22 (sequence is synthesized)
tgacctttataactacatttaaaacccttaattcctatttctgggtgtttgcgagcctgattgctatcatgaagtaaaaatttattactctaggtattcactagctaaataaacatagtt

SEQ ID NO: 672168 - DNA, 120 bp, Artificial Sequence
  ENSG00000185728_23 (sequence is synthesized)
cttgtttagcaagcatatgttgttcctcagctcttttctccagcttttgcagtgtcctggcatccttaaaatactttgaaaatatggccttgatccatggattaaatcagtatctaagtg

SEQ ID NO: 672169 - DNA, 120 bp, Artificial Sequence
  ENSG00000185728_24 (sequence is synthesized)
aatgtgttgatgttttattgatcagatctatataagtgggaatacagcatatatctggatattcttatagttatctttttaacatcttatttttttcattaattacatatcaacattaat

SEQ ID NO: 672170 - DNA, 120 bp, Artificial Sequence
  ENSG00000185728_25 (sequence is synthesized)
tttgtatcttgaagcaaattgattttgtataattaaatgtgtcaagcatctgtattaattgatttgatggcataaggttatgaaaataatgtactgccccatgtattactgttccaaaag

SEQ ID NO: 672171 - DNA, 120 bp, Artificial Sequence
  ENSG00000185728_26 (sequence is synthesized)
gagaaagctatgtagaaagatacattaagggtgaaaatagcaatacagtagatttgaataccttgatgttttgcattacttcatttatgtttacatcatgtttagaaatgttttcattta

SEQ ID NO: 672172 - DNA, 120 bp, Artificial Sequence
  ENSG00000185728_27 (sequence is synthesized)
ctgtggtctttggtcacttcagctcaaagacctagtgatggatatttctttgaggctttcatttatataattttattttgtacaatgttttttttaaatgtgcaaatactgtattcaagt

SEQ ID NO: 672173 - DNA, 120 bp, Artificial Sequence
  ENSG00000185728_28 (sequence is synthesized)
gaaaaaaatacagtatttgtagataaccatagctactacacagttcttcggtagtcccagtgtagttatatcagtgtttactgaagggaacatcaaaatattaatggtatattataaaat

SEQ ID NO: 672174 - DNA, 120 bp, Artificial Sequence
  ENSG00000185728_29 (sequence is synthesized)
aaagactttcttaaaggaaaattgcacctattttacctttttaagagtaagccatgaaatcttgtaacatgtctcttaactatttataatgaaaagtggcatttgggtatagtcaccaca

SEQ ID NO: 672175 - DNA, 120 bp, Artificial Sequence
  ENSG00000185728_30 (sequence is synthesized)
gcaatgttctacatccctaagattatctaggtaggacatgtcaaagatgactgttgtcattctggaggtcctattagagaatattataaaagggtgaccttgtaggaaggatctgagtcc

SEQ ID NO: 672176 - DNA, 120 bp, Artificial Sequence
  ENSG00000185728_31 (sequence is synthesized)
tccccctgaggttctctttttcttggtgctttattagcaactctggatatttttataaaactagttacattataaacggtttcaaacatgtttaatttacattaggtttttatgtaagag

SEQ ID NO: 672177 - DNA, 120 bp, Artificial Sequence
  ENSG00000185728_32 (sequence is synthesized)
tgtcatggaagcactcagcaagcaggctgattgcaatagactcagacatgcgaataaatgtaattgagagtctattcatggtgaggagtacatcccagtgcctttaacctggatttctaa

SEQ ID NO: 672178 - DNA, 120 bp, Artificial Sequence
  ENSG00000185728_33 (sequence is synthesized)
tcttaagtgaaatgggtgcagcattcctttggaaaaaaaaatctttttattttcaagtgataattttgtgtttttctcatataagttttctccagagcacccaccttctcttccttcttg

SEQ ID NO: 672179 - DNA, 120 bp, Artificial Sequence
  ENSG00000185728_34 (sequence is synthesized)
gtctgtcattatattgcaaaatatttttcctctgaatgaaattatcacaggttgtctcaagcacaaccaactgaatgtctcttaactgtggggaccaaaagggagagagcctggggtcta

SEQ ID NO: 672180 - DNA, 120 bp, Artificial Sequence
  ENSG00000185728_35 (sequence is synthesized)
caagaggagacacatcatcaaatgtttgaatgatcacaaattaagacattatcagcccagtaaatttcttgcttaatgtttttccaagttctggcttgaatatttcttattaaagctatc

SEQ ID NO: 672181 - DNA, 120 bp, Artificial Sequence
  ENSG00000185728_36 (sequence is synthesized)
ttatgtgggtattttattttgaaaggtattatagtttgtatatttaacagtaaggaggaaactgtaaccaaaattagtatttctctatacgtattggtacttgaagattcctttcaaaag

SEQ ID NO: 672182 - DNA, 120 bp, Artificial Sequence
  ENSG00000185728_37 (sequence is synthesized)
aaatccagcgttttcctaattttagtacttaatttctctttttaatttaagtgatctttctaattcgaaagctgtgttctttttgaataccgtgcatgggggttaagctgatgttaaaac

SEQ ID NO: 672183 - DNA, 120 bp, Artificial Sequence
  ENSG00000185728_38 (sequence is synthesized)
agtttgcaataaaaaaaaatgaatcagcttaagtcatttaatcatttcaagtgcattctgcatcctttaaaaataagtttaagaaatttaagagaattgtgttttcattaagttttgcat

SEQ ID NO: 672184 - DNA, 120 bp, Artificial Sequence
  ENSG00000185728_39 (sequence is synthesized)
atcttttgttatgccatgtaaattccctttttcgtatgattaaaggaaggttatgataaaatgattagttcatttacattcacttgtagcaattacatgagaatttgaattttgtcgtgt

SEQ ID NO: 672185 - DNA, 120 bp, Artificial Sequence
  ENSG00000185728_40 (sequence is synthesized)
ttgggtttgttcattcctgtgaatgatggtacagttaggtgagattttctgttatggtacccaaactcaccatttggtcctctttaatctttgagggtttcaataaaaattgttcactca

SEQ ID NO: 672186 - DNA, 120 bp, Artificial Sequence
  ENSG00000185728_41 (sequence is synthesized)
ataacggtgccccgggcgcaagttgctgcggtgtagctacccgggccggggcgtgcgccctggccccgtagcttgcgggcgggcgggcgcggtgccgcggcgggtggggagacctaaagg

SEQ ID NO: 672187 - DNA, 120 bp, Artificial Sequence
  ENSG00000185728_42 (sequence is synthesized)
agtttttaaattgtcgatttttagctatttgacagattaaaagcaaaataatcatgccatatttagtcctggagttcaagtctaaatgttgatgtgaaaaattattgtagtaaactttta

SEQ ID NO: 672188 - DNA, 120 bp, Artificial Sequence
  ENSG00000185728_43 (sequence is synthesized)
ataacggtgccccgggcgcaagttgctgcggtgtagctacccgggccggggcgtgcgccctggccccgtagcttgcgggcgggcgggcgcggtgccgcggcggacctaaagggcaaggaa

SEQ ID NO: 672189 - DNA, 120 bp, Artificial Sequence
  ENSG00000185728_44 (sequence is synthesized)
aaacggttcgattcatcaaaaagatgctgtaaatgatgatgattttgagccatacttaagtagccagacaaatcaggtaagtcttctgacagtttcagattttaggaaattaacctttta

SEQ ID NO: 672190 - DNA, 120 bp, Artificial Sequence
  ENSG00000185728_45 (sequence is synthesized)
ttagtattagttgatttttcaaatagattatttaatgagattaaccataacatggattcattcatctagtgtacctatatagtaagtgagtagtgagtagcagttgcagatttatggcac

SEQ ID NO: 672191 - DNA, 120 bp, Artificial Sequence
  ENSG00000185728_46 (sequence is synthesized)
aggagagttcttcttcagaaagtataggcaccagaaactaggttatgaaatatagaataaagatttgaaggtgaccattatttgtatatattatggttaggttttttgtgtgtgtgtatt

SEQ ID NO: 672192 - DNA, 120 bp, Artificial Sequence
  ENSG00000185730_0 (sequence is synthesized)
gtagcgggtgcagtccagctgctctggacgctgaggccccggcttctcttgctggggtgtcgattcgggagggctgagggcgcggccgagagaacggggcggtcaccgccgccgtggccc

SEQ ID NO: 672193 - DNA, 120 bp, Artificial Sequence
  ENSG00000185730_1 (sequence is synthesized)
gcgcgtcccgcgctctccttgcagtgcaggccccagccgctctcgggcgcggcgtgggggaggcggccctgcaggtgcgtacccggggtccgacacgtgcggggcttcctgcgagctgag

SEQ ID NO: 672194 - DNA, 120 bp, Artificial Sequence
  ENSG00000185730_2 (sequence is synthesized)
tccccgctgcgcgtcttcaggcctttgtaagttgtcaaatttcccaccggcccagctcatcgagcttcttcccagctgtgaacaggagggcctgttccctaattcttgccgaaattgttc

SEQ ID NO: 672195 - DNA, 120 bp, Artificial Sequence
  ENSG00000185730_3 (sequence is synthesized)
caactgctggtgttctgcaagatggagccaggaggagagcccacaggtgctaaagagagcagtaccctgatggagtcccttgcagctgtgaaggctgctttcctggcgcaggccccgagt

SEQ ID NO: 672196 - DNA, 120 bp, Artificial Sequence
  ENSG00000185730_4 (sequence is synthesized)
ggcagccggtcagccgaggtgcaggcagctcagagcacggagcctgccgcagaggcaggcgctcccgagggagagggccacagaggggggcctccccgggcgttggggtctcttggcctt

SEQ ID NO: 672197 - DNA, 120 bp, Artificial Sequence
  ENSG00000185730_5 (sequence is synthesized)
tgtgaaaaccaggaagccagagagaggcccggaggttcccctcgaggcccggtcacttctgagaaaactggaggacagagtggcctcgagtcagacgtccctccgaacgcaggccccggc

SEQ ID NO: 672198 - DNA, 120 bp, Artificial Sequence
  ENSG00000185730_6 (sequence is synthesized)
gcagagggcgggggcagctggaaggggcggcctttcccgtgcggcgcctgtggccgcagcttcaagtgctcctcggacgcggcaaagcaccggagcatccactcgggggagaaaccgtac

SEQ ID NO: 672199 - DNA, 120 bp, Artificial Sequence
  ENSG00000185730_7 (sequence is synthesized)
gagtgcagcgactgcgggaaggccttcatccacagctcgcacgtggtccggcaccagcgggcgcacagcggggagaggccctacgcgtgcgccgagtgcggcaaggccttcggccagagc

SEQ ID NO: 672200 - DNA, 120 bp, Artificial Sequence
  ENSG00000185730_8 (sequence is synthesized)
ttcaacctcctccggcaccagcgcgtgcacacgggcgagaagccctacgcgtgcgccgactgcggcaaggccttcggccagaggtcggacgccgccaagcaccgccgcacccacaccggg

SEQ ID NO: 672201 - DNA, 120 bp, Artificial Sequence
  ENSG00000185730_9 (sequence is synthesized)
gagaggctgtacgcgtgcggcgagtgcgggaagcgcttcctgcacagctcgaacgtggtccggcaccggcggacccaccacggggagaacccgtacgagtgccgggagtgcggccaggcc

SEQ ID NO: 672202 - DNA, 120 bp, Artificial Sequence
  ENSG00000185730_10 (sequence is synthesized)
ttcagccagagctccaacctcctccagcaccagcgcgtgcacacgggggagcggcccttcgcctgccaggactgcggccgcgccttcagccgcagctccttcctccgcgagcaccgccgc

SEQ ID NO: 672203 - DNA, 120 bp, Artificial Sequence
  ENSG00000185730_11 (sequence is synthesized)
atccacaccggggagaagccccaccagtgcggccactgcgggcgcgcgttccgggcgctgtcgggcttcttccggcaccagcgactccacacgggcgagaagccgttccgctgcaccgag

SEQ ID NO: 672204 - DNA, 120 bp, Artificial Sequence
  ENSG00000185730_12 (sequence is synthesized)
tgcggccgcgccttccgcctgagcttccacctcatccagcaccggcgggtgcatggcgccgagtgagccggggctgcggcggaagagatgccggcggcctggtgggcgcgaggccgaggc

SEQ ID NO: 672205 - DNA, 120 bp, Artificial Sequence
  ENSG00000185730_13 (sequence is synthesized)
cgggggaggctcctgtccgccccgtgcgcggtgaggaagtaacagccggctgcgcgcctggttctcgggttgcgaaagcctcgccaggcctgcatccgccttggcttgggagcaatcagg

SEQ ID NO: 672206 - DNA, 120 bp, Artificial Sequence
  ENSG00000185730_14 (sequence is synthesized)
agagacagggctcggggaaggcgagcgctgcccgcgggaggcgattcccagaggcggggaggtctcaggggtctgtcccgggccggccgcccgcctctgagactccccgcctcccacggt

SEQ ID NO: 672207 - DNA, 120 bp, Artificial Sequence
  ENSG00000185730_15 (sequence is synthesized)
cagctgctgcggggcagtggccggtgattgaatcggtcattcctccgcaaccaggcctccatcaaaaccctgcatgagatgagggcctcgggcttcgggttggtgaaggcggggtggggg

SEQ ID NO: 672208 - DNA, 120 bp, Artificial Sequence
  ENSG00000185730_16 (sequence is synthesized)
ggcagttaggaagggggcgcccagacagggcatggaagcctcgcgtcctcccccgtaccttgcgggtcggtggttcatccatgtatttcaacgccttttcacagccggttcatatggtcc

SEQ ID NO: 672209 - DNA, 88 bp, Artificial Sequence
  ENSG00000185730_17 (sequence is synthesized)
atgtatttcaacgccttttcacagccggttcatatggtcccgacttctgtgtgcttagaaaattatggaacttagcactttgggaggc

SEQ ID NO: 672210 - DNA, 120 bp, Artificial Sequence
  ENSG00000185730_18 (sequence is synthesized)
ctggccaacatggcaaaacccccatctcgactaaaaatacaaaaaattaattgggcgtggtggcgtgcgcctgtaatctcagctacttgggagcctggggcaggagaatcacttgaacct

SEQ ID NO: 672211 - DNA, 120 bp, Artificial Sequence
  ENSG00000185730_19 (sequence is synthesized)
gggtcgtggggtccccggggcccaccgtctgcacttggcatctgaagtcggggtggtcttgtgggactgaccccttaccctgtgggttctgcactagctccgggcaattggtgacagaat

SEQ ID NO: 672212 - DNA, 120 bp, Artificial Sequence
  ENSG00000185730_20 (sequence is synthesized)
cgagttaaattgtaggacatcgcgttggtgtctgagagggagttggagagctggttggtgtggagggaaaggcttacacacatgtgatttcagaagcgttctgtgggtagaggaatcgtt

SEQ ID NO: 672213 - DNA, 120 bp, Artificial Sequence
  ENSG00000185730_21 (sequence is synthesized)
ttctctttgagactgttatgagtatgtacaaatgttatttcctgtaaaatattttcattttttaaaatgttattttctagatagaaaagtagaagtgtctctttggggagcgtttttggg

SEQ ID NO: 672214 - DNA, 120 bp, Artificial Sequence
  ENSG00000185730_22 (sequence is synthesized)
ggcgtatagtaaagctctgtcatcatgaattaagcgaggtgggctttgagtttcttgggatgacagggaaatgtgagccgcctactggccgtgagcccctggggtgcggttgcaggattc

SEQ ID NO: 672215 - DNA, 120 bp, Artificial Sequence
  ENSG00000185730_23 (sequence is synthesized)
gcccatcctggtctgggtgtggcttgtgaccacctcctgcagttctctgcccaggtaaggactaattgggaagaattctgggtcctgagctggctgccgcttccaagacagtcgctttga

SEQ ID NO: 672216 - DNA, 120 bp, Artificial Sequence
  ENSG00000185730_24 (sequence is synthesized)
gggctcttggcaccgattttgttaaaatgcatgagcttagggttgtgcagcctgtaggggcaggggtggtctcagaatggatttggtggccccaccgttaattaagctcctgacccctgg

SEQ ID NO: 672217 - DNA, 120 bp, Artificial Sequence
  ENSG00000185730_25 (sequence is synthesized)
gccggtggtgaggtgggaagatgagcctgtgtctcccatgctgagccaagatcctcaggtaccagtagcggtcaaagcacctgctccctgaaggaagcttacctggcttagcctcattcc

SEQ ID NO: 672218 - DNA, 120 bp, Artificial Sequence
  ENSG00000185730_26 (sequence is synthesized)
tgctcgtaagtcaggcattcagcttgcaaagatccccaagcacacaaggagagtcagctgactgagggccaacagaaacagcaggcagccgctgtcagccacaaagaaacgcagatcctg

SEQ ID NO: 672219 - DNA, 120 bp, Artificial Sequence
  ENSG00000185730_27 (sequence is synthesized)
aaactgtcatcatacaggtgagaggatagttatgtgtgaggtgttcaaagaagtcgcgcagtcagtgatgagaaagctgtagggtacatactgtcacgcatgaataggcaggactcctta

SEQ ID NO: 672220 - DNA, 88 bp, Artificial Sequence
  ENSG00000185730_28 (sequence is synthesized)
agggtacatactgtcacgcatgaataggcaggactccttaaagaacttttggaaatgaaaaacaggccaggtgcagtggttaaggggg

SEQ ID NO: 672221 - DNA, 120 bp, Artificial Sequence
  ENSG00000185730_29 (sequence is synthesized)
tgggcaaaaagagcaaaactccatcttaaaaaaataaataaataaaggaaaatgagccgagtgatggtcttagatataagatggaatggcaagcaaataaaattataaatatgaatacat

SEQ ID NO: 672222 - DNA, 120 bp, Artificial Sequence
  ENSG00000185730_30 (sequence is synthesized)
aattataaatatgaatacatatgtatatataaaagaatagtgtcaactaaaatactagacaacaatagcatgtaaattagaagggacagaaatgttctaagaccctccggttgttgggaa

SEQ ID NO: 672223 - DNA, 120 bp, Artificial Sequence
  ENSG00000185730_31 (sequence is synthesized)
gagggtgtaagatagtgtttaatttgactttgataagttaaatgtgcatagtgtaatttaatgttaattactaaaagagtgtaaccagtctatacatctctaatccaataaaaagaataa

SEQ ID NO: 672224 - DNA, 120 bp, Artificial Sequence
  ENSG00000185730_32 (sequence is synthesized)
ccagctgcttgggagactgaggcaggaggatctcggcttggatcctcagaccaggagtttgaggcagcagtgagctacgattgtgccgctgcactccagactggacaacacagtgagagc

SEQ ID NO: 672225 - DNA, 120 bp, Artificial Sequence
  ENSG00000185730_33 (sequence is synthesized)
cagactggacaacacagtgagagcccataaaataaataaatgaactgaacacaaacttctgtcaattaaaaaataagaacgaaatcaggctgggcctgagcgctgtggctcacacctgta

SEQ ID NO: 672226 - DNA, 120 bp, Artificial Sequence
  ENSG00000185730_34 (sequence is synthesized)
actttggaggccaaggtgggtggatcgcttaagcccaggagttcgaaaccagcctgggcaacatagggagaacctgtctctacaaaaaatacagtaagtaagcctatagttccagccacc

SEQ ID NO: 672227 - DNA, 82 bp, Artificial Sequence
  ENSG00000185730_35 (sequence is synthesized)
cagccaccctcgagactgcagtgagctgtagtcataccactacactccagcctgggcaaaagagtgagaccctctctcaaaa

SEQ ID NO: 672228 - DNA, 120 bp, Artificial Sequence
  ENSG00000185730_36 (sequence is synthesized)
gtcctgcagggaggcggggggcagcgcctggggcgctccaagctctcggccccaaggaagcccacgctcgggacccgcgtgctgccacagccccgggggcctggagggtcccgtgagccg

SEQ ID NO: 672229 - DNA, 120 bp, Artificial Sequence
  ENSG00000185730_37 (sequence is synthesized)
ctggagggtcccgtgagccgagcgggacccgggacaagcgcgggacgccgcggggaacggacgggaacgcgcgtggccgccccacagcgggccttcgacacctcctgacacgtcctgcgg

SEQ ID NO: 672230 - DNA, 120 bp, Artificial Sequence
  ENSG00000185730_38 (sequence is synthesized)
gtgcccggtcctcagttggctcgagccggatcccggcgcgccaacggctcgaccttgccccccacgaggcagggcttcctgcccggcaggaaggactcggccggcgcctgcgggcaaccg

SEQ ID NO: 672231 - DNA, 120 bp, Artificial Sequence
  ENSG00000185730_39 (sequence is synthesized)
atgagctgaaggcgccgcggctgggccgtcccgctctcccgccgccgagcgcgctgtcctcccgctgcccagagcgtcgccggaagtgccgagggggcgggccaggggtggagactggcg

SEQ ID NO: 672232 - DNA, 120 bp, Artificial Sequence
  ENSG00000185730_40 (sequence is synthesized)
gacatgtccacagtcgggcccagagttccagggcaggaattgaacaggaatacaggaaaaacaccatgtctcagtcactgacgcagagcatatactgtgtccttgggcgcagggtgaggg

SEQ ID NO: 672233 - DNA, 120 bp, Artificial Sequence
  ENSG00000185730_41 (sequence is synthesized)
agggaggtaaacgcaggcccatcagatctcctgggcatctgtttggtgactgtctttgccagtgaactgagagcttttggttagaaagtctggcagccccaggctctgcctctgggaagg

SEQ ID NO: 672234 - DNA, 120 bp, Artificial Sequence
  ENSG00000185730_42 (sequence is synthesized)
tctcaagtggtcctcctgcctcagcctctgaaagtgcggagatacagctgtgaaggctgctttcctggcgcaggccccgagtggcagccggtcagccgaggtgcaggcagctcagagcac

SEQ ID NO: 672235 - DNA, 120 bp, Artificial Sequence
  ENSG00000185730_43 (sequence is synthesized)
gaaagcggcacagggaacagcatgacacgggcctgaggcagggcacatttggaaaggggcgaggagagggcagtggcttctggcacggcagcagtgggcatacagaggcagtcgggaccc

SEQ ID NO: 672236 - DNA, 120 bp, Artificial Sequence
  ENSG00000185730_44 (sequence is synthesized)
gtctggaagagcctccgcccgggcattccagctggagatgcgtgaccttcggtctgcggcaggcggaagggcgagagacttggacaggaggtgcatcttgcccggggaaggctgaacgaa

SEQ ID NO: 672237 - DNA, 120 bp, Artificial Sequence
  ENSG00000185736_0 (sequence is synthesized)
caaagtggctggtgccaaacaactagcagaggcgcaaaagtagcctccctgcgctgggagcccagagcaggaggcagagcccgcgggaagctcggagcactcaggacgccgcgcgccctt

SEQ ID NO: 672238 - DNA, 120 bp, Artificial Sequence
  ENSG00000185736_1 (sequence is synthesized)
ccccgccctccctgaccagggagcagctcgctccaggcgcccagccgaggcccccagcccagtgggagcaagtcatagagaacaattcgagagacagagagacggagcgcgctttcctgc

SEQ ID NO: 672239 - DNA, 120 bp, Artificial Sequence
  ENSG00000185736_2 (sequence is synthesized)
tcagtcctgaaaagtgagccgctcccgggtttgcaacctcaagcttcgcagcagcggcggcggcggctgccgggaaggaggcaggtgcaggtgcaggagggaggcggctctgggctccgc

SEQ ID NO: 672240 - DNA, 120 bp, Artificial Sequence
  ENSG00000185736_3 (sequence is synthesized)
gcctgggtctcggccatggcctcggtcctggggagcggcagagggtctggagggctgagcagtcaactcaaatgcaagtccaagaggaggaggaggcggaggtccaagcggaaagataaa

SEQ ID NO: 672241 - DNA, 120 bp, Artificial Sequence
  ENSG00000185736_4 (sequence is synthesized)
gtaagcatattgtcaaccttcctcgctcctttcaagcacctgagtcctggcatcacaaacacggaggatgacgacaccctcagtaccagcagcgcggaggtgaaggagaaccgcaacgtg

SEQ ID NO: 672242 - DNA, 120 bp, Artificial Sequence
  ENSG00000185736_5 (sequence is synthesized)
gcgcggccaccgccctccggggaccgggcccggggcggcgcgcccggcgcgaagaggaagcggccgctggaggaggggaatgggggccacttgtgcaaactgcagctggtctggaagaag

SEQ ID NO: 672243 - DNA, 120 bp, Artificial Sequence
  ENSG00000185736_6 (sequence is synthesized)
gtctggaagaagctgtcgtggtcggtggcgcccaagaacgcgctggtgcagctgcacgagctgaggccgggcctgcagtaccggacagtgtcgcagacgggcccggtgcatgccccggtc

SEQ ID NO: 672244 - DNA, 120 bp, Artificial Sequence
  ENSG00000185736_7 (sequence is synthesized)
ttcgcggtagcggtggaggtgaacgggctcacgttcgagggcacaggccccaccaagaagaaggccaagatgcgcgcggcggagctggcactcaggtccttcgtgcagttccccaacgcc

SEQ ID NO: 672245 - DNA, 120 bp, Artificial Sequence
  ENSG00000185736_8 (sequence is synthesized)
tgccaggcgcacctggccatgggcgggggcccgggccccggcacggacttcacctccgaccaggccgatttccccgacacgctcttccaggagttcgagcccccggcgccgcgccccgga

SEQ ID NO: 672246 - DNA, 80 bp, Artificial Sequence
  ENSG00000185736_9 (sequence is synthesized)
ctcgcgggaggccgccccggggacgccgcgcttctgtccgcggcctacgggcgacggcggctgctgtgccgcgcgctgga

SEQ ID NO: 672247 - DNA, 120 bp, Artificial Sequence
  ENSG00000185736_10 (sequence is synthesized)
gagcgcaaccccgtggtgctgctgaaccgcctgcgcgccgggctgcgctacgtgtgtctggcagaaccggccgagcggcgcgcgcggagcttcgtgatggccgtgagcgtggacggcagg

SEQ ID NO: 672248 - DNA, 120 bp, Artificial Sequence
  ENSG00000185736_11 (sequence is synthesized)
acgttcgagggctcggggcgcagcaagaagctggcccggggtcaggccgcgcaggccgcactgcaggagctgttcgacatccagatgcccggccacgcgcccggcagggccaggaggacg

SEQ ID NO: 672249 - DNA, 120 bp, Artificial Sequence
  ENSG00000185736_12 (sequence is synthesized)
ccaatgccgcaggaattcgcagactccatatcccagctggtcacacagaagttccgcgaggtgacgacggacctcacgcccatgcacgcccgccataaagcgctggcaggaatcgtcatg

SEQ ID NO: 672250 - DNA, 120 bp, Artificial Sequence
  ENSG00000185736_13 (sequence is synthesized)
accaaaggcctggatgctcggcaggcgcaggtcgtggccctgtcctcggggaccaagtgcatcagcggcgagcacctcagtgaccaggggctggtggtgaatgactgccacgcggaggtc

SEQ ID NO: 672251 - DNA, 120 bp, Artificial Sequence
  ENSG00000185736_14 (sequence is synthesized)
gtggcccggcgggcgttcctgcacttcctctacacgcagctggagctgcacctgagcaagcggcgcgaggactcagagcgatcgatattcgtgcggttaaaagaaggtggctaccggctg

SEQ ID NO: 672252 - DNA, 120 bp, Artificial Sequence
  ENSG00000185736_15 (sequence is synthesized)
cgagagaacatcctcttccatctctacgtgagcacctccccctgtggagacgcaagactccactctccctacgagatcaccacagacctgcacagcagcaaacacctcgtcaggaagttc

SEQ ID NO: 672253 - DNA, 120 bp, Artificial Sequence
  ENSG00000185736_16 (sequence is synthesized)
cgcgggcacctgcgcaccaagatcgagtccggggaagggacggtccccgtgcgtggccccagcgcagtgcagacctgggacggcgtcctgctgggggagcagctgatcaccatgtcctgc

SEQ ID NO: 672254 - DNA, 120 bp, Artificial Sequence
  ENSG00000185736_17 (sequence is synthesized)
acggacaagatcgccaggtggaacgtcctggggctgcagggcgcgctcctgtcccacttcgtggagcccgtgtacctgcagagcatcgtggtgggcagcctgcaccacacgggccacctc

SEQ ID NO: 672255 - DNA, 120 bp, Artificial Sequence
  ENSG00000185736_18 (sequence is synthesized)
gcacgcgtcatgagccaccgcatggagggtgtcggccagctgcccgcctcctaccggcacaaccggcctctcctcagcggcgtgagtgacgccgaggcgcgccagccggggaagtcgccc

SEQ ID NO: 672256 - DNA, 120 bp, Artificial Sequence
  ENSG00000185736_19 (sequence is synthesized)
cccttcagcatgaactgggtcgtgggcagcgcggacctggagattatcaacgccaccactgggcggaggagctgtgggggcccatcccggctctgcaagcacgtgctgtctgcacggtgg

SEQ ID NO: 672257 - DNA, 120 bp, Artificial Sequence
  ENSG00000185736_20 (sequence is synthesized)
gcgcggctgtatggcaggctgagcacacggacacccagccctggagacacgccctccatgtactgtgaggccaagctgggggcgcacacctaccagtctgtgaaacagcagctgttcaag

SEQ ID NO: 672258 - DNA, 120 bp, Artificial Sequence
  ENSG00000185736_21 (sequence is synthesized)
gcctttcagaaggctggcctgggcacctgggtgaggaaaccaccggagcagcagcagtttctactgactctctaggctgcgggctcctggctgctggagctgagcgggacgctggaggga

SEQ ID NO: 672259 - DNA, 120 bp, Artificial Sequence
  ENSG00000185736_22 (sequence is synthesized)
tgggaccgtgtctggggggcgacgtggcgggtcggccggttccctgcattcgttttactttggtgtcccagaaacacgcgagtgtgcaatgtttggacgagcaacaacacaaattcagaa

SEQ ID NO: 672260 - DNA, 120 bp, Artificial Sequence
  ENSG00000185736_23 (sequence is synthesized)
cgtgcctctttccagatcgctggccccagaaccctgtcccccacacccaggggcacatgcactgttgagttagcgccgactcttcctgtggagtctgagggaggggctccattcaggcaa

SEQ ID NO: 672261 - DNA, 120 bp, Artificial Sequence
  ENSG00000185736_24 (sequence is synthesized)
aggggttttagctgcagccttggaaggaggcaccgacacgacaccaggcaggagtgagcctcaggccccgtccctgcaccccacccctgcgtgcgcctcttggtgatgctggggtctcac

SEQ ID NO: 672262 - DNA, 120 bp, Artificial Sequence
  ENSG00000185736_25 (sequence is synthesized)
tagcttgagggggcacatgaagataagccacaaatgaagagaaaagccatgcccaccccagccccagagaaaccaataagaatcctctattattttcactattcatttaggtttttatac

SEQ ID NO: 672263 - DNA, 120 bp, Artificial Sequence
  ENSG00000185736_26 (sequence is synthesized)
tccacctcctttcaaaaaagatttaagatgtacgacattaccgaacacctaaaatagaaccagagaaacgaaagccattcccacaaagtgaaggaacagtttccaaaacccctgcgaggc

SEQ ID NO: 672264 - DNA, 120 bp, Artificial Sequence
  ENSG00000185736_27 (sequence is synthesized)
agagttaagacctgtgacgtggggagcctggaaacacccggcccacgcgtgctgcagatgtggggagcctggaaacacccggcccacgcgtgctgcagatgtggggagcctggaaacacc

SEQ ID NO: 672265 - DNA, 120 bp, Artificial Sequence
  ENSG00000185736_28 (sequence is synthesized)
cggcccacgcgtgctgcagatgtggggagtctggaaacacccggcccacgcgtgctgcagatgtggggagcccggaaacacctggcccatgcctgttcagtccgtcatggcgtttggttt

SEQ ID NO: 672266 - DNA, 120 bp, Artificial Sequence
  ENSG00000185736_29 (sequence is synthesized)
atggtggccgatactaagagccactgaggtctgggttgtgtaagggttagctaccaccctataacctccctaccaggtaataaggagaccaagtctttgatcaaattctgattttttaac

SEQ ID NO: 672267 - DNA, 120 bp, Artificial Sequence
  ENSG00000185736_30 (sequence is synthesized)
taaattttcattagaaagcaagcacaaaataaaatcaaaacaacctttaccttcagcttgagaggctaccagctctctattctttcagattctccaatcaacaccttgcaggacaagacc

SEQ ID NO: 672268 - DNA, 120 bp, Artificial Sequence
  ENSG00000185736_31 (sequence is synthesized)
ccaaaaaagttcagctgtcaaaaaatgtaagaggcaggattctgtgaccctcagagcaggcttccaacaccagagaccttcagctcacagtggagatgggacatgggggctttagcccac

SEQ ID NO: 672269 - DNA, 120 bp, Artificial Sequence
  ENSG00000185736_32 (sequence is synthesized)
agcatcatccctgagagccaaggcgctgtattcatacggggtcaggctcttttccaagtatctttacgtaatccatgtacctcgagctgctgtcatctcacctccgagaactcatttcta

SEQ ID NO: 672270 - DNA, 120 bp, Artificial Sequence
  ENSG00000185736_33 (sequence is synthesized)
acattcatcatgctagatagccagtctctcatttctccaacttaaaaaatccatctctgaaattcatgacagtgatggcagacggcaaagcatggtggtgtccacctctggggtgtgggc

SEQ ID NO: 672271 - DNA, 120 bp, Artificial Sequence
  ENSG00000185736_34 (sequence is synthesized)
ttcccggaaagaatcccagctgaccaccccagaaagtgcaagaataacattgtgctgtacatagtcaagtgctataaattacagttatcataatgagaaggcagaaatgaaactgagttg

SEQ ID NO: 672272 - DNA, 120 bp, Artificial Sequence
  ENSG00000185736_35 (sequence is synthesized)
aggccaaatttatcactcgagttcttttagaaaagaaaacaggtactggagtagacaacttcttccagataaagtttcaaaagatacgagaacattttttcaaataaaggactcacatta

SEQ ID NO: 672273 - DNA, 120 bp, Artificial Sequence
  ENSG00000185736_36 (sequence is synthesized)
atcttttataaaaatcacaaaaataaatgaaatcttaattcagtgcaaaagctaagctcaaacgaccagtttctattaagttctggtaacttgacatcactaggatgaagcttagagaac

SEQ ID NO: 672274 - DNA, 120 bp, Artificial Sequence
  ENSG00000185736_37 (sequence is synthesized)
ttagagtcgagaggtgatgggtggctcagacattcgcagcagtcagaagtgagcgctcccctgaatgcgtgggagcacggccagctcctggctgaagtctcccacccaggcctcaaatca

SEQ ID NO: 672275 - DNA, 120 bp, Artificial Sequence
  ENSG00000185736_38 (sequence is synthesized)
ccttcatctgagatgttggctagagaagcatataatgctttgtcccagtgggctccaaatcacgctgtttctgcagcgagggggcctgtgttgtaagcagatttcactgtcacagggaag

SEQ ID NO: 672276 - DNA, 120 bp, Artificial Sequence
  ENSG00000185736_39 (sequence is synthesized)
acgcagggtctgattcacgggactcggaaagcgctcggccacccagtggccagcatcatgaagccacagctggggggttgggattcgttttgtctcaggcattgaccttccagaaacaac

SEQ ID NO: 672277 - DNA, 120 bp, Artificial Sequence
  ENSG00000185736_40 (sequence is synthesized)
tcagactttactgaaatatcaacatccacatctggagaaagccacacattaattccatgctacccattagtacaagtgtatggattcgtgtattaagtccacaggagactccatggaagg

SEQ ID NO: 672278 - DNA, 120 bp, Artificial Sequence
  ENSG00000185736_41 (sequence is synthesized)
agagattaaagctcttcagagaaggccgatagcgacagaagagtttccaatgcagccagagtgaggttgaggtgccggagcctttccgtggagggatctgtcagaggggatgtgggctgc

SEQ ID NO: 672279 - DNA, 120 bp, Artificial Sequence
  ENSG00000185736_42 (sequence is synthesized)
agaggggaccccacgtaaggaaaggagggtcccaggccctgggtagtgaaaggagaaggtagtcgaggcagtcaagggtgaccctacacgcaggaggcacgccacaccagatcacgccac

SEQ ID NO: 672280 - DNA, 120 bp, Artificial Sequence
  ENSG00000185736_43 (sequence is synthesized)
acgcaggctgctcccaactggcagggcctgacccagccaggaagggccaggtcctaggattccacagtgccaggagtgcccgaaggggccaggtcccaggattcccacagccccaggtgt

SEQ ID NO: 672281 - DNA, 120 bp, Artificial Sequence
  ENSG00000185736_44 (sequence is synthesized)
gcctggaagacccgggtcccaggattcccacagccccagctatgcttgggggggccgagtcccaggattcccacagccccaggtgtgcctggaagacccgggtcccaggattcccacagc

SEQ ID NO: 672282 - DNA, 120 bp, Artificial Sequence
  ENSG00000185736_45 (sequence is synthesized)
cccaagagttcccggaagagctgggtcccaggattcccacagccccagctatgcttgggggggccgggtcccaggattcccacagccccaggtgtgcctggaagacccaggtcccaggat

SEQ ID NO: 672283 - DNA, 120 bp, Artificial Sequence
  ENSG00000185736_46 (sequence is synthesized)
tcccacagccctggatgtgcctggaggggctgtgccacctctgcagagatggaagggctcgtgttgaagcctgaggatttcgccctcaggtccaggtcagaacatcccagcaccactttc

SEQ ID NO: 672284 - DNA, 120 bp, Artificial Sequence
  ENSG00000185736_47 (sequence is synthesized)
aggccatgtctgccctgcagttttgaccactgaattggtcttaagagtggccacccattcccctccaagtgagggggcaagacacaagtaggggacgggtcactttctgtcaccctgaaa

SEQ ID NO: 672285 - DNA, 120 bp, Artificial Sequence
  ENSG00000185736_48 (sequence is synthesized)
atacgctgggcacgacacaagtaggggatgggtcactttctgtcaccctgaaaatacgctgggcacgacacaaggggggctgatgaagtcaggcccgcccctccaagtccacctcgaaat

SEQ ID NO: 672286 - DNA, 120 bp, Artificial Sequence
  ENSG00000185736_49 (sequence is synthesized)
caccgtctggcttcctcgcacttcccaccacctgacaccgccaagccccttgcttcagattttctgtggtctgtattcatacccttgcttcagattttctgtagtctatattcatgcctg

SEQ ID NO: 672287 - DNA, 120 bp, Artificial Sequence
  ENSG00000185736_50 (sequence is synthesized)
cttaggcccctacaaaagtcctcataaaaccagcaccacctttatctgcctccaaaacacacactgctttcccatcaggaagatcagcaatgtggtttccggcctggttcttagtcaaaa

SEQ ID NO: 672288 - DNA, 120 bp, Artificial Sequence
  ENSG00000185736_51 (sequence is synthesized)
agttagtgtctggtggtttctggcctttttgcaggacggggcgcagggaacggctgcgcggccaggcagcctccgctgtccacctccagccccggttttgcagccgtgtgtgatatcaag

SEQ ID NO: 672289 - DNA, 120 bp, Artificial Sequence
  ENSG00000185736_52 (sequence is synthesized)
ggatagagttagggtttctgtgggttttgtttttgctgaggaaaggatgtgcaggtcgatagctattgtttcctttccattcctgtgattctctttacatctgtatatatctatcacacc

SEQ ID NO: 672290 - DNA, 120 bp, Artificial Sequence
  ENSG00000185736_53 (sequence is synthesized)
atgctgactttgtgatgagtcctgttcctcagaaacatcaagctgggttccttttcaaagaaacacacagatcatatttctccatctcattttgttttcacagggagcttttcttatcaa

SEQ ID NO: 672291 - DNA, 120 bp, Artificial Sequence
  ENSG00000185736_54 (sequence is synthesized)
caaagtcgcatgcttttttttttggatataatgtttatcacgtctggagagccataaacagtaaatacagaggatatcaatgcccagaatagttattttgatgaaatcctatttttagat

SEQ ID NO: 672292 - DNA, 120 bp, Artificial Sequence
  ENSG00000185736_55 (sequence is synthesized)
aataaatttcaagatgtgtctatagtgtattgtttaaaacaactgaagacatttgagacgtacataaagtagacatttttaatttagggaaacttatatgcccttttttaagaagccatt

SEQ ID NO: 672293 - DNA, 120 bp, Artificial Sequence
  ENSG00000185736_56 (sequence is synthesized)
ctaataaaataatctgactaattggcccaaaatacaataagtatcactttctaacagagaccaaagggaagctgagaggctttccttttatgtactaccgttggatcgctgcagccgcct

SEQ ID NO: 672294 - DNA, 120 bp, Artificial Sequence
  ENSG00000185736_57 (sequence is synthesized)
ctcataacacccaacagaacccggtgaggctctgtgggcttcccgcggccctcagggaggctgcagagtcccctagtccatgtcagggagccgccatcccacatacctccaaagcctgtc

SEQ ID NO: 672295 - DNA, 120 bp, Artificial Sequence
  ENSG00000185736_58 (sequence is synthesized)
ctcgcctgcagtttttgcagagctcgcggttggaggtggaaatttagaagccctgtgttgcaggagaggcagtagcacccccaggcagctcttagcagggacagaccaccccccgcctcg

SEQ ID NO: 672296 - DNA, 120 bp, Artificial Sequence
  ENSG00000185736_59 (sequence is synthesized)
ctggtattttagggtcttttggtattttgccactgtgtggggctaggcgggtggctggaggacacggtgtaggccttgccgctgtctgggttcctcgccactgcaggagcagggctgttt

SEQ ID NO: 672297 - DNA, 120 bp, Artificial Sequence
  ENSG00000185736_60 (sequence is synthesized)
ctggaaacactgggctgctggtgacccgtcaaacttctcccacaaattctgaatccgagaaagtgaaggaaggatggtggggaagtgaggaggcaggagcagaggccacagggaccaacc

SEQ ID NO: 672298 - DNA, 120 bp, Artificial Sequence
  ENSG00000185736_61 (sequence is synthesized)
agagatgcggtggagacagaggagcttccttctcaggctgtttctgggaagcctgagaggcggccagcaccaccctccgctcactctcccctcagcctcttcgcttcccttctcaaccct

SEQ ID NO: 672299 - DNA, 120 bp, Artificial Sequence
  ENSG00000185736_62 (sequence is synthesized)
ttctctcctcctcgcctcttccctttcttgctgtcttgttagtccctgtcccaaaactcctggctcctttgttctgctgccgtggcccccacccaggaggaggtctcaggcaccatcccc

SEQ ID NO: 672300 - DNA, 120 bp, Artificial Sequence
  ENSG00000185736_63 (sequence is synthesized)
ccacgagggatccacacaacaggttcatgctggggctgggggagccccgctgggttcctgatgccttgtgcacagggagttgctgcagtcatttttggactctcctgaatgtgtccacat

SEQ ID NO: 672301 - DNA, 120 bp, Artificial Sequence
  ENSG00000185736_64 (sequence is synthesized)
atgtgtccacatgttctgacctcccaccagaaggaacgctggtggccacatctctagagatctatttacttttttgagaccggcttatgagattggctaatttttgtatttttggtagag

SEQ ID NO: 672302 - DNA, 64 bp, Artificial Sequence
  ENSG00000185736_65 (sequence is synthesized)
ggcctctagagattcacaccaaacaatatcactcctgcgggaaccgcagacagatcaaaccctg

SEQ ID NO: 672303 - DNA, 120 bp, Artificial Sequence
  ENSG00000185736_66 (sequence is synthesized)
aatatcactcctgcgggaaccgcagacagatcaaaccctggtgagaggaacactttatttcccaactcatcatcctaagccaaggttggagggatgagcattccctaaacaccaaggcga

SEQ ID NO: 672304 - DNA, 120 bp, Artificial Sequence
  ENSG00000185736_67 (sequence is synthesized)
gatcacctggtcccagtgcctcttttcacacaggccctagatttctatctctctgcagtttatgcatcggtaaaaaaaaaaaaatctctcccagtgtgccccgttagttttcagcatttt

SEQ ID NO: 672305 - DNA, 120 bp, Artificial Sequence
  ENSG00000185736_68 (sequence is synthesized)
gtaagcaaaatgaacttaacacatagtaattctaattgaaggtatgtacataaaaagcatgatagaatggcaatattgtatcaatggatgtacatttgtaatatttgtaaaaaaaaatcc

SEQ ID NO: 672306 - DNA, 120 bp, Artificial Sequence
  ENSG00000185736_69 (sequence is synthesized)
aaaaccttaaaatatgaatttacatgttaatttgcctctaagttctataaattgcacttcagtgatatctaataagtgaatgtttctgttaagtaaataaaaatattcagtaaaattgtt

SEQ ID NO: 672307 - DNA, 120 bp, Artificial Sequence
  ENSG00000185736_70 (sequence is synthesized)
acagaggcaggaagactgctggatgccgcaaggacttcctgtggagaaaatgtctgttctgttgcctgtgtgatctcagggccccacagaacacaatccatcacccatggggcagaacgt

SEQ ID NO: 672308 - DNA, 120 bp, Artificial Sequence
  ENSG00000185736_71 (sequence is synthesized)
ttcctctcgaggatgttggctgcggccggtggggagtgccaagccccaggctccctgcatcccacttctggtgaggtcagtgatgctgggcacatgcggtcagggccctgtgcctgagcc

SEQ ID NO: 672309 - DNA, 120 bp, Artificial Sequence
  ENSG00000185736_72 (sequence is synthesized)
gtggaactccacagccattccacatgttcagtcccacaccctgaggccaaggcaccccgagtccctgagggagcaaggccctgccacccgaggctgccgctgcagaggcaaacagccccg

SEQ ID NO: 672310 - DNA, 120 bp, Artificial Sequence
  ENSG00000185736_73 (sequence is synthesized)
agcaaggcccggcaaccccaggctgtggctgcatggggcaaacacagcctggcctgaggctgccggccagtcggggtggccataggctaacgagaagccagggcctccctccccactggg

SEQ ID NO: 672311 - DNA, 120 bp, Artificial Sequence
  ENSG00000185736_74 (sequence is synthesized)
gaacacctttcccctaccatcccgagatattgtcttcttggatggagttttcaaagcctccatgtggaggtctcgggatgagaggcctcggctgagctctgtgcagaggagcaggaagct

SEQ ID NO: 672312 - DNA, 120 bp, Artificial Sequence
  ENSG00000185736_75 (sequence is synthesized)
gcagaatgggcacccgcctccctcccagcacctccagtcgctgccacgccccaagctcctgagctgctctgcccaagacctcccccaaccttggtctgacgcgttgagacctccccctac

SEQ ID NO: 672313 - DNA, 120 bp, Artificial Sequence
  ENSG00000185736_76 (sequence is synthesized)
cttggcctgatgccccgagacctcccccaacctcggtctgatgccccgagacctccttgacctcagtctgataccctaagacctcccccaacctcagtctgatgccccaagacctccccc

SEQ ID NO: 672314 - DNA, 120 bp, Artificial Sequence
  ENSG00000185736_77 (sequence is synthesized)
aggttagtctgatgccctgagacttcccccaaccttggtctaatgtcccaagacctctccgtcctcgatctgaccccgagacctcccccacgttggtgacacccccacgttggtgacacc

SEQ ID NO: 672315 - DNA, 120 bp, Artificial Sequence
  ENSG00000185736_78 (sequence is synthesized)
ctgagacctcccccacgttgctctgaggccccgaggcctcccccacgttgctctgatgccctgaggcctccccaacgtggatttgaggccctgaggcctccccaacgtggatctgaggcc

SEQ ID NO: 672316 - DNA, 120 bp, Artificial Sequence
  ENSG00000185736_79 (sequence is synthesized)
ctaagacctccccaacgttgatctgaagcccctagacctcccccacattggtctgacgccctgaaagcgccatccccaatgcaggacatttctgtaactttggtttggaaaataggggtc

SEQ ID NO: 672317 - DNA, 120 bp, Artificial Sequence
  ENSG00000185736_80 (sequence is synthesized)
acaggtgtggggacagcatgagtttccctaaaagagccatgaattccccacaagcctgataaactaacaacaatgtggtcacaggaagtctgggttgagggacccagaacacccttggac

SEQ ID NO: 672318 - DNA, 120 bp, Artificial Sequence
  ENSG00000185736_81 (sequence is synthesized)
agaaaagagagcagcatttgttagcacacatgggcctgtggagcccagtcccaggcaacagtgtccccagagccccagtgatggctgggttgggtctggggcactcccagggagctcccc

SEQ ID NO: 672319 - DNA, 120 bp, Artificial Sequence
  ENSG00000185736_82 (sequence is synthesized)
attcatagcctgggtgctccaaaagtgctcttatttgcctggtttgatcttcacatcacctcgtgaagtagagaagtcacctgtcacagagcggcgtgagtgacgccgaggcgcgccagc

SEQ ID NO: 672320 - DNA, 120 bp, Artificial Sequence
  ENSG00000185736_83 (sequence is synthesized)
acacatgggcctgtggagcccagtcccaggcaacagtgtccccagagccccagtgatggctgggttgggtctggggcactcccagggagctccccaaggtccgcacgatgggaagactga

SEQ ID NO: 672321 - DNA, 120 bp, Artificial Sequence
  ENSG00000185736_84 (sequence is synthesized)
gttgggctcacccaagaggccccacctgcccacctggccgcccacctgcccacctgcccacctggccgcccacaggaggcgatgctgaggaagagccaggtgggcgaggaggggcggggg

SEQ ID NO: 672322 - DNA, 120 bp, Artificial Sequence
  ENSG00000185736_85 (sequence is synthesized)
gcgccaaggtcacgtggccagagcgggtcttcggaacccagggccccgggccctccacaccctccagaggctgccaggttactccgcgagtactgggccggcttcgcaccaggattcccc

SEQ ID NO: 672323 - DNA, 80 bp, Artificial Sequence
  ENSG00000185737_0 (sequence is synthesized)
cccgcgcccggcccgcgcggccccatgcctctgccgcggccctcgggggggcgaaggtgaagaccggctcctaggatgag

SEQ ID NO: 672324 - DNA, 120 bp, Artificial Sequence
  ENSG00000185737_1 (sequence is synthesized)
gggcgaaggtgaagaccggctcctaggatgagtgaaggggcggccgctgcctcgccacctggtgccgcttcggcagccgccgcctcggccgaggagggcaccgcggcggctgcggcggcg

SEQ ID NO: 672325 - DNA, 120 bp, Artificial Sequence
  ENSG00000185737_2 (sequence is synthesized)
gcagcggcgggcgggggcccggacggcggcggcgaaggggcggccgagcccccccgggagttacgctgtagcgactgcatcgtgtggaaccggcagcagacgtggctgtgcgtggtacct

SEQ ID NO: 672326 - DNA, 120 bp, Artificial Sequence
  ENSG00000185737_3 (sequence is synthesized)
ctgttcatcggcttcatcggcctggggctcagcctcatgcttctcaaatggatcgtggtgggctccgtcaaggagtacgtgcccaccgacctagtggactccaaggggatgggccaggac

SEQ ID NO: 672327 - DNA, 120 bp, Artificial Sequence
  ENSG00000185737_4 (sequence is synthesized)
cccttcttcctctccaagcccagctctttccccaaggccatggagaccaccaccactaccacttccaccacgtcccccgccaccccctccgccgggggtgccgcctcctccaggacgccc

SEQ ID NO: 672328 - DNA, 120 bp, Artificial Sequence
  ENSG00000185737_5 (sequence is synthesized)
aaccggattagcactcgcctgaccaccatcacgcgggcgcccactcgcttccccgggcaccgggtgcccatccgggccagcccgcgctccaccacagcacggaacactgcggcccctgcg

SEQ ID NO: 672329 - DNA, 120 bp, Artificial Sequence
  ENSG00000185737_6 (sequence is synthesized)
acggtcccgtccaccacggccccgttcttcagtagcagcacgctgggctcccgacccccggtgccaggaactccaagtacccaggcaatgccctcctggcctactgcggcatacgctacc

SEQ ID NO: 672330 - DNA, 120 bp, Artificial Sequence
  ENSG00000185737_7 (sequence is synthesized)
tcctcctaccttcacgattctactccctcctggaccctgtctccctttcaggatgctgcctcctcttcttcctcttcttcctcctccgctaccaccaccacaccagaaactagcaccagc

SEQ ID NO: 672331 - DNA, 120 bp, Artificial Sequence
  ENSG00000185737_8 (sequence is synthesized)
cccaaatttcatacgacgacatattccacagagcgatccgagcacttcaaaccctgccgagacaaggaccttgcatactgtctcaatgatggcgagtgctttgtgatcgaaaccctgacc

SEQ ID NO: 672332 - DNA, 120 bp, Artificial Sequence
  ENSG00000185737_9 (sequence is synthesized)
ggatcccataaacactgtcggtgcaaagaaggctaccaaggagtccgttgtgatcaatttctgccgaaaactgattccatcttatcggatccaacagaccacttggggattgaattcatg

SEQ ID NO: 672333 - DNA, 120 bp, Artificial Sequence
  ENSG00000185737_10 (sequence is synthesized)
gagagtgaagaagtttatcaaaggcaggtgctgtcaatttcatgtatcatctttggaattgtcatcgtgggcatgttctgtgcagcattctacttcaaaagcaagaaacaagctaaacaa

SEQ ID NO: 672334 - DNA, 120 bp, Artificial Sequence
  ENSG00000185737_11 (sequence is synthesized)
atccaagagcagctgaaagtgccacaaaatggtaaaagctacagtctcaaagcatccagcacaatggcaaagtcagagaacttggtgaagagccatgtccagctgcaaaattattcaaag

SEQ ID NO: 672335 - DNA, 120 bp, Artificial Sequence
  ENSG00000185737_12 (sequence is synthesized)
gtggaaaggcatcctgtgactgcattggagaaaatgatggagtcaagttttgtcggcccccagtcattccctgaggtcccttctcctgacagaggaagccagtctgtcaaacaccacagg

SEQ ID NO: 672336 - DNA, 120 bp, Artificial Sequence
  ENSG00000185737_13 (sequence is synthesized)
agtctatcctcttgctgcagcccagggcaaagaagtggcatgctccataggaatgccttcagaaggacacccccgtcaccccgaagtaggctaggtggaattgtgggaccagcatatcag

SEQ ID NO: 672337 - DNA, 120 bp, Artificial Sequence
  ENSG00000185737_14 (sequence is synthesized)
caactcgaagaatcaaggatcccagaccaggatacgataccttgccaagggtattcatccagtggtttaaaaacccaacgaaatacatcaataaatatgcaactgccttcaagagagaca

SEQ ID NO: 672338 - DNA, 120 bp, Artificial Sequence
  ENSG00000185737_15 (sequence is synthesized)
tagaggaaacctgcctgcaaatgccagggatttctgaagtcaaaagcatcaaatggtgcaaaaactcctattcagctgacgttgtcaatgtgagtattccagtcagcgattgtcttatag

SEQ ID NO: 672339 - DNA, 120 bp, Artificial Sequence
  ENSG00000185737_16 (sequence is synthesized)
cagaacaacaagaagtgaaaatattgctagaaactgtccaggagcagatccgaattctgactgatgccagacggtcagaagactacgaactggccagcgtagaaaccgaggacagtgcaa

SEQ ID NO: 672340 - DNA, 120 bp, Artificial Sequence
  ENSG00000185737_17 (sequence is synthesized)
gcgaaaacacagcctttctccccctgagtcccacagccaaatcagaacgagaggcgcaatttgtcttaagaaatgaaatacaaagagactctgcattgaccaagtgacttgagatgtagg

SEQ ID NO: 672341 - DNA, 120 bp, Artificial Sequence
  ENSG00000185737_18 (sequence is synthesized)
aatctgtgcattctatgctttgctcaacaggaaagagaggaaatcaaatacaaattatttatatgcattaatttaagagcatctacttagaagaaaccaaatagtctatcgccctcatat

SEQ ID NO: 672342 - DNA, 120 bp, Artificial Sequence
  ENSG00000185737_19 (sequence is synthesized)
catagtgttttttaacaaaatatttttttaagggaaagaaatgtttcaggagggataaagcttaccattaaagcttttgggtagaattctgaatccaatttcgtttagtcccaacactgt

SEQ ID NO: 672343 - DNA, 120 bp, Artificial Sequence
  ENSG00000185737_20 (sequence is synthesized)
cctctttggctcttagaagatgtgggcaattcagacccttggccccacagtgccagtgtctcattaaaaaacactggcagttacctggtttcaaaaagaggagagctgcatcccgcaggt

SEQ ID NO: 672344 - DNA, 120 bp, Artificial Sequence
  ENSG00000185737_21 (sequence is synthesized)
ggatgcaccagtgagcaggtggctcttgccatttggcttgccagtcccaagccctaaatttctattcacccaatagcctcatcacaggttatgtcatgtcgacacatgtagtgttttcta

SEQ ID NO: 672345 - DNA, 120 bp, Artificial Sequence
  ENSG00000185737_22 (sequence is synthesized)
tttgatttttggagaatgccacaaaagactctgcaatgggaaggaggacaggagatagaaggagaaaccgggggcaatcttaactactcttgtgtgccaccttcctctgagatttgaatg

SEQ ID NO: 672346 - DNA, 120 bp, Artificial Sequence
  ENSG00000185737_23 (sequence is synthesized)
cacagatctcagctggaggtatgaaattattacagaaaaagagacaaaaaaatccttatatcgtgtcactaaaatcatgctaatagaaatgtttttccttgagattgtttagaggctctg

SEQ ID NO: 672347 - DNA, 120 bp, Artificial Sequence
  ENSG00000185737_24 (sequence is synthesized)
gaggagcgtttctcagtttttgtgtgcctgtgtgcacatgtgtgtgcgagcgtgtgtgtgtgtggacttgctcacgcgggcacatatgctgtaagcacatgtgttcattgtgcgtatgtg

SEQ ID NO: 672348 - DNA, 120 bp, Artificial Sequence
  ENSG00000185737_25 (sequence is synthesized)
tgtgcatgtgtgcgcgtattacgcttgctaaaatttgttctgaaacatcagggaatctactattcagaaaaattatttccctcttagatcttttcactttaaatttttccattaagtata

SEQ ID NO: 672349 - DNA, 120 bp, Artificial Sequence
  ENSG00000185737_26 (sequence is synthesized)
aagttcagttagttcttaaatcaaggtcacttgcatggtggggtcgtataaaactcttgacactgtctagaccattttctgatgtgaatacttttgagaggatcaactattggctcatta

SEQ ID NO: 672350 - DNA, 120 bp, Artificial Sequence
  ENSG00000185737_27 (sequence is synthesized)
atgatatcagtatcataaggtgagttcatcaaggatgtgtgtttattttgaatcatgcctacttaaattattaatacaagacaattaacaaattgacagttaccatttgctttctcatca

SEQ ID NO: 672351 - DNA, 120 bp, Artificial Sequence
  ENSG00000185737_28 (sequence is synthesized)
tcctcattaccatttattttatagcaagtctgctatgtgtggaccaaggcttcggcttctgtggttagtatgggaagaataaattgttgaaataaaaatacccagactattcagttcaca

SEQ ID NO: 672352 - DNA, 120 bp, Artificial Sequence
  ENSG00000185737_29 (sequence is synthesized)
agaagccccccaaaagaacagtaaattgtgttgtatgttcatttggaataaagcaatatttttaccactgctaaggtgaactgaaacctctcctgaagatttgtctgtttatttaccctc

SEQ ID NO: 672353 - DNA, 120 bp, Artificial Sequence
  ENSG00000185737_30 (sequence is synthesized)
actttcatgggacatatgaggaaattagtgttcacatatccagtctttttccaattattggtggtgttgagttgttatgtttacactgttttaaataaaaaggcaccgtatttgaaagca

SEQ ID NO: 672354 - DNA, 120 bp, Artificial Sequence
  ENSG00000185737_31 (sequence is synthesized)
caggaaggagggaaggaaggaatctgccacaaaccagaatggcagtagagccagtaacttgctgcttctctctcctttggctgaagcagtcatttttgagagcacattttcccaggaggt

SEQ ID NO: 672355 - DNA, 120 bp, Artificial Sequence
  ENSG00000185737_32 (sequence is synthesized)
gtttagagcctccactcaacaaatctagcttgtgttttgtagaaggataaaggattcatgagtgtatgtgtgaacatattcaatggattgaaaatgagtctaccctgaagaccccagatt

SEQ ID NO: 672356 - DNA, 120 bp, Artificial Sequence
  ENSG00000185737_33 (sequence is synthesized)
tttgatctgctcttttgatgcagttgatagaataatggagtgtggtatacctccaacccttgtatgcgttgggagaggagggggactacacacgatcaatataatcatctggtattattt

SEQ ID NO: 672357 - DNA, 120 bp, Artificial Sequence
  ENSG00000185737_34 (sequence is synthesized)
gatacgataccttgccaagggatagaggtcaggaagactatatcccacctgcctatacagctgtggtgtgttgaaagacccctggacttaaagtattcatccagtggtttaaaaacccaa

SEQ ID NO: 672358 - DNA, 120 bp, Artificial Sequence
  ENSG00000185737_35 (sequence is synthesized)
atggagtgtggtatacctccaacccttgtatgcgttgggagaggagggggactacacacggtaggggtatttcatgttctttctcaattgatttccttgtgtaccattccggaggtcttt

SEQ ID NO: 672359 - DNA, 120 bp, Artificial Sequence
  ENSG00000185737_36 (sequence is synthesized)
actgtagcagacagtgtctccaggcagggtactgagcaaagaggatagtgaaaagggcagtgaaacatcggcctttttcactggcaacttcaagactcactgcctacaatcagaccactt

SEQ ID NO: 672360 - DNA, 120 bp, Artificial Sequence
  ENSG00000185737_37 (sequence is synthesized)
cacggtttttcagaggcaaaaactcctttatgaattgattgccacatcacccttctggttccatctgaggtcttctttgcagaagccactcagcaccttttggaattgaatgctgacatc

SEQ ID NO: 672361 - DNA, 120 bp, Artificial Sequence
  ENSG00000185737_38 (sequence is synthesized)
gcatcagattcaaaaggaatgctgctgttgattcctttctgtactcatcacatggtgaggaatatgctgggagtctgtataagatgaggctcttgcacggcctgccagagagtgcctgtc

SEQ ID NO: 672362 - DNA, 120 bp, Artificial Sequence
  ENSG00000185737_39 (sequence is synthesized)
atggactggagaactgcatccgttcatttacatatcggcagctaaaattagtggagtcacccacgtttttcaccctaaagaagaaccttcagataagaatccagttcatcactctcgcct

SEQ ID NO: 672363 - DNA, 120 bp, Artificial Sequence
  ENSG00000185737_40 (sequence is synthesized)
gctcaggcttacttggttgctccttgttaccagacagaggggctatagcgctgtgtaagagcaaatgttaaattagtattaatagccaatggcatctctcttctatttttcactgatcag

SEQ ID NO: 672364 - DNA, 120 bp, Artificial Sequence
  ENSG00000185739_0 (sequence is synthesized)
cttggcagtcaccatgagggcgctggtcctgctcggctgcctcctggcctcgctcctgttctcaggacaagcagaagagacggaggatgcaaatgaagaagccccattgagggaccgctc

SEQ ID NO: 672365 - DNA, 120 bp, Artificial Sequence
  ENSG00000185739_1 (sequence is synthesized)
ccacatcgagaagaccctcatgctgaatgaggacaagccatccgatgactactctgcggtgctgcagcggcttcggaagatctaccactcatccatcaagcctctggagcagtcctacaa

SEQ ID NO: 672366 - DNA, 120 bp, Artificial Sequence
  ENSG00000185739_2 (sequence is synthesized)
gtacaatgagctccggcagcatgagatcacagatggagagattacctccaagcccatggtactgttcctgggaccgtggagtgttggtaaatctaccatgataaactacctccttgggct

SEQ ID NO: 672367 - DNA, 120 bp, Artificial Sequence
  ENSG00000185739_3 (sequence is synthesized)
ggaaaatactcgctatcagctctatacaggcgctgaacccaccacctctgagttcacggtcctcatgcatgggcctaagctgaaaaccatcgagggcatcgtcatggctgctgacagcgc

SEQ ID NO: 672368 - DNA, 120 bp, Artificial Sequence
  ENSG00000185739_4 (sequence is synthesized)
ccgttccttctcaccccttgagaagtttggccagaatttcctagagaagctgattggcattgaggttccccacaaacttctggagagggtcacttttgtggatacaccaggcatcatcga

SEQ ID NO: 672369 - DNA, 120 bp, Artificial Sequence
  ENSG00000185739_5 (sequence is synthesized)
gaaccgcaagcagcaagaaagaggctaccccttcaacgacgtgtgccagtggttcatcgacagagctgacctcatctttgtcgtctttgacccaacaaagctggatgtgggtctagagct

SEQ ID NO: 672370 - DNA, 120 bp, Artificial Sequence
  ENSG00000185739_6 (sequence is synthesized)
ggagatgctcttccgccagttgaaggggcgtgaatcccagataaggatcatcctgaacaaggctgacaatctggccacccaaatgctcatgcgggtttacggggccctcttctggagctt

SEQ ID NO: 672371 - DNA, 120 bp, Artificial Sequence
  ENSG00000185739_7 (sequence is synthesized)
ggcccctctcatcaatgtcacagagcccccaagggtttacgtcagctccttctggccacaagagtataagccggacacccatcaggaactgttcctccaagaagagatctccctcctaga

SEQ ID NO: 672372 - DNA, 120 bp, Artificial Sequence
  ENSG00000185739_8 (sequence is synthesized)
agacctgaatcaggtgatcgagaacagactggagaacaagattgccttcatccgccagcacgccatccgggtccgcatccacgccctcctggttgaccgctacctgcagacttacaagga

SEQ ID NO: 672373 - DNA, 120 bp, Artificial Sequence
  ENSG00000185739_9 (sequence is synthesized)
caaaatgaccttcttcagtgatggagaactggtctttaaggacattgtggaagatcccgataaattctacatcttcaagaccatcctggcaaagaccaatgtcagcaaatttgaccttcc

SEQ ID NO: 672374 - DNA, 120 bp, Artificial Sequence
  ENSG00000185739_10 (sequence is synthesized)
caaccgcgaggcctataaggacttcttcggcatcaatcccatttccagtttcaaactgctctcccagcagtgctcctacatgggaggttgctttctggagaagattgagcgggccatcac

SEQ ID NO: 672375 - DNA, 120 bp, Artificial Sequence
  ENSG00000185739_11 (sequence is synthesized)
tcaggagcttccgggcctcctgggtagcctcgggctcgggaagaatccaggtgctctcaactgtgacaaaacagggtgtagcgaaacaccaaaaaatcgctacaggaagcactaggtggt

SEQ ID NO: 672376 - DNA, 120 bp, Artificial Sequence
  ENSG00000185739_12 (sequence is synthesized)
ggagcggtccttgggttcctgttggtgaatcagcttgtgtcctaactgtctgagaggtcctggtttattaaccctttgagccacactggcaggaattattacacagtggagagttgggag

SEQ ID NO: 672377 - DNA, 120 bp, Artificial Sequence
  ENSG00000185739_13 (sequence is synthesized)
ttcattgaggccaggggtcggggcaggtgtgtgggtctagggaggagagtggaaactgtgaattcctgtgtgcttgtcttgttgcttcaatgaggaggcctgattgaggcaagtcagcct

SEQ ID NO: 672378 - DNA, 120 bp, Artificial Sequence
  ENSG00000185739_14 (sequence is synthesized)
ccacctgcttttcctgggtcctgtcttggaaggacagagagcagctaaattctagtgtatcttaaatcagtgagggtcaaataagctaaaagcagctgaaattcctttgttccctgtgag

SEQ ID NO: 672379 - DNA, 120 bp, Artificial Sequence
  ENSG00000185739_15 (sequence is synthesized)
ctgggaaaacagcgaaggcctgagtcgtagagattgtcaggtccattttggcttctttccacacccacagtctcgcgtttgttccccagccctcggctgcctcttaactttgggttgact

SEQ ID NO: 672380 - DNA, 120 bp, Artificial Sequence
  ENSG00000185739_16 (sequence is synthesized)
tttgggttgactttcaacagtgaatagtctcttgggtctgaatatacctgggtttgtttttgtgtttttgagacggagtctcgctctgtcggccaggttggagtgcagtggtgcaatctc

SEQ ID NO: 672381 - DNA, 82 bp, Artificial Sequence
  ENSG00000185739_17 (sequence is synthesized)
cggcctccacctgggttttgagccaatcccccggacttgctcctggtttcctcaaggggtggggcagtggtttaggacactc

SEQ ID NO: 672382 - DNA, 120 bp, Artificial Sequence
  ENSG00000185739_18 (sequence is synthesized)
ctggtttcctcaaggggtggggcagtggtttaggacactcgacaactaagaacaggagttcccaggaaggacaaggatctgcctcccccactgccacttctctgatgtgttcctcaaagc

SEQ ID NO: 672383 - DNA, 120 bp, Artificial Sequence
  ENSG00000185739_19 (sequence is synthesized)
tggctcgagggctcgatcccttcatcggacccaggaggggactggttggtgtatccaggtaatttactcttggaagtgactgtagtgaaggtcgtggaagggctcagagggttaattggt

SEQ ID NO: 672384 - DNA, 120 bp, Artificial Sequence
  ENSG00000185739_20 (sequence is synthesized)
ttgcagtgcgtctttgtctattgcatgtcttggaaaactcagatcccaaaggcgctgggtttcagagaggacagtggagaccttgctccttttccttaggccgccagtctctcaaatttc

SEQ ID NO: 672385 - DNA, 120 bp, Artificial Sequence
  ENSG00000185739_21 (sequence is synthesized)
agaggaggctgtttccacaactcccctgtggaaacacttggcagcggagttgctcctttgcagtttccacaccatggcttttcctttcctttcttctccattccctgatgcatcaacact

SEQ ID NO: 672386 - DNA, 120 bp, Artificial Sequence
  ENSG00000185739_22 (sequence is synthesized)
tacttggagcaatttcctaggagtcagaaccagcaccagccactcggtgtcggtggccaccaaggcttaacattgaccttcccgcctgaccttgatgcagatgtccactgaacacaccgc

SEQ ID NO: 672387 - DNA, 120 bp, Artificial Sequence
  ENSG00000185739_23 (sequence is synthesized)
aggaaagccagggccttcaataccaataagtgtgaatatgtgtgtatgttgtccaagagagattagggagatcacatagactctagggagtagagaacttgtaacagtcttgcaaggcta

SEQ ID NO: 672388 - DNA, 120 bp, Artificial Sequence
  ENSG00000185739_24 (sequence is synthesized)
gcatgcacggctccacagcaggtggtggggagcagaggggcaggacctgcagggaagaagcagcctttggatggtgaaatgtgcatggtgcacagtctgtgcatgcccaggagacccagc

SEQ ID NO: 672389 - DNA, 120 bp, Artificial Sequence
  ENSG00000185739_25 (sequence is synthesized)
ccgggctgcctcgaggggctcctttgtacacagccagccgcttctcttgggaacaagctgtcctgggggccttacccacgaggcaggagtcaggatgcaccagctcagcaccaggaagtc

SEQ ID NO: 672390 - DNA, 120 bp, Artificial Sequence
  ENSG00000185739_26 (sequence is synthesized)
atcctggacccaggacagtggaaaggcaggcagagggagaggcactctgaggtcaggcagggtaagccagttggcagtcaggttaggtctatgaggagaacctcgagttaggaattcccg

SEQ ID NO: 672391 - DNA, 120 bp, Artificial Sequence
  ENSG00000185739_27 (sequence is synthesized)
gttctcagaattgttatcactctggtgcatgctgtcacaggggccgttgcgtttggctttgtggagggcctggacccttccacaagaacacccgaggttccagggcactcaggacaatgt

SEQ ID NO: 672392 - DNA, 120 bp, Artificial Sequence
  ENSG00000185739_28 (sequence is synthesized)
ttccaaggaacgagtcgaccaggaaagaacagtgagttctgcaaggggcatccacggagcctgtgataggggctgatgagatggaatctgtcctggacttttcttctcattaaccaccct

SEQ ID NO: 672393 - DNA, 120 bp, Artificial Sequence
  ENSG00000185739_29 (sequence is synthesized)
ccgcaaaccccagaacccctcgcctcatctctgtactgtctgccctcttgggggatgggccctcccactttcccctgcctgctcctccatgctgtgagctgctttggcagatctgttttt

SEQ ID NO: 672394 - DNA, 120 bp, Artificial Sequence
  ENSG00000185739_30 (sequence is synthesized)
ctgtgtagtcaggggaaaaacaaaaaaagatgcacaactgtgtgggcattgtcatagctgttggtgtcaccactgctttgggggaaatggctgggatgaggctaatacattcatgcaata

SEQ ID NO: 672395 - DNA, 120 bp, Artificial Sequence
  ENSG00000185739_31 (sequence is synthesized)
tttatattttcagggggctgcgttatcagcatgctctccctgccttgggcttttctttccgtcatgttttccttttcgtgttccttctctgatttctcttgtctctgctgctcacaggcc

SEQ ID NO: 672396 - DNA, 120 bp, Artificial Sequence
  ENSG00000185739_32 (sequence is synthesized)
tgcccatcagtcagtacagatactcagtgtctggtttctggccagctccgtggagggggctttaagcagaattctgactctttggggtgggggattaggaactgggggaaacttaatgat

SEQ ID NO: 672397 - DNA, 120 bp, Artificial Sequence
  ENSG00000185739_33 (sequence is synthesized)
ccagagattcccccaagaggagtgtctggaaggatctgtgcctggacagtggcagaacctttccagtgttcttttggttctgatttcatcagtctcaataaagttccgatctctctttaa

SEQ ID NO: 672398 - DNA, 120 bp, Artificial Sequence
  ENSG00000185739_34 (sequence is synthesized)
agacagcgcgtcagtgacaggcacacccgggccagggtcctctcctttcctcagcccgtctctctgtgacagaccctgcctgcactcccaagcccctctctccctgtacgaagagacgga

SEQ ID NO: 672399 - DNA, 120 bp, Artificial Sequence
  ENSG00000185739_35 (sequence is synthesized)
cagtcaccatgagggcgctggtcctgctcggctgcctcctggcctcgctcctgttctcaggacaagcagaactgcaagtctccgcgtcgggtggcacagaagatgttggcaatttgttgg

SEQ ID NO: 672400 - DNA, 120 bp, Artificial Sequence
  ENSG00000185739_36 (sequence is synthesized)
agaatcatttctctgctggagacgcaagtctagaggagaaagaaagggcgctttatgcagacacagcccctcaagacaagaaactgctccttcactacccagatggcagggaggccgaga

SEQ ID NO: 672401 - DNA, 120 bp, Artificial Sequence
  ENSG00000185739_37 (sequence is synthesized)
gccccaagaagacccccgcgtctgccgccagcgcgggccccgatcctgaagccagcctctccaatgcctcagccacagagtcacctccacctggggaaagggacgacagggacgctgcgg

SEQ ID NO: 672402 - DNA, 120 bp, Artificial Sequence
  ENSG00000185739_38 (sequence is synthesized)
ggcctggggaggaaaagaatggcccaccagtggcaagcgccctccctccaggaggggccaaggggcctgtggaagaggagtggccggagcccagttctggagagggacaaggagaggagg

SEQ ID NO: 672403 - DNA, 120 bp, Artificial Sequence
  ENSG00000185739_39 (sequence is synthesized)
agactgggtttgggctccccacggagggaactgccagtggagaggcaggaggacaggctgggggccatgaactccccgaggaagtccaggaggtccaaggggacagcctggtgcagggag

SEQ ID NO: 672404 - DNA, 120 bp, Artificial Sequence
  ENSG00000185739_40 (sequence is synthesized)
cagtagcagggacagcagagccaaaggcagagggggcctctcctcactcagagggtgatggggtcggcccactgaacgcagaggccgagggcagccctgggcctggcgaggagcctgcag

SEQ ID NO: 672405 - DNA, 120 bp, Artificial Sequence
  ENSG00000185739_41 (sequence is synthesized)
tgccagagggagcccctgacgtcgcggctgttgggggagagtcggagccagatattgacacacaagccagtgagggcaccgaggaccagggggagcccggcccagctgcagaggccagtg

SEQ ID NO: 672406 - DNA, 120 bp, Artificial Sequence
  ENSG00000185739_42 (sequence is synthesized)
cagagcctgggggcgcccaaagcgttaaggcaggggacactgaggagaaccagtccccagagatgactgaggaggacgcagatgaagcctcctctgaagaggaaagtggtgatggaagtg

SEQ ID NO: 672407 - DNA, 120 bp, Artificial Sequence
  ENSG00000185739_43 (sequence is synthesized)
gaagcgaggaagaaggaggagttccctccgaagaggagtccgaagaggacagcggcgatggggctagctcagaagaagcagagggcgcctccgaggaggccacggagccccaggaggctg

SEQ ID NO: 672408 - DNA, 120 bp, Artificial Sequence
  ENSG00000185739_44 (sequence is synthesized)
gggagccccaggaagccagggagccccaggaaggcggggatctgcaggaagccgaggagtcccaggaaggcggggatccccaggaagccgaggagccccaggaaggtggagcgccacagg

SEQ ID NO: 672409 - DNA, 120 bp, Artificial Sequence
  ENSG00000185739_45 (sequence is synthesized)
aaggcggggagccccaggaaggtggggatccccaggaagccagggagccccaggaagccagggaaccccaggaaggtgcagagcttccggaagccacaggaaccacaagtcacagggaca

SEQ ID NO: 672410 - DNA, 120 bp, Artificial Sequence
  ENSG00000185739_46 (sequence is synthesized)
gaggggcccagcctggcccggaggaattgaatacagagtccatgggcagtgagaccctggatatgaaggcagaggagcccgaggagggacatcagggggagggagagtcccatcattgtt

SEQ ID NO: 672411 - DNA, 120 bp, Artificial Sequence
  ENSG00000185742_0 (sequence is synthesized)
actccacgctttctgcagccgccactgcagccgcgcggcgggggctccctccttgcagccagccggcggtccagcctggtgcctctgcaaaggaaaggggagcgtggagacgtgttcgag

SEQ ID NO: 672412 - DNA, 120 bp, Artificial Sequence
  ENSG00000185742_1 (sequence is synthesized)
gtggtatcggcgaggatctctcgggcgccgctcactccttggtcgccttgcttgccagcagttgctcccttagtccttggctcgctcgcacaccccctcccgctacagggagcagttttg

SEQ ID NO: 672413 - DNA, 120 bp, Artificial Sequence
  ENSG00000185742_2 (sequence is synthesized)
ggtggcgtgggctccgtcctcttcttggctggtaggaacggtgtgcccaagaggggaagcctagtgggcctggcccctcccagccccgcgccaatgagtgccagggcgccgaaggagctg

SEQ ID NO: 672414 - DNA, 120 bp, Artificial Sequence
  ENSG00000185742_3 (sequence is synthesized)
aggctggcgttgccgccgtgtctcctcaaccggacctttgcttcccccaacgccagcggcagcggcaacacgggtgcccgcggcccaggcgcagtaggcagcggcacctgcatcacgcag

SEQ ID NO: 672415 - DNA, 120 bp, Artificial Sequence
  ENSG00000185742_4 (sequence is synthesized)
gtgggacagcagctcttccagtccttctcctccacgctggtgctgattgtcctggttaccctcatcttctgcctcatcgtgctgtccctctccactttccacatccacaagcgtaggatg

SEQ ID NO: 672416 - DNA, 120 bp, Artificial Sequence
  ENSG00000185742_5 (sequence is synthesized)
aagaagcggaagatgcagagggctcaggaggaatatgagcgggatcactgcagcggcagccgcggtggcggggggctgccccgacctggcaggcaggccccaacccacgcaaaggaaacc

SEQ ID NO: 672417 - DNA, 120 bp, Artificial Sequence
  ENSG00000185742_6 (sequence is synthesized)
cggctggagaggcagccccgggactctcccttctgcgccccttccaacgcctcgtcgttgtcctcttcgtcccctggcctcccgtgccagggtccctgtgctcctccgcctccaccgcca

SEQ ID NO: 672418 - DNA, 120 bp, Artificial Sequence
  ENSG00000185742_7 (sequence is synthesized)
gcctccagtccccaaggagcacacgcagcttcctcctgtttggacacagctggcgagggccttttgcaaacggtggtactgtcctgatcgtctagcccctctcgttccccgtcctcgttt

SEQ ID NO: 672419 - DNA, 120 bp, Artificial Sequence
  ENSG00000185742_8 (sequence is synthesized)
ccagcatctttgccacccttgcttttttccttcttccttccttttccattttcctctggcccctctttcctcttcctggtttccttacctgccctccccttactcttgtttctcctccgc

SEQ ID NO: 672420 - DNA, 120 bp, Artificial Sequence
  ENSG00000185742_9 (sequence is synthesized)
cgaggcactgtgcggtatttgtaaatattgggcgaggaaagtctcggaagaagaaataacgctgataataatactttattaatatttatagtaattattataatactaataacacaatcc

SEQ ID NO: 672421 - DNA, 120 bp, Artificial Sequence
  ENSG00000185742_10 (sequence is synthesized)
aagcgcatgacaaatcacataatttctaactgtcaatggaggatgcatcttcccattccaccccgcgctcccctcaattaggaggagaaaccgcacaagctaccaaatatataaaaggca

SEQ ID NO: 672422 - DNA, 120 bp, Artificial Sequence
  ENSG00000185742_11 (sequence is synthesized)
ttgattcccggagcaaagggaggggagggggcccggtaatgtacatagctgtcaagttaagatttagtttccttccttcccctctgacccctaagctttcacttttcctttagcttccct

SEQ ID NO: 672423 - DNA, 120 bp, Artificial Sequence
  ENSG00000185742_12 (sequence is synthesized)
ttcctccccattcccaccctcagccgggctcaggcaatagtatattataaagaaaatgtctacattaagcaccaggactgcaagaggccatagagaatagtccccggaaagtgtttatga

SEQ ID NO: 672424 - DNA, 120 bp, Artificial Sequence
  ENSG00000185742_13 (sequence is synthesized)
caggtacccctcgccagtccgcccatttctcaccctttggttaaccattacattttccaggacagagcatttaatttactttttaaaatgaccctcgctggccgagcataagtacgttaa

SEQ ID NO: 672425 - DNA, 120 bp, Artificial Sequence
  ENSG00000185742_14 (sequence is synthesized)
aatctttaaatgagttttttttaaaaagctaacgctttcattccctgccccgcccccacccgtacacctttgacttgtgacattttcaggatttacaaaggatctgggagctgtccagcc

SEQ ID NO: 672426 - DNA, 120 bp, Artificial Sequence
  ENSG00000185742_15 (sequence is synthesized)
aggtctggtgctgaagtcgcctcaccgttctgattacttcctctagttgtgaaggcagaggaggggctgttttggaaagtgactattctggcttttggttgggttctttcttctttttct

SEQ ID NO: 672427 - DNA, 120 bp, Artificial Sequence
  ENSG00000185742_16 (sequence is synthesized)
acaatcgagttagcgtgtactattggttttcttattattaaacattgcataagttaccttttttgtaaaaaaaaaaaagtattaggtgatgtgcagtactgaaagtgcagtatctaacca

SEQ ID NO: 672428 - DNA, 120 bp, Artificial Sequence
  ENSG00000185742_17 (sequence is synthesized)
actagaacgtttgttttatttttagaacaagtgcacctttgttatatatttagtatattggtaccaaatacagaaaaaaactatagttctgtactatgtcctccaaactgtatattattg

SEQ ID NO: 672429 - DNA, 120 bp, Artificial Sequence
  ENSG00000185742_18 (sequence is synthesized)
ttcttaatttccagctgttgatataatggttaccactggatgagaaattcagtggtgcagacctggcttctgctgtttccagaagtgttcttttgtaccttattctgtagtagactgtta

SEQ ID NO: 672430 - DNA, 120 bp, Artificial Sequence
  ENSG00000185742_19 (sequence is synthesized)
taaaaagatgacacacacgctttattttttcttttgcaaataatagaaaaaacacaaccacagaaacaaacaaataatggatgtgcaagaatgccatctattaaaaacatggttaatatt

SEQ ID NO: 672431 - DNA, 120 bp, Artificial Sequence
  ENSG00000185742_20 (sequence is synthesized)
taaacagtgcctgtagttctccctgcatgcagttaccacctggaggcagtggtgtgtgtgcttgcttgtactgtatgtggttggggatgagactggtggggatgttgggcaatttggatg

SEQ ID NO: 672432 - DNA, 120 bp, Artificial Sequence
  ENSG00000185742_21 (sequence is synthesized)
ataagacatgcgaatttcaagaaaagctagatccagtaattacttataggatacaaatgtttgcagcttgtttgtttagttacaaatctgtgcctgcagcaaaagaaaggctctctttct

SEQ ID NO: 672433 - DNA, 120 bp, Artificial Sequence
  ENSG00000185742_22 (sequence is synthesized)
cagtctgtcctaacttcactgaacatacaaaaatactgagaaaaaaagaaagtgagaaaataagataaatattttattattttctaatgccagacaaggccatctatgttagaaatggaa

SEQ ID NO: 672434 - DNA, 120 bp, Artificial Sequence
  ENSG00000185742_23 (sequence is synthesized)
gtagtctatagttatttaccaccttgtttcctttggttgaatgacagaagaagccagaagcatattacaatattaattatatgcagtgacatctcttcttggaaatcaagcctttgacag

SEQ ID NO: 672435 - DNA, 120 bp, Artificial Sequence
  ENSG00000185742_24 (sequence is synthesized)
atccctctcccaagcaactcattgttctaaattgtctacttggtccagacatatgtgctcttatccagaggaaacattacctctaatatttttggtcatctattaaattgcccaagctca

SEQ ID NO: 672436 - DNA, 120 bp, Artificial Sequence
  ENSG00000185742_25 (sequence is synthesized)
gtttgcatcttttataaaaataatttaataaacttaattttaatcacccataagataatcacctttcctgaagcacagaagatcatcattgaagcatgccatcttgtaatattaggaaga

SEQ ID NO: 672437 - DNA, 120 bp, Artificial Sequence
  ENSG00000185742_26 (sequence is synthesized)
ccaggtataatctttgggtacaatatattaaacaatgaaccagtttttctccagtgccttagtcacttcctagtaataggtaaaagagtgcattaactccctcaggccactagggaatcc

SEQ ID NO: 672438 - DNA, 120 bp, Artificial Sequence
  ENSG00000185742_27 (sequence is synthesized)
tgtagtgcatcagagttctacactgtacatcagaatgactaaggcactgtgaagaagaaagtccattgatttttgtagcttaccctcatccagtggtagctctttaataccttattacag

SEQ ID NO: 672439 - DNA, 120 bp, Artificial Sequence
  ENSG00000185742_28 (sequence is synthesized)
aatgacttttggacttgaaatttgaatagaatcagggtcccagaagggagcttcatcatttccaatgagctccaataagtgcatggatattactttctttcccttatttggtgcactttc

SEQ ID NO: 672440 - DNA, 120 bp, Artificial Sequence
  ENSG00000185742_29 (sequence is synthesized)
tacagcgaataatttcccattttattaaagcaataagatgttctgttgtgagcagtgctggataacgattccattttcttggtgctgaagctacgcatatgttcttgccttatgaatcat

SEQ ID NO: 672441 - DNA, 120 bp, Artificial Sequence
  ENSG00000185742_30 (sequence is synthesized)
agtatattcaaggcatgcaataataatccccttccaaggagcagcctgtacactctgtgggggtaattatgaaattgtcctacatcatttctccccaaaggaatgcaaggagcaagagaa

SEQ ID NO: 672442 - DNA, 120 bp, Artificial Sequence
  ENSG00000185742_31 (sequence is synthesized)
ataaaagcattatgtatattgtaaaacaaatgatctcaatacctctcaacgtgggcacacatctgtaatacacttttattgtgcaactttaaatgtgtgtgcctttctccattaattgac

SEQ ID NO: 672443 - DNA, 120 bp, Artificial Sequence
  ENSG00000185742_32 (sequence is synthesized)
tgtagtttaatatttttaatagtgctctgtgtaaagatgatgcagtttgtgagtcagatttcatactgagcttaatatactcaaaacctaagcttccagtggtattacttgtgatttttt

SEQ ID NO: 672444 - DNA, 120 bp, Artificial Sequence
  ENSG00000185742_33 (sequence is synthesized)
tatgagatagagaattacatgaaattctagtaatccagtttccacacaaaattatttcaataagcacatatccaagcaatttgtacagaccttgtttaaagcactgcttcttatagggct

SEQ ID NO: 672445 - DNA, 120 bp, Artificial Sequence
  ENSG00000185742_34 (sequence is synthesized)
caattggcagtctcaggagcttgggatgctaccaacagggcatttaggttttcatttttatgaaacaaaaggcaatctggaaatagctaaatttattttaaggattttattcactgatgt

SEQ ID NO: 672446 - DNA, 120 bp, Artificial Sequence
  ENSG00000185742_35 (sequence is synthesized)
cccgtcaaactaaatgcttcaaacccctatagctacagcttaacttctgcacttgctattcagtattaataaggtggcatgcttgattcttattgtttttaaaaatgagaaaatttggag

SEQ ID NO: 672447 - DNA, 120 bp, Artificial Sequence
  ENSG00000185742_36 (sequence is synthesized)
agagaatactattatgtcaacggtacaagactctgaatcttgaagatgtagatggatataatatttagactttatatacacccatagatatgtatttatatatgcatacgttttgtataa

SEQ ID NO: 672448 - DNA, 120 bp, Artificial Sequence
  ENSG00000185742_37 (sequence is synthesized)
atttacaattgactttttgtattctcttttctgtcattacaagaatgagatggaaaccaaaatagttgttccatcctcttacccaaagaggatactgaaaagtccggtatgtgcatgcac

SEQ ID NO: 672449 - DNA, 120 bp, Artificial Sequence
  ENSG00000185742_38 (sequence is synthesized)
ttgtttctctggggtcaaatctgaatgactttctctttaataatgaaaggggagagtcctggttagcttggaaaattggtaattagataagcttcctttcctaggttagtgactcaaatg

SEQ ID NO: 672450 - DNA, 120 bp, Artificial Sequence
  ENSG00000185742_39 (sequence is synthesized)
tagcaatgataataaagttatgaccatatcaatgtggtctaaatatctagatggaaagcaaaaatatccagaagaggtttagggccatctagaccacaaacctggaacctggattgtggt

SEQ ID NO: 672451 - DNA, 120 bp, Artificial Sequence
  ENSG00000185742_40 (sequence is synthesized)
ttgatttttttcattttcaacctatatgttgtgtagaaatacaatttatatctgcatagctaaaggtaaagtgaaaatatgaccattatctgtttagtttgagaaatcatttttggataa

SEQ ID NO: 672452 - DNA, 120 bp, Artificial Sequence
  ENSG00000185742_41 (sequence is synthesized)
tatggataaattagctttaagaaacttctttgacatctgacttttccaccatttctatctgtatcaattgtattaattagataatggttaaatttttatttttttatcatgtagacatat

SEQ ID NO: 672453 - DNA, 120 bp, Artificial Sequence
  ENSG00000185742_42 (sequence is synthesized)
gctttcatgcttttctgtgggtgaaagttgaacaattgctagctgatattatgtggaagttacaggttaaagtagaaccagaaattttaatataatctgatcaggttccttagtcccatt

SEQ ID NO: 672454 - DNA, 120 bp, Artificial Sequence
  ENSG00000185742_43 (sequence is synthesized)
cccatgtgaatctgaactttgaatttgaatctgaaaggcctacttatttgggccattttttgttggaacttgtgattgtaactcacagatgtttcagttcatattagaataaattgccca

SEQ ID NO: 672455 - DNA, 120 bp, Artificial Sequence
  ENSG00000185742_44 (sequence is synthesized)
atctataagagagtgtttaatcattggaatgaatgtaaatctgattctgatttggttatttatttgataacatttgagaaacagctaatgtggcttgacatcaatacttattaatgtctt

SEQ ID NO: 672456 - DNA, 120 bp, Artificial Sequence
  ENSG00000185742_45 (sequence is synthesized)
caacctaataatacaattggtgtcatgtatgaatgcttagctgacaataagaatttaatcaactttatttggagacaatgacttatcaaggaggtcctacccatttgtggtagggatatt

SEQ ID NO: 672457 - DNA, 120 bp, Artificial Sequence
  ENSG00000185742_46 (sequence is synthesized)
tcccttacagttgtgattacaagggattgtttctatagagagatgaacagcaacaacagtgacaatgatgacaacagaaaaactgacttttgaacttgagtatatccaatagatagaaga

SEQ ID NO: 672458 - DNA, 120 bp, Artificial Sequence
  ENSG00000185742_47 (sequence is synthesized)
aaaaagatattagaattcatggaaattttgttttgcttttctatcaataaaagagttttcttgttaattggctttttggacactatttccttgccaatttaatgtacaatataccaggat

SEQ ID NO: 672459 - DNA, 120 bp, Artificial Sequence
  ENSG00000185745_0 (sequence is synthesized)
aactgaaaatccacaagacagaatagccagatctcagaggagcctggctaagcaaaaccctgcagaacggctgcctaatttacagcaaccatgagtacaaatggtgatgatcatcaggtc

SEQ ID NO: 672460 - DNA, 120 bp, Artificial Sequence
  ENSG00000185745_1 (sequence is synthesized)
aaggatagtctggagcaattgagatgtcactttacatgggagttatccattgatgacgatgaaatgcctgatttagaaaacagagtcttggatcagattgaattcctagacaccaaatac

SEQ ID NO: 672461 - DNA, 120 bp, Artificial Sequence
  ENSG00000185745_2 (sequence is synthesized)
agtgtgggaatacacaacctactagcctatgtgaaacacctgaaaggccagaatgaggaagccctgaagagcttaaaagaagctgaaaacttaatgcaggaagaacatgacaaccaagca

SEQ ID NO: 672462 - DNA, 120 bp, Artificial Sequence
  ENSG00000185745_3 (sequence is synthesized)
aatgtgaggagtctggtgacctggggcaactttgcctggatgtattaccacatgggcagactggcagaagcccagacttacctggacaaggtggagaacatttgcaagaagctttcaaat

SEQ ID NO: 672463 - DNA, 120 bp, Artificial Sequence
  ENSG00000185745_4 (sequence is synthesized)
cccttccgctatagaatggagtgtccagaaatagactgtgaggaaggatgggccttgctgaagtgtggaggaaaaaattatgaacgggccaaggcctgctttgaaaaggtgcttgaagtg

SEQ ID NO: 672464 - DNA, 120 bp, Artificial Sequence
  ENSG00000185745_5 (sequence is synthesized)
gaccctgaaaaccctgaatccagcgctgggtatgcgatctctgcctatcgcctggatggctttaaattagccacaaaaaatcacaagccattttctttgcttcccctaaggcaggctgtc

SEQ ID NO: 672465 - DNA, 120 bp, Artificial Sequence
  ENSG00000185745_6 (sequence is synthesized)
cgcttaaatccagacaatggatatattaaggttctccttgccctgaagcttcaggatgaaggacaggaagctgaaggagaaaagtacattgaagaagctctagccaacatgtcctcacag

SEQ ID NO: 672466 - DNA, 120 bp, Artificial Sequence
  ENSG00000185745_7 (sequence is synthesized)
acctatgtctttcgatatgcagccaagttttaccgaagaaaaggctctgtggataaagctcttgagttattaaaaaaggccttgcaggaaacacccacttctgtcttactgcatcaccag

SEQ ID NO: 672467 - DNA, 120 bp, Artificial Sequence
  ENSG00000185745_8 (sequence is synthesized)
atagggctttgctacaaggcacaaatgatccaaatcaaggaggctacaaaagggcagcctagagggcagaacagagaaaagctagacaaaatgataagatcagccatatttcattttgaa

SEQ ID NO: 672468 - DNA, 120 bp, Artificial Sequence
  ENSG00000185745_9 (sequence is synthesized)
tctgcagtggaaaaaaagcccacatttgaggtggctcatctagacctggcaagaatgtatatagaagcaggcaatcacagaaaagctgaagagaattttcaaaaattgttatgcatgaaa

SEQ ID NO: 672469 - DNA, 120 bp, Artificial Sequence
  ENSG00000185745_10 (sequence is synthesized)
ccagtggtagaagaaacaatgcaagacatacatttccactatggtcggtttcaggaatttcaaaagaaatctgacgtcaatgcaattatccattatttaaaagctataaaaatagaacag

SEQ ID NO: 672470 - DNA, 120 bp, Artificial Sequence
  ENSG00000185745_11 (sequence is synthesized)
gcatcattaacaagggataaaagtatcaattctttgaagaaattggttttaaggaaacttcggagaaaggcattagatctggaaagcttgagcctccttgggttcgtctacaaattggaa

SEQ ID NO: 672471 - DNA, 120 bp, Artificial Sequence
  ENSG00000185745_12 (sequence is synthesized)
ggaaatatgaatgaagccctggagtactatgagcgggccctgagactggctgctgactttgagaactctgtgagacaaggtccttaggcacccagatatcagccactttcacatttcatt

SEQ ID NO: 672472 - DNA, 120 bp, Artificial Sequence
  ENSG00000185745_13 (sequence is synthesized)
tcattttatgctaacatttactaatcatcttttctgcttactgttttcagaaacattataattcactgtaatgatgtaattcttgaataataaatctgacaaaatattagttgtgttcaa

SEQ ID NO: 672473 - DNA, 120 bp, Artificial Sequence
  ENSG00000185745_14 (sequence is synthesized)
caattagtgaaacagaatgtgtgtatgcatgtaagaaagagaaatcatttgtatgagtgctatgtagtagagaaaaaatgttagttaactttgtaggaaataaaacattggacttacact

SEQ ID NO: 672474 - DNA, 120 bp, Artificial Sequence
  ENSG00000185745_15 (sequence is synthesized)
aaatgtttaattcattcattttattgtgaaataaaaataaaatccttagctcctccaccaactgaacagaccctcttggccaaggagaccccagaaaccttaaaaactaagtttcccaac

SEQ ID NO: 672475 - DNA, 120 bp, Artificial Sequence
  ENSG00000185745_16 (sequence is synthesized)
catgacaagatgagagatcattcacacctcattatattccctcccttgctaactgccattggactttttccactgagttaaacagaaacccatggaaaacaaagaacagaagactcactc

SEQ ID NO: 672476 - DNA, 120 bp, Artificial Sequence
  ENSG00000185745_17 (sequence is synthesized)
agtgaccactgcccacagactggttctggccagtccatggaggctgcacacagggtgcctctatgtcctttgtttcaccttttgatatagaaaggctaattttgctgtattttaatgtta

SEQ ID NO: 672477 - DNA, 120 bp, Artificial Sequence
  ENSG00000185745_18 (sequence is synthesized)
agtctccaccacagagtgaacacagaatgcatgtgacatacatgtttacataccactattgtgtgactgcccctcatgaatattcatagccccccataacctgttaactatgtgtgtcta

SEQ ID NO: 672478 - DNA, 120 bp, Artificial Sequence
  ENSG00000185745_19 (sequence is synthesized)
gccaatccaccaaccataaaacttctgtaataccctcccttcctccaagagcctgcttttggttgctgtggtaggctctgcttcccaggctgcaggttgcaggagaggaggctgcagtgg

SEQ ID NO: 672479 - DNA, 120 bp, Artificial Sequence
  ENSG00000185745_20 (sequence is synthesized)
ctcacgcctgtaatctcagcacttcgatgggacgaggcaggcagatcacctgaacccaggagttcgagagcagccttggcaatggcaaaaccaaccgtctctacaaaaaatgcaaaaact

SEQ ID NO: 672480 - DNA, 120 bp, Artificial Sequence
  ENSG00000185745_21 (sequence is synthesized)
tagctgggtgtggtggcatgcacctgtagcttcagttccagctactcaggaggctgaggtgagtggactgctggagccagggagttcgaggctgcagtgtcgagatcttgccactgcact

SEQ ID NO: 672481 - DNA, 120 bp, Artificial Sequence
  ENSG00000185745_22 (sequence is synthesized)
ccattctggatgatagaacgagaccccatctcaaaaaaaaaaaaagttctctccaattgtatatagcttgtgattttatgtcaacactatcaataaatagctttcagtgcaagaaaccaa

SEQ ID NO: 672482 - DNA, 120 bp, Artificial Sequence
  ENSG00000185745_23 (sequence is synthesized)
aaatactgtaataaacaggcacatattcttcccaaacctcatgcagtttacaatctagtgagagacacagatagcagtacagagtcaattaaaggttagttttcttcatgaagatgtttt

SEQ ID NO: 672483 - DNA, 120 bp, Artificial Sequence
  ENSG00000185745_24 (sequence is synthesized)
aattttaattcaatgtgaaagggttccaaggagtttatcttgttttatgccattttatttgaagcactacttactaagtcatttgctgatattaatctagttaaatcaagaaatattaca

SEQ ID NO: 672484 - DNA, 120 bp, Artificial Sequence
  ENSG00000185745_25 (sequence is synthesized)
tgaaaatgttgctaaatcagagatcatgggtaacaatcacctttgattatgaataatcatattttattgaaaggcaaggcacaacaaataataagaaggaaaaaataaataagcaatgtt

SEQ ID NO: 672485 - DNA, 120 bp, Artificial Sequence
  ENSG00000185745_26 (sequence is synthesized)
attgatctttcattctgtatatgttttggggggaatatactagtttcttttagtggctgtaacaaattaccacaaacttggtgacttaaaatttcacagatttactctttcttacagttc

SEQ ID NO: 672486 - DNA, 120 bp, Artificial Sequence
  ENSG00000185745_27 (sequence is synthesized)
tggaggtcagaagtctgaaatgggtttcaatgagccaaagtcaaggtattgatgacgctacactcctccggaggctctaggcagatagccttttccagcttccagaggctgcctgaattc

SEQ ID NO: 672487 - DNA, 120 bp, Artificial Sequence
  ENSG00000185745_28 (sequence is synthesized)
tttcatccatcttaaaaaccaacagtgtagtagcctcaaatctctctctctgcttccttcttcacatctccttctctcctctgactcttttgcctctttcttctaaggacgcaccaggtc

SEQ ID NO: 672488 - DNA, 120 bp, Artificial Sequence
  ENSG00000185745_29 (sequence is synthesized)
cacctgcataatccagaataattgccccatccgcaaatccttaatttaataacatctgcaaagtcccttttgctatgtaaagtagcatgttcacaggttctggagacttggccatggata

SEQ ID NO: 672489 - DNA, 120 bp, Artificial Sequence
  ENSG00000185745_30 (sequence is synthesized)
cgattgcggggggggcattattcttaccacagagcaccccaagaaaatctccaaattttgggcttccaatccattttgcttcaattatttaatatttttactccttccagtagatactga

SEQ ID NO: 672490 - DNA, 120 bp, Artificial Sequence
  ENSG00000185745_31 (sequence is synthesized)
tttcatccattgcccttaagaaggtaggacagagattatggcacatctcacattaaatgctatattttcgttggaaatacattttttgcttcaacttttattttaaattcaagggtacat

SEQ ID NO: 672491 - DNA, 120 bp, Artificial Sequence
  ENSG00000185745_32 (sequence is synthesized)
gtgcaggatgttcaggtttgttacacaggtaaacgtgtgccatggcggtttgctgaacagatcatcccatcaccaacagatcatcccattgagaggtgaagccggctgggcttctgggtt

SEQ ID NO: 672492 - DNA, 120 bp, Artificial Sequence
  ENSG00000185745_33 (sequence is synthesized)
gggccaagtaagggaataaaagcaggccacccgagctggcagcggcaacccgctcgggtccccttccatgctgtggaagttttgttctttcgctctttcaataaatcttgctgctgctca

SEQ ID NO: 672493 - DNA, 120 bp, Artificial Sequence
  ENSG00000185745_34 (sequence is synthesized)
gcaaggacacacccacagcttacaccattggctgctgtttagctcccttatataacactgtcttggggtttaaacgtaactgaaaatccacaagacagaatagccagatctcagaggagc

SEQ ID NO: 672494 - DNA, 120 bp, Artificial Sequence
  ENSG00000185745_35 (sequence is synthesized)
ctggctaagcaaaaccctgcagaacggctgcctaatttacagcaaccatgaggttctttaccacagagaaaaagcaggacccacaagaatgtgaaagcctcagtcttgcagcctctctga

SEQ ID NO: 672495 - DNA, 120 bp, Artificial Sequence
  ENSG00000185745_36 (sequence is synthesized)
tgtcttgtgggtaatacagtggagatgtggtaggaaaagctcacagccttcctccataggcttctggtctcactttctgcactgctggcctcttacaacaggttttcgcaatcaggctga

SEQ ID NO: 672496 - DNA, 120 bp, Artificial Sequence
  ENSG00000185753_0 (sequence is synthesized)
gtccgccacgccccgcaacctcctggttccaagtgggagacatggtgctgtcggagctagcggcgcgcctcaactgcgccgagtacaagaactgggtgaaggcgggccactgcctgttac

SEQ ID NO: 672497 - DNA, 120 bp, Artificial Sequence
  ENSG00000185753_1 (sequence is synthesized)
ttactgctgcgcagctgcctgcagggtttcgtcggccgcgaggtgctctccttccaccgcggcctactcgccgcagcccccggcctggggccccgcgccgtctgccgcggcggctcacgg

SEQ ID NO: 672498 - DNA, 120 bp, Artificial Sequence
  ENSG00000185753_2 (sequence is synthesized)
gccctcgcgcccgccagtttcagcctcagtgtcaggtgtgcgctgaatggaaaagggagattttgagacatcatgtcaacagaaatggagatgtgcactggggaaactgccggccgggcc

SEQ ID NO: 672499 - DNA, 120 bp, Artificial Sequence
  ENSG00000185753_3 (sequence is synthesized)
gctggcccgtggacgcctgggaggtggccaaggccttcatgccccgaggactagcagacaaacaaggacctgaggaatgtgatgcagttgctcttttaagtctcatcaactcctgcgatc

SEQ ID NO: 672500 - DNA, 120 bp, Artificial Sequence
  ENSG00000185753_4 (sequence is synthesized)
acttcgtggttgatcgaaagaaagtcacagaggtaattaaatgtcgtaatgagatcatgcactcttcagagatgaaagtatcttctacgtggcttcgagattttcagatgaagatccaaa

SEQ ID NO: 672501 - DNA, 120 bp, Artificial Sequence
  ENSG00000185753_5 (sequence is synthesized)
attttctgaatgaattcaagaacatcccagagattgtggcagtatactccagaatagaacagctgttgacgtctgactgggctgttcacatccccgaggaagatcagcgagatgggtgtg

SEQ ID NO: 672502 - DNA, 120 bp, Artificial Sequence
  ENSG00000185753_6 (sequence is synthesized)
aatgtgaaatgggaacttacctgagtgagagccaagtcaatgaaatagaaatgcagttactaaaggagaaacttcaagagatatatcttcaagcagaagaacaagaggtgttgcctgaag

SEQ ID NO: 672503 - DNA, 120 bp, Artificial Sequence
  ENSG00000185753_7 (sequence is synthesized)
agctctcaaatcgactggaagtggtgaaggaatttctgagaaacaatgaggatcttagaaatggccttacagaagatatgcagaagctagacagcctctgtctacatcaaaaactggatt

SEQ ID NO: 672504 - DNA, 120 bp, Artificial Sequence
  ENSG00000185753_8 (sequence is synthesized)
cacaggaacctgggagacaaacacctgacaggaaggcctgaggttgcccgtcaacaaaaatcaggcatgttctgtgaaagtcagcatggcttccatctcagacatccttttctgtgcaaa

SEQ ID NO: 672505 - DNA, 120 bp, Artificial Sequence
  ENSG00000185753_9 (sequence is synthesized)
aggaaaaagttaccagagtattgtacccaaacaaaaaggaatttttgttgttttgtcctggactttcctctaactctttggaactattttaatatttataaacttggggttgtataatct

SEQ ID NO: 672506 - DNA, 120 bp, Artificial Sequence
  ENSG00000185753_10 (sequence is synthesized)
tggggttgtataatctattgcaataaaaaatattagatactctatgccaaaacttgctaccaggccaggtgtgatggctcacacctgtaatccccagcactttgggaggccaaggcgggc

SEQ ID NO: 672507 - DNA, 89 bp, Artificial Sequence
  ENSG00000185753_11 (sequence is synthesized)
gcaatagagcgagattctgtctcccaaaaaaacaaaaaacaacaacaaaacttgctaccacccagggattttctgctatttaaaaggtg

SEQ ID NO: 672508 - DNA, 120 bp, Artificial Sequence
  ENSG00000185753_12 (sequence is synthesized)
acttgctaccacccagggattttctgctatttaaaaggtgaatttcttttctggtactaaactgtagctgcttaacttagtaaaggctgtgtttggccaggcctgtgccagaggctcacc

SEQ ID NO: 672509 - DNA, 120 bp, Artificial Sequence
  ENSG00000185753_13 (sequence is synthesized)
tggagtgctccacccactggcaggcaagtcctattcctattcacccaggatccccaaggctgggctgggatataaatgttgggataggaaagaaatatttcctttttagaggaaagcaag

SEQ ID NO: 672510 - DNA, 120 bp, Artificial Sequence
  ENSG00000185753_14 (sequence is synthesized)
aaatatttcctttttagaggaaagcaagaagaaacattgcctgaaaggtgattttctagtcatttccaattagtacagaaatgttactgcctctgggtgcagtggttcacgcctgtaatc

SEQ ID NO: 672511 - DNA, 89 bp, Artificial Sequence
  ENSG00000185753_15 (sequence is synthesized)
atctctacaaaaaaatttaaaaattacctgggcatggtggcacacacctttattctcagctactcaggttggtcaaggctgtggtgagc

SEQ ID NO: 672512 - DNA, 120 bp, Artificial Sequence
  ENSG00000185753_16 (sequence is synthesized)
aacaagaccctgtctcaaaaaaaaaaaaaccccaaaaactgttactactaggttggagtagcctaaggcagtagggcaaggaggtgggcccaggctggtctgtggggagctggagaatgg

SEQ ID NO: 672513 - DNA, 120 bp, Artificial Sequence
  ENSG00000185753_17 (sequence is synthesized)
cccaggctggtctgtggggagctggagaatggtgactcgagtgaccagtggacaggcaggacccaggccagcattacaagcggggatgtcaggcaggagcaggggagcttctcgcttggc

SEQ ID NO: 672514 - DNA, 120 bp, Artificial Sequence
  ENSG00000185753_18 (sequence is synthesized)
agctggtttatggtacacttttgaaaagtaagctcccagggcctggccctcacatgctcagtgaatatttgactgaagggtcccctcatagcttgggagtattcacaggcctaaatgtta

SEQ ID NO: 672515 - DNA, 120 bp, Artificial Sequence
  ENSG00000185753_19 (sequence is synthesized)
gttatactattagctaagcctggtcctttgttacgaaatttaaaaatgaaattgcaacattcttgtggaaattcaaagacatcattttctttcaacaaattcacacattcgttcatgctt

SEQ ID NO: 672516 - DNA, 120 bp, Artificial Sequence
  ENSG00000185753_20 (sequence is synthesized)
cttctataccttttacccctaaagtcatccactcctgagttcctcctgctggtttcccaaactgcgcaatgactgccccatcataggcagtggtccgtggagtcggcctcactttcgcct

SEQ ID NO: 672517 - DNA, 120 bp, Artificial Sequence
  ENSG00000185753_21 (sequence is synthesized)
ttccccgcatctacttgtttccaaggccagtggtacttaactgggtcaagttgcctgtggaccttcaggaacagaattgccatgttcctcactgcctgcaggaaaggctccattccaagc

SEQ ID NO: 672518 - DNA, 120 bp, Artificial Sequence
  ENSG00000185753_22 (sequence is synthesized)
ccagtgaagatgtgtgcctatccagccgcccaccaaggatgtcatctgtagaatgggtggagggcaggggtttatttggtgtatatttttacattaaaatgcacttaatatcactttgta

SEQ ID NO: 672519 - DNA, 120 bp, Artificial Sequence
  ENSG00000185753_23 (sequence is synthesized)
aagcccagatgagtgcaaatgtgcctgtaacttcctcctttaatctgtccaggtagtatttagtctttagtcttacattttctttctccctttatttcatgaaattccttgagaaaactt

SEQ ID NO: 672520 - DNA, 120 bp, Artificial Sequence
  ENSG00000185753_24 (sequence is synthesized)
caacagtaaagaaagaaatttcattcatctcacaactcttccaaacgaggaaacttagtgaaatatttcagagcttctagatgtgaggtacaaaacttgggatcaaatggaatcttgatt

SEQ ID NO: 672521 - DNA, 120 bp, Artificial Sequence
  ENSG00000185753_25 (sequence is synthesized)
cactaaccaatttaagatctgacttctaattttaggaactttgggttatgaacgcttccattttatacctgtgtctagttagtttctgcctatctatccaagaagcttttatcaagggtc

SEQ ID NO: 672522 - DNA, 120 bp, Artificial Sequence
  ENSG00000185753_26 (sequence is synthesized)
caccatgtgccagccactgaagtagatataaatacaaggatgtgtaaggtatggatgatggtatacgaactgtcatcttactggatttgtccgctctgttaaagatacggttccgaaaac

SEQ ID NO: 672523 - DNA, 120 bp, Artificial Sequence
  ENSG00000185753_27 (sequence is synthesized)
tttttaaagccctagagagggctttaaggcaatgtagcatcatatatagaggcatcaacctgttcatatctttctatttaacagaactgtgcacctgggcacaagggtgtgcacaacagg

SEQ ID NO: 672524 - DNA, 120 bp, Artificial Sequence
  ENSG00000185753_28 (sequence is synthesized)
atgtgtacagcagcactgttaaagtgtagcacatccatactacaggatcttatgcaactgttggaaagaatgaagcgatgctgcactgtggtcatgcagtgatctctaagacatattaac

SEQ ID NO: 672525 - DNA, 81 bp, Artificial Sequence
  ENSG00000185753_29 (sequence is synthesized)
ctgcactgtggtcatgcagtgatctctaagacatattaactagaaagcaaaaggtttaacaatgtatagcagctgggcgca

SEQ ID NO: 672526 - DNA, 88 bp, Artificial Sequence
  ENSG00000185753_30 (sequence is synthesized)
taaaaaacaaccccccccccccaaaaaaaaaaatgcatagcaagctgtaatgctctttgtgttttagaatagtagaggtctggaaagt

SEQ ID NO: 672527 - DNA, 120 bp, Artificial Sequence
  ENSG00000185753_31 (sequence is synthesized)
aatgctctttgtgttttagaatagtagaggtctggaaagttgtttgcttttccccagtttttttttgctgtgttacctctgaagggaattgaggtagaggggagagttagaaggaatatt

SEQ ID NO: 672528 - DNA, 120 bp, Artificial Sequence
  ENSG00000185753_32 (sequence is synthesized)
cggcttttctattttatatcctcctaggtgaaatttttacaacaaacatgtactggtgtattttgaaatgtttttaaatttttgtatttcaaaataataaaatataaattcaaactgcaa

SEQ ID NO: 672529 - DNA, 120 bp, Artificial Sequence
  ENSG00000185753_33 (sequence is synthesized)
cgcccgccaggtgagcacctggctcggggccttgaccaccgcccccaccccacccctcctcatccccgttcctgtcccagacccagagcgcaagtgtcctgttccctccgcgatgcgggg

SEQ ID NO: 672530 - DNA, 120 bp, Artificial Sequence
  ENSG00000185753_34 (sequence is synthesized)
aggtgagttcaggcagatgatggtgttaaagaaggacagaatcacctcatctctttcatgtctattctctcatgtgaggccatcatgaacacacaacaatctaatctgaagtttgccttt

SEQ ID NO: 672531 - DNA, 120 bp, Artificial Sequence
  ENSG00000185753_35 (sequence is synthesized)
gtccttattgtttcaaagaaaggacactgaggtttgtgttcttcacttaatgattcttacgtctgtgaagtaattcagcatcaactccctgtttagccaaatacacctgaagtcattggt

SEQ ID NO: 672532 - DNA, 120 bp, Artificial Sequence
  ENSG00000185753_36 (sequence is synthesized)
ctagaattaaatgaatcagctttataacataatcaaaaagcatttctgccttaaaatgacaccattgatgcctagctcttaccatggcattaatagcaattgactagtcaatttccataa

SEQ ID NO: 672533 - DNA, 120 bp, Artificial Sequence
  ENSG00000185753_37 (sequence is synthesized)
ggagaacttcttaaaatgagtaactgtcttcagcattttactttttcccccctcaaataaaaaaaataaataaaacattctctttcattttaggttgcccgtcaacaaaaatcaggcatg

SEQ ID NO: 672534 - DNA, 81 bp, Artificial Sequence
  ENSG00000185753_38 (sequence is synthesized)
gctggcccgtggacgcctgggaggtggccaagggtcttgatctgttatccagactggagtgcagtggtgaatcagagctta

SEQ ID NO: 672535 - DNA, 120 bp, Artificial Sequence
  ENSG00000185753_39 (sequence is synthesized)
atgcatggctaatttttttttttaatagagatgggagtcttgctttgttgcccaggctgggctcaaacgatcctcctgcttttgcctcccgaagtgctgggattacaggaatgagccact

SEQ ID NO: 672536 - DNA, 120 bp, Artificial Sequence
  ENSG00000185753_40 (sequence is synthesized)
gtacccagcctatttagagttcttattgcgagtaactttttgttctagtcccttggcaggagtgtacccttgtgattcttagcctagtaaagttgttgcatcccagtataagttgagaaa

SEQ ID NO: 672537 - DNA, 120 bp, Artificial Sequence
  ENSG00000185753_41 (sequence is synthesized)
tatttcaggaaagaaatacgcccaagctttcccataacaccattttgggggtctgtgccataaaattcctactaaaggcaagatcctgctagcttgaggcccttctggcatatctagtat

SEQ ID NO: 672538 - DNA, 120 bp, Artificial Sequence
  ENSG00000185753_42 (sequence is synthesized)
ctcccatccccggattccatctgtaactcctatgtgggtcctactcgccttgcaccatctacataataattgccaacattgatgtcctggttactagcacgtgcctagcactgtgctagt

SEQ ID NO: 672539 - DNA, 120 bp, Artificial Sequence
  ENSG00000185753_43 (sequence is synthesized)
gctatacctgcattctcttatttcattctcacaatatcctttgaagtagataaggacagttatcccccatttactgataaggaatctgagggtaacttgaccaaggtcacagctggcaaa

SEQ ID NO: 672540 - DNA, 120 bp, Artificial Sequence
  ENSG00000185753_44 (sequence is synthesized)
cttttattttatttttaaatcttcttatttaacaactcaaccactgaaatttcagtaaggaaaagaaaaaagatgccttctagttatgctttctgtttatatgccattaagacagaatgg

SEQ ID NO: 672541 - DNA, 120 bp, Artificial Sequence
  ENSG00000185753_45 (sequence is synthesized)
aaagcctgttatatcatatgtatctaatagcagggataatacagcccttcagttattgcccttggccaaggtttagctgtgacagtttccctacttgcattttgggctcatgaggcttta

SEQ ID NO: 672542 - DNA, 120 bp, Artificial Sequence
  ENSG00000185753_46 (sequence is synthesized)
agttgaaacctcagtgcataagagaacttcagtcatcatttggaaaatagacaagtaaccattgcctttccatctcctagagttggaagagactcaggtccccctcctccctcccttgct

SEQ ID NO: 672543 - DNA, 120 bp, Artificial Sequence
  ENSG00000185758_0 (sequence is synthesized)
atggctttaatctttagaacagcaatgcaatctgttggacttttactatctctcctgggatggattttatccattattacaacttatttgccacactggaagaacctcaacctggactta

SEQ ID NO: 672544 - DNA, 120 bp, Artificial Sequence
  ENSG00000185758_1 (sequence is synthesized)
aatgaaatggaaaactggaccatgggactctggcaaacctgtgtcatccaagaggaagtggggatgcaatgcaaggactttgactccttcctggctttgcctgctgaactcagggtctcc

SEQ ID NO: 672545 - DNA, 120 bp, Artificial Sequence
  ENSG00000185758_2 (sequence is synthesized)
ctggactgtttgagaattggagagagtcagagagatctcaagaggcgactgctcattctgggaggaattctgtcctgggcctcgggaatcacagccctggttcccgtctcttgggttgcc

SEQ ID NO: 672546 - DNA, 120 bp, Artificial Sequence
  ENSG00000185758_3 (sequence is synthesized)
cacaagacggttcaggagttctgggatgagaacgtcccagactttgtccccaggtgggagtttggggaggccctgtttctgggctggtttgctggactttctcttctgctaggagggtgt

SEQ ID NO: 672547 - DNA, 120 bp, Artificial Sequence
  ENSG00000185758_4 (sequence is synthesized)
ctgctcaactgcgcagcctgctccagccacgctcccctagctttgggccactatgcagtggcgcaaatgcaaactcagtgtccctacctggaagatgggacagcagatcctcaagtgtaa

SEQ ID NO: 672548 - DNA, 120 bp, Artificial Sequence
  ENSG00000185760_0 (sequence is synthesized)
gccggcttcctccttgaaacccgccggcgcacatgaggccgctgcccccgccgcaggcgctggcggccccctcgcggtgcccgtggtgatgccatgccccgccaccacgcgggaggagag

SEQ ID NO: 672549 - DNA, 120 bp, Artificial Sequence
  ENSG00000185760_1 (sequence is synthesized)
ggctctgggtgaagagcggcgcagcggcggcggcggcgggcggggggcgcttgggcagcggcatgaaggatgtggagtccggccggggcagggtgctgctgaactcggcagccgccaggg

SEQ ID NO: 672550 - DNA, 120 bp, Artificial Sequence
  ENSG00000185760_2 (sequence is synthesized)
cagggtgctgctgaactcggcagccgccaggggcgacggcctgctactgctgggcacccgcgcggccacgctcggtggcggcggcggtggcctgagggagagccgccggggcaagcaggg

SEQ ID NO: 672551 - DNA, 120 bp, Artificial Sequence
  ENSG00000185760_3 (sequence is synthesized)
ggcccggatgagcctgctggggaagccgctctcttacacgagtagccagagctgccggcgcaacgtcaagtaccggcgggtgcagaactacctgtacaacgtgctggagagaccccgcgg

SEQ ID NO: 672552 - DNA, 120 bp, Artificial Sequence
  ENSG00000185760_4 (sequence is synthesized)
ctgggcgttcatctaccacgctttcgtttttctccttgtctttggttgcttgattttgtcagtgttttctaccatccctgagcacacaaaattggcctcaagttgcctcttgatcctgga

SEQ ID NO: 672553 - DNA, 120 bp, Artificial Sequence
  ENSG00000185760_5 (sequence is synthesized)
gttcgtgatgattgtcgtctttggtttggagttcatcattcgaatctggtctgcgggttgctgttgtcgatatagaggatggcaaggaagactgaggtttgctcgaaagcccttctgtgt

SEQ ID NO: 672554 - DNA, 120 bp, Artificial Sequence
  ENSG00000185760_6 (sequence is synthesized)
tatagataccattgttcttatcgcttcaatagcagttgtttctgcaaaaactcagggtaatatttttgccacgtctgcactcagaagtctccgtttcctacagatcctccgcatggtgcg

SEQ ID NO: 672555 - DNA, 120 bp, Artificial Sequence
  ENSG00000185760_7 (sequence is synthesized)
catggaccgaaggggaggcacttggaaattactgggttcagtggtttatgctcacagcaaggaattaatcacagcttggtacataggatttttggttcttattttttcgtctttccttgt

SEQ ID NO: 672556 - DNA, 120 bp, Artificial Sequence
  ENSG00000185760_8 (sequence is synthesized)
ctatctggtggaaaaggatgccaataaagagttttctacatatgcagatgctctctggtggggcacaattacattgacaactattggctatggagacaaaactcccctaacttggctggg

SEQ ID NO: 672557 - DNA, 120 bp, Artificial Sequence
  ENSG00000185760_9 (sequence is synthesized)
aagattgctttctgcaggctttgcactccttggcatttctttctttgcacttcctgccggcattcttggctcaggttttgcattaaaagtacaagaacaacaccgccagaaacactttga

SEQ ID NO: 672558 - DNA, 120 bp, Artificial Sequence
  ENSG00000185760_10 (sequence is synthesized)
gaaaagaaggaacccagctgccaacctcattcagtgtgtttggcgtagttacgcagctgatgagaaatctgtttccattgcaacctggaagccacacttgaaggccttgcacacctgcag

SEQ ID NO: 672559 - DNA, 120 bp, Artificial Sequence
  ENSG00000185760_11 (sequence is synthesized)
ccctaccaagaaagaacaaggggaagcatcaagcagtcagaagctaagttttaaggagcgagtgcgcatggctagccccaggggccagagtattaagagccgacaagcctcagtaggtga

SEQ ID NO: 672560 - DNA, 120 bp, Artificial Sequence
  ENSG00000185760_12 (sequence is synthesized)
caggaggtccccaagcaccgacatcacagccgagggcagtcccaccaaagtgcagaagagctggagcttcaacgaccgaacccgcttccggccctcgctgcgcctcaaaagttctcagcc

SEQ ID NO: 672561 - DNA, 120 bp, Artificial Sequence
  ENSG00000185760_13 (sequence is synthesized)
aaaaccagtgatagatgctgacacagcccttggcactgatgatgtatatgatgaaaaaggatgccagtgtgatgtatcagtggaagacctcaccccaccacttaaaactgtcattcgagc

SEQ ID NO: 672562 - DNA, 120 bp, Artificial Sequence
  ENSG00000185760_14 (sequence is synthesized)
tatcagaattatgaaatttcatgttgcaaaacggaagtttaaggaaacattacgtccatatgatgtaaaagatgtcattgaacaatattctgctggtcatctggacatgttgtgtagaat

SEQ ID NO: 672563 - DNA, 120 bp, Artificial Sequence
  ENSG00000185760_15 (sequence is synthesized)
taaaagccttcaaacacgtgttgatcaaattcttggaaaagggcaaatcacatcagataagaagagccgagagaaaataacagcagaacatgagaccacagacgatctcagtatgctcgg

SEQ ID NO: 672564 - DNA, 120 bp, Artificial Sequence
  ENSG00000185760_16 (sequence is synthesized)
tcgggtggtcaaggttgaaaaacaggtacagtccatagaatccaagctggactgcctactagacatctatcaacaggtccttcggaaaggctctgcctcagccctcgctttggcttcatt

SEQ ID NO: 672565 - DNA, 120 bp, Artificial Sequence
  ENSG00000185760_17 (sequence is synthesized)
ccagatcccaccttttgaatgtgaacagacatctgactatcaaagccctgtggatagcaaagatctttcgggttccgcacaaaacagtggctgcttatccagatcaactagtgccaacat

SEQ ID NO: 672566 - DNA, 120 bp, Artificial Sequence
  ENSG00000185760_18 (sequence is synthesized)
ctcgagaggcctgcagttcattctgacgccaaatgagttcagtgcccagactttctacgcgcttagccctactatgcacagtcaagcaacacaggtgccaattagtcaaagcgatggctc

SEQ ID NO: 672567 - DNA, 120 bp, Artificial Sequence
  ENSG00000185760_19 (sequence is synthesized)
agcagtggcagccaccaacaccattgcaaaccaaataaatacggcacccaagccagcagccccaacaactttacagatcccacctcctctcccagccatcaagcatctgcccaggccaga

SEQ ID NO: 672568 - DNA, 120 bp, Artificial Sequence
  ENSG00000185760_20 (sequence is synthesized)
aactctgcaccctaaccctgcaggcttacaggaaagcatttctgacgtcaccacctgccttgttgcctccaaggaaaatgttcaggttgcacagtcaaatctcaccaaggaccgttctat

SEQ ID NO: 672569 - DNA, 120 bp, Artificial Sequence
  ENSG00000185760_21 (sequence is synthesized)
gaggaaaagctttgacatgggaggagaaactctgttgtctgtctgtcccatggtgccgaaggacttgggcaaatctttgtctgtgcaaaacctgatcaggtcgaccgaggaactgaatat

SEQ ID NO: 672570 - DNA, 120 bp, Artificial Sequence
  ENSG00000185760_22 (sequence is synthesized)
acaactttcagggagtgagtcaagtggctccagaggcagccaagatttttaccccaaatggagggaatccaaattgtttataactgatgaagaggtgggtcccgaagagacagagacaga

SEQ ID NO: 672571 - DNA, 120 bp, Artificial Sequence
  ENSG00000185760_23 (sequence is synthesized)
cacttttgatgccgcaccgcagcctgccagggaagctgcctttgcatcagactctctaaggactggaaggtcacgatcatctcagagcatttgtaaggcaggagaaagtacagatgccct

SEQ ID NO: 672572 - DNA, 120 bp, Artificial Sequence
  ENSG00000185760_24 (sequence is synthesized)
cagcttgcctcatgtcaaactgaaataagttcttcattttctttccaggcatagcagttctttagccatacatatcattgcatgaactatttcgaaagcccttctaaaaagttgaaattg

SEQ ID NO: 672573 - DNA, 120 bp, Artificial Sequence
  ENSG00000185760_25 (sequence is synthesized)
caagaatcgggaagaacatgaaaggcagtttataagcccgttaccttttaattgcatgaaaatgcatgtttagggatggctaaaattccaaggtgcatcgacattaacccactcatttag

SEQ ID NO: 672574 - DNA, 120 bp, Artificial Sequence
  ENSG00000185760_26 (sequence is synthesized)
tgaaattatgggagtaaacaccttcaaatttcaggcatttctgctttgtgactaaatacaaactacattttcaagattaggccataatgtatatttaaacacaatggctatcaacagctg

SEQ ID NO: 672575 - DNA, 120 bp, Artificial Sequence
  ENSG00000185760_27 (sequence is synthesized)
ctaataaggtatcaactaaagcagaattggggaataatagaaatggctgcttatttcaagatatatttgccaacccattcctattcagtcattttattattaatgtaatttgaatgtcaa

SEQ ID NO: 672576 - DNA, 120 bp, Artificial Sequence
  ENSG00000185760_28 (sequence is synthesized)
tttgtgtgcttttggtgatttagcgctgtggcaagcaattttgcacatcattttcatgttgttctttatgacaagaatgttcttcaattagaaaatgtgcaaataatgaaattcagggcc

SEQ ID NO: 672577 - DNA, 120 bp, Artificial Sequence
  ENSG00000185760_29 (sequence is synthesized)
agtgaggcaaatagactatctgacatatttgactttatgaaaacatattgcctgatggcagaatcaactttataagtggtcaacttctacacaagcgtatgaaatactggtcagtagaac

SEQ ID NO: 672578 - DNA, 120 bp, Artificial Sequence
  ENSG00000185760_30 (sequence is synthesized)
agccattgtgattggactggtttctctgcaatggcgccaaccccaggcttgccaatactgcctatgtaaagggcaagtgtgagaagctattctcatttcgctgacatacaggtaggacta

SEQ ID NO: 672579 - DNA, 120 bp, Artificial Sequence
  ENSG00000185760_31 (sequence is synthesized)
tgggggatgggacatttgagtgggactgagataggaaaggcttgaaaagaacccagaaacaccaccaggaagttggcaaagtaaaagaaaatgacttccccctcaaagggcaatgagagg

SEQ ID NO: 672580 - DNA, 120 bp, Artificial Sequence
  ENSG00000185760_32 (sequence is synthesized)
gagagaaacaaaccaaaatagaagaactagactttttagaaaatgagtattgctagggaattcaactacctaatcttcccttattcttatatataagcagagaatttttgcaaggtattt

SEQ ID NO: 672581 - DNA, 120 bp, Artificial Sequence
  ENSG00000185760_33 (sequence is synthesized)
attttttaatatgccctgaatgtcttttgctattatgtgtacattttgcatatgaaagtctaaaacgaaacttcctttactttttatactgtagtgaaaattttctattcttcccaagaa

SEQ ID NO: 672582 - DNA, 120 bp, Artificial Sequence
  ENSG00000185760_34 (sequence is synthesized)
tgttgtcccaaatctgaaattactggttcaatttcctgatataaacatttacaattagaagctagatagtactggcagagtctgcaaatcagaacacttaaatatatcatggcagcaaaa

SEQ ID NO: 672583 - DNA, 120 bp, Artificial Sequence
  ENSG00000185760_35 (sequence is synthesized)
agaccaagggaaacaaaatgacaaatgtatttatcagaaagcaagcaatgctgactgcttgttagaaacccatctagctatcttaggtcaccagaacttcagccaacgtaatgacattca

SEQ ID NO: 672584 - DNA, 120 bp, Artificial Sequence
  ENSG00000185760_36 (sequence is synthesized)
aaaaaaaaggacataagagatagcatttcaattcaattaaaccctagccacaggaggactcaagaaaggaagttgtttccttggcagacataaatgctgcctccagaagtacttctccag

SEQ ID NO: 672585 - DNA, 120 bp, Artificial Sequence
  ENSG00000185760_37 (sequence is synthesized)
cagccaagcagaatgagcagggttatcaagtggatgttcaaaggaagaaggaggccctgaactccaccaatcctccccagccctccccaacaggctttctccatcattgactctcccctg

SEQ ID NO: 672586 - DNA, 120 bp, Artificial Sequence
  ENSG00000185760_38 (sequence is synthesized)
cttttcttcttcattaactccttattcattccctgccagtattttgcttctgaacttcaccaggccttaaccagcctccatccccaggtcaaccagttctccgctttacctaaaatgtgc

SEQ ID NO: 672587 - DNA, 120 bp, Artificial Sequence
  ENSG00000185760_39 (sequence is synthesized)
ttctcaaccttttagaaccttgtcccttttgataaacatggaaatttttaaagcttcctcttcgcatcccacttggattctaagacaattagaatcatttagaatctttttggctgctgg

SEQ ID NO: 672588 - DNA, 120 bp, Artificial Sequence
  ENSG00000185760_40 (sequence is synthesized)
aaatgtatagaagatagaggctaaattttacacttcagttaagacattgtcaatccttttaagcaattgttttcattttcaaaatacagaatgttagtaaattatgaaaatcaatttttc

SEQ ID NO: 672589 - DNA, 83 bp, Artificial Sequence
  ENSG00000185760_41 (sequence is synthesized)
aaaatacagaatgttagtaaattatgaaaatcaatttttcatcttcattcaacctgaagttgtgattcccccttgcaagaatg

SEQ ID NO: 672590 - DNA, 120 bp, Artificial Sequence
  ENSG00000185760_42 (sequence is synthesized)
gacctaaagccagacacctgccgtgactgggcaggctctctcccattattaacagaggaagaggagggaggcagcaactttcaggtagcactgattcttggacatactctgtcctgggtc

SEQ ID NO: 672591 - DNA, 120 bp, Artificial Sequence
  ENSG00000185760_43 (sequence is synthesized)
aaaccccactggcagcaggaattctgaatgtattggggacccctccttaggcctcgttaagtctcaaacacagtacagctcacccagcattgctgacgactgaagattcagaaacaaaac

SEQ ID NO: 672592 - DNA, 120 bp, Artificial Sequence
  ENSG00000185760_44 (sequence is synthesized)
ctacacacagcactgaggtcttaatcatagcaaaatgtgataaaccatgttgtgaaaaacttttatacattgaagccatgaccattttgtgtctatcttactctagcacaaaaattgggg

SEQ ID NO: 672593 - DNA, 120 bp, Artificial Sequence
  ENSG00000185760_45 (sequence is synthesized)
gatgttaaaagatagttgtgtggaagctataaggttctgtctgtcgtgttactctctgtggaaatgagaggggtctcccatttacactaagcaaatttccattggtcaattttaatgatg

SEQ ID NO: 672594 - DNA, 120 bp, Artificial Sequence
  ENSG00000185760_46 (sequence is synthesized)
tcttgaagcacaatttagctgagcactgagtagccatatgctttctgagtacaagtgtgtctgccttcttcaacatgtagggttgatcaagctaatacttaattgcaaatatcccttgta

SEQ ID NO: 672595 - DNA, 120 bp, Artificial Sequence
  ENSG00000185760_47 (sequence is synthesized)
tgaggttaactaaaaaaattttgctatgtctgatctacatgtttgcattttgttcaactaaattaatatttgtagattgcaagttttgtttaaaataactttattgagtttttaagtcct

SEQ ID NO: 672596 - DNA, 120 bp, Artificial Sequence
  ENSG00000185760_48 (sequence is synthesized)
gatctgttctaaggtgcctttctcacctcccattgattcagtgattctgaagttcttaatttgcaagtaaaataagtctactagagaggaggaaatcaggcacaaattgaccaattctca

SEQ ID NO: 672597 - DNA, 120 bp, Artificial Sequence
  ENSG00000185760_49 (sequence is synthesized)
tgccatttgcaaagcaaaactgtaaggatgatgaaacctggctaactaaattaatggatcatttcactaaatcagatagaggaaatatcataaatattaacttgtctccctagaagctga

SEQ ID NO: 672598 - DNA, 120 bp, Artificial Sequence
  ENSG00000185760_50 (sequence is synthesized)
gatttttcgccttaaatgacatggttgtgtttttgtaagagaaacttaatctaatctaataatgtgcatttaagtaagcagttctaagtcatgtatgacaatgcaattgtctgtttcctg

SEQ ID NO: 672599 - DNA, 120 bp, Artificial Sequence
  ENSG00000185760_51 (sequence is synthesized)
aaaacaaataaatcgggaacaccatatccatttcaagctatcattaaagtgtaatttcctttgctctcttttactgggattatttgttttaaagtaaaacattaaaaagatgtctataaa

SEQ ID NO: 672600 - DNA, 120 bp, Artificial Sequence
  ENSG00000185760_52 (sequence is synthesized)
ggctgggtgtgcgcgcgtgggagcgcgcctcggagcgccccgcactcccccactctatccccgggggcagtttgggaaggagggagtggtagtcgcgggaatgagggagcaagagaaacc

SEQ ID NO: 672601 - DNA, 120 bp, Artificial Sequence
  ENSG00000185760_53 (sequence is synthesized)
ctctcaaagtgacgccccaaacaggtccggatttagaattcgaagctaaaggctgttagaaattgggactcctcggcctcctctgcagcccctcctttcccgccccgaagcccgggcggt

SEQ ID NO: 672602 - DNA, 120 bp, Artificial Sequence
  ENSG00000185760_54 (sequence is synthesized)
ctaccaagaaagaacaaggggaagcatcaagcagtaagttctgtagtaataagcagaagctcttcagaatgtacacctcacggaagcagagtcagaagctaagttttaaggagcgagtgc

SEQ ID NO: 672603 - DNA, 120 bp, Artificial Sequence
  ENSG00000185760_55 (sequence is synthesized)
gctacatgtttgtttataaatctgatacctaccaggtgttttaaatgtgtctcatgtgagtaaaatcgatcaacaaatacaagatgattaaaagtgacctttcacaagattgcctgcaaa

SEQ ID NO: 672604 - DNA, 120 bp, Artificial Sequence
  ENSG00000185760_56 (sequence is synthesized)
tgacgtctgaccagcaaaggtccaagacccagggacaaccaggtgcttgctctgtgaatatcttgaaacacagtaaggaggatgatcatttctggtcaacaatgaaggtgctctttccct

SEQ ID NO: 672605 - DNA, 120 bp, Artificial Sequence
  ENSG00000185760_57 (sequence is synthesized)
ctctcacacactccatctaccagcaaatcagagaccactgcttatcttccttagagaggttcctgttgaaagttatttcgaagtcttccaatgataagtaaaattcaagttcttctccca

SEQ ID NO: 672606 - DNA, 120 bp, Artificial Sequence
  ENSG00000185760_58 (sequence is synthesized)
agaggaattaacctattttatttatcatattatgtagcagacattcacttgccaacacattttattgagtgccacataattttcatgtttataaaataaaatattttatttttcatttaa

SEQ ID NO: 672607 - DNA, 120 bp, Artificial Sequence
  ENSG00000185760_59 (sequence is synthesized)
ttaaggaagaaagtgtatcaccatccatgggcactgttaagaagaatcctttattccatacttctttcatagtatgcacatctcaaaagtctccacttattaaaccagaatttatggaaa

SEQ ID NO: 672608 - DNA, 120 bp, Artificial Sequence
  ENSG00000185760_60 (sequence is synthesized)
tatcagagtctcagatacctggactatgacaccaacattcttgtcttctatctcctgttttgcaatatttgattaatattaaaagctaacatccatggagtacttatcatggaccgggca

SEQ ID NO: 672609 - DNA, 120 bp, Artificial Sequence
  ENSG00000185761_0 (sequence is synthesized)
gctcgccctggggccgctcagggagccgggacgcgctgcctgggctccgcgcagccgatgacattctgagttcttcctctccataccgggctccacgtctcctgtcttctttacctgatc

SEQ ID NO: 672610 - DNA, 120 bp, Artificial Sequence
  ENSG00000185761_1 (sequence is synthesized)
cacaggacccctcaactttcctgtaagggaggctctattaccccgtttttcagagacgagaggtagggctcagagaggtttagttactttccaagatcacacagccagtcagggcagagc

SEQ ID NO: 672611 - DNA, 120 bp, Artificial Sequence
  ENSG00000185761_2 (sequence is synthesized)
cgggacacaaccctgtgtctctggcggtggctctatggactcggcccctctgttccccaggccccacctcttccagaacctcctgctcttcctgtgggccctgctgaactgtggtttggg

SEQ ID NO: 672612 - DNA, 120 bp, Artificial Sequence
  ENSG00000185761_3 (sequence is synthesized)
ggtcagtgctcagggtccgggcgagtggaccccgtgggtgtcctggacccgctgctccagctcctgcgggcgtggcgtctctgtgcgcagccggcgctgcctccggcttcctggggaaga

SEQ ID NO: 672613 - DNA, 120 bp, Artificial Sequence
  ENSG00000185761_4 (sequence is synthesized)
accgtgctggggagactcccatgagtaccgcctctgccagttgccagactgccccccaggggctgtgcccttccgagacctacagtgtgccctgtacaatggccgccctgtcctgggcac

SEQ ID NO: 672614 - DNA, 120 bp, Artificial Sequence
  ENSG00000185761_5 (sequence is synthesized)
ccagaagacctaccagtgggtgcccttccatggggcgcccaaccagtgcgacctcaactgcctggctgaggggcacgccttctaccacagcttcggccgcgtcctggacggcaccgcctg

SEQ ID NO: 672615 - DNA, 120 bp, Artificial Sequence
  ENSG00000185761_6 (sequence is synthesized)
cagcccgggtgcccagggggtctgcgtggctggccgctgccttagcgccggctgtgatgggttgttgggctcgggtgccctcgaggaccgctgtggccgctgcggaggcgccaacgactc

SEQ ID NO: 672616 - DNA, 120 bp, Artificial Sequence
  ENSG00000185761_7 (sequence is synthesized)
gtgccttttcgtgcagcgcgtgtttcgtgacgccggtgccttcgctgggtactggaacgtgaccctgatccccgagggcgccagacacatccgcgtggaacacaggagccgcaaccacct

SEQ ID NO: 672617 - DNA, 120 bp, Artificial Sequence
  ENSG00000185761_8 (sequence is synthesized)
ggcactgatggggggcgatgggcgctacgtgcttaatgggcactgggtggtcagcccaccagggacctacgaggcggccggcacgcatgtggtctacacccgagacacagggccccagga

SEQ ID NO: 672618 - DNA, 120 bp, Artificial Sequence
  ENSG00000185761_9 (sequence is synthesized)
gacattgcaagcagccgggcccacctcccatgacctgctcctacaggtcctcctgcaggagcccaaccctggcatcgagtttgagttctggctccctcgggagcgctacagccccttcca

SEQ ID NO: 672619 - DNA, 120 bp, Artificial Sequence
  ENSG00000185761_10 (sequence is synthesized)
ggctcgtgtgcaggccctgggctggcccctgaggcagcctcagccccggggggtggagcctcagccccccgcagcccctgctgtcacccctgcacagaccccaacgctggccccagaccc

SEQ ID NO: 672620 - DNA, 120 bp, Artificial Sequence
  ENSG00000185761_11 (sequence is synthesized)
ctccactattgcggcagtgactttgtgttccaggcccgagtgctgggccaccaccaccaggcccaggagacccgctatgaggtgcgcatccagctcgtctacaagaaccgctcgccactg

SEQ ID NO: 672621 - DNA, 120 bp, Artificial Sequence
  ENSG00000185761_12 (sequence is synthesized)
cgggcacgcgagtacgtgtgggcgccaggccactgcccctgcccgatgctggcaccccaccgggactacctgatggctgtccagcgtcttgtcagccccgacggcacacaggaccagctg

SEQ ID NO: 672622 - DNA, 120 bp, Artificial Sequence
  ENSG00000185761_13 (sequence is synthesized)
ctgctgccccacgccggctacgcccggccctggagccctgcggaggacagccgcatacgcctgactgcccggcgctgtcctggctgagcccctgcaggagccccggccacacacagcaag

SEQ ID NO: 672623 - DNA, 120 bp, Artificial Sequence
  ENSG00000185761_14 (sequence is synthesized)
aaagatacatctgaccagcctcaacgtcaacgtatttcccctctcaccctggcttccaggcagctctgaaatacgtcccacctgtgcagctatgtgactccctcccacacacgcttaaga

SEQ ID NO: 672624 - DNA, 120 bp, Artificial Sequence
  ENSG00000185761_15 (sequence is synthesized)
cacctctgcatgcagtcaaagccactgtcacaagccggcaggcactggtgaggaggcactaaggagactctgacttttatttcgcctctctccttggctgccaggaagctcatagctatt

SEQ ID NO: 672625 - DNA, 120 bp, Artificial Sequence
  ENSG00000185761_16 (sequence is synthesized)
tatactcagaaagtttaacgctgctttctttctctttgcgcgcgtcacacttgcttggagacactgtcatgaacgagcatgacaccctgctgccctgggtacccagaagatcatctgttt

SEQ ID NO: 672626 - DNA, 120 bp, Artificial Sequence
  ENSG00000185761_17 (sequence is synthesized)
acttcccagacactgtgctgtctctgctctctgctactcacacacaccctcatgtgtgaagggcagagacactgtcacaaacaggcatgccccttagaagacatgcctaaccaggcactg

SEQ ID NO: 672627 - DNA, 120 bp, Artificial Sequence
  ENSG00000185761_18 (sequence is synthesized)
taacgtaccaacgtaccaatttccccttttcccctggctaccaggaaactcggagacaatcttttcagcctcagcatttctggctggatttccacccatcaacacgtgcttgctcctcct

SEQ ID NO: 672628 - DNA, 120 bp, Artificial Sequence
  ENSG00000185761_19 (sequence is synthesized)
tggctggatttccacccatcaacacgtgcttgctcctcctttttttttttttctgaggtagacccttgctctgtcacctaggctgaagtgcggtggtgcaatcatggctcactgcagcct

SEQ ID NO: 672629 - DNA, 87 bp, Artificial Sequence
  ENSG00000185761_20 (sequence is synthesized)
taaccgttgcccacactgctctccaactactggcctcaaacgatcctcctgcctcggcctcccaaagcactggaatttcaggcatgc

SEQ ID NO: 672630 - DNA, 120 bp, Artificial Sequence
  ENSG00000185761_21 (sequence is synthesized)
cctgcctcggcctcccaaagcactggaatttcaggcatgcactatcgtactggctgttcaccccccttttattcctctttaatttttacaagcactttttaaaaaaaaattttactttaa

SEQ ID NO: 672631 - DNA, 120 bp, Artificial Sequence
  ENSG00000185761_22 (sequence is synthesized)
cataccgggctccacgtctcctgtcttctttacctgatccacaggacccctcaactttcctgccccacctcttccagaacctcctgctcttcctgtgggccctgctgaactgtggtttgg

SEQ ID NO: 672632 - DNA, 120 bp, Artificial Sequence
  ENSG00000185761_23 (sequence is synthesized)
gctcgccctggggccgctcagggagccgggacgcgctgcctgggctccgcgcagccgggacccaactcctgatccagcccctgccggccgcaccttccgcagggtgtcacagaatcatgg

SEQ ID NO: 672633 - DNA, 120 bp, Artificial Sequence
  ENSG00000185761_24 (sequence is synthesized)
actgagtccacttggcccccactgcacagatggggaaactgaggcctgggagagtggagtggctggcctcaggccacacggaaaggccccacctcttccagaacctcctgctcttcctgt

SEQ ID NO: 672634 - DNA, 120 bp, Artificial Sequence
  ENSG00000185761_25 (sequence is synthesized)
accgggacctgggtcggggaacccccggatgggagcccaggcgcgccagggtccccatccacgagcaggtcgaccccccgcgagaggggtgaggggcaggaccaggggagggggctgtga

SEQ ID NO: 672635 - DNA, 120 bp, Artificial Sequence
  ENSG00000185761_26 (sequence is synthesized)
ccggggatggggacgccggtgggacgcaatccgggcgtcggcggggtaggggcagcgcccgggactcccagacccagggcggggtgacctcggttcgcgcacattcccgggccctgagcg

SEQ ID NO: 672636 - DNA, 120 bp, Artificial Sequence
  ENSG00000185761_27 (sequence is synthesized)
ctcggttcgcgcacattcccgggccctgagcgcggcgcccggaatagcagccccggggcagaggagggcggtcagtccccgcgccgcgcccccgcccgagcctgccaaggtcacccggac

SEQ ID NO: 672637 - DNA, 80 bp, Artificial Sequence
  ENSG00000185761_28 (sequence is synthesized)
caccagcctgcggctccgggacccctgcgctcgcgtccgccgggcagtcccctgccgcagatccgcgcccgccgcgcgag

SEQ ID NO: 672638 - DNA, 120 bp, Artificial Sequence
  ENSG00000185761_29 (sequence is synthesized)
accagtgggtgcccttccatggggagcttggaacagtgtctggaaaacagtaggtgttcagtggaatgaagaatgagtaatggtgttaaaaatgaataatatgtaaggactcctaatata

SEQ ID NO: 672639 - DNA, 120 bp, Artificial Sequence
  ENSG00000185761_30 (sequence is synthesized)
cataccgggctccacgtctcctgtcttctttacctgatccacaggacccctcaactttcctgtaagggaggctctattaccccgtttttcagagacgagaggccccacctcttccagaac

SEQ ID NO: 672640 - DNA, 120 bp, Artificial Sequence
  ENSG00000185761_31 (sequence is synthesized)
acggggccgagcctctccccagtgcgctggggccctgcgctgggggtgaccgggacctgggtcggggaacccccggatgggagcccaggcgcgccagggtccccatccacgagcaggtcg

SEQ ID NO: 672641 - DNA, 120 bp, Artificial Sequence
  ENSG00000185774_0 (sequence is synthesized)
aatgtagtttaatggctttacaaagaaagccaggcagaggagcacttctcagtggctgtggtcggaccatgacctagctgaccatgaacttggaagggcttgaaatgatagcagttctga

SEQ ID NO: 672642 - DNA, 120 bp, Artificial Sequence
  ENSG00000185774_1 (sequence is synthesized)
tcgtcattgtgctttttgttaaattattggaacagtttgggctgattgaagcaggtttagaagacagcgtggaagatgaactggagatggccaccgtcaggcatcggcctgaagcccttg

SEQ ID NO: 672643 - DNA, 120 bp, Artificial Sequence
  ENSG00000185774_2 (sequence is synthesized)
agcttctggaagcccagagcaaatttaccaagaaagagcttcagatcctttacagaggatttaagaatgaatgccccagtggtgttgttaatgaagaaaccttcaaagagatttactcgc

SEQ ID NO: 672644 - DNA, 120 bp, Artificial Sequence
  ENSG00000185774_3 (sequence is synthesized)
agttctttccacagggagactctacaacatatgcacattttctgttcaatgcatttgatacagaccacaatggagctgtgagtttcgaggatttcatcaaaggtctttccattttgctcc

SEQ ID NO: 672645 - DNA, 120 bp, Artificial Sequence
  ENSG00000185774_4 (sequence is synthesized)
gggggacagtacaagaaaaactcaattgggcatttaatctgtatgacataaataaagatggctacatcactaaagaggaaatgcttgatataatgaaagcaatatacgatatgatgggta

SEQ ID NO: 672646 - DNA, 120 bp, Artificial Sequence
  ENSG00000185774_5 (sequence is synthesized)
aatgtacatatcctgtcctcaaagaagatgctcccagacaacacgttgaaacattttttcagaaaatggacaaaaataaagatggggttgttaccatagatgagttcattgaaagctgcc

SEQ ID NO: 672647 - DNA, 120 bp, Artificial Sequence
  ENSG00000185774_6 (sequence is synthesized)
atgtgaactattctaccacccttaaagttggagctaccacttttagcatagattgctcagcttgacactgaagcatattatgcaaacaagctttgttttaatataaagcaatccccaaaa

SEQ ID NO: 672648 - DNA, 120 bp, Artificial Sequence
  ENSG00000185774_7 (sequence is synthesized)
gatttgagctttcagttataaatttgcatccttttcataatgccactgagttcaggggatggtctaactcatttcatactctgtgaatattcaaaagtaatagaatctggcatatagttt

SEQ ID NO: 672649 - DNA, 120 bp, Artificial Sequence
  ENSG00000185774_8 (sequence is synthesized)
tattggttccttagccatgggattattgaggctttcacatatcagtgattttaaaatatcagtgttttttgctactcatttgtatgtattcagtcctaggattttgaatggttttctaat

SEQ ID NO: 672650 - DNA, 120 bp, Artificial Sequence
  ENSG00000185774_9 (sequence is synthesized)
atagtgacatctgcatttaatttccagaaattaaattaattttcatgtttgaatgctgtaattccatttaaattccatttatatactttaaggaaacaagattacaacaattaaaaaaac

SEQ ID NO: 672651 - DNA, 120 bp, Artificial Sequence
  ENSG00000185774_10 (sequence is synthesized)
acatagttccagtttctatggccttcccaccttctgttagaaattagttttatctggcatttttaaacatttaaaaattattaaacatttaaaaattagtttattatcagatatcagcat

SEQ ID NO: 672652 - DNA, 120 bp, Artificial Sequence
  ENSG00000185774_11 (sequence is synthesized)
atgcctaataaaacttattttaataagcatttaattttccataatatgttacagccaaggcctatataataattttggatttgttcaatctttcttacaggctgttttctattgtatcaa

SEQ ID NO: 672653 - DNA, 120 bp, Artificial Sequence
  ENSG00000185774_12 (sequence is synthesized)
tcattagtatcaatcattaagtggaagttgaagaaggcatcaaacaaaacaaggatgtttacagacatatgcaaagggtcaggatatctatcctccagtatatagtaatgcttaataaca

SEQ ID NO: 672654 - DNA, 120 bp, Artificial Sequence
  ENSG00000185774_13 (sequence is synthesized)
aactgcttctggagaggggatgccgagccgaaccagagctgggttactacaagtgtgaaccggcagcctgtctgttgccacagaagaacttggtcaccacactgagaagccgtgttttct

SEQ ID NO: 672655 - DNA, 120 bp, Artificial Sequence
  ENSG00000185774_14 (sequence is synthesized)
cacctccctgttactgttgtagctgtatctggcttctctagcattttaaaggaatttctgattgaggcgctaacagctaattccacaggagttgtaaggcagcctgtgcataaactgaga

SEQ ID NO: 672656 - DNA, 120 bp, Artificial Sequence
  ENSG00000185774_15 (sequence is synthesized)
cagaagtttctcctcagagactctctttttattattattattattattattggcaaagacttctggctctcctcagaggaataccttgttgcttaagatgagtggctgtagaaagcggtg

SEQ ID NO: 672657 - DNA, 80 bp, Artificial Sequence
  ENSG00000185774_16 (sequence is synthesized)
ataccttgttgcttaagatgagtggctgtagaaagcggtgtaaacgtgaaatactgaaatttgcccagtaccttctcaga

SEQ ID NO: 672658 - DNA, 120 bp, Artificial Sequence
  ENSG00000185774_17 (sequence is synthesized)
cactgtctactaagaacaaacagcaagcaaaattagcaagcaaaattcactttgaaagcaccagtggttccattacattgacaactactaccaagatttagtagaaaataagtgctcaac

SEQ ID NO: 672659 - DNA, 120 bp, Artificial Sequence
  ENSG00000185774_18 (sequence is synthesized)
aactaatccagattacagtatgatttagctcatcataattcagattatttttaatcatcttagccaaaactgtaaagttgccacattactaaagccacacacatcgtccctgttttgtag

SEQ ID NO: 672660 - DNA, 120 bp, Artificial Sequence
  ENSG00000185774_19 (sequence is synthesized)
aaatatcacaaagaccaagaggctacagaaggaggaaatttgcaactgtctttgcaacaataaatcaggtatctattctggtgtagagataggatgttgaaagctgccctgctatcacca

SEQ ID NO: 672661 - DNA, 120 bp, Artificial Sequence
  ENSG00000185774_20 (sequence is synthesized)
gtgtagaaattaagagtagtacaatacatgtacactgaaatttgccatcacgtgtttgtgtaaactcaatgtgcacattttgtatttcaaaaagaaaaaataaaagcaaaataaaatgtt

SEQ ID NO: 672662 - DNA, 120 bp, Artificial Sequence
  ENSG00000185774_21 (sequence is synthesized)
gctcactttttccccttgcaagtctttgttccaagcctgacgttgctacgattctgtaattaactccctccactccaaaggggtctggaggctgggatgctctgccagctcagaggatgt

SEQ ID NO: 672663 - DNA, 120 bp, Artificial Sequence
  ENSG00000185774_22 (sequence is synthesized)
tgactctggagtgggagtccgaaggactgcaaacagtgggtattgttgtgattatatgtgcatctctgaagcttcttcatttgctgggactgattgatttttcggaagacagcgtggaag

SEQ ID NO: 672664 - DNA, 120 bp, Artificial Sequence
  ENSG00000185774_23 (sequence is synthesized)
gcagccgccgccgaagctctcgctcccagcgccacggacgcccccgggccgagcggcggtgcgctcccgtgcagacccgtggacagacgcccctggccggtggactctcgagtctcgctt

SEQ ID NO: 672665 - DNA, 120 bp, Artificial Sequence
  ENSG00000185774_24 (sequence is synthesized)
gcccctggccggtggactctcgagtctcgcttctgcaccctgcgtccctagacatgaatgtgaggagggtggaaagcatttcggctcagctggaggaggccagctctacaggcggtttcc

SEQ ID NO: 672666 - DNA, 120 bp, Artificial Sequence
  ENSG00000185774_25 (sequence is synthesized)
aaagagcggctcatgaagctcttgccctgctcagctgccaaaacgtcgtctcctgctattcaaaacagcgtggaagatgaactggagatggccaccgtcaggcatcggcctgaagccctt

SEQ ID NO: 672667 - DNA, 120 bp, Artificial Sequence
  ENSG00000185774_26 (sequence is synthesized)
aatgaagaataaagagtgggctagcgacttccaggggatagaacagaagcggttattgagcattcgctgtgtaccaagtgctgtccttgacaagaagacttacacccagtggtcccagag

SEQ ID NO: 672668 - DNA, 120 bp, Artificial Sequence
  ENSG00000185774_27 (sequence is synthesized)
cctgaaacaaatgatgaacaagcaaaaccataaaataactgtttttagacattgagcttcaggcattgaagaacagtgattcttcaatcactgttgattgaacagtgatattgggaagca

SEQ ID NO: 672669 - DNA, 120 bp, Artificial Sequence
  ENSG00000185774_28 (sequence is synthesized)
agccaacaatttgtgcttcagggagagttttccaaaccaattgttattaatgagtcacacatcatatctgatttatgatttattaaactttatgcattaaatactttccaaacaagacaa

SEQ ID NO: 672670 - DNA, 120 bp, Artificial Sequence
  ENSG00000185774_29 (sequence is synthesized)
aagatggaggctctgtgtgagaaggaatgcagggcagcctctggttgcagagagcagcacccggtttgacagctagcaatgcaattgtgacctcagacctacaatgtcaaggaattggct

SEQ ID NO: 672671 - DNA, 120 bp, Artificial Sequence
  ENSG00000185774_30 (sequence is synthesized)
tctgccaacaaccagaatgagcatgaaagtggattagtccttggaacttccagataagagcccagccagctatacttggatttcagcctgtgagattctcagcagagaacccagtcaagt

SEQ ID NO: 672672 - DNA, 120 bp, Artificial Sequence
  ENSG00000185774_31 (sequence is synthesized)
ggtttcctgtacgctcagaacagcaccaagcgcagcattaaagagcggctcatgaagctcttgccctgctcagctgccaaaacgtcgtctcctgctattcaaagcaacgtggaagatgaa

SEQ ID NO: 672673 - DNA, 120 bp, Artificial Sequence
  ENSG00000185774_32 (sequence is synthesized)
ggatttaagaatgtaagaactttctttttgactttaccttcacacaattcccagaggagcattgagaaatgagaggaaaagggggaaaatatcccattctatgagagccccatcatatgt

SEQ ID NO: 672674 - DNA, 120 bp, Artificial Sequence
  ENSG00000185774_33 (sequence is synthesized)
atatttcatactgatccttcccagataggaatataatcagtatctgtggactttgattctctgtggcacacccatgctggcatactgtgattgcccattaaacaaagagtttctgagaaa

SEQ ID NO: 672675 - DNA, 120 bp, Artificial Sequence
  ENSG00000185774_34 (sequence is synthesized)
gtggacagtcacagacattagcagacatgttcttccgttttcctttgttgctctgtgtaagcatcggtgagcagtggctggtcctaagactctttcttgttttcctccacagacagcgtg

SEQ ID NO: 672676 - DNA, 120 bp, Artificial Sequence
  ENSG00000185774_35 (sequence is synthesized)
atgaatgtgaggagggtggaaagcatttcggctcagctggaggaggccagctctacaggcgaagcggttattgagcattcgctgtgtaccaagtgctgtccttgacaagaagacttacac

SEQ ID NO: 672677 - DNA, 120 bp, Artificial Sequence
  ENSG00000185775_0 (sequence is synthesized)
agttgcttgaaagcaacgtgcctattcacatggagaatcttccctttcctttaaaattacttagtgcctcatcgctaaacgcccccagctccacaccatgggtgttggatatcttcctca

SEQ ID NO: 672678 - DNA, 120 bp, Artificial Sequence
  ENSG00000185775_1 (sequence is synthesized)
ccttggtgtttgccctggggttcttcttcctattactcccctacttatcttacttccattgtgatgacccaccctcaccatcgcctgggaagagaaagtgtccagtagggcggaggcgga

SEQ ID NO: 672679 - DNA, 120 bp, Artificial Sequence
  ENSG00000185775_2 (sequence is synthesized)
ggcccagaggcaggatgaaaaaccacagtctgagagctggtagagagtgcccgagaggcctggaggagacttcggaccttctttcacaactgcagagcctcctggggccacaccttgaca

SEQ ID NO: 672680 - DNA, 120 bp, Artificial Sequence
  ENSG00000185775_3 (sequence is synthesized)
aaggtgactttggtcagctctccggtccagaccccccaggtgaggtgggcgaaagagcacctgatggagcctcccagtcctctcatgagcctatggaagatgctgctcccattctctccc

SEQ ID NO: 672681 - DNA, 120 bp, Artificial Sequence
  ENSG00000185775_4 (sequence is synthesized)
cgttagcttccccggatcctcaagccaagcatcctcaggatctggcctccaccccatcaccaggcccaatgaccacctcagtctcctccctaagtgcctcccagccaccagaaccttccc

SEQ ID NO: 672682 - DNA, 120 bp, Artificial Sequence
  ENSG00000185775_5 (sequence is synthesized)
ttcccctagaacacccctcacccgagccacctgcacttttccctcacccaccacacacccctgatcctctggcctgctctccgcctcctccaaaaggcttcactgctcctcccctgcggg

SEQ ID NO: 672683 - DNA, 120 bp, Artificial Sequence
  ENSG00000185775_6 (sequence is synthesized)
actccacactgataactccatctcactgtgactcagtggcacttccactgggcaccgtccctcaaagcttgtctccacatgaggatttggtggcttctgtcccagccatctcaggccttg

SEQ ID NO: 672684 - DNA, 120 bp, Artificial Sequence
  ENSG00000185775_7 (sequence is synthesized)
gtggctcaaacagtcatgtttctgcctcctcccggtggcaggagactgccagaacctcgtgcgcctttaactcatcagtccagcaagatcctctttcccgccacccaccagagacctgtc

SEQ ID NO: 672685 - DNA, 120 bp, Artificial Sequence
  ENSG00000185775_8 (sequence is synthesized)
agatggaagctggtagcctgtttttgctcagctctgatggccagaatgtcgtggggatacaagtcacagaaacagccaaggtcaacatttgggaagaaaaagaaaatgttggatcattta

SEQ ID NO: 672686 - DNA, 120 bp, Artificial Sequence
  ENSG00000185775_9 (sequence is synthesized)
caaatcaaatgaccccagaaaagcacttaaattctttggggaatttggctaaatcattggatgctgagcaggacaccacaaacccaaaacccttctggaacatgggagagaactcgaaac

SEQ ID NO: 672687 - DNA, 120 bp, Artificial Sequence
  ENSG00000185775_10 (sequence is synthesized)
agctgcccggacctcagaagtgctcagatcctaggctcttgcaggaaagtttttggaagaattatagccagcttttctggggcctcccctctctgcacagcgagtccctggtggctaacg

SEQ ID NO: 672688 - DNA, 120 bp, Artificial Sequence
  ENSG00000185775_11 (sequence is synthesized)
cctgggtaactgacaggtcttatactttacagtctcctcctttcttgttcaatgaaatgtccaatgtctgcccaattcaaagggagactacaatgtccccactgcttttccaggcccagc

SEQ ID NO: 672689 - DNA, 120 bp, Artificial Sequence
  ENSG00000185775_12 (sequence is synthesized)
ccctgtcccaccgccaaccctttatttcatccacaccccaattcctgcccacacctatggctcaggccgaggctcaggcccatcttcagtcttctttcccagtcctatctcctgcttttc

SEQ ID NO: 672690 - DNA, 120 bp, Artificial Sequence
  ENSG00000185775_13 (sequence is synthesized)
catccctgattaagaacactggagtagcttgccctgcatcgcagaataaagtgcaagctctctccctacctgaaactcagcaccctgaatggcctttgttgaggaaacaactagaaggta

SEQ ID NO: 672691 - DNA, 120 bp, Artificial Sequence
  ENSG00000185775_14 (sequence is synthesized)
ggttggctttaccctctagggtccaaaaatctcaggacgtctttagtgtctccactcctaaccttccccaggaaagtttgacatccattctgcctgagaactttccagtcagtcctgaac

SEQ ID NO: 672692 - DNA, 120 bp, Artificial Sequence
  ENSG00000185775_15 (sequence is synthesized)
tccggagacaactggagcaacacataaaaaagtggatcatccaacactggggcaacctgggaaggatccaagagtctctggatctgatgcagcttcgggacgaatcaccagggacaagtc

SEQ ID NO: 672693 - DNA, 120 bp, Artificial Sequence
  ENSG00000185775_16 (sequence is synthesized)
aggccaagggcaaacccagtccctggcagtcctccacgtccacaggtgaaagcagcaaggaggcacagaaggtgaagttccagctagagagggacctgtgcccacatctggggcaaattc

SEQ ID NO: 672694 - DNA, 120 bp, Artificial Sequence
  ENSG00000185775_17 (sequence is synthesized)
caaaatctatccagggacatgaaaagcttcccacggaaggttctgggggtgacttctgaggagtcggaaaggaacttgaggaagcccttgaggagtgactcgggaagtgatttattaaga

SEQ ID NO: 672695 - DNA, 120 bp, Artificial Sequence
  ENSG00000185775_18 (sequence is synthesized)
tgcacagagaggactcatatagaaaacatcctgaaagcccacatgggcaggaacttgggccagaccaacgagggcttgatccccgtgcgtgtgcgtcgatcctggcttgctgtcaaccag

SEQ ID NO: 672696 - DNA, 120 bp, Artificial Sequence
  ENSG00000185775_19 (sequence is synthesized)
gctcttcccgtgtccaacacccatgtgaaaaccagcaatctagcagccccgaaaagtgggaaagcctgtgtgaacacagcccaggtgctttccttcctcgagccgtgtactcagcagggg

SEQ ID NO: 672697 - DNA, 120 bp, Artificial Sequence
  ENSG00000185775_20 (sequence is synthesized)
ttgggagcccatattgtgaggttttgggccaaacacaggtggggtctacccctcagggtcctcaagcccattcagtgctttaaactggaaaaggtttcatccttgtcccttacgcagctt

SEQ ID NO: 672698 - DNA, 120 bp, Artificial Sequence
  ENSG00000185775_21 (sequence is synthesized)
gctggtccctcctcagccacctgtgaatctggggctggctcagaagttgaggtggacatgttccttagaaagccaccaatggcaagtctgagaaagcaggtgctgaccaaagcatctgat

SEQ ID NO: 672699 - DNA, 120 bp, Artificial Sequence
  ENSG00000185775_22 (sequence is synthesized)
cacatgccagagagtcttctggcctcctcacctgcatggaagcagttccagagggcaccgcgaggaatcccatcttggaatgatcatgggcccttgaagcctcctccagctggacaggag

SEQ ID NO: 672700 - DNA, 120 bp, Artificial Sequence
  ENSG00000185775_23 (sequence is synthesized)
ggcaggtggccatctaagcccctcacgtacagcctcacaggcagcacccagcagagcaggagcttaggagcccaatcttcaaaggctggagagacaagggaggcagtgccacaatgcaga

SEQ ID NO: 672701 - DNA, 120 bp, Artificial Sequence
  ENSG00000185775_24 (sequence is synthesized)
gtccccttggaaacctgtatgctggcaaacctccaagccacaagtgaggatgtgcatggtttcgaggctccagggaccagcaaaagctctctacaccctagagtgtctgtctcccaagat

SEQ ID NO: 672702 - DNA, 120 bp, Artificial Sequence
  ENSG00000185775_25 (sequence is synthesized)
ccaagaaagctgtgtcttatggaggaggttgttagtgaatttgagcctggaatggccacaaagtcagagacccagcctcaagtttgtgccgctgttgtgctccttccagatgggcaagca

SEQ ID NO: 672703 - DNA, 120 bp, Artificial Sequence
  ENSG00000185775_26 (sequence is synthesized)
tctgttgtgccccacgcttcagagaatttggtttctcaagtgccccagggccatctccagagcatgcctactgggaacatgcgggcttcccaggagctacatgacctcatggcagccaga

SEQ ID NO: 672704 - DNA, 120 bp, Artificial Sequence
  ENSG00000185775_27 (sequence is synthesized)
aggagcaaactggtgcaagaggagcccagaaacccaaactgtcaaggctcatgcaagagccaaaggccaatgtttccccctattcacaagagtgagaagtctaggaagcccaacttagaa

SEQ ID NO: 672705 - DNA, 120 bp, Artificial Sequence
  ENSG00000185775_28 (sequence is synthesized)
aaacatgaagaaaggcttgaaggattgaggactcctcaacttaccccagtcaggaaaacagaagacacccatcaggatgaaggcgtccagctactgccatcaaagaaacagcctccttca

SEQ ID NO: 672706 - DNA, 120 bp, Artificial Sequence
  ENSG00000185775_29 (sequence is synthesized)
gtaagccactttggagaaaacatcaagcaattttttcagtggattttttcaaagaaaaaaagcaagccagcaccagtcactgctgagagccaaaaaacagtaaaaaacagatcatgtgtg

SEQ ID NO: 672707 - DNA, 120 bp, Artificial Sequence
  ENSG00000185775_30 (sequence is synthesized)
tacagcagcagtgctgaagctcagggtctcatgacggcagttggacaaatgctggacaagaaaatgtcactttgccatgcgcaccatgcctcgaaggtaaatcagcacaaacagaagttt

SEQ ID NO: 672708 - DNA, 120 bp, Artificial Sequence
  ENSG00000185775_31 (sequence is synthesized)
caagccccagtctgtgggtttccctgcaaccacaggcacctcttctactcagaacatggcagaatactgagctatgcagccagcagtcaacaagccactctcaagagccagggttgtccc

SEQ ID NO: 672709 - DNA, 120 bp, Artificial Sequence
  ENSG00000185775_32 (sequence is synthesized)
aacagagacaggcaaatcagaaatcaacagcccttgaaaagtgtgcggtgcaacaatgagcaatggggcctgcgacatccccaaatcttgcaccccaagaaagctgtatccccagtcagt

SEQ ID NO: 672710 - DNA, 120 bp, Artificial Sequence
  ENSG00000185775_33 (sequence is synthesized)
ccccctcagcactggccgaagacatccggtgcctctagccaccatcaccactgtccaaggcactgtcttctttgggaaggtatctgatttggtcagtcacaaattcttttttagccttcc

SEQ ID NO: 672711 - DNA, 120 bp, Artificial Sequence
  ENSG00000185775_34 (sequence is synthesized)
ctggagaaaaacaagtccccaagaaaaaattcactctatgtagagaaaaaatattttctctcatgttagtaaatgcagaacatttaatattccacaatatatatggttttttatttataa

SEQ ID NO: 672712 - DNA, 120 bp, Artificial Sequence
  ENSG00000185775_35 (sequence is synthesized)
gggaatgaagccatggtgggccagggactgggcgttacccagcagggggcagtgtgtgtgtcctggggagaccaatgcctgcctggatgcggagggggctggtagagagtgcccgagagg

SEQ ID NO: 672713 - DNA, 120 bp, Artificial Sequence
  ENSG00000185787_0 (sequence is synthesized)
gcgtgcgcggcgggctgtcgttggctggagcagcggctgcgcgggtcgcggtgctgtgaggtctgcgggcgctggcaaatccggcccaggatgtagagctggcagtgcctgacggcgcgt

SEQ ID NO: 672714 - DNA, 120 bp, Artificial Sequence
  ENSG00000185787_1 (sequence is synthesized)
ctgacgcggagttgggtggggtagagagtagggggcggtagtcgggggtggtgggagaaggaggaggcggcgaatcacttataaatggcgccgaagcaggacccgaagcctaaattccag

SEQ ID NO: 672715 - DNA, 120 bp, Artificial Sequence
  ENSG00000185787_2 (sequence is synthesized)
gagggtgagcgagtgctgtgctttcatgggcctcttctttatgaagcaaagtgtgtaaaggttgccataaaggacaaacaagtgaaatacttcatacattacagtggttggaataaaaaa

SEQ ID NO: 672716 - DNA, 120 bp, Artificial Sequence
  ENSG00000185787_3 (sequence is synthesized)
agtgctgtgaggcccaggcgctctgaaaaatctttgaagacacatgaggatattgtagccctttttcctgttcctgaaggagctccctcagtacaccaccccctcctgacctctagttgg

SEQ ID NO: 672717 - DNA, 120 bp, Artificial Sequence
  ENSG00000185787_4 (sequence is synthesized)
gatgaatgggttccggagagcagagtactcaaatacgtggacaccaatttgcagaaacagcgagaacttcaaaaagccaatcaggagcagtatgcagaggggaagatgagaggggctgcc

SEQ ID NO: 672718 - DNA, 120 bp, Artificial Sequence
  ENSG00000185787_5 (sequence is synthesized)
ccaggaaagaagacatctggtctgcaacagaaaaatgttgaagtgaaaacgaaaaagaacaaacagaaaacacctggaaatggagatggtggcagtaccagtgagacccctcagcctcct

SEQ ID NO: 672719 - DNA, 120 bp, Artificial Sequence
  ENSG00000185787_6 (sequence is synthesized)
cggaagaaaagggcccgggtagatcctactgttgaaaatgaggaaacattcatgaacagagttgaagttaaagtaaagattcctgaagagctaaaaccgtggcttgttgatgactgggac

SEQ ID NO: 672720 - DNA, 120 bp, Artificial Sequence
  ENSG00000185787_7 (sequence is synthesized)
ttaattaccaggcaaaaacagctcttttatcttcctgccaagaagaatgtggattccattcttgaggattatgcaaattacaagaaatctcgtggaaacacagataataaggagtatgcg

SEQ ID NO: 672721 - DNA, 120 bp, Artificial Sequence
  ENSG00000185787_8 (sequence is synthesized)
gttaatgaagttgtggcagggataaaagaatacttcaacgtaatgttgggtacccagctactctataaatttgagagaccacagtatgctgaaattcttgcagatcatcccgatgcaccc

SEQ ID NO: 672722 - DNA, 120 bp, Artificial Sequence
  ENSG00000185787_9 (sequence is synthesized)
atgagaagagccttgctttattactcaattatcttcacgatttcctaaagtacctggcaaagaattctgcaactttgttcagtgccagcgattatgaagtggctcctcctgagtaccatc

SEQ ID NO: 672723 - DNA, 120 bp, Artificial Sequence
  ENSG00000185787_10 (sequence is synthesized)
ggaaagctgtgtgagaggcactctcactcacttatgtttggatctccgtaaacacatttttgttcttagtctatctcttgtacaaacgatgtgctttgaagatgttagtgtataacaatt

SEQ ID NO: 672724 - DNA, 120 bp, Artificial Sequence
  ENSG00000185787_11 (sequence is synthesized)
aacgatgtgctttgaagatgttagtgtataacaattgatgtttgttttctgtttgattttaaacagagaaaaaataaaagggggtaatagctccttttttcttctttctttttttttttc

SEQ ID NO: 672725 - DNA, 120 bp, Artificial Sequence
  ENSG00000185787_12 (sequence is synthesized)
aacagagggatatgctgtagagtgttttattgcctagttgacaaagctgcttttgaatgctggtggttctattcctttgacactacgcacttttataatacatgttaatgctatatgaca

SEQ ID NO: 672726 - DNA, 120 bp, Artificial Sequence
  ENSG00000185787_13 (sequence is synthesized)
aaatgctctgattcctagtgccaaaggttcaattcagtgtatataactgaacacactcatccatttgtgcttttgtttttttttatggtgcttaaagtaaagagcccatcctttgcaagt

SEQ ID NO: 672727 - DNA, 120 bp, Artificial Sequence
  ENSG00000185787_14 (sequence is synthesized)
catccatgttgttacttaggcattttatcttggctcaaattgttgaagaatggtggcttgtttcatggtttttgtatttgtgtctaatgcacgttttaacatgatagacgcaatgcattg

SEQ ID NO: 672728 - DNA, 120 bp, Artificial Sequence
  ENSG00000185787_15 (sequence is synthesized)
tgtagctagttttctggaaaagtcaatcttttaggaattgtttttcagatcttcaataaattttttctttaaatttcaaagaacaatgtgcttgtgttgatgccttacaaaaaccattgt

SEQ ID NO: 672729 - DNA, 120 bp, Artificial Sequence
  ENSG00000185787_16 (sequence is synthesized)
atatttgtgtattccttcttgtatttagacagtggtttttcaggtgcgtgctttgttttctggtatggcctttatggaatgagacgctttagctttggtacgtagcgctaatccatagca

SEQ ID NO: 672730 - DNA, 120 bp, Artificial Sequence
  ENSG00000185787_17 (sequence is synthesized)
gctttggcagtttgctgtcttgagtcttagctaaaaagttagaagtttacatgactgttttttttattttccctaaattattacttactctgagcattaattaagggcattttcacctgt

SEQ ID NO: 672731 - DNA, 120 bp, Artificial Sequence
  ENSG00000185787_18 (sequence is synthesized)
gtaaaattatggtcagcttttttctgtctataattgtttacttttgtgggtttactctagaaacatgagccaaaaatgtcaatagacaacacagtattaaaataacccaaaagttgtaaa

SEQ ID NO: 672732 - DNA, 120 bp, Artificial Sequence
  ENSG00000185787_19 (sequence is synthesized)
gtacgatatttcactgagtaaaagggttggaagcagagatacaagtggagagtaaaggtcctcaacttagaaaaacagatgaggaaagcatttaaaaaactgtattttcagatatatagt

SEQ ID NO: 672733 - DNA, 120 bp, Artificial Sequence
  ENSG00000185787_20 (sequence is synthesized)
gtcttctctaaatgaataagaggtaaagtaattaactttccaaaacatgactcccattttaatttgaacttttatctagaatgttaaatagcaaaatctctttaggagcaagagttttaa

SEQ ID NO: 672734 - DNA, 64 bp, Artificial Sequence
  ENSG00000185787_21 (sequence is synthesized)
ggagcaagagttttaaaaatcgtgtattttattttataattttttttttttgagacagaccgcc

SEQ ID NO: 672735 - DNA, 120 bp, Artificial Sequence
  ENSG00000185787_22 (sequence is synthesized)
gctgggatcacaggtgtgcaccaccacatctgtggtaatttttgtattttctgtagagatggggtttcaccacgttcgccagggtggtcttgaatacctgacctcaagcgatcgcctatc

SEQ ID NO: 672736 - DNA, 62 bp, Artificial Sequence
  ENSG00000185787_23 (sequence is synthesized)
agatggggtttcaccacgttcgccagggtggtcttgaatacctgacctcaagcgatcgaaat

SEQ ID NO: 672737 - DNA, 120 bp, Artificial Sequence
  ENSG00000185787_24 (sequence is synthesized)
tcatgttggctgccctgcctataaaatgattcctggtacctttcagctgctgtgttacagctttgacttcaagcgatcaagccatatctagggagcagtatgcagaggggaagatgagag

SEQ ID NO: 672738 - DNA, 120 bp, Artificial Sequence
  ENSG00000185787_25 (sequence is synthesized)
cagttaatttttgtattttttatagagaacaggatttgccatgttgcccaggctggtctggaattttgagctctagagatccaccccctcttcacctcccaaaatgctgggattacaggc

SEQ ID NO: 672739 - DNA, 120 bp, Artificial Sequence
  ENSG00000185787_26 (sequence is synthesized)
atgtgccactgcgcctggcttggtttatttttttctattatgtggagagagatgggaatttaaccaactatcaataaaaatccttgtgtctgagtaggacacatatttaccacctgatcc

SEQ ID NO: 672740 - DNA, 120 bp, Artificial Sequence
  ENSG00000185787_27 (sequence is synthesized)
gaacttaaccctgataaagggagttgaaacagaggcagttttactggaaataattatttttcttttttttctctccttttaggaaaacgaaaaagaacaaacagaaaacacctggaaatg

SEQ ID NO: 672741 - DNA, 120 bp, Artificial Sequence
  ENSG00000185787_28 (sequence is synthesized)
ggtctgcaacagaaaaatgttgaagtgtaagaagctctttgttttgattttgcatactatatgtgaagataatattttatgttcattgtgtgttagactgtgttgaagtggaaactttgg

SEQ ID NO: 672742 - DNA, 120 bp, Artificial Sequence
  ENSG00000185787_29 (sequence is synthesized)
gaatcacttataaatggcgccgaagcaggacccgaagcctaaattccaggagggtgagtgtgcgcctttgggaaaaaggcacctaacggcgcaggagatagaggcgggctcgaggtgatt

SEQ ID NO: 672743 - DNA, 120 bp, Artificial Sequence
  ENSG00000185787_30 (sequence is synthesized)
aacccatggccgggaaaagaagctcctgctccccgctccactcccggcgtcttcacacttggggaagggagaggcaggaagtgcaaggaccgcgcaagacccggccccccgagccgccag

SEQ ID NO: 672744 - DNA, 120 bp, Artificial Sequence
  ENSG00000185787_31 (sequence is synthesized)
ccagcagcccagatgcggtgggcgggagctgggggggcggcggggtcccgcgaagacctgcgacctggcgccctcgccggctgtgtcccggccagcccgctttccaggcgagcctcgcta

SEQ ID NO: 672745 - DNA, 120 bp, Artificial Sequence
  ENSG00000185787_32 (sequence is synthesized)
cctcgctaaggagtgtgagaaaccaaatcctcagtgggtaaaccgcgctccgtccagcccactcggacgagagctctcccgggagccaggcgcgttgctgcacccgaggtggggaaaccg

SEQ ID NO: 672746 - DNA, 120 bp, Artificial Sequence
  ENSG00000185787_33 (sequence is synthesized)
gagcccgaagagcggaaggggcttattccaggcgacaggcagtgtcagtaactgaatcaggggccgaggaagtttccccagaagcgcggcttcgctcccggcccggcccgaccccgacta

SEQ ID NO: 672747 - DNA, 120 bp, Artificial Sequence
  ENSG00000185787_34 (sequence is synthesized)
ctgtcccctaatacccagggagcggaagacgcgaccaactccaggcacagcggagccggcgcggggtccacaaagcaaaaaagaatgatccccttcccccatcctcaagtgactgatgct

SEQ ID NO: 672748 - DNA, 120 bp, Artificial Sequence
  ENSG00000185787_35 (sequence is synthesized)
acctctatgacattgacgtttttattttgaaagctatgaaattttggagtaagcttatgtttattgattatctcaaataggagtctcacagcagtgttataaaataggtacatggtggta

SEQ ID NO: 672749 - DNA, 120 bp, Artificial Sequence
  ENSG00000185787_36 (sequence is synthesized)
ataaataaatggaagatggtgatactaaatgttgtctatactaaatgttcggtagagctcttcatgaaagttgtatttttggtaggaatatgattctttaacttagattgaggtaacagc

SEQ ID NO: 672750 - DNA, 120 bp, Artificial Sequence
  ENSG00000185787_37 (sequence is synthesized)
tgtgtaatggagaaataatgaaaagggttaatgtgtcaagagactattttccttatagagtttgttaaattagctaaatgagacccctccccgccaacatttacagcacctggaaatgga

SEQ ID NO: 672751 - DNA, 120 bp, Artificial Sequence
  ENSG00000185787_38 (sequence is synthesized)
actgataaaataatattttaatttagaggctgaacactttagaactactaccagaaagagtaagttagaagaataaaagttcacatataaattttatgaggttataatgataaaggtgga

SEQ ID NO: 672752 - DNA, 120 bp, Artificial Sequence
  ENSG00000185787_39 (sequence is synthesized)
aataactcatttttggagattgctagggcaggaactcgttctgaaaattcataaaggtgaagaagcatatgtcttactgtcattgctaatggtaggccatagaaagcacacaccaccacc

SEQ ID NO: 672753 - DNA, 120 bp, Artificial Sequence
  ENSG00000185787_40 (sequence is synthesized)
tgcaaggtattcatgaccctgaaaagaacctgaatcttactaagcgcctggatctattgttagtttgcaggaaataggatgtttaatggagtgacatgtttgtcaatcgttgaactctat

SEQ ID NO: 672754 - DNA, 120 bp, Artificial Sequence
  ENSG00000185787_41 (sequence is synthesized)
aattgagaattttataggacaaatgaagctatttgaacaaatggcataggtagggttagggatagttgggggagatgattagggactgcttgaggattatgagacttaagagacctatca

SEQ ID NO: 672755 - DNA, 120 bp, Artificial Sequence
  ENSG00000185787_42 (sequence is synthesized)
gtcatatacagtatgtggatatagtttgaattctgatttgaatcctttggagggttatgcagttacagctaaactgcgaagattcaagcatggctgtatcacttattatttgtgagtttg

SEQ ID NO: 672756 - DNA, 120 bp, Artificial Sequence
  ENSG00000185787_43 (sequence is synthesized)
gtgtttatgaatagcatgttaggatttttagtctcagttacatgacataaccatgggagctttgattatctacaagatttgcttacatggttaatacctgaaattaaaaattttctcttt

SEQ ID NO: 672757 - DNA, 120 bp, Artificial Sequence
  ENSG00000185787_44 (sequence is synthesized)
tcgggggtggtgggagaaggaggaggcggcgaatcacttataaatggcgccgaagcaggacccgaagcctaaattccaggaggtgtgtaaaggttgccataaaggacaaacaagtgaaat

SEQ ID NO: 672758 - DNA, 120 bp, Artificial Sequence
  ENSG00000185787_45 (sequence is synthesized)
cagagtggtgggtggggacagaaaaaaaaaagtgagatgagcgttttcctccgctttgtgttgcctggaggcatcactctgctattcttgggcgcagtgccgagatcctatggtaatgtg

SEQ ID NO: 672759 - DNA, 79 bp, Artificial Sequence
  ENSG00000185787_46 (sequence is synthesized)
ggaagctttgttcttttgctctttgcgataaatcttgctactgctcaatctgcagcttcactcctgagcctagcgaaac

SEQ ID NO: 672760 - DNA, 64 bp, Artificial Sequence
  ENSG00000185787_47 (sequence is synthesized)
gggaggaacccttcactcttgagccagcaagaccacgaacccaccaggagaaaactccgaacac

SEQ ID NO: 672761 - DNA, 120 bp, Artificial Sequence
  ENSG00000185792_0 (sequence is synthesized)
acacctcagttcacaatcctggggcgatatggcagaatcttttttttcggattttggcttgttgtggtatctgaaggagctcagaaaggaagagttttggaaatttaaggagctcctcaa

SEQ ID NO: 672762 - DNA, 120 bp, Artificial Sequence
  ENSG00000185792_1 (sequence is synthesized)
acaacctttggagaaatttgaactcaagccaatcccctgggctgagctgaagaaggcctccaaagaagatgtagcaaagctgctggacaaacattacccaggaaagcaggcatgggaggt

SEQ ID NO: 672763 - DNA, 120 bp, Artificial Sequence
  ENSG00000185792_2 (sequence is synthesized)
aacactgaacctgtttctacagatcaataggaaagatctctggacaaaggctcaggaagagatgagaaataagctaaacccatacagaaagcatatgaaggaaacatttcaactcatatg

SEQ ID NO: 672764 - DNA, 120 bp, Artificial Sequence
  ENSG00000185792_3 (sequence is synthesized)
ggagaaggaaacctgtcttcacgtccctgagcatttctacaaagaaaccatgaaaaatgagtataaagaattgaatgacgcatatactgctgcggctagacgacacactgtggtcctgga

SEQ ID NO: 672765 - DNA, 120 bp, Artificial Sequence
  ENSG00000185792_4 (sequence is synthesized)
aggtcctgatggaattggaaaaacaacccttttaagaaaagtgatgttggactgggcagagggaaacttatggaaggacaggttcacatttgtgtttttcctcaatgtctgtgaaatgaa

SEQ ID NO: 672766 - DNA, 120 bp, Artificial Sequence
  ENSG00000185792_5 (sequence is synthesized)
cggtatcgcagagaccagcttactggagctcctctctagggactggccggagtcttcagagaagatcgaagacattttttcccagccagagagaattctgttcatcatggatggctttga

SEQ ID NO: 672767 - DNA, 120 bp, Artificial Sequence
  ENSG00000185792_6 (sequence is synthesized)
gcaactgaagtttaacttacaacttaaggctgacttgagcgatgattggaggcagcggcagccaatgccaattatcctgagcagtttgttgcaaaaaaagatgcttccagaatcctctct

SEQ ID NO: 672768 - DNA, 120 bp, Artificial Sequence
  ENSG00000185792_7 (sequence is synthesized)
ccttattgcattaggaaaactggctatgcaaaaacactattttatgttgcggcatccaaaactcataaagctcttaggattcagtgaatctgaaaagaagtcgtatttctcctacttctt

SEQ ID NO: 672769 - DNA, 120 bp, Artificial Sequence
  ENSG00000185792_8 (sequence is synthesized)
tggtgagaagagcaaagccctgaaagtcttcaattttgtgagagataatgggccgctgtttatcttgtgccataatccctttacgtgctggttggtctgtacttgtgtgaaacagaggct

SEQ ID NO: 672770 - DNA, 120 bp, Artificial Sequence
  ENSG00000185792_9 (sequence is synthesized)
agagaggggagaagaccttgaaataaactcccaaaacaccacctatttatatgcatcctttttaacaactgtattcaaagcaggaagtcagagttttccacctaaggtgaacagagcccg

SEQ ID NO: 672771 - DNA, 120 bp, Artificial Sequence
  ENSG00000185792_10 (sequence is synthesized)
actaaaaagcctgtgtgctttggctgcagagggaatttggacatatacatttgtattttcccatggggatctccggaggaatgggttatctgagtctgagggcgtgatgtgggtgggtat

SEQ ID NO: 672772 - DNA, 120 bp, Artificial Sequence
  ENSG00000185792_11 (sequence is synthesized)
gagactcctccaaaggagaggggactgttttgccttcatgcatctgtgtatccaagagttttgtgccgccatgttttatttgctcaaacgacccaaagacgatcctaacccggccattgg

SEQ ID NO: 672773 - DNA, 120 bp, Artificial Sequence
  ENSG00000185792_12 (sequence is synthesized)
aagcataacccagcttgtaagagcaagtgtggttcagcctcaaaccctcttgacccaggtggggatattcatgtttggaatttcaacagaagaaatcgtcagcatgctggagacctcctt

SEQ ID NO: 672774 - DNA, 120 bp, Artificial Sequence
  ENSG00000185792_13 (sequence is synthesized)
tggttttccactgtcaaaagacctaaagcaggaaataacccaatgccttgaaagtttaagtcaatgtgaagctgatagggaagccatagctttccaggaactattcattggtttgtttga

SEQ ID NO: 672775 - DNA, 120 bp, Artificial Sequence
  ENSG00000185792_14 (sequence is synthesized)
ttaacgacacttcgcatgtgtgtggagaatatctttccagatgactcaggatgcatctcagattacaatgagaagctcgtctactggcgggagctttgctcaatgttcattaccaacaag

SEQ ID NO: 672776 - DNA, 120 bp, Artificial Sequence
  ENSG00000185792_15 (sequence is synthesized)
aacttccagattttagacatggaaaataccagcctcgatgatccctccctggcgattctttgcaaagcgctggctcagcctgtttgtaaactccgaaaactcatatttacttctgtgtac

SEQ ID NO: 672777 - DNA, 120 bp, Artificial Sequence
  ENSG00000185792_16 (sequence is synthesized)
tttggacatgattcagaattatttaaggcagttcttcacaaccctcatctgaaacttctgagcctgtacggcactagcctctcccagtctgacatcagacacctgtgtgagacgctgaaa

SEQ ID NO: 672778 - DNA, 120 bp, Artificial Sequence
  ENSG00000185792_17 (sequence is synthesized)
catccaatgtgcaagatagaagagctgatactgggaaagtgtgacatctccagtgaagtttgtgaagacatcgcctccgtcctggcctgcaacagcaagctgaaacacctctccttggta

SEQ ID NO: 672779 - DNA, 120 bp, Artificial Sequence
  ENSG00000185792_18 (sequence is synthesized)
gaaaatcccttgagggacgaaggaatgacgttgctgtgtgaagccctgaagcactcacactgtgccctggagaggctgatgttgatgtactgctgtctcacctctgtctcctgtgactcc

SEQ ID NO: 672780 - DNA, 120 bp, Artificial Sequence
  ENSG00000185792_19 (sequence is synthesized)
atttccgaagtcctcttgtgcagtaagtccctgtccctcctcgatctgggctcaaatgccctggaagataatggagtggcatctctgtgtgcagcgctgaagcacccaggctgcagcata

SEQ ID NO: 672781 - DNA, 120 bp, Artificial Sequence
  ENSG00000185792_20 (sequence is synthesized)
cgggagctgtggttgatgggctgtttccttacttccgattcctgtaaggacattgctgctgttcttatttgcaatgggaaactgaagaccctgaaacttgggcataatgaaataggagac

SEQ ID NO: 672782 - DNA, 120 bp, Artificial Sequence
  ENSG00000185792_21 (sequence is synthesized)
actggtgtcagacagttatgtgcagctttgcagcatcctcactgtaaattagagtgtctcgggctgcaaacgtgtccgatcacccgtgcctgctgcgacgacatcgccgcagcactcatc

SEQ ID NO: 672783 - DNA, 120 bp, Artificial Sequence
  ENSG00000185792_22 (sequence is synthesized)
gcctgcaaaacactgaggagcctgaacctcgactggattgccttggatgctgatgcagtggtggtgctgtgtgaggcattgagccacccggactgtgccctgcagatgctggggctgcac

SEQ ID NO: 672784 - DNA, 120 bp, Artificial Sequence
  ENSG00000185792_23 (sequence is synthesized)
aaatctggctttgatgaagaaactcagaagatcctgatgtctgtggaagaaaaaattccccatctgaccatttcacatggaccttggattgacgaggaatacaagatcaggggtgtgctc

SEQ ID NO: 672785 - DNA, 120 bp, Artificial Sequence
  ENSG00000185792_24 (sequence is synthesized)
ctctgatggggaacaccctgaagtagtcgtctcacaaaggctttccttggccacagtgggaccttcacctggcacctctatcctgtaattgcacatcatggcagcagggctgtgatttca

SEQ ID NO: 672786 - DNA, 120 bp, Artificial Sequence
  ENSG00000185792_25 (sequence is synthesized)
gaggtactccctaagtgttctagcaatatgattatggagtgtgattcagtgtacatgctgattgtctttgcctcggtcctatatccccttgtctttagaaatcccatcctgccttgtgat

SEQ ID NO: 672787 - DNA, 120 bp, Artificial Sequence
  ENSG00000185792_26 (sequence is synthesized)
atttagaagcacaagtacgttaaacaagtgctaaacgctctggaaagcatggctttattttcttaatggatgtcttggtgtgtaggagcatgcatttgtaggcaccacaatccggatact

SEQ ID NO: 672788 - DNA, 120 bp, Artificial Sequence
  ENSG00000185792_27 (sequence is synthesized)
tctgacacagaagtgatgctagaatgtgtctatagattgtattgctagcatccagactttctagtttgtccagatttcgatttgatcaattttcttgtccaataaaaaagcatttccaaa

SEQ ID NO: 672789 - DNA, 120 bp, Artificial Sequence
  ENSG00000185792_28 (sequence is synthesized)
ctgggaaattgtcagaagtccctcggagacacagttgcaccaggtgagaaccactgctctataaaacatcttctacttacgttgcccataaatatgcaacgccagctcagacttcagaag

SEQ ID NO: 672790 - DNA, 120 bp, Artificial Sequence
  ENSG00000185798_0 (sequence is synthesized)
atcactaggcgccgaggaggggagcgggaagcgcagtgccagcgccacagcccttcaatcattttggttgctatccagcttctccacatcaagtccaacttcagaaaccccaagcctgta

SEQ ID NO: 672791 - DNA, 120 bp, Artificial Sequence
  ENSG00000185798_1 (sequence is synthesized)
gagaaaagttgacctgtgctgactctggtgatggtgactgtctctcactaatttctttgaagtcttcaaggataagcagagttgatccatctgagaaagggatcatgaactagacagaat

SEQ ID NO: 672792 - DNA, 120 bp, Artificial Sequence
  ENSG00000185798_2 (sequence is synthesized)
gaacagccttagaggcacagactcttgaacgggacggtggtggtatgactagtgcagagtgtttagagatcactcagtttttaaagactggcctttatcgtgtctcagtgcagccgaggc

SEQ ID NO: 672793 - DNA, 120 bp, Artificial Sequence
  ENSG00000185798_3 (sequence is synthesized)
agagcctttgaaggatgcgatgttgtcattcttactaatctagtccagccgctgaggtgactttcaacggcagaccgtctcctgagcgccccaggtagaatttcaaaagtctccgggacc

SEQ ID NO: 672794 - DNA, 120 bp, Artificial Sequence
  ENSG00000185798_4 (sequence is synthesized)
attatggcagtcaagtggacgggtgggcattcttctcctgtcctctgcctgaatgcaagtaaagaagggctgctggcttctggagcagagggcggagatctcacggcttggggtgaagat

SEQ ID NO: 672795 - DNA, 120 bp, Artificial Sequence
  ENSG00000185798_5 (sequence is synthesized)
ggaactccattaggacacacgcggttccaaggggctgatgatgttaccagtgtcttattttctccctcctgtcccaccaagctctatgcctcacatggagaaaccattagtgtactggat

SEQ ID NO: 672796 - DNA, 120 bp, Artificial Sequence
  ENSG00000185798_6 (sequence is synthesized)
atgtgaatgaagaagaaatcaattgtctttcattgaatcaaacggaaaacctgctggcttctgctgacgactctggggcaatcaaaatcctagacttggaaaacaagaaagttatcagat

SEQ ID NO: 672797 - DNA, 120 bp, Artificial Sequence
  ENSG00000185798_7 (sequence is synthesized)
ccttgaagagacattccaatatctgctcctcagtggcttttcggcctcagaggcctcagagcctggtgtcatgtggactggatatgcaggtgatgctgtggagtcttcaaaaagcccgac

SEQ ID NO: 672798 - DNA, 120 bp, Artificial Sequence
  ENSG00000185798_8 (sequence is synthesized)
cactctggattacaaatttacaggaggatgaaacagaagaaatggaaggcccacagtcacctggtcagctcttaaaccctgccctagcccattctatctctgtggcttcgtgtggtaata

SEQ ID NO: 672799 - DNA, 120 bp, Artificial Sequence
  ENSG00000185798_9 (sequence is synthesized)
tttttagttgtggtgcagaagatggtaaggttcgaatctttcgggtgatgggagttaagtgtgaacaggaactgggatttaagggccacacttcaggggtatcccaggtctgctttctcc

SEQ ID NO: 672800 - DNA, 120 bp, Artificial Sequence
  ENSG00000185798_10 (sequence is synthesized)
cagaatcctatttgctgcttactggagggaatgatgggaagatcacgttgtgggatgcaaacagtgaagttgagaaaaaacagaagagtcccacaaaacgtacccacaggaagaaaccta

SEQ ID NO: 672801 - DNA, 120 bp, Artificial Sequence
  ENSG00000185798_11 (sequence is synthesized)
aaagaggaacttgcaccaagcagggtggaaatactaacgcttcagtaacagatgaggaagaacatggcaacattttaccaaagctaaatattgaacatggagaaaaagtgaactggctct

SEQ ID NO: 672802 - DNA, 120 bp, Artificial Sequence
  ENSG00000185798_12 (sequence is synthesized)
tgggtacaaaaataaagggacaccaaaatatattagtagctgatcaaactagttgtatatctgtataccccttaaatgaattttaaatccaataaaaacatttgaagaattgtggcaaaa

SEQ ID NO: 672803 - DNA, 120 bp, Artificial Sequence
  ENSG00000185798_13 (sequence is synthesized)
gcacgaagcaagggcgcacgcccagctcgttcgcggttcctctcggccccggatgtgactgtttggctgcgccgcctcacgcctgacgctcgacgggattgggcgccggcgggtgaggtt

SEQ ID NO: 672804 - DNA, 80 bp, Artificial Sequence
  ENSG00000185800_0 (sequence is synthesized)
gcgcccaagatggcggcgggcggcgcggagggcggctcgggccccggcgccgccatgggggactgcgcggagattaagtc

SEQ ID NO: 672805 - DNA, 120 bp, Artificial Sequence
  ENSG00000185800_1 (sequence is synthesized)
gccccggcgccgccatgggggactgcgcggagattaagtcgcaattccgcacgcgcgagggtttctacaagctactcccgggcgacggcgccgctcgcaggtcgggtccggcttccgccc

SEQ ID NO: 672806 - DNA, 80 bp, Artificial Sequence
  ENSG00000185800_2 (sequence is synthesized)
ttccgcccagactccggtgccgcctcagccaccgcagcccccgcccggccctgcctccgcctccggtcccggcgctgcag

SEQ ID NO: 672807 - DNA, 120 bp, Artificial Sequence
  ENSG00000185800_3 (sequence is synthesized)
cagcctcgtgcgcctcggggagccggacagcgccggggccggggagccgcccgccacgcccgcggggctgggctcggggggagaccgcgtctgcttcaacttgggccgtgagctctattt

SEQ ID NO: 672808 - DNA, 120 bp, Artificial Sequence
  ENSG00000185800_4 (sequence is synthesized)
gccgtgagctctatttctacccaggctgctgtcgtcgtgggagccaacggtccattgacctcaacaagccaattgacaagcggatctacaagggcacccagcccacctgccacgatttca

SEQ ID NO: 672809 - DNA, 120 bp, Artificial Sequence
  ENSG00000185800_5 (sequence is synthesized)
accagttcactgctgccaccgagaccatctcgctgctggtgggcttctcagcgggtcaagtgcagtacctggatctcatcaaaaaggacaccagcaagctgttcaatgaggagcggttga

SEQ ID NO: 672810 - DNA, 120 bp, Artificial Sequence
  ENSG00000185800_6 (sequence is synthesized)
tcgacaagaccaaggtgacatatctgaagtggctgcctgagtcggagagcctgttcctggcatcacacgccagtggccacctgtacctgtacaacgtcagccacccctgcgcctcggccc

SEQ ID NO: 672811 - DNA, 120 bp, Artificial Sequence
  ENSG00000185800_7 (sequence is synthesized)
cgccccagtacagcctgctgaagcagggcgagggcttctctgtctatgctgccaagagcaaggcaccccgcaacccgctggccaagtgggcggtgggtgaggggcccctcaacgagttcg

SEQ ID NO: 672812 - DNA, 120 bp, Artificial Sequence
  ENSG00000185800_8 (sequence is synthesized)
ccttctcgcccgatggccggcacctggcctgtgtgagccaggatggctgcctgcgcgtcttccacttcgactccatgctcctgcgtgggctcatgaagagctactttgggggcctgctgt

SEQ ID NO: 672813 - DNA, 120 bp, Artificial Sequence
  ENSG00000185800_9 (sequence is synthesized)
gtgtgtgctggagccctgacggccgctacgtggtgacgggtggcgaagatgacctggtcaccgtgtggtccttcaccgagggccgcgtggtggctcgaggccatggccacaagtcctggg

SEQ ID NO: 672814 - DNA, 120 bp, Artificial Sequence
  ENSG00000185800_10 (sequence is synthesized)
tcaacgctgtggcctttgacccctacaccacaagggcagaggaggcggcgacagcagccggtgctgatggggagcggagcggcgaagaggaggaggaggagcccgaggctgcgggcacag

SEQ ID NO: 672815 - DNA, 120 bp, Artificial Sequence
  ENSG00000185800_11 (sequence is synthesized)
gctcggccgggggcgccccgctctctccactgcccaaggctggctccattacttaccgctttggctcggcgggccaggacacgcagttctgcctgtgggacctcactgaagacgtgctct

SEQ ID NO: 672816 - DNA, 120 bp, Artificial Sequence
  ENSG00000185800_12 (sequence is synthesized)
actgaagacgtgctctacccgcacccccccctggcccgcacccgcaccctccctggcacacctggcaccacgccaccggccgccagcagctcgaggggtggcgagcctggcccaggcccc

SEQ ID NO: 672817 - DNA, 120 bp, Artificial Sequence
  ENSG00000185800_13 (sequence is synthesized)
cccgctccaacagtctcccgcacccagctggcgggggcaaggcgggcggcccgggtgtggcggcagagcctggcacaccattcagcattggccgcttcgccacgctcacactgcaggagc

SEQ ID NO: 672818 - DNA, 120 bp, Artificial Sequence
  ENSG00000185800_14 (sequence is synthesized)
aacatcagccggggtggcagtggcggcagtggcagtggtggggagaagcccagcggccctgttccccgcagccgcctggaccccgccaaggtgctgggcactgcgctgtgcccgcgcatc

SEQ ID NO: 672819 - DNA, 120 bp, Artificial Sequence
  ENSG00000185800_15 (sequence is synthesized)
cacgaggtgcccctgctggagccccttgtgtgcaagaagatcgcccaggagcggctcacagtcctcctgttcctggaggactgcatcatcactgcctgccaggagggcctcatctgcacc

SEQ ID NO: 672820 - DNA, 120 bp, Artificial Sequence
  ENSG00000185800_16 (sequence is synthesized)
tgggcccggccgggcaaggcgttcacagacgaggagaccgaggcccagacaggggaaggaagttggcccaggtcacccagcaagtcagtggtagagggcatctcctcccaaccaggcaac

SEQ ID NO: 672821 - DNA, 120 bp, Artificial Sequence
  ENSG00000185800_17 (sequence is synthesized)
tccccgagtggcacagtggtgtgaagccatggatatcgggcccccccaaccccatgcccccagcctcctagccataaccctccctgctgacctcacagatcaacgtattaacaagactaa

SEQ ID NO: 672822 - DNA, 120 bp, Artificial Sequence
  ENSG00000185800_18 (sequence is synthesized)
ccatgatggatggactgctccagtccccccacctgcacaaaatttgggggccccccagactggcccggacacgggcgatgtaatagcccttgtggcctcagccttgtcccccacccactg

SEQ ID NO: 672823 - DNA, 120 bp, Artificial Sequence
  ENSG00000185800_19 (sequence is synthesized)
ccaagtacaatgacctcttcctctgaaacatcagtgttaccctcatccctgtccccagcatgtgactggtcactcctggggagagactccccgcccctgccacaagagccccaggtctgc

SEQ ID NO: 672824 - DNA, 120 bp, Artificial Sequence
  ENSG00000185800_20 (sequence is synthesized)
agtgtgcccctcagttgagtgggcagggccgggggtggtccagccctcgcccggcccccaccccagctgcccttgctattgtctgtgcttttgaagagtgttaaattatggaagcccctc

SEQ ID NO: 672825 - DNA, 120 bp, Artificial Sequence
  ENSG00000185800_21 (sequence is synthesized)
aggttcctccctgtcccgcaggacctcttatttatactaaagttccctgttttctcagcgggtctgtccccttcggaggagatgatgtagaggacctgtgtgtgtactctgtggttctag

SEQ ID NO: 672826 - DNA, 120 bp, Artificial Sequence
  ENSG00000185800_22 (sequence is synthesized)
gcagtccgctttccccagaggaggagtgcaggcctgctcccagcccagcgcctcccaccccttttcatagcaggaaaagccggagcccagggagggaacggacctgcgagtcacacaact

SEQ ID NO: 672827 - DNA, 120 bp, Artificial Sequence
  ENSG00000185800_23 (sequence is synthesized)
ggtgacccacaccagcggctggagcaggaccctcttggggagaagagcatcctgcccgcagccagggcccctcatcaaagtcctcggtgttttttaaattatcagaactgcccaggacca

SEQ ID NO: 672828 - DNA, 120 bp, Artificial Sequence
  ENSG00000185800_24 (sequence is synthesized)
cgtttcccaggccctgcccagctgggactcctcggtccttgcctcctagtttctcaggcctggccctctcaaggcccaggcaccccaggccggttggaggccccgacttccactctggag

SEQ ID NO: 672829 - DNA, 120 bp, Artificial Sequence
  ENSG00000185800_25 (sequence is synthesized)
aaccgtccaccctggaaagaagagctcagattcctcttggctctcggagccgcagggagtgtgtcttcccgcgccaccctccaccccccgaaatgtttctgtttctaatcccagcctggg

SEQ ID NO: 672830 - DNA, 120 bp, Artificial Sequence
  ENSG00000185800_26 (sequence is synthesized)
caggaatgtggctccccggccaggggccaaggagctattttggggtctcgtttgcccagggagggcttggctccaccactttcctcccccagcctttgggcagcaggtcacccctgttca

SEQ ID NO: 672831 - DNA, 120 bp, Artificial Sequence
  ENSG00000185800_27 (sequence is synthesized)
ttcctcccccagcctttgggcagcaggtcacccctgttcaggctctgagggtgccccctcctggtcctgtcctcaccaccccttccccacctcctgggaaaaaaaaaaaaaaaaaaaaaa

SEQ ID NO: 672832 - DNA, 120 bp, Artificial Sequence
  ENSG00000185800_28 (sequence is synthesized)
cactactgttccatggcccggaggttgaggaccccgagatacaggacaattctgtggcaagcaggactgtcccctcgccaaagatgggacatcgaggctccttggagcaccctgtggcca

SEQ ID NO: 672833 - DNA, 120 bp, Artificial Sequence
  ENSG00000185800_29 (sequence is synthesized)
ccttgcagcagcctctgtttccccatgtttccatgacctggtgtccatctgtcttccccagtttgggagcttctctccgaggaggacctgggcctggtgtggcacctgctgtgtgagcgg

SEQ ID NO: 672834 - DNA, 120 bp, Artificial Sequence
  ENSG00000185800_30 (sequence is synthesized)
ggccatgtccaacggccttcttggggactttgggtcggggagaagttctgcctgggttttactgccttctcccaaccccacactgtctcccctggcagcggttgatcgacaagaccaagg

SEQ ID NO: 672835 - DNA, 120 bp, Artificial Sequence
  ENSG00000185800_31 (sequence is synthesized)
cccagcaagtcagtggtagaggtaggactgtccctgagttctttccccagcacctcagggtccctcccaagttagaagggagctccagtttccccctcccctcccacccttacccttacc

SEQ ID NO: 672836 - DNA, 120 bp, Artificial Sequence
  ENSG00000185800_32 (sequence is synthesized)
ccatggtctcactcaggatccgccaaggactttgattattgcgtgaaagtgctgactgccaggacaggaagctagctaagatgcaagttcccagcctagagcagtggcctctggggggtc

SEQ ID NO: 672837 - DNA, 120 bp, Artificial Sequence
  ENSG00000185800_33 (sequence is synthesized)
ggcggacccaagggcaaggccagggtggcagcagctttggggactctgggctggctccctccccttgacactggctgaagcccaggtggtctctaacccctcccatctctccctctcatc

SEQ ID NO: 672838 - DNA, 120 bp, Artificial Sequence
  ENSG00000185800_34 (sequence is synthesized)
ctggctccgtggggtgaggggaagccagggaaatcttagtgtctcagtacaagacctctcagatccttagagtgagggggtctagccctaggcagcaggcagcagaaagaggggtgggtg

SEQ ID NO: 672839 - DNA, 120 bp, Artificial Sequence
  ENSG00000185800_35 (sequence is synthesized)
tgagagccagctaggaattggggcatccaaggctggccgtctgaagggcagcagatgggccccacatggccaggtcttactgcctgtcactcgaaccagaatctatttctgttgaacatc

SEQ ID NO: 672840 - DNA, 120 bp, Artificial Sequence
  ENSG00000185800_36 (sequence is synthesized)
tctgtctcattctctctggtccagaggaggtgttccataaatattctcagaatgagtgaatggctgaagggagtgaacggaacagtcagtggattaaaaattcattagctcatccattca

SEQ ID NO: 672841 - DNA, 120 bp, Artificial Sequence
  ENSG00000185800_37 (sequence is synthesized)
aggggcaggaccagggagagatggagaatggggtgacagcagctaatgacagctgcctttactgtacccaggccctgtgctgtgttacccttgtgctgaatactttactccttgggtttt

SEQ ID NO: 672842 - DNA, 120 bp, Artificial Sequence
  ENSG00000185800_38 (sequence is synthesized)
tgagccaccgcgcccggccattctttgagttttcatcaaccagtggatacagaagtgtgctgcccattttgcagattagagaattgaggctagtaaataagtcgggacttagttgatgcc

SEQ ID NO: 672843 - DNA, 120 bp, Artificial Sequence
  ENSG00000185800_39 (sequence is synthesized)
cttgctctttgagttctgggctctggaggctttggattcaaagccctgctgcaccatttactcatcatgtgactttgggaaggtgaccattctctgagcctcacttctcctcctctgcaa

SEQ ID NO: 672844 - DNA, 120 bp, Artificial Sequence
  ENSG00000185800_40 (sequence is synthesized)
aatgggattccagttcctaccttgcaggaccgctgttgtagaatcatacatggagattgctcagtcctgggccaacttggcctacgaggagataccagtaaacgaccttatccgcgggca

SEQ ID NO: 672845 - DNA, 120 bp, Artificial Sequence
  ENSG00000185803_0 (sequence is synthesized)
ggcccggaaccgccacgggtgagtcgggtcgtggctgctgccgggtcctgcgcgctccggactgaggtggcgtccctgggccggacggcggtgtcccggcgtggcgggaagccggcactg

SEQ ID NO: 672846 - DNA, 120 bp, Artificial Sequence
  ENSG00000185803_1 (sequence is synthesized)
gagcgggagcgcactgggcgcgggaccgggaggcgcagggaccggacggctcccgagtcgcccacctgacgctagaagaagtcttcacttcccaggagagccaaagcgtgtctggcccta

SEQ ID NO: 672847 - DNA, 120 bp, Artificial Sequence
  ENSG00000185803_2 (sequence is synthesized)
ggtgggaaaagaactggctgtgacctttgccctgacctggaagggcccagccttgggctgaatggcagcacccacgcccgcccgtccggtgctgacccacctgctggtggctctcttcgg

SEQ ID NO: 672848 - DNA, 120 bp, Artificial Sequence
  ENSG00000185803_3 (sequence is synthesized)
catgggctcctgggctgcggtcaatgggatctgggtggagctacctgtggtggtcaaagagcttccagagggttggagcctcccctcttacgtctctgtgcttgtggctctggggaacct

SEQ ID NO: 672849 - DNA, 120 bp, Artificial Sequence
  ENSG00000185803_4 (sequence is synthesized)
gggtctgctggtggtgaccctctggaggaggctggccccaggaaaggacgagcaggtccccatccgggtggtgcaggtgctgggcatggtgggcacagccctgctggcctctctgtggca

SEQ ID NO: 672850 - DNA, 120 bp, Artificial Sequence
  ENSG00000185803_5 (sequence is synthesized)
ccatgtggccccagtggcaggacagttgcattctgtggccttcttagcactggcctttgtgctggcactggcatgctgtgcctcgaatgtcactttcctgcccttcttgagccacctgcc

SEQ ID NO: 672851 - DNA, 120 bp, Artificial Sequence
  ENSG00000185803_6 (sequence is synthesized)
acctcgcttcttacggtcattcttcctgggtcaaggcctgagtgccctgctgccctgcgtgctggccctagtgcagggtgtgggccgcctcgagtgcccgccagcccccatcaacggcac

SEQ ID NO: 672852 - DNA, 120 bp, Artificial Sequence
  ENSG00000185803_7 (sequence is synthesized)
gggtcttctgctgctgttgccgccaccaccatctgtacccacaggggagttaggatcaggcctccaggtgggagccccaggagcagaggaagaggtggaagagtcctcaccactgcaaga

SEQ ID NO: 672853 - DNA, 120 bp, Artificial Sequence
  ENSG00000185803_8 (sequence is synthesized)
gccaccaagccaggcagcaggcaccacccctggtccagaccctaaggcctatcagcttctatcagcccgcagtgcctgcctgctgggcctgttggccgccaccaacgcgctgaccaatgg

SEQ ID NO: 672854 - DNA, 120 bp, Artificial Sequence
  ENSG00000185803_9 (sequence is synthesized)
cgtgctgcctgccgtgcagagcttttcctgcttaccctacgggcgtctggcctaccacctggctgtggtgctgggcagtgctgccaatcccctggcctgcttcctggccatgggtgtgct

SEQ ID NO: 672855 - DNA, 120 bp, Artificial Sequence
  ENSG00000185803_10 (sequence is synthesized)
gtgcaggtccttggcagggctgggcggcctctctctgctgggcgtgttctgtgggggctacctgatggcgctggcagtcctgagcccctgcccgcccctggtgggcacctcggcgggggt

SEQ ID NO: 672856 - DNA, 120 bp, Artificial Sequence
  ENSG00000185803_11 (sequence is synthesized)
ggtcctcgtggtgctgtcgtgggtgctgtgtcttggcgtgttctcctacgtgaaggtggcagccagctccctgctgcatggcgggggccggccggcattgctggcagccggcgtggccat

SEQ ID NO: 672857 - DNA, 120 bp, Artificial Sequence
  ENSG00000185803_12 (sequence is synthesized)
ccaggtgggctctctgctcggcgctgttgctatgttccccccgaccagcatctatcacgtgttccacagcagaaaggactgtgcagacccctgtgactcctgagcctgggcaggtgggga

SEQ ID NO: 672858 - DNA, 120 bp, Artificial Sequence
  ENSG00000185803_13 (sequence is synthesized)
ccccgctccccaacacctgtctttccctcaatgctgccaccatgcctgagtgcctgcagcccaggaggcccgcacaccggtacactcgtggacacctacacactccataggagatcctgg

SEQ ID NO: 672859 - DNA, 120 bp, Artificial Sequence
  ENSG00000185803_14 (sequence is synthesized)
ctttccagggtgggcaagggcaaggagcaggcttggagccagggaccagtgggggctgtagggtaagcccctgagcctgggacctacatgtggtttgcgtaataaaacatttgtatttaa

SEQ ID NO: 672860 - DNA, 120 bp, Artificial Sequence
  ENSG00000185803_15 (sequence is synthesized)
atgccgggggcgggcccggaaccgccacgggtgagtcgggtcgtggctgctgccgggtcctgcgcgctccggactgagaagaagtcttcacttcccaggagagccaaagcgtgtctggcc

SEQ ID NO: 672861 - DNA, 120 bp, Artificial Sequence
  ENSG00000185803_16 (sequence is synthesized)
tccgagcagagccgtcccggccactcccctgggatctgacttggctcttgcggtcgcgggcaccgtgaagccctggggtgtgcgtggctcctcctgctagaagaagtcttcacttcccag

SEQ ID NO: 672862 - DNA, 120 bp, Artificial Sequence
  ENSG00000185803_17 (sequence is synthesized)
ggagggctccactcgctccttcggcctcctcccctggggccgcagcgactcgggccggcttcctgcttccctgcctgccggcggtcccgctggctagaagaagtcttcacttcccaggag

SEQ ID NO: 672863 - DNA, 120 bp, Artificial Sequence
  ENSG00000185803_18 (sequence is synthesized)
ctcttgcttctgcacctgcgggcgccacgcggagagtctgagcggcgcggggccggccctcaggggaggagggcggtgggggtcgggcccaggggctcacacctctctcagggagctgaa

SEQ ID NO: 672864 - DNA, 120 bp, Artificial Sequence
  ENSG00000185803_19 (sequence is synthesized)
agaagctattgttcttgaggcgtctggccaggtggcgctccgggcaggcctacttgggtgtccccgcctctgatacctccctgctggaggaaacagcaggaaaagagaaccaggcaggca

SEQ ID NO: 672865 - DNA, 120 bp, Artificial Sequence
  ENSG00000185803_20 (sequence is synthesized)
ggcagacatccccacggagcagcgttgggcccccaaggtgcctgacccacttcctagagtactgaacagtcccagagtgtcacagctgatgtgcaggacagcctggagctctcaccttca

SEQ ID NO: 672866 - DNA, 120 bp, Artificial Sequence
  ENSG00000185803_21 (sequence is synthesized)
gggtcagcctctggagctgtgaaaacctgggccgacagcggaggcagagctgcactaatgttcccacacgagtccttcccacccaacaccttggtgcagggagacggaaggagcctggag

SEQ ID NO: 672867 - DNA, 120 bp, Artificial Sequence
  ENSG00000185803_22 (sequence is synthesized)
ccagggctagaagaagtcttcacttcccaggagagccaaagcgtgtctggccctaggtgggaaaagaactggctgtgacctttgccctgacctggaagggcccagccttgggctgaatgg

SEQ ID NO: 672868 - DNA, 120 bp, Artificial Sequence
  ENSG00000185803_23 (sequence is synthesized)
gcccggggctcccccagttcccctggtctcaccctgttctgactccggctctgcatcctatctgtttctctgtttctttcaagctagaagaagtcttcacttcccaggagagccaaagcg

SEQ ID NO: 672869 - DNA, 120 bp, Artificial Sequence
  ENSG00000185803_24 (sequence is synthesized)
tgttcttgaggcgtctggccaggtggcgctccgggcaggtgagtcctaggaaccagagctggaagcgccagccgatggaggtcgtgggcaggctgccggcccggcccttaggcatctgag

SEQ ID NO: 672870 - DNA, 120 bp, Artificial Sequence
  ENSG00000185808_0 (sequence is synthesized)
cacgcccgcccccgcgctcgctggctcccacccggggagggtcgttgtgcgcctgcgccagggtgggggttgccgtcgcgcctaggcctttccctcaggttttcctcttccccactgcgg

SEQ ID NO: 672871 - DNA, 120 bp, Artificial Sequence
  ENSG00000185808_1 (sequence is synthesized)
ctccccagtcggcgcttgcgcggagaactcagcgctgagattgtctaaagccccaggaaaaatggtggaaaattcaccgtcgccattgccagaaagagcgatttatggctttgttctttt

SEQ ID NO: 672872 - DNA, 120 bp, Artificial Sequence
  ENSG00000185808_2 (sequence is synthesized)
cttaagctcccaatttggcttcatactttacctcgtgtgggcctttattcctgaatcttggctaaactctttaggtttaacctattggcctcaaaaatattgggcagttgcattacctgt

SEQ ID NO: 672873 - DNA, 120 bp, Artificial Sequence
  ENSG00000185808_3 (sequence is synthesized)
ctacctccttattgctatagtaattggctacgtgctcttgtttgggattaacatgatgagtacctctccactcgactccatccatacaatcacagataactatgcaaaaaatcaacagca

SEQ ID NO: 672874 - DNA, 120 bp, Artificial Sequence
  ENSG00000185808_4 (sequence is synthesized)
gaagaaataccaagaggaggccattccagccttaagagatatttctattagtgaagtaaaccaaatgttctttcttgcagccaaagaactttacaccaaaaactgaactgtgtgtaacca

SEQ ID NO: 672875 - DNA, 120 bp, Artificial Sequence
  ENSG00000185808_5 (sequence is synthesized)
tagtaacaccaagcacgtatttatttataagtttttgccattataattttgaccataaattaatttgaccatctctcttattaatagagaagtaaaaaatgtaagttgaccttctcttag

SEQ ID NO: 672876 - DNA, 120 bp, Artificial Sequence
  ENSG00000185808_6 (sequence is synthesized)
attatgttcaatgaatattgtaaatgttcaagtattgttaatgaatagaataaatacaatattgcattcccatatagcagacttaaaaaaaaaaatcaatgtcagtataatcaagaagtt

SEQ ID NO: 672877 - DNA, 120 bp, Artificial Sequence
  ENSG00000185808_7 (sequence is synthesized)
cctccagagaggcatttatattgtaatttgcaaagggcaatgatgtccttcctcctgtttgtcctgaggggcccagaattcaaacccttagtttttgggaagggtacagttagtacttgt

SEQ ID NO: 672878 - DNA, 120 bp, Artificial Sequence
  ENSG00000185808_8 (sequence is synthesized)
gccatcagattcatgtctaagacacaaatatttgttgagtactcactgtgtaccaggtatttttctaggcactgaggatgaagtaatggtaagattctctctcaaagagcttatagtttt

SEQ ID NO: 672879 - DNA, 120 bp, Artificial Sequence
  ENSG00000185808_9 (sequence is synthesized)
agaagcagggtgaggcaactaagcaaataaacaaggaaatataatttgatgagtgctatgcaaagaattaagataatgtattctagaatgcaaagggatgactagttcacattgggtggt

SEQ ID NO: 672880 - DNA, 120 bp, Artificial Sequence
  ENSG00000185808_10 (sequence is synthesized)
caaggaaggcctctcagagagaggctgttgggatctaagtataaagcaggtgaggcaaagaccataaggtgggaaggaacttggtttgtcctaagaacagagagaagactggcattgggc

SEQ ID NO: 672881 - DNA, 120 bp, Artificial Sequence
  ENSG00000185808_11 (sequence is synthesized)
atagagcataccaaacaagagagaatgtggtcccaggtgagcctggagagaccgggcccagattgtgaagggctttgtaggctggtgtaggaagtgtggatttaagtgtaagtgtgatga

SEQ ID NO: 672882 - DNA, 120 bp, Artificial Sequence
  ENSG00000185808_12 (sequence is synthesized)
gtttgaggcactttaggatcaagctgttgggagtcttgaaggaaaggaatgacatggcctgatttctgtttttaaaagtcatcctgattggtgaatgaagaatagattcagaggaggagc

SEQ ID NO: 672883 - DNA, 120 bp, Artificial Sequence
  ENSG00000185808_13 (sequence is synthesized)
tgggaaggggacaataaccatatccttacccagtaagcatgagatggataacatgaatctgcttttcctgttccctagtttgtcccagttcctgttattttatggtgagagcatgtcacc

SEQ ID NO: 672884 - DNA, 69 bp, Artificial Sequence
  ENSG00000185808_14 (sequence is synthesized)
tgtcccagttcctgttattttatggtgagagcatgtcaccacacttaagagcagtataaggggactctg

SEQ ID NO: 672885 - DNA, 120 bp, Artificial Sequence
  ENSG00000185808_15 (sequence is synthesized)
cgagatcatgccactgcactccagccttagcaacagagcgagacggttaccttggcaaccgtctcaaaaaaaaaagaaacaaaaaaaagcagtgtaagggaaccagcgaactccaccaag

SEQ ID NO: 672886 - DNA, 120 bp, Artificial Sequence
  ENSG00000185808_16 (sequence is synthesized)
aactccaccaagtatagaatgataaataaatcatggtctgtttctacaattgaacactacacagccatgcaaacaagaatgcattacttctctacctaataatatgaattaatatggcca

SEQ ID NO: 672887 - DNA, 120 bp, Artificial Sequence
  ENSG00000185808_17 (sequence is synthesized)
taacattgggcaaaaaaagccagacacaaaagagtaaactactgcgtggttccctttatttgaagttcaaaatcaggaaaaactaatctatggtggcaaatattagaataatggttacct

SEQ ID NO: 672888 - DNA, 120 bp, Artificial Sequence
  ENSG00000185808_18 (sequence is synthesized)
ttggagaagagtattatctaggaggaggcatgaaggagcctgctggtgaattgaaaatgccctacatcttgatctgggtggtggttatggttacatggaggtaatacatgtttttaaaaa

SEQ ID NO: 672889 - DNA, 120 bp, Artificial Sequence
  ENSG00000185808_19 (sequence is synthesized)
atcattaagttattaagatttctgcttctgatgcaagttacacctcaataaaaaggggaaaaaaaaacagtgcctatgcctacctccagaaaatgttgattcattggtctggagtagagc

SEQ ID NO: 672890 - DNA, 120 bp, Artificial Sequence
  ENSG00000185808_20 (sequence is synthesized)
acaggcaggggtaattttttaacatcttccagatgcttccaatatgcagccagggtcgagaatgactcccttacatgattggactcccttacatgattggactcccttacatgattggac

SEQ ID NO: 672891 - DNA, 120 bp, Artificial Sequence
  ENSG00000185808_21 (sequence is synthesized)
tcccttacatgattggactcccttacatgattagacttaactgagttttggtcaagcagggcagtagctgtaagctttggaagagaaagccagcagttatccgagcggttccctcccatc

SEQ ID NO: 672892 - DNA, 120 bp, Artificial Sequence
  ENSG00000185808_22 (sequence is synthesized)
tgtgagactcttgctcatgtcagcagtattcccttgtcttcccctcggacaggtgatgggcctgagacgggtttgaaataggtcaggatagaaccttcatggactctagtgttctattgc

SEQ ID NO: 672893 - DNA, 120 bp, Artificial Sequence
  ENSG00000185808_23 (sequence is synthesized)
acattaagcctcaaattaacttttcattctggtttccaaccactctgtccttacaggtcatgaaaggaacaccaatgttttgcaaactatgggcagcagtgtttttgagggtcatgatca

SEQ ID NO: 672894 - DNA, 120 bp, Artificial Sequence
  ENSG00000185808_24 (sequence is synthesized)
gtttagtgtagcaattctctatcttttcttaagatcttaggacccctttattcttgtaaagagtgagagccccaaagaccttttgtgtatgtagatatatttaaaaattaaaatagaaaa

SEQ ID NO: 672895 - DNA, 120 bp, Artificial Sequence
  ENSG00000185808_25 (sequence is synthesized)
tttttaaatatttgtttataaataatacgttaccttttagatataaaattaactcatcacataatgagaaacaaaatttctgttacagaaacatttcacccaaatcattgtagtaatact

SEQ ID NO: 672896 - DNA, 120 bp, Artificial Sequence
  ENSG00000185808_26 (sequence is synthesized)
aagctgattctaaaaggacaaatttaacataaacatattcatgagaaataactattttctaaaacaaaaaaattcagtgagacaagtagaattgttttacatttctccaagtctctttaa

SEQ ID NO: 672897 - DNA, 120 bp, Artificial Sequence
  ENSG00000185808_27 (sequence is synthesized)
tgtctggcttcatggaacacagccgtttctcatatctgcttgtgcattcagtctgtgacattagcgcctgtcacgaagcctctggaaagctccgctgcatagtcatgagagaacgaggat

SEQ ID NO: 672898 - DNA, 120 bp, Artificial Sequence
  ENSG00000185808_28 (sequence is synthesized)
ttttgacctcataggccccctgaaatatggtcttgggacccccggactttgagaaccactggttagtgggcctccactagtgtgtgtgtgatgaactagaatagaatatgtcagtgcatt

SEQ ID NO: 672899 - DNA, 120 bp, Artificial Sequence
  ENSG00000185808_29 (sequence is synthesized)
gcactcagtaagggtgaatattttgactgaacgtctgtttcaaccacttcagagcctctctgttcacctcttactccagccactgatgccccaaacagttcatgcaaatttaaccacatc

SEQ ID NO: 672900 - DNA, 120 bp, Artificial Sequence
  ENSG00000185808_30 (sequence is synthesized)
cacataggtgcctcttatagtacactctggaaggagaggggttaacacccacaggaccagcctggagcccaacctgggagaggtatcagtggatatacacatccttctttcagcccggag

SEQ ID NO: 672901 - DNA, 120 bp, Artificial Sequence
  ENSG00000185808_31 (sequence is synthesized)
gagacagttctgcactgcattccatgagctcctcagaaggtctcatgggattgaactgcggttgccacgatggtggtggactcagcccacgtgcttgtctgtctgatgtgttttgcaccc

SEQ ID NO: 672902 - DNA, 120 bp, Artificial Sequence
  ENSG00000185808_32 (sequence is synthesized)
tctgccacttggccctgctctctgtggtcactttcccagtaaattgcctgcacacaagcctttgtcccagtctctgctttcagaactccagctgagatgttttttgtttttggtattttt

SEQ ID NO: 672903 - DNA, 86 bp, Artificial Sequence
  ENSG00000185808_33 (sequence is synthesized)
cagaactccagctgagatgttttttgtttttggtatttttgagacaggatcaaagctggaatgcagtggtgccatcatgatcctcc

SEQ ID NO: 672904 - DNA, 120 bp, Artificial Sequence
  ENSG00000185808_34 (sequence is synthesized)
cgctatgcctagctaatctttttattttttttttttttgtagtgacagggtctccctgtgttgcccaggctgtgagatgtttttgttttgtaaaaattgtgcttctgccatgatgtataa

SEQ ID NO: 672905 - DNA, 120 bp, Artificial Sequence
  ENSG00000185808_35 (sequence is synthesized)
tgcatgtcctaatttaagaaaaaagtttgaaagacactgttctgcaatgagcccaaataatagcctaaaatactccaaatagaaagtgtcaataatataaaaatttccatatattaacaa

SEQ ID NO: 672906 - DNA, 120 bp, Artificial Sequence
  ENSG00000185808_36 (sequence is synthesized)
aaccttctccagtgattcaactcccagggagaaataaaagcccaagtatgaaatcacctaatgaaaagccaacataatttaaatccaaaattctgctccccctaatttcttgacctgccc

SEQ ID NO: 672907 - DNA, 120 bp, Artificial Sequence
  ENSG00000185808_37 (sequence is synthesized)
tgttttagttaaaaggatctcaatcagatgtttgggtttcctcaggaagctgctgcctaggctgtcataagaatgggagtcattccttaagcacattgacccaacccaaaatttcttgca

SEQ ID NO: 672908 - DNA, 120 bp, Artificial Sequence
  ENSG00000185808_38 (sequence is synthesized)
tctcccagttttttaaagattcagtaggctatatgaaaatgtcatattaacagtcccatgcccatggaactttgaaaatccaaataaatcaactcctacagcaatagtgatggaacccag

SEQ ID NO: 672909 - DNA, 120 bp, Artificial Sequence
  ENSG00000185808_39 (sequence is synthesized)
tacattgtatagtacagacccaccagccagtaactagaacagacttgatgggacatggggaaaggaagacagaaaacggaagaggaaagagagattcttcttgattcatcgtgctggggt

SEQ ID NO: 672910 - DNA, 120 bp, Artificial Sequence
  ENSG00000185808_40 (sequence is synthesized)
gcaggtcaggctatggcagttttcatgggtctcagtcactcagtttaacacaattaggttcatggtggcactatttactattttgggttgggaggaaatgtacttatcccaccttttcta

SEQ ID NO: 672911 - DNA, 120 bp, Artificial Sequence
  ENSG00000185808_41 (sequence is synthesized)
gtcaggagagtttgtcattccatggtaaaataaataaataaataataatcctaaattgtcaatggcttaacataacagtttagttttcaaagaactgcactttgaggtagccaccaaatc

SEQ ID NO: 672912 - DNA, 120 bp, Artificial Sequence
  ENSG00000185808_42 (sequence is synthesized)
tgaacagggccacatggacaagcacagtggatgtttcagtgattacctatctggacctatgactgaggaccagatattcttttcctctctgtgcctcatcaccacttaagtctcagaggt

SEQ ID NO: 672913 - DNA, 120 bp, Artificial Sequence
  ENSG00000185808_43 (sequence is synthesized)
cagaaatgcaatggaaatctcaattagggaccaaaggactcacagagtgagaaatgatggcattgtggaaaatacagtcttgaacaagggcatttgtggaccaagatttatattttcaca

SEQ ID NO: 672914 - DNA, 120 bp, Artificial Sequence
  ENSG00000185808_44 (sequence is synthesized)
caatgcaggggaagttaatgtccaataattcaatacctgcctaaggttatttctgcaaatccagcatgcccaagctctgcttgtataggttacagtcacaggggaccctatggccagggc

SEQ ID NO: 672915 - DNA, 120 bp, Artificial Sequence
  ENSG00000185808_45 (sequence is synthesized)
tggaagaagccagctagagcctcacagtgactcagatgccacactccaattgcactgtagtcagcccacttgtgtcataaagcctgtttacacaaagcctagcatattagaagcagctgt

SEQ ID NO: 672916 - DNA, 120 bp, Artificial Sequence
  ENSG00000185808_46 (sequence is synthesized)
gagtcagcctgcttcagctgctgctgctgccccaagaggcccatctctccctgtgatactttggtttctaaggcaacctcttttgaatgttctcagtgaatgcaccatgggtgggcacat

SEQ ID NO: 672917 - DNA, 120 bp, Artificial Sequence
  ENSG00000185808_47 (sequence is synthesized)
cctggggaaagttcagtcactcactcctcaccaccattctgtgaaggacttacgcacctggcaagaattaaaatgcagtgtctaccttattgctgatggagcccgattttcaagtgctgc

SEQ ID NO: 672918 - DNA, 120 bp, Artificial Sequence
  ENSG00000185808_48 (sequence is synthesized)
ataagcctgaagccaaaatcatgctttcttccctaaatctagacttggggactgatgtgaggaggactgggcctgcagacctggagacatggcctgaccagctgcatgctcaggaggtgg

SEQ ID NO: 672919 - DNA, 120 bp, Artificial Sequence
  ENSG00000185808_49 (sequence is synthesized)
cagggccaggtggatagcagacaactccatgcagtcactcttggctcgttttcacccatcggctaagtcacagctcttcccaggggtataaagaatatggggggttgggcgcggtggctc

SEQ ID NO: 672920 - DNA, 120 bp, Artificial Sequence
  ENSG00000185808_50 (sequence is synthesized)
agtgaaactccatctcaaaaaataaaaaagaatatagggaagacagagtggcagaagtggcttcctcactactaccccaaaaagactgaagtgttgcaattgttgaggcaaaaacatgat

SEQ ID NO: 672921 - DNA, 120 bp, Artificial Sequence
  ENSG00000185808_51 (sequence is synthesized)
aacatgatggctcccagacactagccacttgggctgtctcctgttttcccctattttaaacaatgagtacaacaaacatcttttgtggataaactttatgaaattgtgtccttgggctag

SEQ ID NO: 672922 - DNA, 120 bp, Artificial Sequence
  ENSG00000185808_52 (sequence is synthesized)
gtggataaactttatgaaattgtgtccttgggctaggcttcttgtattggaattactacagggtcaaagagcttgaatgttgatatggttcagctctgtgtccccacccaaatctcatct

SEQ ID NO: 672923 - DNA, 120 bp, Artificial Sequence
  ENSG00000185808_53 (sequence is synthesized)
gtgggaggtgactggatcatgggagtggtttccccaaagctgttctcctgaaagtgagggaggcctcacgagatctgatgatttaaaagtggcagtttcccctgcattctatctctgtct

SEQ ID NO: 672924 - DNA, 120 bp, Artificial Sequence
  ENSG00000185808_54 (sequence is synthesized)
atttaaaagtggcagtttcccctgcattctatctctgtctctccttccactatgtaagacacgccttgcttccccttcaccttctgccgtgaatgtaagtttcctgaggcctccccagcc

SEQ ID NO: 672925 - DNA, 120 bp, Artificial Sequence
  ENSG00000185808_55 (sequence is synthesized)
tcccacagggaggccacgcttgcagagctggagcgcgcgtctatcgccccagaacccccctccctgccctatcctccgccaccccttctgttgcggggcgcgcgccagcctgggtgtctg

SEQ ID NO: 672926 - DNA, 120 bp, Artificial Sequence
  ENSG00000185808_56 (sequence is synthesized)
tatgcgctcgaggcgggggcgcgggttgcggacggaggcgcgggaggcggttctgcgcggcgggggccgtacccgcggcggagcgaggaggcgagaatggatcaatggtgccacggagca

SEQ ID NO: 672927 - DNA, 120 bp, Artificial Sequence
  ENSG00000185808_57 (sequence is synthesized)
ggccgaggtgtcgggaggggcctgggtgggcgtatgaaggacccgaggtcgagggcccccccataccccgcctcgaatgagaaatagaagtctccacgaatgggcagggcccggggcctg

SEQ ID NO: 672928 - DNA, 120 bp, Artificial Sequence
  ENSG00000185808_58 (sequence is synthesized)
aaaaatctgaagggatctcgtgtttgctgagtgttccgtgtgccagcactagcctaggaggttttagtctctacaaatatttatacagcaccagacgcgatggcaaagtggataaagcct

SEQ ID NO: 672929 - DNA, 120 bp, Artificial Sequence
  ENSG00000185808_59 (sequence is synthesized)
attgtctaaagccccaggaaaaatggtggaaaattcaccgtcgccattgccagaaagagcgatttatggctttgttcttttcttaagctcccaatttggcttcaatattgggcagttgca

SEQ ID NO: 672930 - DNA, 120 bp, Artificial Sequence
  ENSG00000185808_60 (sequence is synthesized)
ttgaggagtcatatcatttcttaaacctacccaaatcttaaatatttgttctcttaaaattcatgaatagccatatagaaattgaaagctttttaaagatcgctattgatacatctctaa

SEQ ID NO: 672931 - DNA, 120 bp, Artificial Sequence
  ENSG00000185808_61 (sequence is synthesized)
ttaaagatggtagcatgaacacacatgtttatctccatccatttcctccaaaaatcttgttaaaatgaccctacaggaaaaaaaaaaaaaactgaagatacaaaccacagaaacaatagt

SEQ ID NO: 672932 - DNA, 80 bp, Artificial Sequence
  ENSG00000185811_0 (sequence is synthesized)
actctaacaagtgactgcgcggcccgcgcccggggcggtgactgcggcaagccccctgggtccccgcgcggcgcatccca

SEQ ID NO: 672933 - DNA, 120 bp, Artificial Sequence
  ENSG00000185811_1 (sequence is synthesized)
tggcagggcagagggagccccggctccgaggttgctcttcgcacccgaggatcagtcttggccccaaagcgcgacgcacaaatccacataacctgaggaccatggatgctgatgagggtc

SEQ ID NO: 672934 - DNA, 120 bp, Artificial Sequence
  ENSG00000185811_2 (sequence is synthesized)
aagacatgtcccaagtttcagggaaggaaagcccccctgtaagcgatactccagatgagggcgatgagcccatgccgatccccgaggacctctccaccacctcgggaggacagcaaagct

SEQ ID NO: 672935 - DNA, 120 bp, Artificial Sequence
  ENSG00000185811_3 (sequence is synthesized)
ccaagagtgacagagtcgtggccagtaatgttaaagtagagactcagagtgatgaagagaatgggcgtgcctgtgaaatgaatggggaagaatgtgcggaggatttacgaatgcttgatg

SEQ ID NO: 672936 - DNA, 120 bp, Artificial Sequence
  ENSG00000185811_4 (sequence is synthesized)
cctcgggagagaaaatgaatggctcccacagggaccaaggcagctcggctttgtcgggagttggaggcattcgacttcctaacggaaaactaaagtgtgatatctgtgggatcatttgca

SEQ ID NO: 672937 - DNA, 120 bp, Artificial Sequence
  ENSG00000185811_5 (sequence is synthesized)
tcgggcccaatgtgctcatggttcacaaaagaagccacactggagaacggcccttccagtgcaatcagtgcggggcctcattcacccagaagggcaacctgctccggcacatcaagctgc

SEQ ID NO: 672938 - DNA, 120 bp, Artificial Sequence
  ENSG00000185811_6 (sequence is synthesized)
attccggggagaagcccttcaaatgccacctctgcaactacgcctgccgccggagggacgccctcactggccacctgaggacgcactccgttggtaaacctcacaaatgtggatattgtg

SEQ ID NO: 672939 - DNA, 120 bp, Artificial Sequence
  ENSG00000185811_7 (sequence is synthesized)
gccgaagctataaacagcgaagctctttagaggaacataaagagcgctgccacaactacttggaaagcatgggccttccgggcacactgtacccagtcattaaagaagaaactaatcaca

SEQ ID NO: 672940 - DNA, 120 bp, Artificial Sequence
  ENSG00000185811_8 (sequence is synthesized)
gtgaaatggcagaagacctgtgcaagataggatcagagagatctctcgtgctggacagactagcaagtaacgtcgccaaacgtaagagctctatgcctcagaaatttcttggggacaagg

SEQ ID NO: 672941 - DNA, 120 bp, Artificial Sequence
  ENSG00000185811_9 (sequence is synthesized)
gcctgtccgacacgccctacgacagcagcgccagctacgagaaggagaacgaaatgatgaagtcccacgtgatggaccaagccatcaacaacgccatcaactacctgggggccgagtccc

SEQ ID NO: 672942 - DNA, 120 bp, Artificial Sequence
  ENSG00000185811_10 (sequence is synthesized)
tgcgcccgctggtgcagacgcccccgggcggttccgaggtggtcccggtcatcagcccgatgtaccagctgcacaagccgctcgcggagggcaccccgcgctccaaccactcggcccagg

SEQ ID NO: 672943 - DNA, 120 bp, Artificial Sequence
  ENSG00000185811_11 (sequence is synthesized)
acagcgccgtggagaacctgctgctgctctccaaggccaagttggtgccctcggagcgcgaggcgtccccgagcaacagctgccaagactccacggacaccgagagcaacaacgaggagc

SEQ ID NO: 672944 - DNA, 120 bp, Artificial Sequence
  ENSG00000185811_12 (sequence is synthesized)
agcgcagcggtctcatctacctgaccaaccacatcgccccgcacgcgcgcaacgggctgtcgctcaaggaggagcaccgcgcctacgacctgctgcgcgccgcctccgagaactcgcagg

SEQ ID NO: 672945 - DNA, 120 bp, Artificial Sequence
  ENSG00000185811_13 (sequence is synthesized)
acgcgctccgcgtggtcagcaccagcggggagcagatgaaggtgtacaagtgcgaacactgccgggtgctcttcctggatcacgtcatgtacaccatccacatgggctgccacggcttcc

SEQ ID NO: 672946 - DNA, 120 bp, Artificial Sequence
  ENSG00000185811_14 (sequence is synthesized)
gtgatccttttgagtgcaacatgtgcggctaccacagccaggaccggtacgagttctcgtcgcacataacgcgaggggagcaccgcttccacatgagctaaagccctcccgcgcccccac

SEQ ID NO: 672947 - DNA, 120 bp, Artificial Sequence
  ENSG00000185811_15 (sequence is synthesized)
cccagaccccgagccaccccaggaaaagcacaaggactgccgccttctcgctcccgccagcagcatagactggactggaccagacaatgttgtgtttggatttgtaactgttttttgttt

SEQ ID NO: 672948 - DNA, 120 bp, Artificial Sequence
  ENSG00000185811_16 (sequence is synthesized)
tttgtttgagttggttgattggggtttgatttgcttttgaaaagatttttatttttagaggcagggctgcattgggagcatccagaactgctaccttcctagatgtttccccagaccgct

SEQ ID NO: 672949 - DNA, 120 bp, Artificial Sequence
  ENSG00000185811_17 (sequence is synthesized)
ggctgagattccctcacctgtcgcttcctagaatccccttctccaaacgattagtctaaattttcagagagaaatagataaaacacgccacagcctgggaaggagcgtgctctaccctgt

SEQ ID NO: 672950 - DNA, 120 bp, Artificial Sequence
  ENSG00000185811_18 (sequence is synthesized)
gctaagcacggggttcgcgcaccaggtgtctttttccagtccccagaagcagagagcacagcccctgctgtgtgggtctgcaggtgagcagacaggacaggtgtgccgccacccaagtgc

SEQ ID NO: 672951 - DNA, 120 bp, Artificial Sequence
  ENSG00000185811_19 (sequence is synthesized)
caagacacagcagggccaacaacctgtgcccaggccagcttcgagctacatgcatctagggcggagaggctgcacttgtgagagaaaatactatttcaagtcatattctgcgtaggaaaa

SEQ ID NO: 672952 - DNA, 120 bp, Artificial Sequence
  ENSG00000185811_20 (sequence is synthesized)
tgaattggttggggaaagtcgtgtctgtcagactgccctgggtggagggagacgccgggctagagcctttgggatcgtcctggattcactggctttgcggaggctgctcagatggcctga

SEQ ID NO: 672953 - DNA, 120 bp, Artificial Sequence
  ENSG00000185811_21 (sequence is synthesized)
gcctcccgaggcttgctgccccgtaggaggagactgtcttcccgtgggcatatctggggagccctgttccccgctttttcactcccatacctttaatggcccccaaaatctgtcactaca

SEQ ID NO: 672954 - DNA, 120 bp, Artificial Sequence
  ENSG00000185811_22 (sequence is synthesized)
atttaaacaccagtcccgaaatttggatcttctttctttttgaatctctcaaacggcaacattcctcagaaaccaaagctttatttcaaatctcttccttccctggctggttccatctag

SEQ ID NO: 672955 - DNA, 120 bp, Artificial Sequence
  ENSG00000185811_23 (sequence is synthesized)
taccagaggcctcttttcctgaagaaatccaatcctagccctcattttaattatgtacatctgtttgtagccacaagcctgaatttctcagtgttggtaagtttctttacctaccctcac

SEQ ID NO: 672956 - DNA, 120 bp, Artificial Sequence
  ENSG00000185811_24 (sequence is synthesized)
tatatattattctcgttttaaaacccataaaggagtgatttagaacagtcattaattttcaactcaatgaaatatgtgaagcccagcatctctgttgctaacacacagagctcacctgtt

SEQ ID NO: 672957 - DNA, 120 bp, Artificial Sequence
  ENSG00000185811_25 (sequence is synthesized)
tgaaaccaagctttcaaacatgttgaagctctttactgtaaaggcaagccagcatgtgtgtccacacatacataggatggctggctctgcacctgtaggatattggaatgcacagggcaa

SEQ ID NO: 672958 - DNA, 120 bp, Artificial Sequence
  ENSG00000185811_26 (sequence is synthesized)
agaccttcggagagtaatgccaccagatcccctaggaaagaggaggcaaatggcactgcaggtgagaaccccgcccatccgtgctatgacatggaggcactgaagcccgaggaaggtgtg

SEQ ID NO: 672959 - DNA, 120 bp, Artificial Sequence
  ENSG00000185811_27 (sequence is synthesized)
tggagattctaatcccaacaagcaagggtctccttcaagattaatgctatcaatcattaaggtcattactctcaaccacctaggcaatgaagaatataccatttcaaatatttacagtac

SEQ ID NO: 672960 - DNA, 120 bp, Artificial Sequence
  ENSG00000185811_28 (sequence is synthesized)
ttgtcttcaccaacactgtcccaaggtgaaatgaagcaacagagaggaaattgtacataagtacctcagcatttaatccaaacaggggttcttagtctcagcactatgacattttgggct

SEQ ID NO: 672961 - DNA, 120 bp, Artificial Sequence
  ENSG00000185811_29 (sequence is synthesized)
gactacttatttgttaggcgggagctctcctgtgcattgtaggataattagcagtatccctggtggctacccaatagacgccagtagcaccccgaattgacaacccaaactctccagaca

SEQ ID NO: 672962 - DNA, 120 bp, Artificial Sequence
  ENSG00000185811_30 (sequence is synthesized)
tcaccaactgtcccctgcgaggagaaatcactcctgggggagaaccactgacccaaatgaattctaaaccaatcaaatgtctgggaagccctccaagaaaaaaaatagaaaagcacttga

SEQ ID NO: 672963 - DNA, 120 bp, Artificial Sequence
  ENSG00000185811_31 (sequence is synthesized)
agaatattcccaatattcccggtcagcagtatcaaggctgacttgtgttcatgtggagtcattataaattctataaatcaattattccccttcggtcttaaaaatatatttcctcataaa

SEQ ID NO: 672964 - DNA, 120 bp, Artificial Sequence
  ENSG00000185811_32 (sequence is synthesized)
catttgagttttgttgaaaagatggagtttacaaagataccattcttgagtcatggatttctctgctcacagaagggtgtggcatttggaaacgggaataaacaaaattgctgcaccaat

SEQ ID NO: 672965 - DNA, 120 bp, Artificial Sequence
  ENSG00000185811_33 (sequence is synthesized)
gcactgagtgaaggaagagagacagaggatcaagggctttagacagcactccttcaatatgcaatcacagagaaagatgcgccttatccaagttaatatctctaaggtgagagccttctt

SEQ ID NO: 672966 - DNA, 120 bp, Artificial Sequence
  ENSG00000185811_34 (sequence is synthesized)
agagtcagtttgttgcaaatttcacctactctgttcttttccatccatccccctgagtcagttggttgaagggagttattttttcaagtggaattcaaacaaagctcaaaccagaactgt

SEQ ID NO: 672967 - DNA, 120 bp, Artificial Sequence
  ENSG00000185811_35 (sequence is synthesized)
aaatagtgattgcaggaattcttttctaaactgctttgccctttcctctcactgccttttatagccaatataaatgtctctttgcacaccttttgttgtggttttatattgtaacaccat

SEQ ID NO: 672968 - DNA, 120 bp, Artificial Sequence
  ENSG00000185811_36 (sequence is synthesized)
ttttctttgaaactattgtatttaaagtaaggtttcatattatgtcagcaagtaattaacttatgtttaaaaggtggccatatcatgtaccaaaagttgctgaagtttctcttctagctg

SEQ ID NO: 672969 - DNA, 120 bp, Artificial Sequence
  ENSG00000185811_37 (sequence is synthesized)
gtaaagtaggagtttgcatgacttcacactttttttgcgtagtttcttctgttgtatgatggcgtgagtgtgtgtcttgggtaccgctgtgtactactgtgtgcctagattccatgcact

SEQ ID NO: 672970 - DNA, 120 bp, Artificial Sequence
  ENSG00000185811_38 (sequence is synthesized)
ctcgttgtgtttgaagtaaatattggagaccggagggtaacaggttggcctgttgattacagctagtaatcgctgtgtcttgttccgccccctccctgacaccccagcttcccaggatgt

SEQ ID NO: 672971 - DNA, 120 bp, Artificial Sequence
  ENSG00000185811_39 (sequence is synthesized)
ggaaagcctggatctcagctccttgccccatatcccttctgtaatttgtacctaaagagtgtgattatcctaattcaagagtcactaaaactcatcacattatcattgcatatcagcaaa

SEQ ID NO: 672972 - DNA, 120 bp, Artificial Sequence
  ENSG00000185811_40 (sequence is synthesized)
gggtaaagtcctagcaccaattgcttcacataccagcatgttccatttccaatttagaattagccacataataaaatcttagaatcttccttgagaaagagctgcctgagatgtagtttt

SEQ ID NO: 672973 - DNA, 120 bp, Artificial Sequence
  ENSG00000185811_41 (sequence is synthesized)
gttatatggttccccaccgaccatttttgtgcttttttcttgttttgttttgttttgactgcactgtgagttttgtagtgtcctcttcttgccaaaacaaacgcgagatgaactggactt

SEQ ID NO: 672974 - DNA, 120 bp, Artificial Sequence
  ENSG00000185811_42 (sequence is synthesized)
atgtagacaaatcgtgatgccagtgtatccttcctttcttcagttccagcaataatgaatggtcaacttttttaaaatctagatctctctcattcatttcaatgtatttttactttaaga

SEQ ID NO: 672975 - DNA, 120 bp, Artificial Sequence
  ENSG00000185811_43 (sequence is synthesized)
tgaaccaaaattattagacttatttaagatgtacaggcatcagaaaaaagaagcacataatgcttttggtgcgatggcactcactgtgaacatgtgtaaccacatattaatatgcaatat

SEQ ID NO: 672976 - DNA, 120 bp, Artificial Sequence
  ENSG00000185811_44 (sequence is synthesized)
tgtttccaatactttctaatacagttttttataatgttgtgtgtggtgattgttcaggtcgaatctgttgtatccagtacagctttaggtcttcagctgcccttctggcgagtacatgca

SEQ ID NO: 672977 - DNA, 120 bp, Artificial Sequence
  ENSG00000185811_45 (sequence is synthesized)
caggattgtaaatgagaaatgcagtcatatttccagtctgcctctatgatgatgttaaattattgctgtttagctgtgaacaagggatgtaccactggaggaatagagtatccttttgta

SEQ ID NO: 672978 - DNA, 120 bp, Artificial Sequence
  ENSG00000185811_46 (sequence is synthesized)
cacattttgaaatgcttcttctgtagtgatagaacaaataaatgcaacgaatactctgtctgccctatcccgtgaagtccacactggcgtaagagaaggcccagcagagcaggaatctgc

SEQ ID NO: 672979 - DNA, 120 bp, Artificial Sequence
  ENSG00000185811_47 (sequence is synthesized)
ctagactttctcccaatgagatcccaatatgagagggagaagagatgggcctcaggacagctgcaataccacttgggaacacatgtggtgtcttgatgtggccagcgcagcagttcagca

SEQ ID NO: 672980 - DNA, 120 bp, Artificial Sequence
  ENSG00000185811_48 (sequence is synthesized)
caacgtacctcccatctacaacagtgctggacgtgggaattctaagtcccagtcttgagggtgggtggagatggagggcaacaagagatacatttccagttctccactgcagcatgcttc

SEQ ID NO: 672981 - DNA, 120 bp, Artificial Sequence
  ENSG00000185811_49 (sequence is synthesized)
agtcattctgtgagtggccgggcccagggccctcacaatttcactaccttgtcttttacatagtcataagaattatcctcaacatagccttttgacgctgtaaatcttgagtattcattt

SEQ ID NO: 672982 - DNA, 120 bp, Artificial Sequence
  ENSG00000185811_50 (sequence is synthesized)
acccttttctgatctcctggaaacagctgcctgcctgcattgcacttctcttcccgaggagtggggtaaatttaaaagtcaagttatagtttggatgttagtatagaattttgaaattgg

SEQ ID NO: 672983 - DNA, 120 bp, Artificial Sequence
  ENSG00000185811_51 (sequence is synthesized)
gaattaaaaatcaggactggggactgggagaccaaaaatttctgatcccatttctgatggatgtgtcacaccttttctgtcaaaataaaatgtcttggaggttatgactccttggtgaaa

SEQ ID NO: 672984 - DNA, 120 bp, Artificial Sequence
  ENSG00000185811_52 (sequence is synthesized)
agtgtgaaggcagcagaggaaccttttggaggaggaagaggacacagaggccctgtagccaggcaccaagatccctcccaggtggctgggtctgaggggaactccgagcagccctaggtc

SEQ ID NO: 672985 - DNA, 120 bp, Artificial Sequence
  ENSG00000185811_53 (sequence is synthesized)
cgccgccccggcggcctttgggggctgagccggagcccggcgcgattgcaaagttttcgtgcgcggcccctctggcccggagttgcggctgagacgcgcgccgcgcgagccgggggactc

SEQ ID NO: 672986 - DNA, 120 bp, Artificial Sequence
  ENSG00000185811_54 (sequence is synthesized)
ggggactcggcgacggggcggggacgggacgacgcaccctctccgtgtcccgctctgcgcccttctgcgcgccccgctccctgtaccggagcagcgatccgggaggcggccgagagataa

SEQ ID NO: 672987 - DNA, 120 bp, Artificial Sequence
  ENSG00000185811_55 (sequence is synthesized)
gcctctgtgcctgtgaaacctttatctctttgtatttttccaagacagtgatgaagggatgcaagtcattttatccattgtgttccctcaactggcatattaaagaaatatggcacaaag

SEQ ID NO: 672988 - DNA, 120 bp, Artificial Sequence
  ENSG00000185811_56 (sequence is synthesized)
atcagcaggatgggggtcctctggtgtgtgggaggatggacactcacaggccagcatggccgtgagagccacacaccccgcaaaatgtccaagttgaggagcaatcctgcccagggacgc

SEQ ID NO: 672989 - DNA, 120 bp, Artificial Sequence
  ENSG00000185811_57 (sequence is synthesized)
gtctctgtcactgtcctctgtcctcactgcacttgcaggaatatcaaatgttatggattgtagatcgtgaaaattacacacttacgtgttttggcaacagtgcttttcagtgtttggggt

SEQ ID NO: 672990 - DNA, 120 bp, Artificial Sequence
  ENSG00000185811_58 (sequence is synthesized)
tagaacaagccacatctggccattttatgttatccctctaatctctagttcttaaatttcagatttaactgaaaatagaaagtttcataaatggtaatttttaaatgttagaaaaaaatc

SEQ ID NO: 672991 - DNA, 120 bp, Artificial Sequence
  ENSG00000185811_59 (sequence is synthesized)
aggagccgagtgtttggactggagctgctgaatggtttctcacagttctagaatgtttggggctgcaccctctaagatgttgaacccatcagtaattgctccaaaccactttatgggata

SEQ ID NO: 672992 - DNA, 120 bp, Artificial Sequence
  ENSG00000185811_60 (sequence is synthesized)
taatgctgtgagttgacacctgaggggattgtggtcctgttcatgagtaattacttttctgttgcctatagaagggccagcaatagcagatgagtagctgaacagtggttttgagtaata

SEQ ID NO: 672993 - DNA, 120 bp, Artificial Sequence
  ENSG00000185811_61 (sequence is synthesized)
catatggggctgatgactttagggatttccatgcaataattcccaaatctttctctctgttggaattgtgactatcttctcacacaagcggctacttggtcttgatgccttcccccgcaa

SEQ ID NO: 672994 - DNA, 120 bp, Artificial Sequence
  ENSG00000185811_62 (sequence is synthesized)
aacagcaaccaaactgttctgggccaatatcaccaccttgtggtcatgatgaagaattgccccctttgccctcaacacctcttttcttcttgaaaattaaaaacaacccctttcaccccc

SEQ ID NO: 672995 - DNA, 120 bp, Artificial Sequence
  ENSG00000185811_63 (sequence is synthesized)
tgattttaagagtggcagtgtctgggattataggtgattgtatttcttcccttttgcacatctatgttctctcatttgtattgtgtggggagaagtgactttttttataaaaagaaaaag

SEQ ID NO: 672996 - DNA, 120 bp, Artificial Sequence
  ENSG00000185811_64 (sequence is synthesized)
gtatatgcatcccagcagagaagcactggctccacccagtacctgcctcctcatgccaccctctcaagccaaaagccgggggaagcccaggcaccttgaccatgaccgcccgagactcac

SEQ ID NO: 672997 - DNA, 120 bp, Artificial Sequence
  ENSG00000185811_65 (sequence is synthesized)
caaagctccaagagtgacagagtcgtgggggacaagggcctgtccgacacgccctacgacagcagcgccagctacgagaaggagaacgaaatgatgaagtcccacgtgatggaccaagcc

SEQ ID NO: 672998 - DNA, 120 bp, Artificial Sequence
  ENSG00000185811_66 (sequence is synthesized)
catgtaaatatcgtacgtgcatgttccttcatcaacccccgagatacattaaatattcactgttctattcgttagacacctaccatatcatttttgggtatttataccataaagtgcaaa

SEQ ID NO: 672999 - DNA, 120 bp, Artificial Sequence
  ENSG00000185811_67 (sequence is synthesized)
acgaaggtctaggcagttgtgcggtgtcctgggagcatggcagtggagtaacagtaagggttggagtcacagtagcactgatgggattgttacttcgcagatgctgctggacagctttga

SEQ ID NO: 673000 - DNA, 120 bp, Artificial Sequence
  ENSG00000185811_68 (sequence is synthesized)
gattactcctgtaatcctttttattgagtgtgaggataaaatggccatattttctgtcaccaacaaagaactgaacatggtttcaagataatttttacaattttgtgggacaggagaagg

SEQ ID NO: 673001 - DNA, 120 bp, Artificial Sequence
  ENSG00000185811_69 (sequence is synthesized)
tcttcatctgtggttctggagtattaatttcagaactgagaagagaaaattgcaggcctccaggccgttattctgtggtgcatcgctgctggagccaacgtactgttcctgcttggtgcc

SEQ ID NO: 673002 - DNA, 120 bp, Artificial Sequence
  ENSG00000185811_70 (sequence is synthesized)
cgcaggaccttctctgatctgagctgttaaaccaaaaacagatgtgaatttcatttttcttttttagatattgagctgataaatgataaatatatttgggtaacatcctcaaatgagtac

SEQ ID NO: 673003 - DNA, 120 bp, Artificial Sequence
  ENSG00000185811_71 (sequence is synthesized)
tttaaagaacagagagtgcttttgaaaatgtatagagagctgaatatttaaagccatacaagttgataatccccttaggacctgtattagtaaatcctctaatactataaagcaacatca

SEQ ID NO: 673004 - DNA, 120 bp, Artificial Sequence
  ENSG00000185811_72 (sequence is synthesized)
gaaaacaggtcgcatttgttaacactgtgacaattataattataggctctaatttgaacagtgccagtaacagttaaagacaggtgtctgacatcctggttatcaaaaactatctggtgt

SEQ ID NO: 673005 - DNA, 120 bp, Artificial Sequence
  ENSG00000185811_73 (sequence is synthesized)
ctaaggaatttaacagtatcaaagtacatctttttgctcacaaactagattggctacttttccagcctatagaagttacagaaatctttcttttactgatattcctttgattccacttta

SEQ ID NO: 673006 - DNA, 120 bp, Artificial Sequence
  ENSG00000185811_74 (sequence is synthesized)
aagcaatagcttgatacctactttttgagatgtatatgtatgtacttgtaaatgcttatatatgtgtatttgtttacacgtgagcttatatgaacatataaaacattatggtattggaca

SEQ ID NO: 673007 - DNA, 120 bp, Artificial Sequence
  ENSG00000185811_75 (sequence is synthesized)
gagaaatgatattgatttgaagaatcatattgttgaagtattttgagaagtcaaatgcacttgagagtaagctaatgcatcctaaaacatgtttctgtgaagtctgaggaaggtgtcagc

SEQ ID NO: 673008 - DNA, 120 bp, Artificial Sequence
  ENSG00000185811_76 (sequence is synthesized)
cagagcatatgttgaagcagacccttcagtgaagccttcagtctgtaagaatcgctgcatgtgaagatgtgttaatgttatgatagttacagtttttataaaagagatgatatacacttg

SEQ ID NO: 673009 - DNA, 120 bp, Artificial Sequence
  ENSG00000185811_77 (sequence is synthesized)
gaaggaggaaagcatcctgtcttccttgtgttctgagcatgtttctaattgactggtagctcagttgttgcaagcgattggttccaagtggtaccgagtcatagagtccttgttctggta

SEQ ID NO: 673010 - DNA, 120 bp, Artificial Sequence
  ENSG00000185811_78 (sequence is synthesized)
cagccttgtaaaggacttctcaacacgtaccaattccaccctataaataaaacaagggaaaagtgaacagcatcacatgagaggcttggcgagggctgctattatagtaacacatactaa

SEQ ID NO: 673011 - DNA, 120 bp, Artificial Sequence
  ENSG00000185811_79 (sequence is synthesized)
gtagtctcagctgagccctcagggtacgtgtgctgagtggtcaccctccacaaaacaaaaaatcctgatacaccaaaacttactcctcaaagtttccactgagaaaccatgagtaaaatg

SEQ ID NO: 673012 - DNA, 120 bp, Artificial Sequence
  ENSG00000185811_80 (sequence is synthesized)
tgtgtttaaattgtatccaaactaacagggtttgatgtttagaaacaataatcaatgatggaatagcagcaaaatcgagttttcagaaagacctcagatgagctttcaaatggcttgccc

SEQ ID NO: 673013 - DNA, 120 bp, Artificial Sequence
  ENSG00000185811_81 (sequence is synthesized)
ccaaatctttctctcgagaacggcccttccagtgcaatcagtgcggggcctcattcacccagaagggcaacctgctccggcacatcaagctgcacaagccgctcgcggagggcaccccgc

SEQ ID NO: 673014 - DNA, 120 bp, Artificial Sequence
  ENSG00000185811_82 (sequence is synthesized)
acttctccccgtgtaagagtgctggtgaaggctgaggcaagggcccagaaagattgagggacaaagacaggagcgcccgcattgcccatctgccaggctggaggtgtattcattattgat

SEQ ID NO: 673015 - DNA, 120 bp, Artificial Sequence
  ENSG00000185811_83 (sequence is synthesized)
tggaaaacttcacccaccctctttatttcaagaaaccaaagacggagagaagttcagtgaattaaccaaggtgaaatgacagagtcagaattgaactgaatttctgactgaaaaactagt

SEQ ID NO: 673016 - DNA, 120 bp, Artificial Sequence
  ENSG00000185811_84 (sequence is synthesized)
tctcgctccattataccatgttctaatgagctaatgagtcaacagttccctggaatacctgttttcttctttaaaaagagaaagagctgtgatactgagagctacctattggcataaaag

SEQ ID NO: 673017 - DNA, 120 bp, Artificial Sequence
  ENSG00000185811_85 (sequence is synthesized)
aatatgaaggacatacaggtaaaatgaggtagactggatcaatgtgggtcagctacataagcccccatagccaaggagggaacatgtatgtaaaattctcaggcttatgagaatcacaac

SEQ ID NO: 673018 - DNA, 120 bp, Artificial Sequence
  ENSG00000185811_86 (sequence is synthesized)
caactgtatgtctataggacatcctaatgcaataatgggaaaatgtgataactgaattttatctacatgtatagaaaacatattttgggccgggcatggtggctcaagcttgtaatccca

SEQ ID NO: 673019 - DNA, 80 bp, Artificial Sequence
  ENSG00000185813_0 (sequence is synthesized)
gggcgggcggcggcgctcggagtcgccgggagctgccaggctgtccgcgccgccgctgcggggccatgatccggaacggg

SEQ ID NO: 673020 - DNA, 120 bp, Artificial Sequence
  ENSG00000185813_1 (sequence is synthesized)
cgggcgcggggctgcaggcggcgcagagcagccgggcccggggggcaggcgcgccgtgagggtgtggtgcgatggctgctatgacatggtgcattacggccactccaaccagctgcgcca

SEQ ID NO: 673021 - DNA, 120 bp, Artificial Sequence
  ENSG00000185813_2 (sequence is synthesized)
ggcacgggccatgggtgactacctcatcgtaggcgtgcacaccgatgaggagatcgccaagcacaaggggcccccggtgttcactcaggaggagagatacaagatggtgcaggccatcaa

SEQ ID NO: 673022 - DNA, 120 bp, Artificial Sequence
  ENSG00000185813_3 (sequence is synthesized)
atgggtggacgaggtggtgccagcggctccctacgtcactacactagagaccctggacaaatacaactgtgacttctgtgttcacggcaatgacatcaccctgactgtagatggccggga

SEQ ID NO: 673023 - DNA, 120 bp, Artificial Sequence
  ENSG00000185813_4 (sequence is synthesized)
cacctatgaggaagtaaagcaggctgggaggtacagagaatgcaagcgcacgcaaggggtgtccaccacagacctcgtgggccgcatgctgctggtaaccaaagcccatcacagcagcca

SEQ ID NO: 673024 - DNA, 120 bp, Artificial Sequence
  ENSG00000185813_5 (sequence is synthesized)
ggagatgtcctctgagtaccgggagtatgcagacagttttggcaagtgccctggtgggcggaacccctggaccggggtatcccagttcctgcagacatctcagaagatcatccagtttgc

SEQ ID NO: 673025 - DNA, 120 bp, Artificial Sequence
  ENSG00000185813_6 (sequence is synthesized)
ttctgggaaggagccccagccaggggagacagtcatctatgtggctggtgccttcgacctgttccacatcgggcatgtggacttcctggagaaggtgcacaggctggcagagaggcccta

SEQ ID NO: 673026 - DNA, 120 bp, Artificial Sequence
  ENSG00000185813_7 (sequence is synthesized)
catcatcgcgggcttacactttgaccaggaggtcaatcactacaaggggaagaactaccccatcatgaatctgcatgaacggactctgagcgtgctggcctgccggtacgtgtcagaagt

SEQ ID NO: 673027 - DNA, 120 bp, Artificial Sequence
  ENSG00000185813_8 (sequence is synthesized)
ggtgattggagccccgtacgcggtcacagcagagctcctaagtcacttcaaggtggacctggtgtgtcacggcaagacagaaattatccctgacagggatggctccgacccataccagga

SEQ ID NO: 673028 - DNA, 120 bp, Artificial Sequence
  ENSG00000185813_9 (sequence is synthesized)
gcccaagagaaggggcatcttccgtcagattgacagtggcagcaacctcaccacagacctcatcgtccagcggatcatcaccaacaggttggagtatgaggcgcgaaaccagaagaagga

SEQ ID NO: 673029 - DNA, 120 bp, Artificial Sequence
  ENSG00000185813_10 (sequence is synthesized)
agccaaggagctggccttcctggaggctgccaggcagcaggcggcacagcccctgggggagcgcgatggtgacttctaacctggcagaggccctggccggccctccccctgctctgcttc

SEQ ID NO: 673030 - DNA, 120 bp, Artificial Sequence
  ENSG00000185813_11 (sequence is synthesized)
tgcgccttctgcgtttggacataggactctgcagggccgccctctctaactggcctggctctggaagggctggtgaggactctgcctccttgcctgcctacaaggtgcctggtttgcagc

SEQ ID NO: 673031 - DNA, 120 bp, Artificial Sequence
  ENSG00000185813_12 (sequence is synthesized)
aggctctccgctctttccagcaaagctgctcagagagggtgtccagcacagtggagaggccggaagtgagacgggcagacggcacctgcagcctgaaacgcaccgctcctgcgtgcgccc

SEQ ID NO: 673032 - DNA, 120 bp, Artificial Sequence
  ENSG00000185813_13 (sequence is synthesized)
ccacctggtccccggatgcccccaccacctggacagaggccacactgactgcccacccagctgtggcgggaggtgcagagcagagggctttagggagcagtgactgcggtcaccccttta

SEQ ID NO: 673033 - DNA, 120 bp, Artificial Sequence
  ENSG00000185813_14 (sequence is synthesized)
gttctctgggtgtagaccacaccacctcccactgggcaccccccaacacggtgtcctgccacccagcgcctggctccaggaaaacacgcttgccttccttcccggcagcttcgccactct

SEQ ID NO: 673034 - DNA, 120 bp, Artificial Sequence
  ENSG00000185813_15 (sequence is synthesized)
ccttatggactctgttctgtttgtacatggctgacggaaatctctttggtacaaccgaataaagcctggtggcagtgctgcgcggggctcccagccctgctgggaaggaccagggaacca

SEQ ID NO: 673035 - DNA, 120 bp, Artificial Sequence
  ENSG00000185813_16 (sequence is synthesized)
ctcagcaaggagaccctcttggccctgcccccaccatgcacccagcagccgggagtgcagcgggcagcctggcagtgagtgaaacccaggcctccagccctccaaagcctggggccaccc

SEQ ID NO: 673036 - DNA, 120 bp, Artificial Sequence
  ENSG00000185813_17 (sequence is synthesized)
cctgtagcaggcgatgctagaataaggaggagagccagagctgaggctccttgccccttggcccctccaggggccatgggatctctgtctcccacacccctgtcacggcccgcctggagc

SEQ ID NO: 673037 - DNA, 120 bp, Artificial Sequence
  ENSG00000185813_18 (sequence is synthesized)
agcccagaggccgaagaggttcttactgcagcctccgggaggtgtctagggaggccatagattgcctggtctcgccgcattcaaaatgaggcttatgatcagtacttttttcagccccac

SEQ ID NO: 673038 - DNA, 120 bp, Artificial Sequence
  ENSG00000185813_19 (sequence is synthesized)
attcctctccagaatggcctctgccctacagcacctggcccatgtggcaccccatgggcctgtcctctgctgttgtgaggtcgacctcacgacccagcacaggagctggaggcgaggtgc

SEQ ID NO: 673039 - DNA, 120 bp, Artificial Sequence
  ENSG00000185813_20 (sequence is synthesized)
acgcgaggctctccacagcccaggaaggcagcctgtcaccctgctctccgagccaggggccaaggtgtggggggcacaggccatcctcatcctgccaggcccccgctttcaggagtgggg

SEQ ID NO: 673040 - DNA, 120 bp, Artificial Sequence
  ENSG00000185813_21 (sequence is synthesized)
ccaggcttggggagggtagaaaggccctgcagtgctgctgcctgggcccggaggtgggcctggccccgtagcagcattggaggccagagcccaagccagttccggagtcacacccaacgg

SEQ ID NO: 673041 - DNA, 120 bp, Artificial Sequence
  ENSG00000185813_22 (sequence is synthesized)
cggagggagaacctacccatctcccaccttcagctctggggaggcatgctctgggcctctggagccagggctcaggcccccaactctcctccttgcccctgcaccctcggacttggcctg

SEQ ID NO: 673042 - DNA, 120 bp, Artificial Sequence
  ENSG00000185813_23 (sequence is synthesized)
gccagaagggatgggggcaagaggaaggcagccaggggctccagcccatgccctcacagatttggctctcgagttggggagcgaagggctgggggaggacactgggaaccgggccagccg

SEQ ID NO: 673043 - DNA, 120 bp, Artificial Sequence
  ENSG00000185813_24 (sequence is synthesized)
tggccctgcacttcccccagggagcaccaaggctaggcgcggcttcaccgcggggctgggtcgtggccagcttcgcccctgggtctgaagacctctgggcggcccaggccaaccttgccc

SEQ ID NO: 673044 - DNA, 120 bp, Artificial Sequence
  ENSG00000185813_25 (sequence is synthesized)
tgccgccgcacactcggctgccttctcatacccaggcttggggatttccaggtcccgttcccctcgtggcctggctgccagtcctccagcacccctcactccgaggccgcctcatttatt

SEQ ID NO: 673045 - DNA, 120 bp, Artificial Sequence
  ENSG00000185813_26 (sequence is synthesized)
tattcgtttgccattaactgcggggtgagcggagtaggggagacctggggcgccatcccgcgccggaggggcctggggtcaccgagtgggacggtgggggcggggggcccccagcggtgc

SEQ ID NO: 673046 - DNA, 120 bp, Artificial Sequence
  ENSG00000185813_27 (sequence is synthesized)
caggagaggtccgggctcaggcggcgaggcagtcggctgcgcgcagggacaggaagacgttcgccttgcactggtaggtcccgcggccgtcggggagccgctcgcacctctgcaggtttg

SEQ ID NO: 673047 - DNA, 120 bp, Artificial Sequence
  ENSG00000185813_28 (sequence is synthesized)
gggcgacgtcctggacgcacacagcctggggggcaggcaagcaaaggctgaggggccgccgcacccccacccacgtcctgccgccgccccccatcagtccccggcacgccggactcacga

SEQ ID NO: 673048 - DNA, 120 bp, Artificial Sequence
  ENSG00000185813_29 (sequence is synthesized)
ccggactcacgaggctccgcagcctggggtgcagttgcagctccggggaggcgccggccccgcccgggggttccgcccctctgtagggctgggagcgccgcgcgtacggggacctgcgga

SEQ ID NO: 673049 - DNA, 120 bp, Artificial Sequence
  ENSG00000185813_30 (sequence is synthesized)
gcgcggcccaccgagtaggagctgtgccccgccgctggcttgtaccacgcgaggccaggcggcgccagcagcaggcacagcgccagggcggcggccgccagtgtcgcggaccgggccatg

SEQ ID NO: 673050 - DNA, 120 bp, Artificial Sequence
  ENSG00000185813_31 (sequence is synthesized)
gtgtcgcggaccgggccatggggacgccggctgactggtgggcggcggcgtccgggctcggagcagccaccgcctgggccgccttatatctgcggcgagggcgggccgaggctgcggagg

SEQ ID NO: 673051 - DNA, 120 bp, Artificial Sequence
  ENSG00000185813_32 (sequence is synthesized)
ggcgggcgggctggggtgcagcgggcgcgcgcggaggagccgtcgcacctccgcatcccaaaggaaccagccgcgcgggcgagcgctggaggcgcgcaaggatctggcgcttggtgggag

SEQ ID NO: 673052 - DNA, 120 bp, Artificial Sequence
  ENSG00000185813_33 (sequence is synthesized)
cccaacgccccctcaagctccccacccatgccgctcgcgcccttcaggcccggcttgcgtgggccgcagtggcagcaggggagggcccacgggcgcccagccctaggagtcgtcccccag

SEQ ID NO: 673053 - DNA, 120 bp, Artificial Sequence
  ENSG00000185813_34 (sequence is synthesized)
gcaatccccagtactcctgatgctggagagccagccacactgcacagtgccccgggggcggtttctaccaccctaaggggtattcttggctccaggcatcagagtccatgtggcttgtgg

SEQ ID NO: 673054 - DNA, 120 bp, Artificial Sequence
  ENSG00000185813_35 (sequence is synthesized)
ggccctcatttctttcatgcccactggggaaggttccaccagcagggctgttactggcggggtcctctgggaggggggcaagaaggccagccacaccaaggcactggagctccacgactc

SEQ ID NO: 673055 - DNA, 120 bp, Artificial Sequence
  ENSG00000185813_36 (sequence is synthesized)
ctggccttcgattggaggcccctctctgccagctctgccccttggggggcaccaggcaggactgccagccgctctcctggcaggtgacatcagccttcaagctcactgtgccctcaccat

SEQ ID NO: 673056 - DNA, 120 bp, Artificial Sequence
  ENSG00000185813_37 (sequence is synthesized)
ttcatgctcccccaaggtcctggtcatgtcttctcttgggtatcttcccaggacaggcactggcactggagccctggcacttgtttctgggttccatgcttcccaggtgtgatggtgaat

SEQ ID NO: 673057 - DNA, 120 bp, Artificial Sequence
  ENSG00000185813_38 (sequence is synthesized)
accctcaatccaggtgggcaccacctaatcggctgccagcacagccaggatacaagcaggcagaggaacgtggaaagactagactggctgaatctggcctccatctttctcccatgctgg

SEQ ID NO: 673058 - DNA, 120 bp, Artificial Sequence
  ENSG00000185813_39 (sequence is synthesized)
ttcccgccctcgcacgtcggcctccaggttcttcagcttttggactctcggacctacaccagtggcttgccaggggctctgcagcctttggccacaggatgaaggctgcactatcggctt

SEQ ID NO: 673059 - DNA, 86 bp, Artificial Sequence
  ENSG00000185813_40 (sequence is synthesized)
ctctacttttccttgcacatggcttattgtgggacttcaccttgtgatcacgtgagtcaatactcccaataaactcttcatatata

SEQ ID NO: 673060 - DNA, 120 bp, Artificial Sequence
  ENSG00000185813_41 (sequence is synthesized)
agcacctgctcgtcagaaggaatctctgcctttgcctgagaccctcgcagggaagagagccacccagttggccagcactagtgggctaagggccagggtagagagacagcctgcccccac

SEQ ID NO: 673061 - DNA, 120 bp, Artificial Sequence
  ENSG00000185813_42 (sequence is synthesized)
cggccctcttgtgtggctacagctgggtgctgggaaggggcctcctactggaggggccgggtgggctggggtccccagtctccccgttgtccttttcctagaggagatcgccaagcacaa

SEQ ID NO: 673062 - DNA, 120 bp, Artificial Sequence
  ENSG00000185813_43 (sequence is synthesized)
gttctgggtggcgtcctcgtccggcatgggccggggctggcaggctgcggggctcgcctgccgggagggtcgggctgcagaggctccgcgccctgccgtgggcgaccccgtctacctctg

SEQ ID NO: 673063 - DNA, 120 bp, Artificial Sequence
  ENSG00000185813_44 (sequence is synthesized)
gcggaggccccgcccggtcacgccgacctctccggtgcagccaccgcgctgagatctggagccacggcctccctgcttctccgtaaccaccagcaaccagcttgcccggctccggtccag

SEQ ID NO: 673064 - DNA, 120 bp, Artificial Sequence
  ENSG00000185813_45 (sequence is synthesized)
cttcaaggtgaggctccgcatgggctcacctcgttccctctgttcacctctgttcctgcatgggctgggaatgcaggctggctgtgggctcctaggcggggcccaggaggtacctgggct

SEQ ID NO: 673065 - DNA, 120 bp, Artificial Sequence
  ENSG00000185813_46 (sequence is synthesized)
gaggaaagggcagggtcagctctcccaacccccggggcctgtgctgggctgtgggtggcgacggccgctgcctccccggggagggctcctgaccccactccttctccaggtggacctggt

SEQ ID NO: 673066 - DNA, 120 bp, Artificial Sequence
  ENSG00000185813_47 (sequence is synthesized)
ctgcggggccatgatccggaacgggcgcggggctgcaggcggcgcagagcagccgggcccggggggcaggcgcgccgtgagggtgtggtgcgatggctgccaccgcgctgagatctggag

SEQ ID NO: 673067 - DNA, 120 bp, Artificial Sequence
  ENSG00000185813_48 (sequence is synthesized)
aagggcgagcaacctccccgacttcttcccatgagggacagccgggaggggcacaccctgtccccccaaaaagtctccgggctgagctagccgcactctggccgcaggaggtcaatcact

SEQ ID NO: 673068 - DNA, 120 bp, Artificial Sequence
  ENSG00000185813_49 (sequence is synthesized)
gggccatgggtgactacctcatcgtaggcgtgcacaccgatggaggagagatacaagatggtgcaggccatcaaatgggtggacgaggtggtgccagcggctccctacgtcactacacta

SEQ ID NO: 673069 - DNA, 120 bp, Artificial Sequence
  ENSG00000185813_50 (sequence is synthesized)
gaggtcaatcactacaaggggaagaactaccccatcatgaatctgcatgaacggactctgagcgtgctggcctgccgggtgagtgggggccaggagccagcccaaggatggggagacatt

SEQ ID NO: 673070 - DNA, 120 bp, Artificial Sequence
  ENSG00000185813_51 (sequence is synthesized)
cccacaacatcccccctactaagggcctccctgagccagggcaggggggcttgggtcactggcagagctgcacccagcaccccgagttctgtggcacctgcccatacctgtttgttgagg

SEQ ID NO: 673071 - DNA, 120 bp, Artificial Sequence
  ENSG00000185813_52 (sequence is synthesized)
catgaggaggggtggtcaggtctccagatgctgttccttcttgtctcatggaggagccccaggggtccccagcctgcccagcccatccctgctactcactggcagccccgccccatgtct

SEQ ID NO: 673072 - DNA, 120 bp, Artificial Sequence
  ENSG00000185818_0 (sequence is synthesized)
atgcattgtgggcctcccgacatggtctgcgagacgaagatcgtggccgccgaggaccatgaggcgctgccgggggccaagaaggacgcgctgctcgccgccgccggcgccatgtggccc

SEQ ID NO: 673073 - DNA, 120 bp, Artificial Sequence
  ENSG00000185818_1 (sequence is synthesized)
cgcgagttccgtgcggccgagcaggaggcggcgcgccgcatcttctacgacggcatcatggagcgcatccctaacacggccttccgcggcctgcggcagcacccgcgcgcgcagctgctc

SEQ ID NO: 673074 - DNA, 120 bp, Artificial Sequence
  ENSG00000185818_2 (sequence is synthesized)
tacgccctgctggcggcgctgtgcttcgccgtgagccgctcgctgctgctgacgtgcctggtgccggccgcgctgctgggcctgcgctactactacagccgcaaggtgatccgcgcctac

SEQ ID NO: 673075 - DNA, 120 bp, Artificial Sequence
  ENSG00000185818_3 (sequence is synthesized)
ctggagtgcgcgctgcacacggacatggcggacatcgagcagtactacatgaagccgcccggctcctgcttctgggtggccgtgctggatggcaacgtggtgggcattgtggctgcacgg

SEQ ID NO: 673076 - DNA, 120 bp, Artificial Sequence
  ENSG00000185818_4 (sequence is synthesized)
gcccacgaggaggacaacacggtggagctgctgcggatgtctgtggactcacgtttccgaggcaagggcatcgccaaggcgctgggccggaaggtgctggagttcgccgtggtgcacaac

SEQ ID NO: 673077 - DNA, 120 bp, Artificial Sequence
  ENSG00000185818_5 (sequence is synthesized)
tactccgcggtggtgctgggcacgacggccgtcaaggtggccgcccacaagctctacgagtcgctgggcttcagacacatgggcgccagtgaccactacgtgctgccgggcatgaccctc

SEQ ID NO: 673078 - DNA, 120 bp, Artificial Sequence
  ENSG00000185818_6 (sequence is synthesized)
tcgctggctgagcgcctcttcttccaggtccgctaccaccgctaccgcctgcagctgcgcgaggagtgaccgccgccgctcgcccgcccgcccccccggccgccctgtccgcctttgccc

SEQ ID NO: 673079 - DNA, 120 bp, Artificial Sequence
  ENSG00000185818_7 (sequence is synthesized)
gcctgcccgccgcccggcgcggcctgctttcagacgctcaattggcgtttgtgttgggtttccccttttcaacatcctgcggttgtctggctggttccggggggtgcggggctgttgttc

SEQ ID NO: 673080 - DNA, 120 bp, Artificial Sequence
  ENSG00000185818_8 (sequence is synthesized)
ttcggcgacactttggtgggggtgggttgtttgtcgccatagcccctcgcccttccccacctgcctgggcggcttgccacctgaagagtggcatcttggaccaccgcggctgtccatgac

SEQ ID NO: 673081 - DNA, 120 bp, Artificial Sequence
  ENSG00000185818_9 (sequence is synthesized)
gctgccctgcccgccgccactggggaaggcccagccttgctcaccaagcacagaacctctgcagcagatcccggggccaggctccggccccgcctgcggccccagcgccactgcctgtgg

SEQ ID NO: 673082 - DNA, 120 bp, Artificial Sequence
  ENSG00000185818_10 (sequence is synthesized)
aggccccagctggccacggcgctgctttgctccgcgcatgccgagggtgtggcccggctgagcatgccgcatgcacacagccccgccctgccgccctgcccagactggacccggagaccc

SEQ ID NO: 673083 - DNA, 120 bp, Artificial Sequence
  ENSG00000185818_11 (sequence is synthesized)
gggctggtgagcgcccctgtccccagcccccagctggctgtgggagggcctgcccctgcccccacctcctggagggcctggtctgccccgcgccgcccggctctgtccacacctgctttg

SEQ ID NO: 673084 - DNA, 120 bp, Artificial Sequence
  ENSG00000185818_12 (sequence is synthesized)
ctctgacgccctccatttctctggctccggcccctcccctgcctgggctgtgctgactggtgtcatcacccaggtgactcccatggcgtccgtggcacagccagggtgggggtccatggg

SEQ ID NO: 673085 - DNA, 120 bp, Artificial Sequence
  ENSG00000185818_13 (sequence is synthesized)
acccctctccccagtgcccactggatcgtgctggcctctcccagatgtccccggggacctcctgcctctggctgacggtccaccctgtgaatcttatcagcccaggctgctgccaacagc

SEQ ID NO: 673086 - DNA, 120 bp, Artificial Sequence
  ENSG00000185818_14 (sequence is synthesized)
gcccagcccacagcttctcccagcctgaaaccaacacattttctaataagttatttagacagaatagcactctgcatgactttaattcttgggacaaaacggtagtttgtaccctaagac

SEQ ID NO: 673087 - DNA, 120 bp, Artificial Sequence
  ENSG00000185818_15 (sequence is synthesized)
acagtttctggcccagtgtgatgggggtgggtggccgggtgggtggagcgttttgctgttggaaacctggagggaaaccctgattggatgtcatttcctgccatggagcacgcctcccag

SEQ ID NO: 673088 - DNA, 120 bp, Artificial Sequence
  ENSG00000185818_16 (sequence is synthesized)
ccctggcctgcagtgtgggcagggtggggggcaagggagtccgcagcctccgggaggaggggcagggcgctgccttgggctgggtgggaagaggggtggccgcctcggcttccgctggcc

SEQ ID NO: 673089 - DNA, 120 bp, Artificial Sequence
  ENSG00000185818_17 (sequence is synthesized)
atgctcctggtctctccttcctgaggtcacaggcaggggctgccctggacggggggcggggggggtggcctggaaggggagacagaggtggagggtggcacaggctgcacattcagctta

SEQ ID NO: 673090 - DNA, 120 bp, Artificial Sequence
  ENSG00000185818_18 (sequence is synthesized)
gaagtggacctggctttggtggcaggagaagaataaacacttgcccagacccctttgtgtgggggaattggggaggggtcgtggcaggcagggtgggccacggaactgggtcccaggcat

SEQ ID NO: 673091 - DNA, 120 bp, Artificial Sequence
  ENSG00000185818_19 (sequence is synthesized)
caaggccacgtgcagggccatggagggatgcttctcacgaggcgcttcagaagcgagcgaagggacagagaagccctgcgtccaagggccttttgtcctgttagcaattgaggtgtgcag

SEQ ID NO: 673092 - DNA, 120 bp, Artificial Sequence
  ENSG00000185818_20 (sequence is synthesized)
agcactgtacagaccccactcccctgtacattcctccctggaggtgcccggtccccgcttggggatgggagttttgtagactgtacagaaatcggcaccctattttcttgcagctcagat

SEQ ID NO: 673093 - DNA, 120 bp, Artificial Sequence
  ENSG00000185818_21 (sequence is synthesized)
tttgttaatctggaatatacagacagacgtaaagtgttttagcaaaatggaaacaaacagttgtgcctttttcctcttttggtttggtttgggtttggcctggggctggtcccagttggt

SEQ ID NO: 673094 - DNA, 120 bp, Artificial Sequence
  ENSG00000185818_22 (sequence is synthesized)
gcggggcatgctgggggcaggaggggcagggcgggccaggtggagtcaggtcttgggggtgtcatgtcggggtgctgccagcgtcccttggtcctgtgcctttggagcctcgggctcctg

SEQ ID NO: 673095 - DNA, 120 bp, Artificial Sequence
  ENSG00000185818_23 (sequence is synthesized)
cctgggggttctgagagtcctgggcagtgtggccttctctcattctggtggcatctgcgcccgtgagtgacctcttccttggctgcactgccctgtgggtggtgagacgcttggcctttt

SEQ ID NO: 673096 - DNA, 120 bp, Artificial Sequence
  ENSG00000185818_24 (sequence is synthesized)
ttgttgctgccaggacttggtagagatggcaggaagggtgtgcggggtggttgtgtgcagaaccctgccgcccctgaggtgagcagaggcactggtgtgcctgccaggctggggcggagc

SEQ ID NO: 673097 - DNA, 120 bp, Artificial Sequence
  ENSG00000185818_25 (sequence is synthesized)
tgcccggaacccttgccaggccaatgtgtagcttggtggcgcccttgaaggccactggggggtaggtgtgtcctcccccggggctggaggccgggtgcctggtgggtgggcctgacctgg

SEQ ID NO: 673098 - DNA, 120 bp, Artificial Sequence
  ENSG00000185818_26 (sequence is synthesized)
cccacctcatccctccagcctgggatctcactgctctgcacatgtgcactgacgtgaattttatacgtttgtagaaactctgatgtaacttcttctacctctgaagcgccctcctgggcc

SEQ ID NO: 673099 - DNA, 120 bp, Artificial Sequence
  ENSG00000185818_27 (sequence is synthesized)
ctgctgtcacgtggctggtgcggcttccccgagtgctggccccctgcccgctccccatgggcacccaccactcaaactctgcgtggtgaggcccggggaaagccaggccgggccctagca

SEQ ID NO: 673100 - DNA, 120 bp, Artificial Sequence
  ENSG00000185818_28 (sequence is synthesized)
ctgctcaggggcctggggctcctgggatttctgtgtgtttggaagcctctgtttttggagtggggggcgtggaaggcgggaggggctgacagtgcctggggccagagctgggcgaaggag

SEQ ID NO: 673101 - DNA, 120 bp, Artificial Sequence
  ENSG00000185818_29 (sequence is synthesized)
gacatcctcactggacgagcactgcaggcctgacgagaggctccgggcagctgagggctgaagcgcctcgggatgccccacactgcccagagccacgggtcttgctgtgctgggggtggg

SEQ ID NO: 673102 - DNA, 120 bp, Artificial Sequence
  ENSG00000185818_30 (sequence is synthesized)
gtggccccaggcagctgccactgcccaggtgtgagtcgctgcagacctggtccctgagggtgggaggcctgcttgtgctgaagctgccatgtggtctggcccccagaagggctcctgagc

SEQ ID NO: 673103 - DNA, 120 bp, Artificial Sequence
  ENSG00000185818_31 (sequence is synthesized)
gtagggagttgagccccgcagccgtggcggcatctcctcctccttcctccgccccatgcccagccttgcttccggctggtggcatgccttggggccgggcagcaggtgagaagctgcccc

SEQ ID NO: 673104 - DNA, 120 bp, Artificial Sequence
  ENSG00000185818_32 (sequence is synthesized)
cggagggaggggccaagggctgggtcagtctggcctgaggggtggatggctggccctgggggaaggctgggcctgggaggccctgtggacagcaggcctgaggccacgaggtcctggggc

SEQ ID NO: 673105 - DNA, 120 bp, Artificial Sequence
  ENSG00000185818_33 (sequence is synthesized)
cacccctctcctgctctgggtgtccttctcagagaagatggcagaaggctgcaggccctagaggggacgacgggctggggacgccctgagcttcctggctgtgtggcaggtgctggggaa

SEQ ID NO: 673106 - DNA, 120 bp, Artificial Sequence
  ENSG00000185818_34 (sequence is synthesized)
gctctctgggccatagggacctggctcccctctgagaggcccgcctgccctggggcacccagggctgtgctggtggcctgaggctgggaacttgggttcctgggctctgctggcgcctgg

SEQ ID NO: 673107 - DNA, 120 bp, Artificial Sequence
  ENSG00000185818_35 (sequence is synthesized)
gctttgtgggggccgaaggtggttgccccgccgggcagggggctgtgtgggccctcgtggggccaccttcctgtcagtgcccgagggacggtgggacagttgcccctgcgccaagggagc

SEQ ID NO: 673108 - DNA, 120 bp, Artificial Sequence
  ENSG00000185818_36 (sequence is synthesized)
ccactgccatcccccgtgggctggcgctgcagtcgcgcaccctgtgttgcctgctgacttgcttatgtctgtttggaagctgcttctgtttggccacaggcctgtgttcctgggctgatg

SEQ ID NO: 673109 - DNA, 120 bp, Artificial Sequence
  ENSG00000185818_37 (sequence is synthesized)
gccacagagctgacacttggggtttgagttccagacttgcagaccctgggatccgcttactcctccgcgccacggctgctgtgcttccagaggtggcgtgatgcctcccggggccatggt

SEQ ID NO: 673110 - DNA, 120 bp, Artificial Sequence
  ENSG00000185818_38 (sequence is synthesized)
ggggtgaaggatggcgagccggacataccattgttggatgtattttttttaaaacagcaataattagccattttaaaggagggatgtacctgtgtgtgtgcatgtgcacgtgtttgagcg

SEQ ID NO: 673111 - DNA, 120 bp, Artificial Sequence
  ENSG00000185818_39 (sequence is synthesized)
tgtgtgtgtgtgcaagtgggttcttggatatgtgtagtgtgagcatgtgtgcatgtgtgagcctgtgcacgtgcatgttgtaggtgcataagcatgtacacgcgtgagcatgcatgtgtg

SEQ ID NO: 673112 - DNA, 120 bp, Artificial Sequence
  ENSG00000185818_40 (sequence is synthesized)
tgtacacgtgtataggtgtacatgtgcatgagttgtgtacatgcgtgagcacgtgtatagatgtacgtgtgtgtgcgcatgtgtgcgtgtacatgtgtttgtgtcttgggtatgcataag

SEQ ID NO: 673113 - DNA, 120 bp, Artificial Sequence
  ENSG00000185818_41 (sequence is synthesized)
catgcacgtgtgtatgaatgtgcgtgtgtatgcatgagcacgtatgcatgtgtgatgcgcatgttcttgtgtacttctctgagggggcacatatgtatgagtgtatgagtgcatacatat

SEQ ID NO: 673114 - DNA, 120 bp, Artificial Sequence
  ENSG00000185818_42 (sequence is synthesized)
gcatatggtgtacgtgtgtgtactttgtgtgtgggcatgtatgcgtatgagtacttgtgtgtggctggtgtatgggtgagcatgcacatgtgtatggatgcatatgtgagctgtacatgt

SEQ ID NO: 673115 - DNA, 120 bp, Artificial Sequence
  ENSG00000185818_43 (sequence is synthesized)
agagtgtacatgtgtgttgcatgagcatgcatgcgtgcgagtgcctgtgtgtgtacttgcatatatgtggctgtgcaggtacccggcggtggtgggctggcagtgcccggggaagcaggt

SEQ ID NO: 673116 - DNA, 120 bp, Artificial Sequence
  ENSG00000185818_44 (sequence is synthesized)
cctgctcacggcttccctgctgggccccaggccccgggctgagcctccctggcccctcttgcccctcagtggagcagggcctgggtggagggcctgggcagctccagggcaggtccgggg

SEQ ID NO: 673117 - DNA, 120 bp, Artificial Sequence
  ENSG00000185818_45 (sequence is synthesized)
aggccaggcttggggagcacagggggtggggttcacctgctgctgtttgttcccgaaactgtactgtgagcccacggcgggggcagattgttctgaggccccagatgtgccaaaacagcc

SEQ ID NO: 673118 - DNA, 120 bp, Artificial Sequence
  ENSG00000185818_46 (sequence is synthesized)
cccagggtgggggcgagcgagttctgaggagaggggctgcgggggccgggggtgggtgtgtgcccctcccctgaatggcccccaatgctgctgtttttcaataaaaccagagttgaaggc

SEQ ID NO: 673119 - DNA, 120 bp, Artificial Sequence
  ENSG00000185821_0 (sequence is synthesized)
atgaaaaatagaacatcagtgacagatttcatccttctgggtctgacggataatccgcaactgcaggttgtgattttctcgttcctatttcttacgtatgtactgagtgttactggaaat

SEQ ID NO: 673120 - DNA, 120 bp, Artificial Sequence
  ENSG00000185821_1 (sequence is synthesized)
ctaactatcatctcccttaccctgctggattcccacctgaagacccccatgtatttcttcctcaggaatttctccttggaaatttcatttacttctgtctgtaatcctagatttctgatc

SEQ ID NO: 673121 - DNA, 120 bp, Artificial Sequence
  ENSG00000185821_2 (sequence is synthesized)
agcattctaacaggggacaaatccatatcttataatgcttgtgcagctcagctatttttctttatcttccttggctcaacggagtttttcctcctggcctctatgtcctatgattgctat

SEQ ID NO: 673122 - DNA, 120 bp, Artificial Sequence
  ENSG00000185821_3 (sequence is synthesized)
tttccaccactggccatgggcttacagctggatttctgtgactccaatgtcattgaccactttacctgtgactctgctcctttgctgcaaatctcttgcacagacacaagtactctagag

SEQ ID NO: 673123 - DNA, 120 bp, Artificial Sequence
  ENSG00000185821_4 (sequence is synthesized)
ctcatgagctttattttagctctgtttactcttatatccactttgatattagtaattctctcctatacttacatcatcagaactattctgagaatcccctcagcacagcaaagaaaaaaa

SEQ ID NO: 673124 - DNA, 120 bp, Artificial Sequence
  ENSG00000185821_5 (sequence is synthesized)
gccttttcaacctgctcctcacatgtgattgttgtctctatctcttatggaagctgcatcttcatgtatgtgaaaacatcagcaaaggaaggagttgctttgacaaaaggagtagctata

SEQ ID NO: 673125 - DNA, 120 bp, Artificial Sequence
  ENSG00000185821_6 (sequence is synthesized)
ctcaatacctctgtcgctcctatgctgaatccatttatttacactctaagaaaccagcaggtgaaacaagcatttaaggatgttctgagaaagatttcccacaaaaaaaaaaaacactga

SEQ ID NO: 673126 - DNA, 120 bp, Artificial Sequence
  ENSG00000185823_0 (sequence is synthesized)
tttgcgcccccgctggcgctccctggttctgtgaggaacctcgcggcggcgtcgcaggcgtagagccagtcagtttgtgcttggtcgccagaggaggcggtggctgaggagagttgagtc

SEQ ID NO: 673127 - DNA, 120 bp, Artificial Sequence
  ENSG00000185823_1 (sequence is synthesized)
cactgctgaccctgttttacggtaggaggcacggctagctctaaatgggcaatttacttagtaaatttagacccgggtgccgccgccggcccctgccagggccagggcgtggcgcccccg

SEQ ID NO: 673128 - DNA, 120 bp, Artificial Sequence
  ENSG00000185823_2 (sequence is synthesized)
ctcccctgtcccgggacgcctccccgcccggtcgggctcactctgtacccaccccgcgccctttccgcggcctgttccgccggaacgcccgtcgcaggccttcagcagccagcatcttcg

SEQ ID NO: 673129 - DNA, 120 bp, Artificial Sequence
  ENSG00000185823_3 (sequence is synthesized)
tcgcccctaagaggccgtgtcctctccctcgggctgcggccgcccctctgggggtcctgccggctgtgggttgggggctggccatcaggaagacacccatgctgcctgctcggaaccccc

SEQ ID NO: 673130 - DNA, 120 bp, Artificial Sequence
  ENSG00000185823_4 (sequence is synthesized)
cgaggtttggacaccccagttccgtaaggatccctcctcccagccgcatgttcactctcctgctgccttcaccacgtgagccggcggtcaaggccaggaagcccatcccagccactctcc

SEQ ID NO: 673131 - DNA, 120 bp, Artificial Sequence
  ENSG00000185823_5 (sequence is synthesized)
tggaggagaccgaggtgtgggcccaagaagggcccagaagagtgaagaaggatgaggatccggtgcagatcgaaggggaggatgacgagaaaaggaccccccttagcagcggagaagcat

SEQ ID NO: 673132 - DNA, 120 bp, Artificial Sequence
  ENSG00000185823_6 (sequence is synthesized)
cgtccacatccaggtcccagggcacccagggagacgtggcctccttcagatgcagccctgggcctctggagggaaatgtctaccacaagttctcagaaaacagcatgagtgagaaggccc

SEQ ID NO: 673133 - DNA, 120 bp, Artificial Sequence
  ENSG00000185823_7 (sequence is synthesized)
aggcgtctccagcgagctcctgcttggaaggccctgccatgcccagcacacacagccaggccggatgtgcccggcatcttggaaagcctgatccggatgcaacagcgccccctgagccag

SEQ ID NO: 673134 - DNA, 120 bp, Artificial Sequence
  ENSG00000185823_8 (sequence is synthesized)
ccgttggctgctccctgctgcagcagaagttggctgcggaagtgctgaatgaagagccaccgcccagctccctaggcttgccgattccgctgatgtccggaaagaggatgcctgatgaga

SEQ ID NO: 673135 - DNA, 120 bp, Artificial Sequence
  ENSG00000185823_9 (sequence is synthesized)
agcctttctgtattcctccaaggagcgctgctcctcccagagctgcccgcaacaggccctgcaaaaggaaaatgtcgattccattgctgctgccgctgcccccttcactgccattgctgt

SEQ ID NO: 673136 - DNA, 120 bp, Artificial Sequence
  ENSG00000185823_10 (sequence is synthesized)
gggatcgaggtgagcttcccccacctgctaagctcccctgcctgtctgttgagggagacctacacaccttggagaagagccctgagtataaaaggaatagcagaatcttggaggataaaa

SEQ ID NO: 673137 - DNA, 120 bp, Artificial Sequence
  ENSG00000185823_11 (sequence is synthesized)
cagagaccatgacaaacagcagcatcacccagcctgccccttctttctcccaacctgtgcagaccacagactccctgcccctgaccacttacacttcccaggtctcagctcctttgccca

SEQ ID NO: 673138 - DNA, 120 bp, Artificial Sequence
  ENSG00000185823_12 (sequence is synthesized)
tccctgacttggctgacctggctactggacccctcatcctgcctatccctccactttccaccacaccaaaaatggatgagaaaatagcattcacaatccctaactctcctctggctcttc

SEQ ID NO: 673139 - DNA, 120 bp, Artificial Sequence
  ENSG00000185823_13 (sequence is synthesized)
ctgctgaccttgttcccattttgggtgatcagtctaatgagaaaggaggctcttataattcagtcgtaggagcagcgcctctcacttctgaccccccaacacctcctagctccacaccct

SEQ ID NO: 673140 - DNA, 120 bp, Artificial Sequence
  ENSG00000185823_14 (sequence is synthesized)
ccttcaagcctcccgtcacaagggagtccccaatatctatgtgtgtggattcccctcctcctctttccttcctgactcttcttccagtcccttccaccgggacctcagttatcaccagca

SEQ ID NO: 673141 - DNA, 120 bp, Artificial Sequence
  ENSG00000185823_15 (sequence is synthesized)
agcctatgaattccacgtcagtcatttccactgtcacaacaaacgcatctgcccacctaacctcacagactgcggtagaccctgaagtagttaatatggatactactgccccatctcagg

SEQ ID NO: 673142 - DNA, 120 bp, Artificial Sequence
  ENSG00000185823_16 (sequence is synthesized)
ttgttattttcacatcttccctaagctccagagtgagctctctcccaaattcccaaatacattgcagtgcagagcagaggcacccgggaaagacatcagtctacacatccccacttccat

SEQ ID NO: 673143 - DNA, 120 bp, Artificial Sequence
  ENSG00000185823_17 (sequence is synthesized)
ttatattccacaataccaccccaagttttaaccaactctttggaaaagaagccacccctcagcccaaatttgaggctcctgatgggcagccgcagaaagcttctctccccagtgcctgtg

SEQ ID NO: 673144 - DNA, 120 bp, Artificial Sequence
  ENSG00000185823_18 (sequence is synthesized)
ttttcctgagccttcccatcattcctcctccagacacctccactttagtgaacagtgcctctacagcatcatcatccaaacctcccattgaaaccaatgctatgcataccactcctcctt

SEQ ID NO: 673145 - DNA, 120 bp, Artificial Sequence
  ENSG00000185823_19 (sequence is synthesized)
ccaaggctgtcatcttgcagtctgcctctgtctccaagaagtacctcccattttacctggggcttcctggttctgggaacacacaacccagcggcaacactgcctcagtccaaggctcca

SEQ ID NO: 673146 - DNA, 120 bp, Artificial Sequence
  ENSG00000185823_20 (sequence is synthesized)
ccagtttgcctgcacagtcagtcagggcaccagctacagcttccaaccatcctttaaatccaggagccacccctcaacccaaatttggggcccctgatgggccgcagcagaaaacctctc

SEQ ID NO: 673147 - DNA, 120 bp, Artificial Sequence
  ENSG00000185823_21 (sequence is synthesized)
tccccagtgcccatgatttcctgagccttcctatcatggttcctccagacacctccactttagtgagcagtgcctctgcagcatcgttatccaagcctgccattgacaccagtgacatga

SEQ ID NO: 673148 - DNA, 120 bp, Artificial Sequence
  ENSG00000185823_22 (sequence is synthesized)
ataccacccctccttccaaaactgtcatcttgcagtctacctttgtctccaggaaggaggagtacatccgattttatatggggcttcctggttctgggaacacactacacagtgacagca

SEQ ID NO: 673149 - DNA, 120 bp, Artificial Sequence
  ENSG00000185823_23 (sequence is synthesized)
ttgcctcagcccaagtctccaccagttttcctgcacaggcagataggagaccaaccacaacttccagccatcctttaaatacaggatccatctctcattccacacttggggccactgatg

SEQ ID NO: 673150 - DNA, 120 bp, Artificial Sequence
  ENSG00000185823_24 (sequence is synthesized)
ggcagcagaagtctgacagttcttttattctggggaatccagcaaccccagcaccagttataggcttaacatctccttcagtccagccactgagtggcagcataattccaccaggttttg

SEQ ID NO: 673151 - DNA, 120 bp, Artificial Sequence
  ENSG00000185823_25 (sequence is synthesized)
cagagttaacatcaccatatactgcattgggcacacctgttaatgctgagccagtcgagggtcacaatgcaagtgctttccccaatggcacagcaaagacttctggatttagaattgcca

SEQ ID NO: 673152 - DNA, 120 bp, Artificial Sequence
  ENSG00000185823_26 (sequence is synthesized)
ctgggatgcctggcactggagacagtaccttactggttggaaatactattccaggcccacaagtgattatgggacctggaacccctatggatggtgggagcattgggttcagcatgtctg

SEQ ID NO: 673153 - DNA, 120 bp, Artificial Sequence
  ENSG00000185823_27 (sequence is synthesized)
ccccaggccccagttccacatcaggagaactcaacattggacaaggacagagtgggacacccagcaccacttctgttttcccatttggtcaggcagcctgggacccaactggccacagca

SEQ ID NO: 673154 - DNA, 120 bp, Artificial Sequence
  ENSG00000185823_28 (sequence is synthesized)
tggctgctgcaccacaaggggctagcaacattcctgtatttggatatacttctgctgccgcctacattcctggtttagacccacctacccagaattcatgcagtggtatgggaggggatg

SEQ ID NO: 673155 - DNA, 120 bp, Artificial Sequence
  ENSG00000185823_29 (sequence is synthesized)
gcaccagatccatagttggaggcccttgtgttcctgcttttcaacagtgcatcctgcagcacacatggacagagagaaaattctacacttcaagcacccactactatggacaagaaacat

SEQ ID NO: 673156 - DNA, 120 bp, Artificial Sequence
  ENSG00000185823_30 (sequence is synthesized)
atgttaggagacatgtctgtttccaacttccgtaagagcacctgtggttcacctgatcacaccacatcagttgtggttgtaaataccagcattatccttttgtatggtcatgcttctagt

SEQ ID NO: 673157 - DNA, 120 bp, Artificial Sequence
  ENSG00000185823_31 (sequence is synthesized)
ttcatcttcatgccaagcacctgccatgtacctctccagaactcaggttgtgcaccaggaggggacaacaacatccctgtgctccctttctctgtcagtacacatgggtcccacctggac

SEQ ID NO: 673158 - DNA, 120 bp, Artificial Sequence
  ENSG00000185823_32 (sequence is synthesized)
tggtgcatctgcagtgaatggcaacatatctttaattagaggcccttgtgtatccacctaccaacaaagtacctagggcccacctggacaaaacacagatggtacctcttccaggagtgt

SEQ ID NO: 673159 - DNA, 120 bp, Artificial Sequence
  ENSG00000185823_33 (sequence is synthesized)
caacattcatttgatagaaggccctcatgtgcccatgtatcagcaaagcacctggggcccacctggacaaagcacaaaccatgcaatgagggacagcaacacaacggctgtgactggttg

SEQ ID NO: 673160 - DNA, 120 bp, Artificial Sequence
  ENSG00000185823_34 (sequence is synthesized)
tacttttggtcccccatttacacaaagcacctgaggcccacctggctaaatgcaggtggtgcaataggagatagccccagatatttgtagggagaaacctctagtctccctttcagtaaa

SEQ ID NO: 673161 - DNA, 120 bp, Artificial Sequence
  ENSG00000185823_35 (sequence is synthesized)
agaaacctctagtctccctttcagtaaaaatactatggacctgcccaaccaaggtgctccttttgactttagaggaaccagcattgtttttgttttggtttgtttgtttgtttgtttgtt

SEQ ID NO: 673162 - DNA, 120 bp, Artificial Sequence
  ENSG00000185823_36 (sequence is synthesized)
gtgtgagccaccatgcccagcctagaggagccagcattgttagttaaatacttgtgtttggatggtcctggtcagagcacctgtgcctgtgatggaaagcagccactagtgacacttgta

SEQ ID NO: 673163 - DNA, 120 bp, Artificial Sequence
  ENSG00000185823_37 (sequence is synthesized)
cctgccaaggccttcataggagccaccaactcattttttactcctatcaatggtcttaagaaataagcactctccctgcacatacagttctcataaattgacattgttccaggaggaatg

SEQ ID NO: 673164 - DNA, 120 bp, Artificial Sequence
  ENSG00000185823_38 (sequence is synthesized)
gaggaatgggctcagttccctcaaggttaaacttaacctgctctcttcctacagaagctggaggcccaaaaccacagacagagagagagagagtgtgtgtgtttgtgtgtgtgtgtgtgt

SEQ ID NO: 673165 - DNA, 120 bp, Artificial Sequence
  ENSG00000185823_39 (sequence is synthesized)
gtgagtgtggagcagatgagcccagtcagaaccgcactgtattttagtggtcttctgcactgtggagggtagaggaaacctggcttgactgttaacttggctgaccctacctctgggcca

SEQ ID NO: 673166 - DNA, 120 bp, Artificial Sequence
  ENSG00000185823_40 (sequence is synthesized)
gttctctctagtcatggacagaaaggcaaaattcccgactttgtggaccctatattctagttgaaggggagaaaagaagcaaaaacatggaaattatctggtaaattagccagtaacgaa

SEQ ID NO: 673167 - DNA, 120 bp, Artificial Sequence
  ENSG00000185823_41 (sequence is synthesized)
tgctatgaaaaataaagaagtacatggaggattgagattgtagatagaagcaggtgtttcagtttacactgtgaacaagcctcactgggaaggtaaatttaaacgaagcctagagagaag

SEQ ID NO: 673168 - DNA, 120 bp, Artificial Sequence
  ENSG00000185823_42 (sequence is synthesized)
cagttgagccagatatatgagcaaagacctttccagataataggagtggtcattgcagaggctcaaaggaaggatccctggtgtcctcatggagcagttagtaaggaaatgtggctggaa

SEQ ID NO: 673169 - DNA, 120 bp, Artificial Sequence
  ENSG00000185823_43 (sequence is synthesized)
tggagtcagcaagtgggagggagggatagagaagaggacagaggagagatgtgagtggaattccttcctccactttttactaattgtgtaataacagttgactcaaacttcaaaagtctc

SEQ ID NO: 673170 - DNA, 120 bp, Artificial Sequence
  ENSG00000185823_44 (sequence is synthesized)
aatgaaatcagtacttttactatggcctgtttatctcataagatttttgaaaggataaaatgaaataatatggagaaatgacttataagcttttgttgtaatttgttatatacataggga

SEQ ID NO: 673171 - DNA, 120 bp, Artificial Sequence
  ENSG00000185823_45 (sequence is synthesized)
tggatagacggatggatagattagatgatagatagatagatagatagatgataacgttatggactgaatgtttgtgtacccccaaaaattgatattttgaagcctaacttccagtgtgat

SEQ ID NO: 673172 - DNA, 120 bp, Artificial Sequence
  ENSG00000185823_46 (sequence is synthesized)
ggtattaggaggtgaggctttggggaggtgattaggtttagatgaagtcatgaaaatgaaacccccatgatgggatttgcgcctttatgagaagaaataccagtgctttctctaattgcc

SEQ ID NO: 673173 - DNA, 120 bp, Artificial Sequence
  ENSG00000185823_47 (sequence is synthesized)
atgtgaaggtataccaacaaggtaacagtctgtaagccaggaaaagagtcctcacaagaaacagaatttgtctttatcttggacttcctaacctttagaattgtagaaaataattgaatg

SEQ ID NO: 673174 - DNA, 120 bp, Artificial Sequence
  ENSG00000185823_48 (sequence is synthesized)
ttgtttaagctaccagtctgtggcattttttgtagcaatcagaactgactaataaagatagatagatgatagatagatacatagatagatgatagagatagatgatagatagatagatag

SEQ ID NO: 673175 - DNA, 120 bp, Artificial Sequence
  ENSG00000185823_49 (sequence is synthesized)
atagatagataatatacatatatatgtatggtcaatgactgagttccttaggcaatggtgccctgattgcctttattaggcaattcaaatagaagaatagaagaaccccctttttttttt

SEQ ID NO: 673176 - DNA, 120 bp, Artificial Sequence
  ENSG00000185823_50 (sequence is synthesized)
cagtggcgtgatcttggctcactgcacgctccacctctcggaagaacccctttttattagcataaaagcacttacttttatgaagcaaacacatgtaaaaatatgataacagagactaaa

SEQ ID NO: 673177 - DNA, 120 bp, Artificial Sequence
  ENSG00000185823_51 (sequence is synthesized)
gcaaacacatgtaaaaatatgataacagagactaaaacatttatgagattaggcctgaaagaaaacaatcacagagaaattactgaattcctcttggcaccctggggcctgattcattcg

SEQ ID NO: 673178 - DNA, 120 bp, Artificial Sequence
  ENSG00000185823_52 (sequence is synthesized)
ctctaaattgtttagtacagttccagaggatcaaagctcctgtttcctggccagataatcacctaacttttgtaatcagaactgcctttcagaagtagagtggaaatccagttttcttct

SEQ ID NO: 673179 - DNA, 120 bp, Artificial Sequence
  ENSG00000185823_53 (sequence is synthesized)
aatagccctatacccttgcagtattaccagggacaaattttttaaaattcatacttcttgacattttttaaaaggcttcaagctaaatattatgatcctggtaagacaaactttgaataa

SEQ ID NO: 673180 - DNA, 120 bp, Artificial Sequence
  ENSG00000185823_54 (sequence is synthesized)
atgtgtgagagatacaaagataatttttgttttcatgttttgatgcacttacacaactgaaactatttctaaatattcttttattttttattaagataaaaagcaaacataatatcaatt

SEQ ID NO: 673181 - DNA, 120 bp, Artificial Sequence
  ENSG00000185823_55 (sequence is synthesized)
taaataatactgaaagtcaaccttcctaccacagttccctcctccagagatagtgtttagctactttgatgtcactcccatagttctgagtttgcttttttacttcaactattatgttat

SEQ ID NO: 673182 - DNA, 120 bp, Artificial Sequence
  ENSG00000185823_56 (sequence is synthesized)
cttacagatgtcattgtttttcctaaaacttgaagtgccttcctttttttctccttgaactcttttcccataaaaaaaaaatgtttttggtttctagaattttcaaatagtattgtttac

SEQ ID NO: 673183 - DNA, 120 bp, Artificial Sequence
  ENSG00000185823_57 (sequence is synthesized)
tttcaaatagtattgtttacttgactgaatcccttccttttccagaaaccttgagcctcctccactggtttgggagtggtaagaccaaagtaaatgtaaaaagtaaagtagaggttcctc

SEQ ID NO: 673184 - DNA, 120 bp, Artificial Sequence
  ENSG00000185823_58 (sequence is synthesized)
ctttcctccctatctaattagaaataagtagtaacttcttttagaagcaaaatgtattcacagacctgtactaacattcttaaatatctgctagtcataataaagaaatcaatgtacttt

SEQ ID NO: 673185 - DNA, 120 bp, Artificial Sequence
  ENSG00000185825_0 (sequence is synthesized)
gtgggagagttctgttgctgcggcggggcctgcacgttgactgtgggaaactcggaaacaagctcacatcttcctgtgggaaaccttctagcaacaggatgagtctgcagtggactgcag

SEQ ID NO: 673186 - DNA, 120 bp, Artificial Sequence
  ENSG00000185825_1 (sequence is synthesized)
ttgccaccttcctctatgcggaggtctttgttgtgttgcttctctgcattcccttcatttctcctaaaagatggcagaagattttcaagtcccggctggtggagttgttagtgtcctatg

SEQ ID NO: 673187 - DNA, 120 bp, Artificial Sequence
  ENSG00000185825_2 (sequence is synthesized)
gcaacaccttctttgtggttctcattgtcatccttgtgctgttggtcatcgatgccgtgcgcgaaattcggaagtatgatgatgtgacggaaaaggtgaacctccagaacaatcccgggg

SEQ ID NO: 673188 - DNA, 120 bp, Artificial Sequence
  ENSG00000185825_3 (sequence is synthesized)
ccatggagcacttccacatgaagcttttccgtgcccagaggaatctctacattgctggcttttccttgctgctgtccttcctgcttagacgcctggtgactctcatttcgcagcaggcca

SEQ ID NO: 673189 - DNA, 120 bp, Artificial Sequence
  ENSG00000185825_4 (sequence is synthesized)
cgctgctggcctccaatgaagcctttaaaaagcaggcggagagtgctagtgaggcggccaagaagtacatggaggagaatgaccagctcaagaagggagctgctgttgacggaggcaagt

SEQ ID NO: 673190 - DNA, 120 bp, Artificial Sequence
  ENSG00000185825_5 (sequence is synthesized)
ccagcactaagcaaaaactagagaaagctgaaaaccaggttctggccatgcggaagcagtctgagggcctcaccaaggagtacgaccgcttgctggaggagcacgcaaagctgcaggctg

SEQ ID NO: 673191 - DNA, 120 bp, Artificial Sequence
  ENSG00000185825_6 (sequence is synthesized)
cagtagatggtcccatggacaagaaggaagagtaagggcctccttcctcccctgcctgcagctggcttccacctggcacgtgcctgctgcttcctgagagcccggcctctccctccagta

SEQ ID NO: 673192 - DNA, 120 bp, Artificial Sequence
  ENSG00000185825_7 (sequence is synthesized)
cttctgtttgtgcccttctgcttcccccattcccttccacagctcatagctcgtcatctcggcccttgtccacactctccaagcacattacaggggacctgattgctacacgttcagaat

SEQ ID NO: 673193 - DNA, 120 bp, Artificial Sequence
  ENSG00000185825_8 (sequence is synthesized)
gcgtttgctgtcatcctgcttggcctggccaggcctggcacagccttggcttccacgcctgagcgtggagagcacgagttagttgtagtccggcttgcggtggggctgacttcctgttgg

SEQ ID NO: 673194 - DNA, 120 bp, Artificial Sequence
  ENSG00000185825_9 (sequence is synthesized)
tttgagcccctttttgttttgccctctgggtgttttctttggtcccgcaggagggtgggtggagcaggtggactggagtttctcttgagggcaataaaagttgtcatggtgtgtacgtgg

SEQ ID NO: 673195 - DNA, 120 bp, Artificial Sequence
  ENSG00000185825_10 (sequence is synthesized)
gcgcttccggtttccggccgcggtatgaggggcggggccggggctgctgtgggagagttctgttgctgcggcggggcctgcacgttgactgtgggaaactcgaacgcctttcagttaaac

SEQ ID NO: 673196 - DNA, 120 bp, Artificial Sequence
  ENSG00000185825_11 (sequence is synthesized)
gggcgtcggaaatctcgggcttcctggggcagggatcgtcgggagaggccgctctggacgtgttgacacacgtgctggagggggcaggaaacaagctcacatcttcctgtgggaaacctt

SEQ ID NO: 673197 - DNA, 120 bp, Artificial Sequence
  ENSG00000185825_12 (sequence is synthesized)
gttgtcattgggtctcgcttgcaggctgggatcttgctccctgtctcccactctcagcctccctggaggttacccttgccgagagccactagagttcctctccattaaagggactggggg

SEQ ID NO: 673198 - DNA, 120 bp, Artificial Sequence
  ENSG00000185825_13 (sequence is synthesized)
atggcctctgtgtttcttttgctttatcttgagcttttttgtcagccctttccctctactttgggggcctgcaaaagcagaggggctttattttgagaagtagcctcctgtataacctcg

SEQ ID NO: 673199 - DNA, 120 bp, Artificial Sequence
  ENSG00000185825_14 (sequence is synthesized)
tttgagatagatttgggccagtttctggtgtctgtagcagtcgggttttttccccctaattcctgtcttttcgtttctgttttcttggtcatttacatcatttcaagaactagagaaagc

SEQ ID NO: 673200 - DNA, 120 bp, Artificial Sequence
  ENSG00000185825_15 (sequence is synthesized)
tgtgggagagttctgttgctgcggcggggcctgcacgttgactgtgggaaactcggtgagcgggctccgcgcgccgggctgggctccgggaccgcggaggctccccggcccatcgacgag

SEQ ID NO: 673201 - DNA, 120 bp, Artificial Sequence
  ENSG00000185825_16 (sequence is synthesized)
aggagcggccgggatgggcctccgggacggtgtgccaggccggggccaagtcggaggcccctcgctctgggtgggcgctggggcccgcgagggctactgaaacaagctcacatcttcctg

SEQ ID NO: 673202 - DNA, 120 bp, Artificial Sequence
  ENSG00000185825_17 (sequence is synthesized)
tcgcccggagcccgaggcgcctcttcctctcccgctcggagcgccggccctccgctccggggcggggtgggaagcggaggaaacaagctcacatcttcctgtgggaaaccttctagcaac

SEQ ID NO: 673203 - DNA, 120 bp, Artificial Sequence
  ENSG00000185825_18 (sequence is synthesized)
ggccttttttccaatagtcttgaatggatgtcaaattagagaattgcaagccactgaggctgactttgcatgggctattcggccattggagaagagtacaaagctggatttccattttgc

SEQ ID NO: 673204 - DNA, 120 bp, Artificial Sequence
  ENSG00000185825_19 (sequence is synthesized)
aagtcggaggcccctcgctctgggtgggcgctggggcccgcgagggctactgtaaggacccctggcttctgaggatactgcgtctagaactttctccgtatggggccttgaggtgcttgg

SEQ ID NO: 673205 - DNA, 120 bp, Artificial Sequence
  ENSG00000185825_20 (sequence is synthesized)
tcgagacctgcctttgcgcttggtcccgaatcctgccctctaggagtcgctcttgcgggcctccagcccaccggaggcgaagcggccccgggcggaaggccgctggatcctcgagggagg

SEQ ID NO: 673206 - DNA, 120 bp, Artificial Sequence
  ENSG00000185825_21 (sequence is synthesized)
tgccggtttctctccgcgggcgccgtggggacggtgggaggcgggggcgtcggcagcgcttggactaggtgcggccttgggcctgcctggtagcggggatttgggcccgcagagcgcccg

SEQ ID NO: 673207 - DNA, 120 bp, Artificial Sequence
  ENSG00000185825_22 (sequence is synthesized)
ccttctctgccaggaatcaacggcctggctctcctggtgctgccaggggcccctgggagcctctccccaaaccaggaacctcaggggtgtctcctggcccgggccctgtgtgacccttgc

SEQ ID NO: 673208 - DNA, 120 bp, Artificial Sequence
  ENSG00000185825_23 (sequence is synthesized)
cttctgaggtgtgtgagaaaggaacccctgccttgttttgactgtttgaacgagtccttccctcctctcttcctgccagctaacatctcggggcaagggtgaaccaagggaaatgaagtg

SEQ ID NO: 673209 - DNA, 120 bp, Artificial Sequence
  ENSG00000185825_24 (sequence is synthesized)
gccattccaatctctgtttggggactagcatctgcctccagctgccacctgtttgcctgtctctcctggctgcttcagagaggcagcctgcgcctgtgtcctgattcctctacaccctcc

SEQ ID NO: 673210 - DNA, 120 bp, Artificial Sequence
  ENSG00000185825_25 (sequence is synthesized)
tggggggttgagggggcaggtgctgtgaaaggagccatgggctagccatggacaccgagctcagtgggctcagtctcccccctgtgactttgattcctcctcagtctgtggcctggatcc

SEQ ID NO: 673211 - DNA, 120 bp, Artificial Sequence
  ENSG00000185825_26 (sequence is synthesized)
agtgcagggggtcagggtggagagtggcggccccagcctcgcagggtaactgaactggatgttcttggctgcccagcgcttacaagtcccgtaccttttgtgccctgccaggaaacaagc

SEQ ID NO: 673212 - DNA, 120 bp, Artificial Sequence
  ENSG00000185825_27 (sequence is synthesized)
ggtgggcgctggggcccgcgagggctactgtaaggacccctggcttctgaggatactgcgtctagaactttctccgtatggggccttgaggaaacaagctcacatcttcctgtgggaaac

SEQ ID NO: 673213 - DNA, 120 bp, Artificial Sequence
  ENSG00000185829_0 (sequence is synthesized)
gtggtttagctgaactgagctgaaatcctaaaggccgcggagtcggcggtgttgtaggtagcggtaccttgagtggcaacagaattcgattaaattacaatgggaaacatttttgaaaag

SEQ ID NO: 673214 - DNA, 120 bp, Artificial Sequence
  ENSG00000185829_1 (sequence is synthesized)
ctctttaaaagtctacttgggaaaaaaaagatgcggattcttatattgagtttggatacagctggaaaaaccaccatcttgtataaattgaagctgggggagactgtgcctgccgtccct

SEQ ID NO: 673215 - DNA, 120 bp, Artificial Sequence
  ENSG00000185829_2 (sequence is synthesized)
acagtaggtttctgtgtggagacagtagaatataaaaataacaccttcgctgtctgggatgttggcagccacttcaaaatcagacctctgtggcagcattttttccagaacacaaaaggt

SEQ ID NO: 673216 - DNA, 120 bp, Artificial Sequence
  ENSG00000185829_3 (sequence is synthesized)
gccagaagcccaggaagcacacatcaaggctcacttgccagcggggtgctgccaataaaatgtagtcacgtggaatttggaatgtggaaaggaggtagaagtcatcctttcctcccccat

SEQ ID NO: 673217 - DNA, 120 bp, Artificial Sequence
  ENSG00000185829_4 (sequence is synthesized)
agcagcaggtgtgcaggctctggtggtcagctggactccatactcccccaccagtcaccagcctggggaccgtggggctgcaaggacctcagcagcggtttcccaagtttcctgacttct

SEQ ID NO: 673218 - DNA, 120 bp, Artificial Sequence
  ENSG00000185829_5 (sequence is synthesized)
tccatcctctggaaatcagctgtggtaaagtagcctgaaagccagtggtgcaaccccatccccacaaccttcaccacctctagcacctccagtgataagcactaattgcctatatacaac

SEQ ID NO: 673219 - DNA, 120 bp, Artificial Sequence
  ENSG00000185829_6 (sequence is synthesized)
ccttttttgtttgaaatatctagagtaatttctgttttcctatctggggtagtgtaacataagaagaaatatatatttggtctctgcccccagttcctaacacaaagctcctaaaaccct

SEQ ID NO: 673220 - DNA, 120 bp, Artificial Sequence
  ENSG00000185829_7 (sequence is synthesized)
tggaaattcctgaatgatggcggtgctaagagcattgtcctttgttaatttatcatttttcttttctcctaggtgttttttcctttttaaacttttcttttaggttagggggtacatatg

SEQ ID NO: 673221 - DNA, 68 bp, Artificial Sequence
  ENSG00000185829_8 (sequence is synthesized)
tcctttttaaacttttcttttaggttagggggtacatatgcacgttcgttatatagccaagcctagta

SEQ ID NO: 673222 - DNA, 120 bp, Artificial Sequence
  ENSG00000185829_9 (sequence is synthesized)
caccctcaggtagggcccagtgtctgttgtttatgagttctcatcattttgctcccacttaaaagaacatacagtatttggttttctgttcctgtcttagtttgctgaggataatggcct

SEQ ID NO: 673223 - DNA, 120 bp, Artificial Sequence
  ENSG00000185829_10 (sequence is synthesized)
ctagctccatctgtgttcctgcaaaagacatgatctcgctgttttttatggttgcacatcttttgttctaacatttggtccttaaacctggttcctgacacagagctcctaaatcccttg

SEQ ID NO: 673224 - DNA, 120 bp, Artificial Sequence
  ENSG00000185829_11 (sequence is synthesized)
gaattttctgggtgatagaagcgtcctttgttctcatgaggtgactcttggtgggctccttatttggggactggtcaccaaaaagacctatggttggaagcgttgtgctgtcagccccat

SEQ ID NO: 673225 - DNA, 120 bp, Artificial Sequence
  ENSG00000185829_12 (sequence is synthesized)
tccccatcctctggcgtggggagtagagctggagctcaatcatgcctacgtgataaagcctccagaaaactccttaaaagacaggacttggagagcttccgggttggcgaacacatccat

SEQ ID NO: 673226 - DNA, 120 bp, Artificial Sequence
  ENSG00000185829_13 (sequence is synthesized)
gttccaggagagtggtgcaccccaactccacaaggacccttccaaacctcaccctgtgtatctcttcaactggcttcatcatttgtgtcctttaaaatatcctttgtaataaatcagcac

SEQ ID NO: 673227 - DNA, 120 bp, Artificial Sequence
  ENSG00000185829_14 (sequence is synthesized)
tagtaagaaaactgttttcctgggttccatgagctgttctagcaaatgttcaaacctgaggagggagttgtggggacctccaatttacagccagttggtcagatgcataggtgatgcttg

SEQ ID NO: 673228 - DNA, 120 bp, Artificial Sequence
  ENSG00000185829_15 (sequence is synthesized)
gccttgcacctggggtctgacatgcggatggtcctgtgtgactgagcccttaacctgtggagtctggtgctcactctgcttagggcttctcttgcctttttagtgtccttctaggcggcc

SEQ ID NO: 673229 - DNA, 120 bp, Artificial Sequence
  ENSG00000185829_16 (sequence is synthesized)
ggttccactgccaccatgctgtcccacactgtctcctcaggatgtattcagatgtccagccctccccccagtctaggagccccccctttgaggaaagggatgctggcctagtcaactctt

SEQ ID NO: 673230 - DNA, 120 bp, Artificial Sequence
  ENSG00000185829_17 (sequence is synthesized)
tcccagcaccaggtacagcatctggcacgttccatctttttcatggactctccccaggcggcctgaccttccctcctctgaaccggtgcatttcttgtctgcatcatgtttgccctaatc

SEQ ID NO: 673231 - DNA, 120 bp, Artificial Sequence
  ENSG00000185829_18 (sequence is synthesized)
agatatcaccttatttcctcttttaaaaaatgctttgtttctctggcaggcttcatcggaatcacaattttcattcatttagtaactgttgttgtttattctatgtatttttgcaggagg

SEQ ID NO: 673232 - DNA, 120 bp, Artificial Sequence
  ENSG00000185829_19 (sequence is synthesized)
cctgaggtgggctgtgttctcctcctatggcagggcttcactctcctcctcctccgttggggcttcgctgtccctgggataagaataacaatgccaaggttttcattcttgaaaggagca

SEQ ID NO: 673233 - DNA, 120 bp, Artificial Sequence
  ENSG00000185829_20 (sequence is synthesized)
attaagcttctcaccccctcctcattttagatgggaactgtgagggccccatcatttacccagggtccctgttgaggatcttgtcctcattagatgacttcttgtgcagcttccatgcat

SEQ ID NO: 673234 - DNA, 120 bp, Artificial Sequence
  ENSG00000185829_21 (sequence is synthesized)
gattatttattcttgtggcactgagaggtttgtacatatctttaaaccagagcggctgtccaaatgaggaaagtccatcctagaagatagaaagggaaatattaattttgcatgtcctct

SEQ ID NO: 673235 - DNA, 120 bp, Artificial Sequence
  ENSG00000185829_22 (sequence is synthesized)
gctttccctggccacagcaatgaatcctccaatgtacctgactctcccttcgcgaagagcatcccctccatggcagaaatctgaaaatgcccctggggagacacatgcacaagacagtga

SEQ ID NO: 673236 - DNA, 120 bp, Artificial Sequence
  ENSG00000185829_23 (sequence is synthesized)
gtgatgcagccgtttcccacgtatctcacaatgtacttctctggtcttattaggactaaatgagtatctcagtccataatcacagggagaaccaccaccacagaccacatacccggggtc

SEQ ID NO: 673237 - DNA, 120 bp, Artificial Sequence
  ENSG00000185829_24 (sequence is synthesized)
ttgaaaataattccatgcatgtgggactttcagaagctctccatgtctgcccagaagggccccacaatatactggggggactttgtatgtggctcagcatggagcaggggcaggattttc

SEQ ID NO: 673238 - DNA, 120 bp, Artificial Sequence
  ENSG00000185829_25 (sequence is synthesized)
agtcccactcactcccttggccaagtgcccttgtgcagtgaacaaactgcacaaccatgctgggcagaagcattttatatcagtccccttcggacttagtctcacaggcatcatttgatg

SEQ ID NO: 673239 - DNA, 120 bp, Artificial Sequence
  ENSG00000185829_26 (sequence is synthesized)
ggggatgggagatgaagtggttcttcgttttctagatactttattctataagttggatcacctcaagcaaatgcgtgagtgcagctagccaagttctctatctcacagtcttcatatggc

SEQ ID NO: 673240 - DNA, 120 bp, Artificial Sequence
  ENSG00000185829_27 (sequence is synthesized)
tggctgtcgctgatgagtgagtgagctacgaaatcagcttaaagcacaacatgttatttttgaatttgaataaaataggaaaaggcagagtgcattgtgtgaccatggggtaagtaagac

SEQ ID NO: 673241 - DNA, 120 bp, Artificial Sequence
  ENSG00000185829_28 (sequence is synthesized)
actctccctttctccttctcagttttcctgtcataaaaggacaaactactatctaaggtctccgtagttaaaattcttttttgttgttttttttttatttgagacagtttggctcattcc

SEQ ID NO: 673242 - DNA, 84 bp, Artificial Sequence
  ENSG00000185829_29 (sequence is synthesized)
ttgttgttttttttttatttgagacagtttggctcattccccaggctggagtgcaatggtgctatcttggctccctgcaacctg

SEQ ID NO: 673243 - DNA, 88 bp, Artificial Sequence
  ENSG00000185829_30 (sequence is synthesized)
gttggtcaggctggtcacgagctcctaacctcaagtgatcctgcctggcctttctggttaaaattctgtgaggtttgcataaaaggaa

SEQ ID NO: 673244 - DNA, 120 bp, Artificial Sequence
  ENSG00000185829_31 (sequence is synthesized)
cctttctggttaaaattctgtgaggtttgcataaaaggaatagagtaggggcccaaaaaccagtaagatgagaaaatagtgtttcctcagttctaggatccaggggaaaaaaaaaagaaa

SEQ ID NO: 673245 - DNA, 120 bp, Artificial Sequence
  ENSG00000185829_32 (sequence is synthesized)
tatccatcccatctcttggacagatgatgccagttaattactttgaataaatatgggcaaaagcttatcattatcaacaaatgagaagaaagaaaccctatgccaggtaacaccaaagct

SEQ ID NO: 673246 - DNA, 120 bp, Artificial Sequence
  ENSG00000185829_33 (sequence is synthesized)
ttggcccagtgccctctgttgaaacatcctaggctttttctttccactcctattacaactgatctgatttggccccttcacacctcactcctagattttgctagacctttctattttgtc

SEQ ID NO: 673247 - DNA, 120 bp, Artificial Sequence
  ENSG00000185829_34 (sequence is synthesized)
tccctgaattaagcttttccttttggacactttacatatggattctaaaacaatcctctgcatgtctacacttgcacataatgcaaaaaacaaaataaaataatcttcctgttttgatca

SEQ ID NO: 673248 - DNA, 120 bp, Artificial Sequence
  ENSG00000185829_35 (sequence is synthesized)
gaagagggctgactgtatctaacttagggtcttgcatgcagctggcacttaatacattttattgactgttttagataacattcaacagataattcctaataaaaactcttaaaagtagga

SEQ ID NO: 673249 - DNA, 120 bp, Artificial Sequence
  ENSG00000185829_36 (sequence is synthesized)
ctcggctccaaccggttccacttcttcaggctcaggattttcactcttctcgaatgggggtggccctcccccaatcttctgagtcgcaacagcatctccctccctccaggacctcagagc

SEQ ID NO: 673250 - DNA, 120 bp, Artificial Sequence
  ENSG00000185829_37 (sequence is synthesized)
acaccaagctcctccatacaagacctcggactgcatcacgtaaatgctttttcaggggcaaaatctagagaatctgaaatggtgagcctttttcctttttttttttttttttgagatgaa

SEQ ID NO: 673251 - DNA, 120 bp, Artificial Sequence
  ENSG00000185829_38 (sequence is synthesized)
agcctgacaagttgatgccactgctgtctgagggctcctctggctcaacaatcagctcagtgcttgtgtagttcttccgggcttgtaacaccttcatgaacgctccttctggattcccta

SEQ ID NO: 673252 - DNA, 120 bp, Artificial Sequence
  ENSG00000185829_39 (sequence is synthesized)
ccgatgcttcttcagctgtcaaaaaagaagagactgctttgatcatgaaagatgatgggatgggatgcatcagtccatagctgtacaccccagtcacacagagtaggagtcagcaaacat

SEQ ID NO: 673253 - DNA, 120 bp, Artificial Sequence
  ENSG00000185838_0 (sequence is synthesized)
ctctggacgctgcgcggcgctcctaggagcaggcgttcccgactccggcaagagggtggcgcctggactctcgccctcagagggaggcccgtcccacggtctgtggctacggatcccagg

SEQ ID NO: 673254 - DNA, 120 bp, Artificial Sequence
  ENSG00000185838_1 (sequence is synthesized)
accctcttcgcgggcgattcgcgtagcctcaggtaactgcatcctgcccagcatgacggccccctgcccgccgccacctccagacccccagtttgtcctccgaggcacccagtcaccggt

SEQ ID NO: 673255 - DNA, 120 bp, Artificial Sequence
  ENSG00000185838_2 (sequence is synthesized)
gcatgcgctgcacttctgcgaaggagcccaggctcaggggcgcccgctcctcttctcagggtctcagagtggcctggtacacatctggagcctgcagacgcggagagcggttaccaccct

SEQ ID NO: 673256 - DNA, 120 bp, Artificial Sequence
  ENSG00000185838_3 (sequence is synthesized)
ggatggccacggcggccagtgtgtgacctggctgcagacgctgccccaggggcgccagctcctcagtcagggccgggacctgaagctgtgcctgtgggacctcgcggagggcaggagcgc

SEQ ID NO: 673257 - DNA, 120 bp, Artificial Sequence
  ENSG00000185838_4 (sequence is synthesized)
tgtcgtggactccgtgtgcttggagagtgtgggcttctgccggagcagcatcctggccgggggccagccacgctggacgcttgccgtgccagggaggggcagcgacgaggttcagattct

SEQ ID NO: 673258 - DNA, 120 bp, Artificial Sequence
  ENSG00000185838_5 (sequence is synthesized)
ggagatgccctccaagacgtcagtgtgcgccctgaagccgaaggcagatgccaagctgggcatgcccatgtgcctgcggctgtggcaggccgactgcagctcccgcccactccttctggc

SEQ ID NO: 673259 - DNA, 120 bp, Artificial Sequence
  ENSG00000185838_6 (sequence is synthesized)
cggctatgaggatggatcggtggtcctgtgggacgtctctgagcagaaggtgtgcagccgcatcgcctgccatgaggagcccgtcatggaccttgactttgactcccagaaggccagggg

SEQ ID NO: 673260 - DNA, 120 bp, Artificial Sequence
  ENSG00000185838_7 (sequence is synthesized)
catctcaggctccgcggggaaggcgctggctgtctggagcctggactggcagcaggccctgcaggtgcgtgggactcatgaactcaccaatcccgggatcgccgaggtcacgatccggcc

SEQ ID NO: 673261 - DNA, 120 bp, Artificial Sequence
  ENSG00000185838_8 (sequence is synthesized)
agatcgcaagatcctggccaccgcaggctgggaccaccgcatccgcgtgttccactggcggacgatgcagccactggccgtgctggccttccacagcgccgctgtccagtgcgtggcctt

SEQ ID NO: 673262 - DNA, 120 bp, Artificial Sequence
  ENSG00000185838_9 (sequence is synthesized)
caccgccgatggcttgctggccgcgggctccaaggatcagcggatcagcctctggtcactctacccacgcgcatgactcacccactcccttcccgggagacgaggagggcgggcagggag

SEQ ID NO: 673263 - DNA, 120 bp, Artificial Sequence
  ENSG00000185838_10 (sequence is synthesized)
gtgggcatcaggccccagccttggcctgaaacctcaagggcctctgaggaccagcaagtcatggcccaaggaccatggagtccccgctgtcttcatgaggttggtatttccttttgtgga

SEQ ID NO: 673264 - DNA, 120 bp, Artificial Sequence
  ENSG00000185838_11 (sequence is synthesized)
gtgcctcatcacaggacggtgactctgggggccagccagagccctggccgtccgaggcctgcaggagacgttggcttgggcctgctgtgttgccagctgagggtattttataataaattt

SEQ ID NO: 673265 - DNA, 120 bp, Artificial Sequence
  ENSG00000185838_12 (sequence is synthesized)
ccattgccaagttgcaggcttgaggtgggagctccctgaggaggccctggtcccccacttagcatcagtgccctcagacccccaccaggcaggatgctcagccccaccctcacacctgct

SEQ ID NO: 673266 - DNA, 120 bp, Artificial Sequence
  ENSG00000185838_13 (sequence is synthesized)
gttgaatgggccaccccgagtgtgggtttcctgggccaggcctcaggagatgataggccccaaccatagctgcgtcgatgtccacatgacccctcaccccgaggaggccaggagctccca

SEQ ID NO: 673267 - DNA, 120 bp, Artificial Sequence
  ENSG00000185838_14 (sequence is synthesized)
acacacaggttgaggccaggatcaggatcaggaagtaactgaactccctaaagagtgaagcagagaaaggtgcctgtgagggacggcaaggggggcttgcagcgcacagggccaggccag

SEQ ID NO: 673268 - DNA, 120 bp, Artificial Sequence
  ENSG00000185838_15 (sequence is synthesized)
atgtgggatccgggagggcacgcctgcccgcagagggtgcagtggggaaggcgcacagggtgcacctccaggtgagtgctgggcagaaggcacgagagcagcaagggagtgtgacaagca

SEQ ID NO: 673269 - DNA, 120 bp, Artificial Sequence
  ENSG00000185838_16 (sequence is synthesized)
ccgcctcacagtggccaaggccacagtcacagctgcggctgcacacagggtggcccccagggcacaacacagcaagagcaggacttagcagccagagcctcacactgcatgcagccgggc

SEQ ID NO: 673270 - DNA, 120 bp, Artificial Sequence
  ENSG00000185838_17 (sequence is synthesized)
ccagcctggccggtcgtctcctcctaaaagcgggtgttgattgggaaagaaccatgaccctgaatattggagtggggcccatgggcagatccagagaagctgggaccacacacgcctgtg

SEQ ID NO: 673271 - DNA, 120 bp, Artificial Sequence
  ENSG00000185838_18 (sequence is synthesized)
tctgcccggattgccggaagagcccctctagctgaaggcccggggtggcctcccttgaggcagttgccctgcaaggccctgccgatgctccttgggacccccacctgggcttctagtcct

SEQ ID NO: 673272 - DNA, 120 bp, Artificial Sequence
  ENSG00000185838_19 (sequence is synthesized)
agaactagactcgagtccagcagacccccaggatgagatacagagggtgaccctgagagtggcaccagcctcctgcaggaccacatggcatttccaggtttccaggcagaaatctgaaca

SEQ ID NO: 673273 - DNA, 120 bp, Artificial Sequence
  ENSG00000185838_20 (sequence is synthesized)
tgtgtgggacggatcggaagggtgtgggatccaggtggccggagcaggggtggatcaggggagttcccggaacagacctgccaaacggagggctggactgggcgctgcagcttggggcca

SEQ ID NO: 673274 - DNA, 120 bp, Artificial Sequence
  ENSG00000185838_21 (sequence is synthesized)
ggaaggctccagtgccgggctgggggtgggggctggattacagcctgagggtggctgcactgagtgaagtggacatggccagccgccgtggggtacagccgaggagggcttccaaggcct

SEQ ID NO: 673275 - DNA, 120 bp, Artificial Sequence
  ENSG00000185838_22 (sequence is synthesized)
ggggatgggggtgttggatttgtcagtgagacctgtgcacccactgcagggggtcccaaggccgtgcctccccaaccccactgtgaggaacatggttgctggggggcccggagtccttga

SEQ ID NO: 673276 - DNA, 120 bp, Artificial Sequence
  ENSG00000185838_23 (sequence is synthesized)
ggagtcctgtgaccacacttctctgttggtcagaggtaccatggggaccgttccatcaaacgggaatgtcagtgctggccgggaaagcggcccctggcccaagcttggagaccacctggc

SEQ ID NO: 673277 - DNA, 120 bp, Artificial Sequence
  ENSG00000185838_24 (sequence is synthesized)
tcgggtactggcctggctccgttggacaagggtggccaccaggtgcccaggacctttggagaggggggccctgctgcttttcctcgagtgtcctatagccgccaggatgcgtagggcact

SEQ ID NO: 673278 - DNA, 120 bp, Artificial Sequence
  ENSG00000185838_25 (sequence is synthesized)
ccgggaggtattttcatatcactgaggtgtcagggaggggaagggtcctgggtttaggctgcagtgactgcaggtgctgagggagctgtgccctgggtgctcatcacaggctgtcacagt

SEQ ID NO: 673279 - DNA, 120 bp, Artificial Sequence
  ENSG00000185838_26 (sequence is synthesized)
gagggaaggtgtcaggttctgacatccccatgacagcggcagggtaggtggagtgggaattggctttgcagtttccctgcatgcccttgacagccttgccaaaggcacatctgccccgcc

SEQ ID NO: 673280 - DNA, 120 bp, Artificial Sequence
  ENSG00000185838_27 (sequence is synthesized)
tgtttatgtccctgtcatctttggcatcatcactgtagttacaaaactccctacgtcccacagccacgaggtgggtatcccacatgagggcccaggtgtgcatgccagcatgaggttggc

SEQ ID NO: 673281 - DNA, 120 bp, Artificial Sequence
  ENSG00000185838_28 (sequence is synthesized)
gagtggcactgcctgctgatgtcttacatagaggccatgaagagctgtgggcagggtgtacagaccctgagttggcccctggccctcgtgctttcagtcaaaggcacaagcagggtggat

SEQ ID NO: 673282 - DNA, 120 bp, Artificial Sequence
  ENSG00000185838_29 (sequence is synthesized)
ggcaggcggctgccccctagcctggccttgagctccctgccccaggccatgtggcgttgagcagtgtccaggcacatcttgttctgaatctcagtgtgcagggatggagtcgggacagcg

SEQ ID NO: 673283 - DNA, 120 bp, Artificial Sequence
  ENSG00000185838_30 (sequence is synthesized)
tgagtcctgcatgcctaacacagccctcacccctccagtgcacaacggggccacgtgcccgcatctgggtggctaggcagatagggccccccttgccaggcagatccagcttctgaggcc

SEQ ID NO: 673284 - DNA, 120 bp, Artificial Sequence
  ENSG00000185838_31 (sequence is synthesized)
ttatagacgtcctgtggagggcaggcccaggactttcattcacctggctgagctgcctgggagagcagcagaaccggtgctggggtccaagccggccaagagcagtgcagccctcctggt

SEQ ID NO: 673285 - DNA, 120 bp, Artificial Sequence
  ENSG00000185838_32 (sequence is synthesized)
cctgttcctctcttgagctgctccgtggtgtccacagcagagccatgtggctctggacaggtcggcctttgtgtcaacagaacctgggtcgtgatgaatcaccatgcgtctgaccagcct

SEQ ID NO: 673286 - DNA, 120 bp, Artificial Sequence
  ENSG00000185838_33 (sequence is synthesized)
tgaaacccccacaacagaagaagaaacggtctcagctccagacatccagcttggaaaagatgcacctgaacattggcattctcttcctagcaaacagccacttcctgtaggctggcagga

SEQ ID NO: 673287 - DNA, 120 bp, Artificial Sequence
  ENSG00000185838_34 (sequence is synthesized)
acgccaacagagccagcagtgaaggcattaagtggggaggaggggtggcccggaggcagcacgcgaaggtcagcatgcagctcctgggatgaacctgagaggcgactcctggcagcatgg

SEQ ID NO: 673288 - DNA, 120 bp, Artificial Sequence
  ENSG00000185838_35 (sequence is synthesized)
ctggtcgctgccatcacgcccctggccaacccaccaactgggagaggcagcccttccacatcttcctccataatgctcttgggtagcagtgaggcctctcaagccagagagaacttggtg

SEQ ID NO: 673289 - DNA, 120 bp, Artificial Sequence
  ENSG00000185838_36 (sequence is synthesized)
acttggtgtttggaaacaacggcggacatttcttgccattttcagtgccaactcaggtaggtgtgttctaccatcctgtgtttttggggtgtttttttttttgagtcagagtctcactct

SEQ ID NO: 673290 - DNA, 74 bp, Artificial Sequence
  ENSG00000185838_37 (sequence is synthesized)
ctgcaggaccacccacataggtgcaggccatcatgcccagctaattttttatttttttttatagagaaggagtc

SEQ ID NO: 673291 - DNA, 120 bp, Artificial Sequence
  ENSG00000185838_38 (sequence is synthesized)
gcccagctaattttttatttttttttatagagaaggagtctcgctatgttgcccaggctggtttcgaactcctgggctcaagcgatcgatcctcccgcctctagcctcccaaagcactag

SEQ ID NO: 673292 - DNA, 120 bp, Artificial Sequence
  ENSG00000185838_39 (sequence is synthesized)
aattataggcctgagccactgcgcccggcccaccatcctgttcttattggaagaatttccatgtgtcgaggcacgggcacaacgtagctggtcctctgctcagggccccacaaggctgcg

SEQ ID NO: 673293 - DNA, 120 bp, Artificial Sequence
  ENSG00000185838_40 (sequence is synthesized)
tcagggtggcagcgcggctgggggctttttctgttcaaatccagattctcgtggctgtgagccccagccctgggcactgtccgcctggtggtgtcttcacagccagcaggggtggccttg

SEQ ID NO: 673294 - DNA, 120 bp, Artificial Sequence
  ENSG00000185838_41 (sequence is synthesized)
gggtgttctgtggagtaactttcacggcccagagtgggatcctgagtggctggagccgtatgctccagcatccccagccgctgcctccggtgcaggtggagtgggcccctctgattacca

SEQ ID NO: 673295 - DNA, 120 bp, Artificial Sequence
  ENSG00000185838_42 (sequence is synthesized)
ggagctgtcagaggggcagcaggtcccactccactggccggtgggcagctgtgtgcagggacgcgggtcctggcacgtctgcctggtgaggccctgcctccagtgccaaggggcctcccc

SEQ ID NO: 673296 - DNA, 120 bp, Artificial Sequence
  ENSG00000185838_43 (sequence is synthesized)
tctcgacggtgggcgccaccatgtgctgacctctgtgcagccccactttacaaggtaggttcggccagcaccccatccgcgggcgggcagcactcacccagcgttgcgccgccaacaggg

SEQ ID NO: 673297 - DNA, 120 bp, Artificial Sequence
  ENSG00000185838_44 (sequence is synthesized)
tccctcttagacaagcagctgtgcctagagccttttccttcctccctgcgtgttacctgcaggccaacagacggccctgggtctgggaccaggagaacctgcctccgcctctggcagtgg

SEQ ID NO: 673298 - DNA, 120 bp, Artificial Sequence
  ENSG00000185838_45 (sequence is synthesized)
gtgtccctgcaggcagattgggcttggcacgtagacaccgaggggtcagccgatgccgggagatgatcccgggaagggctccggagcacagcccaggacccgccgccgctgctgggcgct

SEQ ID NO: 673299 - DNA, 120 bp, Artificial Sequence
  ENSG00000185838_46 (sequence is synthesized)
ccatgttgacgtgctgtgcgtgtctccactccccaggcaatgatgttcaatcaggtgtttcccacctgtgtctctgccaagaagccacagaacaccctctgcacaaaaggagtgtttgca

SEQ ID NO: 673300 - DNA, 120 bp, Artificial Sequence
  ENSG00000185838_47 (sequence is synthesized)
caaagaaaaacaaccctccgggggttctttagaaatgcttatactcaattagctagaacttcatgtgaaatcccagcgtggaagacaacaagccggcaccggtgaaaactttgctgtgca

SEQ ID NO: 673301 - DNA, 120 bp, Artificial Sequence
  ENSG00000185838_48 (sequence is synthesized)
cctgccctctaccaagctgccagccccaccagccctgtggtcctaggtgggcacagctgctgcacggtcccccaggcctgcctctcctcggggtctcaaccttcataccagatttgccag

SEQ ID NO: 673302 - DNA, 120 bp, Artificial Sequence
  ENSG00000185838_49 (sequence is synthesized)
catccccattcccgccttgtgggtggagagtccttgagaccctctgtcactctgtcagcttccccaggtcagcgagctgtggcttggctcccacgcatcagcttttatgggaggcccatt

SEQ ID NO: 673303 - DNA, 120 bp, Artificial Sequence
  ENSG00000185838_50 (sequence is synthesized)
aggagctgggcaggagggacagaggggaggccaggcagccactgctgagtgggacgggtagcccagcccatgaggctggccagccctacaggggaggtcccacagcactggccgggaagt

SEQ ID NO: 673304 - DNA, 120 bp, Artificial Sequence
  ENSG00000185838_51 (sequence is synthesized)
ccacataggaaagcatcagttgagggatgaagccacggacgatggggacaacggccacagggtgtgctaagctgaggaaattagtaggaggtgctcataagctgttttgttttttggttt

SEQ ID NO: 673305 - DNA, 76 bp, Artificial Sequence
  ENSG00000185838_52 (sequence is synthesized)
ttagtaggaggtgctcataagctgttttgttttttggtttgtttgtttgttttttcttttaagagaccagggacag

SEQ ID NO: 673306 - DNA, 120 bp, Artificial Sequence
  ENSG00000185838_53 (sequence is synthesized)
tcctcctgcctcagcctcccgagtaactcatggcctttaagtgaactgcttccaccatccagctgtgcaggtggcctgggaacagcagcacatctgtcccctgccacctcttgcatgcac

SEQ ID NO: 673307 - DNA, 120 bp, Artificial Sequence
  ENSG00000185838_54 (sequence is synthesized)
acttgacctcctgacttgggctctgaaacctgtaaaatgtggggtgtagagaaatcgagtcatttggcctcatcctggtgccattatctcttgctacattaataaaccacctcaaacaga

SEQ ID NO: 673308 - DNA, 120 bp, Artificial Sequence
  ENSG00000185838_55 (sequence is synthesized)
ggcgttcccgactccggcaagagggtcagtgtggaggcgggagcccgggcggccggcttgaactccgtgcacgcgggcctggagctgcgcccctgcgtcttttcccgacttctgatccgc

SEQ ID NO: 673309 - DNA, 120 bp, Artificial Sequence
  ENSG00000185838_56 (sequence is synthesized)
agaggggcactcggagccccagcctgggtcgcagtgccttcggtctgcgggcctcagtttctcggtccgcgccgggggtttgtgggggcacctggagacatttgggccgttctcgcagtc

SEQ ID NO: 673310 - DNA, 120 bp, Artificial Sequence
  ENSG00000185842_0 (sequence is synthesized)
agggcgcaggcgtggctcttggtcaggcggttacggccaggaggcgtcggagcctggcgtggtagggctgtgctgcgcggtccttcccattcaccctagtctggcgctcgccggcgtggg

SEQ ID NO: 673311 - DNA, 120 bp, Artificial Sequence
  ENSG00000185842_1 (sequence is synthesized)
cgggccggaccttcgccgcttccaggaagggccacaacggccgtcggaccacggcgcggcggccagttcctttatagttttgttcagaaaaacatatggagacgtttatacccattgatt

SEQ ID NO: 673312 - DNA, 120 bp, Artificial Sequence
  ENSG00000185842_2 (sequence is synthesized)
tgacaactgaaaatcaagagatggacaaggaggaaaccaagacaaaaccaagacttttaagatatgaagagaaaaaatatgaagatgtgaaaccattagagactcaaccagctgaaatag

SEQ ID NO: 673313 - DNA, 120 bp, Artificial Sequence
  ENSG00000185842_3 (sequence is synthesized)
cagaaaaggaaacattggaatataaaacagttagaacattctctgaatctttgaagtcagagaaaacagaagattaccttagagaaagtataattcaacaacatatggtttctccagagc

SEQ ID NO: 673314 - DNA, 120 bp, Artificial Sequence
  ENSG00000185842_4 (sequence is synthesized)
cagcttcccttaaggagaaagggaagtcaaggagaaaaaaggatcaaactcatgcttgtccaaatgttaggaaagccaggcctgtgtcctatgatagaacagaaccaaaagatgatgatg

SEQ ID NO: 673315 - DNA, 120 bp, Artificial Sequence
  ENSG00000185842_5 (sequence is synthesized)
tgataagaaatattattaggctacgagaaaagcttggttggcaaactatattaccgcagcacagtttgaaatacggaagctccaaaattgcaattcagaagattactttaaagaaacctt

SEQ ID NO: 673316 - DNA, 120 bp, Artificial Sequence
  ENSG00000185842_6 (sequence is synthesized)
tggaagatgatggagaatttgtttattgccttcctcggaaaagtcctaaatccctttacaatccatatgatcttcaggtagtatcggctcatactgctaaacattgcaaagaattttggg

SEQ ID NO: 673317 - DNA, 120 bp, Artificial Sequence
  ENSG00000185842_7 (sequence is synthesized)
ttattactgcttcatttatctcaaaggttattaatatagttggtagtgtaaaggaagtagaactcatacctactttggaatggctatcagaaagaagacattactatttattacggcaat

SEQ ID NO: 673318 - DNA, 120 bp, Artificial Sequence
  ENSG00000185842_8 (sequence is synthesized)
tcaagatattttctgatttccgaatgaataaagcatttgttacctggaaattgaatgttaaaagaattaagacagagaagagcaggtcatttttgtaccaccatctttttttggctgatg

SEQ ID NO: 673319 - DNA, 120 bp, Artificial Sequence
  ENSG00000185842_9 (sequence is synthesized)
acttgtttcaaacctgtttggtttatataagaggactttgtgaagatgcaattaatctcaaaaattataatgaccatgaaaataatctatctgccatatgccttgtaaagctggatagtt

SEQ ID NO: 673320 - DNA, 120 bp, Artificial Sequence
  ENSG00000185842_10 (sequence is synthesized)
ctcgaacatattctctagatgaattttgtgaagagcagttacagcaagctacccaggcattgaaacaacttgaggacatcaggaataaagcaatttcagagatgaaaagtacttttctaa

SEQ ID NO: 673321 - DNA, 120 bp, Artificial Sequence
  ENSG00000185842_11 (sequence is synthesized)
aggttgcagaaaagaatgaaatcaaagagtattttgagtcaaaactctctgaagatgacacaacacatttcaagctgcctaaatatagacgtttattagaaacatttttcaagtttgtaa

SEQ ID NO: 673322 - DNA, 120 bp, Artificial Sequence
  ENSG00000185842_12 (sequence is synthesized)
tgctggttgactacatatttcaggaactcattcgtcaacttatgaacactgcagtcacactacttttggaattatttaatggttctgctggaatgccattttcagtggaaaaaaagaatg

SEQ ID NO: 673323 - DNA, 120 bp, Artificial Sequence
  ENSG00000185842_13 (sequence is synthesized)
aaaatcttatcagaacattcaaggacaactcttttcctactggaaagacaacaaatgattgtgaagaacttgttgataattcaaagttacatgctatttctgttcaaaagtcagaagtaa

SEQ ID NO: 673324 - DNA, 120 bp, Artificial Sequence
  ENSG00000185842_14 (sequence is synthesized)
aaacagacactgatattaatgagattttgaatagtgttgaagtggggaaggatttgagaaaaacatatgcaccaatatttgaagtaaatctatgcttgagaattcctgctgagagtgatt

SEQ ID NO: 673325 - DNA, 120 bp, Artificial Sequence
  ENSG00000185842_15 (sequence is synthesized)
cttcagaaaattctaaagagaactttcatgagtctgaccagtgccctgaagagtgtgtgatgtttgaagatgaaatgtcagaaaataaagacaattgtgtcaaaaaacactcaagtgaag

SEQ ID NO: 673326 - DNA, 120 bp, Artificial Sequence
  ENSG00000185842_16 (sequence is synthesized)
aattgctcccaaaagccaagaaatcaaaagaaattagttacaatcttgaagatattatttcagacacagaaattgagactgagtttgagaataaatacatgtattatgaatttccagaat

SEQ ID NO: 673327 - DNA, 120 bp, Artificial Sequence
  ENSG00000185842_17 (sequence is synthesized)
ttcctacaaatctctttatagatcccaacagattggagttttcagtaaaaattcaaaatatgttgactaatatggaaaaatgtataaccacaattactcctctttgccaagatccccagc

SEQ ID NO: 673328 - DNA, 120 bp, Artificial Sequence
  ENSG00000185842_18 (sequence is synthesized)
tgtctatcttcattgatttggtttcaataatggatttacctaataagacaggaagcataatacattataaagagcagaccagatggccagattgtcacatcctttttgaaacagatcctg

SEQ ID NO: 673329 - DNA, 120 bp, Artificial Sequence
  ENSG00000185842_19 (sequence is synthesized)
cctaccaaaatataattgtgaatctcctgactattattggtaattcaatgggcctagttaatgcttacagccacaagtttataaagtattgtaccatgacagaaaaggccaaaatcatga

SEQ ID NO: 673330 - DNA, 120 bp, Artificial Sequence
  ENSG00000185842_20 (sequence is synthesized)
gtatgaaaatatcatctatgggagaattaacttcaaaagaatttgaagctattctaaatagattcagaaactattttagacatattgtgaatatggccattgagaagcgtattggtattt

SEQ ID NO: 673331 - DNA, 120 bp, Artificial Sequence
  ENSG00000185842_21 (sequence is synthesized)
tcaacgttgtaagtcttgattatcaatcagaatgcttactgtatattgacaacgtcatacatatgagccacaccctcatacaatctgtaattgaaaaaaagaacaaaaatttattggaag

SEQ ID NO: 673332 - DNA, 120 bp, Artificial Sequence
  ENSG00000185842_22 (sequence is synthesized)
ttgtggaatcatcattgcagcagctggaatgtgatcccactgaaatagaagaatttctggagcattttatttttttgaatgcaatttcctcaaaaatatctaaattagaaaaagagttct

SEQ ID NO: 673333 - DNA, 120 bp, Artificial Sequence
  ENSG00000185842_23 (sequence is synthesized)
taacaatgtctcagctatattctgttgcaaagcatcaccagatccatatttcagaagagcaaattgccatattccaagttcttcttcttaagtttagtcaactaaaatcatctatgaagt

SEQ ID NO: 673334 - DNA, 120 bp, Artificial Sequence
  ENSG00000185842_24 (sequence is synthesized)
taagtaaaataaataaagacactgctataactaaattcagagataacttggaagcatgtatcagtggtctacatgttgatgttggcaatttaaaagccaagataagaactcctcttctgt

SEQ ID NO: 673335 - DNA, 120 bp, Artificial Sequence
  ENSG00000185842_25 (sequence is synthesized)
tatgtgctggtactcaagtgtcaacagcaatggaaatgatccagactctctcaggggaagctgcaagtttaactaacaaagctaaagcatattcacattatcaggattgtttcagtgatt

SEQ ID NO: 673336 - DNA, 120 bp, Artificial Sequence
  ENSG00000185842_26 (sequence is synthesized)
ctcaatctcatatgcattctgttaatgtggaagaaattacacagattgtgctttcagagatctctgacattgaaggtgacttgactttgaggaaaaaactatgggaagcacaagaggagt

SEQ ID NO: 673337 - DNA, 120 bp, Artificial Sequence
  ENSG00000185842_27 (sequence is synthesized)
ggaagcgagcctcttgggaatggaggaatagttctcttcaaagtattgatgtagaatcagtacagagaaatgtttcaaaactgatgcacataatctcggtactagaaaaaggtttaccta

SEQ ID NO: 673338 - DNA, 120 bp, Artificial Sequence
  ENSG00000185842_28 (sequence is synthesized)
aaagcgatatggtaacacatcttaagcaagtggtaacagagtttaaacaagagctgcctatcattatagctctgggaaatccctgtctcaagccaaggcattgggaggctctccaggaga

SEQ ID NO: 673339 - DNA, 120 bp, Artificial Sequence
  ENSG00000185842_29 (sequence is synthesized)
ttattgggaagtcagttccgcttgataaaaactgtaaagtagagaatcttctagctctcaagatgtttcagtatgaaaatgaaataaatgatatgtcaacctcagcaactaatgaagctg

SEQ ID NO: 673340 - DNA, 120 bp, Artificial Sequence
  ENSG00000185842_30 (sequence is synthesized)
ctcttgaaaaaatgctatttaagattattgatttttggaacactactcctttgcctttaattcttcaccacacagagatttactctatcttcataattccatctatagatgacatatcag

SEQ ID NO: 673341 - DNA, 120 bp, Artificial Sequence
  ENSG00000185842_31 (sequence is synthesized)
ctcagttagaagagtctcaagtcatacttgcaacaattaaaggatctccccacattgggcccattaaggatcttgtgaatgaatgggatcaaaacttgactctcttctcttacacccttg

SEQ ID NO: 673342 - DNA, 120 bp, Artificial Sequence
  ENSG00000185842_32 (sequence is synthesized)
aggaatggatgaattgtcaaagaaattggctttatcttgaaccagtctttcattcttcagaaatacgaaggcaactcccagcagaaacagaacttttctctcaagtgatttccatgtgga

SEQ ID NO: 673343 - DNA, 120 bp, Artificial Sequence
  ENSG00000185842_33 (sequence is synthesized)
aaaaaataatgtcaaaaatacaaaacaaacagaatgctttgcagataaccacttctgcaggagtccttgaaattctgcaaaattgtaatatacatcttgaacatataaagaaaagccttg

SEQ ID NO: 673344 - DNA, 120 bp, Artificial Sequence
  ENSG00000185842_34 (sequence is synthesized)
aggattaccttgaagttaaaagattaattttcccaagattttactttcttagcaatgccgagcttcttgatattctagctgatagcagaaatcctgagtctgtacagcctcatcttgtga

SEQ ID NO: 673345 - DNA, 120 bp, Artificial Sequence
  ENSG00000185842_35 (sequence is synthesized)
aatgctttgaaaatataaaacaattattgatatggaaacaagacattggccctcctgctgtaaaaatgctaatatctgctgaaggggaaggtctcgtgctgccaaagaaaattcgtgtaa

SEQ ID NO: 673346 - DNA, 120 bp, Artificial Sequence
  ENSG00000185842_36 (sequence is synthesized)
gaagtgctgtagaacagtggctggtaaatgtagaaaaaagcatgttcgatgtgctaaaaaaagagagatatatatataacattatcttactttttcagagccagatcatgttttataatg

SEQ ID NO: 673347 - DNA, 120 bp, Artificial Sequence
  ENSG00000185842_37 (sequence is synthesized)
attgtgttaaaagttttgtgagttcttattcaagagaaaaattggaaaaagtccacgctggtctgatgtgtcatctagaagaggttgcagacctggtagtgctggatactagtaactctc

SEQ ID NO: 673348 - DNA, 120 bp, Artificial Sequence
  ENSG00000185842_38 (sequence is synthesized)
gaacaaaagctatactaggggcattgcttatcctttatgttcactgcagagatatagtgataaatttactacttaaaaatatcttcaatgcagaggattttgagtggacaagacatttgc

SEQ ID NO: 673349 - DNA, 120 bp, Artificial Sequence
  ENSG00000185842_39 (sequence is synthesized)
aatataaatggaatgaaaaacaaaagttgtgctatgtgtctcaaggaaatgccagctttacttatggctatgagtacttgggctgtacctcaagattggttattacgcctctcacagacc

SEQ ID NO: 673350 - DNA, 120 bp, Artificial Sequence
  ENSG00000185842_40 (sequence is synthesized)
gatgctggctgactctcatggaagcactacacttgaatctaggaggctgtcctgccggtccagctggtacaggaaaaactgagactgtcaaagatctagcaaaatccttaggcaaacatt

SEQ ID NO: 673351 - DNA, 120 bp, Artificial Sequence
  ENSG00000185842_41 (sequence is synthesized)
gtgtggtcttcaactgttttgaggatttggattataagatagtgagaaaatttttctttggactagttcagtcaggagcatggagttgttttgatgaattcaatctaattgatttggaag

SEQ ID NO: 673352 - DNA, 120 bp, Artificial Sequence
  ENSG00000185842_42 (sequence is synthesized)
ttctctctgtcattgcctcacagatcctaacaattaaggctgcaaaagacaactattctgccaggtttgtactggaaggaaaagaaattcgtatcaatatgtcttgtgcggtatttatca

SEQ ID NO: 673353 - DNA, 120 bp, Artificial Sequence
  ENSG00000185842_43 (sequence is synthesized)
ccatgaatcccagatacggaggtggagtagagctcccagataacttaaaatctctgtttcgcccagtggcaatgatggtgccccattatcaaatgattgctgaaataatattgttttcat

SEQ ID NO: 673354 - DNA, 120 bp, Artificial Sequence
  ENSG00000185842_44 (sequence is synthesized)
ttggtttcaaatctgcaaattcactctctggaaagctaactaacctttatgaattagcgcgcaaacagctctcacaacaggatcattataattttggcttgagatctctgaagatagttt

SEQ ID NO: 673355 - DNA, 120 bp, Artificial Sequence
  ENSG00000185842_45 (sequence is synthesized)
taataatggctggaacgaagaaacgggagtttaaatgtctttctgaagcagatgaaaccttgattgttatcgaggctataagagaagctagtttgccaaaatgtcctcctgaagatgtcc

SEQ ID NO: 673356 - DNA, 120 bp, Artificial Sequence
  ENSG00000185842_46 (sequence is synthesized)
cactttttgaaaatattataggagatatttttccagaagtgacagttttgaaagtaaatcaacttgccttggagaaagtaatatatactgcaactcagcaattgggtttacaaaactggt

SEQ ID NO: 673357 - DNA, 120 bp, Artificial Sequence
  ENSG00000185842_47 (sequence is synthesized)
catctcagaaagagaagattatacagttttataatcaacttcaggtttgtgttggtgtgatgttagtgggcccaacaggtggaggaaagacaacagtcagaagaattttggaaaaagcat

SEQ ID NO: 673358 - DNA, 120 bp, Artificial Sequence
  ENSG00000185842_48 (sequence is synthesized)
taacgctattaccaattgcagacttcttatcagttgcagaaagaaaatctgcttcaaagatttcagaaagaaaaggaaaagtagatatttgtgttttaaatccaaagtgtgtcactctca

SEQ ID NO: 673359 - DNA, 120 bp, Artificial Sequence
  ENSG00000185842_49 (sequence is synthesized)
gtgaactatatggacaactggatcctaatactatggaatggactgatggattattatcagcaacaattcgaagttatgtatattttaacacaccaaagaacacaaagaaagacattgatc

SEQ ID NO: 673360 - DNA, 120 bp, Artificial Sequence
  ENSG00000185842_50 (sequence is synthesized)
tcagactaaagtcaagaatctcagatttatccaatgttttcaaacttgattcctctgatacaacagagactgatgataatatttttgaggagatagagaaagttgttaaaattccagaaa

SEQ ID NO: 673361 - DNA, 120 bp, Artificial Sequence
  ENSG00000185842_51 (sequence is synthesized)
atcacaattttgattggcagtggattatcctagatggcccagtggacaccttttgggtagaaaatctgaactctgtgctagatgatactagaacattgtgcctagcaaacagtgagagaa

SEQ ID NO: 673362 - DNA, 120 bp, Artificial Sequence
  ENSG00000185842_52 (sequence is synthesized)
tagctttaactaataaaataagagtgatttttgaagtggacaatctctctcaggccagtcctgctactgtcagccgatgtgccatggtctatatggatcctgttgatctgggatgggaac

SEQ ID NO: 673363 - DNA, 120 bp, Artificial Sequence
  ENSG00000185842_53 (sequence is synthesized)
cttatgttaagtcatggcttctgaaaacttctaaaattataagtcaatcaggagtggattgtcttgaattcatgattaaaaatagtgtcacagacggactacaatttataaggaatcgtc

SEQ ID NO: 673364 - DNA, 120 bp, Artificial Sequence
  ENSG00000185842_54 (sequence is synthesized)
agaaatttcagccatatcctatggaggacataacagtcgtcataaccctctgcagaattcttgatgctttctttgacttcatgggtaaaaatggaggatttgaacaaagtgatgatttga

SEQ ID NO: 673365 - DNA, 120 bp, Artificial Sequence
  ENSG00000185842_55 (sequence is synthesized)
atgacacgtcatctaaggaggcaaattcccaaagagagtctgtcacattcaaggatatagaaaagagggatgaaaatacatggtatccagagaaaaatcctgataaattaacaaaaatta

SEQ ID NO: 673366 - DNA, 120 bp, Artificial Sequence
  ENSG00000185842_56 (sequence is synthesized)
ttcaaaagctttttgtgtttgcctttacttgggcatttggaggagctttaaaccgtgaagatgaacacagagaaaatataccattttgtcccagtcttgaacctgattctcttgcaaaag

SEQ ID NO: 673367 - DNA, 120 bp, Artificial Sequence
  ENSG00000185842_57 (sequence is synthesized)
ggcagacggagaaaggggaactgcatcaacctaccaactggtgaatgttccatctttggatattttgtggatatagagcaatgtgaattcataccttggtcagatttagttcctaatgat

SEQ ID NO: 673368 - DNA, 120 bp, Artificial Sequence
  ENSG00000185842_58 (sequence is synthesized)
cagacactaattcaaagaggaacttcattactaactaatcttcaaagatctggcggaaacttcttgaagataacagaatgtggagaatgcattaattataccgctaccagagacacaaca

SEQ ID NO: 673369 - DNA, 120 bp, Artificial Sequence
  ENSG00000185842_59 (sequence is synthesized)
tgcctttcttttctcatgagccttcttttaaagaattcctgccctgtacttctcacaggagaatctggtgttgggaaaactgctgccattaatcaaatgcttgaaaagctagagggtcca

SEQ ID NO: 673370 - DNA, 120 bp, Artificial Sequence
  ENSG00000185842_60 (sequence is synthesized)
ggagcatttgacataaaacatggttcaattttaggagacaccctattatatagtgaaataaaaaaatcaagtagcctaaaacagaatatcaccatcttgattcctgaaactcataagaca

SEQ ID NO: 673371 - DNA, 120 bp, Artificial Sequence
  ENSG00000185842_61 (sequence is synthesized)
gcaactggaagttcagataatcccactaaaaagccagaagttagaactaataaaaagttacttaaaaataatgatcataaaggagttgtagtctctacaataaattttagcaccaatgta

SEQ ID NO: 673372 - DNA, 120 bp, Artificial Sequence
  ENSG00000185842_62 (sequence is synthesized)
acagctgccaaaaccaaggagatgattcttaagaagttaataagaagaactaaagatactcttggagcaccaaaaaacaaccggattctaatatttattgatgatatgaatatgccagta

SEQ ID NO: 673373 - DNA, 120 bp, Artificial Sequence
  ENSG00000185842_63 (sequence is synthesized)
tcagatatgtatggagcacagccacccctggaattgataagacaattgttagatttgggaggagtttatgatactgaaaaaaatacatggaagaatattcaagatctgtctatagttgca

SEQ ID NO: 673374 - DNA, 120 bp, Artificial Sequence
  ENSG00000185842_64 (sequence is synthesized)
gcttgtgttccagttgtgaatgatatcagcccacgtcttctcaaacacttttccatgctggtattacctcatccttcacaagacatcttatgtactattttccaggctcatttgggaatt

SEQ ID NO: 673375 - DNA, 120 bp, Artificial Sequence
  ENSG00000185842_65 (sequence is synthesized)
tatttctccatcaataacttcacacctgaagttcagaaaagtaaggatcagataatatcttgttccctagctatataccatcaagtacgtcagaatatgttaccaactccaacaaaatgt

SEQ ID NO: 673376 - DNA, 120 bp, Artificial Sequence
  ENSG00000185842_66 (sequence is synthesized)
cactacatgtttaatcttcgagatatgtttaagcttctcctaggattgctgcaagctgacaggactgttgttaactccaaagagatggctgctctgctctttgttcatgaagccacccga

SEQ ID NO: 673377 - DNA, 120 bp, Artificial Sequence
  ENSG00000185842_67 (sequence is synthesized)
gtatttcacgatcgcttaattgatttcactgataaaagccttttctatcggttgctttcaagggaacttgagaactgttttcagattggaatagatggatgtgggaaaaaaacatgtgca

SEQ ID NO: 673378 - DNA, 120 bp, Artificial Sequence
  ENSG00000185842_68 (sequence is synthesized)
accttggcctgttatttgacagataataaactataccgagtgcctatatctcacaaatgtgcctacatcgaattcaaagaagtctttaaaaaggtgtttattcacgcaggattaaaaggg

SEQ ID NO: 673379 - DNA, 120 bp, Artificial Sequence
  ENSG00000185842_69 (sequence is synthesized)
aaacccactgttctgatggttcccaatttaaacatagaacaagactcatttttagaagatttgaactacatcatcagttcaggaagaatacctgacctgtttgaaaatgttgagctggat

SEQ ID NO: 673380 - DNA, 120 bp, Artificial Sequence
  ENSG00000185842_70 (sequence is synthesized)
tctattgcaatgaaaatcagatatcttactgaacaatctggtcatatggataataggcaatctttactttcattctttcaaaagagaatatataaaaatcttcatatttttgtgatcatg

SEQ ID NO: 673381 - DNA, 120 bp, Artificial Sequence
  ENSG00000185842_71 (sequence is synthesized)
agtcctgaaggacctagcttccgccaaaattgtagagtgtatccttctatgattagctcctgcacgatcgattggtatgagaggtggccagaagaagctctccttattgtagctaactca

SEQ ID NO: 673382 - DNA, 120 bp, Artificial Sequence
  ENSG00000185842_72 (sequence is synthesized)
ttcttaaaagaaaaggtcaattttgagaacagagagaacttgaaagaaaaacttgccccaacatgtgtccaaatccacaaaagcatgaaagacttgaacagaaaatactttgaagaaact

SEQ ID NO: 673383 - DNA, 120 bp, Artificial Sequence
  ENSG00000185842_73 (sequence is synthesized)
ggaagattttattataccactcccaatagctacttgcaatttatggaaacatttgcacacattttgagggcacgagaggaagagatgcaaacaaagagggatcgcttccatatgggtcta

SEQ ID NO: 673384 - DNA, 120 bp, Artificial Sequence
  ENSG00000185842_74 (sequence is synthesized)
tccacaatcctggaagcaaccactctagttacagaaatgcaagaagagctcttgattcttggccctcaagtagaacaaaaaacaaaggaaacagaaactctaatggaaaaactacggaaa

SEQ ID NO: 673385 - DNA, 120 bp, Artificial Sequence
  ENSG00000185842_75 (sequence is synthesized)
gattcacaagtagttgagaaagttcagatgcttgttaaacaggatgaagaaattgtggcagaagaagtaagaattgtggaagattatgctcagaaaactgccaatgaactaaaaagtgtg

SEQ ID NO: 673386 - DNA, 120 bp, Artificial Sequence
  ENSG00000185842_76 (sequence is synthesized)
ctgccagcctttgacaaggcaattgtggctctgaatgccctggataaagctgatgtcgctgaattaagagtatacacacggcctcccttccttgtactgactgtcatgaatgcagtgtgt

SEQ ID NO: 673387 - DNA, 120 bp, Artificial Sequence
  ENSG00000185842_77 (sequence is synthesized)
attcttctgcaaaagaaacctaactgggcaacggcaaagttacttctttcagaaactggtttcctgaaaaaattgattaaccttgacaaggacagcatacctgataaggttttcgtgaag

SEQ ID NO: 673388 - DNA, 120 bp, Artificial Sequence
  ENSG00000185842_78 (sequence is synthesized)
ctaaaaaaaattgtaaccttacctgatttcaacccacacaagatttcgctggtttctgttgcttgttgctccctgtgccagtgggttatagctttgaataactaccatgaagtacagaag

SEQ ID NO: 673389 - DNA, 120 bp, Artificial Sequence
  ENSG00000185842_79 (sequence is synthesized)
gttgtgggccctaaacaaatccaagtagctgaagctcaaaacgtccttaaaattgcgcgacaaagacttgctgagaaacaaagaggtttacagctggttgaagaacatttgctgttttta

SEQ ID NO: 673390 - DNA, 120 bp, Artificial Sequence
  ENSG00000185842_80 (sequence is synthesized)
caggcagcttacaaagataccgttgctgaaaaacaactattagcaaatcggaaaacaatggccagcaggcgctttcagtgtgcgtcagtcttactaactgtcctggaagatgagaagact

SEQ ID NO: 673391 - DNA, 120 bp, Artificial Sequence
  ENSG00000185842_81 (sequence is synthesized)
cgatggcaagaaacaatcaatcaaatagataacaaattagaaggaattttgggtgacatacttctttcagcagcgtgcattgtctacagtggaattttaacaccagaatttcgccagttg

SEQ ID NO: 673392 - DNA, 120 bp, Artificial Sequence
  ENSG00000185842_82 (sequence is synthesized)
attgtgaataaatgggagacattctgcattgaaaatggcatttctttgtcttccaaattctctttaattaaagttatggcacaaaaatatgagatcagccgatggcataatcagggactg

SEQ ID NO: 673393 - DNA, 120 bp, Artificial Sequence
  ENSG00000185842_83 (sequence is synthesized)
cctcatggtcagtattcagtagagaatgccatcttgatcaagaatggccagcagtggccactgctgattgacccacataggcaagctcacaaatggatccgtcagatggaaggatccagg

SEQ ID NO: 673394 - DNA, 120 bp, Artificial Sequence
  ENSG00000185842_84 (sequence is synthesized)
ctgcagaagctctccattgaagacagcaattataccaaaaaaattgaaaatgctatgaagacaggagggagtgtcctcctgcagaatctccttgagacattagctccaggcttaaaggca

SEQ ID NO: 673395 - DNA, 120 bp, Artificial Sequence
  ENSG00000185842_85 (sequence is synthesized)
attctgaaaaaggatatctatcagaaaaaaggacactatttcataagggttggtgatgctgagttcgaatacaattcaaattttaggttatacttatctacagaaatagacaacccccat

SEQ ID NO: 673396 - DNA, 120 bp, Artificial Sequence
  ENSG00000185842_86 (sequence is synthesized)
tttcttccatcagtttataactttgttactatgatcaacttcactgtaacattccaaggtttgcaagatcaactcttgtctactgtggtaactcatgaagttcctcatttagaagatcaa

SEQ ID NO: 673397 - DNA, 120 bp, Artificial Sequence
  ENSG00000185842_87 (sequence is synthesized)
cgttccaagttactggagagtatttcccttgatgccataactcttgaagaactagaggaaaaaacattaaatttactgcagaaagcactaggatccatattagatgatgacaaaattgta

SEQ ID NO: 673398 - DNA, 120 bp, Artificial Sequence
  ENSG00000185842_88 (sequence is synthesized)
gataccttaagaaaatccaaaatgacatcaaacgaaatttcaaagcgcatcgaagcaacaaaaaaagctgaaagtgaaatccaagcaatacgtaaaaactatctccccattgcgacccga

SEQ ID NO: 673399 - DNA, 120 bp, Artificial Sequence
  ENSG00000185842_89 (sequence is synthesized)
ggcgccctgctctacttcctagtagctgatctcacacaaatcaactacatgtaccagttctccctagactggtttcatcaggtttttgtttcatcagtagtttccaaaagcaaagaacaa

SEQ ID NO: 673400 - DNA, 120 bp, Artificial Sequence
  ENSG00000185842_90 (sequence is synthesized)
gaacatagttttaaaagggagaaagtgtctccaaaagaagttcatgagtttataagtatttcaaaagaacccaacctggaaaatgagaaaaatctcttagataagcatattaaaagtgca

SEQ ID NO: 673401 - DNA, 120 bp, Artificial Sequence
  ENSG00000185842_91 (sequence is synthesized)
atagacatgttgacaaaaagtatttttaaggtggtttcttcagctctatttaatgaagataaactttgcttctcttttcggctttgcactgtaatcatgcaaaacaatgctaatggaaat

SEQ ID NO: 673402 - DNA, 120 bp, Artificial Sequence
  ENSG00000185842_92 (sequence is synthesized)
ctaatacaggatgacattggattcctaccagaagaagaatggaacatctttttatattctggcatattgataaatattaaaagtgcattatcccagtctagacttactagcacatttgaa

SEQ ID NO: 673403 - DNA, 120 bp, Artificial Sequence
  ENSG00000185842_93 (sequence is synthesized)
ataggtgaaagtcaacatcttcagtggctgtcagattccaggtggaggcagtgccaatatgtcagcactcacctggaaccattttcacttctgtgcaaatcccttttatcaaacgtatca

SEQ ID NO: 673404 - DNA, 120 bp, Artificial Sequence
  ENSG00000185842_94 (sequence is synthesized)
caatgggatacttttaagaacagtaaagcagtttattctctgatcagcacacctttctcttcagaaaatgcttcattggaggaaaatacaaaaccaccagaggaaactgaacttttgaat

SEQ ID NO: 673405 - DNA, 120 bp, Artificial Sequence
  ENSG00000185842_95 (sequence is synthesized)
gaaaataaagaaacgtgtaatcctataaattttccctgggagaaactcacttcatttcaaagacttattttggtaaaagttcttagaccagaaagtttaaacaattcagtgagaaagttt

SEQ ID NO: 673406 - DNA, 120 bp, Artificial Sequence
  ENSG00000185842_96 (sequence is synthesized)
ataactgaaaaaatgggaaataagtatcttcaaagaactggagttaatttgaaagatgcatataaaggatccaatgccagaactccgctgatacttattcaaactcatgggatcgacctt

SEQ ID NO: 673407 - DNA, 120 bp, Artificial Sequence
  ENSG00000185842_97 (sequence is synthesized)
accaatatcctcctgagatttgcacaagagttaaaaggaacaacacatcatgtgaccataatttctctgggccgtgaccaagcagctaaagctgaagacctcattttaaaggcactaaca

SEQ ID NO: 673408 - DNA, 120 bp, Artificial Sequence
  ENSG00000185842_98 (sequence is synthesized)
aaaacacaacaatgggtcttcctccagaactgccatcttgcaacatcatttatgccaaggctttgcacaattgtagaatcttttaatagtccaaacgtgacaatagaccctgagtttcgg

SEQ ID NO: 673409 - DNA, 120 bp, Artificial Sequence
  ENSG00000185842_99 (sequence is synthesized)
ctatggttaagctcaaaatcatacagttcttttccaattcctgttcttaaaaagggtttaaagattgccgtggaatctccccagggattgaaaagtaacttacttcagacatttggatgt

SEQ ID NO: 673410 - DNA, 120 bp, Artificial Sequence
  ENSG00000185842_100 (sequence is synthesized)
actgggagtggagaggtaacagaagagatatttgaaaatcctgactgtggacaatggtggaaaaaacttttatttagcctatgttttttcaatgctgtaatcaatgaaagaaaaaattac

SEQ ID NO: 673411 - DNA, 120 bp, Artificial Sequence
  ENSG00000185842_101 (sequence is synthesized)
ggaatattgggctggaatattgcttataaatttaattcttcagacttgggggttgccattaaggtgttggaaaattccctgagaggacagcccagcatttcgtggcaagcactgcgctac

SEQ ID NO: 673412 - DNA, 120 bp, Artificial Sequence
  ENSG00000185842_102 (sequence is synthesized)
ctgattggagaagtgatttacggtggccgggtgattgataattgggacaagcgatgcttgaagaccctactctacaaattttgtaatcctgaagtgctgaaagatgacttcagtttctcc

SEQ ID NO: 673413 - DNA, 120 bp, Artificial Sequence
  ENSG00000185842_103 (sequence is synthesized)
agatctgcaagcataaaggactacatacacattatccagtccttacctgatgatgaccttcccgaggtcttaggaatacacccagaggccatcaggagctgctgggagacccagggcgaa

SEQ ID NO: 673414 - DNA, 120 bp, Artificial Sequence
  ENSG00000185842_104 (sequence is synthesized)
aagtttattgaaaatctgattgccatgcaaccaaaaactaccactgccaacctcatgatcagacctgagcagagtaaggatgaactggtgatggaaattctatccgacttgctaaagcgg

SEQ ID NO: 673415 - DNA, 120 bp, Artificial Sequence
  ENSG00000185842_105 (sequence is synthesized)
ctgccactgacagtggagaaagaagaaattgctgttggaactccaagcacattgaagagcatgatgtcaagctccatttgggagtctctttctaaaaatctcaaagatcacgaccccctt

SEQ ID NO: 673416 - DNA, 120 bp, Artificial Sequence
  ENSG00000185842_106 (sequence is synthesized)
atccattgtgtcttgctaacctttttgaagcaagaaattaaacgatttgataagttattatttgtcatacataaatccttaaaagatcttcagcttgctataaaaggagagatcatcctc

SEQ ID NO: 673417 - DNA, 120 bp, Artificial Sequence
  ENSG00000185842_107 (sequence is synthesized)
acccaagaattggaggaaatatttaactcttttcttaatatgagagtgcctacattgtggcagaaacacgcctacagatcttgtaagccactgagttcctggattgatgatctcatccag

SEQ ID NO: 673418 - DNA, 120 bp, Artificial Sequence
  ENSG00000185842_108 (sequence is synthesized)
cgactgaatttcttcaatacttgggccaaagtggcttatactgcaatacagcgtcggtatatgagatttgtcacagtttggaagcagtctattccatcaactagccaaaaatgcaaacac

SEQ ID NO: 673419 - DNA, 120 bp, Artificial Sequence
  ENSG00000185842_109 (sequence is synthesized)
cctgaggattcagagaacaatttctttgaagggtttccttcaagatactggctcccagctttcttctttccacaagcctttcttgctgctgtgcttcaagactatgggaggtcccgagga

SEQ ID NO: 673420 - DNA, 120 bp, Artificial Sequence
  ENSG00000185842_110 (sequence is synthesized)
atcgctgtggatgccctcaccttcacccaccatgtgatttccaacaccactgacaaggatgagaagttctccgtatttatgccaaagaaactcaacatagtcaggagagcgtttaagggc

SEQ ID NO: 673421 - DNA, 120 bp, Artificial Sequence
  ENSG00000185842_111 (sequence is synthesized)
tcagcttcctctcacactggagtttacatttttggtttattcatcgagggggcaagatggaatcgtgaacagaaaatactggaagactcgctgcctctggagatgtgctgtgattttccc

SEQ ID NO: 673422 - DNA, 120 bp, Artificial Sequence
  ENSG00000185842_112 (sequence is synthesized)
gacatatactttttgccaacaaagatttctaccaaaacaccaaatgcttccaaccagacagattcagaactctatgcttttgaatgcccagtttaccagacacctgagaggtcaagaatt

SEQ ID NO: 673423 - DNA, 120 bp, Artificial Sequence
  ENSG00000185842_113 (sequence is synthesized)
ttggcaactaccggtttaccaacaaactttttaacatcagtgtatttatcaacgaagaaacctcctagtcactggatcacaatgcgggttgcattgctttgtgagaagaatgaaaaataa

SEQ ID NO: 673424 - DNA, 120 bp, Artificial Sequence
  ENSG00000185842_114 (sequence is synthesized)
atggggaggcgatcacagtggatctgggctatgaggtgtcagatgctggtaccagtcctaagtctgcacataggactggctcgtgctctgggatgtggctgcattgcttccaagatagaa

SEQ ID NO: 673425 - DNA, 120 bp, Artificial Sequence
  ENSG00000185842_115 (sequence is synthesized)
tgcctcataagatgtaatgcaccctttcctctgctggatgctgttggttctgtggcatcacaggagttgcagtctctgactggcaccgtcggtgtcacatcgggggccgccgcgtacccg

SEQ ID NO: 673426 - DNA, 120 bp, Artificial Sequence
  ENSG00000185842_116 (sequence is synthesized)
aaacatactttctgcctgcttctccgtgccataaaccatacaggaacagaccttggtcctgtagggagaggccaatggctgaccagcactgcttgtgacaggcacactgacgtgtgtagc

SEQ ID NO: 673427 - DNA, 120 bp, Artificial Sequence
  ENSG00000185842_117 (sequence is synthesized)
ttcagttttgctttaaatgatggagtcccagatgttgaacatgttcaggacatattttatggtcattgtgtagacaaatatcatgtaaaagttcttagaccagaaagtttaaacaattca

SEQ ID NO: 673428 - DNA, 120 bp, Artificial Sequence
  ENSG00000185842_118 (sequence is synthesized)
gtaataccagtagaaaatagtactaattcttttatctaaaaattttttacggaacaccccatttcctctgtaacttatgaagaaatgccaataattttggcatttaagaagcatttttcc

SEQ ID NO: 673429 - DNA, 120 bp, Artificial Sequence
  ENSG00000185842_119 (sequence is synthesized)
gttacagaagaatgagatgttccataaaatttctttagataaaggaagtttactcttttcagtattaaaactcttaattttagtctctttggataaatattgtaaaaatattttatggtc

SEQ ID NO: 673430 - DNA, 120 bp, Artificial Sequence
  ENSG00000185842_120 (sequence is synthesized)
aagcaaacttaaatacaccctacagttgactctggaacaacgcaagggttaggggctctgaccccctacacagttgaaaatttgagtataacttttgactctacccaaactttgctatta

SEQ ID NO: 673431 - DNA, 120 bp, Artificial Sequence
  ENSG00000185842_121 (sequence is synthesized)
atactaatagtctattgttgacaagaagctttatcagtaacataaacaatcaattaacatgttttgtctggtagatatatactgtattcttacaataaagtaagttagaggaaagaaaaa

SEQ ID NO: 673432 - DNA, 120 bp, Artificial Sequence
  ENSG00000185842_122 (sequence is synthesized)
cttggtcatttgtggagcagtttatatataagaatctccttgggagcatgttatttaatagtgaagtttttccttttgtgtagagatttaggtttgaagattcaactttaataaattttt

SEQ ID NO: 673433 - DNA, 120 bp, Artificial Sequence
  ENSG00000185842_123 (sequence is synthesized)
tcatctatcaaatactttgttaatacttggggtaaatttttacaggaagaactacaaaacaagcatttgctagcttaatgggaactataataataaagaaaagaatattctttattggca

SEQ ID NO: 673434 - DNA, 120 bp, Artificial Sequence
  ENSG00000185842_124 (sequence is synthesized)
ggaggaaatattcaataatttaagctagagtttgaaaattctccttgtggcagagtacatgtactcatttttgctattaacagaacttattatttggtaataccttacttaatatcggtg

SEQ ID NO: 673435 - DNA, 120 bp, Artificial Sequence
  ENSG00000185842_125 (sequence is synthesized)
ctataggatgcgcagtaaaatttgaatttcacataaatggtaaataattttagtatacttcaagtattacctatgttaaaattattgtttatctgaaattcagatttctctgataattta

SEQ ID NO: 673436 - DNA, 120 bp, Artificial Sequence
  ENSG00000185842_126 (sequence is synthesized)
gcaaatatattttttatttgttatatctggcaattctgtgcctaagtatactctgtcttccaggttcagagttagtttttaaagatatgtgagaattctggaaggagctacaaagtccaa

SEQ ID NO: 673437 - DNA, 120 bp, Artificial Sequence
  ENSG00000185842_127 (sequence is synthesized)
aagtgcgctaagcaaactgtttcttcaaagattatatccttacgtaaatatacttttgcctttccatattccctacaatacataatctcacctttgctctaattaaaagttgagaaagca

SEQ ID NO: 673438 - DNA, 120 bp, Artificial Sequence
  ENSG00000185842_128 (sequence is synthesized)
aaaaaagatttatcagaataccagtgactataataaacttgccagtgtacttgatgaattccaaatgaagttgggttcaatttctttggagctttctcattccatggtgttcttcaagga

SEQ ID NO: 673439 - DNA, 120 bp, Artificial Sequence
  ENSG00000185842_129 (sequence is synthesized)
aaatgctaatatctgctgaaggggaaggtctcgtgctgccaaagaaaattcgtgtaagaagtgctgtagaacagtggctggtaaatgtagaaaaaagcatgttcgatgtgctaaaaaaat

SEQ ID NO: 673440 - DNA, 120 bp, Artificial Sequence
  ENSG00000185842_130 (sequence is synthesized)
ggatatgccaaaaaagtgagaaggaggttgttggatatgagaaattaaccaacaactgagaaatcctaggaaagcaaaagtttttccagcagtagacagtttgccagtgtcctgtgaaaa

SEQ ID NO: 673441 - DNA, 120 bp, Artificial Sequence
  ENSG00000185842_131 (sequence is synthesized)
agaacagagtctctcccctttgctggcttcgaagaagcaagctgctatgattccaatcacaaagaaatgaattcttcttacaacctgagggagcttggaagcagatcttttcccaataga

SEQ ID NO: 673442 - DNA, 120 bp, Artificial Sequence
  ENSG00000185842_132 (sequence is synthesized)
gcctccaaatgagaatccattcccaagcaacacctcgattacagcctttgagactttaagcagaggatccgttaagctgtatccagactcctgacccacagaaactgtgagatagtaaat

SEQ ID NO: 673443 - DNA, 120 bp, Artificial Sequence
  ENSG00000185842_133 (sequence is synthesized)
accttctaaacactactgttaaaaacaaagcatttttcttattttccacaactggatatatctactgtaactggtgaaacaggaatattaattgaaatgatggcatactttgtagctggt

SEQ ID NO: 673444 - DNA, 120 bp, Artificial Sequence
  ENSG00000185842_134 (sequence is synthesized)
aaacaggactatgaattgaaatgttggcatactttaatttctatttatcaaaatttaataatattttaggctaattaaagttttataactaggtagctgaaaatatatcaattcaaaaaa

SEQ ID NO: 673445 - DNA, 120 bp, Artificial Sequence
  ENSG00000185842_135 (sequence is synthesized)
ttctgggatttggagtgggaggaggtggtggacactcatgctgtttggcctctgggtcctggtcttcctctcctcagcactcatcagactgcactaagatgattccgagactacccagaa

SEQ ID NO: 673446 - DNA, 120 bp, Artificial Sequence
  ENSG00000185842_136 (sequence is synthesized)
ttagtgaacgttaggaacatgtcagaagaaggatggaactgggagagtttgtcctacaaggcaaaagactctgaggagaaaaagaaatattgaaaagggtgatacatgaagaactagact

SEQ ID NO: 673447 - DNA, 120 bp, Artificial Sequence
  ENSG00000185842_137 (sequence is synthesized)
ctaattctgctagaactccaaccagggggacctccaaggggaagacacatgcagttgatctaaattgatgatgatggtggcgtgtccttttatagacagggagttccctgtcactggagc

SEQ ID NO: 673448 - DNA, 120 bp, Artificial Sequence
  ENSG00000185842_138 (sequence is synthesized)
tttaggagaaatcaggtgactgcttggcaagagtattgacgtggaagaaagctcaggttcagatgtgttttcgactggaggtttatccaactgtttatttaaaatatgggtccaaaactg

SEQ ID NO: 673449 - DNA, 120 bp, Artificial Sequence
  ENSG00000185842_139 (sequence is synthesized)
ctctggctgttggaaatatcgagatgaacaacgtaaggcctctgccctctagaagatcccaatctacctgataatgatggcactgatgcttgctagccaacactgactaagtactatgtg

SEQ ID NO: 673450 - DNA, 120 bp, Artificial Sequence
  ENSG00000185842_140 (sequence is synthesized)
ctaagctctttacctgcattatttaatcctcacaaattagcctcattctgtaggtcaggaaactaaggttcaaagaggcagatcataagctttgaacccaccaagtctagctgactctac

SEQ ID NO: 673451 - DNA, 120 bp, Artificial Sequence
  ENSG00000185842_141 (sequence is synthesized)
acccatagcctaacctcttcctacataacccattagacatgaaaaggctaccgagaggcagatgtgcaccagggccttttcttatgactcacagagggagcacaggggtatggactgccc

SEQ ID NO: 673452 - DNA, 120 bp, Artificial Sequence
  ENSG00000185842_142 (sequence is synthesized)
gcctaagtttgctttttgcctctattcatctaatcagatgttctcacttatttctgctttatacaaacaaccagcttccactgagttgaagtaagattacttccatttattctgagtggc

SEQ ID NO: 673453 - DNA, 120 bp, Artificial Sequence
  ENSG00000185842_143 (sequence is synthesized)
tctttgaagagttaaatcactccaaaaggggctgtttacaaattacctacagtttagatttttcagaggaaaaacccatgtaagctatgaccaagttacacaagtataaatggaagtgac

SEQ ID NO: 673454 - DNA, 120 bp, Artificial Sequence
  ENSG00000185842_144 (sequence is synthesized)
attgtcaaatgcgttagattaacttcttccaagattgttaggaaaggacaacactagaacaaatgcagtataggaaaatttgcatttatataagttaaggggaagagaagtaaaaagcat

SEQ ID NO: 673455 - DNA, 62 bp, Artificial Sequence
  ENSG00000185842_145 (sequence is synthesized)
tgcatttatataagttaaggggaagagaagtaaaaagcattatacaaagcaattcccagtaa

SEQ ID NO: 673456 - DNA, 120 bp, Artificial Sequence
  ENSG00000185842_146 (sequence is synthesized)
aggcgtgagccactgcgcccggccaaaattcttttatagaataagccaaaataggaagtgcttaatatgagttcagcttgcacctccaggtagtcacattccagagtggacaacacagaa

SEQ ID NO: 673457 - DNA, 120 bp, Artificial Sequence
  ENSG00000185842_147 (sequence is synthesized)
gtcacattccagagtggacaacacagaaggcatcaccaggcacagcacaggctgttccacactgcctcccctgtgtcaacaagctggcccaggctgcatcaagggagagctcaggacagc

SEQ ID NO: 673458 - DNA, 120 bp, Artificial Sequence
  ENSG00000185842_148 (sequence is synthesized)
ggtgcccaccccttctcttcagagacctgccccatcagaggagatggcagagccctccagggtggcctggtacttggccaccagctcctccaggctgggcatccctccagcacacctgca

SEQ ID NO: 673459 - DNA, 120 bp, Artificial Sequence
  ENSG00000185842_149 (sequence is synthesized)
ggagagcatgtggcttcacaggcctacctcaggcacacctggagtcacctggaattggagctgcaggcaactaaattttctacttcacagacctcatcagaaactcattttacttaaccc

SEQ ID NO: 673460 - DNA, 120 bp, Artificial Sequence
  ENSG00000185842_150 (sequence is synthesized)
agacctcatcagaaactcattttacttaaccctttatcattaaaatgtaatcctctatttaacctatatcattcaaaaatatatggaacccggccgggcatggtggctcacacctgtagt

SEQ ID NO: 673461 - DNA, 120 bp, Artificial Sequence
  ENSG00000185860_0 (sequence is synthesized)
gtgccaggcaggaatggcctgctaggagatgcagtgagcccccaggacctctccactgcctcctccacccctgtatttcacttggctctccaaattgactcaactccagaccataaagaa

SEQ ID NO: 673462 - DNA, 120 bp, Artificial Sequence
  ENSG00000185860_1 (sequence is synthesized)
gatggagaggcacatggtcaggggacaattgtataagcattttgatttggagaggaagaatgccaagcaggctgaagccagactggaccaaagactgcagagactaaaggttatttgcct

SEQ ID NO: 673463 - DNA, 120 bp, Artificial Sequence
  ENSG00000185860_2 (sequence is synthesized)
ctaccatgtgaaattgctgacctgggagcagaggcagctccaaaaagaactgcagaggttgcagcaagcagaaaccatgaagaaaaagttctcctcttatttggggaatggatttcagaa

SEQ ID NO: 673464 - DNA, 120 bp, Artificial Sequence
  ENSG00000185860_3 (sequence is synthesized)
gagaccagaagatgttctcgtgttctcaccacagggaaggcagaagcacagagccccacaggctaagaaaatgagagcattggcaacccgtatggcccaagacacatgcaaaagcaagtc

SEQ ID NO: 673465 - DNA, 120 bp, Artificial Sequence
  ENSG00000185860_4 (sequence is synthesized)
ccaggtgcctccttcacatgatgctggcctcaaagaccccatgaagagcaaaaagcagccactctctcaaaataacagaactgcctgcttcataaaagagcaaccacaagcccaagagaa

SEQ ID NO: 673466 - DNA, 120 bp, Artificial Sequence
  ENSG00000185860_5 (sequence is synthesized)
agattctgtgaatccatctaaggacgtagaccccagcaagggcatctctgttccatgccaaaatcaagaggtttccaccaacaccatagaacaaggtcctagttccagcccagctagtga

SEQ ID NO: 673467 - DNA, 120 bp, Artificial Sequence
  ENSG00000185860_6 (sequence is synthesized)
gggaacactggaaaacaaattcccccaaaacacatggaatgtgcaggaagcttcgaaggcgagttcacaaagccaaccttcttagagttgctttcaaaggccagaaatgcccattatctc

SEQ ID NO: 673468 - DNA, 120 bp, Artificial Sequence
  ENSG00000185860_7 (sequence is synthesized)
cggcacagggtcccccctgagtctgagaggttgcttagcattggagagatatttgggcatggggaatcctcatcatccagggcaggaaaggagtgtgaaaacagggtgccttctaagttt

SEQ ID NO: 673469 - DNA, 120 bp, Artificial Sequence
  ENSG00000185860_8 (sequence is synthesized)
cttcctctctaaccgtttaacatagcctgacaataacatatgccattattgctaaggaaatgtgttcctcaaatgactatattaagcaatacagagaaaaacaaacaaacataattgaat

SEQ ID NO: 673470 - DNA, 120 bp, Artificial Sequence
  ENSG00000185860_9 (sequence is synthesized)
tacaattttattttaaactccctattattttccgggaatataatatttcttgaatgaacaatgctaatatatgaaaaaggagaggaagaatgaatcttctgaaaatattttaagtgatat

SEQ ID NO: 673471 - DNA, 120 bp, Artificial Sequence
  ENSG00000185860_10 (sequence is synthesized)
gtttatgatgtcatcaaaaatatgaatatatattgatgactggacttgggaaaacagtaacagtcttgctttcagggacttcctgtttcctctaggagattctcatggtgccacctgctg

SEQ ID NO: 673472 - DNA, 120 bp, Artificial Sequence
  ENSG00000185860_11 (sequence is synthesized)
gcaaaacggcatagctattctctctgttttagtttgatatatagtagtggtaggaataggaatgtgattgtaaataggtactgtaacatggtctataaagaaaatctgctctttaaccac

SEQ ID NO: 673473 - DNA, 120 bp, Artificial Sequence
  ENSG00000185860_12 (sequence is synthesized)
ctttccttataaggacaccggtaatataggattagtacccaccctaatgacctcattttaatttgattttctctgtaaagaccttatctccaaataaggtcccaccctaaggtactgggg

SEQ ID NO: 673474 - DNA, 120 bp, Artificial Sequence
  ENSG00000185860_13 (sequence is synthesized)
gttaggacttgagcataaaaaatttaaggacacaatccaactcataacacttcttaattaactcaaagcagaaaccatgaagaaaaagttctcctcttatttggggaatggatttcagaa

SEQ ID NO: 673475 - DNA, 120 bp, Artificial Sequence
  ENSG00000185860_14 (sequence is synthesized)
ccatgaagcaaagcaacagaggaaggcaggccataagtgacagaactgattgattcacaaaaacttaatttatttgcaccagccatgcctgggccaacatgaataggcatacaacaatta

SEQ ID NO: 673476 - DNA, 120 bp, Artificial Sequence
  ENSG00000185860_15 (sequence is synthesized)
gagaacccctttgtaaactgcgcaagctctttcctaaaagttctttcttcttgtcttctacgcaagccttgcctatcgtcatcacaattctccctcaaggctgagtcctgagtgaatggt

SEQ ID NO: 673477 - DNA, 120 bp, Artificial Sequence
  ENSG00000185860_16 (sequence is synthesized)
ttgtcactgctaagtgggtcttttcactgtactagctctcacagcgggaaggggccatcacaaggcaggagggagccaacttcagcctagttctctgttccaggtccacctcaatcctgc

SEQ ID NO: 673478 - DNA, 120 bp, Artificial Sequence
  ENSG00000185860_17 (sequence is synthesized)
gcacttctaaaatcaatattttagtacatcctgttttaaataatattccatgcatcgccaaaaaattatacatttaaaaatcttctaaccacctagattttatcttcttatcatttagtc

SEQ ID NO: 673479 - DNA, 120 bp, Artificial Sequence
  ENSG00000185860_18 (sequence is synthesized)
taatacatttgccttcttcgatacaatggatgtaatactctgattagtacaacttaactcaatcaaagagaacgctgctgcatggaacctttcttgtgtaactcattaaattctaaacag

SEQ ID NO: 673480 - DNA, 120 bp, Artificial Sequence
  ENSG00000185860_19 (sequence is synthesized)
tttaaatccttaatcctgacgtggcacacggtgctctaggatggcttgctctcgaccagtccatggccactttacttataccagtggttctcagctaggagcaaatgtgccccctgtccc

SEQ ID NO: 673481 - DNA, 120 bp, Artificial Sequence
  ENSG00000185860_20 (sequence is synthesized)
cagaaaacatccagcactgtccagagatatttctggttgtcataactgaggtgagggggctgccactggagtctagtaggtagggaccataaattctataatacatggggcagccctcta

SEQ ID NO: 673482 - DNA, 120 bp, Artificial Sequence
  ENSG00000185860_21 (sequence is synthesized)
aaacaaagaattaacaagcccgaaacatcaatagcgccaagattggaaactccaccctgtgccattacattaaatattcacagaaccttctgagacagaaaatcagggagatacttgctg

SEQ ID NO: 673483 - DNA, 120 bp, Artificial Sequence
  ENSG00000185860_22 (sequence is synthesized)
ccattttacagataaagaaattgaggctcatgataagtaaaatagctttctccataccagaatgtggatgaggaacaaagaccagggtactcttttcccatactctcctctcaaagaaga

SEQ ID NO: 673484 - DNA, 120 bp, Artificial Sequence
  ENSG00000185860_23 (sequence is synthesized)
tggggaagggcatgtgtccgatggctcctgccctcgttttcagttaagaaatgctttcaaccctacaaatacaaatctttaacattcaaattagtaacacatggttagaagggataattt

SEQ ID NO: 673485 - DNA, 120 bp, Artificial Sequence
  ENSG00000185860_24 (sequence is synthesized)
atacttcaattttgaggaaacattttttattacattcattcattcattcattcattcagagatgtactggggacagatgatcccttccccatttcctcccccatgaggaagaaggggctt

SEQ ID NO: 673486 - DNA, 120 bp, Artificial Sequence
  ENSG00000185860_25 (sequence is synthesized)
ttgacttgttgccttaactcattcaatgggaaaagattccatttttcacctacaggcagaggcagctggaaactcccagaagtagaggctcagtctctctggaggctactgaagagcacc

SEQ ID NO: 673487 - DNA, 120 bp, Artificial Sequence
  ENSG00000185860_26 (sequence is synthesized)
ctgaagggtgtcacaatcctcagtgttgggggaaagttgggtaagtttttaccatgaacactggagggaccagctcctctcagggtgaaatgagccttgaaggaaggacagagggaatca

SEQ ID NO: 673488 - DNA, 120 bp, Artificial Sequence
  ENSG00000185860_27 (sequence is synthesized)
cgcttgggcaagtgttttgccctcacaccaagagtaccagggaagcagagggtaccagtccaaacagatgtcagcagctctatctcaccaatgacagccagaatagcaagcaaccactgc

SEQ ID NO: 673489 - DNA, 120 bp, Artificial Sequence
  ENSG00000185860_28 (sequence is synthesized)
aagcacagagccccacaggctaagaaaatgagttcctagaatcttctacctccacagcggatcccctgatgccactccaaacttctgtaattgcactcacatatgtgtattccagattcg

SEQ ID NO: 673490 - DNA, 120 bp, Artificial Sequence
  ENSG00000185860_29 (sequence is synthesized)
atgtggaaggaaaaggcagttaccgagtgctcagtctgccatcttgaaatagaaatcagagataccatttcatgaggactgtccaggcatacttttgcttgagttccttagaggcctgga

SEQ ID NO: 673491 - DNA, 120 bp, Artificial Sequence
  ENSG00000185860_30 (sequence is synthesized)
tgaccttgaccgtatggtgagaggccagcagagttgcatggacagcttctgtattgctcatgttcctgcatggcaaacacaggtgaagctcatcatcttccaccagcagctgctgcagaa

SEQ ID NO: 673492 - DNA, 120 bp, Artificial Sequence
  ENSG00000185860_31 (sequence is synthesized)
ggataggtcaatgccaccgggagggcagttcagacacagaatgtgcattatctggatggcatcaggtagaggcatttctctctggttcagaaaactgattttgactgctttggttccaag

SEQ ID NO: 673493 - DNA, 120 bp, Artificial Sequence
  ENSG00000185860_32 (sequence is synthesized)
caggagcccaaggaaagattttttaaagccttaaaaatcttttttttttttaaaaaaaaggtaaaggaaagagggaactcacactctaatagccgcttacttagtgtactgtcaacaatg

SEQ ID NO: 673494 - DNA, 120 bp, Artificial Sequence
  ENSG00000185860_33 (sequence is synthesized)
agagctgtacttttccattgctcattgctctattgagattattctgaggcacgttatcatcctgaatttactatgcaactgatatctaagggtgattacaaaccatccatagcaagtgtt

SEQ ID NO: 673495 - DNA, 120 bp, Artificial Sequence
  ENSG00000185862_0 (sequence is synthesized)
cctttcttagccaaatcaccaaaatgtccagttagaacaagaatttagcattctgcaaaagaagttaacagctgagataacgaggaaatattctgaaatggatcccaaatatttcatctt

SEQ ID NO: 673496 - DNA, 120 bp, Artificial Sequence
  ENSG00000185862_1 (sequence is synthesized)
aattttgttttgtggacacctgaacaatacatttttttcaaagacagagacaattacaacagagaagcagtcacagcctaccttattcacatcatcaatgtcacaggtattggctaattc

SEQ ID NO: 673497 - DNA, 120 bp, Artificial Sequence
  ENSG00000185862_2 (sequence is synthesized)
tcaaaacacaacagggaatcctttgggtcaaccaacacaattcagcgacactttttctggacaatcaatatcacctgccaaagtcactgctggacaaccaacaccagctgtctatacctc

SEQ ID NO: 673498 - DNA, 120 bp, Artificial Sequence
  ENSG00000185862_3 (sequence is synthesized)
ttctgaaaaaccagaagcacatacttctgctggacaaccacttgcctacaacaccaaacaaccaacaccaatagccaacacctcctcccagcaagccgtgttcacctctgccagacaact

SEQ ID NO: 673499 - DNA, 120 bp, Artificial Sequence
  ENSG00000185862_4 (sequence is synthesized)
accatctgcccgtacttctaccacacaaccaccaaagtcatttgtctatacttttactcaacaatcatcatctgtccagatcccttctagaaaacaaataactgttcataatccatccac

SEQ ID NO: 673500 - DNA, 120 bp, Artificial Sequence
  ENSG00000185862_5 (sequence is synthesized)
acaaccaacatcaactgtcaaaaattcacctaggagtacaccaggatttatcttagatactaccagtaacaaacaaaccccacaaaaaaacaattataattcaatagctgccatactaat

SEQ ID NO: 673501 - DNA, 120 bp, Artificial Sequence
  ENSG00000185862_6 (sequence is synthesized)
tggtgtacttctgacttctatgttggtagctataatcatcattgtactttggaaatgcttaaggaaaccagttttaaatgatcaaaattgggcaggtagatctccatttgctgatggaga

SEQ ID NO: 673502 - DNA, 120 bp, Artificial Sequence
  ENSG00000185862_7 (sequence is synthesized)
aacccctgacatttgtatggataacatcagagaaaatgaaatatccacaaaacgtacatcaatcatttcacttacaccctggaaaccaagcaaaagcacacttttagcagatgacttaga

SEQ ID NO: 673503 - DNA, 120 bp, Artificial Sequence
  ENSG00000185862_8 (sequence is synthesized)
caagtgaaaacattgaagactccaacaaccccaaaacagagaaaataaaagatcaagtaaatggtacatcagaagatagtgctgatggttcaacagttggaactgctgtttcttcttcag

SEQ ID NO: 673504 - DNA, 120 bp, Artificial Sequence
  ENSG00000185862_9 (sequence is synthesized)
atgatgcagatctgcctccaccacctccccttctggatttggaaggacaggaaagtaaccaatctgacaaacccacaatgacaattgtatctcctcttccaaatgattctactagtctcc

SEQ ID NO: 673505 - DNA, 120 bp, Artificial Sequence
  ENSG00000185862_10 (sequence is synthesized)
ctccatctctggactgtctcaatcaagactgtggagatcataaatctgagataatacaatcatttccaccgcttgactcacttaacttgcccctgccaccagtagattttatgaaaaacc

SEQ ID NO: 673506 - DNA, 120 bp, Artificial Sequence
  ENSG00000185862_11 (sequence is synthesized)
aagaagattccaaccttgagatccagtgtcaggagttctctattcctcccaactctgatcaagatcttaatgaatccctgccacctccacctgcagaactgttataaatattacaacttg

SEQ ID NO: 673507 - DNA, 120 bp, Artificial Sequence
  ENSG00000185862_12 (sequence is synthesized)
ctttttagctgatcttccatcctcaaatgactcttttttctttatatgttaacatatataaaatggcaactgatagtcaattttgatttttattcaggaactatctgaaatctgctcaga

SEQ ID NO: 673508 - DNA, 120 bp, Artificial Sequence
  ENSG00000185862_13 (sequence is synthesized)
cagagcctatgtgcatagatgaaacttttttttaaaaaaagttatttaacagtaatctatttactaattatagtacctatctttaaagtatagtacattttacatatgtaaatggtatgt

SEQ ID NO: 673509 - DNA, 120 bp, Artificial Sequence
  ENSG00000185862_14 (sequence is synthesized)
ataatttaagaactctgaaacaatctacatatacttattacccagtacagttttttttcccctgaaaagctgtgtataaaattatggtgaataaacttttatgtttccatttcaaagacc

SEQ ID NO: 673510 - DNA, 120 bp, Artificial Sequence
  ENSG00000185862_15 (sequence is synthesized)
agggtggagaggaataagagactaagtatatgcttcaagttttaaattaatacctcaagtattaaataaatattccaagtttgtgggaatgggagattaaaatgcatgtttgagaataga

SEQ ID NO: 673511 - DNA, 120 bp, Artificial Sequence
  ENSG00000185862_16 (sequence is synthesized)
atttcagtttgctagaggaacattttaaatctgaattgaaccacccattttcctttcttagccaaatcaccaaaatgtccagttagaacaagaatttagcattctgcaaaagaagttaac

SEQ ID NO: 673512 - DNA, 120 bp, Artificial Sequence
  ENSG00000185862_17 (sequence is synthesized)
agctgagggccatttatcatcactgtgtaccaagtggtagaggagtaagcaatgatatgctgtttagatatgctgaaaagataacgaggaaatattctgaaatggatcccaaatatttca

SEQ ID NO: 673513 - DNA, 120 bp, Artificial Sequence
  ENSG00000185863_0 (sequence is synthesized)
aaggactgcccgtaagaccaggccagccccactgctgcctctgcctcagagctggcctgagctggctgggctctcaggcctctgcccaccctacctgtcccattcccagagctgcttggc

SEQ ID NO: 673514 - DNA, 120 bp, Artificial Sequence
  ENSG00000185863_1 (sequence is synthesized)
catggctccttgaattgcggtgcccaagggcaaatgacacactggcattgtgagcccccccacccccacctcacagtcctactgtgaagtcagcaccttccaacagttccgtcagaggtg

SEQ ID NO: 673515 - DNA, 120 bp, Artificial Sequence
  ENSG00000185863_2 (sequence is synthesized)
tccctggcctgtgtcctgcctgcgtggtggccccttgggcctcacatatttgtcccttctgctcatccctgctgcagctggaacctactgtgaatgcagccttggcctcagccgcgaggc

SEQ ID NO: 673516 - DNA, 120 bp, Artificial Sequence
  ENSG00000185863_3 (sequence is synthesized)
cctcatcgccctccttgtggtgctggcgggcatcagtgccagctgcttctgtgccctcgtcatcgtggcaattggtgtcttgcgggccaagggtgaaacatgcccgagacaagtggacaa

SEQ ID NO: 673517 - DNA, 120 bp, Artificial Sequence
  ENSG00000185863_4 (sequence is synthesized)
caggttggtggagaattttggggtccaggaagatctcatggacctgcacccggtttacgtggagtcccagctaatggacgctgacctggaggtctccctggtgccaccactagaggatca

SEQ ID NO: 673518 - DNA, 120 bp, Artificial Sequence
  ENSG00000185863_5 (sequence is synthesized)
gagccttgtggccatccccatggaggcttcttcagaggagccgccaccacccccgcccctaccacctgagtagagggctgagggcagctgggggaggggaattaaagcgtatttagtggc

SEQ ID NO: 673519 - DNA, 120 bp, Artificial Sequence
  ENSG00000185863_6 (sequence is synthesized)
ccttggtcttgcaagaagggctttaccccctgggtgggctgtcacctggggtaggaatggcgtttcctaggcgtgtgctgggggagctccgggggcccagcactgttccaggactcatgt

SEQ ID NO: 673520 - DNA, 120 bp, Artificial Sequence
  ENSG00000185863_7 (sequence is synthesized)
gcctcagccgcgaggccctcatcgccctccttgtggtgctggcgggcatcagtgccagctgcttctgtgccctcgtcatcgtggcaattggtgtcttgcgggccaaggggaatggcgttt

SEQ ID NO: 673521 - DNA, 120 bp, Artificial Sequence
  ENSG00000185863_8 (sequence is synthesized)
agtggggccagggctggacatggcccccggtccctggcctgtgtcctgcctgcgtggtggccccttgggcctcacatatttgtcccttctgctcatccctgctgcaggtgcctcctcctg

SEQ ID NO: 673522 - DNA, 83 bp, Artificial Sequence
  ENSG00000185864_0 (sequence is synthesized)
ctgactttggtggaagtccttggttacatgtcattattgcatttccgacaagttataaagttgtcattaccctctggatagtt

SEQ ID NO: 673523 - DNA, 79 bp, Artificial Sequence
  ENSG00000185864_1 (sequence is synthesized)
actttggtggaagtccttggttacatgtcattattgcatttccgacaagttactctcctgaagactatcttctggtctc

SEQ ID NO: 673524 - DNA, 60 bp, Artificial Sequence
  ENSG00000185864_2 (sequence is synthesized)
acctgctgagcgtctgcggattccgcttccaccatcagccgatgataatctcaagacacc

SEQ ID NO: 673525 - DNA, 64 bp, Artificial Sequence
  ENSG00000185864_3 (sequence is synthesized)
ggaggctgaggcagaaaaaccacgcaaacccaagaggcagagggcggctgagatggaaccacct

SEQ ID NO: 673526 - DNA, 79 bp, Artificial Sequence
  ENSG00000185864_4 (sequence is synthesized)
ctcccttagctactcaggaggctgaggcagaaaaaccacgcaaacccaagaggcagagggcggctgagatggaaccacc

SEQ ID NO: 673527 - DNA, 120 bp, Artificial Sequence
  ENSG00000185864_5 (sequence is synthesized)
ggagggccgctgacgtggaaccatcattacccgaacccaagaggcggaggttgagctgagaagaggccagtgcactcaagcctgagcaataagaataaaaccgagtagaacaaaataaaa

SEQ ID NO: 673528 - DNA, 120 bp, Artificial Sequence
  ENSG00000185864_6 (sequence is synthesized)
agtgcactcaagcctgagcaataagaataaaaccgagtagaacaaaataaaaaattcaaaaaacaaaacaaaacccacactccaaaaactaacaaagaataaataaataatataaaaata

SEQ ID NO: 673529 - DNA, 120 bp, Artificial Sequence; identical to SEQ ID NO: 558520
  ENSG00000185864_7 (sequence is synthesized)

SEQ ID NO: 673530 - DNA, 120 bp, Artificial Sequence; identical to SEQ ID NO: 558521
  ENSG00000185864_8 (sequence is synthesized)

SEQ ID NO: 673531 - DNA, 120 bp, Artificial Sequence; identical to SEQ ID NO: 558522
  ENSG00000185864_9 (sequence is synthesized)

SEQ ID NO: 673532 - DNA, 120 bp, Artificial Sequence
  ENSG00000185864_10 (sequence is synthesized)
tttttagatgctaaaacttatgggtgaaagtggattaaatgtagccaaatgcaacatcaaaatcttcaggcacaaaaacccattaactttttcatactctcagaaggtgaacctaatttc

SEQ ID NO: 673533 - DNA, 120 bp, Artificial Sequence
  ENSG00000185864_11 (sequence is synthesized)
aaatgaaagctgcctccagaatatattgttaagcgtattctagatataattcattttggcaaacatactgtagaaattcacataacattttactgtactaaaagtaaattgcccatgtaa

SEQ ID NO: 673534 - DNA, 80 bp, Artificial Sequence
  ENSG00000185864_12 (sequence is synthesized)
attacagctattacaaatctcctaagatgtctcgggtagtgtattagttacttttcatactgctatgaagaaatactgga

SEQ ID NO: 673535 - DNA, 71 bp, Artificial Sequence
  ENSG00000185864_13 (sequence is synthesized)
atgaattttaaaggatgactgatggtccctggaagagaaacagtaaacaaataaggtatgatctcgtgaaa

SEQ ID NO: 673536 - DNA, 60 bp, Artificial Sequence
  ENSG00000185864_14 (sequence is synthesized)
caggttaatttttgtaaatgtaccaggcatgcttaaaatgaatgtatctacatttgttcc

SEQ ID NO: 673537 - DNA, 86 bp, Artificial Sequence
  ENSG00000185864_15 (sequence is synthesized)
atgctcttttggctcctctttgggctcctactggaatttatcagccatcagtgcatctctgttatcaatactctggctgaccatca

SEQ ID NO: 673538 - DNA, 78 bp, Artificial Sequence
  ENSG00000185864_16 (sequence is synthesized)
gcagagagcctggaggtccaaccgccgtagacaggaaggaaataaaattgtcctgaaagacgtcattactctacggag

SEQ ID NO: 673539 - DNA, 70 bp, Artificial Sequence
  ENSG00000185864_17 (sequence is synthesized)
attttaaaggatgactgatggtccctggaagagaaacagtaaacaaatagtaaagtcagtgacatgccca

SEQ ID NO: 673540 - DNA, 120 bp, Artificial Sequence
  ENSG00000185869_0 (sequence is synthesized)
agaacacatctgctttcctgtgtgagggtgaggcttgggccgggttccccgggaggctcatctccattgcgcagcgctacggcgacccgcaactccgaggctcggctggatgttgagagt

SEQ ID NO: 673541 - DNA, 120 bp, Artificial Sequence
  ENSG00000185869_1 (sequence is synthesized)
tgagggagcagccgtttcgggtgggcccaggcgaggagctgacaggaatcggcgtgggtcccgctctggactacatttcccagagggcctggtggcctgccacttttctcgcaggaattc

SEQ ID NO: 673542 - DNA, 120 bp, Artificial Sequence
  ENSG00000185869_2 (sequence is synthesized)
gaacgtttcgtcactcctggcgggacccttagatctgggaggaaacctctctgaggtctggtcagattccaaccctggacagcagtgaacacaacctttcccctgagccactggaattgg

SEQ ID NO: 673543 - DNA, 120 bp, Artificial Sequence
  ENSG00000185869_3 (sequence is synthesized)
acagaatgccccattctcctctgatctccattcctcatgtgtggtgtcacccagaagaggaggaaagaatgcatgatgaacttctacaagcagtatccaaggggccggtgatgttcaggg

SEQ ID NO: 673544 - DNA, 120 bp, Artificial Sequence
  ENSG00000185869_4 (sequence is synthesized)
atgtttccatagacttctctcaagaggaatgggaatgcctggacgctgatcagatgaatttatacaaagaagtgatgttggagaatttcagcaacctggtttcagtgggactttccaatt

SEQ ID NO: 673545 - DNA, 120 bp, Artificial Sequence
  ENSG00000185869_5 (sequence is synthesized)
ctaagccagctgtgatctccttattggaacaaggaaaagagccctggatggttgatagagagctgactagaggcctgtgttcagatctggaatcaatgtgtgagaccaaaatattatctc

SEQ ID NO: 673546 - DNA, 120 bp, Artificial Sequence
  ENSG00000185869_6 (sequence is synthesized)
taaagaagagacatttcagtcaagtaataattacccgtgaagacatgtctacttttattcagcccacatttcttattccacctcaaaaaactatgagtgaagagaaaccatgggaatgta

SEQ ID NO: 673547 - DNA, 120 bp, Artificial Sequence
  ENSG00000185869_7 (sequence is synthesized)
tgtggaaagacctttaatcaaaactcacaatttatccaacatcagagaattcattttggtgaaaaacactatgaatctaaggagtatgggaagtcctttagtcgtggctcactcgttact

SEQ ID NO: 673548 - DNA, 120 bp, Artificial Sequence
  ENSG00000185869_8 (sequence is synthesized)
cgacatcagaggattcacactggtaaaaaaccctatgaatgtaaggaatgtggcaaggcttttagttgtagttcatatttttctcaacatcagaggattcacactggtgagaaaccctat

SEQ ID NO: 673549 - DNA, 120 bp, Artificial Sequence
  ENSG00000185869_9 (sequence is synthesized)
gaatgtaaggaatgtggaaaagcctttaagtattgctcaaaccttaatgatcatcagagaattcacactggtgagaaaccctatgaatgtaaagtatgtggaaaagcctttactaaaagt

SEQ ID NO: 673550 - DNA, 120 bp, Artificial Sequence
  ENSG00000185869_10 (sequence is synthesized)
tcacaactttttctacatctgagaattcatactggtgagaaaccttatgaatgtaaagaatgtgggaaagcctttactcaacactcaaggcttattcagcatcagagaatgcatactggt

SEQ ID NO: 673551 - DNA, 120 bp, Artificial Sequence
  ENSG00000185869_11 (sequence is synthesized)
gagaaaccttatgaatgtaagcagtgtgggaaggcctttaatagtgcctcaacacttactaaccatcacagaattcatgctggtgagaagctctatgaatgtgaagaatgtagaaaggcc

SEQ ID NO: 673552 - DNA, 120 bp, Artificial Sequence
  ENSG00000185869_12 (sequence is synthesized)
tttattcagagctcagaacttattcaacatcagagaatccatacagatgaaaaaccatatgaatgtaatgaatgtgggaaggcctttaataaaggctcaaatcttactcgacatcagaga

SEQ ID NO: 673553 - DNA, 120 bp, Artificial Sequence
  ENSG00000185869_13 (sequence is synthesized)
attcacactggtgagaaaccctatgactgtaaggaatgtggaaaggcttttggtagtcgctctgacctcattcgccatgagggaattcatactggttgaatgacagtaaagtaagaccat

SEQ ID NO: 673554 - DNA, 120 bp, Artificial Sequence
  ENSG00000185869_14 (sequence is synthesized)
tttgttaacctttataataatttttttaaaacaggtaaggagaacaaattaggatacatattatcaaaggttctcctatgtattcgtttttaaacgatacgataacaaagtaccaagtac

SEQ ID NO: 673555 - DNA, 120 bp, Artificial Sequence
  ENSG00000185869_15 (sequence is synthesized)
agatctgggaggtgagatattttggtccccaggagaactggctcaggtctgcaagttcccatccgggatgactggaaagggcttaggtgaggataccgaagaccgatggggagctggcgc

SEQ ID NO: 673556 - DNA, 83 bp, Artificial Sequence
  ENSG00000185869_16 (sequence is synthesized)
gcttaggtgaggataccgaagaccgatggggagctggcgccttgggcccctgcgggcggagcggcctgaaaggtggaggttgt

SEQ ID NO: 673557 - DNA, 120 bp, Artificial Sequence
  ENSG00000185869_17 (sequence is synthesized)
agcctggaaatctaaactcaagggtgctgatcgttttggttccttctgaggactctgaggatctgttctatgcctttttcctaacctctgttaacagctggcagtccttggcattccatg

SEQ ID NO: 673558 - DNA, 120 bp, Artificial Sequence
  ENSG00000185869_18 (sequence is synthesized)
gcttttacatacaccattccaatctctgcctccatcttcacattgcattctcgctgtgtatctctgtgtatgtcttttatttggacaccagtcaggttagattggggttacctggtgacc

SEQ ID NO: 673559 - DNA, 120 bp, Artificial Sequence
  ENSG00000185869_19 (sequence is synthesized)
tcatcttaacttgattatatctgccaagaccctgtttccaagtaaggtcacatttaccggtaccaggggttaggacttcagcatatctttttaggggatacagttcaacccataataccc

SEQ ID NO: 673560 - DNA, 120 bp, Artificial Sequence
  ENSG00000185869_20 (sequence is synthesized)
ttttaggggatacagttcaacccataataccctgttagaatgattttgtctaatatatttgtaatttccttttatacataagttgttagtcaaatttattttattttattttattttgag

SEQ ID NO: 673561 - DNA, 82 bp, Artificial Sequence
  ENSG00000185869_21 (sequence is synthesized)
atggccaaaacagactttataccaacaaaaattaaaaaggacaaagaaggtcatttataatgataaaggataaattcaacaa

SEQ ID NO: 673562 - DNA, 120 bp, Artificial Sequence
  ENSG00000185869_22 (sequence is synthesized)
aaagaaggtcatttataatgataaaggataaattcaacaagaagataaaacaatcctaaatatgtatgcacccaacactgcaacacccagatccataacacagatactactagacctaag

SEQ ID NO: 673563 - DNA, 120 bp, Artificial Sequence
  ENSG00000185869_23 (sequence is synthesized)
aaaagagatagacagcaatacaacaatagcaggggacttcaccactccattgacagcactagacagatcactgggacagaaatcaacaaagaaactctggacttaaattggactctacac

SEQ ID NO: 673564 - DNA, 120 bp, Artificial Sequence
  ENSG00000185869_24 (sequence is synthesized)
caaatggacccaacagacatctgaagaacattctacccaacaaccacagaatatatactcttctcttctgtgcatggaacattctcaaaaataggtcatatactggaccacaaagcaagt

SEQ ID NO: 673565 - DNA, 120 bp, Artificial Sequence
  ENSG00000185869_25 (sequence is synthesized)
atcaataaattttaaaaaaacaaaatcatatctaacatcttctctgaccatagtggaataaaactagatatcaataccaagaggaactctcaaaacagatacatggaatttaaacagctt

SEQ ID NO: 673566 - DNA, 120 bp, Artificial Sequence
  ENSG00000185869_26 (sequence is synthesized)
gctcctgaatgatttttggatcaatgatgaaactaaggtggaaatttaaaattttttgaaataaatgaaaatagagacaaaacacatgaaaacatctgagatacagcaaaagcagtgcta

SEQ ID NO: 673567 - DNA, 120 bp, Artificial Sequence
  ENSG00000185869_27 (sequence is synthesized)
agagaggattttatagcattaaatgcctacaccaaaaagatagaaaaatctcaaatgaatagcctaacgtcacatctcaaggaactaggaaaaaacaaaacaaactcaacccaaagctgg

SEQ ID NO: 673568 - DNA, 120 bp, Artificial Sequence
  ENSG00000185869_28 (sequence is synthesized)
cagaagaaaagcaataacaaatatcagagcaggcaaaaatgagactgagaacaaaggaatgcaaaagatcaataaaagaaaaagttggttctttgcaaagataaaactgacagaccacta

SEQ ID NO: 673569 - DNA, 120 bp, Artificial Sequence
  ENSG00000185869_29 (sequence is synthesized)
gctagattaaccaagaaaaaaagaagattcaaataaatacaatcagaaatgataaggtgatattataactgataacacagacatataaaatatcagcagaaactatatgcacatattaga

SEQ ID NO: 673570 - DNA, 120 bp, Artificial Sequence
  ENSG00000185869_30 (sequence is synthesized)
aaacctagaggaagtggataaattcctagaaacacataaccttccaagattgaaccagggagaaataggaatcctcaacagactactgagtattgaaattgaatcagtaatagaaaaaaa

SEQ ID NO: 673571 - DNA, 120 bp, Artificial Sequence
  ENSG00000185869_31 (sequence is synthesized)
accagacagattcacagctgaattctactagacatgcaaggaagaactagtaacagcactattgaaactattccaaaaattataggagggaatcctccctaactcattctacaaagccag

SEQ ID NO: 673572 - DNA, 120 bp, Artificial Sequence
  ENSG00000185869_32 (sequence is synthesized)
ccctaactcattctacaaagccagtatcatcctgatactgaagccaggcaaggataaaacacacaaaaaaactacaagccaatatccctgatgaaaatagacacaaaaatcttcagcaaa

SEQ ID NO: 673573 - DNA, 120 bp, Artificial Sequence
  ENSG00000185869_33 (sequence is synthesized)
atactagcaaaccaaatcaaacagtacataaaaaagatagtaacagcacagtcaagtggattttattcctggggtgtaaggatggctcaacatatgcaactcaatacatgattcatcaca

SEQ ID NO: 673574 - DNA, 120 bp, Artificial Sequence
  ENSG00000185869_34 (sequence is synthesized)
tacacagaattaaaaataagccaggcactcacacctgtaatcccagcactttgcaaggccaaggcgggcagatcacatgatgtcaagagtttgagaccagtctggctgacatggcgaaac

SEQ ID NO: 673575 - DNA, 67 bp, Artificial Sequence
  ENSG00000185869_35 (sequence is synthesized)
cctgtctctactaaaaatagaaaaattggctgggcatggtggcaggagaagcggaggttgcagtgag

SEQ ID NO: 673576 - DNA, 70 bp, Artificial Sequence
  ENSG00000185869_36 (sequence is synthesized)
aaattgcttgaatggggggagcaacaaagccagactccatctcaaaaaaaaaccaaaaaaaatcctattt

SEQ ID NO: 673577 - DNA, 120 bp, Artificial Sequence
  ENSG00000185869_37 (sequence is synthesized)
cagactccatctcaaaaaaaaaccaaaaaaaatcctatttagtacaaggtacattatttaggtaatgagtccattaaaagccaacactttccccactacactatatgtgtatgtaacaca

SEQ ID NO: 673578 - DNA, 120 bp, Artificial Sequence
  ENSG00000185869_38 (sequence is synthesized)
actgcccttgtaacttcctaaacctataattaagaaacaataaaaggcaaattaagaatgcttttttaaaaggtgggggcattatgctaataagttactgtggatttcagagtgcagagt

SEQ ID NO: 673579 - DNA, 120 bp, Artificial Sequence
  ENSG00000185869_39 (sequence is synthesized)
agaaagatcacaagaatttagtgtggtaggtgggaacagaaaatgggtgtataaattttattgacgtgggagtactggatattgtagagacagatatcatcagggcaaggagattaaaga

SEQ ID NO: 673580 - DNA, 120 bp, Artificial Sequence
  ENSG00000185869_40 (sequence is synthesized)
tttttgcattgacggtttgacactatattgtggtaataacactgtatgtgttgggagatagaacaggaaacatcttccctggaatatgtatactattaaatgttttatcaaacttttgat

SEQ ID NO: 673581 - DNA, 120 bp, Artificial Sequence
  ENSG00000185869_41 (sequence is synthesized)
caaacaagacagcacaatttataatttcatttctatttctatgttatgagaaactgatcatttattcaaatgtttaacaggcatgttcatgttactataaactcttctgtttcaccatca

SEQ ID NO: 673582 - DNA, 120 bp, Artificial Sequence
  ENSG00000185869_42 (sequence is synthesized)
aagagatatacttctgagatgttatcaggaagctccctttaaaggcctgaagcctcttccatataagctatcccactttttttttttttctcatactttttccctagtccaatatagcaa

SEQ ID NO: 673583 - DNA, 120 bp, Artificial Sequence
  ENSG00000185869_43 (sequence is synthesized)
gtacctccctggctacaattatgctataattattctagtcacattttagtttcattccttcctatgatacgctacgtttagatttgtataacagtagacattcccaccctgagaaataga

SEQ ID NO: 673584 - DNA, 120 bp, Artificial Sequence
  ENSG00000185869_44 (sequence is synthesized)
tgtaagtgcatgtgtgtctttttctttccctgtgcttgttttcattttatctactttcagctatttaacatctttgaccagtttgttctggatttaaaagctcattctttcatttatcaa

SEQ ID NO: 673585 - DNA, 120 bp, Artificial Sequence
  ENSG00000185869_45 (sequence is synthesized)
acatttgattatttcttacttgaaaacaaaattgaagtataacatacacacataaaactgcatgactatgattgcatagtatggtgaaattgagaatggtgaaaccactactaggacgat

SEQ ID NO: 673586 - DNA, 120 bp, Artificial Sequence
  ENSG00000185869_46 (sequence is synthesized)
aaatagaacattactagcacctcagaaccccttctctgccccttcccaatcaccagcctctttttcctctctcaaaataaataccatcctgacatttggcaccatggattcgttttgcct

SEQ ID NO: 673587 - DNA, 120 bp, Artificial Sequence
  ENSG00000185869_47 (sequence is synthesized)
atttttgaactttgtatagacgcaatcacacagtatttagtcttttgcctttggctttttttgctcaacattatgtttatgtgacatatctatggtgctgcatatatctggtgttagttc

SEQ ID NO: 673588 - DNA, 80 bp, Artificial Sequence
  ENSG00000185869_48 (sequence is synthesized)
tctatggtgctgcatatatctggtgttagttcattcttattggctatgttatatttcattctatgaatatatacatatat

SEQ ID NO: 673589 - DNA, 120 bp, Artificial Sequence
  ENSG00000185869_49 (sequence is synthesized)
ctcccaaagtgctgggattacaggcgtaacccactgtgtcctgcttcattctatgaatattttttaaattatgctttatatattattaattactataagtgtccttctgttgacagttgg

SEQ ID NO: 673590 - DNA, 120 bp, Artificial Sequence
  ENSG00000185869_50 (sequence is synthesized)
aagtgtccttctgttgacagttggtttgtttgcagtttttagctattaaacataatgctgctgtgaacgttcctgtgtataacttttggtaaatgtatgtacacatttcttttaggtata

SEQ ID NO: 673591 - DNA, 120 bp, Artificial Sequence
  ENSG00000185869_51 (sequence is synthesized)
tacataggagtggaattactgagcaataggatatgtgtgtgttcaactttagtaaatataccaattttccaaagtagttataccaatttgcagttctactagcagtatgaaggttactat

SEQ ID NO: 673592 - DNA, 120 bp, Artificial Sequence
  ENSG00000185869_52 (sequence is synthesized)
tgctctgcattcttacattcttaccagttattattgccaggccctttaattttagttattctgatgtgtgtgttctgtgacatgcctgtttaagtttcttggctaaacttagtcggttgt

SEQ ID NO: 673593 - DNA, 120 bp, Artificial Sequence
  ENSG00000185869_53 (sequence is synthesized)
ctatctttttcctgttggtttcaaagaattcttattatattctatgtatcagccctgtgtttggttatacatgatgtaaatatctcccaccactttataccttgccctttactcttttaa

SEQ ID NO: 673594 - DNA, 120 bp, Artificial Sequence
  ENSG00000185869_54 (sequence is synthesized)
tagtaccttttgatgaacagaagttattaattttaatgtggtcacagttatctttttctttatagtgttgcttttttgtgtcctggataggaatcattgcctaccccaaggtcttgaaga

SEQ ID NO: 673595 - DNA, 120 bp, Artificial Sequence
  ENSG00000185869_55 (sequence is synthesized)
tatttcctatgttatattctagtagctttattgttttactttttccatttagatctactttcctgaagttggtatttgtatgtgttgtgaggtaggggtcaaatttcattttttttccat

SEQ ID NO: 673596 - DNA, 120 bp, Artificial Sequence
  ENSG00000185869_56 (sequence is synthesized)
gtgaatatccagttgacttcttagtgtttattgagatgactgtccttttcccattctatagagataggactatatctatcttttccccaatagaaataggactacctttgtcataaatca

SEQ ID NO: 673597 - DNA, 120 bp, Artificial Sequence
  ENSG00000185869_57 (sequence is synthesized)
ggtattcctatttctgtgagtctatctctgaattctgttcctttggcttatttgtctatccttgtgccaataccacactatattaatactgtagcatgtaataaatcttatctagtagag

SEQ ID NO: 673598 - DNA, 120 bp, Artificial Sequence
  ENSG00000185869_58 (sequence is synthesized)
tattaatactgtagcatgtaataaatcttatctagtagagcaagttctcctgctgctgcttagtcctttgcattttcattgtaaattttagtattaggccgggcgcagtggctcacgcct

SEQ ID NO: 673599 - DNA, 120 bp, Artificial Sequence
  ENSG00000185873_0 (sequence is synthesized)
agcacataagtcaaaagctgcgtcagaaggttctaacttttgtcatcactattaccagcattgtcatcgttatcgttatcttcgtcatcatcattaccaccgttatacctgatactgcca

SEQ ID NO: 673600 - DNA, 120 bp, Artificial Sequence
  ENSG00000185873_1 (sequence is synthesized)
taacaatcagaacattatgtacaggcacggcatatcttcccaaagatcttggccactatggactacgatctttatttttcttggagtggcggcaatcttgggagtaaccattggtcttct

SEQ ID NO: 673601 - DNA, 120 bp, Artificial Sequence
  ENSG00000185873_2 (sequence is synthesized)
tgttcattttctggcagttgagaagacttactattatcaaggtgattttcatatttctggagtcacatacaatgataattgtgaaaacgcagcttcacaagccagcacaaatctaagcaa

SEQ ID NO: 673602 - DNA, 120 bp, Artificial Sequence
  ENSG00000185873_3 (sequence is synthesized)
agatattgagactaagatgttaaatgcatttcaaaattccagtatatataaggaatatgtcaaatctgaggtcatcaaacttctgcctaatgccaatggttcaaatgtgcagttacagct

SEQ ID NO: 673603 - DNA, 120 bp, Artificial Sequence
  ENSG00000185873_4 (sequence is synthesized)
gaaattcaagtttcctccagcagaaggagttagcatgaggactaaaatcaaggctaaattacatcagatgttgaaaaacaacatggcatcctggaatgcagttcctgcttccattaaact

SEQ ID NO: 673604 - DNA, 120 bp, Artificial Sequence
  ENSG00000185873_5 (sequence is synthesized)
catggaaatcagcaaggctgcttctgaaatgcttaccaacaactgttgtgggagacaagtagccaacagtatcataactggcaacaaaattgtgaatggaaaaagctccctggagggggc

SEQ ID NO: 673605 - DNA, 120 bp, Artificial Sequence
  ENSG00000185873_6 (sequence is synthesized)
atggccatggcaggccagcatgcaatggaaaggccgtcactactgtggagcctctctgatcagcagcaggtggctattatctgcagctcactgctttgctaagaaaaataattcaaaaga

SEQ ID NO: 673606 - DNA, 120 bp, Artificial Sequence
  ENSG00000185873_7 (sequence is synthesized)
ttggactgtcaactttggaattgtagtaaataaaccatatatgacacggaaagtccaaaacattatttttcatgaaaattatagcagtcctgggcttcatgatgatattgcccttgtgca

SEQ ID NO: 673607 - DNA, 120 bp, Artificial Sequence
  ENSG00000185873_8 (sequence is synthesized)
gcttgctgaagaagtttcttttacagagtacattcgtaagatttgtcttcctgaagccaaaatgaagctctcagaaaatgacaatgttgtagttacaggttggggaacactttatatgaa

SEQ ID NO: 673608 - DNA, 120 bp, Artificial Sequence
  ENSG00000185873_9 (sequence is synthesized)
tggttcatttccagtgatacttcaagaagactttttgaagattattgacaacaaaatttgcaatgcctcatatgcatactctggctttgtgactgatacaatgttatgtgctggatttat

SEQ ID NO: 673609 - DNA, 120 bp, Artificial Sequence
  ENSG00000185873_10 (sequence is synthesized)
gtcaggagaagctgatgcatgtcagaatgattctggtggaccactagcttaccctgattccagaaatatctggcatcttgttggaatagtaagctggggtgatggatgtggtaaaaagaa

SEQ ID NO: 673610 - DNA, 120 bp, Artificial Sequence
  ENSG00000185873_11 (sequence is synthesized)
caggtgtctatactcgagtgacttcttatcgcaattggattacatccaagactggactctgaaaaaaaaggaattatacaaaggaacataaagaccactgtaggctatccttatctgtgg

SEQ ID NO: 673611 - DNA, 120 bp, Artificial Sequence
  ENSG00000185873_12 (sequence is synthesized)
ccttatctgtggctttgggatctttttattttgattgttggtaaactaatcattttattatatataaaaatataaatgtctttattaatattttattatatctaaaacactgtccatgca

SEQ ID NO: 673612 - DNA, 83 bp, Artificial Sequence
  ENSG00000185873_13 (sequence is synthesized)
ataggcggattgcttgagcccaggagtttgagggcagcctgggaaacatggctaaatccgtgttcaaaaaatacaaaaattag

SEQ ID NO: 673613 - DNA, 86 bp, Artificial Sequence
  ENSG00000185873_14 (sequence is synthesized)
ggcggattgcttgagcccaggagtttgagggcagcctgggaaacatggctaaatccgtgtttgcacctatagtcccagctattcag

SEQ ID NO: 673614 - DNA, 120 bp, Artificial Sequence
  ENSG00000185873_15 (sequence is synthesized)
tttttcttaatagctgagttgtgattcattttaccattatattcagaattgaccttaatttgttttccagaatcaaaagaaaataaaatataaattttgaaactatgagaacatatatag

SEQ ID NO: 673615 - DNA, 120 bp, Artificial Sequence
  ENSG00000185873_16 (sequence is synthesized)
gggatttatcaaatgagttactttttattatatcaattataatttcattttattaactggaataagtgcgaaagtgtacattactttttaacttatatgtgaaatgattcatgtacctca

SEQ ID NO: 673616 - DNA, 120 bp, Artificial Sequence
  ENSG00000185873_17 (sequence is synthesized)
caaaatcatgcaatcttgcagtgaagaaggagtatcagagctccagctacactgagtctttcaatttacagatcaagaaactgaagaccagagaagagaaatgatttggttaaagtcact

SEQ ID NO: 673617 - DNA, 120 bp, Artificial Sequence
  ENSG00000185873_18 (sequence is synthesized)
ctccatcatctgtgataagttgacaaatttatccttacacaaatttgtcctcattgagttgacatccaaaatttgtcaggaattaaagaatgacttttgagtggcaattatttatataac

SEQ ID NO: 673618 - DNA, 120 bp, Artificial Sequence
  ENSG00000185873_19 (sequence is synthesized)
attttccattgtcttcatattcaccttttgtcatttgtttgctttctcttgcagcaaaaataatatgaggtcatcaagggcagagaactgtgtggcatctccttatagtaaaagtgcaat

SEQ ID NO: 673619 - DNA, 120 bp, Artificial Sequence
  ENSG00000185873_20 (sequence is synthesized)
catatggatggctaactttgtaatctctacaaataatttaccttatgtaattttccaaatgtaaaagtcaccaaaaacttaaaggcattaaaataaactaaaaaagtactcatttcttca

SEQ ID NO: 673620 - DNA, 120 bp, Artificial Sequence
  ENSG00000185873_21 (sequence is synthesized)
atttacaacagctccatgtcaaagatagttttcaaaatagaatttcagtggtttatagttttgtttgggaacctcatgccttaaaattatgagataatcaccactaagaacagtgttgtg

SEQ ID NO: 673621 - DNA, 120 bp, Artificial Sequence
  ENSG00000185873_22 (sequence is synthesized)
ttaaaaatacttgaaatatgtcatgtggaaatcccataacacgctttccgaattactagatataccagatattgacttagaatttctctttgaaaaacactggtctattaattttaacat

SEQ ID NO: 673622 - DNA, 120 bp, Artificial Sequence
  ENSG00000185873_23 (sequence is synthesized)
atataaaaagttaaatgaaaattgattccaaataataaaactgtgagtgaaaaatatcatatttgaatatgttaaaatgagaaagattgaaggaaatgacaatttaggataagaagaaaa

SEQ ID NO: 673623 - DNA, 120 bp, Artificial Sequence
  ENSG00000185873_24 (sequence is synthesized)
ataagaagaaaatataaaaccaggctatataaaatatatttattaaagataaaaacagttctgcatcttaaaaattattattattttttgctttagaggtgggatgttgctatgttgtgt

SEQ ID NO: 673624 - DNA, 89 bp, Artificial Sequence
  ENSG00000185873_25 (sequence is synthesized)
ttattttttgctttagaggtgggatgttgctatgttgtgtgggctggagtgcaattcacaggtgcaattacagtggactatagcctgga

SEQ ID NO: 673625 - DNA, 120 bp, Artificial Sequence
  ENSG00000185875_0 (sequence is synthesized)
gtggagcggaggcacgctggccgccgcaggcacaggcgcagagtccactgcgcgggggcgggaccggggagctagctgcagactccacgttttgcaaagatcggttttgcctcagagtca

SEQ ID NO: 673626 - DNA, 120 bp, Artificial Sequence
  ENSG00000185875_1 (sequence is synthesized)
acaaactcttcagattggttccggtgtgtcctatgtttacaagtcagtggaaattaagcacaacacatataaattgaaaagtcaaataaggaaatgaattacctcccttgacggctctaa

SEQ ID NO: 673627 - DNA, 120 bp, Artificial Sequence
  ENSG00000185875_2 (sequence is synthesized)
ttttacttggctaaagccaatttttaggttggcttgggcagaaaagtgaaaagagaatgctccactttaaccgatgtcatcatctgaaaaagataacacagaaatgtttttctagtatac

SEQ ID NO: 673628 - DNA, 120 bp, Artificial Sequence
  ENSG00000185875_3 (sequence is synthesized)
atgttaaaacggataaacatgcacagcgatttctttcaagaacctttgcacttgcggaattgaggaagtcatggtattcaacccactctcttgttggagacaaaaatattatcctgatgg

SEQ ID NO: 673629 - DNA, 120 bp, Artificial Sequence
  ENSG00000185875_4 (sequence is synthesized)
gacctcctggtgctgggaaaacaacagtaggcagaataataggtcagaaactaggttgttgtgtcatagatgtggatgatgatatccttgaaaaaacctggaatatgagtgtgtctgaaa

SEQ ID NO: 673630 - DNA, 120 bp, Artificial Sequence
  ENSG00000185875_5 (sequence is synthesized)
aattacaggatgttggtaatgagcaatttttagaagaggaaggaaaagctgtgttaaacttctctgcatctggaagtgtgatttcccttactgggtccaatccaatgcatgatgctagca

SEQ ID NO: 673631 - DNA, 120 bp, Artificial Sequence
  ENSG00000185875_6 (sequence is synthesized)
tgtggcatctgaagaaaaatggaataattgtatacctggatgtacctctactagatctaatttgtcgtctaaaattaatgaagacagataggattgtaggtcagaattctggaacatcta

SEQ ID NO: 673632 - DNA, 120 bp, Artificial Sequence
  ENSG00000185875_7 (sequence is synthesized)
tgaaagacttacttaaatttagaagacagtattataagaagtggtatgatgctcgtgttttctgtgaaagtggggcttccccagaggaggtagctgacaaagtgctgaatgcaattaaaa

SEQ ID NO: 673633 - DNA, 120 bp, Artificial Sequence
  ENSG00000185875_8 (sequence is synthesized)
gataccaagatgtggactcggaaacattcatttcaacaagacacgtttggcctgaagactgtgaacagaaggtttcagcaaaattctttagtgaagctgtaattgaggggttggcttctg

SEQ ID NO: 673634 - DNA, 120 bp, Artificial Sequence
  ENSG00000185875_9 (sequence is synthesized)
atggtggcctctttgttcctgcaaaggagtttccaaaattaagctgcggggagtggaaaagcctagtaggagcaacctacgtagaaagagcacagatactgttggaaagatgtatccatc

SEQ ID NO: 673635 - DNA, 120 bp, Artificial Sequence
  ENSG00000185875_10 (sequence is synthesized)
ctgcagacatacctgctgccaggttgggagaaatgattgaaactgcttatggggaaaactttgcctgctcaaaaattgctcctgtcaggcacctttcaggcaaccagttcatcctggagt

SEQ ID NO: 673636 - DNA, 120 bp, Artificial Sequence
  ENSG00000185875_11 (sequence is synthesized)
tgtttcatggaccaacaggatcatttaaagatttgtctttacagcttatgcctcatatttttgcacactgtatcccaccaagttgcaattatatgatacttgtagctacttcaggagaca

SEQ ID NO: 673637 - DNA, 120 bp, Artificial Sequence
  ENSG00000185875_12 (sequence is synthesized)
cagggagtgcagtcttaaatggttttagtcgtctaaataagaatgataagcaaaggatagctgtggttgcattttttcctgagaatggagtaagtgattttcaaaaagcacaaataattg

SEQ ID NO: 673638 - DNA, 120 bp, Artificial Sequence
  ENSG00000185875_13 (sequence is synthesized)
gcagtcagagagaaaatggatgggcagtgggtgttgagtcagattttgatttttgccagacagctataaaaagaatttttaatgattctgattttactggctttcttactgtggaatatg

SEQ ID NO: 673639 - DNA, 120 bp, Artificial Sequence
  ENSG00000185875_14 (sequence is synthesized)
gaacaatcttaagttcggctaactccataaactggggccgactacttccgcaggtagtttatcatgcttccgcatatcttgatcttgttagtcaaggatttatttcttttggaagcccag

SEQ ID NO: 673640 - DNA, 120 bp, Artificial Sequence
  ENSG00000185875_15 (sequence is synthesized)
acaggaaactttggtaacattttagcagcagtgtatgccaaaatgatgggaatcccgattcgaaaatttatctgtgcctctaatcagaaccatgttttgactgattttataaaaacagga

SEQ ID NO: 673641 - DNA, 120 bp, Artificial Sequence
  ENSG00000185875_16 (sequence is synthesized)
cattatgatctaagggaaagaaaactagcacaaaccttttcaccgtcaatagatattctcaaatcttcaaacctagaacgacatttacacttgatggctaataaagatggacagctaatg

SEQ ID NO: 673642 - DNA, 120 bp, Artificial Sequence
  ENSG00000185875_17 (sequence is synthesized)
acagaattatttaatcgattagaaagtcagcatcatttccagatagaaaaggctctagttgagaaacttcagcaggattttgtagctgactggtgctctgagggagagtgcctagcagct

SEQ ID NO: 673643 - DNA, 120 bp, Artificial Sequence
  ENSG00000185875_18 (sequence is synthesized)
attaactccacctataatacttcagggtatattttggatccacacactgctgttgcaaaagtggttgcagatagggtgcaagacaaaacttgccctgtgattatctcatctacagcccat

SEQ ID NO: 673644 - DNA, 120 bp, Artificial Sequence
  ENSG00000185875_19 (sequence is synthesized)
tactcaaagtttgcacctgctatcatgcaggctttaaagattaaagaaatcaatgagacttcatcaagtcagctctatttgctgggttcatacaatgcattacctccactgcatgaggct

SEQ ID NO: 673645 - DNA, 120 bp, Artificial Sequence
  ENSG00000185875_20 (sequence is synthesized)
ttattagagagaacaaaacagcaagagaagatggagtaccaggtctgtgcagctgatatgaatgtcttgaagagtcatgtggaacaacttgtccaaaatcaattcatatgaaagctttca

SEQ ID NO: 673646 - DNA, 120 bp, Artificial Sequence
  ENSG00000185875_21 (sequence is synthesized)
gagtaaatttttttttctagctataagcatgcaataataaatctcaaacactgatttggagtacagtagcattttgtcttttatgtaaatatctctatatctgtttggaatttcaaaagt

SEQ ID NO: 673647 - DNA, 120 bp, Artificial Sequence
  ENSG00000185875_22 (sequence is synthesized)
ctgatctctagggctgacatgagaactccatgtcacctcctcagatctttaatctggaagtgacaaaaggtaacacagtgcacggacctttgagctatcatacttttgccttctgctcat

SEQ ID NO: 673648 - DNA, 120 bp, Artificial Sequence
  ENSG00000185875_23 (sequence is synthesized)
gaggggtgtatcaatttccactcccacaccctcactgttatgtggaccaaaatgtctggtatactatttggcgattaaaatatttaagcccagttttcaggtactacatctgtaactagt

SEQ ID NO: 673649 - DNA, 120 bp, Artificial Sequence
  ENSG00000185875_24 (sequence is synthesized)
gaatactctgttgattagaaagttaatttaccactcaaaatggctaacttgaatggaggaagtagtaaactcttctattaggatttgggccagtgttttttgtttgttttttggtgcagt

SEQ ID NO: 673650 - DNA, 69 bp, Artificial Sequence
  ENSG00000185875_25 (sequence is synthesized)
acatggctaatttttttatttttaatagagatgaggtttcgccatgttttccaggctgatcttgaacct

SEQ ID NO: 673651 - DNA, 79 bp, Artificial Sequence
  ENSG00000185875_26 (sequence is synthesized)
tgcaacaccacacatggctaatttttttatttttaatagagatgaggtttcgccatgttttccaggctgatcttgaacc

SEQ ID NO: 673652 - DNA, 120 bp, Artificial Sequence
  ENSG00000185875_27 (sequence is synthesized)
agtgtttttaaccctcctcaaattccattttggactacaactaatgtgtatctcacactgtccaaattaaagatgtactctgtccttcactctcctttggatgtgtacggttagggtgac

SEQ ID NO: 673653 - DNA, 120 bp, Artificial Sequence
  ENSG00000185875_28 (sequence is synthesized)
gatgtttgaaaatcaacacataactgaaatccaggatgaaacagtaagcagaactacttagaagtgaatacagaaatgatctatttcaagaggaaggttttccaaaattaagagtacttg

SEQ ID NO: 673654 - DNA, 120 bp, Artificial Sequence
  ENSG00000185875_29 (sequence is synthesized)
agtagtctcaataggagtgtatttgtagacagcagtttccctatattatttggagtcaattcttacgtaatttgttgtttatttcttcagtgaacattgtctttttctggcagctgaaac

SEQ ID NO: 673655 - DNA, 120 bp, Artificial Sequence
  ENSG00000185875_30 (sequence is synthesized)
tgcacacaactgatacacatatttaatttgtattcctttgtagtaatacattttaaccatgatttatgtttgtgaatttactggatgttttctttctgaattaaagattgtcaagaccaa

SEQ ID NO: 673656 - DNA, 120 bp, Artificial Sequence
  ENSG00000185875_31 (sequence is synthesized)
actgcgcgggggcgggaccggggagctagctgcaggtacggtgctccgtctcctgtggaggctttagcggctcgtggacactgctcccccatttcctttcatttcccccgtcttctcagt

SEQ ID NO: 673657 - DNA, 120 bp, Artificial Sequence
  ENSG00000185880_0 (sequence is synthesized)
agacctcactctggccttgctgcttctctccagctcctgaacttttctttcttccatcatgctctgagcccattccttgaaaactaaaaggtccctgactcccagtctgcagccatcctg

SEQ ID NO: 673658 - DNA, 120 bp, Artificial Sequence
  ENSG00000185880_1 (sequence is synthesized)
ggcctgctgagctctgattcaagtgcctgcctctgccccttggtgggctgaagcttcatggaggtatccaccaacccctcctccaacatcgatccaggcgactatgttgaaatgaatgat

SEQ ID NO: 673659 - DNA, 120 bp, Artificial Sequence
  ENSG00000185880_2 (sequence is synthesized)
tcaatcacccacctaccctctaaagtggtgatacaagatattactatggagctacactgccctctgtgcaatgattggttccgagacccactgatgctaagctgtggccacaacttctgt

SEQ ID NO: 673660 - DNA, 120 bp, Artificial Sequence
  ENSG00000185880_3 (sequence is synthesized)
gaagcctgtatccaagacttttggaggctgcaagcaaaggaaacattctgtcctgagtgtaagatgctatgtcagtataacaactgtacattcaaccctgtactggacaagttggtagag

SEQ ID NO: 673661 - DNA, 120 bp, Artificial Sequence
  ENSG00000185880_4 (sequence is synthesized)
aagattaagaagttacccttactcaagggccatccacagtgcccagagcatggagagaacctgaaactgttcagtaaaccagatgggaaactgatctgctttcaatgcaaggatgctcgg

SEQ ID NO: 673662 - DNA, 120 bp, Artificial Sequence
  ENSG00000185880_5 (sequence is synthesized)
ttgtctgtggggcagtctaaggagttcctgcaaatctctgatgctgtccatttcttcacggaggagcttgccatccaacagggtcaactggagacaactctgaaggagcttcagaccctg

SEQ ID NO: 673663 - DNA, 120 bp, Artificial Sequence
  ENSG00000185880_6 (sequence is synthesized)
aggaacatgcagaaggaagctattgctgctcacaaggaaaacaagctacatctgcagcaacatgtgtccatggagtttctaaagctgcatcagttcctgcacagcaaagaaaaggacatt

SEQ ID NO: 673664 - DNA, 120 bp, Artificial Sequence
  ENSG00000185880_7 (sequence is synthesized)
tgagccagcttcaggagcaatgtctcttagccaaggatatgttggtgagcattcaggcaaagacggaacaacagaactccttcgactttctcaaagacatcacaactctcttacatagct

SEQ ID NO: 673665 - DNA, 120 bp, Artificial Sequence
  ENSG00000185880_8 (sequence is synthesized)
tggagcaaggaatgaaggtgctggcaaccagagagcttatttccagaaagctgaacctgggccagtacaaaggtcctatccagtacatggtatggagggaaatgcaggacactctctgcc

SEQ ID NO: 673666 - DNA, 120 bp, Artificial Sequence
  ENSG00000185880_9 (sequence is synthesized)
caggcctgtctccactaactctggaccctaaaacagctcacccaaatctggtgctctccaaaagccaaaccagcgtctggcatggtgacattaagaagataatgcctgatgatcctgaga

SEQ ID NO: 673667 - DNA, 120 bp, Artificial Sequence
  ENSG00000185880_10 (sequence is synthesized)
ggtttgactcaagtgtggctgtactgggctcaagaggcttcacctctggaaagtggtactgggaagtagaagtagcaaagaagacaaaatggacagttggagttgtcagagaatccatca

SEQ ID NO: 673668 - DNA, 120 bp, Artificial Sequence
  ENSG00000185880_11 (sequence is synthesized)
ttcggaagggcagctgtcctctaactcctgagcaaggattctggcttttaagactaaggaaccaaactgatctaaaggctctggatttgccttctttcagtctgacactgactaacaacc

SEQ ID NO: 673669 - DNA, 120 bp, Artificial Sequence
  ENSG00000185880_12 (sequence is synthesized)
tcgacaaggtgggcatatacctggattatgaaggaggacagttgtccttctacaatgctaaaaccatgactcacatttacaccttcagtaacactttcatggagaaactttatccctact

SEQ ID NO: 673670 - DNA, 120 bp, Artificial Sequence
  ENSG00000185880_13 (sequence is synthesized)
tctgcccctgccttaatgatggtggagagaataaagaaccattgcacatcttacatccacagtaatgagtcataatattatacaaattcagagtgttattaaagaggtattgaaatattt

SEQ ID NO: 673671 - DNA, 120 bp, Artificial Sequence
  ENSG00000185880_14 (sequence is synthesized)
agtgttttagcctatccagttccgggagtttgcacgcagacgctctgcttcgtgaccttggctctgctctgtgggcgccgcccccagcctgggcgcgtccatcgtcgagtaccttctcct

SEQ ID NO: 673672 - DNA, 120 bp, Artificial Sequence
  ENSG00000185880_15 (sequence is synthesized)
ctgcctccccctccctctgcttctatctctctccaattgccctccctggcctgcggccgcccggtcctccttcccagcccagtgcagccaggcacccgggttcggcttgctcaggtctct

SEQ ID NO: 673673 - DNA, 120 bp, Artificial Sequence
  ENSG00000185880_16 (sequence is synthesized)
gtccgggactgggaagccacggagggccgggaaagtggcacactcctggagctcaagcttcctactctctcatcgctgaataactaccgggcaggactgggtggaacagacagcatattt

SEQ ID NO: 673674 - DNA, 120 bp, Artificial Sequence
  ENSG00000185880_17 (sequence is synthesized)
aggtcattgatgggctgctgggtggatggagctggaaagtgatgggcactgctttctggggctgcccaggttccttccgagggctcgcttttcctgggcagagcgggaaagaggaggggc

SEQ ID NO: 673675 - DNA, 120 bp, Artificial Sequence
  ENSG00000185880_18 (sequence is synthesized)
aggccggtcgcgaaacgcaaatagtcgagaatagcgatccggggagaagcaggtgtctgtggggcccaagagaagtaccatctcgagcatccttagtccagaaatggggagctatgaacc

SEQ ID NO: 673676 - DNA, 120 bp, Artificial Sequence
  ENSG00000185880_19 (sequence is synthesized)
ttaagattagaccactaactcgaatctaaatgagctgcccttgtctcctacaaaagaaaagttgggcaggtagggtattctaatgagggtttctctttctcttaagcaaatgatgatcaa

SEQ ID NO: 673677 - DNA, 120 bp, Artificial Sequence
  ENSG00000185880_20 (sequence is synthesized)
ctgttttctcctttttgttgttattatcaccaattatctctttatacattgcatatccattaacacacataactattgttttgtgcatttgtcttttatattgaataggggaaaaagagg

SEQ ID NO: 673678 - DNA, 120 bp, Artificial Sequence
  ENSG00000185880_21 (sequence is synthesized)
agttagaaaccaaaaactgcaatattggactttacctatgtagctactttttcactggtctctacttctttatatggcttggagatacttcctagtttcctttcatttcaacatgtagga

SEQ ID NO: 673679 - DNA, 120 bp, Artificial Sequence
  ENSG00000185880_22 (sequence is synthesized)
ctccttttagcatttcttctagagcagatctactagcattttttgtagattaagactactagacaactccttcagtttttgtttatctgggaatgtcttaattcctcttttcatgaatat

SEQ ID NO: 673680 - DNA, 120 bp, Artificial Sequence
  ENSG00000185880_23 (sequence is synthesized)
attcctcttttcatgaatatataattctttatttttaaaaaattttaattaaaaaaaagtagaaacagggtcttgccatgttgttcctgggctcaaatgatctgcccaccttggcctccc

SEQ ID NO: 673681 - DNA, 120 bp, Artificial Sequence
  ENSG00000185880_24 (sequence is synthesized)
gtgagctactgtgcctggctggatacagaactcttagttaacagtttttttctttcggcagttcagatatgtcatctctctccttcttggctttcatattttctgaaaagaaatcagcta

SEQ ID NO: 673682 - DNA, 120 bp, Artificial Sequence
  ENSG00000185880_25 (sequence is synthesized)
gtaatcttactgagaatcccttgtatgtgaagagtcatttctctcttgctgctttcaagattccttccttgtcattggacacttcaattataatgtgtctcattgtggatctctttgaat

SEQ ID NO: 673683 - DNA, 120 bp, Artificial Sequence
  ENSG00000185880_26 (sequence is synthesized)
atctctttgaatttatcctgcttggagtttgttgagcttcttggatgtaaaatttcatcatattttggaagttttcagccattactttttcaaaaatttttttttttgagacagagtttc

SEQ ID NO: 673684 - DNA, 120 bp, Artificial Sequence
  ENSG00000185880_27 (sequence is synthesized)
caagctggggtgcagtggagtgatctcagcttactataacctccacctcccaggtcaagcaattctcctgtctcaacctcccaagtagcagggattaccagtgcctgccgccatgaccag

SEQ ID NO: 673685 - DNA, 67 bp, Artificial Sequence
  ENSG00000185880_28 (sequence is synthesized)
accccaaagtattgggattacaggcttgagccgcagtgcccggctgcttcaaacattctttctgcat

SEQ ID NO: 673686 - DNA, 120 bp, Artificial Sequence
  ENSG00000185880_29 (sequence is synthesized)
gagccgcagtgcccggctgcttcaaacattctttctgcatttttctcctttctttctgaaattcttattatgtctgtttgatagtgtcttgtggatctcttaggctcagttcattgttgg

SEQ ID NO: 673687 - DNA, 90 bp, Artificial Sequence
  ENSG00000185880_30 (sequence is synthesized)
atagtgtcttgtggatctcttaggctcagttcattgttggtcattcctttttttttttttttttctgagatggagtgtcattggtcttgg

SEQ ID NO: 673688 - DNA, 74 bp, Artificial Sequence
  ENSG00000185880_31 (sequence is synthesized)
atgtgtttttttaaaaaggagtgaaggggaccctggatggttgacgatatcacactactgactaaggaatctga

SEQ ID NO: 673689 - DNA, 120 bp, Artificial Sequence
  ENSG00000185880_32 (sequence is synthesized)
ggatggttgacgatatcacactactgactaaggaatctgattgattttccaattctttgtatataatttctagaaaacaaaaataaaataaaggtaataactagtagagcagaagttgaa

SEQ ID NO: 673690 - DNA, 120 bp, Artificial Sequence
  ENSG00000185880_33 (sequence is synthesized)
aaataaaactttcaaaagacacttggggaaagtgggtaaagagagagatgtacaacaaagtacatttctttgatttagtactgtttcttcctctgccttgattctttattaaagtttaaa

SEQ ID NO: 673691 - DNA, 120 bp, Artificial Sequence
  ENSG00000185880_34 (sequence is synthesized)
tagcatcatacgctataatttcagaaaacactcaagttactggttcactttcaaaggagagattatgtgcttttactttagttgtaccaattttcagctcctttaggaatggcgccatca

SEQ ID NO: 673692 - DNA, 120 bp, Artificial Sequence
  ENSG00000185880_35 (sequence is synthesized)
ggaacatgcagaaggaagctattgctgctcacaaggtgaggagcaagaaagaggggttatgagatagaactggaacacaccctccatgtaacttcagctatgggtacaaaggtgcctaac

SEQ ID NO: 673693 - DNA, 120 bp, Artificial Sequence
  ENSG00000185880_36 (sequence is synthesized)
atatattatctacacactaaatggtacctaggctatggaattggaaaactgagtctgtagggtggaaaggaatatggtggtggagtaggttcctaatagctgatcaacagagcagattaa

SEQ ID NO: 673694 - DNA, 120 bp, Artificial Sequence
  ENSG00000185880_37 (sequence is synthesized)
tcgtggcgttgaaatgtgtctggtctttggctttatctatggcaaaaaaaaaaaaggaacttattagaaaaaaatcaatcactaaagattgctatgtccaaagaaatacctttatttcct

SEQ ID NO: 673695 - DNA, 120 bp, Artificial Sequence
  ENSG00000185880_38 (sequence is synthesized)
ttgagtttataaccagacacctctggactaggtctctaaggtcataggcttttcccagctgatttgatcttcttagcttcctccaagctaaataaagctattgtctgcactttcaacttc

SEQ ID NO: 673696 - DNA, 120 bp, Artificial Sequence
  ENSG00000185880_39 (sequence is synthesized)
ataggcactctaggacaacattaatggctagagctttggcaaatcagtccctagattgggggtgctaaattggaagttctgtttctttattcattattctatggagaagagccttctcag

SEQ ID NO: 673697 - DNA, 120 bp, Artificial Sequence
  ENSG00000185880_40 (sequence is synthesized)
gtatttggcatctggaagaaaaaaatatgcagactcagggaaagaagaaggatatatggaagtaatgatgtcttcagaaaatcttgttccttttgtaaaagttcctattagtgtgagcat

SEQ ID NO: 673698 - DNA, 120 bp, Artificial Sequence
  ENSG00000185880_41 (sequence is synthesized)
tcattcattcatttaacaaatatttattgagtgggtcaggcataatactagatattggggatgggagacagctgttaattaaataatcccatgagtaataataaaataacaactgtgata

SEQ ID NO: 673699 - DNA, 120 bp, Artificial Sequence
  ENSG00000185880_42 (sequence is synthesized)
agtactataactgaaagtatagggtatgatgatagcatataaatggagaacataatctagactgggggaggggtgttctctgaagaagtcacattaaaaattgagaattgaaggataagt

SEQ ID NO: 673700 - DNA, 120 bp, Artificial Sequence
  ENSG00000185880_43 (sequence is synthesized)
aacttatccaagtgaactgggtgagtggggatatgaaggaggtagcctggagaagaatgttctaggaatagaaaagagtatctggaaaagtcctgagatggaaagttagctgctatgtta

SEQ ID NO: 673701 - DNA, 120 bp, Artificial Sequence
  ENSG00000185880_44 (sequence is synthesized)
aacagagaaaaggccaataaagctggaacatgctaagcaagatgatattgatgaggtggatatgggctcactgtaacctcatactcttgggctcaagagatcttcccacctcagcctcct

SEQ ID NO: 673702 - DNA, 120 bp, Artificial Sequence
  ENSG00000185880_45 (sequence is synthesized)
gagtatctgggactagtttgccacacatggctaattattttatttttggagagactgggtctcactatgttgcccagtcttgaactcctgttccaagcaatcctcccagcttggcctcta

SEQ ID NO: 673703 - DNA, 120 bp, Artificial Sequence
  ENSG00000185880_46 (sequence is synthesized)
aggtatgagccactgtgcccagccaagactatcttaaggtgcaataataattatggaccatgggatccaagctagataagagaggacatgaaggtagaagttcctgaatagaaatggagg

SEQ ID NO: 673704 - DNA, 120 bp, Artificial Sequence
  ENSG00000185880_47 (sequence is synthesized)
tgaatagaaatggagggatcggtgaataggaggtttcaatgagatccaataattgttgcaataggagtatctgagtgagcctggtgcataaaaagttattttggagatgatacaattgct

SEQ ID NO: 673705 - DNA, 120 bp, Artificial Sequence
  ENSG00000185880_48 (sequence is synthesized)
gggggtgataaaatcctaggtgagactataggaatgaatcaataaatgtggaaatcactagaaatgaggagaatgaggaactgagaagccaggatgtcaaatagtttaactgtgaggatg

SEQ ID NO: 673706 - DNA, 120 bp, Artificial Sequence
  ENSG00000185880_49 (sequence is synthesized)
ttgaggtaacccaaggaaaaagctgcaagtgtaacagtggcattcccccagttctgatttctaggtaaggacagttcttccagcctcccaatacccccagtctaacagtaccacttggca

SEQ ID NO: 673707 - DNA, 120 bp, Artificial Sequence
  ENSG00000185880_50 (sequence is synthesized)
gcttttggattaccaatctaggagggtattatctttcattctagaatgtttgactaactccacagtcttatttaatatggcattggttaccatctcagtactgcaataggaaactggagg

SEQ ID NO: 673708 - DNA, 120 bp, Artificial Sequence
  ENSG00000185880_51 (sequence is synthesized)
tcacttttgcctatttcatcctgaactattaaattagttggaaaaggagtaagtctcccaaaggactcattttagtatgactgaatttgatattcagtagccatttgtatgcatttttct

SEQ ID NO: 673709 - DNA, 120 bp, Artificial Sequence
  ENSG00000185880_52 (sequence is synthesized)
gtgatggtatttaccaagtgtgtgagtgttggtggtgtgggcccccatccccaagcactagtctctgcaataaccatggtgataatcatggaggtttccaggaaaacaagctacatctgc

SEQ ID NO: 673710 - DNA, 120 bp, Artificial Sequence
  ENSG00000185880_53 (sequence is synthesized)
tatgtggggaaatctgacctctaaattcttataagtcagagagtgactgaacaacagcagtgagacatcgaagagttttaatatctgctgtaaaccttggcacagatcatttacttctct

SEQ ID NO: 673711 - DNA, 120 bp, Artificial Sequence
  ENSG00000185880_54 (sequence is synthesized)
aagactgaatccaaaaagcacaatggaatactataataagctgagacagcatggtgaattccagacaagcctgagcattccctatagccagagaaggaggcccaacacctaacatagcct

SEQ ID NO: 673712 - DNA, 120 bp, Artificial Sequence
  ENSG00000185880_55 (sequence is synthesized)
tgaatctctagcacctgtagtgattgacctaactcaccgtgactctgtagtgattattgaacaaaggaggaggccaagagcaaacacaaggccactccaagaccacactggcagttgtgt

SEQ ID NO: 673713 - DNA, 120 bp, Artificial Sequence
  ENSG00000185880_56 (sequence is synthesized)
ggtgaacaatgatgaggagggagtgaaaagggacagagatgtatgtataaccaacagtgcccaccataattccctgcaaaaaaattttttttgtcatatactacctggttatattcagtg

SEQ ID NO: 673714 - DNA, 120 bp, Artificial Sequence
  ENSG00000185880_57 (sequence is synthesized)
tcaagtttgcatggatggatgctcagagattgaacttagtatacaacacatctactctatagaatgtggccacatctgtagtcagtgcttctgcacttcctttacacatactaacactgc

SEQ ID NO: 673715 - DNA, 120 bp, Artificial Sequence
  ENSG00000185880_58 (sequence is synthesized)
ccagtttgtttgaaaaaaatcagcctccatcagtatcactgcagttatatatgatgtatgccttattgctcaagacagatcctgtggctggatttttccatgtctttgtgcaggaactat

SEQ ID NO: 673716 - DNA, 120 bp, Artificial Sequence
  ENSG00000185880_59 (sequence is synthesized)
gggttgttggcatccaatgctctgagcttaaaaatactgatttttaaaattgctatctgcagtatataagaaactctttgatttctcatatgctctgagactgctttttgtttcctttgg

SEQ ID NO: 673717 - DNA, 120 bp, Artificial Sequence
  ENSG00000185880_60 (sequence is synthesized)
tccctttcttatagtcatcaatttttagttggccacatgtggacattctggaccacataaataaagacaacaccctagagatggtgaagtaagttgtaaactaaaatcctaagcccccta

SEQ ID NO: 673718 - DNA, 120 bp, Artificial Sequence
  ENSG00000185880_61 (sequence is synthesized)
attgactgaatggaacccctcttgaccaaagtgaccccagaaaaaccttaaaactgagttcctggccatgacgggatgggaggtcagacacgcttcattatatctccgtctcttttatgg

SEQ ID NO: 673719 - DNA, 120 bp, Artificial Sequence
  ENSG00000185880_62 (sequence is synthesized)
tttagacacaacaactgaccagcattaatgtcaaaataaagatcataaggctgacagaatagaccctttgtggcaataacaaattattcgtaagatctaaggtcatgccaggcaagtgtt

SEQ ID NO: 673720 - DNA, 120 bp, Artificial Sequence
  ENSG00000185880_63 (sequence is synthesized)
aaattattcgtaagatctaaggtcatgccaggcaagtgttatgtcatgcactcctacacttaaagaataaactatgttctaactgccacaagattttctatttatttatttatttattta

SEQ ID NO: 673721 - DNA, 76 bp, Artificial Sequence
  ENSG00000185880_64 (sequence is synthesized)
ttttttgagacggagttctgccctgtcagtttttctttttgtttagcagctaaacaagcaccagctgagataagca

SEQ ID NO: 673722 - DNA, 73 bp, Artificial Sequence
  ENSG00000185880_65 (sequence is synthesized)
ttcaccgtgttagccatgatggtctccatctcctgaccttgtgacctgcctgcctcggccttctcttgataag

SEQ ID NO: 673723 - DNA, 120 bp, Artificial Sequence
  ENSG00000185880_66 (sequence is synthesized)
ccactgactatgggctggttctggccagtttatagaggctaagcacccttgttccttcctgtcctgaacaggcattttgacttatagggtctaattgttatgcatttaagtgttaagtct

SEQ ID NO: 673724 - DNA, 120 bp, Artificial Sequence
  ENSG00000185880_67 (sequence is synthesized)
gcactccagtctgggtgacagagtaagactccgtcgcgaaaaacaaaaaacaaacaataacaacaacaaaaagagttaagtctccacctcaaagtgaacatgggttgtatgttacatgca

SEQ ID NO: 673725 - DNA, 120 bp, Artificial Sequence
  ENSG00000185880_68 (sequence is synthesized)
atgttacatgcatgtttgttcaataagcatgagtcaggatgaccttcataattattcatagctcctcctgtaacctgttgaatatgtatgtttagccaacctattcagcatcaagttcct

SEQ ID NO: 673726 - DNA, 120 bp, Artificial Sequence
  ENSG00000185880_69 (sequence is synthesized)
acccctgctcctcctttgaagtgcctgtctctggtctttgccagagattgtacttcctggcctgtgggatggccaccttgcaggcctttaacgctttataagaaataaagtctcctctcc

SEQ ID NO: 673727 - DNA, 120 bp, Artificial Sequence
  ENSG00000185883_0 (sequence is synthesized)
gttctgcggtgctggtatttagagcgcagcggctgacgggccggatcgccttcgccgccgcccgcccgcaaaccttcgtgcccggcccgtcctcgcccccgcctccgccaccgcctcggc

SEQ ID NO: 673728 - DNA, 120 bp, Artificial Sequence
  ENSG00000185883_1 (sequence is synthesized)
ccgcagagcttgccccctccccacccgcagacatgtccgagtccaagagcggccccgagtatgcttcgtttttcgccgtcatgggcgcctcggccgccatggtcttcagcgccctgggcg

SEQ ID NO: 673729 - DNA, 120 bp, Artificial Sequence
  ENSG00000185883_2 (sequence is synthesized)
ctgcctatggcacagccaagagcggtaccggcattgcggccatgtctgtcatgcggccggagcagatcatgaagtccatcatcccagtggtcatggctggcatcatcgccatctacggcc

SEQ ID NO: 673730 - DNA, 120 bp, Artificial Sequence
  ENSG00000185883_3 (sequence is synthesized)
tggtggtggcagtcctcatcgccaactccctgaatgacgacatcagcctctacaagagcttcctccagctgggcgccggcctgagcgtgggcctgagcggcctggcagccggctttgcca

SEQ ID NO: 673731 - DNA, 120 bp, Artificial Sequence
  ENSG00000185883_4 (sequence is synthesized)
ggacgctggcgtgcggggcaccgcccagcagccccgactattcgtgggcatgatcctgattctcatcttcgccgaggtgctcggcctctacggtctcatcgtcgccctcatcctctccac

SEQ ID NO: 673732 - DNA, 120 bp, Artificial Sequence
  ENSG00000185883_5 (sequence is synthesized)
aaagtagaccctctccgagcccaccagccacagaatattatgtaaagaccacccctcctcattccagaacgaacagcctgacacatacgcacggggccgccgcccccagtagttggtctt

SEQ ID NO: 673733 - DNA, 120 bp, Artificial Sequence
  ENSG00000185883_6 (sequence is synthesized)
gtacatgcgcagtgtcctagtgcccatcgtctgtttccccggccttgcccccgcccgccccgtgccgtggacatctgggcccactcatcgcccctccaggcccccggcgccccaccccct

SEQ ID NO: 673734 - DNA, 120 bp, Artificial Sequence
  ENSG00000185883_7 (sequence is synthesized)
agagtgctctgtgtatgcggatgatttagaattgtcatttctctttactggatgtttatttataaagatctggcctgttcctgcgtctgcggagcggcccttgtctcccagctatctata

SEQ ID NO: 673735 - DNA, 120 bp, Artificial Sequence
  ENSG00000185883_8 (sequence is synthesized)
accttagctagagtgtcgccttgtgggttcctgttgctgagacttcctggatggagccgccctcaccgccgggcccgtggccctgcgcggagctgtgtccaataaagttcttggatgtga

SEQ ID NO: 673736 - DNA, 120 bp, Artificial Sequence
  ENSG00000185883_9 (sequence is synthesized)
cacgtagaggaaggaggagtggctgtcctggcctccttttgcttgcccgtggctgttcctcctgggtcctcttgccctgggctggatgccttcttcggctccccctctgcatgtgataac

SEQ ID NO: 673737 - DNA, 120 bp, Artificial Sequence
  ENSG00000185885_0 (sequence is synthesized)
cgttcctgggcctggagggctgctttggggcaggaaactttggccaccaggcctctgacctgcaccaggagacactgggaggtttagtccccaaacccgcacagagcaggactgcagcct

SEQ ID NO: 673738 - DNA, 120 bp, Artificial Sequence
  ENSG00000185885_1 (sequence is synthesized)
gaggaaagagcaaggatttcaggagagaggcctgcgacaagtgagcaggaaatagaaacttaagagaaatacacacttctgagaaactgaaacgacaggggaaaggaggtctcactgagc

SEQ ID NO: 673739 - DNA, 120 bp, Artificial Sequence
  ENSG00000185885_2 (sequence is synthesized)
accgtcccagcatccggacaccacagcggcccttcgctccacgcagaaaaccacacttctcaaaccttcactcaacacttccttccccaaagccagaagatgcacaaggaggaacatgag

SEQ ID NO: 673740 - DNA, 120 bp, Artificial Sequence
  ENSG00000185885_3 (sequence is synthesized)
ctgtgctggggccaccccccagcaccatccttccaaggtccaccgtgatcaacatccacagcgagacctccgtgcccgaccatgtcgtctggtccctgttcaacaccctcttcttgaact

SEQ ID NO: 673741 - DNA, 120 bp, Artificial Sequence
  ENSG00000185885_4 (sequence is synthesized)
ggtgctgtctgggcttcatagcattcgcctactccgtgaagtctagggacaggaagatggttggcgacgtgaccggggcccaggcctatgcctccaccgccaagtgcctgaacatctggg

SEQ ID NO: 673742 - DNA, 120 bp, Artificial Sequence
  ENSG00000185885_5 (sequence is synthesized)
ccctgattctgggcatcctcatgaccattggattcatcctgttactggtattcggctctgtgacagtctaccatattatgttacagataatacaggaaaaacggggttactagtagccgc

SEQ ID NO: 673743 - DNA, 120 bp, Artificial Sequence
  ENSG00000185885_6 (sequence is synthesized)
ccatagcctgcaacctttgcactccactgtgcaatgctggccctgcacgctggggctgttgcccctgcccccttggtcctgcccctagatacagcagtttatacccacacacctgtctac

SEQ ID NO: 673744 - DNA, 120 bp, Artificial Sequence
  ENSG00000185888_0 (sequence is synthesized)
gctgggggcgctgcctcgagcctcatggctgcccctgcttccgtcatgggcccactcgggccctctgccctgggccttctgctgctgctcctggtggtggcccctccccgggtcgcagca

SEQ ID NO: 673745 - DNA, 120 bp, Artificial Sequence
  ENSG00000185888_1 (sequence is synthesized)
ttggtccacagacagccagagaaccagggaatctccctaactggcagcgtggcctgtggtcggcccagcatggaggggaaaatcctgggcggcgtccctgcgcccgagaggaagtggccg

SEQ ID NO: 673746 - DNA, 120 bp, Artificial Sequence
  ENSG00000185888_2 (sequence is synthesized)
tggcaggtcagcgtgcactacgcaggcctccacgtctgcggcggctccatcctcaatgagtactgggtgctgtcagctgcgcactgctttcacagggacaagaatatcaaaatctatgac

SEQ ID NO: 673747 - DNA, 120 bp, Artificial Sequence
  ENSG00000185888_3 (sequence is synthesized)
atgtacgtaggcctcgtaaacctcagggtggccggcaaccacacccagtggtatgaggtgaacagggtgatcctgcaccccacatatgagatgtaccaccccatcggaggtgacgtggcc

SEQ ID NO: 673748 - DNA, 120 bp, Artificial Sequence
  ENSG00000185888_4 (sequence is synthesized)
ctggtgcagctgaagacccgcattgtgttttctgagtccgtgctcccggtttgccttgcaactccagaagtgaaccttaccagtgccaattgctgggctacgggatggggactagtctca

SEQ ID NO: 673749 - DNA, 120 bp, Artificial Sequence
  ENSG00000185888_5 (sequence is synthesized)
acctgctctacggacacatgtcctacatcatgcccgacatgctgtgtgctggggacatcctgaatgctaagaccgtgtgtgagggcgactccgggggcccacttgtctgtgaattcaacc

SEQ ID NO: 673750 - DNA, 120 bp, Artificial Sequence
  ENSG00000185888_6 (sequence is synthesized)
gcagctggttgcagattggaattgtgagctggggccgaggctgctccaaccctctgtaccctggagtgtatgccagtgtttcctatttctcaaaatggatatgtgataacatagaaatca

SEQ ID NO: 673751 - DNA, 120 bp, Artificial Sequence
  ENSG00000185888_7 (sequence is synthesized)
cgcccactcctgctcagccagcccctgctctctctccagctctggggcccactctcagcgtcctaatggccatgctggctggctggtcagtgctgtgaggtcaggatacccactctagga

SEQ ID NO: 673752 - DNA, 120 bp, Artificial Sequence
  ENSG00000185888_8 (sequence is synthesized)
ttctcatggctgcacaccctgccccagcccagctgcctccagacccctaagcatctcctgtcctggcctctctgaagcagacaagggccacctatcccgggggtggatgctgagtccagg

SEQ ID NO: 673753 - DNA, 120 bp, Artificial Sequence
  ENSG00000185888_9 (sequence is synthesized)
aggtgatgagcaagtgtacaaaagaaaaaagggaagggggagaggggctggtcagggagaacccagcttgggcagagtgcacctgagatttgataagatcattaaatatttacaaagcaa

SEQ ID NO: 673754 - DNA, 120 bp, Artificial Sequence; identical to SEQ ID NO: 656361
  ENSG00000185894_0 (sequence is synthesized)

SEQ ID NO: 673755 - DNA, 120 bp, Artificial Sequence; identical to SEQ ID NO: 656362
  ENSG00000185894_1 (sequence is synthesized)

SEQ ID NO: 673756 - DNA, 120 bp, Artificial Sequence; identical to SEQ ID NO: 656363
  ENSG00000185894_2 (sequence is synthesized)

SEQ ID NO: 673757 - DNA, 120 bp, Artificial Sequence; identical to SEQ ID NO: 656364
  ENSG00000185894_3 (sequence is synthesized)

SEQ ID NO: 673758 - DNA, 120 bp, Artificial Sequence; identical to SEQ ID NO: 656365
  ENSG00000185894_4 (sequence is synthesized)

SEQ ID NO: 673759 - DNA, 120 bp, Artificial Sequence; identical to SEQ ID NO: 656366
  ENSG00000185894_5 (sequence is synthesized)

SEQ ID NO: 673760 - DNA, 120 bp, Artificial Sequence; identical to SEQ ID NO: 656367
  ENSG00000185894_6 (sequence is synthesized)

SEQ ID NO: 673761 - DNA, 120 bp, Artificial Sequence; identical to SEQ ID NO: 656368
  ENSG00000185894_7 (sequence is synthesized)

SEQ ID NO: 673762 - DNA, 120 bp, Artificial Sequence; identical to SEQ ID NO: 656369
  ENSG00000185894_8 (sequence is synthesized)

SEQ ID NO: 673763 - DNA, 120 bp, Artificial Sequence; identical to SEQ ID NO: 656370
  ENSG00000185894_9 (sequence is synthesized)

SEQ ID NO: 673764 - DNA, 120 bp, Artificial Sequence; identical to SEQ ID NO: 656371
  ENSG00000185894_10 (sequence is synthesized)

SEQ ID NO: 673765 - DNA, 120 bp, Artificial Sequence; identical to SEQ ID NO: 656372
  ENSG00000185894_11 (sequence is synthesized)

SEQ ID NO: 673766 - DNA, 120 bp, Artificial Sequence
  ENSG00000185896_0 (sequence is synthesized)
acgtgacaagcgctgccggccgcggtgtcttcttcgtgccggcgtcgcagtggccgggcctcttgcgtctggtaacgccgctgtctctaacgccagcccttggcgcccgcgccccgccac

SEQ ID NO: 673767 - DNA, 120 bp, Artificial Sequence
  ENSG00000185896_1 (sequence is synthesized)
gcccgcgcccccgctccccgcaccgtacccggccgcctcgcgccatggcggcccccggcagcgcccggcgacccctgctgctgctactgctgttgctgctgctcggcctcatgcattgtg

SEQ ID NO: 673768 - DNA, 120 bp, Artificial Sequence
  ENSG00000185896_2 (sequence is synthesized)
gctgttgctgctgctcggcctcatgcattgtgcgtcagcagcaatgtttatggtgaaaaatggcaacgggaccgcgtgcataatggccaacttctctgctgccttctcagtgaactacga

SEQ ID NO: 673769 - DNA, 120 bp, Artificial Sequence
  ENSG00000185896_3 (sequence is synthesized)
caccaagagtggccctaagaacatgacctttgacctgccatcagatgccacagtggtgctcaaccgcagctcctgtggaaaagagaacacttctgaccccagtctcgtgattgcttttgg

SEQ ID NO: 673770 - DNA, 120 bp, Artificial Sequence
  ENSG00000185896_4 (sequence is synthesized)
aagaggacatacactcactctcaatttcacgagaaatgcaacacgttacagcgtccagctcatgagttttgtttataacttgtcagacacacaccttttccccaatgcgagctccaaaga

SEQ ID NO: 673771 - DNA, 120 bp, Artificial Sequence
  ENSG00000185896_5 (sequence is synthesized)
aatcaagactgtggaatctataactgacatcagggcagatatagataaaaaatacagatgtgttagtggcacccaggtccacatgaacaacgtgaccgtaacgctccatgatgccaccat

SEQ ID NO: 673772 - DNA, 120 bp, Artificial Sequence
  ENSG00000185896_6 (sequence is synthesized)
ccaggcgtacctttccaacagcagcttcagccggggagagacacgctgtgaacaagacaggccttccccaaccacagcgccccctgcgccacccagcccctcgccctcacccgtgcccaa

SEQ ID NO: 673773 - DNA, 120 bp, Artificial Sequence
  ENSG00000185896_7 (sequence is synthesized)
gagcccctctgtggacaagtacaacgtgagcggcaccaacgggacctgcctgctggccagcatggggctgcagctgaacctcacctatgagaggaaggacaacacgacggtgacaaggct

SEQ ID NO: 673774 - DNA, 120 bp, Artificial Sequence
  ENSG00000185896_8 (sequence is synthesized)
tctcaacatcaaccccaacaagacctcggccagcgggagctgcggcgcccacctggtgactctggagctgcacagcgagggcaccaccgtcctgctcttccagttcgggatgaatgcaag

SEQ ID NO: 673775 - DNA, 120 bp, Artificial Sequence
  ENSG00000185896_9 (sequence is synthesized)
ttctagccggtttttcctacaaggaatccagttgaatacaattcttcctgacgccagagaccctgcctttaaagctgccaacggctccctgcgagcgctgcaggccacagtcggcaattc

SEQ ID NO: 673776 - DNA, 120 bp, Artificial Sequence
  ENSG00000185896_10 (sequence is synthesized)
ctacaagtgcaacgcggaggagcacgtccgtgtcacgaaggcgttttcagtcaatatattcaaagtgtgggtccaggctttcaaggtggaaggtggccagtttggctctgtggaggagtg

SEQ ID NO: 673777 - DNA, 120 bp, Artificial Sequence
  ENSG00000185896_11 (sequence is synthesized)
gtcctcatcgtcctcatcgcctacctcgtcggcaggaagaggagtcacgcaggctaccagactatctagcctggtgcacgcaggcacagcagctgcaggggcctctgttcctttctctgg

SEQ ID NO: 673778 - DNA, 120 bp, Artificial Sequence
  ENSG00000185896_12 (sequence is synthesized)
gcttagggtcctgtcgaaggggaggcacactttctggcaaacgtttctcaaatctgcttcatccaatgtgaagttcatcttgcagcatttactatgcacaacagagtaactatcgaaatg

SEQ ID NO: 673779 - DNA, 120 bp, Artificial Sequence
  ENSG00000185896_13 (sequence is synthesized)
acggtgttaattttgctaactgggttaaatattttgctaactggttaaacattaatatttaccaaagtaggattttgagggtgggggtgctctctctgagggggtgggggtgccgctgtc

SEQ ID NO: 673780 - DNA, 120 bp, Artificial Sequence
  ENSG00000185896_14 (sequence is synthesized)
tctgaggggtgggggtgccgctgtctctgaggggtgggggtgccgctctctctgagggggtgggggtgccgctttctctgagggggtgggggtgccgctctctctgagggggtgggggtg

SEQ ID NO: 673781 - DNA, 120 bp, Artificial Sequence
  ENSG00000185896_15 (sequence is synthesized)
ctgctctctccgaggggtggaatgccgctgtctctgaggggtgggggtgccgctctaaattggctccatatcatttgagtttagggttctggtgtttggtttcttcattctttactgcac

SEQ ID NO: 673782 - DNA, 120 bp, Artificial Sequence
  ENSG00000185896_16 (sequence is synthesized)
tcagatttaagccttacaaagggaaagcctctggccgtcacacgtaggacgcatgaaggtcactcgtggtgaggctgacatgctcacacattacaacagtagagagggaacatcctaaga

SEQ ID NO: 673783 - DNA, 120 bp, Artificial Sequence
  ENSG00000185896_17 (sequence is synthesized)
cagaggaactccagagatgagtgtctggagcgcttcagttcagctttaaaggccaggacgggccacacgtggctggcggcctcgttccagtggcggcacgtccttgggcgtctctaatgt

SEQ ID NO: 673784 - DNA, 120 bp, Artificial Sequence
  ENSG00000185896_18 (sequence is synthesized)
ctgcagctcaagggctggcacttttttaaatataaaaatgggtgttatttttatttttatttgtaaagtgatttttggtcttctgttgacattcggggtgatcctgttctgcgctgtgta

SEQ ID NO: 673785 - DNA, 120 bp, Artificial Sequence
  ENSG00000185896_19 (sequence is synthesized)
caatgtgagatcggtgcgttctcctgatgttttgccgtggcttggggattgtacacgggaccagctcacgtaatgcattgcctgtaacaatgtaataaaaagcctctttctttttggggt

SEQ ID NO: 673786 - DNA, 120 bp, Artificial Sequence
  ENSG00000185896_20 (sequence is synthesized)
gggccttgtccttctgtcagctaaaatgggagctcatgagagaaggacgtcagggaaacggggttgagggtggtctcggtgcagagagaagggtgtcagggaaacggggggtgagggtgg

SEQ ID NO: 673787 - DNA, 120 bp, Artificial Sequence
  ENSG00000185896_21 (sequence is synthesized)
tcttggtgccagacgtagggaatggtgttgggagtggcccgagtgcctggcacagttgtctggttcattcatgtaacatgataatttttaaatcattaaaaaaattacctttcatacaga

SEQ ID NO: 673788 - DNA, 120 bp, Artificial Sequence
  ENSG00000185896_22 (sequence is synthesized)
acgtgcttcagactccgcctgtggacgtttagtcgcttccgtgtgggctggggcgacgcccctgttcctctgcaaggagctgtttcttcttgccggtctgagattctagagtggaggagt

SEQ ID NO: 673789 - DNA, 120 bp, Artificial Sequence
  ENSG00000185896_23 (sequence is synthesized)
acaggcgtgagccactgtgcccggcagcaccttttctttatggacatagattttggtatttcctttaccaaagggaagataggtgggactacttctggttatatgcttcgctttaggctt

SEQ ID NO: 673790 - DNA, 120 bp, Artificial Sequence
  ENSG00000185896_24 (sequence is synthesized)
gaagaacagttgctgtaaagattttattttgtgaaagacccaaggttgaaatgagtcggattcattggaatccattacttttccagggaataggattttaaatgaaaagctaagcatcct

SEQ ID NO: 673791 - DNA, 120 bp, Artificial Sequence
  ENSG00000185896_25 (sequence is synthesized)
ctctttcaatatctgccctcacagtgtgcctgagttgcatttacacttagagtgacagatgagactcgggtgtgtgtgtggttggaaggctgtgctcacgcagtgtgagatcagcccctg

SEQ ID NO: 673792 - DNA, 120 bp, Artificial Sequence
  ENSG00000185896_26 (sequence is synthesized)
ggtggtgagtgctcactggactggcatgcacgaacttgtagtggcagagacaagtgaaagcatgtcatttctgcacggattccagtggtggcagataggtgtttggcgttagaacaggca

SEQ ID NO: 673793 - DNA, 120 bp, Artificial Sequence
  ENSG00000185896_27 (sequence is synthesized)
gaaacacctgttttccaatctgtaatgaaagaactgtgtaataacgtgcaatttgtacaattaccagtgtctctaccgtagtgatcagattacatttgttgccaaacatcttgatcaggg

SEQ ID NO: 673794 - DNA, 120 bp, Artificial Sequence
  ENSG00000185896_28 (sequence is synthesized)
aagtggagtatgagtaagtcagagaggaaatatttagcagtgaccactgtccagctggaaagacctatagagcttccattctgtccctttgcttcaggatggggaagggaagccactcca

SEQ ID NO: 673795 - DNA, 120 bp, Artificial Sequence
  ENSG00000185896_29 (sequence is synthesized)
ccgatgtgtagtgctgtgaggacctttctgaaattgggcaaagagctcagcactttgagtccatgagaaataaaactgaccagacgttaagtagcaggtgaggaccacagtgaaagatcc

SEQ ID NO: 673796 - DNA, 120 bp, Artificial Sequence
  ENSG00000185896_30 (sequence is synthesized)
tgcagcctctcccatggatttctgcagatgggtgagttgtgccttcaaggcaccacgtcttacagagatcctctgagaaaggcggaacagcgtatgcctaggatgatgcagaaattgaca

SEQ ID NO: 673797 - DNA, 120 bp, Artificial Sequence
  ENSG00000185896_31 (sequence is synthesized)
tgtgccttcctgataagtgttctggaataaagcactaaatagcaatagactaggttggcaaactcaatcagatgggcttagagataacaattccagaatagtatccgaaagggacagggc

SEQ ID NO: 673798 - DNA, 120 bp, Artificial Sequence
  ENSG00000185896_32 (sequence is synthesized)
gggcaccaggtgaactggctgcgtaatccatgtgtctggttgttcattgaatttaagaaacacagtggaggctgggtgcagtggctgacacctataatcccagcaccttgggaggccaag

SEQ ID NO: 673799 - DNA, 78 bp, Artificial Sequence
  ENSG00000185896_33 (sequence is synthesized)
agttcaagaccagcctggccaaagtggcaaaaccccgtcgctactaaaaacagaaattagctgggtttggtggcacgt

SEQ ID NO: 673800 - DNA, 120 bp, Artificial Sequence
  ENSG00000185896_34 (sequence is synthesized)
acagtggaatcttgtaataaaagccatcactgctacagctgtggaaaatggaaatactcggtcgtattttctggacagtttttgatggtctccgtcttccctggaattgacaggcctcat

SEQ ID NO: 673801 - DNA, 120 bp, Artificial Sequence
  ENSG00000185896_35 (sequence is synthesized)
ccactgtgtctccaccacatctttttgtgccctgggtctgctcatgggaggcagcgttaggaaggaggcggcctcacttttttctgccttccctttatcctgggctttttagttccttgg

SEQ ID NO: 673802 - DNA, 120 bp, Artificial Sequence
  ENSG00000185896_36 (sequence is synthesized)
caggggagggcatgcaggccgtgcggccttctggcttcagatgctgctgccctgtggttccgtggtggcatttctgcctgggaggactcctgtgcagttagcaacataagacatgaagca

SEQ ID NO: 673803 - DNA, 120 bp, Artificial Sequence
  ENSG00000185896_37 (sequence is synthesized)
tataattgtcacttgtcagtctttttaaatcgctgtgcaaatgaattaacagttcagtttcttataattttagctttccaaatcatgctttcctgtgctgtgatagctcctgcagtcccc

SEQ ID NO: 673804 - DNA, 120 bp, Artificial Sequence
  ENSG00000185896_38 (sequence is synthesized)
gttttccagagactgactctcaagaggtctggaaggaccagcctgggcagcacagggaggctccatttctgcaaataataaaacgagttagctgggcgtagtggcgcacacctgtggtcc

SEQ ID NO: 673805 - DNA, 73 bp, Artificial Sequence
  ENSG00000185896_39 (sequence is synthesized)
caggagttaaggttgcgatgagccggagaagggtctggaaggaactaaccaaaattttcattccccagagata

SEQ ID NO: 673806 - DNA, 120 bp, Artificial Sequence
  ENSG00000185896_40 (sequence is synthesized)
tctggaaggaactaaccaaaattttcattccccagagatacacaacgccttttatagacaagatcttttgcagttttgttctaatactagaaatgtaggaagtcaggtttattacccaat

SEQ ID NO: 673807 - DNA, 120 bp, Artificial Sequence
  ENSG00000185896_41 (sequence is synthesized)
tcgcggggtgtggaggacgtgcttcagactccgcctgtggacgtttagtcgcttccgtgtgggctggggcgacgcccctgttcctctgcaaggagctgtttcttcttgccggtctgagat

SEQ ID NO: 673808 - DNA, 120 bp, Artificial Sequence
  ENSG00000185896_42 (sequence is synthesized)
tctagaggtaactccccctgctttagagaggcccagcgtgtctctcagctgggagcccctggtaccatttgagagtaagggaatcattttaagaaacagtggtggcgcttctcccatgaa

SEQ ID NO: 673809 - DNA, 120 bp, Artificial Sequence
  ENSG00000185896_43 (sequence is synthesized)
cgttgaatacaacactgtcatctgatgtgcacagaggccctggacgcagcacagctgtccggccacagcccctgattccagacgggggagagacgtgtgtggtttcctcgccgtgcagag

SEQ ID NO: 673810 - DNA, 120 bp, Artificial Sequence
  ENSG00000185896_44 (sequence is synthesized)
agcaccagtctctgcagcggcttccccaagtgacaattccagctagagctggaaccttccgccagggttcctctttgccttttggctgatgtgggggagtggtggggagagaggcctgtt

SEQ ID NO: 673811 - DNA, 120 bp, Artificial Sequence
  ENSG00000185896_45 (sequence is synthesized)
tgcaggcccctgtgtgagcagagccctgacaccatccgtctgtcttggcagtggaggagtgtctgctggacgagaacagcatgctgatccccatcgctgtgggtggtgccctggcggggc

SEQ ID NO: 673812 - DNA, 120 bp, Artificial Sequence
  ENSG00000185897_0 (sequence is synthesized)
ccccttttagcatgctgaccagccctggcaacggagctcaaggcatctatgtgccactgctcaacagtgagtgacgtcatgggcacggccaggtctttatcagttctgccggataaatag

SEQ ID NO: 673813 - DNA, 120 bp, Artificial Sequence; identical to SEQ ID NO: 266428
  ENSG00000185897_1 (sequence is synthesized)

SEQ ID NO: 673814 - DNA, 120 bp, Artificial Sequence
  ENSG00000185897_2 (sequence is synthesized)
cactggttcgtcttctcggtgtaccttctcactttcctggtggggctccccctcaacctgctggccctggtggtcttcgtgggcaagctgcagcgccgcccggtggccgtggacgtgctc

SEQ ID NO: 673815 - DNA, 120 bp, Artificial Sequence; identical to SEQ ID NO: 266430
  ENSG00000185897_3 (sequence is synthesized)

SEQ ID NO: 673816 - DNA, 120 bp, Artificial Sequence; identical to SEQ ID NO: 266431
  ENSG00000185897_4 (sequence is synthesized)

SEQ ID NO: 673817 - DNA, 120 bp, Artificial Sequence; identical to SEQ ID NO: 266432
  ENSG00000185897_5 (sequence is synthesized)

SEQ ID NO: 673818 - DNA, 120 bp, Artificial Sequence
  ENSG00000185897_6 (sequence is synthesized)
cggaaggaccagctagccatcctcctgcccgtgcggctggagatggctgtggtcctctttgtggtcccgctgatcatcaccagctactgctacagccgcctggtgtggatcctcggcaga

SEQ ID NO: 673819 - DNA, 120 bp, Artificial Sequence
  ENSG00000185897_7 (sequence is synthesized)
gggggcagccaccgccggcagaggagggtggcggggctgttggcggccacgctgctcaacttccttgtctgctttgggccctacaacgtgtcccatgtcgtgggctatatctgcggtgaa

SEQ ID NO: 673820 - DNA, 120 bp, Artificial Sequence
  ENSG00000185897_8 (sequence is synthesized)
agcccggcgtggaggatctacgtgacgcttctcagcaccctgaactcctgtgtcgacccctttgtctactacttctcctcctccgggttccaagccgactttcatgagctgctgaggagg

SEQ ID NO: 673821 - DNA, 120 bp, Artificial Sequence
  ENSG00000185897_9 (sequence is synthesized)
ttgtgtgggctctggggccagtggcagcaggagagcagcatggagctgaaggagcagaagggaggggaggagcagagagcggaccgaccagctgaaagaaagaccagtgaacactcacag

SEQ ID NO: 673822 - DNA, 120 bp, Artificial Sequence
  ENSG00000185897_10 (sequence is synthesized)
ggctgtggaactggtggccaggtggcctgtgctgaaagctaggtcctccgggggaggagggtgtagctggcatgtcatcctcagggcgcttcctcgctcacgccaggagggacttggagt

SEQ ID NO: 673823 - DNA, 120 bp, Artificial Sequence
  ENSG00000185897_11 (sequence is synthesized)
ggcgagctggggcccgatggggcttgggggcagagtagacatctagcctccctaagggtatgcgcgctaaagcccagctctcgatctcacctccatccccatccacccacacactatgga

SEQ ID NO: 673824 - DNA, 120 bp, Artificial Sequence
  ENSG00000185897_12 (sequence is synthesized)
ttgggctctgggaaggggtcagggtgagaggctgctctggagaacaatgaggtcctcatagcagcaggcagctcctgtgttttcttgagggtggcagaggagctaagagcagtgcccagg

SEQ ID NO: 673825 - DNA, 120 bp, Artificial Sequence
  ENSG00000185897_13 (sequence is synthesized)
gtctgagggggctgcccagtgagtggcaggggcaggagaggggagaaccccatcctcagagctgctcccagccagcgagtcaggagcgggggagacagggctccagggatgaggccgcat

SEQ ID NO: 673826 - DNA, 120 bp, Artificial Sequence
  ENSG00000185897_14 (sequence is synthesized)
tctgctcccacagcgccttttccagaaagttcccattgctcaataaatgtggatcatcagagacatttatgaacaatgacagaagaaaaattacccaaataaatgtggaagcaagcaaaa

SEQ ID NO: 673827 - DNA, 120 bp, Artificial Sequence
  ENSG00000185899_0 (sequence is synthesized)
atgaatggagaccacatggttctaggatcttcggtgactgacaagaaggccatcatcttggttaccattttactccttttacgcctggtagcaatagcaggcaatggcttcatcactgct

SEQ ID NO: 673828 - DNA, 120 bp, Artificial Sequence
  ENSG00000185899_1 (sequence is synthesized)
gctctgggcgtggagtgggtgctacggagaatgttgttgccttgtgataagttattggttagcctaggggcctctcgcttctgtctgcagtcagtggtaatgggtaagaccatttatgtt

SEQ ID NO: 673829 - DNA, 120 bp, Artificial Sequence
  ENSG00000185899_2 (sequence is synthesized)
ttcttgcatccgatggccttcccatacaaccctgtactgcagtttctagctttccagtgggacttcctgaatgctgccaccttatggtcctctacctggctcagtgtcttctattgtgtg

SEQ ID NO: 673830 - DNA, 120 bp, Artificial Sequence
  ENSG00000185899_3 (sequence is synthesized)
ttcataggcaaccacagaatgtatcagaactatttaaggaaccatctacaaccttggaatgtcactggcgatagcatacggagctactgtgagaaattctatctcttccctctaaaaatg

SEQ ID NO: 673831 - DNA, 120 bp, Artificial Sequence
  ENSG00000185899_4 (sequence is synthesized)
attacttggacaatgcccactgctgtctttttcatttgcatgattttgctcatcacatctctgggaagacacaggaagaaggctctccttacaacctcaggattccgagagcccagtgtg

SEQ ID NO: 673832 - DNA, 120 bp, Artificial Sequence
  ENSG00000185899_5 (sequence is synthesized)
caggcacacataaaggctctgctggctctcctctcttttgccatgctcttcatctcatatttcctgtcactggtgttcagtgctgcaggtatttttccacctctggactttaaattctgg

SEQ ID NO: 673833 - DNA, 120 bp, Artificial Sequence
  ENSG00000185899_6 (sequence is synthesized)
gtgtgggagtcagtgatttatctgtgtgcagcagttcaccccatcattctgctcttcagcaactgcaggctgagagctgtgctgaagagtcgtcgttcctcaaggtgtgggacaccttga

SEQ ID NO: 673834 - DNA, 120 bp, Artificial Sequence
  ENSG00000185900_0 (sequence is synthesized)
agtgcgtgctggcccggggtggcaggagccgcagaggcttgggctgcagaaaaaggatcctgtttgctgtgtaatcctgagaatggactgcaagagaggaaaaactgggcgtctgcttgg

SEQ ID NO: 673835 - DNA, 120 bp, Artificial Sequence
  ENSG00000185900_1 (sequence is synthesized)
gaatctattgtggaaacccagggtgtttcccgaccagtccctgggcgccaactagagtatggactgaccaggtacctggatggagacctgagctggagaaggagatgcgcttgggaggaa

SEQ ID NO: 673836 - DNA, 120 bp, Artificial Sequence
  ENSG00000185900_2 (sequence is synthesized)
attgcagaggccgtcaacatggaaaagcagccccagaacagcaggagaggcctcgccccccgagaggtgccgccagctgttgggctgctgctgatcatggccctgatgaatactctgctc

SEQ ID NO: 673837 - DNA, 120 bp, Artificial Sequence
  ENSG00000185900_3 (sequence is synthesized)
tacctctgcctcgaccacttcttcatcgctcctcgacaatccactgtggaccccacacactgtccctatggtcacttcaggataggacagatgaaaaactgctcaccttggctgtcctgc

SEQ ID NO: 673838 - DNA, 120 bp, Artificial Sequence
  ENSG00000185900_4 (sequence is synthesized)
gaggagctgagaacagaagtgagacagctgaagcgtgttggggaaggagctgtaaagagagtctttctgtctgagtggaaggagcacaaagttgcactctcacagctcaccagcctggag

SEQ ID NO: 673839 - DNA, 120 bp, Artificial Sequence
  ENSG00000185900_5 (sequence is synthesized)
atgaaagatgatttcctccatggactgcagatgctgaaatctctccaaggcacacatgttgtcacgctgcttggctattgtgaggatgacaacactatgcttactgaatatcaccctcta

SEQ ID NO: 673840 - DNA, 120 bp, Artificial Sequence
  ENSG00000185900_6 (sequence is synthesized)
ggttccttgagtaacctggaagaaacactaaacctttcaaagtaccaaaatgtgaacacgtggcagcacaggctggagctggccatggactatgtcagcatcattaattacctgcaccac

SEQ ID NO: 673841 - DNA, 120 bp, Artificial Sequence
  ENSG00000185900_7 (sequence is synthesized)
aacaagcaacttcagcattttggcaaatgacttggacgccttacccctggtgaaccacagctccgggatgctggtgaagtgcggccacagggagctgcatggggatttcgtggctccaga

SEQ ID NO: 673842 - DNA, 120 bp, Artificial Sequence
  ENSG00000185900_8 (sequence is synthesized)
gcaactgtggccctatggagaggacgtgcctttccacgatgatctcatgccctcatatgatgagaagattgacatttggaagatcccagacatctccagtttccttctggggcacattga

SEQ ID NO: 673843 - DNA, 120 bp, Artificial Sequence
  ENSG00000185900_9 (sequence is synthesized)
agggagtgatatggtccgattccatttgtttgatattcacaaagcatgcaagagccagactccctcagaaagacccactgcccaggacgttctggagacctaccagaaggtcttggatac

SEQ ID NO: 673844 - DNA, 120 bp, Artificial Sequence
  ENSG00000185900_10 (sequence is synthesized)
acttagagatgccatgatgtctcaggcaagagagatgctgtgaaaaccagtccagccaatgaaggtgggattgaagggctgaatggaagttacagcattctactctgatggtggagtttt

SEQ ID NO: 673845 - DNA, 120 bp, Artificial Sequence
  ENSG00000185900_11 (sequence is synthesized)
ttgcctgagtttcgtgttttattgttttttttatggcttagccatgtggttcgttgtccacatccacatgtacgtttgtatgtagtccacattggttgttagatttttttttttttcttt

SEQ ID NO: 673846 - DNA, 65 bp, Artificial Sequence
  ENSG00000185900_12 (sequence is synthesized)
tgtagtccacattggttgttagatttttttttttttctttgagatgcggtcttgctctgttgctg

SEQ ID NO: 673847 - DNA, 120 bp, Artificial Sequence
  ENSG00000185900_13 (sequence is synthesized)
caggcatgggccactatgcctggccagttgttagatttccatggatttgtagtttccaaagtttctcgttattgatttctacttttcttccattgtggtctgagaaggtacttgatatga

SEQ ID NO: 673848 - DNA, 120 bp, Artificial Sequence
  ENSG00000185905_0 (sequence is synthesized)
accctccaagcctgcacctcttagtccagcaccaggaagagtggctctaggagggagaggagcccagggactgacccaagatgccgttgactccagagccgccctctgggcgcgtggagg

SEQ ID NO: 673849 - DNA, 120 bp, Artificial Sequence
  ENSG00000185905_1 (sequence is synthesized)
ggccccccgcatgggaagcagccccatggccctcactgccctgtgggccctgcatccccatcatgctggtcctggccaccctggctgcgctcttcatcctcaccaccgctgtgttggctg

SEQ ID NO: 673850 - DNA, 120 bp, Artificial Sequence
  ENSG00000185905_2 (sequence is synthesized)
aacgcctgttccgccgtgctctccgcccagaccccagccaccgtgcacccaccctggtgtggcgcccaggaggagagctgtggattgagcccatgggcaccgcccgagagcgctctgagg

SEQ ID NO: 673851 - DNA, 120 bp, Artificial Sequence
  ENSG00000185905_3 (sequence is synthesized)
actggtatggctctgcggtccccctgctgacagatcgggcccctgagcctcccacccaggtgggcactttggaggcccgagcaacagccccacctgccccctcagccccaaattctgctc

SEQ ID NO: 673852 - DNA, 120 bp, Artificial Sequence
  ENSG00000185905_4 (sequence is synthesized)
ccagcaacttgggcccccagaccgtactggaggtcccagcccggagcaccttctgggggccccagccctgggaggggaggccccccgccacaggcctggtgagctgggctgaacccgagc

SEQ ID NO: 673853 - DNA, 120 bp, Artificial Sequence
  ENSG00000185905_5 (sequence is synthesized)
agaggccagaggccagcgtccagtttgggagcccccaggccaggaggcagcggccagggagcccggatcctgagtggggcctccagccacgggtcaccttggagcagatctcagctttct

SEQ ID NO: 673854 - DNA, 120 bp, Artificial Sequence
  ENSG00000185905_6 (sequence is synthesized)
ggaagcgtgaaggccggaccagtgtggggttctgaatccccagggttccccagagatccccgaggcaggccttgcctcagtgggaccggggaccccaggatccagcattaggattgagac

SEQ ID NO: 673855 - DNA, 120 bp, Artificial Sequence
  ENSG00000185905_7 (sequence is synthesized)
tgccccagcgaagatgcccttcccaggctccttccacctggagtccccctccccgggtctgggtggtggccaggctatgtggactaggggaagcccagcagtgcctctgctcagctacct

SEQ ID NO: 673856 - DNA, 120 bp, Artificial Sequence
  ENSG00000185905_8 (sequence is synthesized)
gggctgtggctcagagacctgggggtggagccaatgccaggccagaagccttcaagatcgcatccagatgaagaacccaaggtactagatagtcaggaaatggcatcgaccagccacctc

SEQ ID NO: 673857 - DNA, 120 bp, Artificial Sequence
  ENSG00000185905_9 (sequence is synthesized)
caccttctttcagtgtttaccgaagccaccaataccaaagagaacgggtcctgcggtgctgaacagcctcggtgtggcgatgacagctggcaggagatgacaggaatccagtttcccaga

SEQ ID NO: 673858 - DNA, 120 bp, Artificial Sequence
  ENSG00000185905_10 (sequence is synthesized)
ggaaaatacacaaagagaggaccagaccaggcagaggaacattttgtttcatatgaactgtggctttgacccccaaactgcaaggaggaacttgctgggccaagctgcagcggcgctgtc

SEQ ID NO: 673859 - DNA, 120 bp, Artificial Sequence
  ENSG00000185905_11 (sequence is synthesized)
ttgctggagtggggacctagagtcagagaaaacccacaggctcctctgcccattctcctccatctgcacacgtctcagcctcggaccctcaccactccatggtgaggaaggccatggcca

SEQ ID NO: 673860 - DNA, 120 bp, Artificial Sequence
  ENSG00000185905_12 (sequence is synthesized)
ggggaaactgagtttcatccaatgtggagaggagcgttgtcctagagcagggcaactcccaaactgtgacctctgatcatcgtcccttccagcttgctggagtgtccagagagacagatt

SEQ ID NO: 673861 - DNA, 120 bp, Artificial Sequence
  ENSG00000185905_13 (sequence is synthesized)
tgccacaagctaggcttacttataatgctccaccctacagaaatgggaccccaagtacccaatcttccctttaggagaggcaggcaggtgggtgagcagcagatgtagtttccatttccc

SEQ ID NO: 673862 - DNA, 71 bp, Artificial Sequence
  ENSG00000185905_14 (sequence is synthesized)
caggcaggtgggtgagcagcagatgtagtttccatttccctgggggtttaattttccaactctgtcaccca

SEQ ID NO: 673863 - DNA, 120 bp, Artificial Sequence
  ENSG00000185905_15 (sequence is synthesized)
ggagtgcagtggcacaatctcaactcactacagcctcgaactcctaggctcaagcgatcctcccacctcaacctctagaatagctgggactgcaggtgcataccaccacgcccagctaat

SEQ ID NO: 673864 - DNA, 85 bp, Artificial Sequence
  ENSG00000185905_16 (sequence is synthesized)
taatttttgtattttttttgtagagacacggtctcaccatactgcctgggcaggtttccaactcctgggctcaagtgatccagca

SEQ ID NO: 673865 - DNA, 87 bp, Artificial Sequence
  ENSG00000185905_17 (sequence is synthesized)
tctcagctcactgcggccttgtctccctagtaggtggaactacaggcatgtaccaccacacctggctattttttttttttagagaca

SEQ ID NO: 673866 - DNA, 90 bp, Artificial Sequence
  ENSG00000185905_18 (sequence is synthesized)
taattcctgggctcgagagagccactcatccccatctctcagagtgttgggattacagccatgagccaccatgcccggccaaacttcagc

SEQ ID NO: 673867 - DNA, 120 bp, Artificial Sequence
  ENSG00000185905_19 (sequence is synthesized)
gattacagccatgagccaccatgcccggccaaacttcagccttgaatattagtgattttgccatattagtttaccatctgtacaattatttgctttatatttttctttaaattggctcat

SEQ ID NO: 673868 - DNA, 120 bp, Artificial Sequence
  ENSG00000185905_20 (sequence is synthesized)
tattcacttaatgaaattattgcaacaggaatcttttgtatcacttctgtaaatggaaaaccagtctcatttgccatcaatagaaggtaaaacatgaaaataaatacaatgtaaacaaaa

SEQ ID NO: 673869 - DNA, 120 bp, Artificial Sequence
  ENSG00000185909_0 (sequence is synthesized)
agagcccgacttcagccccagccagatcccgcgtcaacggaggcggaacggcggaccccgtaccctggcagcatcggagcaccggcgggtgaaggcaaggtccctggactggtcatatac

SEQ ID NO: 673870 - DNA, 120 bp, Artificial Sequence
  ENSG00000185909_1 (sequence is synthesized)
ctcttgtggccctggcagaatcaagatgaggccctgtcatgcctccccagtgaggcctacagtctgagcagacagcatggcctgccactggcagtgaacaccatgtctgcaggaggtggc

SEQ ID NO: 673871 - DNA, 120 bp, Artificial Sequence
  ENSG00000185909_2 (sequence is synthesized)
cgggcctttgcttggcaagtgttcccccccatgcccacttgccgggtctatggcacagtggcacaccaagatgggcacctgctggtgttggggggttgtggccgggctggactgcccctg

SEQ ID NO: 673872 - DNA, 120 bp, Artificial Sequence
  ENSG00000185909_3 (sequence is synthesized)
gacactgctgagacactggacatggcctcgcacacatggctggcactggcacccctgcccactgcccgggctggtgcagctgcggtagttctgggcaagcaggtgctagtggtgggtggt

SEQ ID NO: 673873 - DNA, 120 bp, Artificial Sequence
  ENSG00000185909_4 (sequence is synthesized)
gtggatgaggtccagagcccggtagctgctgtagaggccttcctgatggatgagggccgctgggagcgtcgggccaccctccctcaagcagccatgggggttgcaactgtggagagagat

SEQ ID NO: 673874 - DNA, 120 bp, Artificial Sequence
  ENSG00000185909_5 (sequence is synthesized)
ggtatggtgtatgctctggggggaatgggccctgacacggccccccaggcccaggtacgtgtgtatgagccccgtcgggactgctggctttcgctaccctccatgcccacaccctgctat

SEQ ID NO: 673875 - DNA, 120 bp, Artificial Sequence
  ENSG00000185909_6 (sequence is synthesized)
ggggcctccaccttcctgcacgggaacaagatctatgtcctggggggccgccagggcaagctcccggtgactgcttttgaagcctttgatctggaggcccgtacatggacccggcatcca

SEQ ID NO: 673876 - DNA, 120 bp, Artificial Sequence
  ENSG00000185909_7 (sequence is synthesized)
agcctacccagccgtcgggcctttgctggctgcgccatggctgaaggcagcgtctttagcctgggtggcctgcagcagcctgggccccacaacttctactctcgcccacactttgtcaac

SEQ ID NO: 673877 - DNA, 120 bp, Artificial Sequence
  ENSG00000185909_8 (sequence is synthesized)
gcctgcgcatgagggataagagggcagactttgtggttgggtcccttgggggccacattgtggccattgggggccttggaaaccagccatgtcctttgggctctgtggagagctttagcc

SEQ ID NO: 673878 - DNA, 120 bp, Artificial Sequence
  ENSG00000185909_9 (sequence is synthesized)
ttgcacggcggcgctgggaggcattgcctgccatgcccactgcccgctgctcctgctctagtctgcaggctgggccccggctgtttgttattgggggtgtggcccagggccccagtcaag

SEQ ID NO: 673879 - DNA, 120 bp, Artificial Sequence
  ENSG00000185909_10 (sequence is synthesized)
ccgtggaggcactgtgtctgcgtgatggggtctgaaggcttggtgggagctgtccactggagcagctcattgccagaggcagctatttctatggctccttttgctgctgaggacactcac

SEQ ID NO: 673880 - DNA, 120 bp, Artificial Sequence
  ENSG00000185909_11 (sequence is synthesized)
tgtggctctgtgggatgagagaggcatgggggtgagcacttgaaacactgccttggggccttgggttaggggagcctttgtctttagtgcaggacacacatatgcttacacctaccttta

SEQ ID NO: 673881 - DNA, 120 bp, Artificial Sequence
  ENSG00000185909_12 (sequence is synthesized)
tcaccattcgttcatgaatcatgcctagctccatccttgccctgggacctactaggccttccatccaactgggaaatggggagaagcaaagctggcctcatgctcttcagggtcagttcc

SEQ ID NO: 673882 - DNA, 120 bp, Artificial Sequence
  ENSG00000185909_13 (sequence is synthesized)
tatctggagttgaccaggcctaccccagttgccattcctgaaaaatctcagctgccaggctgcctttagggtccctgcagacccaggagagttgagagggtgggggacacagagagaata

SEQ ID NO: 673883 - DNA, 120 bp, Artificial Sequence
  ENSG00000185909_14 (sequence is synthesized)
gagaggatgtgggaactgccagagggccggagcgcaggagttcaagtggaggaatgctggctttgagccctctacactgctggttgtatgaccttggacaagtcacttcacctctctgtg

SEQ ID NO: 673884 - DNA, 120 bp, Artificial Sequence
  ENSG00000185909_15 (sequence is synthesized)
cctcagcatcctcatctataaatggggatctctgaaaccttcctaccctacctacctcacagggctgttgtgaggacccagggagtttggatgtggaagtaaaagtgctgctaaaaccta

SEQ ID NO: 673885 - DNA, 120 bp, Artificial Sequence
  ENSG00000185909_16 (sequence is synthesized)
gatgtttgacctggagcatggtgagcagtggctgttctgggctgtcctcccgctctctgtgggatggaggggcatagtgtgtacatgactagatctgacctcccctctcctgcagggtcc

SEQ ID NO: 673886 - DNA, 120 bp, Artificial Sequence
  ENSG00000185909_17 (sequence is synthesized)
tggaccaaattgccccgcagcctgcgcatgagggataagagggcagactttgtggttgggtcccttgggggccacattgtggccattgggggccttggtaagtctctatggggctgggga

SEQ ID NO: 673887 - DNA, 120 bp, Artificial Sequence
  ENSG00000185915_0 (sequence is synthesized)
agttgtccccggccttcgcgggtgcccgcagaacccgtcctcctcgtccaccccggagaggtcagagtcctcgccctgcactcccgggacgccgcatctgcgccgtcggacatccagcac

SEQ ID NO: 673888 - DNA, 120 bp, Artificial Sequence
  ENSG00000185915_1 (sequence is synthesized)
ccccggagtccaccggcaactcggttcttccaggtgatggtgtgcagccaccgccgcccctggcgtgcaggtgtgggctctccacattgggccggggaggggacttcgggcaacgcgctg

SEQ ID NO: 673889 - DNA, 120 bp, Artificial Sequence
  ENSG00000185915_2 (sequence is synthesized)
gaagcctcggcagtcgtggaaaccaagccccacactcccgggaagcctccaaattccgcgccctccgttactaggggcctccgaaaaccgtttccagactggatttgctctgagaggggc

SEQ ID NO: 673890 - DNA, 120 bp, Artificial Sequence
  ENSG00000185915_3 (sequence is synthesized)
actgggcgatctgcaggtctggatgaaggagccctgggctttaaactgagcaggcagaaatgggcccctgctaggggctctgtggcttacgcgggggtcccgggagtgttgtgccccggg

SEQ ID NO: 673891 - DNA, 120 bp, Artificial Sequence
  ENSG00000185915_4 (sequence is synthesized)
atgcctccggccctgcccagcaggcctctggtcccaccaggctgcttccagccctgggtagaatgagttacttcctgtcttactgcaaagctcatggcggcgcgctgctcaccggctacc

SEQ ID NO: 673892 - DNA, 120 bp, Artificial Sequence
  ENSG00000185915_5 (sequence is synthesized)
aggccctgcgcgccgagggcttcctgtgcgacgtgacactggagaccgagggcagcgaattcccggcgcacaggtcgctcctggcgtgctccagtgactacttcagggccctgttcaaga

SEQ ID NO: 673893 - DNA, 120 bp, Artificial Sequence
  ENSG00000185915_6 (sequence is synthesized)
gccacacccaggaatcccgggcgcgcgtgatccacctgcacgtgccatcggcagccggcctgcagcgcctgctggacttcatctacactgcctggctgtcgctttccatggacactgtag

SEQ ID NO: 673894 - DNA, 120 bp, Artificial Sequence
  ENSG00000185915_7 (sequence is synthesized)
aggacactctggaggccgccagctacctgcaggtcactgaggccctggggctctgtgggcgctacttggagcgccagctggctccagagaactgctgcttcgccgccaacgtggcagcgc

SEQ ID NO: 673895 - DNA, 120 bp, Artificial Sequence
  ENSG00000185915_8 (sequence is synthesized)
gctttggcctggctcacacgctggacgcggccgagcgctgcatcgtgagccacttgcaggagctgctggcgcggggcgcgggccccgcgggactcctggagctcaaccctacatcgctga

SEQ ID NO: 673896 - DNA, 120 bp, Artificial Sequence
  ENSG00000185915_9 (sequence is synthesized)
gggctgtactgggtgcccccgacgtggcgcgggtgcccgaggcccggctactgggcctggcgttagcttggttgcggcaggagcccacaactgagcgcctggcacactgtacagagttgc

SEQ ID NO: 673897 - DNA, 120 bp, Artificial Sequence
  ENSG00000185915_10 (sequence is synthesized)
tggagcgtgtccgctttggcctggttcccgccgacgtactgcggcgcgtgtactcgggctctggcctcgtgctgcccgcccgggtcaagggcctcatcatccaggccctcaactaccaca

SEQ ID NO: 673898 - DNA, 120 bp, Artificial Sequence
  ENSG00000185915_11 (sequence is synthesized)
cgacgccctcccgccagccgctcatgcagggcgagcagaccagcatccggagcccccagacccgcatcttgttggtgggggggcgcagggcacgggaggtggtgattgaggaggtcgcgg

SEQ ID NO: 673899 - DNA, 120 bp, Artificial Sequence
  ENSG00000185915_12 (sequence is synthesized)
ccccgcagagggcagctaggggccaggtcgccgccccagagcccgaggaagaagaggaagagttggaggaagaggaggaggaggaggagtgggagctcacccagaacgtggtggccttcg

SEQ ID NO: 673900 - DNA, 120 bp, Artificial Sequence
  ENSG00000185915_13 (sequence is synthesized)
atgtgtacaatcaccgctggcgcagccttacgcagctacccacaccactgctggggcacagcgtgtgcaccgcgggcaacttcctgtttgtcctgggtggggagagcccttccggcagtg

SEQ ID NO: 673901 - DNA, 120 bp, Artificial Sequence
  ENSG00000185915_14 (sequence is synthesized)
catcctctcccctggccgacgactcgcgggtggtcacggcccaagtgcaccgttacgacccgcgcttccacgcttggacggaagtgcccgccatgcgggaagcgcgggcccacttctggt

SEQ ID NO: 673902 - DNA, 120 bp, Artificial Sequence
  ENSG00000185915_15 (sequence is synthesized)
ggtgcgggcggtgaggtgctggcctcggtggagatgtacgacctgcgtcgggaccgctggacggcggctggggcactaccgcgggctctgcacggtcacgcgggggccgtcggggaccgc

SEQ ID NO: 673903 - DNA, 120 bp, Artificial Sequence
  ENSG00000185915_16 (sequence is synthesized)
ggtgttgtgtacatctcggggggcaaggcagggagaggcgagggcggagcgagcagcctccgggacttatacgtcctgggccctgaggagcaggtttggagcaagaaggcacccatgggc

SEQ ID NO: 673904 - DNA, 120 bp, Artificial Sequence
  ENSG00000185915_17 (sequence is synthesized)
accgcacgtttcgggcaccacatggcagtgctgcgcggcgctgtgtttgcttttctggggcgatacgagcccttctctgagatcgagcgctacgaccccggcgccgaccagtggactcgg

SEQ ID NO: 673905 - DNA, 120 bp, Artificial Sequence
  ENSG00000185915_18 (sequence is synthesized)
ttgcggccgctgccctacgaccgcttctgctatgggctggccgtggtcgaggagacagcgttgctgctgggcggcctcaagtggcgggactcgcgccaggtgcctacccgcaacgtagtg

SEQ ID NO: 673906 - DNA, 120 bp, Artificial Sequence
  ENSG00000185915_19 (sequence is synthesized)
ggctacgacctcgacctggaccgttgggaggacatcggctgcgcgttgccctgggcctggagcggcctgcggtgcgcagtgctgcagctggccgagggtggggacgacgagagggaggga

SEQ ID NO: 673907 - DNA, 120 bp, Artificial Sequence
  ENSG00000185915_20 (sequence is synthesized)
gaggttggagaggcgctagatttggtgctgggctgaatgggtcagtccggtttccttccgcaatggaggagaaagtcgcgcttggttagtcttacagagcaacggatgggctttttctaa

SEQ ID NO: 673908 - DNA, 120 bp, Artificial Sequence
  ENSG00000185915_21 (sequence is synthesized)
gaaagggattctgggagcagagtggcttctgaaggttaacaggcaaacaaggccttgagcaaagagaaacatttctccttgagctgagaatgggagacagcggggcggggggtcaaatag

SEQ ID NO: 673909 - DNA, 120 bp, Artificial Sequence
  ENSG00000185915_22 (sequence is synthesized)
aaggctatatgaatcaacttcagtgagctggtgaaagaaaatttttagaaaggctcacgcaaggctagagaaggactttcacaaataaaatatgaccttattttccctcttacagttaaa

SEQ ID NO: 673910 - DNA, 88 bp, Artificial Sequence
  ENSG00000185915_23 (sequence is synthesized)
gtaccacaggaagtttatacaaaactcagaaaattgttggctataaaggctgtaattaagtcctaggagatggcattatctgaataaa

SEQ ID NO: 673911 - DNA, 120 bp, Artificial Sequence
  ENSG00000185915_24 (sequence is synthesized)
gctgtaattaagtcctaggagatggcattatctgaataaatagtgaaaggagagtgccttggttaaataccatgaaatcattgtaaggagaactatgattttatgatccggagccatggt

SEQ ID NO: 673912 - DNA, 120 bp, Artificial Sequence
  ENSG00000185915_25 (sequence is synthesized)
tacagttctgctctgatggtttgatataaatatggaactgagaaggaaaaaaaaaatctctaagcacttttttttaatctagaaagtatccttaaatttttctgtcaccggtgtcaccct

SEQ ID NO: 673913 - DNA, 120 bp, Artificial Sequence
  ENSG00000185915_26 (sequence is synthesized)
aggctgcttttgccctgactttagacagctcactggttttaagtcacatttcatcaacccttagccataataatcaggatcctctggttaagtggaatgtctaaccaaaacaaaacaaaa

SEQ ID NO: 673914 - DNA, 120 bp, Artificial Sequence
  ENSG00000185915_27 (sequence is synthesized)
actgatttctttcatactcttttaaatgttcattctgcagacatactgtagattatatttgtaaaaaaaaatcaatttttggtggttacccccacttcccccaaaagaatcacagagaaa

SEQ ID NO: 673915 - DNA, 120 bp, Artificial Sequence
  ENSG00000185915_28 (sequence is synthesized)
ggaaagaggaataggtaaagttttaaacttcgtctcaggtaaatgggaaacgagcttgatttttcagggtcttagataagacacttgtatatactgaacaggtgctgcttttggcttgta

SEQ ID NO: 673916 - DNA, 120 bp, Artificial Sequence
  ENSG00000185915_29 (sequence is synthesized)
tcaccaatgaggcagcaaagttagaactcgaaactagggtggggggtggtggctgtataattaggtcacaaagaaatgtggtaaggactttgcatgaataaagtaggtgctttataagga

SEQ ID NO: 673917 - DNA, 120 bp, Artificial Sequence
  ENSG00000185917_0 (sequence is synthesized)
gcccgcggcggaaggggcggacccgggagactgaggacttggattgcttaaggacaccaggcaggcgcgacagccttcagcctctccctctgcagttttggccggttcctttaacttgcc

SEQ ID NO: 673918 - DNA, 120 bp, Artificial Sequence
  ENSG00000185917_1 (sequence is synthesized)
ttcatctggggctgtttggtatttccacgtgccttgggcccgcccactgcagcctccatcttggaagcggccgccggcgcctagaactgtatttcagaaaaaagaaactacagttttagc

SEQ ID NO: 673919 - DNA, 120 bp, Artificial Sequence
  ENSG00000185917_2 (sequence is synthesized)
atgcagaaaggaaaagggagaacaagccggatcagaagacgaaaactctgcggaagttctgaatcaagaggagtgaatgagagccacaagtctgaatttatagagctgaggaagtggctg

SEQ ID NO: 673920 - DNA, 120 bp, Artificial Sequence
  ENSG00000185917_3 (sequence is synthesized)
aaagctaggaagtttcaagattcaaacttagcgcctgcttgttttccaggtacaggaagagggctgatgagtcaaacatccctgcaggagggacagatgattatttcgttgcctgagagt

SEQ ID NO: 673921 - DNA, 120 bp, Artificial Sequence
  ENSG00000185917_4 (sequence is synthesized)
tgcctgctcaccacggacacagtgattcgaagctacttaggggcatacattactaagtggaagcctcctccatctcctctgctggcgctgtgcacctttttagtttcagaaaagcatgct

SEQ ID NO: 673922 - DNA, 120 bp, Artificial Sequence
  ENSG00000185917_5 (sequence is synthesized)
gggcaccgatctctttggaagccttacctggagattttacccaaggcgtatacctgccctgtttgtttggagccggaagtggtgaaccttcttcccaaatctttaaaagcaaaggctgaa

SEQ ID NO: 673923 - DNA, 120 bp, Artificial Sequence
  ENSG00000185917_6 (sequence is synthesized)
gagcagagagcccacgtgcaggagttctttgcttcctccagagactttttctcttctctgcagcctctgtttgcggaggctgttgacagcatcttcagctacagtgccctgctgtgggct

SEQ ID NO: 673924 - DNA, 120 bp, Artificial Sequence
  ENSG00000185917_7 (sequence is synthesized)
tggtgcaccgtcaacaccagagccgtgtacctgaggcccaggcagcgggaatgcctttctgcagagccggacacctgtgcactcgctccgtacctggacctgctgaatcatagcccacat

SEQ ID NO: 673925 - DNA, 120 bp, Artificial Sequence
  ENSG00000185917_8 (sequence is synthesized)
gtccaggtaaaagcagcgtttaatgaagaaactcattcttacgaaattagaacgacttcacgttggagaaagcatgaagaggtattcatctgttacggccctcacgataatcaacggctg

SEQ ID NO: 673926 - DNA, 120 bp, Artificial Sequence
  ENSG00000185917_9 (sequence is synthesized)
ttcctggaatacggatttgtttctgtccataatcctcatgcttgtgtttatgtctcaagagaaatacttgttaaatatcttccatcaacagataaacagatggacaaaaagatttctatt

SEQ ID NO: 673927 - DNA, 120 bp, Artificial Sequence
  ENSG00000185917_10 (sequence is synthesized)
ttaaaggatcatggctatatagaaaatttgacatttggatgggatggaccatcttggaggctactcacagcccttaagttgttatgtctggaagctgagaaatttacatgctggaaaaaa

SEQ ID NO: 673928 - DNA, 120 bp, Artificial Sequence
  ENSG00000185917_11 (sequence is synthesized)
gtacttcttggggaggtaatttcagatacgaatgagaagacaagtttggacatagcccagaaaatatgctattatttcatagaagagactaatgctgtgcttcaaaaggtgtctcatatg

SEQ ID NO: 673929 - DNA, 120 bp, Artificial Sequence
  ENSG00000185917_12 (sequence is synthesized)
gccctgataaaccaactaactttggtggaatccttgtggacggaagagctaaagattctcagggcatctgccgagaccctgcacagtttgcaaacagcttttacctgatttcaccgaagc

SEQ ID NO: 673930 - DNA, 120 bp, Artificial Sequence
  ENSG00000185917_13 (sequence is synthesized)
gcatttggtcacctcctctgaaacaaaagttaattttgaagagcatcatcatgggctggggtggtggctgcccccaggacatgcaggatttctgcagggggcagcacaggttctgggatt

SEQ ID NO: 673931 - DNA, 120 bp, Artificial Sequence
  ENSG00000185917_14 (sequence is synthesized)
gtgaggctgtgagtgaaggtggacaagctgtctggatggcaggtctaatgctcttccgaataaagtgctgaactgtgaggagagaggcggactgtgaggcagccaggagccagctgcgtc

SEQ ID NO: 673932 - DNA, 120 bp, Artificial Sequence
  ENSG00000185917_15 (sequence is synthesized)
cgtgtgtggtctgtcaccacggggcctgcttcttatctgacacagcagctatcagagtctagtggttgtgcttttaagatgctctgataccattgggttaaggggcagattggcggtggg

SEQ ID NO: 673933 - DNA, 120 bp, Artificial Sequence
  ENSG00000185917_16 (sequence is synthesized)
tgtggggcagtgtgaggtagtcctggatccccgccagggtggcccagacgccagcccttccctgtgtggctgcactgaggtgggtgttgaagagccccctaggggacacacagcttccag

SEQ ID NO: 673934 - DNA, 120 bp, Artificial Sequence
  ENSG00000185917_17 (sequence is synthesized)
gaggagggaatgtcctctaagcatgctcctggcctctcaaggtggcgcttgtctaattattcacttgggaagaatgactagctcagccagcggctctttctgctttgttctggcgacttt

SEQ ID NO: 673935 - DNA, 120 bp, Artificial Sequence
  ENSG00000185917_18 (sequence is synthesized)
cctgggcaggcctttccacctggggagctggctcatcctgcacagctgggccgtggtgggcctgtctgcttgattctggggttcagtgtaggtcagctgatggcgaaccatggtggtggt

SEQ ID NO: 673936 - DNA, 120 bp, Artificial Sequence
  ENSG00000185917_19 (sequence is synthesized)
ttggcttctgttcttattcttgagttttgataccacgcagaccttgggtggggagagcttcctgcacagctctcagcggcctgtggccttggaactgcctgcgtaagtaacggaggggct

SEQ ID NO: 673937 - DNA, 120 bp, Artificial Sequence
  ENSG00000185917_20 (sequence is synthesized)
gctggtcctgttcaggcccgtgctggggacgccgcttagacaatgttgcccagagtcctgtttaccctcccagggttcattcttcccaagaactcaaattcctttctcattggagcctag

SEQ ID NO: 673938 - DNA, 120 bp, Artificial Sequence
  ENSG00000185917_21 (sequence is synthesized)
tgaaaccaaatgaacgggacctgctggcctcaggaggcaggcagagtttaaaataaaactttctcatgatttcttgaacatctttccctgtttgtatatacactttgtgtttatttttca

SEQ ID NO: 673939 - DNA, 120 bp, Artificial Sequence
  ENSG00000185917_22 (sequence is synthesized)
gtagctgcagtatattttttttcaatattcagtataatgcagtgtatttcatcatatgctgtatggagagtgggcagacttctgtggagggcccgatagtaaccatttgaagctttctgg

SEQ ID NO: 673940 - DNA, 120 bp, Artificial Sequence
  ENSG00000185917_23 (sequence is synthesized)
acctgtggtcttagtcccagcgattctgcagagcggccatcggcagcatgtcaaccatttgcatggctgggctccagggaaactactgacaacgacaggtggtgggccatagtttcctga

SEQ ID NO: 673941 - DNA, 120 bp, Artificial Sequence
  ENSG00000185917_24 (sequence is synthesized)
cccctgtgctatgccagaatttctttttcctcttccctatgagtggacctaaatatgttaattccttttcacctttcaaaacggacagccccttgaacattaaaaacttcgcagacccta

SEQ ID NO: 673942 - DNA, 120 bp, Artificial Sequence
  ENSG00000185917_25 (sequence is synthesized)
ttcatcagcgtaaaaagaactgagtttaggtcgcaggtcccctccagggcaggcattatcgtgtgcgctgcagtaacctctcatcttgtggagtcctacacttagcgcatgttgctccgg

SEQ ID NO: 673943 - DNA, 120 bp, Artificial Sequence
  ENSG00000185917_26 (sequence is synthesized)
cgcgctgcgtaaagctgaggagcctgaggcccgaggtccgatgctcgcctggctggcctatggctgcgggagcggtgtgtgtcggaccgtaggacggcctcacggctagagtttgaggac

SEQ ID NO: 673944 - DNA, 120 bp, Artificial Sequence
  ENSG00000185917_27 (sequence is synthesized)
tatgggggcggggacggtgcctgtgtctgtggcggtcaccgggcttcacgtggtcctcagcagggtgatggtggacagctcgcgcgagggcccgggagtcttggggacacttcccggcgc

SEQ ID NO: 673945 - DNA, 120 bp, Artificial Sequence
  ENSG00000185917_28 (sequence is synthesized)
ggtctgtggactgagcgctgggacccgcaccgaaccagccgccgttcgcctctggagctggacatgccgactttcgttaggtcaaataatgaaccttatactgcggaagtgcggtattaa

SEQ ID NO: 673946 - DNA, 120 bp, Artificial Sequence
  ENSG00000185917_29 (sequence is synthesized)
atgaaccttatactgcggaagtgcggtattaatattgcctggagttcttgtctcttgctcatttctgccctcgtatgttttagaagtagatttattttttatttttatttttttaattta

SEQ ID NO: 673947 - DNA, 62 bp, Artificial Sequence
  ENSG00000185917_30 (sequence is synthesized)
ttaatttatctagctgcagcttccgcctcctgagatcaagcgattctcctgcctcagcctcc

SEQ ID NO: 673948 - DNA, 86 bp, Artificial Sequence
  ENSG00000185917_31 (sequence is synthesized)
cgcctcgggctcccaaagtgctggttttacaggcgtgagccactgtacccagccattattttatttttatttatgtatttattttt

SEQ ID NO: 673949 - DNA, 82 bp, Artificial Sequence
  ENSG00000185917_32 (sequence is synthesized)
gggctcccaaagtgctggttttacaggcgtgagccactgtacccagccattattttatttttatttatgtatttattttttt

SEQ ID NO: 673950 - DNA, 87 bp, Artificial Sequence
  ENSG00000185917_33 (sequence is synthesized)
agctattttttgtatttttagtagattaagctgtagtcactaggtctgcaagataaaactgttttagagggactgatataatgggaa

SEQ ID NO: 673951 - DNA, 120 bp, Artificial Sequence
  ENSG00000185917_34 (sequence is synthesized)
gcaagataaaactgttttagagggactgatataatgggaattctgttactgtagggatcatgatttagctcacagtataaacgtttcatgtacaaaagcacttgagagaaacagtttacc

SEQ ID NO: 673952 - DNA, 120 bp, Artificial Sequence
  ENSG00000185917_35 (sequence is synthesized)
aaaacatacatttgtatacttaaaggtacaaagaacagtgattatcatataactggaaagtaaatcaaagaaatgttttttattttagattgagcatttccacagaaattacagttttgt

SEQ ID NO: 673953 - DNA, 120 bp, Artificial Sequence
  ENSG00000185917_36 (sequence is synthesized)
ttggtcacctcctctggtgggtgttagtcacacattttagactaaggtttgatggactaaatttatatagtttagagtcgatgagttgtgtctactcaacaattaggaacttaatccttt

SEQ ID NO: 673954 - DNA, 120 bp, Artificial Sequence
  ENSG00000185917_37 (sequence is synthesized)
tccctgcaggtgagaactgttctttgatccttgaaacccaatgtagattttgctgctttgtttttgcggttcaaacgaagtgaattaaaaaaatttcagacatacagtcatttcttactt

SEQ ID NO: 673955 - DNA, 120 bp, Artificial Sequence
  ENSG00000185917_38 (sequence is synthesized)
acctaatagatatatttgaatatggttctatcaactaggattaagtttgttgcaataaaagacaagcccaaaattgaggtgcttaagcagcatggaaatttattttgttctcactcatag

SEQ ID NO: 673956 - DNA, 120 bp, Artificial Sequence
  ENSG00000185917_39 (sequence is synthesized)
tctctcatgtccttaagggaactgcaccctcaggtcaggttgtgggtcttggaacttgggcatcaggagagagcaagcgggtgaggaagggcaggcttccttcctttaaggaaattccag

SEQ ID NO: 673957 - DNA, 120 bp, Artificial Sequence
  ENSG00000185917_40 (sequence is synthesized)
tccctctgtccttggccagtgatcaggtacacagccctagccagctgcaagggaggagatccgtgctggcctttccccagccacgtgccctctaagtaggattccgttagcgaggagggg

SEQ ID NO: 673958 - DNA, 120 bp, Artificial Sequence
  ENSG00000185917_41 (sequence is synthesized)
gagagaaggcgtgttgggataggcaactagcaatctctgccacagcacatgttacatgtcagatcacgttttcagtatgccaagggagctgctgctgtctgtgaggcagtcgtgatgtgg

SEQ ID NO: 673959 - DNA, 120 bp, Artificial Sequence
  ENSG00000185917_42 (sequence is synthesized)
gacagagggcttcaggcacgcggctgctgctgccactgctgctctgagacaaggtggatgagtctgctgccggatcaagaaaaagaactgtatttcagaaaaaagaaactacagttttag

SEQ ID NO: 673960 - DNA, 120 bp, Artificial Sequence
  ENSG00000185917_43 (sequence is synthesized)
atgcttgtgtttatgtctcaagaggttggaatcaactttgttcttaacattaacactatataatttttttccccatttggagatgtgtattttcagttttaataaaaatatcaaaacctt

SEQ ID NO: 673961 - DNA, 120 bp, Artificial Sequence
  ENSG00000185917_44 (sequence is synthesized)
aaatctacctatagtccttgtttctggaggttgttgccatggtgagatttgatttcatgtatgttcttttgtgatctattaacctagccatcatcattgattttattatttttgagtcag

SEQ ID NO: 673962 - DNA, 76 bp, Artificial Sequence
  ENSG00000185917_45 (sequence is synthesized)
aacctagccatcatcattgattttattatttttgagtcagagtcggttggaacctccgcctcccaggttcaggtga

SEQ ID NO: 673963 - DNA, 62 bp, Artificial Sequence
  ENSG00000185917_46 (sequence is synthesized)
accaccatgcctggctactggcctcaagtgatctacctgtctcagcctcccaaagtgctagg

SEQ ID NO: 673964 - DNA, 120 bp, Artificial Sequence
  ENSG00000185917_47 (sequence is synthesized)
taggattgtaggagtgagccactgtgcctggcctggttttattattactatttttaatatttgttttttcatatgatagagacagtgtcttgttatgttgcccaggctggtcttcaactc

SEQ ID NO: 673965 - DNA, 120 bp, Artificial Sequence
  ENSG00000185917_48 (sequence is synthesized)
ctgggctcgagatcctcctgcctcaacctcccagagtgttggtattataggcgggagctaccgtgcttggcccagttttattattttaaaatagtaagttagccattacacttaagatgt

SEQ ID NO: 673966 - DNA, 120 bp, Artificial Sequence
  ENSG00000185917_49 (sequence is synthesized)
gaaaattccaaatatagtgttaaaaaagtacatagaagactgatttttccctttctgaaactgtagagaagcagttttctaggccatgaaaaaacggcaagagccttattaaatatataa

SEQ ID NO: 673967 - DNA, 120 bp, Artificial Sequence
  ENSG00000185917_50 (sequence is synthesized)
tttgaagcatttttaaatatagatttgattggagatagaaacttggccaagctgttactactccatcttataggcagaataataatgtgatttctcaaaataaaaatagaaaagcaaaaa

SEQ ID NO: 673968 - DNA, 120 bp, Artificial Sequence
  ENSG00000185917_51 (sequence is synthesized)
ctgggtcttgctgctagaaaaccagcttcgagattggcttcatgttttcaaaatcctgataaatttaatattgatgtccgcgaagtattcatttgttgaataaattaatttgagcaaaaa

SEQ ID NO: 673969 - DNA, 120 bp, Artificial Sequence
  ENSG00000185917_52 (sequence is synthesized)
ttatattttagttatatttacatttttaaaataaaatagaaaaatcccttattaccctgcttctccaaatagctctgttaatttgtgcatatttactttaagttttttgtagttgcagtc

SEQ ID NO: 673970 - DNA, 120 bp, Artificial Sequence
  ENSG00000185917_53 (sequence is synthesized)
actaatatccagactgctttgaattctggtttggaaaaagctcagtattgtaaacctttcctcatgtttttgcagggcctctacttttgttgactgtaaattttcaacagtcatgctgat

SEQ ID NO: 673971 - DNA, 120 bp, Artificial Sequence
  ENSG00000185917_54 (sequence is synthesized)
gtcctaatgacctgcttgtttttggtggatttacttagtgggagcaggagctgaggttatgcgtgtttagtcctccagccttgaaattcttacagcctttcagggactcagtactgatgt

SEQ ID NO: 673972 - DNA, 120 bp, Artificial Sequence
  ENSG00000185917_55 (sequence is synthesized)
gactgaattggacttgaagagtagatttcctttgtgtgaattaggtggaactgtttatgcatgtctgggttgctaaagggaaaggaagtgagttgagaagggaagggagacatacttttg

SEQ ID NO: 673973 - DNA, 120 bp, Artificial Sequence
  ENSG00000185917_56 (sequence is synthesized)
gcggccgccggcgcctaggtgagctagtaggacttccgggtcgggcctccagttgcccgggtaacgggagcagagtcggcgggattgagcatttccacagaaattacagttttgtccttt

SEQ ID NO: 673974 - DNA, 120 bp, Artificial Sequence
  ENSG00000185917_57 (sequence is synthesized)
gtctgtctgacacatttcatcagacatgttcttttaaaaatggtaatccgattatatagtggttttaatcaccatttgttctctccttgcctgatagtgaatgagagccacaagtctgaa

SEQ ID NO: 673975 - DNA, 120 bp, Artificial Sequence
  ENSG00000185917_58 (sequence is synthesized)
ggcctagccttactcttactggctgtaatttcagtgttgaagtaaaaacaacgaagttttgactgatattttgagaagttttcattgcattgggtcagaagatagaatggaagaaaagga

SEQ ID NO: 673976 - DNA, 120 bp, Artificial Sequence
  ENSG00000185917_59 (sequence is synthesized)
aaactgctaaggaaataaatacagtattaaaggatggaaatgtttatactgagacgttgtcactggcactaaagaaaataggattagagagcaatgaataaaaaatatttattaagcacc

SEQ ID NO: 673977 - DNA, 120 bp, Artificial Sequence
  ENSG00000185920_0 (sequence is synthesized)
gaactggatgtgggcagcggcggccgcagagacctcgggacccccgcgcaatgtggcaatggaaggcgcagggtctgactccccggcagcggccgcggccgcagcggcagcagcgcccgc

SEQ ID NO: 673978 - DNA, 120 bp, Artificial Sequence
  ENSG00000185920_1 (sequence is synthesized)
cgtgtgagcagcagcagcggctggtctgtcaaccggagcccgagcccgagcagcctgcggccagcagcgtcctcgcaagccgagcgcccaggcgcgccaggagcccgcagcagcggcagc

SEQ ID NO: 673979 - DNA, 80 bp, Artificial Sequence
  ENSG00000185920_2 (sequence is synthesized)
cggcggcggcggcaacatggcctcggctggtaacgccgccgagccccaggaccgcggcggcggcggcagcggctgtatcg

SEQ ID NO: 673980 - DNA, 120 bp, Artificial Sequence
  ENSG00000185920_3 (sequence is synthesized)
atcggtgccccgggacggccggctggaggcgggaggcgcagacggacgggggggctgcgccgtgctgccgcgccggaccgggactatctgcaccggcccagctactgcgacgccgccttc

SEQ ID NO: 673981 - DNA, 120 bp, Artificial Sequence
  ENSG00000185920_4 (sequence is synthesized)
gctctggagcagatttccaaggggaaggctactggccggaaagcgccgctgtggctgagagcgaagtttcagagactcttatttaaactgggttgttacattcaaaaaaactgcggcaag

SEQ ID NO: 673982 - DNA, 120 bp, Artificial Sequence
  ENSG00000185920_5 (sequence is synthesized)
ttcttggttgtgggcctcctcatatttggggccttcgcggtgggattaaaagcagcgaacctcgagaccaacgtggaggagctgtgggtggaagttggaggacgagtaagtcgtgaatta

SEQ ID NO: 673983 - DNA, 120 bp, Artificial Sequence
  ENSG00000185920_6 (sequence is synthesized)
aattatactcgccagaagattggagaagaggctatgtttaatcctcaactcatgatacagacccctaaagaagaaggtgctaatgtcctgaccacagaagcgctcctacaacacctggac

SEQ ID NO: 673984 - DNA, 120 bp, Artificial Sequence
  ENSG00000185920_7 (sequence is synthesized)
tcggcactccaggccagccgtgtccatgtatacatgtacaacaggcagtggaaattggaacatttgtgttacaaatcaggagagcttatcacagaaacaggttacatggatcagataata

SEQ ID NO: 673985 - DNA, 120 bp, Artificial Sequence
  ENSG00000185920_8 (sequence is synthesized)
gaatatctttacccttgtttgattattacacctttggactgcttctgggaaggggcgaaattacagtctgggacagcatacctcctaggtaaacctcctttgcggtggacaaacttcgac

SEQ ID NO: 673986 - DNA, 120 bp, Artificial Sequence
  ENSG00000185920_9 (sequence is synthesized)
cctttggaattcctggaagagttaaagaaaataaactatcaagtggacagctgggaggaaatgctgaataaggctgaggttggtcatggttacatggaccgcccctgcctcaatccggcc

SEQ ID NO: 673987 - DNA, 120 bp, Artificial Sequence
  ENSG00000185920_10 (sequence is synthesized)
gatccagactgccccgccacagcccccaacaaaaattcaaccaaacctcttgatatggcccttgttttgaatggtggatgtcatggcttatccagaaagtatatgcactggcaggaggag

SEQ ID NO: 673988 - DNA, 120 bp, Artificial Sequence
  ENSG00000185920_11 (sequence is synthesized)
ttgattgtgggtggcacagtcaagaacagcactggaaaactcgtcagcgcccatgccctgcagaccatgttccagttaatgactcccaagcaaatgtacgagcacttcaaggggtacgag

SEQ ID NO: 673989 - DNA, 120 bp, Artificial Sequence
  ENSG00000185920_12 (sequence is synthesized)
tatgtctcacacatcaactggaacgaggacaaagcggcagccatcctggaggcctggcagaggacatatgtggaggtggttcatcagagtgtcgcacagaactccactcaaaaggtgctt

SEQ ID NO: 673990 - DNA, 120 bp, Artificial Sequence
  ENSG00000185920_13 (sequence is synthesized)
tccttcaccaccacgaccctggacgacatcctgaaatccttctctgacgtcagtgtcatccgcgtggccagcggctacttactcatgctcgcctatgcctgtctaaccatgctgcgctgg

SEQ ID NO: 673991 - DNA, 120 bp, Artificial Sequence
  ENSG00000185920_14 (sequence is synthesized)
gactgctccaagtcccagggtgccgtggggctggctggcgtcctgctggttgcactgtcagtggctgcaggactgggcctgtgctcattgatcggaatttcctttaacgctgcaacaact

SEQ ID NO: 673992 - DNA, 120 bp, Artificial Sequence
  ENSG00000185920_15 (sequence is synthesized)
caggttttgccatttctcgctcttggtgttggtgtggatgatgtttttcttctggcccacgccttcagtgaaacaggacagaataaaagaatcccttttgaggacaggaccggggagtgc

SEQ ID NO: 673993 - DNA, 120 bp, Artificial Sequence
  ENSG00000185920_16 (sequence is synthesized)
ctgaagcgcacaggagccagcgtggccctcacgtccatcagcaatgtcacagccttcttcatggccgcgttaatcccaattcccgctctgcgggcgttctccctccaggcagcggtagta

SEQ ID NO: 673994 - DNA, 120 bp, Artificial Sequence
  ENSG00000185920_17 (sequence is synthesized)
gtggtgttcaattttgccatggttctgctcatttttcctgcaattctcagcatggatttatatcgacgcgaggacaggagactggatattttctgctgttttacaagcccctgcgtcagc

SEQ ID NO: 673995 - DNA, 120 bp, Artificial Sequence
  ENSG00000185920_18 (sequence is synthesized)
agagtgattcaggttgaacctcaggcctacaccgacacacacgacaatacccgctacagccccccacctccctacagcagccacagctttgcccatgaaacgcagattaccatgcagtcc

SEQ ID NO: 673996 - DNA, 120 bp, Artificial Sequence
  ENSG00000185920_19 (sequence is synthesized)
actgtccagctccgcacggagtacgacccccacacgcacgtgtactacaccaccgctgagccgcgctccgagatctctgtgcagcccgtcaccgtgacacaggacaccctcagctgccag

SEQ ID NO: 673997 - DNA, 120 bp, Artificial Sequence
  ENSG00000185920_20 (sequence is synthesized)
agcccagagagcaccagctccacaagggacctgctctcccagttctccgactccagcctccactgcctcgagcccccctgtacgaagtggacactctcatcttttgctgagaagcactat

SEQ ID NO: 673998 - DNA, 120 bp, Artificial Sequence
  ENSG00000185920_21 (sequence is synthesized)
gctcctttcctcttgaaaccaaaagccaaggtagtggtgatcttcctttttctgggcttgctgggggtcagcctttatggcaccacccgagtgagagacgggctggaccttacggacatt

SEQ ID NO: 673999 - DNA, 120 bp, Artificial Sequence
  ENSG00000185920_22 (sequence is synthesized)
gtacctcgggaaaccagagaatatgactttattgctgcacaattcaaatacttttctttctacaacatgtatatagtcacccagaaagcagactacccgaatatccagcacttactttac

SEQ ID NO: 674000 - DNA, 120 bp, Artificial Sequence
  ENSG00000185920_23 (sequence is synthesized)
gacctacacaggagtttcagtaacgtgaagtatgtcatgttggaagaaaacaaacagcttcccaaaatgtggctgcactacttcagagactggcttcagggacttcaggatgcatttgac

SEQ ID NO: 674001 - DNA, 120 bp, Artificial Sequence
  ENSG00000185920_24 (sequence is synthesized)
agtgactgggaaaccgggaaaatcatgccaaacaattacaagaatggatcagacgatggagtccttgcctacaaactcctggtgcaaaccggcagccgcgataagcccatcgacatcagc

SEQ ID NO: 674002 - DNA, 120 bp, Artificial Sequence
  ENSG00000185920_25 (sequence is synthesized)
cagttgactaaacagcgtctggtggatgcagatggcatcattaatcccagcgctttctacatctacctgacggcttgggtcagcaacgaccccgtcgcgtatgctgcctcccaggccaac

SEQ ID NO: 674003 - DNA, 120 bp, Artificial Sequence
  ENSG00000185920_26 (sequence is synthesized)
atccggccacaccgaccagaatgggtccacgacaaagccgactacatgcctgaaacaaggctgagaatcccggcagcagagcccatcgagtatgcccagttccctttctacctcaacggc

SEQ ID NO: 674004 - DNA, 120 bp, Artificial Sequence
  ENSG00000185920_27 (sequence is synthesized)
ttgcgggacacctcagactttgtggaggcaattgaaaaagtaaggaccatctgcagcaactatacgagcctggggctgtccagttaccccaacggctaccccttcctcttctgggagcag

SEQ ID NO: 674005 - DNA, 120 bp, Artificial Sequence
  ENSG00000185920_28 (sequence is synthesized)
tacatcggcctccgccactggctgctgctgttcatcagcgtggtgttggcctgcacattcctcgtgtgcgctgtcttccttctgaacccctggacggccgggatcattgtgatggtcctg

SEQ ID NO: 674006 - DNA, 120 bp, Artificial Sequence
  ENSG00000185920_29 (sequence is synthesized)
gcgctgatgacggtcgagctgttcggcatgatgggcctcatcggaatcaagctcagtgccgtgcccgtggtcatcctgatcgcttctgttggcataggagtggagttcaccgttcacgtt

SEQ ID NO: 674007 - DNA, 120 bp, Artificial Sequence
  ENSG00000185920_30 (sequence is synthesized)
gctttggcctttctgacggccatcggcgacaagaaccgcagggctgtgcttgccctggagcacatgtttgcacccgtcctggatggcgccgtgtccactctgctgggagtgctgatgctg

SEQ ID NO: 674008 - DNA, 120 bp, Artificial Sequence
  ENSG00000185920_31 (sequence is synthesized)
gcgggatctgagttcgacttcattgtcaggtatttctttgctgtgctggcgatcctcaccatcctcggcgttctcaatgggctggttttgcttcccgtgcttttgtctttctttggacca

SEQ ID NO: 674009 - DNA, 120 bp, Artificial Sequence
  ENSG00000185920_32 (sequence is synthesized)
tatcctgaggtgtctccagccaacggcttgaaccgcctgcccacaccctcccctgagccaccccccagcgtggtccgcttcgccatgccgcccggccacacgcacagcgggtctgattcc

SEQ ID NO: 674010 - DNA, 120 bp, Artificial Sequence
  ENSG00000185920_33 (sequence is synthesized)
ttcccagacgacagtgtcaggcctcagcgaggagcttcggcactacgaggcccagcagggcgcgggaggccctgcccaccaagtgatcgtggaagccacagaaaaccccgtcttcgccca

SEQ ID NO: 674011 - DNA, 120 bp, Artificial Sequence
  ENSG00000185920_34 (sequence is synthesized)
ctccactgtggtccatcccgaatccaggcatcacccaccctcgaacccgagacagcagccccacctggactcagggtccctgcctcccggacggcaaggccagcagccccgcagggaccc

SEQ ID NO: 674012 - DNA, 120 bp, Artificial Sequence
  ENSG00000185920_35 (sequence is synthesized)
ccccagagaaggcttgtggccacccccctacagaccgcgcagagacgcttttgaaatttctactgaagggcattctggccctagcaatagggcccgctggggccctcgcggggcccgttc

SEQ ID NO: 674013 - DNA, 120 bp, Artificial Sequence
  ENSG00000185920_36 (sequence is synthesized)
tcacaaccctcggaacccagcgtccactgccatgggcagctccgtgcccggctactgccagcccatcaccactgtgacggcttctgcctccgtgactgtcgccgtgcacccgccgcctgt

SEQ ID NO: 674014 - DNA, 120 bp, Artificial Sequence
  ENSG00000185920_37 (sequence is synthesized)
ccctgggcctgggcggaacccccgagggggactctgcccaggctaccctgagactgaccacggcctgtttgaggacccccacgtgcctttccacgtccggtgtgagaggagggattcgaa

SEQ ID NO: 674015 - DNA, 120 bp, Artificial Sequence
  ENSG00000185920_38 (sequence is synthesized)
ggtggaagtcattgagctgcaggacgtggaatgcgaggagaggccccggggaagcagctccaactgagggtgattaaaatctgaagcaaagaggccaaagattggaaaccccccaccccc

SEQ ID NO: 674016 - DNA, 120 bp, Artificial Sequence
  ENSG00000185920_39 (sequence is synthesized)
acctctttccagaactgcttgaagagaactggttggagttatggaaaagatgccctgtgccaggacagcagttcattgttactgtaaccgattgtattattttgttaaatatttctataa

SEQ ID NO: 674017 - DNA, 120 bp, Artificial Sequence
  ENSG00000185920_40 (sequence is synthesized)
atatttaagagatgtacacatgtgtaatataggaaggaaggatgtaaagtggtatgatctggggcttctccactcctgccccagagtgtggaggccacagtggggcctctccgtatttgt

SEQ ID NO: 674018 - DNA, 120 bp, Artificial Sequence
  ENSG00000185920_41 (sequence is synthesized)
gcattgggctccgtgccacaaccaagcttcattagtcttaaatttcagcatatgttgctgctgcttaaatattgtataatttacttgtataattctatgcaaatattgcttatgtaatag

SEQ ID NO: 674019 - DNA, 120 bp, Artificial Sequence
  ENSG00000185920_42 (sequence is synthesized)
gattattttgtaaaggtttctgtttaaaatattttaaatttgcatatcacaaccctgtggtagtatgaaatgttactgttaactttcaaacacgctatgcgtgataatttttttgtttaa

SEQ ID NO: 674020 - DNA, 120 bp, Artificial Sequence
  ENSG00000185920_43 (sequence is synthesized)
tgagcagatatgaagaaagcacgttaatcctggtggcttctctaggtgtcgttgtgtgcggtcctcttgtttggctgtgcgtgtgaacacgtgtgtgagttcaccatgtactgtactgtg

SEQ ID NO: 674021 - DNA, 120 bp, Artificial Sequence
  ENSG00000185920_44 (sequence is synthesized)
attttttttttgtcttgttttgtttctctacactgtctgtaacctgtagtaggctctgacctagtcaggctggaagcgtcaggatatcttttcttcgtgctggtgagggctggccctaaa

SEQ ID NO: 674022 - DNA, 120 bp, Artificial Sequence
  ENSG00000185920_45 (sequence is synthesized)
catccacctaatcctttcaaatcagcccggcaaaagctagactctcctcgtgtctacggcatctcttatgatcattggctgccatccaggaccccaatttgtgcttcagggggataatct

SEQ ID NO: 674023 - DNA, 120 bp, Artificial Sequence
  ENSG00000185920_46 (sequence is synthesized)
ccttctctcggatcattgtgatggatgctggaacctcagggtatggagctcacatcagttcatcatggtgggtgttagagaattcggtgacatgcctagtgctgagccttggctgggcca

SEQ ID NO: 674024 - DNA, 120 bp, Artificial Sequence
  ENSG00000185920_47 (sequence is synthesized)
tgagagtctgtatactctaaaaagcatgcagcatggtgcccctcttctgaccaacacacacacgacccctcccccaacacccccaaattcaagagtggatgtggccctgtcacaggtaga

SEQ ID NO: 674025 - DNA, 120 bp, Artificial Sequence
  ENSG00000185920_48 (sequence is synthesized)
aaaacctatttagttaattctttcttggcccacagtctcccagaaatgatgttttgagtccctatagtttaaactccctctcttaaatggagcagctggttgaggctttctagatctgtt

SEQ ID NO: 674026 - DNA, 120 bp, Artificial Sequence
  ENSG00000185920_49 (sequence is synthesized)
tgcatcttctttaaaactaagtggtgagcatgcattgtggtgtagaggcaggcattatgtaggataagagctccggggggattcttcatgcaccagtgtttagggtacgtgcttcctaag

SEQ ID NO: 674027 - DNA, 120 bp, Artificial Sequence
  ENSG00000185920_50 (sequence is synthesized)
taaatccaaacattgtctccatcctccccgtcattagtgctctttcaatgtgatgtgggaaagcaggaggatggacacaccccactgaaagatgtaggcaggggcaggtctctcaaccag

SEQ ID NO: 674028 - DNA, 120 bp, Artificial Sequence
  ENSG00000185920_51 (sequence is synthesized)
gcatatttttaaaagttgcttctgtactggttctcttcttttgctctgaggtgtgggctccctcatctcgtaaccagagaccagcacatgtcagggaagcacccagtgtcggctccccat

SEQ ID NO: 674029 - DNA, 120 bp, Artificial Sequence
  ENSG00000185920_52 (sequence is synthesized)
ccaaatccacaccagcaccttgttacagacaagaagtcagaggaaagggcggggtccctgcagggctgaagcctaagctactgtgaggcgctcacgagtggcagctcctgttactccctt

SEQ ID NO: 674030 - DNA, 120 bp, Artificial Sequence
  ENSG00000185920_53 (sequence is synthesized)
ttaaattacctgggaaatcttaacagaaaggtaatgggcccccagaaatacccacagcatagtgacctcagaccctgatactcaccacaaaacttttaagatgctgattgggagccgctt

SEQ ID NO: 674031 - DNA, 120 bp, Artificial Sequence
  ENSG00000185920_54 (sequence is synthesized)
gtggctgctgggtgtgtgtgtgtgtgtgtgcgtgcgtgcgtgtgtgtgtgtctctgctggggaccctggccacccccctgctgctgtcttggtgcctgtcacccacatggtctgccatcc

SEQ ID NO: 674032 - DNA, 120 bp, Artificial Sequence
  ENSG00000185920_55 (sequence is synthesized)
taacacccagctctgctcagaaaacgtcctgcgtggaggagggatgatgcagaattctgaagtcgacttccctctggctcctggcgtgccctcgctcccttcctgagcccagctcgtgtt

SEQ ID NO: 674033 - DNA, 120 bp, Artificial Sequence
  ENSG00000185920_56 (sequence is synthesized)
gcgccggaggctgcgcggcccctgatttctgcatggtgtagaactttctccaatagtcacattggcaaagggagaactggggtgggcggggggtggggctggcagggaattagaatttct

SEQ ID NO: 674034 - DNA, 120 bp, Artificial Sequence
  ENSG00000185920_57 (sequence is synthesized)
ctctctcttttaatagttttattttgtctgtcctgtttgttcatttggatgttttaatttttaaaaaaaaaaaaactttgctgatatttataattttgtatcataagaatgttttcctct

SEQ ID NO: 674035 - DNA, 120 bp, Artificial Sequence
  ENSG00000185920_58 (sequence is synthesized)
acagtatttgtcatgccagtttataacaaaaaaaaatgcagggattttatttctattggaaacattacagctatgttttacttttggacagaatttttatttgtatagagtgcttactaa

SEQ ID NO: 674036 - DNA, 120 bp, Artificial Sequence
  ENSG00000185920_59 (sequence is synthesized)
tgttaaatagttcagagtatataacatttacattaaggactcatggtaggttttagggtaaggagtttaaaggaaataaatattcaaactgggtctcattgccaattttggtggaaatga

SEQ ID NO: 674037 - DNA, 120 bp, Artificial Sequence
  ENSG00000185920_60 (sequence is synthesized)
gtttgtgtcatttcaattacaaagataaaagtatgccatataatttatttatatgaagatttatttttgtagtgtacatagtagtcatcaagtcttttgacagaagtatatttttaaaga

SEQ ID NO: 674038 - DNA, 120 bp, Artificial Sequence
  ENSG00000185920_61 (sequence is synthesized)
atttatatgtgatgaatccataatgtctggaactttgctgagacatgagtgggcacagttttcattgtaaattacagcaaggaaagaaaatgtttaacagtgttaagagagtcagagcag

SEQ ID NO: 674039 - DNA, 120 bp, Artificial Sequence
  ENSG00000185920_62 (sequence is synthesized)
agtggatattcatgcgattatgaagtgtttattagttaccattggcgacctagcatgcttctcatttcaaaccttggaaggtgaaaatgtacaaactctctaaataattaatgttcaaac

SEQ ID NO: 674040 - DNA, 120 bp, Artificial Sequence
  ENSG00000185920_63 (sequence is synthesized)
actgatagaaattctaacatgaataaaaaataatataacttgttggttatatctttgtttgtagaatgctttttttctttaaaatacttgggagagacagttagtgttggagccatcaga

SEQ ID NO: 674041 - DNA, 120 bp, Artificial Sequence
  ENSG00000185920_64 (sequence is synthesized)
aactgttgtttcatcttgctgaccttgtgacactcttcttttttgctctatctgatggagagagttttaggttttcctcctttttgttttgtataaatagtgggtataagcatagctctg

SEQ ID NO: 674042 - DNA, 120 bp, Artificial Sequence
  ENSG00000185920_65 (sequence is synthesized)
ttacatggatgtattacaaagtgggggctgagcttttagtgtgatcatcacccaaatagtgtacattgtacccattaattaatttcttatcacctgaccctatttttgttttctcatacc

SEQ ID NO: 674043 - DNA, 120 bp, Artificial Sequence
  ENSG00000185920_66 (sequence is synthesized)
aagaaacttcctaagttaaccatcaaaattagtccttctgtcatctctcttagcatacttatttcccttatgtgatgcctaataatgagggaacataaataaagccaaattcaaagatga

SEQ ID NO: 674044 - DNA, 120 bp, Artificial Sequence
  ENSG00000185920_67 (sequence is synthesized)
acccaggagggctgtgctgatagcacgttcctcgagtttactttgctttccttgagtttattgtaaaggggtaaagttttcggatccgtcacgtgaccctgacaggtcctgcctatggcg

SEQ ID NO: 674045 - DNA, 120 bp, Artificial Sequence
  ENSG00000185920_68 (sequence is synthesized)
cggcagaccacccacgccgagggccatggaactgcttaatagaaacaggcttgtaattgtgagtccgcgctgcactccgccgaaagcctccggcggcccagcgcgccggggtttttacac

SEQ ID NO: 674046 - DNA, 120 bp, Artificial Sequence
  ENSG00000185920_69 (sequence is synthesized)
aattcagctcacacagcctctccccacgctatggaaatgcgtcgggagtgaactccggcggccgcgctcaccacgtggatccccacttactaccattctcggcgggggtccagttggggg

SEQ ID NO: 674047 - DNA, 120 bp, Artificial Sequence
  ENSG00000185920_70 (sequence is synthesized)
aacccgcaatatgttgttccaaagagcgctcgcccctagcgcccgtccccgagggtgatggacagagcaggactggtttgctggctcctgaaccttgggctccatcgctgggattacgca

SEQ ID NO: 674048 - DNA, 120 bp, Artificial Sequence
  ENSG00000185920_71 (sequence is synthesized)
actcacacctctccaggaaaagcagcagacaaatggggattgaaaaattcaaaccctccctctggtcctgggaggaaagggctgtctgaggtccgcagggggtggaggggaaggctactg

SEQ ID NO: 674049 - DNA, 120 bp, Artificial Sequence
  ENSG00000185920_72 (sequence is synthesized)
gaaggcgagcacccagacgggggcccgccggggccgcggccagcgccggggaaatgccgcgccggggagcagcctgcgccggcctgagcccttccctttgcactcggctgttttttacgt

SEQ ID NO: 674050 - DNA, 120 bp, Artificial Sequence
  ENSG00000185920_73 (sequence is synthesized)
ggaggagaagaagaagaagaaaacggaggagaagaaaaagacgacaggggagacaaagagacccgcagcgacaaggcaagggggagacgagggaagactgggagaagacggaggagcgga

SEQ ID NO: 674051 - DNA, 120 bp, Artificial Sequence
  ENSG00000185920_74 (sequence is synthesized)
ggacgaggaaaggggggccagggaaaaaaaaggaattgatgtgaaatccaagcccagcgtccgcgccatcggcacccgcgctccgagcaggggttgacggccggctatggggaaggctac

SEQ ID NO: 674052 - DNA, 120 bp, Artificial Sequence
  ENSG00000185920_75 (sequence is synthesized)
gcagccaagggacctagagccaggcaaagaggaggacaaggttctcctggggttctcggcatccccgaggggctgtggcgctcgggcacatcccacgctggaccccagtgaccttttatc

SEQ ID NO: 674053 - DNA, 120 bp, Artificial Sequence
  ENSG00000185920_76 (sequence is synthesized)
cccagagcaaggctgatgtgtccaagctttgtcatccttggggaaccagtccagctccacactgctctcttcccccactgctaacctgcggagggtcggtgcagcgccacaaggacacaa

SEQ ID NO: 674054 - DNA, 120 bp, Artificial Sequence
  ENSG00000185920_77 (sequence is synthesized)
acagcaccaccttttaccaatatttgccagtctttatggaggtgcatgccacagcgaattggtcacatgggaacgcatccgtgtaaccagcccccagatgaagggagaggtcacaagcag

SEQ ID NO: 674055 - DNA, 120 bp, Artificial Sequence
  ENSG00000185920_78 (sequence is synthesized)
cccccagggacacctcaggcccacaccccactctcgtgatttctaataccaaggttactgctgcctgcttttgtactttataaatacggacttgcacacctcttactctgttcaacttcc

SEQ ID NO: 674056 - DNA, 120 bp, Artificial Sequence
  ENSG00000185920_79 (sequence is synthesized)
aatcatgtttctgccaggcaaacttgccctgttggtctgtaacaagtattgtagggaagcaactacctggtacagttttgcagaatgtgaagtggcatccctgtggggagccaggttgtc

SEQ ID NO: 674057 - DNA, 120 bp, Artificial Sequence
  ENSG00000185920_80 (sequence is synthesized)
ctggggccactgcaagcatggccaatgcattcttagtgtttgtcacctacatgcttcaggagaagatgtgagggtctgtgccattaaattacactcttaagctgagatgggtccagagta

SEQ ID NO: 674058 - DNA, 120 bp, Artificial Sequence
  ENSG00000185920_81 (sequence is synthesized)
attttatgcattggaatgaactttaagaacatgtagttcaacccatcccatgttttaggtgagaaaactgggaattagactaattagagcatttgtccaagttcatgcagttatgaaatg

SEQ ID NO: 674059 - DNA, 120 bp, Artificial Sequence
  ENSG00000185920_82 (sequence is synthesized)
agagagccaggtttcaaagcctttttctggcttcaagcccattcatttttctaatgcacaatgatgtccttctcaagtgtaaatgagagttgatcaagtaatataaagtgagaacctact

SEQ ID NO: 674060 - DNA, 120 bp, Artificial Sequence
  ENSG00000185920_83 (sequence is synthesized)
catgccggatagtctatgttgatgctgtatagaattaaaatataaatatgtccatggatgtgtggctaggtggaggatggcggagatatgggtaagttaggcacagctctcaaagagagg

SEQ ID NO: 674061 - DNA, 120 bp, Artificial Sequence
  ENSG00000185920_84 (sequence is synthesized)
aaagacatcagtatagatagacatggacaaaggaaacgtgggcggtccccatgacagctgcgccaggtttcagcaggagatctgcccagccagggctctagagttcaggagaagggggtc

SEQ ID NO: 674062 - DNA, 120 bp, Artificial Sequence
  ENSG00000185920_85 (sequence is synthesized)
attttcaacaagcttaacatgggggtgacatttcaacagggcgctgagagacaggaaggcacagggaagaggacacagtaagctccttgggtgaagacaggcctcccttaggaggccaag

SEQ ID NO: 674063 - DNA, 120 bp, Artificial Sequence
  ENSG00000185920_86 (sequence is synthesized)
ctttcttttttttttttttttttccttcccttggacttttccatccccactcttccagattttcttttttttttcgttagactgatctccctaacacacctggaaagatatgggcttata

SEQ ID NO: 674064 - DNA, 120 bp, Artificial Sequence
  ENSG00000185920_87 (sequence is synthesized)
atctccctaacacacctggaaagatatgggcttatataacacttttctagagacaataaaactcccgattaattcttttttttttgagagatagggtcttgcttatctaggctggagtgc

SEQ ID NO: 674065 - DNA, 120 bp, Artificial Sequence
  ENSG00000185920_88 (sequence is synthesized)
ctgtcacccaggctggagggcagtggcataatcacagctcactgcctcagccttccaggatcaagtaattttcttgtctgtatagctgagatgacaggcatgcaccactgcgcccagcta

SEQ ID NO: 674066 - DNA, 120 bp, Artificial Sequence
  ENSG00000185920_89 (sequence is synthesized)
tatagctgagatgacaggcatgcaccactgcgcccagctaatttttaaagtttatttatttatttattcattcattcatttcattcattcattatagagatagggtctcactttgctgcc

SEQ ID NO: 674067 - DNA, 84 bp, Artificial Sequence
  ENSG00000185920_90 (sequence is synthesized)
tcattcattcattatagagatagggtctcactttgctgcccaggctgatttcaaactcctggcttcacgctgtcctcctgcctg

SEQ ID NO: 674068 - DNA, 120 bp, Artificial Sequence
  ENSG00000185920_91 (sequence is synthesized)
ttcacatttctgtaagataggaatagaagagactgtgaagttagaatttgacccacctggcacatgttgttgtttataatattaatggttaagagcaggagagttcattttgaatactac

SEQ ID NO: 674069 - DNA, 120 bp, Artificial Sequence
  ENSG00000185920_92 (sequence is synthesized)
ctattaaggacatgatctgccagtaaaacatctccgcacctgagtatgtgtcaatactttgcaaacctaatttaatccccgcctattttgaatttatgataattcagctgggctgccctg

SEQ ID NO: 674070 - DNA, 120 bp, Artificial Sequence
  ENSG00000185920_93 (sequence is synthesized)
aagttgtttaatgtatgtagaaaagcagattaatggtgtaaacaagattattgggagaacacttaagaaaacaagacttttcaagtactttggtagcattcatttacataaacaccctac

SEQ ID NO: 674071 - DNA, 120 bp, Artificial Sequence
  ENSG00000185920_94 (sequence is synthesized)
atgttaattacgattgagtattatctattcattaaagcaagcttgctgggtctctacttggcaaaagctctgctcgttttgacagatgcttaaaagtgatcgaaattgcagttcttttta

SEQ ID NO: 674072 - DNA, 120 bp, Artificial Sequence
  ENSG00000185920_95 (sequence is synthesized)
gtaagtgtgtgatcatgctttctgatgtctgtgacttctctaggactcagtgtttctaatgttgcttatcattgtttgttccatttcagttttgaacaagaaataaaaacattgaaattc

SEQ ID NO: 674073 - DNA, 62 bp, Artificial Sequence
  ENSG00000185920_96 (sequence is synthesized)
gttcgacttcattgtcaggtaagcaggcgtgtgcaaggagacatgttttagaaatcattgtg

SEQ ID NO: 674074 - DNA, 84 bp, Artificial Sequence
  ENSG00000185920_97 (sequence is synthesized)
tattgttattagctcaggtgatcttcgttgcttatttccttctgtatctggtagattgcagcacctcgtcatcgtgactctgct

SEQ ID NO: 674075 - DNA, 120 bp, Artificial Sequence
  ENSG00000185920_98 (sequence is synthesized)
tatctggtagattgcagcacctcgtcatcgtgactctgctttcttttgaacttgttaacgtagagatattcggaggtataaagacaagctctcttctagagctgtcttggggagtatctt

SEQ ID NO: 674076 - DNA, 120 bp, Artificial Sequence
  ENSG00000185920_99 (sequence is synthesized)
gaaaacagaaggtaaaggatttggggctggcagcaaagacaactctgcagcttgaagccaaaggatcacccaataggtggcccattattgtctcgggttagaaacactgcagaaagaaat

SEQ ID NO: 674077 - DNA, 120 bp, Artificial Sequence
  ENSG00000185920_100 (sequence is synthesized)
gccacatttgacctacgctccctctccttcaaactgtagaaaggaaaacttaaaaatacctaaaattgtcacctgactttattcttttaagaagtgaaaatgacgtgctcagatttcata

SEQ ID NO: 674078 - DNA, 120 bp, Artificial Sequence
  ENSG00000185920_101 (sequence is synthesized)
ttcgagtccccacaattaggaagcatttagcattggactttggtgtcaactcttgggaatctaagcctagtttggatctcaaggcaagtcgtttccagttgatttaattaagaatatgac

SEQ ID NO: 674079 - DNA, 120 bp, Artificial Sequence
  ENSG00000185920_102 (sequence is synthesized)
tttgtgaaatataaaagaacagtgagttttccttttgaaaagaatttgagaactgcagaggaggaaaccacttgcttctttgagcagcctccatggctttgtgagggacctgctcttgga

SEQ ID NO: 674080 - DNA, 120 bp, Artificial Sequence
  ENSG00000185920_103 (sequence is synthesized)
tagaactctgctactttatggagctctaaggccagaatcaccaataagtaaaagatagtccaggattagaaccatgacagggcagaaccagatgtgagaaatgattggtttgtttggcac

SEQ ID NO: 674081 - DNA, 120 bp, Artificial Sequence
  ENSG00000185920_104 (sequence is synthesized)
tgtgtgtgtgtgtgtcagagagagagatacgcttcttatcttcaagtaaaaagaagagggtttcaactagaagttttagccaaagttttattacgggaaagagatgagtccattggttgg

SEQ ID NO: 674082 - DNA, 120 bp, Artificial Sequence
  ENSG00000185920_105 (sequence is synthesized)
tattacgggaaagagatgagtccattggttggcctgtggcatagcccactgggcaatttggcatcatggaggccgccttcttagaatgagtgccaagcttgcttattgtagtttttgcat

SEQ ID NO: 674083 - DNA, 120 bp, Artificial Sequence
  ENSG00000185920_106 (sequence is synthesized)
agagtgaatggtgaagtggaatcgctgtagaccagcgcttctcacaccgatgtgctgaggaatcatctgagggtctaagtgcagggccgatttcggggggcgggaggtgggatgagggct

SEQ ID NO: 674084 - DNA, 120 bp, Artificial Sequence
  ENSG00000185920_107 (sequence is synthesized)
gggtctgcatctccagctacctccctgcaatgtccatggagctagacttctcagcacaaactactgctaagccagcaagccagttcctaaattcctgtttgccaataccaagtagagagt

SEQ ID NO: 674085 - DNA, 120 bp, Artificial Sequence
  ENSG00000185920_108 (sequence is synthesized)
tgcccaactgagttaaatgttttggtctgtgttttattttagttcttagtttgattttagcttttcctttgttcttagtatacactttttcaggcactaacgttatcattatgatataaa

SEQ ID NO: 674086 - DNA, 120 bp, Artificial Sequence
  ENSG00000185920_109 (sequence is synthesized)
agctcaatgtcaagtagagtttcttttgcatatttactttctcgtttaacacaaatataacaagcaccccataagtgccatttgcacaacagcaaataatggggacccccatatccctct

SEQ ID NO: 674087 - DNA, 120 bp, Artificial Sequence
  ENSG00000185920_110 (sequence is synthesized)
gtgtagcctaaggtcttttaggggagagacaagttcacaggcaaaaccaggggaaatgcaaggtgtgctggggtctcatgagttacaggagggtctcgctcagccttgtgggggatgctg

SEQ ID NO: 674088 - DNA, 120 bp, Artificial Sequence
  ENSG00000185920_111 (sequence is synthesized)
aatgaggaaacttagcctgaattagagcccccagctggaaacctggcagctggaatcccagcgctctcctctcagccggggttgttcccgcccagaaatatcagggttcctctttcaagc

SEQ ID NO: 674089 - DNA, 120 bp, Artificial Sequence
  ENSG00000185920_112 (sequence is synthesized)
atgagcagacactgtatatgctaagccgtcagaaatctaattggcctgtttatgcttcagctagatggatgggatgcaaatgtcttaatgtggctgctgatacatgccccagccgaaagt

SEQ ID NO: 674090 - DNA, 120 bp, Artificial Sequence
  ENSG00000185920_113 (sequence is synthesized)
tccagcagtttacattagaccaagacattggctgcttggtttttactaatgtagttcagaagtttctagtgtttacaatagctgtgaggtatttgtatttttatggggattctctctcct

SEQ ID NO: 674091 - DNA, 120 bp, Artificial Sequence
  ENSG00000185920_114 (sequence is synthesized)
ttcatctgatgtcaaaacatatatagacatggcagcactggttgcctgttccattttatgaaccagaggaccattaacagatagatatcttgccccccccttcccagaacatcctgagcc

SEQ ID NO: 674092 - DNA, 120 bp, Artificial Sequence
  ENSG00000185920_115 (sequence is synthesized)
tctcccctaccccagcccacttccatcagagttgccctagaaatcattagttccagaaacgcatccctgcgtggagtctgtgccctccagccatgcagagtgtctgccagaggctgtccc

SEQ ID NO: 674093 - DNA, 120 bp, Artificial Sequence
  ENSG00000185920_116 (sequence is synthesized)
tggctgacaggtttaccttggtattcatgaaggattccagaccttagccctcaatggtgggaaagcagaactacttctgcactctcctcctctgccatggtgctgcggcctttatgtttg

SEQ ID NO: 674094 - DNA, 120 bp, Artificial Sequence
  ENSG00000185920_117 (sequence is synthesized)
aattggctgacgcaaaacaagagtattcagagatgctaaattgttcaacaaaagattggcccgcagagcagccccgccattgtggagtgccctcacccagcacaatgccccagctcccac

SEQ ID NO: 674095 - DNA, 120 bp, Artificial Sequence
  ENSG00000185920_118 (sequence is synthesized)
agaatgggcagcattttctttgcagaaagctggttcctgtgttctaaaaaggttgcaattggagctatttggtaaaactggaactcacagaattctaggcagaaagttgtgattaatgaa

SEQ ID NO: 674096 - DNA, 120 bp, Artificial Sequence
  ENSG00000185920_119 (sequence is synthesized)
aggccagggaaagccttacctgatatgctagagacttaattagagattctgccgtaagatgcagaagcatttcacagtggattagcagcctgcagaagtgggctgcttttcctcctgggc

SEQ ID NO: 674097 - DNA, 120 bp, Artificial Sequence
  ENSG00000185920_120 (sequence is synthesized)
taaattgtttaaattctacacccttcacttcatttgtttgcttctgctgggttttcacgagcggggcccctcggcattgtgtttgtgctttcagtctgcccagccattcaggtcgcattc

SEQ ID NO: 674098 - DNA, 120 bp, Artificial Sequence
  ENSG00000185920_121 (sequence is synthesized)
catatttttgtgtttgtgtaacacattcataaataacattacatgccatcagagttcagcaaattaacaaactaattttttttttcttcccttcatgaactaacactttgggttgtggaa

SEQ ID NO: 674099 - DNA, 120 bp, Artificial Sequence
  ENSG00000185920_122 (sequence is synthesized)
tgtagtcctcaaagtcataaggtaaagaaacaaaaagcaaaaactcaccttgtgttgaatgtgaactgcggttggataacagccttttcagtggggtgggttttgttcatttctggcgtt

SEQ ID NO: 674100 - DNA, 120 bp, Artificial Sequence
  ENSG00000185920_123 (sequence is synthesized)
ttctttgctgtgctggcgatcctcaccatcctcggcgttctcaatgggctggttttgcttcccgtgcttttgtctttctttggaccatatcctgaggtcagtagtgacacggggatgtcc

SEQ ID NO: 674101 - DNA, 120 bp, Artificial Sequence
  ENSG00000185920_124 (sequence is synthesized)
cacgtgtaggccggctgaatgctgtgtttcctgtgccgctcttcacttcgatacttaggtgcctccccacttgctggtggttcttcagtaaacatctcagagtcatgtctgttttcctct

SEQ ID NO: 674102 - DNA, 120 bp, Artificial Sequence
  ENSG00000185920_125 (sequence is synthesized)
tcggtgtactggctttgagggctagagggcgggttcggtttggttcctctaaatcaactgattggcagcctgggtcttacagatctttatacagtaaatgaagactttccccttgagatg

SEQ ID NO: 674103 - DNA, 120 bp, Artificial Sequence
  ENSG00000185920_126 (sequence is synthesized)
cataattggacttcacaagagtaaaaagtacacatcctgcctttccagtgtggagcagaggacagttcttctgctccagctgcgggacctgaaggtcctccaggtggtagagaaggggag

SEQ ID NO: 674104 - DNA, 120 bp, Artificial Sequence
  ENSG00000185920_127 (sequence is synthesized)
gttaatacggcacagtgcgcagggccccagggcagggaacagaggcccctgaaaaataccgtgctttgagctttgagtgtggccagcaggtaaatggacaagaacacttttaacatggaa

SEQ ID NO: 674105 - DNA, 120 bp, Artificial Sequence
  ENSG00000185920_128 (sequence is synthesized)
tcgtcaggtaagccagctcccgaggacaatctatgccctgtagtcttcttcctttcctcaaaagccacttccctcctgacatcggcaagtgtatttgtattaatacttaaaccgttatcc

SEQ ID NO: 674106 - DNA, 120 bp, Artificial Sequence
  ENSG00000185920_129 (sequence is synthesized)
gaagaaggggcctcctggcagatgcagcgtcgtctcgggaactcgtggctccttgggagctggtgggagctgcgacaggcagcaggtccagcgtgggcagagtgccgggctgacctgatt

SEQ ID NO: 674107 - DNA, 120 bp, Artificial Sequence
  ENSG00000185924_0 (sequence is synthesized)
gatcgctcggtcctgcaaacgcgcgccgggcgctttccccggagctcggcggtgcgtgcgagcgcccttttgctgcagccgcggcggcggtggtccgagggggcggagaggagggggctg

SEQ ID NO: 674108 - DNA, 120 bp, Artificial Sequence
  ENSG00000185924_1 (sequence is synthesized)
ggcgtcccccctcaaaaccgcctgcgaagtgctccgggtggcagaagcaggccgccggctccgcggagcaagccgctcgccccggggctgagcaagcgcgcggggctgccgggcagcacc

SEQ ID NO: 674109 - DNA, 120 bp, Artificial Sequence
  ENSG00000185924_2 (sequence is synthesized)
gtgccctcggcgcggggctggagctcaccatgcccctgcggggccgggccaccgggcacgagcggatccccggcttgcccccgcctcgacgcgctcggattagctgcagctggcgcccag

SEQ ID NO: 674110 - DNA, 120 bp, Artificial Sequence
  ENSG00000185924_3 (sequence is synthesized)
ccgcctcgacgcgctcggattagctgcagctggcgcccagggatttgaatctggaccccgggagggagtgcgcctaggccgacctcggagcggcggccccgtggccaacatgcttcgcaa

SEQ ID NO: 674111 - DNA, 120 bp, Artificial Sequence
  ENSG00000185924_4 (sequence is synthesized)
agggtgctgtgtggagttgctgctgctgttggtagctgcggagctgcccctgggtggtggctgcccacgggactgtgtgtgctacccggcgcccatgacggtcagctgccaggcgcacaa

SEQ ID NO: 674112 - DNA, 120 bp, Artificial Sequence
  ENSG00000185924_5 (sequence is synthesized)
ctttgcagccatcccggagggcatccccgtggacagcgagcgcgtcttcctgcagaacaaccgcatcggcctcctccagcccggccacttcagccccgccatggtcaccctgtggatcta

SEQ ID NO: 674113 - DNA, 120 bp, Artificial Sequence
  ENSG00000185924_6 (sequence is synthesized)
ctcgaacaacatcacctacatccaccccagcaccttcgagggcttcgtgcacctggaggagctggacctcggcgacaaccggcagctgcggacgctggcacccgagaccttccagggcct

SEQ ID NO: 674114 - DNA, 120 bp, Artificial Sequence
  ENSG00000185924_7 (sequence is synthesized)
ggtgaagcttcacgccctctacctctacaagtgtgggctcagcgccttgccggccggcgtctttggcggcctgcacagcctgcagtacctctacctgcaggacaaccacatcgagtacct

SEQ ID NO: 674115 - DNA, 120 bp, Artificial Sequence
  ENSG00000185924_8 (sequence is synthesized)
ccaggacgacatcttcgtggacctggtcaacctcagccacctgtttctccacggcaacaagctgtggagtctgggcccgggcaccttccggggcctggtgaacctggaccgtcttttgct

SEQ ID NO: 674116 - DNA, 120 bp, Artificial Sequence
  ENSG00000185924_9 (sequence is synthesized)
gcacgagaaccagctgcagtgggtccaccacaaggcgttccacgacctccgcaggctgaccaccctcttcctcttcaacaacagcctctcggagctgcagggtgagtgcctggccccgct

SEQ ID NO: 674117 - DNA, 120 bp, Artificial Sequence
  ENSG00000185924_10 (sequence is synthesized)
gggggccctggagttcctccgcctcaacggcaacccctgggactgtggttgtcgcgcgcgctccctgtgggaatggctgcagaggttccggggctccagctccgctgtcccctgtgtgtc

SEQ ID NO: 674118 - DNA, 120 bp, Artificial Sequence
  ENSG00000185924_11 (sequence is synthesized)
ccctgggctgcggcacggccaggacctgaagctgctgagggccgaggacttccggaactgcacgggaccagcgtccccgcaccagatcaagtcacacacgctcaccaccaccgacagggc

SEQ ID NO: 674119 - DNA, 120 bp, Artificial Sequence
  ENSG00000185924_12 (sequence is synthesized)
cgcccgcaaggaacaccactcaccccacggccccaccaggagcaagggccacccgcacggcccccggcccggccacaggaagccggggaagaactgcaccaaccccaggaaccgcaatca

SEQ ID NO: 674120 - DNA, 120 bp, Artificial Sequence
  ENSG00000185924_13 (sequence is synthesized)
gatctctaaggcgggcgccgggaaacaggcccccgagctgccagactatgccccagactaccagcacaagttcagttttgacatcatgcctacggcccggcccaagaggaagggcaagtg

SEQ ID NO: 674121 - DNA, 120 bp, Artificial Sequence
  ENSG00000185924_14 (sequence is synthesized)
tgcccgcaggacccccatccgtgcccccagcggggtgcagcaggcctcctcggccagttccctgggggcctccctcctggcctggacactggggctggcggtcactctccgctgaggacc

SEQ ID NO: 674122 - DNA, 120 bp, Artificial Sequence
  ENSG00000185924_15 (sequence is synthesized)
ccagcactgccacatgtccaccaaggaacagaatttattttcttctttttttaacaagtggaagatctgctgggtttcaggaaaaggctggtagagccttcggctgctgtctggacgtct

SEQ ID NO: 674123 - DNA, 120 bp, Artificial Sequence
  ENSG00000185924_16 (sequence is synthesized)
ggaccctgccatgtggattataaacccaaagtgtacagccctaggcgggagggggtggcgcttctcagccggctgtcccagccagccccgcagagcgcccacggacagtgtccactctgg

SEQ ID NO: 674124 - DNA, 120 bp, Artificial Sequence
  ENSG00000185924_17 (sequence is synthesized)
caaggtgggaaaaggcactccaagtgcatcctccactggcaacagtgggacaattgcccccgacggcggcaccggggctctgtggaatcccgatcgttccgagaggtctggagggccccg

SEQ ID NO: 674125 - DNA, 120 bp, Artificial Sequence
  ENSG00000185924_18 (sequence is synthesized)
tggttcctggagaaagcaggacgcagagaagaacaaatgaggctcacccacgaggctgggtggccagcagtctgggcacacacgagcaggtggcatcttggctcttgcctgaggccagtc

SEQ ID NO: 674126 - DNA, 120 bp, Artificial Sequence
  ENSG00000185924_19 (sequence is synthesized)
accctgccctgaattctatcctactccaccttcagcccctccctcgggggtagcgcctctcattcctgatgtctcaggcaaccctggcagacccaggtccaactgctggggtccaagaac

SEQ ID NO: 674127 - DNA, 120 bp, Artificial Sequence
  ENSG00000185924_20 (sequence is synthesized)
caattaccaaaggaaagatcatcagaggctgaaatctagaacttcatcccgggcaatgaggttctcacagaaggtgcagttttataactaactacgtccacttatatatattcacactct

SEQ ID NO: 674128 - DNA, 120 bp, Artificial Sequence
  ENSG00000185924_21 (sequence is synthesized)
atatatatatatatatatatacacaaatgcacagtccccctcccactccgttacctaactgtacgtcttttcatgtttataaactatacagaaaactgtatttgctgaactaaggattgt

SEQ ID NO: 674129 - DNA, 120 bp, Artificial Sequence
  ENSG00000185924_22 (sequence is synthesized)
tgtatttgctgaactaaggattgtattggtgatttctagcaaaaacaaagtgatagaatttttgtctagaatcccaaactggcaacgatagtctccaagggacctggccttgccaagggc

SEQ ID NO: 674130 - DNA, 120 bp, Artificial Sequence
  ENSG00000185924_23 (sequence is synthesized)
ctggggcaaggtgtcggcgggacggtgaggaagggggaggcagcaagagtcactttgggggaccaatattcttagatatttagagcatcaccttgtttttatatgcaacacaagcctgtc

SEQ ID NO: 674131 - DNA, 120 bp, Artificial Sequence
  ENSG00000185924_24 (sequence is synthesized)
tgccaccctggagcgccctgtcacccctgctgtcgtagctgttggcttcagggtgagaagtgagaagcagcttattgtatatgagggagccaggccccgagggtgagcgagatggagaag

SEQ ID NO: 674132 - DNA, 120 bp, Artificial Sequence
  ENSG00000185924_25 (sequence is synthesized)
gggaaggaaggggctttgggatctggaaaccagcaggccaggcagcatccacagtgttagtccaaagggtcggaccgtgtcgtcagcctagcgtttggtcagtgacggcctggacgggcc

SEQ ID NO: 674133 - DNA, 120 bp, Artificial Sequence
  ENSG00000185924_26 (sequence is synthesized)
aaggagactccgggcttgagcccaggcctcccgcacggctcagctgctgaatttttccttgaggctgtttggtgtgtgacccagcaagggccctgtgtgggacagcaggagggaggcgtc

SEQ ID NO: 674134 - DNA, 120 bp, Artificial Sequence
  ENSG00000185924_27 (sequence is synthesized)
gggggccttagcagaaggggaacaatgagggcatttcatgaaccatctcaggcacttctgcatcacggaagacctggccctcccagccgtcctggggatgctcagggtgcaggcagaggc

SEQ ID NO: 674135 - DNA, 120 bp, Artificial Sequence
  ENSG00000185924_28 (sequence is synthesized)
tcgggaggccggactcaggggtcagaagcagggactggggcaggcgagcccggacagggaagaggggctccgatcaaagccggccgtgctgctggccgggggcccaggtgggtacaagct

SEQ ID NO: 674136 - DNA, 120 bp, Artificial Sequence
  ENSG00000185924_29 (sequence is synthesized)
cctttgtgctttgcacaaacctgaatcccccaccagagaggatgtgtgtgaggagccagaaacgctgaatccaattaagagagaaaaataataataacaataaatgatcttggacaagaa

SEQ ID NO: 674137 - DNA, 120 bp, Artificial Sequence
  ENSG00000185926_0 (sequence is synthesized)
atggagaataggaataacatgacagagtttgttttgctggggcttacagagaatccaaagatgcagaaaatcatatttgttgtgttttttgtcatctatatcatcactgtggtgggatat

SEQ ID NO: 674138 - DNA, 120 bp, Artificial Sequence
  ENSG00000185926_1 (sequence is synthesized)
gtgctcattgtggtcaccatcactgccagcccatcactggggtcccccatgtacctttccctggcctatctctcctttattgatgcctgctattcctctgtcaatacccctaacctgatc

SEQ ID NO: 674139 - DNA, 120 bp, Artificial Sequence
  ENSG00000185926_2 (sequence is synthesized)
acacattcactctatggaaagaaggccatcctattcaatggatgcatgactcaagtctttggagaacatttcttcggaggtgcagagggcatcctacttactgtgatggcctatgaccac

SEQ ID NO: 674140 - DNA, 120 bp, Artificial Sequence
  ENSG00000185926_3 (sequence is synthesized)
tttcttcatgcaaccatacagatcctcttcatcttccaattacctttctgtggtcctaatgtcatagatcactttatgtgtgatctgaaccctttgctcaacctcgcctgcactgacacc

SEQ ID NO: 674141 - DNA, 120 bp, Artificial Sequence
  ENSG00000185926_4 (sequence is synthesized)
catatgctggaactcttcattgctgccaacagtggattcatctgcttgttaaactttgccctcctgctggtctcctatgtggtcatcttgtgctccctaaggactcatagcttggaggca

SEQ ID NO: 674142 - DNA, 120 bp, Artificial Sequence
  ENSG00000185926_5 (sequence is synthesized)
aggcacaaagccctctccacctgtgtctcccacatcacggttgtcatcttattctttgtgccctgcatatttgtgtacatgagacctgcagctactttacctattgataaagcagttgct

SEQ ID NO: 674143 - DNA, 120 bp, Artificial Sequence
  ENSG00000185926_6 (sequence is synthesized)
atattctacactatgataactcctatgttaaaccccttaatctataccttgaagaatgcccagatgaaaaatgccatcaggaaattgtgtagtagaaaggacatttcaggtgacaaataa

SEQ ID NO: 674144 - DNA, 120 bp, Artificial Sequence
  ENSG00000185933_0 (sequence is synthesized)
ctctgctctgagctctgttggtcccagccaggagagcccgagtcatgaggtgggcacccagtgggcagggtgggcagcaggggccctcttggaggcagcagtgagttgggaagaggaggc

SEQ ID NO: 674145 - DNA, 120 bp, Artificial Sequence
  ENSG00000185933_1 (sequence is synthesized)
cgggccccacagcgggcatgatggacaagttccggatgatcttccagttcctgcagtccaaccaggagtccttcatgaatggcatctgtggcatcatggccctggccagtgcccagatgt

SEQ ID NO: 674146 - DNA, 120 bp, Artificial Sequence
  ENSG00000185933_2 (sequence is synthesized)
actcggccttcgacttcaactgcccctgcctgccgggctacaatgcagcctacagcgcgggcatcctgctggcgccacccctggtgctctttctgcttggcctggtcatgaacaacaacg

SEQ ID NO: 674147 - DNA, 120 bp, Artificial Sequence
  ENSG00000185933_3 (sequence is synthesized)
tgtccatgctggccgaagagtggaagcggccgctgggccgccgggccaaggaccccgctgtgttgcgctacatgttctgctccatggcccagcgcgccctcatcgcgcctgtcgtctggg

SEQ ID NO: 674148 - DNA, 120 bp, Artificial Sequence
  ENSG00000185933_4 (sequence is synthesized)
tggccgtcacgctactcgacggcaaatgcttcctctgtgccttctgcactgccgtgcccgtgagcgcactgggcaacggcagcctggcacccggccttcctgcccccgagctcgcccgcc

SEQ ID NO: 674149 - DNA, 120 bp, Artificial Sequence
  ENSG00000185933_5 (sequence is synthesized)
tgctggcccgggtgccctgccctgagatctacgatggcgactggctgttggcccgagaggtggccgtgcgttacctccgctgcatctcccaggcgctgggctggtccttcgtgctgctga

SEQ ID NO: 674150 - DNA, 120 bp, Artificial Sequence
  ENSG00000185933_6 (sequence is synthesized)
ccactctgctggcattcgtggtgcgctctgtgcggccctgcttcacgcaggccgccttcctcaagagcaagtactggtcccactatatcgacatcgagcgcaagctcttcgacgagacgt

SEQ ID NO: 674151 - DNA, 120 bp, Artificial Sequence
  ENSG00000185933_7 (sequence is synthesized)
gcacggagcacgccaaagcctttgccaaggtctgcatccagcagttcttcgaggccatgaaccatgacctggagctgggtcacacccacgggacactggccacggcccctgcttccgcag

SEQ ID NO: 674152 - DNA, 120 bp, Artificial Sequence
  ENSG00000185933_8 (sequence is synthesized)
ctgcccccacgacccccgatggtgcggaggaggaaagggagaagctgcgtggcatcacggatcaaggcaccatgaacaggctgctcacgagctggcacaaatgcaaaccgcctctgcggc

SEQ ID NO: 674153 - DNA, 120 bp, Artificial Sequence
  ENSG00000185933_9 (sequence is synthesized)
tgggccaggaggagccaccgctgatgggcaacggctgggctgggggtgggccccggcctccgcgtaaggaggtggccacctacttcagcaaagtgtgaggtgtggccagctgaagaggca

SEQ ID NO: 674154 - DNA, 120 bp, Artificial Sequence
  ENSG00000185933_10 (sequence is synthesized)
ggaacggggatctgagcccacagcccctccaacccccaaaccaggtggaaaaaggaagggtttcagtgctgggcagtactcccctaggcagatccacactccctagcactcgcctgccca

SEQ ID NO: 674155 - DNA, 120 bp, Artificial Sequence
  ENSG00000185933_11 (sequence is synthesized)
ttggaggcaggaaatttggagctggaaggggatctgatgccttcaggtgtgacactgccctggatggccctagggcagtgggcccatgagcagtattagtctaaaggggtcggaactgtc

SEQ ID NO: 674156 - DNA, 120 bp, Artificial Sequence
  ENSG00000185933_12 (sequence is synthesized)
tgttcactgtctcctcccaggttcaacagacatccctgccccagggtccaccctcgtctgtggctgttcagtacctctcttcctttatgctccgggctcggggagtgggaatcatcaggc

SEQ ID NO: 674157 - DNA, 120 bp, Artificial Sequence
  ENSG00000185933_13 (sequence is synthesized)
gtctcatgaagtgggagccctctgatttgggcaagcgtgtcgtaggtgagactgggtgtgccggggcaggtccataaggacatgacacacagcctacctggtgtgacacacctggggtga

SEQ ID NO: 674158 - DNA, 120 bp, Artificial Sequence
  ENSG00000185933_14 (sequence is synthesized)
caggcgatgagacaagatgtcagaagctaggttcacatggaagaggtcagagtgtgtggtcaccatgggggtcatgtgacaattgtccaggtggactgcatgtttatttagcacaaacca

SEQ ID NO: 674159 - DNA, 120 bp, Artificial Sequence
  ENSG00000185933_15 (sequence is synthesized)
agcacaaaagtcctcctgtagaggggtctttgaaaaaccaccttaatacccccgtcacatccaggtctccaggggaaatcagaccatccccaaggcttgagaagttagacacagaagctg

SEQ ID NO: 674160 - DNA, 120 bp, Artificial Sequence
  ENSG00000185933_16 (sequence is synthesized)
aagtctctccatttttctcaaagaccccacctcttggggatggagttctaagaggctaagaggagctccaaggctctagcccaggtgggatgagggtggaggagagcagtgtaaagagaa

SEQ ID NO: 674161 - DNA, 120 bp, Artificial Sequence
  ENSG00000185933_17 (sequence is synthesized)
agcagctcagattccagagtgagacagaactgggtcaaatggtgtctctaccactcacaaaccctgtccctgggccagctgcatcactgcctgtgccttcgtttcttcatctatacaatg

SEQ ID NO: 674162 - DNA, 120 bp, Artificial Sequence
  ENSG00000185933_18 (sequence is synthesized)
aggatgaggcccccccggcccgccatcatggggttgctgtgtgtaaaagcacatggcacatagtaggcacccagcacagggtggctaatgtatttgttgatttctgaacctaaggacttc

SEQ ID NO: 674163 - DNA, 120 bp, Artificial Sequence
  ENSG00000185933_19 (sequence is synthesized)
cttcctcctcccctgggcagggatgagacagcaacacaaacactcgagcttccatcttgttgaggaggaaacagaggtacagataggtttctcagcaccgccctcagctctgagacataa

SEQ ID NO: 674164 - DNA, 120 bp, Artificial Sequence
  ENSG00000185933_20 (sequence is synthesized)
gtcccaagcatctaaggattcattttgatcttggcatgattccatccttttttatccatccttccctctattcccacttctggggtccagtttccctcctcttaattatttgggaggagt

SEQ ID NO: 674165 - DNA, 120 bp, Artificial Sequence
  ENSG00000185933_21 (sequence is synthesized)
tgctcagatctttgtgggccaaggtgggctgggagggctcttccaggaggtaggagttggtatgggccctgaagtcagggaggattaggatgagcaaaaaacaaggtgtatgttggtggg

SEQ ID NO: 674166 - DNA, 120 bp, Artificial Sequence
  ENSG00000185933_22 (sequence is synthesized)
tggcagcacttccagtgggaagagaaggcccggaggtatcaggaggtacaaatgtgatgaagagcaaagctttgggtcaggcacacctgagttcaaataccagcactgcaggacttgtgg

SEQ ID NO: 674167 - DNA, 120 bp, Artificial Sequence
  ENSG00000185933_23 (sequence is synthesized)
actgcaggacttgtggccagtcacccagccactctaagcctcagtgtgtctgtctataaaatggatattagaagacctgcttggccaggcggagtggctcatgcctgtaatcccagcact

SEQ ID NO: 674168 - DNA, 76 bp, Artificial Sequence
  ENSG00000185933_24 (sequence is synthesized)
gagggaggatcacttgagcctggtaaagtaataataataataagaagaagaagaagaataaagagaagatttataa

SEQ ID NO: 674169 - DNA, 120 bp, Artificial Sequence
  ENSG00000185940_0 (sequence is synthesized)
ggctccacacctgcacctccctctcacctgctcctctacctgctccaccctcaatccaccagaaccatgggctgctgtggctgctccggaggctgtggctccggctgtggaggccgtggc

SEQ ID NO: 674170 - DNA, 120 bp, Artificial Sequence
  ENSG00000185940_1 (sequence is synthesized)
tccggctgtgggggctgtggctccggctgtggaggctgtggctctggctgtgggggctgtggctccggctgtggaggctgtgggggctgtggctccggctgtgcgggctgtgggggatgt

SEQ ID NO: 674171 - DNA, 120 bp, Artificial Sequence
  ENSG00000185940_2 (sequence is synthesized)
ggctccggctgctgtgtgcctgtctgctgctgcaagcccatgtgctgctgtgtgccagcttgttcctgctccagctgtggcaaagggggctgtggctcttgcgggggctccaagagaggc

SEQ ID NO: 674172 - DNA, 120 bp, Artificial Sequence
  ENSG00000185940_3 (sequence is synthesized)
ggctcctgtggggggtccaaggggggctgtggctcctgtggggggtccaaggggggctgtggttcttatggctgctcccagtccagctgctgcaagccctgctgctgctcctcaggctgt

SEQ ID NO: 674173 - DNA, 120 bp, Artificial Sequence
  ENSG00000185940_4 (sequence is synthesized)
gggtcatcctgctgccagtccagctgctgtaagccttactgctgccagtccagctgctgtaagccctactgctgccagtccagctgctgtaagccctgtagctgcttctcaggctgtgga

SEQ ID NO: 674174 - DNA, 120 bp, Artificial Sequence
  ENSG00000185940_5 (sequence is synthesized)
tcatcctgctgccaatccagctgctacaagccctgctgctgccagtccagctgctgtgtccccgtgtgctgccagtgtaagatctgaggctctgactgcagactgcaggtggcctgactg

SEQ ID NO: 674175 - DNA, 120 bp, Artificial Sequence
  ENSG00000185940_6 (sequence is synthesized)
gtgaagggcccggctgcccagcttccttgccctgggttctctggtgctccactgtctccactgtgtcctcactggcttcatccactccacaccagtgctcccgaaactgactgaggaccc

SEQ ID NO: 674176 - DNA, 120 bp, Artificial Sequence
  ENSG00000185942_0 (sequence is synthesized)
agccgcgagcggcggccgcggggccgaggagcctgggccgggccgggcggggactactccggagtcaggaggcagcagcggcggaggacgaggatctctggcagtcagcgccgctcggac

SEQ ID NO: 674177 - DNA, 120 bp, Artificial Sequence
  ENSG00000185942_1 (sequence is synthesized)
gccgccggcaccatgggctgctgcaccggacgctgctcgctcatctgcctctgcgcgctgcagttggtctcagcattagagaggcagatctttgacttccttggtttccagtgggcgcct

SEQ ID NO: 674178 - DNA, 120 bp, Artificial Sequence
  ENSG00000185942_2 (sequence is synthesized)
attcttggaaattttctacacataatagttgtcatattgggtttgtttgggaccattcagtacagacctcgatacataatggtgtatacagtgtggactgccctctgggtcacctggaat

SEQ ID NO: 674179 - DNA, 120 bp, Artificial Sequence
  ENSG00000185942_3 (sequence is synthesized)
gtgttcattatctgcttttatttggaagtaggtggactctcaaaggacaccgatctaatgacattcaatatctctgtacatcggtcatggtggagagaacatgggcctggttgtgtcaga

SEQ ID NO: 674180 - DNA, 120 bp, Artificial Sequence
  ENSG00000185942_4 (sequence is synthesized)
agagtgctgcctccctcagcccatggcatgatggacgattacacgtacgtctctgtcacaggctgcatcgttgacttccagtacctggaggtcatccacagtgctgtccaaatactactc

SEQ ID NO: 674181 - DNA, 120 bp, Artificial Sequence
  ENSG00000185942_5 (sequence is synthesized)
tctttggtgggttttgtgtatgcctgttatgtgatcagtatttccatggaagaagaagacacatattcatgtgatctgcaagtatgcaaacatctttttatccagatgctgcaaattatt

SEQ ID NO: 674182 - DNA, 120 bp, Artificial Sequence
  ENSG00000185942_6 (sequence is synthesized)
gaataagcaagaattagtaagatattatcaccaaattgtcacatcagtcaagcctcatgtgcttcctaagaactgaggtgatgcattattttagagtgtcattctaaaccccagattcaa

SEQ ID NO: 674183 - DNA, 120 bp, Artificial Sequence
  ENSG00000185942_7 (sequence is synthesized)
catcttcctaatctttctagtgcagtctaatatataaattttatgaaaagcataggtttttttttaaccagcagtgctctttgagaatttacattgattcctaaagattgccattgcttt

SEQ ID NO: 674184 - DNA, 120 bp, Artificial Sequence
  ENSG00000185942_8 (sequence is synthesized)
tgtgaaatctgattttactttttgaaaattttcatgtgaatttcccattttcagtgttgtagcacctctctcttcctctaagatcctgcaagctcatcaaaagccatgatcttattatac

SEQ ID NO: 674185 - DNA, 120 bp, Artificial Sequence
  ENSG00000185942_9 (sequence is synthesized)
cagcagttttatttattcaatctttcaacaagtagttattgaacttctataatgtgccaggctctggagctcgccttacaccaaacagacacaatcgatccattcgaagtgtcgtaatta

SEQ ID NO: 674186 - DNA, 120 bp, Artificial Sequence
  ENSG00000185942_10 (sequence is synthesized)
cacattgagggaccaactagaccttttctcattgtaaacttggagcaaaagtaaattcattaaaataaatttacattatagtgccacaaaaaaatgaacagaaccagaaagcatttttta

SEQ ID NO: 674187 - DNA, 120 bp, Artificial Sequence
  ENSG00000185942_11 (sequence is synthesized)
caaaaattaacagaacagtgtgatagaggggaaaaggatgtgagatcatggtgccctaccttcaatagggtggccagaaaacacctctctgaagaagcagcatttgagctgagacctgaa

SEQ ID NO: 674188 - DNA, 120 bp, Artificial Sequence
  ENSG00000185942_12 (sequence is synthesized)
gaacgaggagtcagtgatgcagagaacctcaggagatgccttccaatctgagaaaagaggtgtacaagcaacatggtgccggcacctgctcagcttttggaaaggactcaggaagctttt

SEQ ID NO: 674189 - DNA, 120 bp, Artificial Sequence
  ENSG00000185942_13 (sequence is synthesized)
actcatgatggaaggcaaagcgggaggaggcacatcacatagcaagagtggaagcaagagagacgtcatgctcttttaagcaatcagctctcaggtgaactaatagagtgagaactcact

SEQ ID NO: 674190 - DNA, 120 bp, Artificial Sequence
  ENSG00000185942_14 (sequence is synthesized)
catttctgtggggagggcatcaagctatttataatggatccatcctcatgacacaaacactgctatctcccacctctaacactggagatgacacttgaacatgagatttggaggggacaa

SEQ ID NO: 674191 - DNA, 120 bp, Artificial Sequence
  ENSG00000185942_15 (sequence is synthesized)
atatcaaaactatatcatatggtttgcagatattttcttccatccttgagttatcttttcattttgttaattgtttcctttgctgtgctgaagctttgtttaatgaaatcccatttgtct

SEQ ID NO: 674192 - DNA, 120 bp, Artificial Sequence
  ENSG00000185942_16 (sequence is synthesized)
ataatggtggacaccgatctaatgacattcaatatctctgtacatcggtcatggtggagagaacatgggcctggttgtgtcagaagagtgctgcctccctcagcccatggcatgatggac

SEQ ID NO: 674193 - DNA, 120 bp, Artificial Sequence
  ENSG00000185942_17 (sequence is synthesized)
acacacacacacccggacccagacagcccactccactttccagacgcccacctcctacatactcccctcccctaaacagacattcacccactcgccatctgtagcctccttccaaccccc

SEQ ID NO: 674194 - DNA, 120 bp, Artificial Sequence
  ENSG00000185942_18 (sequence is synthesized)
cgccccgcccgcctggctccccctccccaagaaacagacctgcacagtgggacgcagggacccccgccagacgctcgggtcgtgcgcaccgcactgacctcggcccgccccgccgggaaa

SEQ ID NO: 674195 - DNA, 120 bp, Artificial Sequence
  ENSG00000185942_19 (sequence is synthesized)
ctatatttttcctataggtttctgctgtggagccgtactcactgcagaccctgaaggaggaggaatacctgctttctgcccctcagtggtctcagctgccgttcttctcacatatgcatc

SEQ ID NO: 674196 - DNA, 120 bp, Artificial Sequence
  ENSG00000185942_20 (sequence is synthesized)
atccatacacatcaagatgttttgcggctttatgtcagtatgagtaatcttggtcttactgtgtagatattctaacccttgaaggaaatgtcaaatgatactcttcagacaacgtactgg

SEQ ID NO: 674197 - DNA, 120 bp, Artificial Sequence
  ENSG00000185942_21 (sequence is synthesized)
gaagaagacacatttgatttcataggtggacttgatacacactcctactaccaggatcatgttgagttaaagcctgttaaaccagtcgaaataagtaatgacattgaaccagaaatgcgg

SEQ ID NO: 674198 - DNA, 120 bp, Artificial Sequence
  ENSG00000185942_22 (sequence is synthesized)
ctgctgaacttgacttagggagcaaaggaccattgactgcgcgcctcggtggatccgacccgcctgacattccttccagaggctagactgtgcttcctggctttcccacgaatcatggag

SEQ ID NO: 674199 - DNA, 120 bp, Artificial Sequence
  ENSG00000185942_23 (sequence is synthesized)
cattttggtcacagcctttgtattattagcattgttctctagatgagttctaggtgcttgggtgggtatttttttagtcgttttcttcttatatgaacacttgtaagttgtaaaaaaaaa

SEQ ID NO: 674200 - DNA, 120 bp, Artificial Sequence
  ENSG00000185946_0 (sequence is synthesized)
gcagtcgtgagtcctcttgtccttgagcgtcaaccttctttccctgaagtggctggggttcctgtttccttctttgattgacaacttgtgttaaccctcgcacatctctgggccaatttt

SEQ ID NO: 674201 - DNA, 120 bp, Artificial Sequence
  ENSG00000185946_1 (sequence is synthesized)
tgcttgtaagtctttccggagacccctggaatttaaatcattagcaccgcgcccttccccgaagagtcttcgaagggttgccgcttttcggtggcgcagttctcgcgagaaggtgacttt

SEQ ID NO: 674202 - DNA, 120 bp, Artificial Sequence
  ENSG00000185946_2 (sequence is synthesized)
ctttctcggtatttcctggtttccagaatccttagcgcgaggcggaaaaaatatttctcccagcttgtgttgatgccgcgattttgactgagacttcttcccacgatttctgtttttgct

SEQ ID NO: 674203 - DNA, 120 bp, Artificial Sequence
  ENSG00000185946_3 (sequence is synthesized)
tctccaaggaaaatggcagctcccgagcagccgcttgcgatatcaaggggatgcacgagctcctcctcgctttccccgcctcggggcgaccgaacccttctggtcaggcacctgccggct

SEQ ID NO: 674204 - DNA, 120 bp, Artificial Sequence
  ENSG00000185946_4 (sequence is synthesized)
gagcttactgctgaggagaaagaggacttgctgaagtacttcggggctcagtctgtgcgggtcctgtcagataaggggcgactgaaacatacagcttttgccacattccctaatgaaaaa

SEQ ID NO: 674205 - DNA, 120 bp, Artificial Sequence
  ENSG00000185946_5 (sequence is synthesized)
gcagctataaaggcattgacaagactccatcaactgaaacttttaggtcatactttagtcgttgaatttgcaaaagagcaagatcgagttcactccccatgtcccacttcaggctctgaa

SEQ ID NO: 674206 - DNA, 120 bp, Artificial Sequence
  ENSG00000185946_6 (sequence is synthesized)
aaaaaaaaaaggtctgatgaccctgtcgaagatgataaagaaaaaaaagaacttggttatttaacagtagaaaatggaattgcaccaaaccatgggctgacttttcctttaaattcatgc

SEQ ID NO: 674207 - DNA, 120 bp, Artificial Sequence
  ENSG00000185946_7 (sequence is synthesized)
ctcaagtatatgtacccaccaccttccagcacaatcctagcaaacattgtaaatgccttggcaagcgtgcctaagttctatgtacaggtccttcatcttatgaataaaatgaatttgccc

SEQ ID NO: 674208 - DNA, 120 bp, Artificial Sequence
  ENSG00000185946_8 (sequence is synthesized)
tttgccagacgaggatgaggaattatctagtgaagaatcagaatatgaaagcactgatgatgaggaccgacagagaatgaacaaattaatggaactagcaaatcttcagcccaaaagacc

SEQ ID NO: 674209 - DNA, 120 bp, Artificial Sequence
  ENSG00000185946_9 (sequence is synthesized)
taaaacaataaagcagcgccatgtgagaaaaaagagaaaaataaaggatatgttgaatacacctttgtgtccttcacacagcagtttacatccagtgctgttaccttcagatgtatttga

SEQ ID NO: 674210 - DNA, 120 bp, Artificial Sequence
  ENSG00000185946_10 (sequence is synthesized)
ccaaccacaacctgtaggtaacaaaagaattgaattccatatatctaccgacatgccagctgcatttaagaaagatttagaaaaggaacaaaattgtgaggaaaaaaatcatgatttacc

SEQ ID NO: 674211 - DNA, 120 bp, Artificial Sequence
  ENSG00000185946_11 (sequence is synthesized)
tgctactgaagttgatgcatccaatataggatttggaaaaatcttccccaaacctaatttggacatcacagaggagattaaagaagactctgatgaaatgccttcagaatgtatttctag

SEQ ID NO: 674212 - DNA, 120 bp, Artificial Sequence
  ENSG00000185946_12 (sequence is synthesized)
aagggaattggaaaagggcagaatttctagagaagaaatggaaacactttcagttttcagaagttatgaaccgggtgaaccaaactgtagaatttatgtaaagaatttagctaaacatgt

SEQ ID NO: 674213 - DNA, 120 bp, Artificial Sequence
  ENSG00000185946_13 (sequence is synthesized)
tcaagaaaaggaccttaaatatatttttggaagatatgttgacttttcatcagaaacacagcggatcatgtttgatatacgtttgatgaaagaaggtcgtatgaaaggacaagctttcat

SEQ ID NO: 674214 - DNA, 120 bp, Artificial Sequence
  ENSG00000185946_14 (sequence is synthesized)
tggacttcctaatgaaaaagcagcagcaaaagccttaaaggaagctaatggatatgtgctttttggaaaacccatggtggttcagtttgctcgatctgctagaccaaaacaagatcctaa

SEQ ID NO: 674215 - DNA, 120 bp, Artificial Sequence
  ENSG00000185946_15 (sequence is synthesized)
ggaaggaaaaagaaagtgttaaaaattaataaaggtttttttgaatcccgtgtccttcaagtgctttctaactttgagaggaagaaattgaccacctggactatggaactgtgcgtaaca

SEQ ID NO: 674216 - DNA, 120 bp, Artificial Sequence
  ENSG00000185946_16 (sequence is synthesized)
gctttgaaagtgtatttaaaaattaaatctatatgcctttaaatcagtgaattggaaacatattacatgtattttaatgattttcctcaaatataataaattgtttcctttccaataaaa

SEQ ID NO: 674217 - DNA, 120 bp, Artificial Sequence
  ENSG00000185946_17 (sequence is synthesized)
aaagtgtatcctttcttgtcgtatcctttttggggcagtgtttttttgtttttttcctagaaatgtttgtccttcccccacctgttgatccaggttaaggaatacttttttacactttat

SEQ ID NO: 674218 - DNA, 120 bp, Artificial Sequence
  ENSG00000185946_18 (sequence is synthesized)
tcaaatgaaatatttctaaaattatttgtatagactgaacagatcttttatgtgtttttagatttgttgttgaattttctgtgctgtcctttatataattttttgagggaaagttagtga

SEQ ID NO: 674219 - DNA, 120 bp, Artificial Sequence
  ENSG00000185946_19 (sequence is synthesized)
atcaggtcaacttacttagagaatgtgttcatttactttaacccagaatacagtcttgtttcttctatttgtatgtttcctaaacctaattcaataacatatgctttctgttgtgtaata

SEQ ID NO: 674220 - DNA, 120 bp, Artificial Sequence
  ENSG00000185946_20 (sequence is synthesized)
tatctggtttaggtatttataatgtgtttaaaatttgggcaaaggaaatgtttttcttttaaaaagtacttacattgaaaattaagatgtctggattactatgtaaattctagagagtag

SEQ ID NO: 674221 - DNA, 120 bp, Artificial Sequence
  ENSG00000185946_21 (sequence is synthesized)
cagacctctcatctgaagtcttagtgaatctcttttgacatagatagcaatagaagtatctttcttctttcccctttctttttctaaacaagagaagaaaagcgtaatagaggggagaac

SEQ ID NO: 674222 - DNA, 120 bp, Artificial Sequence
  ENSG00000185946_22 (sequence is synthesized)
acataatgcccactaagggtagtgcattaaggaaaaacagtcttggcaggtatataggaatagtggtttccagactggttgatgaccgtaatcaccaagaacagtggttctcagtcttgg

SEQ ID NO: 674223 - DNA, 83 bp, Artificial Sequence
  ENSG00000185946_23 (sequence is synthesized)
gatgaccgtaatcaccaagaacagtggttctcagtcttggctgcacattgcagtgatctggaacttaaatactaattttaaaa

SEQ ID NO: 674224 - DNA, 90 bp, Artificial Sequence
  ENSG00000185946_24 (sequence is synthesized)
ttgcacctctggtctcagctacttgggatgctaaggcaggaggattacttgagccccagaggttgaggttgcagtgaaccatgatcacac

SEQ ID NO: 674225 - DNA, 84 bp, Artificial Sequence
  ENSG00000185946_25 (sequence is synthesized)
ctccctcctaaaaaaatccttaagaaatatattgatgcttggttcctttggtcagaattttgatttaaggtgttgggagtgtag

SEQ ID NO: 674226 - DNA, 120 bp, Artificial Sequence
  ENSG00000185946_26 (sequence is synthesized)
cctttggtcagaattttgatttaaggtgttgggagtgtagcacagatgttggaataaacctctcaaactgattttaatatacaaacaaggtcgagaaccaccaaggaagagtttttatgc

SEQ ID NO: 674227 - DNA, 120 bp, Artificial Sequence
  ENSG00000185946_27 (sequence is synthesized)
ataaagattcctgtactctaccctagaactaatacatctgaatctctgggaatggagtataacaatcagatttgaaaaggtttctttagtaattttaaggactgaccagtttagacactg

SEQ ID NO: 674228 - DNA, 120 bp, Artificial Sequence
  ENSG00000185946_28 (sequence is synthesized)
ctttgttagagtaaaatgattaggtacctagtatcaacctagccatccaaccttatattaataactaggaaaataaagggttggagcctctgtgtttctttgttgaaaaatctgctacta

SEQ ID NO: 674229 - DNA, 120 bp, Artificial Sequence
  ENSG00000185946_29 (sequence is synthesized)
ttattagatctgtgaaaacaattgaaaattcggttattatcaccttaaaagtacaaaacctatagattttgaaaatgtaattatttttctgtaggcatagttaaaaagattttgtaaatg

SEQ ID NO: 674230 - DNA, 120 bp, Artificial Sequence
  ENSG00000185946_30 (sequence is synthesized)
ttataaatcagtttctttataagcggtttatttagataaattttgttatactgacatgattcactaattttctaaatataaatggttcagctcttagttatttttaaactaatgacctgt

SEQ ID NO: 674231 - DNA, 120 bp, Artificial Sequence
  ENSG00000185946_31 (sequence is synthesized)
gttatacttcctatttttaatgggcttttatgatgttttaggtttttttgaatcccgtgtccttcaagtgctttctaactttgagaggaagaaattgaccacctggactatggaactgtg

SEQ ID NO: 674232 - DNA, 120 bp, Artificial Sequence
  ENSG00000185946_32 (sequence is synthesized)
cctttcttgtctcttgtttcttctatttgtatgtttcctaaacctaattcaataacatatgctttctgttgtgtaatatatctggtttaggtatttataatgtgtttaaaatttgggcaa

SEQ ID NO: 674233 - DNA, 120 bp, Artificial Sequence
  ENSG00000185946_33 (sequence is synthesized)
gttaccctttagaaatttccacaattggcattctagcagtagatattcattcgttacaattaaacccaccttactgagtcagatgacagtgttatttagatttttaataaaagagcttca

SEQ ID NO: 674234 - DNA, 120 bp, Artificial Sequence
  ENSG00000185946_34 (sequence is synthesized)
caaatctgtcatgccatttaccttaatttaaggcacatactttaaaacatctctccaattaatgtttgtaatcacttcttctgttttttttaaatactcatactttatagtggagggaac

SEQ ID NO: 674235 - DNA, 120 bp, Artificial Sequence
  ENSG00000185946_35 (sequence is synthesized)
gttcctttccatacagtgtttccagtctatatttaggaaaaaattttgttttcattcctaaaactttcatgtggcatttaaaataagtcagtgtgtcccacaagtctggagttatatttt

SEQ ID NO: 674236 - DNA, 120 bp, Artificial Sequence
  ENSG00000185946_36 (sequence is synthesized)
ccaaatgcagctgatagactgtcacaaatactgtgtctgagatacatacaaagcgatttaaaaaaaaatggtgattagaaatacatgattttaggattttatatcctaacatgataattt

SEQ ID NO: 674237 - DNA, 120 bp, Artificial Sequence
  ENSG00000185946_37 (sequence is synthesized)
tctacttctcaaagacttttactgttttggtacattgtcagaaaatatttagaggctttagattgatgtgtagcacataatttttcctacggtaatgggaaatagacttctagctaggat

SEQ ID NO: 674238 - DNA, 120 bp, Artificial Sequence
  ENSG00000185946_38 (sequence is synthesized)
ttttacacaaaacatctatctgattttctagaacagattactgacattaaatgagaggagctatacaagggttcttaggccatggtttgtctgagatgcctgatactgtgtttacttcat

SEQ ID NO: 674239 - DNA, 120 bp, Artificial Sequence
  ENSG00000185946_39 (sequence is synthesized)
tcttgcatttaaatatggaggtggctgatggtttgggaaattcactttaagcaaaataagtacccaaatcaattaacatatatactttgctcttttttataacatgactcatcttaacgg

SEQ ID NO: 674240 - DNA, 120 bp, Artificial Sequence
  ENSG00000185946_40 (sequence is synthesized)
gctcttttttataacatgactcatcttaacggacctttaatagtagatattttattggacaaattgtagttactctagaagtctgaaatttttaaaacaaaagttatatatatataaagt

SEQ ID NO: 674241 - DNA, 120 bp, Artificial Sequence
  ENSG00000185946_41 (sequence is synthesized)
ttaggtttcaaaattgtaattatctttaaaaacttgcttaaaatattttaattttatatctttgttttttgttttttaataagaaatggaaacactttcagttttcagaagttatgaacc

SEQ ID NO: 674242 - DNA, 120 bp, Artificial Sequence
  ENSG00000185946_42 (sequence is synthesized)
aatggaaacactttcagttttcagaagttatgaaccgggtgaaccaaactgtagaatttatgtaaagaatttagctaaacatgttcaagaaaaggtaggtataaattgattttttttcat

SEQ ID NO: 674243 - DNA, 120 bp, Artificial Sequence
  ENSG00000185946_43 (sequence is synthesized)
cctttaagaatgtggttttcttactgtgcttcagggcatgacaaattattgtttagtattttcaggttaattttttattaaaataatactctcatagcttgggttctctggcagtaaata

SEQ ID NO: 674244 - DNA, 120 bp, Artificial Sequence
  ENSG00000185946_44 (sequence is synthesized)
ctgagacagagtttgtggtatgtattaatttcctagggctaagtggctgaaacaacagagatgtgttgtctcacagttctggaggcaaactgaagtcaaaagtgtggcaggattggttca

SEQ ID NO: 674245 - DNA, 120 bp, Artificial Sequence
  ENSG00000185946_45 (sequence is synthesized)
ttctgagggctttgagtgaaggatctgttctgtgcctctcccatagcttctgctggtatgcagaagctggcgaactttcaccttccttggcttgtggaagcatcaccacaatttctgcct

SEQ ID NO: 674246 - DNA, 120 bp, Artificial Sequence
  ENSG00000185946_46 (sequence is synthesized)
ttgtacatagcatactccctttgtgagtatctgtccaaatttccccttttgaaaggccaccagtcatattagattaaagcctaccttagtccagtatgacctcttctactgatgcattga

SEQ ID NO: 674247 - DNA, 120 bp, Artificial Sequence
  ENSG00000185946_47 (sequence is synthesized)
agacaagactaattcttgagataaaattaagaataaaagtttgacaaggtagtaattcaggtatctctttttttttttttttgaggaaatacctatctgtgcagttaagtcccattaaac

SEQ ID NO: 674248 - DNA, 120 bp, Artificial Sequence
  ENSG00000185946_48 (sequence is synthesized)
gtcaaaactataactacagattaaaacccatttatatgtgaaaattaagtttggagaatgaatcttataaggggagtgtgcctgttactctttttttaactttttctgcctatagtaaag

SEQ ID NO: 674249 - DNA, 120 bp, Artificial Sequence
  ENSG00000185946_49 (sequence is synthesized)
caatggttcttaaaccctaatatgtatcatatcacttggagagcctaataaaacacagattcgtaggttccttccttccctgaaagagttgatttggtaggtctgatgtggggacctagg

SEQ ID NO: 674250 - DNA, 120 bp, Artificial Sequence
  ENSG00000185946_50 (sequence is synthesized)
gaaactgtttataccagttttccttttaatgaggggatttccaggatgctggacatttagtgctgaaatggggaatgtgtctggtaagccaagacaggtcggtcacccttgttggcacct

SEQ ID NO: 674251 - DNA, 120 bp, Artificial Sequence
  ENSG00000185946_51 (sequence is synthesized)
gaaaatttgcgagattaatgaggtttcaggtaatgatgaggcatcttatccagagaccacagcttgaaaactcctggaataaacacttacagatacattttctaactcttaaaattaacc

SEQ ID NO: 674252 - DNA, 120 bp, Artificial Sequence
  ENSG00000185946_52 (sequence is synthesized)
taaagtaaatgttaaaataaaagttaaaaaaaaaagtcaaactgtcattaaaaataattctggctgagcacggtggctcacccctgtaatctcagcaatttgggaagtggaggtgggcgg

SEQ ID NO: 674253 - DNA, 76 bp, Artificial Sequence
  ENSG00000185946_53 (sequence is synthesized)
gtgaaaccgtacctgtagtcccagctacgtgggcggctgaggcaggagaatcgcctgaacctgcgaggtggaggtt

SEQ ID NO: 674254 - DNA, 89 bp, Artificial Sequence
  ENSG00000185946_54 (sequence is synthesized)
gtgtggtggcgcctacctgtagtcccagctacgtgggcggctgaggcaggagaatcgcctgaacctgcatcacgccactgcactccaca

SEQ ID NO: 674255 - DNA, 120 bp, Artificial Sequence
  ENSG00000185947_0 (sequence is synthesized)
agttagagctcgggtctcctcgccacagctccgagtctttcgttctgggaggcccaggcggcttcgcgttctgagaataaacagaacctctgttgctctgcgacttgcaggcactgggag

SEQ ID NO: 674256 - DNA, 120 bp, Artificial Sequence
  ENSG00000185947_1 (sequence is synthesized)
attcgtagctaagacgccagggcatcccggaagctgggaaatgggactgttgacattcagggatgtggccgtagaattctctttggaggagtgggaacacctggaaccagctcagaagaa

SEQ ID NO: 674257 - DNA, 120 bp, Artificial Sequence
  ENSG00000185947_2 (sequence is synthesized)
tttgtatcaggatgtgatgttagaaaactacagaaacctggtctctctgggtcttgttgtctctaagccggacctgatcacctttttggaacaaaggaaagagccttggaatgtgaagag

SEQ ID NO: 674258 - DNA, 120 bp, Artificial Sequence
  ENSG00000185947_3 (sequence is synthesized)
tgaggagacagtagccatccagccagatgtgttttcgcattataacaaggacctgttgacagagcactgcacagaagcttcattccaaaaagtgatatcgaggagacatgggagctgtga

SEQ ID NO: 674259 - DNA, 120 bp, Artificial Sequence
  ENSG00000185947_4 (sequence is synthesized)
tcttgagaatttacatttaagaaaaaggtggaaaagggaggagtgtgaagggcacaatggatgttatgatgaaaagacttttaaatatgatcaatttgatgaatcctctgttgaaagttt

SEQ ID NO: 674260 - DNA, 120 bp, Artificial Sequence
  ENSG00000185947_5 (sequence is synthesized)
gtttcaccagcaaatactttcttcttgtgccaaaagctataactttgatcaatataggaaggtctttactcattcatcattgcttaatcaacaagaggaaatagatatttggggaaaaca

SEQ ID NO: 674261 - DNA, 120 bp, Artificial Sequence
  ENSG00000185947_6 (sequence is synthesized)
tcacatatatgataaaacttcagtgttatttaggcaggtctctactctaaatagttaccgaaatgtttttattggagagaaaaattatcattgcaataattctgaaaaaaccttgaacca

SEQ ID NO: 674262 - DNA, 120 bp, Artificial Sequence
  ENSG00000185947_7 (sequence is synthesized)
aagctcaagccctaaaaatcatcaggaaaattattttctagaaaaacaatacaaatgtaaagaatttgaggaagtctttcttcagagtatgcatgggcaagagaaacaagaacagtctta

SEQ ID NO: 674263 - DNA, 120 bp, Artificial Sequence
  ENSG00000185947_8 (sequence is synthesized)
caaatgtaataaatgtgtagaagtttgtacccagtcattaaaacatattcaacatcagaccatccatatcagagaaaactcatatagctataacaaatatgataaagatcttagtcagtc

SEQ ID NO: 674264 - DNA, 120 bp, Artificial Sequence
  ENSG00000185947_9 (sequence is synthesized)
atcaaatcttagaaagcagataatccataatgaagagaaaccatacaaatgtgaaaaatgtggggatagcttaaaccatagtttgcaccttactcaacatcagatcattcctaccgaaga

SEQ ID NO: 674265 - DNA, 120 bp, Artificial Sequence
  ENSG00000185947_10 (sequence is synthesized)
gaaaccctgtaaatggaaagaatgtggcaaggtctttaaccttaactgtagtttataccttactaaacagcagcaaattgatactggagaaaacctttacaaatgtaaagcatgtagcaa

SEQ ID NO: 674266 - DNA, 120 bp, Artificial Sequence
  ENSG00000185947_11 (sequence is synthesized)
atcttttactcgttcctccaatcttattgtgcatcagagaattcacactggagagaaaccatacaaatgtaaagaatgtggcaaagcctttcgctgtagttcataccttactaaacataa

SEQ ID NO: 674267 - DNA, 120 bp, Artificial Sequence
  ENSG00000185947_12 (sequence is synthesized)
gcgaattcatactggagagaaaccttataaatgtaaagaatgtggaaaagcttttaaccgtagttcatgccttactcaacatcagacaactcatacaggagaaaaactttacaaatgtaa

SEQ ID NO: 674268 - DNA, 120 bp, Artificial Sequence
  ENSG00000185947_13 (sequence is synthesized)
tcaaatcttattatgcatcagagagttcatactggagagaagccttataaatgtaaagaatgtggcaaagtctttagccgtagttcttgccttactcaacatcggaaaattcatactgga

SEQ ID NO: 674269 - DNA, 120 bp, Artificial Sequence
  ENSG00000185947_14 (sequence is synthesized)
gaaaatctttacaaatgcaaagtatgtgctaaaccttttacttgtttctcaaatcttattgtgcatgagagaattcatactggagagaaaccctataaatgtaaagaatgtggcaaagcc

SEQ ID NO: 674270 - DNA, 120 bp, Artificial Sequence
  ENSG00000185947_15 (sequence is synthesized)
tttccttatagttcacaccttattcgacatcatcgaattcatactggagaaaaaccatacaaatgtaaagcatgtagcaaatcttttagtgactcctcaggtcttactgtgcatcggcga

SEQ ID NO: 674271 - DNA, 120 bp, Artificial Sequence
  ENSG00000185947_16 (sequence is synthesized)
actcatactggagagaaaccctatacatgtaaagaatgtggcaaagcctttagttatagttcagatgttattcagcatcggagaattcatactggccagagaccctacaaatgtgaagaa

SEQ ID NO: 674272 - DNA, 80 bp, Artificial Sequence
  ENSG00000185947_17 (sequence is synthesized)
attcatactggccctataggtcatacctcactacacatcagagaagtcatactggagagagaccctacaaatgtgaagaa

SEQ ID NO: 674273 - DNA, 120 bp, Artificial Sequence
  ENSG00000185947_18 (sequence is synthesized)
acacatcggagaagacatactggagagagaccctacaaatgtgatgaatgtggtaaagccttcagctataggtcatacctcactacacatcggagaagtcatagtggagagagaccctac

SEQ ID NO: 674274 - DNA, 120 bp, Artificial Sequence
  ENSG00000185947_19 (sequence is synthesized)
gtgaagaatgtggcaaagcctttaactctaggtcatacctcattgcacatcagagaagtcatactagagaaaaactttaaaaatgtaaaacatggagcagattttttacttgttacccat

SEQ ID NO: 674275 - DNA, 120 bp, Artificial Sequence
  ENSG00000185947_20 (sequence is synthesized)
ccatgtcttattgtgcatcagataatttatatgggagtgaaaccctacaaatgttaagaatgtggcataacctttaactattttcaagccttacacaatagcagagaatataaactgaaa

SEQ ID NO: 674276 - DNA, 120 bp, Artificial Sequence
  ENSG00000185947_21 (sequence is synthesized)
aaatccatacaaatattaaaaatgtggcaaattattttaaactgtgctcaacccttactcaagataatccatactagagaaacactatagatgtaaaaatgtgaaaagttttattcaaaa

SEQ ID NO: 674277 - DNA, 120 bp, Artificial Sequence
  ENSG00000185947_22 (sequence is synthesized)
tatcaaacttatgagtcacctaggggttcatagaaaaaggaagtttgcagatgcaataaatgtgaggaagtatttaataaaaaatgaagtctaaatgtgtcagagaatttatgtgagaaa

SEQ ID NO: 674278 - DNA, 120 bp, Artificial Sequence
  ENSG00000185947_23 (sequence is synthesized)
ggactaaagcacagacactttcagcctttatactaaataagagtattttttgtacagaataatctaaaggcaaaataattagataatttatttgcttatatgttttaaagtagcaagaac

SEQ ID NO: 674279 - DNA, 120 bp, Artificial Sequence
  ENSG00000185947_24 (sequence is synthesized)
attgatgttttgacaggtatatttcatagatacttcatttgtatttacagtatttgaggtttttggaaagcaaatattatttatataattcagctttcaaatctgttgctgcttttcctt

SEQ ID NO: 674280 - DNA, 120 bp, Artificial Sequence
  ENSG00000185947_25 (sequence is synthesized)
aatccgtggtgttcatgtgaaaatatgtgttctgtttttttttctgcatcagaacaatgtgaggtcattctacgttaatatcattaatatcagcatttttcatggaagtttaatgccaaa

SEQ ID NO: 674281 - DNA, 120 bp, Artificial Sequence
  ENSG00000185947_26 (sequence is synthesized)
tgtaaaacacatgaaaatttttaaaaatatgctctttgtgtttgaataaagtagtaatgcatgtaaacatatacgtgtttagagctcttttctatattaaagtaagagggatattctgaa

SEQ ID NO: 674282 - DNA, 120 bp, Artificial Sequence
  ENSG00000185947_27 (sequence is synthesized)
tcccggaagctgggaaatgaactgtctgggatgactcaagatgcccacagtggccatgtctcctggagtgtttagtgactgtcagccccaggtcacctcctgttagaggaccgcccaagg

SEQ ID NO: 674283 - DNA, 120 bp, Artificial Sequence
  ENSG00000185947_28 (sequence is synthesized)
tacaaatactatcttataacctattgttttaactgctgacaacttcacactgattgcctaagtgaacaaataagcaataagaaaactagtaaaaactctacctttaactttgcttcccca

SEQ ID NO: 674284 - DNA, 120 bp, Artificial Sequence
  ENSG00000185947_29 (sequence is synthesized)
tttttcaactttttgttggttctctttatgtcttattgtactgtctttgtcttgaaacattgttgtagttgtattgagtcatcattgagtatttctacttgagtattttacacaccacag

SEQ ID NO: 674285 - DNA, 120 bp, Artificial Sequence
  ENSG00000185947_30 (sequence is synthesized)
ttaccatattataatactcagtttttctctgtgctattaccaatgagttctgtaccttcagatgacttcttattgttcattaacattcttttcttacagatggaagagaatgccccttag

SEQ ID NO: 674286 - DNA, 120 bp, Artificial Sequence
  ENSG00000185947_31 (sequence is synthesized)
tattacttgtaggacaggtctggttttaatgaaatctctcagtgtttgtctgggaaggtcatttttttctccttcatggctatggaatattttcacgggatagactattctagtgtaaaa

SEQ ID NO: 674287 - DNA, 120 bp, Artificial Sequence
  ENSG00000185947_32 (sequence is synthesized)
gctttgctacttcagcactttaaatatgtcatgctattctctcctggcctgtaagatttccactgaaaatctgctgccagacgtactggagtttcattgtatgctgtttcttttttcttg

SEQ ID NO: 674288 - DNA, 120 bp, Artificial Sequence
  ENSG00000185947_33 (sequence is synthesized)
ctgcttttaggatcctttattcttaatttttgggagtttgattattaaatgtcttgaggtagtcgtctttgggttcaatctgctttgtgttctgtaacctggttgtacttggatattgat

SEQ ID NO: 674289 - DNA, 120 bp, Artificial Sequence
  ENSG00000185947_34 (sequence is synthesized)
atctttatagatttgggaagttctctgatcgtattcttgaaactttctacccctgtctctttctctctttaaggctaacaactcttagatttgcccttttcagggtgttttctaaatctt

SEQ ID NO: 674290 - DNA, 120 bp, Artificial Sequence
  ENSG00000185947_35 (sequence is synthesized)
gtaggcatacttcattcttttttgtcttctctacatattttcaaattgcctatgttcaagctcaataattttttcttttgcctgatcagttttgctattaagagactgatgcattcttca

SEQ ID NO: 674291 - DNA, 120 bp, Artificial Sequence
  ENSG00000185947_36 (sequence is synthesized)
gtatgccaattgcttttttaacttcaatttctgcttgattccttttaattatttcaacctctttgtttgatttatctgatagaatctgaattccttctctattttatcttgaatttgttt

SEQ ID NO: 674292 - DNA, 120 bp, Artificial Sequence
  ENSG00000185947_37 (sequence is synthesized)
cctcaacacaactatgttgaatcatctgtctgaaaagttacttattttgtttctccaggattggcctcttatgccttattcagtttgttaggtgaggccatattttactggatggtctta

SEQ ID NO: 674293 - DNA, 120 bp, Artificial Sequence
  ENSG00000185947_38 (sequence is synthesized)
atgtgtagatgttcatctgtgtcttggcattgaagagttaggcatttattgtagccttcgcagtctgggctttgtgtccacccttgttgggaaggctttccagaatttgaaggtacttgg

SEQ ID NO: 674294 - DNA, 120 bp, Artificial Sequence
  ENSG00000185947_39 (sequence is synthesized)
atctcaaactcaataacgttgttcttgcagactcatagaggtaccatgtggttggtcttggttaaaatcgatgaattatctggattaccaagcagagactcttgttctcttcccttagtt

SEQ ID NO: 674295 - DNA, 120 bp, Artificial Sequence
  ENSG00000185947_40 (sequence is synthesized)
tcttccagacgaatggaatttctttctctatgctgagctacctggagctggggtgggatgacataagcttccctgttgcccccaccactgggactgtgctaatttagacttgaagtgagc

SEQ ID NO: 674296 - DNA, 120 bp, Artificial Sequence
  ENSG00000185947_41 (sequence is synthesized)
acagcactgggtgtcacccaaggcccagtgtaattactgcctggctaccacctaagtttactcaagaccttaggcctctacaatcagcaggtggtaaccagccaggtttgtgtctcctca

SEQ ID NO: 674297 - DNA, 120 bp, Artificial Sequence
  ENSG00000185947_42 (sequence is synthesized)
gggcagtgagttccctttggccccaggtaggttcagagatattgtgtgggagccaggtattgaagtcagaagccttatttatctcgtgttctattctactgcagctaagctggcattcaa

SEQ ID NO: 674298 - DNA, 120 bp, Artificial Sequence
  ENSG00000185947_43 (sequence is synthesized)
attacaagacaacatccttaccactcctccctcccctttctgcaggcagaggagcctcacaatgtgtctgccaccaccaccagcccacaggggtttccactgggctatcactgatgttca

SEQ ID NO: 674299 - DNA, 120 bp, Artificial Sequence
  ENSG00000185947_44 (sequence is synthesized)
ctcaacacccaagcactcttcagtcagcttatgatgactgcttccacaactgggacttactctttggtgcagggcaggtccagaaatgctgactcagggaccctaagagtctgcttggtg

SEQ ID NO: 674300 - DNA, 120 bp, Artificial Sequence
  ENSG00000185947_45 (sequence is synthesized)
ctctaccccactgtggccaagctggtacctcaggtgcaagacagaatcccatttactttttcctctgctttgctcaaacagaaggtgtctttcactatacccaccacagtgggaaatgtt

SEQ ID NO: 674301 - DNA, 120 bp, Artificial Sequence
  ENSG00000185947_46 (sequence is synthesized)
ctgggtcacacctgaagccagcacatctcggagtccaatgttcatgatgtgttattggggtaccactgtaggttattcagagaccagcagctcctaagtcagaaggtgatgaatcctgcc

SEQ ID NO: 674302 - DNA, 120 bp, Artificial Sequence
  ENSG00000185947_47 (sequence is synthesized)
aggtctctgctgtgatagggcagcactgggttcattgtagtcccctagtcactgtgctctccgtctcccaaatgaacagatttctccccgccatgcagatgctgctgaggggcaagggca

SEQ ID NO: 674303 - DNA, 120 bp, Artificial Sequence
  ENSG00000185947_48 (sequence is synthesized)
tatcaattgagaaaacacggcctcaggtttttcactcaactgttgttgtattctcaacttagcataattttgtatattagatttgtaaaatatatgtacctgaatatagtaattggaatt

SEQ ID NO: 674304 - DNA, 120 bp, Artificial Sequence
  ENSG00000185947_49 (sequence is synthesized)
agcctcggggtctgggccccgagtcccaactggtgcagctcggccctcggtcccctccgctgcaagatggcggccaggccggcagccgggaccccgcgtgtcctgtcccatcccgacccc

SEQ ID NO: 674305 - DNA, 120 bp, Artificial Sequence
  ENSG00000185947_50 (sequence is synthesized)
gcagagcgacctcgtccctggccggagccctctctgggcagctccgcgtcgcagccccgcgtctcccccagattgtgcgggactgttgacattcagggatgtggccgtagaattctcttt

SEQ ID NO: 674306 - DNA, 120 bp, Artificial Sequence
  ENSG00000185950_0 (sequence is synthesized)
gttactcactgtgcggcggggaccgcgacgagcccgggtcgccgttggcagcagcagcagcaacaccagcagcagcagcagccccggcggcggcgcggaccccgagcgcccgggcgcacc

SEQ ID NO: 674307 - DNA, 80 bp, Artificial Sequence
  ENSG00000185950_1 (sequence is synthesized)
ggcctccccggaccttccccaccgcctgggcccgagggacgcgtgatcgggcgggcggccgggcgcaagggtgggaggga

SEQ ID NO: 674308 - DNA, 120 bp, Artificial Sequence
  ENSG00000185950_2 (sequence is synthesized)
ccgggcccgggccgcgcggcctgaagcgcccgcgatggcgagcccgccgcggcacgggccgcccgggccggcgagcggagacggccccaacctcaacaacaacaacaacaacaacaacca

SEQ ID NO: 674309 - DNA, 120 bp, Artificial Sequence
  ENSG00000185950_3 (sequence is synthesized)
acaacaacaacaaccacagcgtgcgcaagtgcggctacctgcgcaagcagaagcatggccacaagcgcttcttcgtgctgcgcggacccggcgcgggcggcgacgaggcgacggcgggcg

SEQ ID NO: 674310 - DNA, 120 bp, Artificial Sequence
  ENSG00000185950_4 (sequence is synthesized)
gggggtcggcgccgcaaccgccgcggctcgagtactacgagagcgagaaaaagtggcggagcaaggcaggcgcgccgaaacgggtgatcgctctcgactgctgcctgaacatcaacaagc

SEQ ID NO: 674311 - DNA, 120 bp, Artificial Sequence
  ENSG00000185950_5 (sequence is synthesized)
gcgccgacgccaagcacaagtacctgatcgccctctacaccaaggacgagtacttcgccgtggccgccgagaacgagcaggagcaggagggctggtaccgcgcgctcaccgacctggtca

SEQ ID NO: 674312 - DNA, 80 bp, Artificial Sequence
  ENSG00000185950_6 (sequence is synthesized)
gtcctgcagcgcctccctgcccggcgccctgggcggctctgccggcgccgccggggccgaggacagctacgggctggtgg

SEQ ID NO: 674313 - DNA, 120 bp, Artificial Sequence
  ENSG00000185950_7 (sequence is synthesized)
acgggctggtggctcccgccacggccgcctaccgtgaggtgtggcaggtgaacctgaagcccaagggtctgggccagagcaagaacctgacgggggtgtaccgtctgtgcctgtctgcgc

SEQ ID NO: 674314 - DNA, 120 bp, Artificial Sequence
  ENSG00000185950_8 (sequence is synthesized)
gcaccatcggcttcgtgaagctcaactgcgagcagccgtcggtgacgctgcagctcatgaacatccgccgctgcggccactcggacagcttcttcttcatcgaggtgggccgctcggccg

SEQ ID NO: 674315 - DNA, 120 bp, Artificial Sequence
  ENSG00000185950_9 (sequence is synthesized)
tcacaggccccggcgagctgtggatgcaggcggacgactcggtggtggcgcagaacatccacgagaccatcctggaggccatgaaggcgctcaaggagctcttcgagttccggccgcgca

SEQ ID NO: 674316 - DNA, 120 bp, Artificial Sequence
  ENSG00000185950_10 (sequence is synthesized)
gtaagagccaatcgtcggggtcgtcggccacgcaccccatcagcgtccccggcgcgcgccgccaccaccacctggtcaacctgccccccagccagacgggcctggtgcgccgctcgcgca

SEQ ID NO: 674317 - DNA, 80 bp, Artificial Sequence
  ENSG00000185950_11 (sequence is synthesized)
ccgacagcctggccgccaccccgccggcggccaagtgcagctcgtgccgggtgcgcaccgccagcgagggcgacggcggc

SEQ ID NO: 674318 - DNA, 80 bp, Artificial Sequence
  ENSG00000185950_12 (sequence is synthesized)
gtgtcggtggctgggagccccctgagccccgggccggtgcgcgcgcccctgagccgctcgcacaccctgagcggcggctg

SEQ ID NO: 674319 - DNA, 120 bp, Artificial Sequence
  ENSG00000185950_13 (sequence is synthesized)
cgctgcaacacagccgctccatgtccatgcccgtggcgcactcgccgcccgccgccaccagccccggctccctgtcgtccagcagcggccacggctcgggctcctacccgccgccgcccg

SEQ ID NO: 674320 - DNA, 120 bp, Artificial Sequence
  ENSG00000185950_14 (sequence is synthesized)
gcccgcacccgcctctgccgcatccgctgcaccacggccccggccagcggccctccagcggcagcgcctccgcctcgggctcccccagcgaccccggcttcatgtccctggacgagtacg

SEQ ID NO: 674321 - DNA, 120 bp, Artificial Sequence
  ENSG00000185950_15 (sequence is synthesized)
gctccagcccaggcgacctgcgcgccttctgcagccaccgaagcaacacgcccgagtccatcgcggagacgcccccggcccgagacggcggcggcggcggtgagttctacgggtacatga

SEQ ID NO: 674322 - DNA, 120 bp, Artificial Sequence
  ENSG00000185950_16 (sequence is synthesized)
ccatggacaggcccctgagccactgtggccgctcctaccgccgggtctcgggggacgcggcccaggacctggaccgagggctgcgcaagaggacctactccctgaccacgccagcccggc

SEQ ID NO: 674323 - DNA, 120 bp, Artificial Sequence
  ENSG00000185950_17 (sequence is synthesized)
agcggccggtgccccagccctcctctgcctcgctggatgaatacaccctgatgcgggccaccttctcgggcagcgcgggccgcctctgcccgtcctgccccgcgtcctctcccaaggtgg

SEQ ID NO: 674324 - DNA, 120 bp, Artificial Sequence
  ENSG00000185950_18 (sequence is synthesized)
cctaccacccctacccagaggactacggagacatcgagatcggctcccacaggagctccagcagcaacctgggggcagacgacggctacatgcccatgacgcccggcgcggccctcgcgg

SEQ ID NO: 674325 - DNA, 120 bp, Artificial Sequence
  ENSG00000185950_19 (sequence is synthesized)
gcagtgggagcggcagctgcaggagcgacgactacatgcccatgagccccgccagcgtgtccgcccccaagcagatcttgcagcccagggccgccgccgccgccgccgccgccgtgcctt

SEQ ID NO: 674326 - DNA, 120 bp, Artificial Sequence
  ENSG00000185950_20 (sequence is synthesized)
ctgcggggcctgcggggccagcacccacctctgcggcgggcaggacattcccggcgagcgggggcggctacaaggccagctcgcccgccgagagctcccccgaggacagtgggtacatgc

SEQ ID NO: 674327 - DNA, 120 bp, Artificial Sequence
  ENSG00000185950_21 (sequence is synthesized)
gcatgtggtgcggttccaagctgtccatggagcatgcagatggcaagctgctgcccaacggggactacctcaacgtgtcccccagcgacgcggtcaccacgggcaccccgcccgacttct

SEQ ID NO: 674328 - DNA, 120 bp, Artificial Sequence
  ENSG00000185950_22 (sequence is synthesized)
tctccgcagccctgcaccccggcggggagccgctcaggggcgttcccggctgctgctacagctccttgccccgctcctacaaggccccctacacctgtggcggggacagcgaccagtacg

SEQ ID NO: 674329 - DNA, 120 bp, Artificial Sequence
  ENSG00000185950_23 (sequence is synthesized)
tgctcatgagctcccccgtggggcgcatcctggaggaggagcgtctggagcctcaggccacgccagggcccagccaggcggccagcgccttcggggccggccccacgcagccccctcacc

SEQ ID NO: 674330 - DNA, 120 bp, Artificial Sequence
  ENSG00000185950_24 (sequence is synthesized)
cgtgcggcctagcggcggccgcccggagggcttcttgggccagcgcggccgggcggtgaggcccacgcgcctgtccctggaggggctgcccagcctgcccagcatgcacgagtacccact

SEQ ID NO: 674331 - DNA, 120 bp, Artificial Sequence
  ENSG00000185950_25 (sequence is synthesized)
tgcacgagtacccactgccaccggagcccaagagccccggcgagtacatcaacatcgactttggcgagcccggggcccgcctgtcgccgcccgcgcctcccctgctggcgtcggcggcct

SEQ ID NO: 674332 - DNA, 120 bp, Artificial Sequence
  ENSG00000185950_26 (sequence is synthesized)
cgtcctcctcgctcttgtccgccagcagcccggcctcgtcgctgggctcaggcaccccgggcaccagcagcgacagccggcagcggtctccgctctccgactacatgaacctcgacttca

SEQ ID NO: 674333 - DNA, 120 bp, Artificial Sequence
  ENSG00000185950_27 (sequence is synthesized)
gctcccccaagtctcctaagccgggcgccccgagcggccaccccgtgggctccttggacggcctcctgtcccccgaggcctcctccccgtatccgccgttgcccccgcgtccgtccgcgt

SEQ ID NO: 674334 - DNA, 120 bp, Artificial Sequence
  ENSG00000185950_28 (sequence is synthesized)
accgccgccggccccgggggagctgtaccgcctgccccccgcctcggccgttgccaccgcccagggcccgggcgccgcctcatcgttgtcctcggacaccggggacaatggtgactacac

SEQ ID NO: 674335 - DNA, 120 bp, Artificial Sequence
  ENSG00000185950_29 (sequence is synthesized)
cggacaccggggacaatggtgactacaccgagatggcttttggtgtggccgccaccccgccgcaacctatcgcggcccccccgaagccagaagctgcccgcgtggccagcccgacgtcgg

SEQ ID NO: 674336 - DNA, 120 bp, Artificial Sequence
  ENSG00000185950_30 (sequence is synthesized)
gcgtgaagaggctgagcctcatggagcaggtgtcgggagtcgaggccttcctgcaggccagccagcccccggacccccaccgcggcgccaaggtcatccgcgcagacccgcaggggggcc

SEQ ID NO: 674337 - DNA, 120 bp, Artificial Sequence
  ENSG00000185950_31 (sequence is synthesized)
aggaaaagcagcgagggcggcgtgggtgtcggccctggagggggcgacgagccgcccacctccccacgacagttgcagccggcgccccctttggcaccgcagggccggccgtggaccccg

SEQ ID NO: 674338 - DNA, 120 bp, Artificial Sequence
  ENSG00000185950_32 (sequence is synthesized)
ggtcagcccgggggcttggtcggttgtcctgggagcggtggatcgcccatgcgcagagagacctctgccggcttccagaatggtctcaactacatcgccatcgacgtgagggaggagccc

SEQ ID NO: 674339 - DNA, 120 bp, Artificial Sequence
  ENSG00000185950_33 (sequence is synthesized)
gggctgccaccccagccgcagccgccgccgccgccgcttcctcagccgggagacaagagctcctggggccggacccgaagcctcgggggtctcatcagcgctgtgggcgtcggcagcacc

SEQ ID NO: 674340 - DNA, 120 bp, Artificial Sequence
  ENSG00000185950_34 (sequence is synthesized)
ggcggcgggtgcggggggccgggtcccggtgccctgccccctgccaacacctacgccagcattgacttcttgtcccaccacttgaaggaggccaccatcgtgaaagagtgaagatctgtc

SEQ ID NO: 674341 - DNA, 120 bp, Artificial Sequence
  ENSG00000185950_35 (sequence is synthesized)
tggctttatcaccaggatgtcacatgtcagagagtatcattaaaagaagacgctcagcactgtttcagcccgaagctgcttgcagttttcttttggatctgagcaatgactgtgtttgga

SEQ ID NO: 674342 - DNA, 120 bp, Artificial Sequence
  ENSG00000185950_36 (sequence is synthesized)
aacatctgtggactctgttagatgaggcaccaacaaggcaaggtcacctgcctctttcccttgttcccggatggggcattcatcattgtgctgtttgcgttttgttttgttttgttttaa

SEQ ID NO: 674343 - DNA, 120 bp, Artificial Sequence
  ENSG00000185950_37 (sequence is synthesized)
caaaattagctgaagaagttattctcaagaaaattggatgttttcattggccttcttaaattgtggccagtgtcttttaatttcttcttcttttccttttggcaaagcagatataaccct

SEQ ID NO: 674344 - DNA, 120 bp, Artificial Sequence
  ENSG00000185950_38 (sequence is synthesized)
cagcatgctaggagagtgcacccgtacctatggaagtggtaaaatctggtatttactggcttacactcaaaacgaccacagtcctacctcagttcaaggtaaagccggatttccgtggcg

SEQ ID NO: 674345 - DNA, 120 bp, Artificial Sequence
  ENSG00000185950_39 (sequence is synthesized)
ggggtcccacaggacctcctgtagtagcccctgcgctgtgtgtctggagcgcggtcctcggccttattgaaatggtccaagtagacagctgcttgttggattccagtgcaggtacctgcg

SEQ ID NO: 674346 - DNA, 120 bp, Artificial Sequence
  ENSG00000185950_40 (sequence is synthesized)
atgtttacgtccacaccgagcccagtgtgggactgacatttctcaatggaagtgaaatttgggattggactttgaagacggattactaaataataattattatatgtaactgaagcaacc

SEQ ID NO: 674347 - DNA, 120 bp, Artificial Sequence
  ENSG00000185950_41 (sequence is synthesized)
tacttttgaaaatcaactgtattgggtagtgggaggtgggagggaagggctttgggaaggggatgaatatctctttttacctttaacagacttgtttaatcttctcgatgtagatgttta

SEQ ID NO: 674348 - DNA, 120 bp, Artificial Sequence
  ENSG00000185950_42 (sequence is synthesized)
tgtaggtacttcacattgcaaacgccttttattctatttacaagctcagatgtctctgctctcctgaatcttgggcatgcctttctgtaaccaaaaatccctgtaggcgtgctagcaatt

SEQ ID NO: 674349 - DNA, 120 bp, Artificial Sequence
  ENSG00000185950_43 (sequence is synthesized)
aattccagggtggtccgggtttggcagatttgatttttaaaaaacgtattatctttaataaaatgttattatgtcaaccagtgaggctgccctgaacaaaaaaaacaaaaagaaaaaaaa

SEQ ID NO: 674350 - DNA, 120 bp, Artificial Sequence
  ENSG00000185950_44 (sequence is synthesized)
ggaaagaaagaaactgataaaaagaggcattccagcccctatgttattgatggaaaaagaaaaagaagaaaagcaatctcgcagtacatgttacttgtcgaaaaaattccggacaagact

SEQ ID NO: 674351 - DNA, 120 bp, Artificial Sequence
  ENSG00000185950_45 (sequence is synthesized)
acccttgttttatgttttcagtattctgaaaataccagtgtgtggcagttctcgcagatgttacctaaaactgctgaacttgaccggcagaatgttctgccgttttctgctccctcgaca

SEQ ID NO: 674352 - DNA, 120 bp, Artificial Sequence
  ENSG00000185950_46 (sequence is synthesized)
cttgattggagggctgtcgacctctcctcccgtgggggcttccccagtgcctatcttctctgatagtcatggagaggttacactaattcattggagatgtaagttgttggttttgttttg

SEQ ID NO: 674353 - DNA, 120 bp, Artificial Sequence
  ENSG00000185950_47 (sequence is synthesized)
tgttggttttgttttgttttgtttttagaaaaatatatataaatatataatagatatctatcgctatagaataatgcattaataaaatgaggcttttttagaggaagaccaaaaaattca

SEQ ID NO: 674354 - DNA, 120 bp, Artificial Sequence
  ENSG00000185950_48 (sequence is synthesized)
tttaatggcaatgcaaaagtcttcctgcttccgtgctgaactttagaacagaggattgtattgcaagacaaagttgaatgtaaagtgatctccctgaacatttttaaggttttacttttc

SEQ ID NO: 674355 - DNA, 120 bp, Artificial Sequence
  ENSG00000185950_49 (sequence is synthesized)
tgaaattatacatcacagcagtgcataggccatataatgttagctggaaggtcaatttcagtgtatgatatactttattaagatgtataaaaatcctgaagtttttatttagttttggga

SEQ ID NO: 674356 - DNA, 120 bp, Artificial Sequence
  ENSG00000185950_50 (sequence is synthesized)
ataggcatcaatgggtggtatttgctttgtaactccccccaggtacgatagggactgaatatggaccctgctgaaagcagtgtattgacgcatatttaactcgccctctatccgtagagt

SEQ ID NO: 674357 - DNA, 120 bp, Artificial Sequence
  ENSG00000185950_51 (sequence is synthesized)
agtcatgacactatacagatggttcgtgttcatactgcagcttaaaacaagcaaaatacacagatgataatatgctaaattttcctctatcctgtacatttcacaaaaaggcatatgcaa

SEQ ID NO: 674358 - DNA, 120 bp, Artificial Sequence
  ENSG00000185950_52 (sequence is synthesized)
tatttacatttttaatttagtttacagaatggaaccaaaatgtataaatgttatgtttgctaaaacttcacaatgtatattgggtctttgtacattttgcctgacttaccttaaatttaa

SEQ ID NO: 674359 - DNA, 120 bp, Artificial Sequence
  ENSG00000185950_53 (sequence is synthesized)
aatattttttgctatataaactttaacagttattaaacagtgttttctttttgggtacgtattgtttctggatatcaagatgttaaatatatttcttgctattgtgatatgacaagagac

SEQ ID NO: 674360 - DNA, 120 bp, Artificial Sequence
  ENSG00000185950_54 (sequence is synthesized)
ttaacttatcttgctctgtcttccactgtacacgctgtatataggggtcaatgtgatgctgctggagacgagaataaactggactagaatagtgcattgtatttagtctgtattgatcat

SEQ ID NO: 674361 - DNA, 120 bp, Artificial Sequence
  ENSG00000185950_55 (sequence is synthesized)
ggatgccctccttaatagccatatgcaataaaataaagtacattatttatgaaatgaatacagtcctgaagattttttctgtacgaattctctgtttaacataaagccaatctactttta

SEQ ID NO: 674362 - DNA, 120 bp, Artificial Sequence
  ENSG00000185950_56 (sequence is synthesized)
gagtttgggagtaagtgaggaaatactaggctcctaaaaatacttggataccccttttaattttaaaacttttattctggaagccaaaaaatacctgccagataacaacatttatgaaaa

SEQ ID NO: 674363 - DNA, 120 bp, Artificial Sequence
  ENSG00000185950_57 (sequence is synthesized)
gtaaatgtgttatataacaaaacagaacattcgatgtactctacaaaacagagtccttatgacgtgctggatgccattctaaatacataacaaatattaacttcttgatagctcatgaca

SEQ ID NO: 674364 - DNA, 120 bp, Artificial Sequence
  ENSG00000185950_58 (sequence is synthesized)
atcttaggaggtaagaattgtcatcctcattctacagaggaggagcccgaggtacaaaaatgctaagagacttgtgtgagagcacacagtccatgagtggtaaaaccaggaccgctcccc

SEQ ID NO: 674365 - DNA, 120 bp, Artificial Sequence
  ENSG00000185950_59 (sequence is synthesized)
agctctgcagtccagaatctgcttatgcacctctgcttagtgctcccttcctgatgtgcacacagaagatacaccaacgtgtacatcaagaatgctccctccatgacatgcacacagaag

SEQ ID NO: 674366 - DNA, 71 bp, Artificial Sequence
  ENSG00000185950_60 (sequence is synthesized)
gtacatcaagaatgctccctccatgacatgcacacagaagatgtaccaatgcatacattaagaatgcttcc

SEQ ID NO: 674367 - DNA, 63 bp, Artificial Sequence
  ENSG00000185950_61 (sequence is synthesized)
gaagaatgctgcctccatgacacaaacacagaagaagacataccgatgcatacatcaagaata

SEQ ID NO: 674368 - DNA, 120 bp, Artificial Sequence
  ENSG00000185950_62 (sequence is synthesized)
aaacacagaagaagacataccgatgcatacatcaagaatacaaagaagaaaatcatcagatccaggaaaatgcaattcaggaagcagaaaatagaaaattgatgctgtgaatttttatcc

SEQ ID NO: 674369 - DNA, 120 bp, Artificial Sequence
  ENSG00000185950_63 (sequence is synthesized)
aggagagttttacctccttgcttgaaacatttgtccgtgcatccactttgccctaaaatgatagtcatgtaataatgtgtgtgttatcttttgaacaaataaaatcagtgcaatttggaa

SEQ ID NO: 674370 - DNA, 120 bp, Artificial Sequence
  ENSG00000185955_0 (sequence is synthesized)
cctacttcgactcctctccctgtcccagggaggggagaaaaggtctgggattcattgccaggaggggcttcccccaggatttcctacttctttctttactgctgtgcttgaagctcacag

SEQ ID NO: 674371 - DNA, 120 bp, Artificial Sequence
  ENSG00000185955_1 (sequence is synthesized)
gagacccctcaagaggtggtcaccggcccacagcccaccccatcccccacccgccacccccaccgtaccaaatgctagctctgccctttcttctgtgtttttcccatcaagagagatggt

SEQ ID NO: 674372 - DNA, 120 bp, Artificial Sequence
  ENSG00000185955_2 (sequence is synthesized)
tgtggtcatgaagttcttccgatgggttagacgggcttggcaaaggattatttcctgggttttcttctggaggcaaaaaattaaaccaaccatctcaggacaccctgactccaagaaaca

SEQ ID NO: 674373 - DNA, 120 bp, Artificial Sequence
  ENSG00000185955_3 (sequence is synthesized)
ctcattgaagaagatggagaagactctccaggtggttgagactttgaggttggtcgagctcccaaaagaggctaagcccaagttgggtgagtcccccgagctggcagatccctgcgtgtt

SEQ ID NO: 674374 - DNA, 120 bp, Artificial Sequence
  ENSG00000185955_4 (sequence is synthesized)
gagctgggccaacagggccaatccctactgcagctgccgaggacggccgtcaagtctgtctccacgctcatggtctctgccctgcagagcggctggcagatgtgcagctggaagtcatca

SEQ ID NO: 674375 - DNA, 120 bp, Artificial Sequence
  ENSG00000185955_5 (sequence is synthesized)
gtgagttctgcctcagtcagctcccaagtgaggacgcagtcacctttgaagactccggaggctgagttgctgtgggaggtgtacctggtgctgtgggccgttcggaaacacctgcgccgg

SEQ ID NO: 674376 - DNA, 120 bp, Artificial Sequence
  ENSG00000185955_6 (sequence is synthesized)
ctgtaccgcaggcaggagaggcacagacggcaccacgtccgatgccatgctgccccccgacccaacccggctcagtccctgaaactggatgcccaaagtcccctctagggggaaccccag

SEQ ID NO: 674377 - DNA, 120 bp, Artificial Sequence
  ENSG00000185955_7 (sequence is synthesized)
acccttagagagtcctgacctcactcttacctggggtcccatatcagccccttcattccatgtattccagttgtaaaacaagtatcaaaatattgggaaataaatatcagatagttctga

SEQ ID NO: 674378 - DNA, 120 bp, Artificial Sequence
  ENSG00000185955_8 (sequence is synthesized)
cctggcctgtggccaaacaagatggagtggggaggaaggaaaggacagctggggaggggctggaggagaaggaagagaggccaggaaactcactgctccatcccttttgtgccttctttt

SEQ ID NO: 674379 - DNA, 120 bp, Artificial Sequence
  ENSG00000185955_9 (sequence is synthesized)
ctgtggatggtgttgtctctgccctgcccctctctcctgtctctcctctctgtgtcttggttctcaggttttcttctggaggcaaaaaattaaaccaaccatctcaggacaccctgactc

SEQ ID NO: 674380 - DNA, 120 bp, Artificial Sequence
  ENSG00000185958_0 (sequence is synthesized)
agagtatgccacaacttctaggatcaggaaagacctctcctagcttcctactggatatctttattagcatttttgtagattctgtgaaaaagaagaaataaaacgaaatcacccacattt

SEQ ID NO: 674381 - DNA, 120 bp, Artificial Sequence
  ENSG00000185958_1 (sequence is synthesized)
tcaaaatgttcttcaaaatgaaaaatgagatagacaatgaccctgaatcagaaaaatgcatcaaggattccaccatcatgagaagagagccccaaaatatccttagtcctttgatgctcc

SEQ ID NO: 674382 - DNA, 120 bp, Artificial Sequence
  ENSG00000185958_2 (sequence is synthesized)
ctaaccttgagatcccattctcagtaaaggatatcatctctaggattgagcgcgcacagctccatcgagccagagaggacattgatatgcagctgagtgaaataatgaacaatgtgcatc

SEQ ID NO: 674383 - DNA, 120 bp, Artificial Sequence
  ENSG00000185958_3 (sequence is synthesized)
ggataatgactcgctatactcttgtttttaactcgtcctctgaaaggaatgtctcccttacagaacataagaaaaaacagagaaccaattttcttgagaaaatggctacttacgctaaga

SEQ ID NO: 674384 - DNA, 120 bp, Artificial Sequence
  ENSG00000185958_4 (sequence is synthesized)
ctattgaaataagagaaaagactcttgccaacattctggcctggttggaagaatggaatgatgttttgtctgagatgactctaatggatgttgatgaacaccaccactggatagcacaaa

SEQ ID NO: 674385 - DNA, 120 bp, Artificial Sequence
  ENSG00000185958_5 (sequence is synthesized)
tggagttgttaccggacacgttaaaagctattgagaacaatgtcaagatactaagcagatttagtacatctttcctcgacgaaaagaagaaacaaaagaaaaaaatattatctagaggta

SEQ ID NO: 674386 - DNA, 120 bp, Artificial Sequence
  ENSG00000185958_6 (sequence is synthesized)
ctctatggaaatcttggaaagaaagagttataaaacgaccttcaacagcccgtgctttaagaccagatcagatgattagtgatcaacttgcaacaaatacaaaggtttcagaaatccaag

SEQ ID NO: 674387 - DNA, 120 bp, Artificial Sequence
  ENSG00000185958_7 (sequence is synthesized)
gtatgctacaggaactcataggcaccacaatgttcagtacattggaaaacaatgctattaaatatatatcatcaacaatagtaaacctttctacagctttgagtatgctaaatgatgaat

SEQ ID NO: 674388 - DNA, 120 bp, Artificial Sequence
  ENSG00000185958_8 (sequence is synthesized)
taaaatgtgttaacttccaaagttccactgtgtatgcacatgagacaagtgaagcagaaaaggagctctctctgaagataatacgagatctcagtaacgaaaatgaaatgcttcagcaga

SEQ ID NO: 674389 - DNA, 120 bp, Artificial Sequence
  ENSG00000185958_9 (sequence is synthesized)
aacttcaagatgcagaagaaaaatgtgaacaacttattcgatccaaaattgttatagaacaactatatgcaaaattgtccacatcatcaaccttgaaagtgttacctggaccttctccac

SEQ ID NO: 674390 - DNA, 120 bp, Artificial Sequence
  ENSG00000185958_10 (sequence is synthesized)
agtcatccagggcgataatcaaagttggtgatactgaggacaatatggacaatattttagacaaggaacttgaaaatattgtagatgaagtccaaagaaaagagaccaaggactctggga

SEQ ID NO: 674391 - DNA, 120 bp, Artificial Sequence
  ENSG00000185958_11 (sequence is synthesized)
taaaatgggactccactatttcatatacagcccaagctgaaagaactccagatttaactgaactacgacagcaacctgttgcttctgaagatatttccgaagacagcactaaagataacg

SEQ ID NO: 674392 - DNA, 120 bp, Artificial Sequence
  ENSG00000185958_12 (sequence is synthesized)
tatcattgaagaaaggtgatttctatcaggaagatgagactgatgagtatcaatcatggaaaagaagccacaaaaaagccacatatgtatatgagacctctggaccaaatctgagtgata

SEQ ID NO: 674393 - DNA, 120 bp, Artificial Sequence
  ENSG00000185958_13 (sequence is synthesized)
ataaaagtggacagaaagtctcagaggccaaacctagtcaatactatgagctacaagtactgaaaaagaaaagaaaagaaatgaaatccttttctgaagataaatcaaagtcacccactg

SEQ ID NO: 674394 - DNA, 120 bp, Artificial Sequence
  ENSG00000185958_14 (sequence is synthesized)
aagcaaaaagaaaacatctctctttaactgaaacaaagagccaaggtggcaaaagtggaacaagtatgatgatgttggagcaatttaggaaggtcaaacgtgaatctccatttgacaaac

SEQ ID NO: 674395 - DNA, 120 bp, Artificial Sequence
  ENSG00000185958_15 (sequence is synthesized)
gtccaactgcagcagagattaaagtggaacccaccactgagtcattggacaaagagggcaaaggtgaaattagaagcctagtggagccactcagtatgatccaatttgatgatactgctg

SEQ ID NO: 674396 - DNA, 120 bp, Artificial Sequence
  ENSG00000185958_16 (sequence is synthesized)
agccacagaaaggaaaaataaaaggaaagaaacaccatatctcttcaggaactatcacaagcaaagaagaaaaaactgaagagaaggaagagttgaccaaacaagtcaagtctcatcaac

SEQ ID NO: 674397 - DNA, 120 bp, Artificial Sequence
  ENSG00000185958_17 (sequence is synthesized)
ttgttaaatcactctcaagagtggctaaagagacttcagaatctaccagagttctagaaagtccagatggcaaaagtgaacagagtaacctcgaagaatttcaggaagccataatggctt

SEQ ID NO: 674398 - DNA, 120 bp, Artificial Sequence
  ENSG00000185958_18 (sequence is synthesized)
tcctaaaacagaaaattgataacataggaaaggcttttgacaaaaagactgttccgaaggaagaggagttattaaaaagagcagaagctgaaaaattaggaatcataaaggcaaaaatgg

SEQ ID NO: 674399 - DNA, 120 bp, Artificial Sequence
  ENSG00000185958_19 (sequence is synthesized)
aggaatatttccaaaaagtggctgaaactgtgactaaaatcttgagaaaatacaaagatacaaaaaaggaagaacaagttggagagaaacctataaaacaaaaaaaggtagtctcattta

SEQ ID NO: 674400 - DNA, 120 bp, Artificial Sequence
  ENSG00000185958_20 (sequence is synthesized)
tgccaggattgcattttcagaagtcaccaattagtgcaaaatctgaaagcagtaccctcctctcatatgagagcacagatccagtaattaacaatttaatacaaatgatcttggctgaaa

SEQ ID NO: 674401 - DNA, 120 bp, Artificial Sequence
  ENSG00000185958_21 (sequence is synthesized)
tagaaagtgaaagagatattccaacagtctcaacagtacagaaagaccacaaggagaaggaaaaacaaaggcaggagcaatatttgcaagagggtcaagaacaaatgtctggcatgagtc

SEQ ID NO: 674402 - DNA, 120 bp, Artificial Sequence
  ENSG00000185958_22 (sequence is synthesized)
tcaaacagcagttgctgggagaaagaaatctcttgaaggagcactatgagaagataagtgagaattgggaagaaaaaaaggcatggctccagatgaaggagggaaagcaagaacaacaga

SEQ ID NO: 674403 - DNA, 120 bp, Artificial Sequence
  ENSG00000185958_23 (sequence is synthesized)
gccagaaacagtggcaggaagaagagatgtggaaggaagagcaaaaacaggcaactccaaagcaggctgagcaagaggaaaagcaaaagcaaagaggacaggaggaagaagagcttccaa

SEQ ID NO: 674404 - DNA, 120 bp, Artificial Sequence
  ENSG00000185958_24 (sequence is synthesized)
agtcaagcctgcagcggctggaagaagggacccaaaaaatgaaaacacaagggttgctcttggaaaaggagaatggacagatgaggcagattcagaaggaagcgaaacatttggggccac

SEQ ID NO: 674405 - DNA, 120 bp, Artificial Sequence
  ENSG00000185958_25 (sequence is synthesized)
acaggagaagggagaaagggaaggaaaagcagaagccagagagagggctagaggacctcgaaaggcagatcaaaacaaaggatcagatgcagatgaaggaaacacaacctaaagagctag

SEQ ID NO: 674406 - DNA, 120 bp, Artificial Sequence
  ENSG00000185958_26 (sequence is synthesized)
aaaaaatggtcatccaaactccaatgacattatctcccaggtggaagagtgtattgaaagatgtacagcggtcatatgaaggaaaagagtttcagaggaatctgaagacattagagaacc

SEQ ID NO: 674407 - DNA, 120 bp, Artificial Sequence
  ENSG00000185958_27 (sequence is synthesized)
ttcctgatgaaaaggagcccatatcaatcacacctcccccctccctacaatactccctgcctggagctcttcctatttctggccagcctctcactaaatgcattcatctcacacctcagc

SEQ ID NO: 674408 - DNA, 120 bp, Artificial Sequence
  ENSG00000185958_28 (sequence is synthesized)
aggcccaggaagtggggatcacactcactcctcagcaggcccaggctcaggggatcacgctcacccttcagcaggcccaggaactagggatccctctcacccctcagcaggcccaggccc

SEQ ID NO: 674409 - DNA, 120 bp, Artificial Sequence
  ENSG00000185958_29 (sequence is synthesized)
tggagatccttttcacccctcagcaggcgcaggccctggggatccctctcacccctcagcagacccaggttcaagggatcactctcacccctcagcaggaccaggccccggggatctctc

SEQ ID NO: 674410 - DNA, 120 bp, Artificial Sequence
  ENSG00000185958_30 (sequence is synthesized)
ggccctggggatccctctcacccctcagcaggctcaggaattggggatccctctcacccctcagcaggcccaggccctgagggtctctctcacccctcagcaggctcaggaattggggat

SEQ ID NO: 674411 - DNA, 120 bp, Artificial Sequence
  ENSG00000185958_31 (sequence is synthesized)
ccctctcacccctcagcaggcccaggccctggggatcactctaacccttcagcaggcccagcaattggggatccctctcacccctcagcaggcgcaggctctcggaatcactctcacccc

SEQ ID NO: 674412 - DNA, 120 bp, Artificial Sequence
  ENSG00000185958_32 (sequence is synthesized)
taagcaggttcaggaactggggatccctcttactcctcagcaggcccaggccctggggatcactctcacccctaagcaggctcaggaattggggatccctctcaaccctcagcaggccca

SEQ ID NO: 674413 - DNA, 120 bp, Artificial Sequence
  ENSG00000185958_33 (sequence is synthesized)
gaccctggggatccctctcacccctaagcaggcacaggctctggggatccctttcacccctcagcaggcgcaggccctggggatccctctcacccctcagcaggcgcagactcaggagat

SEQ ID NO: 674414 - DNA, 120 bp, Artificial Sequence
  ENSG00000185958_34 (sequence is synthesized)
cactctcacccctcagcaggcccaggccttggggatgcctctcaccactcagcaggctcaggaactggggatccctctcacccctcagcacgctcaggccttggggatgcctctcaccac

SEQ ID NO: 674415 - DNA, 120 bp, Artificial Sequence
  ENSG00000185958_35 (sequence is synthesized)
tcagcaggctcaggaactggggatccctctcacccctcagcaggctcaggccttggggatgcctctcaccactcagcaggctcaggaactggggatccctctcacccctcagcaggctca

SEQ ID NO: 674416 - DNA, 120 bp, Artificial Sequence
  ENSG00000185958_36 (sequence is synthesized)
ggaattggggatccctttcacccctcagcaggcacaggctcaggagatcactctcacccctcagcaggcccaggccctggggatgcctctcaccgctcagcaggctcaggagctggggat

SEQ ID NO: 674417 - DNA, 120 bp, Artificial Sequence
  ENSG00000185958_37 (sequence is synthesized)
cactctcacccctcagcaggctcaggaattggggatccctctcacccctcagcaggcccaggccctggggatccctctcatccctccgcaggctcaggaattggggatccctctcacccc

SEQ ID NO: 674418 - DNA, 120 bp, Artificial Sequence
  ENSG00000185958_38 (sequence is synthesized)
tcagcaggcccaggccctggggatccttctcatccctccgcaggctcaggaattggggatccctctcacccctcagcaggcccaggccctggggatccctctgatccctccgcaggctca

SEQ ID NO: 674419 - DNA, 120 bp, Artificial Sequence
  ENSG00000185958_39 (sequence is synthesized)
ggaattggggatccctctcacccctcagcaggtccaggccctggggatccctctcatccctccgcaggctcaggaattggagatccctctcacccctcagcaggcccaggccctggggat

SEQ ID NO: 674420 - DNA, 120 bp, Artificial Sequence
  ENSG00000185958_40 (sequence is synthesized)
ccctctcacccctcagcaggcgcaggaactggggatccctctcacccctcagcaggcgcaggaactggggatccctctcacccctcagcaggcgcaggctcaggggatccctctcacccc

SEQ ID NO: 674421 - DNA, 120 bp, Artificial Sequence
  ENSG00000185958_41 (sequence is synthesized)
tcagcaggcccaggctctggggatctctctcacccctcagcaggcgcaggctcaggggatcactctcacccctcagcaggcccaggcactgggagtccccatcaccccagtaaatgcctg

SEQ ID NO: 674422 - DNA, 120 bp, Artificial Sequence
  ENSG00000185958_42 (sequence is synthesized)
ggtgtcagctgtcactcttacctctgagcaaacccacgctttggagtcccctatgaacttagaacaggctcaagaacagttattgaagttaggggttcctctcaccttagataaagccca

SEQ ID NO: 674423 - DNA, 120 bp, Artificial Sequence
  ENSG00000185958_43 (sequence is synthesized)
taccttgggatcgcccctcacccttaagcaagtccagtggtcccatagaccatttcagaaatcgaaggcttctctccccactgggcaatccatcatatcaagattgtctccaagtcttag

SEQ ID NO: 674424 - DNA, 120 bp, Artificial Sequence
  ENSG00000185958_44 (sequence is synthesized)
gctgtccctggcatcatcagctcctactgctgagaagtcctctatattcggggtctcttctactcctttgcagatatcaagggttcccctcaaccaaggcccctttgcccctgggaagcc

SEQ ID NO: 674425 - DNA, 120 bp, Artificial Sequence
  ENSG00000185958_45 (sequence is synthesized)
cctagaaatggggattctttctgagcctgggaagcttggggcaccacagactcttcgttcctctggacagaccctggtatacggaggtcaatccacttctgcgcagttcccggcaccaca

SEQ ID NO: 674426 - DNA, 120 bp, Artificial Sequence
  ENSG00000185958_46 (sequence is synthesized)
ggcccctccctcccctgggcagctcccaatatctcgggcccctcccactccagggcagccctttatagctggagttccacccacttctggacagattccaagtctctgggctcctctttc

SEQ ID NO: 674427 - DNA, 120 bp, Artificial Sequence
  ENSG00000185958_47 (sequence is synthesized)
tcctgggcagcccttagttcctgaagcctcttccatccctggggacctcctggaatctggacccttaaccttctctgagcagctccaggaattccagcctcctgccactgctgagcaatc

SEQ ID NO: 674428 - DNA, 120 bp, Artificial Sequence
  ENSG00000185958_48 (sequence is synthesized)
tccctatctgcaggctccttctacccctgggcagcatctggcaacatggacccttcctgggcgagcttcttcattatggatccctcccacctctagacatcctcccacactatggccgtc

SEQ ID NO: 674429 - DNA, 120 bp, Artificial Sequence
  ENSG00000185958_49 (sequence is synthesized)
cccagcccctggaaagccccagaaaagttggtccccttctgttgctaagaaaagattggcaattatttcttctctgaaatctaaatcagtattgatccatcctagtgctccagatttcaa

SEQ ID NO: 674430 - DNA, 120 bp, Artificial Sequence
  ENSG00000185958_50 (sequence is synthesized)
ggtagctcaagttcctttcaccactaagaagttccaaatgtcggaggtctctgacacttccgaagaaacccagatacttcgagacacttttgctatagaatcatttagaacatttcagtc

SEQ ID NO: 674431 - DNA, 120 bp, Artificial Sequence
  ENSG00000185958_51 (sequence is synthesized)
ccatttcaccaaatataggacaccagtataccaaaccccttacactgatgaaagggcccttctcactctcatgaagccaacaacatcaccatcttctctcactactctactcagaacatc

SEQ ID NO: 674432 - DNA, 120 bp, Artificial Sequence
  ENSG00000185958_52 (sequence is synthesized)
acagatttcacctttggaatggtaccagaaatcccgattccctcctatagacaagccctggatactgagttcagtttcagataccaagaaacccaaagtaatggtgcccccttcctctcc

SEQ ID NO: 674433 - DNA, 120 bp, Artificial Sequence
  ENSG00000185958_53 (sequence is synthesized)
tcaagaacttgaagaaaagaggtattttgttgatgtggaggctcagaagaagaacctgatactattaaatcaggctataaaaacttgtggactcccttcacagctacacacaatggctag

SEQ ID NO: 674434 - DNA, 120 bp, Artificial Sequence
  ENSG00000185958_54 (sequence is synthesized)
gactctcataattgagatacttcatatggacacagttcagttgggatacttattccgcaagtacattgcctataggctgatccagcatgccaggaacaacataatgaaacgactaaaagc

SEQ ID NO: 674435 - DNA, 120 bp, Artificial Sequence
  ENSG00000185958_55 (sequence is synthesized)
catccaaaatactgggaaaggctatgaggccaggaacctccacatgatgctgagcagacttgatgactacgggaaaaaggtgatgcaggtctggactgagaagcagaagtctctagggca

SEQ ID NO: 674436 - DNA, 120 bp, Artificial Sequence
  ENSG00000185958_56 (sequence is synthesized)
gaaacggaatcagtgcctgaagaaaatgatacacgtattcaaccagctcaaaaagatacatgaattgaatcttagtcaacctatccccttaatcatcgaagaaaagcagatacctgcctc

SEQ ID NO: 674437 - DNA, 120 bp, Artificial Sequence
  ENSG00000185958_57 (sequence is synthesized)
taccacatttgttcaaaagccattcttaaaattactaatggaagaggacagaacctctgacatatgcaagaaatttaggcaacaagaggaccagacagaggccatctggaatgttgatct

SEQ ID NO: 674438 - DNA, 120 bp, Artificial Sequence
  ENSG00000185958_58 (sequence is synthesized)
gtccacttcaagctacccaatagcagagaagacatctatgcattcactctgggcccagctgggtgggtacccagatattcccaggctgcttcagttagaagtgcagtctaccttccgaaa

SEQ ID NO: 674439 - DNA, 120 bp, Artificial Sequence
  ENSG00000185958_59 (sequence is synthesized)
atctcttgcatccctccaatcacgggttaagaagattcccaaatgactgtaaaattaaatacaagcatgttgaaagtacatttcagtatctttcagtaaaatgcctattttgttctcttt

SEQ ID NO: 674440 - DNA, 120 bp, Artificial Sequence
  ENSG00000185958_60 (sequence is synthesized)
ctacattactggaaacacaaaggttcaacaaccctggggtaggctgagtcatgaaagggacatcattatgggcccctaacatgatggcaaagtggcacagtctgcctttcccagtctaaa

SEQ ID NO: 674441 - DNA, 120 bp, Artificial Sequence
  ENSG00000185958_61 (sequence is synthesized)
cccgaagatgcctcagaaggaagaaataaatgagtataatgaaggaaactaaaaaccagcagacacccctgaagaattagaaggtggttatgattggtaatgaagggaaatcataatgtt

SEQ ID NO: 674442 - DNA, 120 bp, Artificial Sequence
  ENSG00000185958_62 (sequence is synthesized)
ggttcttggcattttgaacaaagaattgggcaaaatgcccagcaaagcaaataaagaatgaagcaacagaagaacgaaagcagggatttattgagaacaaaagtacactccacagtgcag

SEQ ID NO: 674443 - DNA, 120 bp, Artificial Sequence
  ENSG00000185958_63 (sequence is synthesized)
tattgagaacaaaagtacactccacagtgcaggagtggcccgagcagctgctcaaggacctggatacagaatcttcttgggtccaaataccctctagaagttgcctattgatcacttcat

SEQ ID NO: 674444 - DNA, 120 bp, Artificial Sequence
  ENSG00000185958_64 (sequence is synthesized)
gctcacctcatgtaaataaagcggtagcctgcaatcagtctgattggttgcagcaaaaagcaaccaatcagaggctagggtgaagttacaaacttatactcctatttttttttttttttg

SEQ ID NO: 674445 - DNA, 60 bp, Artificial Sequence
  ENSG00000185958_65 (sequence is synthesized)
caaacttatactcctgcgatctcggttcttgaaattctgcctcccaggttcaagcgattc

SEQ ID NO: 674446 - DNA, 68 bp, Artificial Sequence
  ENSG00000185958_66 (sequence is synthesized)
ggtttcgaactcccagcctgaggtgatccacctgccttgccgtcccaaagtgctgggattacaggcat

SEQ ID NO: 674447 - DNA, 84 bp, Artificial Sequence
  ENSG00000185958_67 (sequence is synthesized)
tctcaaagttacacttttatgcaaacaaagactggcctgcaatcagtctgattcattgagggcagccaatttcccatctgcctc

SEQ ID NO: 674448 - DNA, 120 bp, Artificial Sequence
  ENSG00000185960_0 (sequence is synthesized)
cgcctgcttttgcccgggtcctgagaacaggggctccccacactttttttttttttggttttgttttatttcgtttccgcgcgtctctttctactgcaaacagaaatgggagggtggaca

SEQ ID NO: 674449 - DNA, 120 bp, Artificial Sequence
  ENSG00000185960_1 (sequence is synthesized)
ggcgggtaggagcggatcagacgcccaggacgcagcagcccgagtccgcacagggtttgcgggaggtggtgaccgcgctggggacgccaggacgcgaatgaacctccggggcgcgctcgg

SEQ ID NO: 674450 - DNA, 120 bp, Artificial Sequence
  ENSG00000185960_2 (sequence is synthesized)
ggcctgcgctcagagcttggaaaactggagtttgcttttcctccggccacggagagaacgcgggtaacctgtgtggggggctcgggcgcctgcgcccccctcctgcgcgcgcgctctccc

SEQ ID NO: 674451 - DNA, 120 bp, Artificial Sequence
  ENSG00000185960_3 (sequence is synthesized)
ttccaaaaatgggatctttcccccttcgcaccaaggtgtacggacgccaaacagtgatgaaatgagaagaaagccaattgccggcctggggggtgggggagacacagcgtctctgcgtgc

SEQ ID NO: 674452 - DNA, 120 bp, Artificial Sequence
  ENSG00000185960_4 (sequence is synthesized)
gtccgccgcggagcccggagaccagtaattgcaccagacaggcagcgcatggggggctgggcgaggtcgccgcgtataaatagtgagatttccaatggaaaggcgtaaataacagcgctg

SEQ ID NO: 674453 - DNA, 120 bp, Artificial Sequence
  ENSG00000185960_5 (sequence is synthesized)
gtgatccacccgcgcgcacgggccgtcctctccgcgcggggagacgcgcgcatccaccagccccggctgctcgccagccccggccccagccatggaagagctcacggcttttgtatccaa

SEQ ID NO: 674454 - DNA, 120 bp, Artificial Sequence
  ENSG00000185960_6 (sequence is synthesized)
gtcttttgaccagaaaagcaaggacggtaacggcggaggcggaggcggcggaggtaagaaggattccattacgtaccgggaagttttggagagcggactggcgcgctcccgggagctggg

SEQ ID NO: 674455 - DNA, 120 bp, Artificial Sequence
  ENSG00000185960_7 (sequence is synthesized)
gacgtcggattccagcctccaggacatcacggagggcggcggccactgcccggtgcatttgttcaaggaccacgtagacaatgacaaggagaaactgaaagaattcggcaccgcgagagt

SEQ ID NO: 674456 - DNA, 120 bp, Artificial Sequence
  ENSG00000185960_8 (sequence is synthesized)
ggcagaagggatttatgaatgcaaagagaagcgcgaggacgtgaagtcggaggacgaggacgggcagaccaagctgaaacagaggcgcagccgcaccaacttcacgctggagcagctgaa

SEQ ID NO: 674457 - DNA, 120 bp, Artificial Sequence
  ENSG00000185960_9 (sequence is synthesized)
cgagctcgagcgactcttcgacgagacccattaccccgacgccttcatgcgcgaggagctcagccagcgcctggggctctccgaggcgcgcgtgcaggtttggttccagaaccggagagc

SEQ ID NO: 674458 - DNA, 120 bp, Artificial Sequence
  ENSG00000185960_10 (sequence is synthesized)
caagtgccgcaaacaagagaatcagatgcataaaggcgtcatcttgggcacagccaaccacctagacgcctgccgagtggcaccctacgtcaacatgggagccttacggatgcctttcca

SEQ ID NO: 674459 - DNA, 120 bp, Artificial Sequence
  ENSG00000185960_11 (sequence is synthesized)
acaggtccaggctcagctgcagctggaaggcgtggcccacgcgcacccgcacctgcacccgcacctggcggcgcacgcgccctacctgatgttccccccgccgcccttcgggctgcccat

SEQ ID NO: 674460 - DNA, 120 bp, Artificial Sequence
  ENSG00000185960_12 (sequence is synthesized)
cgcgtcgctggccgagtccgcctcggccgccgccgtggtcgccgccgccgccaaaagcaacagcaagaattccagcatcgccgacctgcggctcaaggcgcggaagcacgcggaggccct

SEQ ID NO: 674461 - DNA, 120 bp, Artificial Sequence
  ENSG00000185960_13 (sequence is synthesized)
gcgcgcccggactcccgggctccgcgcaccccgcctgcaccgcgcgtcctgcactcaaccccgcctggagctccttccgcggccaccgtgctccgggcaccccgggagctcctgcaagag

SEQ ID NO: 674462 - DNA, 120 bp, Artificial Sequence
  ENSG00000185960_14 (sequence is synthesized)
ccgggcaccccgggagctcctgcaagaggcctgaggagggaggctcccgggaccgtccacgcacgacccagccagaccctcgcggagatggtgcagaaggcggagcgggtgagcggccgt

SEQ ID NO: 674463 - DNA, 120 bp, Artificial Sequence
  ENSG00000185960_15 (sequence is synthesized)
cctgggaccctggagaagggtaaacccccgcctggctgcgtcttcctctgctataccctatgcatgcggttaactacacacgtttggaagatccttagagtctattgaaactgcaaagat

SEQ ID NO: 674464 - DNA, 120 bp, Artificial Sequence
  ENSG00000185960_16 (sequence is synthesized)
cccggagctggtctccgatgaaaatgccatttcttcgttgccaacgattttctttactaccatgctccttccttcatcccgagaggctgcggaacgggtgtggatttgaatgtggacttc

SEQ ID NO: 674465 - DNA, 120 bp, Artificial Sequence
  ENSG00000185960_17 (sequence is synthesized)
ggaatcccaggaggcaggggccgggctctcctccaccgctcccccggagcctcccaggcagcaataaggaaatagttctctggctgaggctgaggacgtgaaccgcgggctttggaaagg

SEQ ID NO: 674466 - DNA, 120 bp, Artificial Sequence
  ENSG00000185960_18 (sequence is synthesized)
gaggggagggagacccgaacctcccacgttgggactcccacgttccggggacctgaatgaggaccgactttataacttttccagtgtttgattcccaaattgggtctggttttgttttgg

SEQ ID NO: 674467 - DNA, 120 bp, Artificial Sequence
  ENSG00000185960_19 (sequence is synthesized)
ttttttttttttttttttttgctgtgttacaggattcagacgcaaaagacttgcataagagacggacgcgtggttgcaaggtgtcatactgatatgcagcattaactttactgacatgga

SEQ ID NO: 674468 - DNA, 120 bp, Artificial Sequence
  ENSG00000185960_20 (sequence is synthesized)
attaactttactgacatggagtgaagtgcaatattataaatattatagattaaaaaaaaaatagccgtgcactcttgaccccgtcagcgtccaacgtggaaaaggcgttacctcttctcc

SEQ ID NO: 674469 - DNA, 120 bp, Artificial Sequence
  ENSG00000185960_21 (sequence is synthesized)
cagcgctggccgcctggccactgagggccctttgcaaaaatcacgggtgtagagatggccctgggcgcgctgggagtgtggttgtgtttctgaaggggataaaagagggcacggtggtgc

SEQ ID NO: 674470 - DNA, 120 bp, Artificial Sequence
  ENSG00000185960_22 (sequence is synthesized)
caagatatcagtttggtacctgagctgtttctggttgggaagcgtaaaagccagggagagatccagagagttttcaagtttttgcagatgtaggtggttccagcttttctttctccccta

SEQ ID NO: 674471 - DNA, 120 bp, Artificial Sequence
  ENSG00000185960_23 (sequence is synthesized)
tgtaggtggttccagcttttctttctcccctactccatcttctgcgttcccccagttcttttatttctttgttttttatttttgagacagagacttgctttgtcgcccaggctggagtgc

SEQ ID NO: 674472 - DNA, 120 bp, Artificial Sequence
  ENSG00000185960_24 (sequence is synthesized)
gatctgcccgcctcggcctcccaacgtgcccccagttttataaacagcagatagcaacttgtcgtcacagctggcatgggctggacagttgcttgaaatgacctaaccaaaaacattcaa

SEQ ID NO: 674473 - DNA, 120 bp, Artificial Sequence
  ENSG00000185960_25 (sequence is synthesized)
ttgcttgaaatgacctaaccaaaaacattcaagggttctgcccccagatttcgggagatccacgttccatgttctgattggttttctgggaacacagcaaggggtttggtgacctccgag

SEQ ID NO: 674474 - DNA, 120 bp, Artificial Sequence
  ENSG00000185960_26 (sequence is synthesized)
aagatccatctgcatgattggcattagttaccacagcctgcccagagagaaactatcttctcccaacatttactaacatccactggtcaactctcttatttccataacacatttgcatct

SEQ ID NO: 674475 - DNA, 120 bp, Artificial Sequence
  ENSG00000185960_27 (sequence is synthesized)
ttctggattcaagcttggtggttttctttcctaacttctgatttagatacttctccctgaggtggggataaaagaaaaaaaaaaacaacttctttttttcttccgcataacactttctat

SEQ ID NO: 674476 - DNA, 120 bp, Artificial Sequence
  ENSG00000185960_28 (sequence is synthesized)
cttgtcactgagctgaactgtagatccatttggacccgtctcatttgtatcttctgatattctttatacaaaccaaaagtccccttcaacattttttatgtcaaaatgttacaaccgctg

SEQ ID NO: 674477 - DNA, 120 bp, Artificial Sequence
  ENSG00000185960_29 (sequence is synthesized)
taaaatgacggagagagagagaaagaatcccagacattaacggtattagagagtttgcctcattcatccatttttcttaaaagctggaaattaaaaaaaaaaaagagagagagaggcttt

SEQ ID NO: 674478 - DNA, 80 bp, Artificial Sequence
  ENSG00000185960_30 (sequence is synthesized)
cctgcgcccggcctttgtaactttatttttaattttttttttttttttaagaaagacagagtcttgctctgtcacccagg

SEQ ID NO: 674479 - DNA, 71 bp, Artificial Sequence
  ENSG00000185960_31 (sequence is synthesized)
atttttactagagacgggatcttgctttgctgctgaggctggtcttgagctcctgagctccaaagatcctc

SEQ ID NO: 674480 - DNA, 120 bp, Artificial Sequence
  ENSG00000185960_32 (sequence is synthesized)
gctgaggctggtcttgagctcctgagctccaaagatcctctcacctccacctcccaaagtgttagaattacaagcatgaaccactgcccgtggtctccaaaaaaaggactgttacgtgga

SEQ ID NO: 674481 - DNA, 120 bp, Artificial Sequence
  ENSG00000185962_0 (sequence is synthesized)
atgtcctgccagcagaaccagcagcagtgccagcctccgcccaagtgccctgcaaagagcccagcacagtgtctgcctccagcttcctccagctgtgccccaagctctgggggctgtggg

SEQ ID NO: 674482 - DNA, 120 bp, Artificial Sequence
  ENSG00000185962_1 (sequence is synthesized)
caccacagatgccgcaggtctcaccgttgccgttgccagagctccaactcctgtgacaggggaagtggtcagcaaggcgggagctccagctgtggccacagttctgcgggctgctgctga

SEQ ID NO: 674483 - DNA, 120 bp, Artificial Sequence
  ENSG00000185963_0 (sequence is synthesized)
gcggcggcggctgaggagggcccggcctgcgagagcctcagtgggagccggctcagccctcggccaccatgtcggcgccgtcggaggaggaggagtacgcgcggctggtgatggaggcgc

SEQ ID NO: 674484 - DNA, 120 bp, Artificial Sequence
  ENSG00000185963_1 (sequence is synthesized)
agccggagtggctgcgcgccgaggtgaagcggctgtcccacgagctggccgagaccacgcgtgagaagatccaggcggccgagtacgggctggcggtgctcgaggagaagcaccagctca

SEQ ID NO: 674485 - DNA, 120 bp, Artificial Sequence
  ENSG00000185963_2 (sequence is synthesized)
agctgcagttcgaggagctcgaggtggactatgaggctatccgcagcgagatggagcagctcaaggaggcctttggacaagcacacacaaaccacaagaaggtggctgctgacggagaga

SEQ ID NO: 674486 - DNA, 120 bp, Artificial Sequence
  ENSG00000185963_3 (sequence is synthesized)
gccgggaggagagcctgatccaggagtcggcctccaaggagcagtactacgtgcggaaggtgctagagctgcagacggagctgaagcagttgcgcaatgtcctcaccaacacgcagtcgg

SEQ ID NO: 674487 - DNA, 120 bp, Artificial Sequence
  ENSG00000185963_4 (sequence is synthesized)
agaatgagcgcctggcctctgtggcccaggagctgaaggagatcaaccagaatgtggagatccagcgtggccgcctgcgggatgacatcaaggagtacaaattccgggaagctcgtctgc

SEQ ID NO: 674488 - DNA, 120 bp, Artificial Sequence
  ENSG00000185963_5 (sequence is synthesized)
tgcaggactactcggaactggaggaggagaacatcagcctgcagaagcaagtgtctgtgctcagacagaaccaggtggagtttgagggcctcaagcatgagatcaagcgtctggaggagg

SEQ ID NO: 674489 - DNA, 120 bp, Artificial Sequence
  ENSG00000185963_6 (sequence is synthesized)
agaccgagtacctcaacagccagctggaggatgccatccgcctcaaggagatctcagagcggcagctggaggaggcgctggagaccctgaagacggagcgcgaacagaagaacagcctgc

SEQ ID NO: 674490 - DNA, 120 bp, Artificial Sequence
  ENSG00000185963_7 (sequence is synthesized)
gcaaggagctgtcacactacatgagcatcaatgactccttctacaccagccacctgcatgtctcgctggatggcctcaagttcagtgacgatgctgccgagcccaacaacgatgccgagg

SEQ ID NO: 674491 - DNA, 120 bp, Artificial Sequence
  ENSG00000185963_8 (sequence is synthesized)
ccctggtcaatggctttgagcacggcggcctggccaagctgccactggacaacaagacctccacgcccaagaaggagggcctcgcaccgccctcccccagcctcgtctccgacctactca

SEQ ID NO: 674492 - DNA, 120 bp, Artificial Sequence
  ENSG00000185963_9 (sequence is synthesized)
gtgagctcaacatctctgagatccagaagctgaagcagcagctgatgcagatggagcgggaaaaggcgggcctgctggcaacgctgcaggacacacagaagcagctggagcacacgcggg

SEQ ID NO: 674493 - DNA, 120 bp, Artificial Sequence
  ENSG00000185963_10 (sequence is synthesized)
gctccctgtcagaacagcaggagaaggtgacccgcctcacagagaatctgagtgccctgcggcgcctgcaggccagcaaggagcggcagacagccctggacaacgagaaggaccgtgaca

SEQ ID NO: 674494 - DNA, 120 bp, Artificial Sequence
  ENSG00000185963_11 (sequence is synthesized)
gccatgaggatggggactactacgaggtggacatcaacgggcctgagatcttggcctgcaagtaccatgtggctgtggctgaggctggcgagctccgcgagcagctcaaggcactgcgca

SEQ ID NO: 674495 - DNA, 120 bp, Artificial Sequence
  ENSG00000185963_12 (sequence is synthesized)
gcacgcacgaggctcgtgaggcccagcacgccgaggagaagggccgctatgaggctgagggccaggcactcacggagaaggtctccctgctagagaaggccagccgccaggaccgcgagc

SEQ ID NO: 674496 - DNA, 120 bp, Artificial Sequence
  ENSG00000185963_13 (sequence is synthesized)
tgctggcccggctggagaaggagctaaagaaggtgagcgacgtcgccggcgagacacagggcagcctgagtgtggcccaggatgagctggtgaccttcagtgaggagctggccaatctct

SEQ ID NO: 674497 - DNA, 120 bp, Artificial Sequence
  ENSG00000185963_14 (sequence is synthesized)
accaccacgtgtgcatgtgcaacaatgagacacccaaccgtgtcatgctggactactaccgcgagggccagggcggggccggccgcaccagtcccgggggccgcaccagccccgaggcgc

SEQ ID NO: 674498 - DNA, 120 bp, Artificial Sequence
  ENSG00000185963_15 (sequence is synthesized)
gtggccggcgctcacccatcctcctacccaaggggctgctggctcctgaggcgggccgagcagatggtgggacgggggacagcagcccctcgcctggctcctcactgccatcacccctga

SEQ ID NO: 674499 - DNA, 120 bp, Artificial Sequence
  ENSG00000185963_16 (sequence is synthesized)
gtgacccacgccgggagcccatgaacatctacaacctgatcgctatcatccgtgaccagatcaagcacctgcaggcagccgtggaccgcaccacggagctgtcacgccagcgcattgcct

SEQ ID NO: 674500 - DNA, 120 bp, Artificial Sequence
  ENSG00000185963_17 (sequence is synthesized)
ctcaggagctgggccccgccgtggacaaggacaaggaagcgcttatggaggagatcctcaagctgaagtcgctgctcagcaccaagcgggagcagatcaccacgctgcgcactgtgctca

SEQ ID NO: 674501 - DNA, 120 bp, Artificial Sequence
  ENSG00000185963_18 (sequence is synthesized)
aggccaacaagcagacggccgaggtggcccttgccaacctgaagagcaagtatgagaatgagaaggccatggttaccgagaccatgatgaagctgcgcaatgagctcaaggccctcaagg

SEQ ID NO: 674502 - DNA, 120 bp, Artificial Sequence
  ENSG00000185963_19 (sequence is synthesized)
gatgcagcggcagctggcggctgctgaggacgagaagaagacgctgaactcgctgctgcgcatggccatccagcagaagctggcgctgacccagcggctggagctgctcgagctggacca

SEQ ID NO: 674503 - DNA, 120 bp, Artificial Sequence
  ENSG00000185963_20 (sequence is synthesized)
tgagcagacccggcgtggccgtgccaaagccgccccgaagaccaagccagccacaccgagcctgtagagtagctgccaggaggacttggccacccggccctgtcacactgcagccccttc

SEQ ID NO: 674504 - DNA, 120 bp, Artificial Sequence
  ENSG00000185963_21 (sequence is synthesized)
cccttccctctcgtggcccacaaggaggaaggaagggcaacctaaaagcccacttagaaactttttggatatgccactgcaattcttttcaaaatagcattccccaggtttttaatggga

SEQ ID NO: 674505 - DNA, 120 bp, Artificial Sequence
  ENSG00000185963_22 (sequence is synthesized)
ggaaaaaaagctttaatgttgagcatgctgcgagctgctgcgtggaaaggcctctgtatgggccgaagacccttcttccctggctgccaggctcgccaggagcccactggaaacgcccac

SEQ ID NO: 674506 - DNA, 120 bp, Artificial Sequence
  ENSG00000185963_23 (sequence is synthesized)
cacgggggctccttgttacacatgttctttttttatccgatcaacctgtgcacttttgatattttgatattatatttgcttccttaattcctcgcgtagagacggtctcaggtgccgtgg

SEQ ID NO: 674507 - DNA, 120 bp, Artificial Sequence
  ENSG00000185963_24 (sequence is synthesized)
tctatgctcgtggtcctgtagctgtccgcctcagctcccaccgtgtttgtctggtgtcagcacgaggcagagctgtgtgctccatagcgtgtagctttagactcggagatgagtgctttg

SEQ ID NO: 674508 - DNA, 120 bp, Artificial Sequence
  ENSG00000185963_25 (sequence is synthesized)
acccagcgaggagctcagctaagtgtatccacgctgtggttcagcagcctttagatcatacggcattgtggttcatgtttgaaattacagattttaaatgccatgttcattaagaaatcc

SEQ ID NO: 674509 - DNA, 120 bp, Artificial Sequence
  ENSG00000185963_26 (sequence is synthesized)
agggtattcagattctggggtttttcatattgtattattattattcttaggaatagttcaatgtaacaagaagaaaacttgacctttgctctggttaaaacagtaataggcacttgaaaa

SEQ ID NO: 674510 - DNA, 120 bp, Artificial Sequence
  ENSG00000185963_27 (sequence is synthesized)
aaaaagataaattattgaatgagtagtattacctacaaattccagaattttctgggttttaggacgttgtgaagcatgactgattaacagaattttatacaactgtaccaataaaattcc

SEQ ID NO: 674511 - DNA, 120 bp, Artificial Sequence
  ENSG00000185963_28 (sequence is synthesized)
aaattggaattgttttgttactctggttgttgtgccaaattgtggtacacttagaaaattctacagtcgtcgatttttagggtgttctctttcaacacctttttgttagtaatcattgcc

SEQ ID NO: 674512 - DNA, 120 bp, Artificial Sequence
  ENSG00000185963_29 (sequence is synthesized)
agtagtgccttcatcagttaagggaggtgtcccagcacagatcattctcaaaagcgagcagggaagagctagtgggcatgctgaaggccagcgtggacagcaggtgaggcaggtgctcct

SEQ ID NO: 674513 - DNA, 120 bp, Artificial Sequence
  ENSG00000185963_30 (sequence is synthesized)
cacacccagacctgggcatcttcattgagggaaagaaaacagtcattgtgcaaaattctgttagtcagtgattctttacttgcaaattcaggggcttagaaaatgaaagcaaacacaaaa

SEQ ID NO: 674514 - DNA, 120 bp, Artificial Sequence
  ENSG00000185963_31 (sequence is synthesized)
ccttgagtgtgctttgggaaccaaatggaccttctgggacaagctgagcaagctgtatgaacgccacgtttgtgaagagctgagggtatcaggagggccgacgctgtgttggcatgcgca

SEQ ID NO: 674515 - DNA, 120 bp, Artificial Sequence
  ENSG00000185963_32 (sequence is synthesized)
gtaggggatgagggttagccatagtattctttgcaaatgtgaaagcgagacattatatcttctcttgcttggtgtaactaatcactgttaatttcaggaaacagaactcattaaaactcc

SEQ ID NO: 674516 - DNA, 120 bp, Artificial Sequence
  ENSG00000185963_33 (sequence is synthesized)
ttagcaaaccaggtctacatcctgttttgtttgctgagtgaggttagtgggagtggtcaaattggtactcttggaggaagaaaaactgtccttccttctccaaaaaaggaaaaattataa

SEQ ID NO: 674517 - DNA, 120 bp, Artificial Sequence
  ENSG00000185963_34 (sequence is synthesized)
taatataaatgacaaaaataaaagaattctgtttcctggaataagcatttcttattcctagttgtagggactcctatttttaccttccgttacagtgttgattcataagaaatattgtta

SEQ ID NO: 674518 - DNA, 120 bp, Artificial Sequence
  ENSG00000185963_35 (sequence is synthesized)
catttgagataacttcatctgtatggggtatttatttgcaatgatgtctgagtactgtattttttctgtgcattaccttagtgtcagaatgttggtctttattttaaagtcatatgcatg

SEQ ID NO: 674519 - DNA, 120 bp, Artificial Sequence
  ENSG00000185963_36 (sequence is synthesized)
ttctcctgccaaggaacctttacacagacccaaacaaaaaaataataatcaaatgccttcaatttctgagaaaatgaggcagagcatggaaaaggaataggaaggagaaattaattgaga

SEQ ID NO: 674520 - DNA, 120 bp, Artificial Sequence
  ENSG00000185963_37 (sequence is synthesized)
ttttcaggacacagacatatgatgtgaatgcctacaaagccagtgcgcataggaacagtgggcctgggtaaagagtcacattggtaggaccaataaagaataataaaaagacaaagcaca

SEQ ID NO: 674521 - DNA, 120 bp, Artificial Sequence
  ENSG00000185963_38 (sequence is synthesized)
ccaaagccgccccgaagaccaagccagccacaccgagcgtaagtcacacctgtgcctgtgccagcgacagggccgagggcaccgggctggccaaccaggtgttctgcagcgagaagcaca

SEQ ID NO: 674522 - DNA, 120 bp, Artificial Sequence
  ENSG00000185963_39 (sequence is synthesized)
gcatttactgtgattaggggctgtggggcgccgcacgctgcagctaacatctgcttcacctcaactaacccagcagcagcgggacggcggtgctaggtcaatcttaacgtgactaatgca

SEQ ID NO: 674523 - DNA, 120 bp, Artificial Sequence
  ENSG00000185963_40 (sequence is synthesized)
cagagggtaggagtctagccgaggcgccatggggcgttgcatcagcaggacacttgtgagagctttgtgtcgcttctcactcctcaaagccccctcaggagcacccagtcctcagctgct

SEQ ID NO: 674524 - DNA, 120 bp, Artificial Sequence
  ENSG00000185963_41 (sequence is synthesized)
ctcttaggtgggggtcagaggtggggatagagctgcacattcttgcagcagatgtgtgatgaaagcatcttctaagccctgcgcacccgtggggaaacccaagggaggagtcctggtcct

SEQ ID NO: 674525 - DNA, 120 bp, Artificial Sequence
  ENSG00000185963_42 (sequence is synthesized)
gctccctcagcacccaaaaggggcagaacctgagttgagacttgcatgttcctcgcatgtgtctaatgtcagcactagaaagcagttttaggaggttccagcctgcagcataggtacgac

SEQ ID NO: 674526 - DNA, 120 bp, Artificial Sequence
  ENSG00000185963_43 (sequence is synthesized)
aaagaagtgcagaatttcttccccaagcccagagaagagcagccctgagcccctgtattctgctggccagacacacatggcacagacacagctgaccataacccaggaatccagagctcg

SEQ ID NO: 674527 - DNA, 120 bp, Artificial Sequence
  ENSG00000185963_44 (sequence is synthesized)
gtttctcatttctgagatcaggatgcttgtatagtggcctgtgaggtgacagattggcagggcccaaggccccaggttttcatttttcatgagaaaagctttccaagtgcctggccagac

SEQ ID NO: 674528 - DNA, 120 bp, Artificial Sequence
  ENSG00000185963_45 (sequence is synthesized)
cttggtccttagtgcagagcccgtccttttgtacttggggtgaccccagcagccaattatccggccttccatagggggttcagtcccaaagacatggggctttgaaaaccctagcctgaa

SEQ ID NO: 674529 - DNA, 120 bp, Artificial Sequence
  ENSG00000185963_46 (sequence is synthesized)
gtctgagccaccaagggcttggctgggttggacacccacaggtgtatccagagcccagcccggtgctgggaaagctttgcatagggccagggccacttgtcaggattcacaggtaggaga

SEQ ID NO: 674530 - DNA, 120 bp, Artificial Sequence
  ENSG00000185963_47 (sequence is synthesized)
tgtttaggtctctttatttagtgcaatctgggggatggcaacagagaaagaggaaaggtagctgtagggttctcccatttccagaggctccatccacacctgccttcccacattctgagc

SEQ ID NO: 674531 - DNA, 120 bp, Artificial Sequence
  ENSG00000185963_48 (sequence is synthesized)
agaacttttctcagtacttttttcccgatcaccctgtgggaccagctggacctgaggctgcagtcttctctcctgcaggctgcttgccttgtctctcatgcggaagaggcattcgagtta

SEQ ID NO: 674532 - DNA, 120 bp, Artificial Sequence
  ENSG00000185963_49 (sequence is synthesized)
cctggtgagagaccgtgttgccccctcccacagctctctgccctgcgcgttcttccctttggtgccgagtatgtttcggtcccctccagactccaggacacgcccatgtatgtcccctgc

SEQ ID NO: 674533 - DNA, 120 bp, Artificial Sequence
  ENSG00000185963_50 (sequence is synthesized)
gtgttcatcctgggcccagatccccctgccccagcaagactcgcagtgggatggctgctggcatgcccaccctgcatgcgctttgccctctccttgcaagcctggcacatagcttctctc

SEQ ID NO: 674534 - DNA, 120 bp, Artificial Sequence
  ENSG00000185963_51 (sequence is synthesized)
catactcctaagggactttgcagacacccaagccactgggacccctgctaacacatgcaggtcttctcttctgccaactaacgtgctcgcgccctcccagcacgtggagagcttcaattg

SEQ ID NO: 674535 - DNA, 120 bp, Artificial Sequence
  ENSG00000185963_52 (sequence is synthesized)
tcagataaacaggaagcgacagatgaccgctttctaacgctctcttttctcccgttttcagctgtagagtagctgccaggaggacttggccacccggccctgtcacactgcagccccttc

SEQ ID NO: 674536 - DNA, 120 bp, Artificial Sequence
  ENSG00000185966_0 (sequence is synthesized)
acagtctcctcaggaacagccttctcctgcctctctgcacctggacatctcaactcctgccaagatgtcctgccagcagaaccagaagcagtgccaacccccacccaagtgcccctcacc

SEQ ID NO: 674537 - DNA, 120 bp, Artificial Sequence
  ENSG00000185966_1 (sequence is synthesized)
caagtgtcccccaaagaacccagtacagtgtctgcctccagcttcctctggctgtgccccaagctctgggggctgtggccctagctccgagggcggctgcttcctgaaccaccacaggcg

SEQ ID NO: 674538 - DNA, 120 bp, Artificial Sequence
  ENSG00000185966_2 (sequence is synthesized)
cagaggtccaactcctgtgacaggggcagtggtcagcaaggcgggggctctggctgctgccacggttctgggggctgctgctgatccagatcctgatgctgagacaagcgatctttggag

SEQ ID NO: 674539 - DNA, 120 bp, Artificial Sequence
  ENSG00000185966_3 (sequence is synthesized)
gaaacaagaatcccaagaggccaagaacagccccatctgacgcatgccttcccatataccctcttctgactttcacaggctgagctggaggttttcctgtgggggatctgagctctcccc

SEQ ID NO: 674540 - DNA, 120 bp, Artificial Sequence
  ENSG00000185966_4 (sequence is synthesized)
agaaggcacttcttgttttatgtacaggatgtcatatgtccccctacccctgtacctgccaaggattggcagtgcttgtgcccaacctcgtaaaaaagataaagttccttgtcctcatta

SEQ ID NO: 674541 - DNA, 120 bp, Artificial Sequence
  ENSG00000185972_0 (sequence is synthesized)
ctctcttctccctggtcaaccgctctgcaaacaaccatcaatctgatcccacaggcctgagaaagtctgctctccagtacctgctgctgatctgtttcagccgacaagaggcaccatgaa

SEQ ID NO: 674542 - DNA, 120 bp, Artificial Sequence
  ENSG00000185972_1 (sequence is synthesized)
attggaattcacggagaaaaactacaatagcttcgtgctgcagaacctgaacagacagaggaaacgcaaagagtactgggacatggccctgagtgtggacaaccacgtcttctttgcaca

SEQ ID NO: 674543 - DNA, 120 bp, Artificial Sequence
  ENSG00000185972_2 (sequence is synthesized)
tcgcaatgtgctggctgctgtctccccactggtgaggagcctcatctccagcaatgacatgaagaccgctgatgagcttttcatcaccattgacaccagttacctgagcccggtcacagt

SEQ ID NO: 674544 - DNA, 120 bp, Artificial Sequence
  ENSG00000185972_3 (sequence is synthesized)
ggaccagcttctggactacttctatagcggcaaggtggtgatctccgagcaaaatgtggaggagctgcttcgtggggctcagtatttcaacacaccacgccttcgagttcactgtaacga

SEQ ID NO: 674545 - DNA, 120 bp, Artificial Sequence
  ENSG00000185972_4 (sequence is synthesized)
cttccttattaagtccatctgccgtgccaactgcttgcgctacctcttcttggctgagctgtttgagctcaaagaggtatcagacgtagcttactctggcattcgggacaacttccacta

SEQ ID NO: 674546 - DNA, 120 bp, Artificial Sequence
  ENSG00000185972_5 (sequence is synthesized)
ctgggccagtcctgagggctccatgcacttcatgcgctgtccacctgttatctttggccgcctgctccgtgatgaaaaccttcacgtgctcaatgaagaccaggcgctcagcgcactcat

SEQ ID NO: 674547 - DNA, 120 bp, Artificial Sequence
  ENSG00000185972_6 (sequence is synthesized)
caattgggtgtacttccggaaggaggatcgggagaagtatttcaagaagttcttcaattacatcaatctcaatgctgtctccaataagacgctggtgtttgccagcaacaagctggtggg

SEQ ID NO: 674548 - DNA, 120 bp, Artificial Sequence
  ENSG00000185972_7 (sequence is synthesized)
catggagaacacctcatcccatacaaccctgattgagagtgtcctgatggaccgcaagcaggagcggccatgcagcctgctggtctaccagcggaaaggggccctgcttgattccgtggt

SEQ ID NO: 674549 - DNA, 120 bp, Artificial Sequence
  ENSG00000185972_8 (sequence is synthesized)
ccagttcaatgatggagtgtttgcttatatcatccaggagaacctgtggatgaagctctcagacatgccctatcgggcagcagcacttagtgccacctctgctggtcgctacatctacat

SEQ ID NO: 674550 - DNA, 120 bp, Artificial Sequence
  ENSG00000185972_9 (sequence is synthesized)
ctctggtggcaccactgagcagatttcagggctgaagacagcctggcggtatgacatggatgacaactcctggaccaagttgcctgacctgcccatcgggcttgtcttccacaccatggt

SEQ ID NO: 674551 - DNA, 120 bp, Artificial Sequence
  ENSG00000185972_10 (sequence is synthesized)
gacctgtggggggacagtgtactcagtgggcgggagcattgccccaaggcggtatgtctccaacatctatcgctatgatgagcggaaggaagtctggtgcctggcaggaaagatgagcat

SEQ ID NO: 674552 - DNA, 120 bp, Artificial Sequence
  ENSG00000185972_11 (sequence is synthesized)
ccccatggatggcaccgccgtgatcactaaaggagacaggcatctgtacattgtcactggacggtgcttggtgaaaggttatatctcccgggtcggggtagtggactgctttgacaccag

SEQ ID NO: 674553 - DNA, 120 bp, Artificial Sequence
  ENSG00000185972_12 (sequence is synthesized)
cactggggacgtggtccagtgtatcaccttccccattgagttcaaccatcggcccctgctctctttccaacaggacaacatcctctgcgtgcacagccaccggcagagtgtggaaatcaa

SEQ ID NO: 674554 - DNA, 120 bp, Artificial Sequence
  ENSG00000185972_13 (sequence is synthesized)
tctgcagaaggtgaaggcaagcaagacgaccacctcagtgcctgtcttgcccaacagctgccccttggatgtgtcccatgctatatgctccattggagacagcaaggtgtttgtatgtgg

SEQ ID NO: 674555 - DNA, 120 bp, Artificial Sequence
  ENSG00000185972_14 (sequence is synthesized)
gggtgtcaccactgccagcgatgtccagacaaaggactacaccatcaatccaaatgccttcttgctggaccaaaagacaggcaagtggaagaccctggctcctccaccagaggcactgga

SEQ ID NO: 674556 - DNA, 120 bp, Artificial Sequence
  ENSG00000185972_15 (sequence is synthesized)
ctgtcctgcctgctgtctagccaagctaccttgcaagattcttcaaaggatttaaacattttaagtgggagaataagtaaatgcattattattcacgatttaatgagagaaagagaggaa

SEQ ID NO: 674557 - DNA, 120 bp, Artificial Sequence
  ENSG00000185973_0 (sequence is synthesized)
aggctctccgctgggcccgagcgggctgggggaggggagcgtggggccgacagttttgggggtgaaaaggcaaaaggcgggtgaaaggctgcctcccgagactctccttgcttggaattc

SEQ ID NO: 674558 - DNA, 120 bp, Artificial Sequence
  ENSG00000185973_1 (sequence is synthesized)
tgcccactctgcggagttagcagtcacgacctccagcacaggatgtggtaccacagattgtcccacctacacagcaggcttcaggacttgctgaagggaggagtcatatatccggccctt

SEQ ID NO: 674559 - DNA, 120 bp, Artificial Sequence
  ENSG00000185973_2 (sequence is synthesized)
ccacagcccaacttcaaaagcttacttcctttagctgtccattggcaccatacagcctccaagtctctgacttgtgcttggcagcaacatgaagatcattttgagctgaaatatgctaat

SEQ ID NO: 674560 - DNA, 120 bp, Artificial Sequence
  ENSG00000185973_3 (sequence is synthesized)
accgtgatgcgctttgattacgtctggcttcgagaccactgccgctcagcatcgtgctacaactctaagactcaccagcgcagcctggatactgccagtgtggatttatgtatcaagcca

SEQ ID NO: 674561 - DNA, 120 bp, Artificial Sequence
  ENSG00000185973_4 (sequence is synthesized)
aagaccattcgtctggatgagaccacactctttttcacttggccagatggtcatgtgactaaatatgatttgaattggctggtgaaaaacagctatgaagggcagaaacaaaaagtcatc

SEQ ID NO: 674562 - DNA, 120 bp, Artificial Sequence
  ENSG00000185973_5 (sequence is synthesized)
cagcctagaatactatggaatgctgaaatctaccagcaagcccaagttccatcggtagattgccagagcttcttagaaaccaacgagggactgaagaagtttctgcaaaactttctgctc

SEQ ID NO: 674563 - DNA, 120 bp, Artificial Sequence
  ENSG00000185973_6 (sequence is synthesized)
tatggaattgcattcgtagaaaatgtccctcccactcaagagcacacagagaagttggcagaaaggatcagcttaatcagagaaaccatttatgggaggatgtggtatttcacttcagac

SEQ ID NO: 674564 - DNA, 120 bp, Artificial Sequence
  ENSG00000185973_7 (sequence is synthesized)
ttctccagaggtgacactgcgtacaccaagctagctctggatcggcacactgacactacctattttcaagagccctgtggcattcaagtgtttcattgtcttaaacatgaaggaactggt

SEQ ID NO: 674565 - DNA, 120 bp, Artificial Sequence
  ENSG00000185973_8 (sequence is synthesized)
ggcaggacactgctagtagatggattctatgcagcagaacaggtacttcaaaaggcacctgaggaatttgaactcctcagtaaagtgccattgaagcatgaatatattgaagatgttgga

SEQ ID NO: 674566 - DNA, 120 bp, Artificial Sequence
  ENSG00000185973_9 (sequence is synthesized)
gaatgtcacaaccacatgattgggattgggccagtcttaaatatctacccatggaataaagagctgtatttgatcaggtacaacaactatgaccgggctgtcatcaataccgttccttat

SEQ ID NO: 674567 - DNA, 120 bp, Artificial Sequence
  ENSG00000185973_10 (sequence is synthesized)
gatgtcgtccatcgctggtatacagcacaccggactctaacgatagagttgaggagacctgagaatgagttttgggtcaaactaaagcctggcagggtcctatttatagacaactggcgt

SEQ ID NO: 674568 - DNA, 120 bp, Artificial Sequence
  ENSG00000185973_11 (sequence is synthesized)
gtcctacatggcagggaatgcttcactggctaccgccaactgtgtggctgctatttaacaagagatgatgtattaaacactgctcgcctcttggggcttcaggcttaaaattgacagcat

SEQ ID NO: 674569 - DNA, 120 bp, Artificial Sequence
  ENSG00000185973_12 (sequence is synthesized)
ctggattatgaatacacctggcaccctggctaccagaatttcatatgggcagaataatattgtgtcaaactctacttcagattgtctccttatcccatcccacaaaacagaatctgtccg

SEQ ID NO: 674570 - DNA, 120 bp, Artificial Sequence
  ENSG00000185973_13 (sequence is synthesized)
tttctctagtaagggagacttgttggagaggcgggactctgagttatctaatgtcagacatctagtggggcagctctcttcctcatgttataacatggatccacttgtttgatttaaacc

SEQ ID NO: 674571 - DNA, 120 bp, Artificial Sequence
  ENSG00000185973_14 (sequence is synthesized)
ttttaatataattttggtcagtctccttcagaaatataatctccatattgataggaaagcaataattgccatgaggtaacgatttttttcccaagtagatcagttagaaagaaatgcatt

SEQ ID NO: 674572 - DNA, 120 bp, Artificial Sequence
  ENSG00000185973_15 (sequence is synthesized)
ctagaaataacaaaaatcctgataaagcaacaatttgcaaaatgtttggtcttaggacaccttaacactcttaaaagttattgaaggccccaaggagttcttgggtgtgggttctatcta

SEQ ID NO: 674573 - DNA, 120 bp, Artificial Sequence
  ENSG00000185973_16 (sequence is synthesized)
gcctctggaaaagtcctctgtatcctcatgagataacgagagggggaaaaaaagctactactgcctttgtaacttccacttagcctactacagggctatgcacatcttagtttccaaaag

SEQ ID NO: 674574 - DNA, 120 bp, Artificial Sequence
  ENSG00000185973_17 (sequence is synthesized)
tctgcttaatttcaaaagaaaaatgcctaattgaatgtaactcatcttggtgttattatacaaaataatttttaatctgcagacccacgaaaagggtctcagggactcctccaggggtct

SEQ ID NO: 674575 - DNA, 120 bp, Artificial Sequence
  ENSG00000185973_18 (sequence is synthesized)
tcagaccatactttgagaacccatgggctagcgactaccttgagacagtcctttacctaggcctgtggattaaagggtttagctgaaaccctagattcttctctgtagtctaatagaact

SEQ ID NO: 674576 - DNA, 120 bp, Artificial Sequence
  ENSG00000185973_19 (sequence is synthesized)
ccaaacattgtaagaattgcttggtagcataagctcagggataaggtgggaattgagttcaaatatagtgttttatcttccacacaaatcatctctataggagttaaattaggaagtcac

SEQ ID NO: 674577 - DNA, 120 bp, Artificial Sequence
  ENSG00000185973_20 (sequence is synthesized)
aacagcgcctgttgaacaaactcatcagtgtggtaatcctatgagggataattgcagaaaggttttagagacttgtgaggttccatatgataattctttacacctccccccccaagagaa

SEQ ID NO: 674578 - DNA, 120 bp, Artificial Sequence
  ENSG00000185973_21 (sequence is synthesized)
agtacacagggctattctgtaatattgttcagggaaatcagcatgatagatgctgtgcctccagagagttctctggagattactacccaaatgtgtattttggcaatttggtggtattta

SEQ ID NO: 674579 - DNA, 120 bp, Artificial Sequence
  ENSG00000185973_22 (sequence is synthesized)
ggatgtaatatgttttcctccatttctgctaattttctctctctctctctcataacatactatacatgctaattgccaagatttgaatgagtcaaatttagtagcttgctgcttttattt

SEQ ID NO: 674580 - DNA, 120 bp, Artificial Sequence
  ENSG00000185973_23 (sequence is synthesized)
tttaaatggcttcttttacgtattggcgggggcgggtggggggcagggtatgaggcttcttttccctcagctttcattgaaagtgaagctgtacaataaccacattgaccactgtagaat

SEQ ID NO: 674581 - DNA, 120 bp, Artificial Sequence
  ENSG00000185973_24 (sequence is synthesized)
gatgaaagagaatataggctaggatgcacacaagaggggggaaaaggcattattagtgaagataggagttacaaagcaaagcaaagtcagtattcagatagagaatagagcctaatctga

SEQ ID NO: 674582 - DNA, 120 bp, Artificial Sequence
  ENSG00000185973_25 (sequence is synthesized)
tgtttgcagggagttcctagatcacatttggcaatttacacattattttattgacctatccagtgctccaaaatgtgttccaaaatattttggcattttatttgtactacataggaatct

SEQ ID NO: 674583 - DNA, 120 bp, Artificial Sequence
  ENSG00000185973_26 (sequence is synthesized)
ttaggggagtccctgaaatttgttttcctcttaggtcaaaggactgataattaactttggttcttaaggagtatgccctttagcaataagaacagcaataacattttaccctgcagtttt

SEQ ID NO: 674584 - DNA, 120 bp, Artificial Sequence
  ENSG00000185973_27 (sequence is synthesized)
ttctctatacctactattatgcactcctaaaatatgtcatcattagtcttcatgaggatgtttaccatttctgaagttttgcgtaaattagccttgaagattacactataactgaggtca

SEQ ID NO: 674585 - DNA, 120 bp, Artificial Sequence
  ENSG00000185973_28 (sequence is synthesized)
tcagcattgacttatggccagcaaaggacatgctcatggccctggagagatgaggacacaaaacaaatcaatttccccacttactgaaggactccccttaccttctgtctctcctgagac

SEQ ID NO: 674586 - DNA, 120 bp, Artificial Sequence
  ENSG00000185973_29 (sequence is synthesized)
cttgactcattaattattttactctcctttttggaaatttgcaaccggtccttctcaacaatgtgctccctttagtacactgaagaaaaagagaaggggattatttgagtcctgatcacg

SEQ ID NO: 674587 - DNA, 120 bp, Artificial Sequence
  ENSG00000185973_30 (sequence is synthesized)
atgcattgaaaacttcctatgtgagatgtttctgtttttatatctcttccaggtgtccctgagtatataagcatgggtctatgtctaccaagctcactgtagagtcacttttaccttttg

SEQ ID NO: 674588 - DNA, 120 bp, Artificial Sequence
  ENSG00000185973_31 (sequence is synthesized)
ctatggtggaatgggatctgtagggtcaggaacacagcacctaacacagtgccttatggatagtagttttataatacagatgtgttggaagaataaatgaatgggtccttttcaaacaaa

SEQ ID NO: 674589 - DNA, 120 bp, Artificial Sequence
  ENSG00000185973_32 (sequence is synthesized)
aatggtttgttcctttcaaaaataggttattacttacttttctttttttcttgttttggaaggattttttgaaacattttatttttctcttcaaataaaattgttacaatccacagctaa

SEQ ID NO: 674590 - DNA, 120 bp, Artificial Sequence
  ENSG00000185973_33 (sequence is synthesized)
tcactccaatgtgatattcctgagagaatattgacttatcgtcacttcgtctctgggacaagtattgaacataggggaagccttatataaaattgttcaataaacaaaagatgtctttaa

SEQ ID NO: 674591 - DNA, 120 bp, Artificial Sequence
  ENSG00000185973_34 (sequence is synthesized)
cagccctaaaacttcaaaggaatgcctatttcactatgagagatggccatagtcatgcctatcaccacatggttcatagaagtatcagtgccatttaaaatgccagagacagagtggaca

SEQ ID NO: 674592 - DNA, 120 bp, Artificial Sequence
  ENSG00000185973_35 (sequence is synthesized)
aattctaaggatgtggtaccacagattgtcccacctacacagcaggcttcaggacttgctgaagggaggagtcatatatccggcccttccacagcccaacttcaaaagcttacttccttt

SEQ ID NO: 674593 - DNA, 120 bp, Artificial Sequence
  ENSG00000185973_36 (sequence is synthesized)
gggggtgaaaaggcaaaaggcgggtgaaaggctgcctcccgagactctccttgcttggaattctgcccactctgcggagttagcagtcacgacctccagcacagggttgtcgtcacgatc

SEQ ID NO: 674594 - DNA, 120 bp, Artificial Sequence
  ENSG00000185973_37 (sequence is synthesized)
tgtgccagttgcgcgacagagtctgcccggagatcagcgtgaggccggatgggcctagcgctcaggaagagctggaagagctggagcaagctcgcgttgggactgacgcccagtgtacat

SEQ ID NO: 674595 - DNA, 120 bp, Artificial Sequence
  ENSG00000185973_38 (sequence is synthesized)
agtagagtggaaggtggaactcagctgtctgcaagatcttgcagcactttctttcgttctcatatccactaatgttctctgcccagattttaccctttgtctgccccctctggagcaagg

SEQ ID NO: 674596 - DNA, 120 bp, Artificial Sequence
  ENSG00000185973_39 (sequence is synthesized)
ctctgggtaagtaagttaggctaggaagttttctttctcttccgaaaacaatggaaaagcctttaaatactcctgactgccctggaaacgacattcaaaccattaattgaatgtcaactc

SEQ ID NO: 674597 - DNA, 120 bp, Artificial Sequence
  ENSG00000185974_0 (sequence is synthesized)
agtggtccccaggaaccctcgacagggccagggcgtctctctcgtccagcaagggcagggacgggccacaggccaagggcagcagtcaggcctgctctgtctgtgaacgctcccggcttg

SEQ ID NO: 674598 - DNA, 120 bp, Artificial Sequence
  ENSG00000185974_1 (sequence is synthesized)
gcctcggctgatgggccctcacgcctgaagcgggcaggaagctccgggatggatttcgggtctttggagaccgtggtggccaactctgccttcatcgccgcccgaggcagctttgacggc

SEQ ID NO: 674599 - DNA, 120 bp, Artificial Sequence
  ENSG00000185974_2 (sequence is synthesized)
agcagctcccaaccctcccgggacaagaagtacctggccaagctcaagctgcccccgctgtccaagtgtgagtccctccgcgacagcctcagcctggagtttgagagtgtgtgcttggag

SEQ ID NO: 674600 - DNA, 120 bp, Artificial Sequence
  ENSG00000185974_3 (sequence is synthesized)
cagcccatcggcaagaagctctttcagcagttcctacaatcggcagagaagcacctgccggccctggagctctggaaagacatcgaggactatgacacggcagacaatgacctccagcca

SEQ ID NO: 674601 - DNA, 120 bp, Artificial Sequence
  ENSG00000185974_4 (sequence is synthesized)
cagaaggcccagaccatcctggcccagtacctggacccccaggccaaactcttctgcagcttcctggatgaggggatagtggcgaagtttaaggaggggcctgtggagatccaggacggg

SEQ ID NO: 674602 - DNA, 120 bp, Artificial Sequence
  ENSG00000185974_5 (sequence is synthesized)
ctcttccagcccctgctgcaggccaccctggcacacctgggccaagcccccttccaggagtacctgggcagcctgtacttcctgaggttcctgcagtggaagtggctggaagcccagccc

SEQ ID NO: 674603 - DNA, 120 bp, Artificial Sequence
  ENSG00000185974_6 (sequence is synthesized)
atgggggaggactggttcctggacttcagggtcctagggaaagggggcttcggggaggtgtcggcctgccagatgaaggcgaccggcaagctgtatgcctgcaagaagctgaacaagaag

SEQ ID NO: 674604 - DNA, 120 bp, Artificial Sequence
  ENSG00000185974_7 (sequence is synthesized)
cggctgaagaagaggaagggctaccagggtgctatggtggagaagaagattctgatgaaagtacacagcaggttcatcgtgtctctggcctatgcgtttgaaaccaaagccgacctctgt

SEQ ID NO: 674605 - DNA, 120 bp, Artificial Sequence
  ENSG00000185974_8 (sequence is synthesized)
ctggtgatgaccatcatgaacggaggtgacatcaggtaccacatctacaacgtgaatgaggagaaccctggcttcccggagccgcgcgccctcttctacacggcgcagatcatctgcggc

SEQ ID NO: 674606 - DNA, 120 bp, Artificial Sequence
  ENSG00000185974_9 (sequence is synthesized)
ctggagcacctgcaccagaggcggatcgtctaccgcgacctcaagcccgagaacgtgctgctggacaatgacggcaatgtccggatctctgaccttgggctggccgtggagctgctggac

SEQ ID NO: 674607 - DNA, 120 bp, Artificial Sequence
  ENSG00000185974_10 (sequence is synthesized)
ggacagagcaagaccaagggctacgcagggaccccaggtttcatggcccccgagctcctgcagggcgaggagtacgacttctccgtggactactttgccctgggggtcaccctgtatgag

SEQ ID NO: 674608 - DNA, 120 bp, Artificial Sequence
  ENSG00000185974_11 (sequence is synthesized)
atgattgcggccagaggacccttccgagcccgtggagagaaggtggagaacaaggagctgaagcaccggatcatctcagagcccgtgaagtaccctgataagttcagccaggccagcaag

SEQ ID NO: 674609 - DNA, 120 bp, Artificial Sequence
  ENSG00000185974_12 (sequence is synthesized)
gacttctgcgaggcgctgctggagaaggacccggagaagcgcctggggttcagagatgagacctgcgacaagctccgtgcccaccccctcttcaaggaccttaactggaggcagctggag

SEQ ID NO: 674610 - DNA, 120 bp, Artificial Sequence
  ENSG00000185974_13 (sequence is synthesized)
gctgggatgctgatgccccctttcatcccagactccaaaactgtctacgcaaaggatattcaggacgtgggtgccttttccaccgtcaaaggtgtggcctttgacaaaacagacacagaa

SEQ ID NO: 674611 - DNA, 120 bp, Artificial Sequence
  ENSG00000185974_14 (sequence is synthesized)
ttctttcaggaatttgccactggcaactgccccatcccctggcaggaggagatgatcgagacgggcatctttggcgagctgaacgtgtggcgctcggacggtcagatgccggacgacatg

SEQ ID NO: 674612 - DNA, 120 bp, Artificial Sequence
  ENSG00000185974_15 (sequence is synthesized)
aagggcatctccgggggctccagctcctcgtccaagtcagggatgtgtctggtttcctaggtgacgccccagagtccacgtggaggaaaaggacccatacggctcgatgggggccgcctg

SEQ ID NO: 674613 - DNA, 120 bp, Artificial Sequence
  ENSG00000185974_16 (sequence is synthesized)
cctccgtggtgccagcctggggtctgctagcaaggggacacgtggttccctccacccaggtccccatcacgccatctccttgcggcccaaggaggagaaagcccacatcggcctgagccg

SEQ ID NO: 674614 - DNA, 120 bp, Artificial Sequence
  ENSG00000185974_17 (sequence is synthesized)
ctgcatatttcacgtcttttgctccatctcactgagaagacataagatgctctccagagggagtaagccaaaaatctacaaactcttagggagcctcctgcattggtgattgaccaaccg

SEQ ID NO: 674615 - DNA, 120 bp, Artificial Sequence
  ENSG00000185974_18 (sequence is synthesized)
tgtggtcaggggcagagactcggttttggcctcccaagaccttagccattggcttcccagagccacgctcctcagcgggaggtgcacggtggccaggtcaggggtcagtgaaccctggcc

SEQ ID NO: 674616 - DNA, 120 bp, Artificial Sequence
  ENSG00000185974_19 (sequence is synthesized)
gcagcccctggccccactggggagggctggacctcgccccccccaggtccctctgtgcaggctcctgacttccagggtgcccgggccctgtgctggtggcctgcacgccacatggtcccc

SEQ ID NO: 674617 - DNA, 120 bp, Artificial Sequence
  ENSG00000185974_20 (sequence is synthesized)
tgcaccctgcggcgccgtggtcctctgcacactggggcaccatggtcccctgcactccggggtgccatggtccacatctgccaggcgcaggctctgttgggctgttgggaggaggggagc

SEQ ID NO: 674618 - DNA, 120 bp, Artificial Sequence
  ENSG00000185974_21 (sequence is synthesized)
gggtgtggagtctgggggtctcagtgcatcttggggtctccttatctcagggtgtccagctgacggcagctggtgcaaagttcccacccctgagctggggagctgaaaatgttttctgtc

SEQ ID NO: 674619 - DNA, 120 bp, Artificial Sequence
  ENSG00000185974_22 (sequence is synthesized)
ttgaccctgagtcccggaagcacctcagctgctcttggcgggcaaagccaggaccgtttgctctctgaccctcctccccactggggctggtccgtctcatctcccaggggacacttcagg

SEQ ID NO: 674620 - DNA, 120 bp, Artificial Sequence
  ENSG00000185974_23 (sequence is synthesized)
ccacgggccttgtgcatagggacagagctccttgctgcaacccctctctgtgttcccagtagcagcagcactggagtcctaaagccatagcccgggaagacactcacagcccaccttctc

SEQ ID NO: 674621 - DNA, 120 bp, Artificial Sequence
  ENSG00000185974_24 (sequence is synthesized)
atacagctcggccccacccacaatgcacctggcatttccaactgcactttgaacactgaaggttccccaaatgctttgtgtgttttaactgcaggaagttagttctgttgcaactgcctc

SEQ ID NO: 674622 - DNA, 120 bp, Artificial Sequence
  ENSG00000185974_25 (sequence is synthesized)
caggacacactccctcttgagggccggcggtgctggcctgggttccatggcctcagcagccggctcagagggagtgcatccaagccgcagggaagcagtggtgatgggcggcctgaggac

SEQ ID NO: 674623 - DNA, 120 bp, Artificial Sequence
  ENSG00000185974_26 (sequence is synthesized)
tcctttccagagagggcctctgagctccttttaggaaagaacttcctttgagccccggccactgttgtaccagtgggagaagaagcctgaccctgccacatgtggtcacggggagagaag

SEQ ID NO: 674624 - DNA, 120 bp, Artificial Sequence
  ENSG00000185974_27 (sequence is synthesized)
atggtaggacgtccccgtgagccttggggcagagctggtggtagaaagaagccctgtctactctaatttggtgagaggggccgcggcaagtggctgatgatgtgactgatggagacaggg

SEQ ID NO: 674625 - DNA, 120 bp, Artificial Sequence
  ENSG00000185974_28 (sequence is synthesized)
tggcttgggaaggtcccacttgggggtgtcacgtcctgcagggagtggaagagatggatcctccgtagcctggactggtgggtctcggcctctctcccagaaatggcagagacagctgcc

SEQ ID NO: 674626 - DNA, 120 bp, Artificial Sequence
  ENSG00000185974_29 (sequence is synthesized)
tgagagtcagtgctgcagtgggcagggcctatgccctcacagtcctcaggctgccaggtcgtcctcttcctgttggggagaagaggaccctggcaatccacaattttggagatttgctgg

SEQ ID NO: 674627 - DNA, 120 bp, Artificial Sequence
  ENSG00000185974_30 (sequence is synthesized)
ctgcagccaaaatggggacccaactccctcctatgtggttttagagcttctggagggaagataggccacgcccctgggtgaggagcacgtcttcccacagatcctaagtcggccacaccc

SEQ ID NO: 674628 - DNA, 120 bp, Artificial Sequence
  ENSG00000185974_31 (sequence is synthesized)
tgggtgaggagcacgtcttcccataggtcccacgtcagccacaccctgggtgaggagcacgtcttcccatagatcccacatcggccacaccctgggtgaggagcatgtcttcccatagat

SEQ ID NO: 674629 - DNA, 120 bp, Artificial Sequence
  ENSG00000185974_32 (sequence is synthesized)
cccacgtcggccacaccctgggtgaggagcacgtcttcccatagatcccacatcggccacaccctgggtgaggagcatgtcttcccatagatcccacgtcggccacaccctgggtgagga

SEQ ID NO: 674630 - DNA, 120 bp, Artificial Sequence
  ENSG00000185974_33 (sequence is synthesized)
gcacgtcttcccatagatcccacgtcggccacaccctgggtgaggagcatgtcttcccatagaacccacgtcggccacaccctgggtgaggagcacgtcttcccacagatctcaacagaa

SEQ ID NO: 674631 - DNA, 120 bp, Artificial Sequence
  ENSG00000185974_34 (sequence is synthesized)
ctccacatcgtctggttttgtggagactttcatatgtcctgtcaagttgcctcatgcacctgcagactgttcttgggaagcaaacctggactgcaaaataaacctcccggcctcctcctg

SEQ ID NO: 674632 - DNA, 120 bp, Artificial Sequence
  ENSG00000185974_35 (sequence is synthesized)
aggtggtcctgaggccgtcacagaggccgtctgggggccagcatgggccagccgggtcagggtcggtgcaccgagaggagagtgatgtctgtgaccggctgtgcctggccatcgggggcc

SEQ ID NO: 674633 - DNA, 120 bp, Artificial Sequence
  ENSG00000185974_36 (sequence is synthesized)
ggtgcgtcagggagggacgctggttggaaggaagctgccaagttcactggagcgtgtgcttgagtgcctggggtctggggtctgcagagtgcgcaggggaggccctggtggggatggggc

SEQ ID NO: 674634 - DNA, 120 bp, Artificial Sequence
  ENSG00000185974_37 (sequence is synthesized)
cccaggggaaggcgtgttcggggaggagaccgcttcatgacgagaccctaggggaggctcccaacaaggcagatgtgagcgccaggtcctttcacaagaaggctccaaaatgagccctgg

SEQ ID NO: 674635 - DNA, 120 bp, Artificial Sequence
  ENSG00000185974_38 (sequence is synthesized)
gatctcaggcttcttccggccccactcaagccccagctgtgtggtctcaggggaacccaggggccttctgggaacactgggctttctctctcagcctccacgacacttccctaaggaaga

SEQ ID NO: 674636 - DNA, 120 bp, Artificial Sequence
  ENSG00000185982_0 (sequence is synthesized)
caaaactctggatcatctttaaagacctgtggcacacagaccactggacaaagttctgctgcctctttctcttgggaagtctgtaaatatgaagctgtttctggttctcattattctgct

SEQ ID NO: 674637 - DNA, 120 bp, Artificial Sequence
  ENSG00000185982_1 (sequence is synthesized)
aataaagtaacaggctattgcaggaagaaatgcaaggtaggagaaagatatgaaataggatgtctaagtgggaaattatgttgtgctaatgatgaagaagagaaaaaacatgtgtcattt

SEQ ID NO: 674638 - DNA, 120 bp, Artificial Sequence
  ENSG00000185982_2 (sequence is synthesized)
aagaagccacatcaacattctggtgagaagctgagtgtgctgcaggattacatcatcttacccaccatcaccattttcacagtctaatcctaaatctagcccttgtctcgctggtctcca

SEQ ID NO: 674639 - DNA, 120 bp, Artificial Sequence
  ENSG00000185985_0 (sequence is synthesized)
cttcctgcaagaagcgttgcccgttggctagctgctcggtggggatctgcctgccctgggggcgccgcccgcgctccccgcggtgctctcgctcctgggctgcgccagtccgaggcggtg

SEQ ID NO: 674640 - DNA, 120 bp, Artificial Sequence
  ENSG00000185985_1 (sequence is synthesized)
ccggctcctttgcctccccgagtcgcagatgctgcgggcgcctccgggaaaagatctgggcggcgcgctcgctcgatggacacaggaagatccagaagctagtggcacatctagcaacag

SEQ ID NO: 674641 - DNA, 120 bp, Artificial Sequence
  ENSG00000185985_2 (sequence is synthesized)
agccagatcagaacccaggttggaggtggagtagttcagaatcaactgacgcagccgggaattgagctttgcaaagccacttgcaaggaagggaagcatctgcccaaccctcccccaccg

SEQ ID NO: 674642 - DNA, 120 bp, Artificial Sequence
  ENSG00000185985_3 (sequence is synthesized)
cgcgccctggatcctctgcctgccccctcccccgtgacgtcaccctagtcctgtcccggggagcctgcaaagcctctcagattcaaactgctagacgcactgctgccaccgccaccgaat

SEQ ID NO: 674643 - DNA, 120 bp, Artificial Sequence
  ENSG00000185985_4 (sequence is synthesized)
tggaaacgcgcgcccaggctccgtcgtcgccttcgcccgccgaccgggccagccggctctccgacctccctacagaatcgcaccccagtccctccctggcagctcggcttccctcagctc

SEQ ID NO: 674644 - DNA, 120 bp, Artificial Sequence
  ENSG00000185985_5 (sequence is synthesized)
caactcttctcttccgctcctgcctcctgtcggatttttaatttctgcgcacccccagtcaaattaaatcaaccaacaaaaagcagggcatcccccctggaagcagcgtcttattttacc

SEQ ID NO: 674645 - DNA, 120 bp, Artificial Sequence
  ENSG00000185985_6 (sequence is synthesized)
ttgttctcccacttcctgaagatgctaaactcctggtggactgcagaggagagggattcagtcttctcctgatgtcgattgcgatttctgctgggagctcaagacgggcgagctgcccga

SEQ ID NO: 674646 - DNA, 120 bp, Artificial Sequence
  ENSG00000185985_7 (sequence is synthesized)
gatctcttcgagataccccaggggaggaggagatgggcaggatttagtaggacaactcggttactaatgacttggcggctggctgcgaccccccgggaaatcaggtttgcctgtaggtac

SEQ ID NO: 674647 - DNA, 120 bp, Artificial Sequence
  ENSG00000185985_8 (sequence is synthesized)
ctgagttgacaccgaaggtgcctaaagatgctgagcggcgtttggttcctcagtgtgttaaccgtggccgggatcttacagacagagagtcgcaaaactgccaaagacatttgcaagatc

SEQ ID NO: 674648 - DNA, 120 bp, Artificial Sequence
  ENSG00000185985_9 (sequence is synthesized)
cgctgtctgtgcgaagaaaaggaaaacgtactgaatatcaactgtgagaacaaaggatttacaacagttagcctgctccagcccccccagtatcgaatctatcagctttttctcaatgga

SEQ ID NO: 674649 - DNA, 120 bp, Artificial Sequence
  ENSG00000185985_10 (sequence is synthesized)
aacctcttgacaagactgtatccaaacgaatttgtcaattactccaacgcggtgactcttcacctaggtaacaacgggttacaggagatccgaacgggggcattcagtggcctgaaaact

SEQ ID NO: 674650 - DNA, 120 bp, Artificial Sequence
  ENSG00000185985_11 (sequence is synthesized)
ctcaaaagactgcatctcaacaacaacaagcttgagatattgagggaggacaccttcctaggcctggagagcctggagtatctccaggccgactacaattacatcagtgccatcgaggct

SEQ ID NO: 674651 - DNA, 120 bp, Artificial Sequence
  ENSG00000185985_12 (sequence is synthesized)
ggggcattcagcaaacttaacaagctcaaagtgctcatcctgaatgacaaccttctgctttcactgcccagcaatgtgttccgctttgtcctgctgacccacttagacctcagggggaat

SEQ ID NO: 674652 - DNA, 120 bp, Artificial Sequence
  ENSG00000185985_13 (sequence is synthesized)
aggctaaaagtaatgccttttgctggcgtccttgaacatattggagggatcatggagattcagctggaggaaaatccatggaattgcacttgtgacttacttcctctcaaggcctggcta

SEQ ID NO: 674653 - DNA, 120 bp, Artificial Sequence
  ENSG00000185985_14 (sequence is synthesized)
gacaccataactgtttttgtgggagagattgtctgtgagactccctttaggttgcatgggaaagacgtgacccagctgaccaggcaagacctctgtcccagaaaaagtgccagtgattcc

SEQ ID NO: 674654 - DNA, 120 bp, Artificial Sequence
  ENSG00000185985_15 (sequence is synthesized)
agtcagaggggcagccatgctgacacccacgtccaaaggctgtcacctacaatgaatcctgctctcaacccaaccagggctccgaaagccagccggccgcccaaaatgagaaatcgtcca

SEQ ID NO: 674655 - DNA, 120 bp, Artificial Sequence
  ENSG00000185985_16 (sequence is synthesized)
actcctcgagtgactgtgtcaaaggacaggcaaagttttggacccatcatggtgtaccagaccaagtctcctgtgcctctcacctgtcccagcagctgtgtctgcacctctcagagctca

SEQ ID NO: 674656 - DNA, 120 bp, Artificial Sequence
  ENSG00000185985_17 (sequence is synthesized)
gacaatggtctgaatgtaaactgccaagaaaggaagttcactaatatctctgacctgcagcccaaaccgaccagtccaaagaaactctacctaacagggaactatcttcaaactgtctat

SEQ ID NO: 674657 - DNA, 120 bp, Artificial Sequence
  ENSG00000185985_18 (sequence is synthesized)
aagaatgacctcttagaatacagttctttggacttactgcacttaggaaacaacaggattgcagtcattcaggaaggtgcctttacaaacctgaccagtttacgcagactttatctgaat

SEQ ID NO: 674658 - DNA, 120 bp, Artificial Sequence
  ENSG00000185985_19 (sequence is synthesized)
ggcaattaccttgaagtgctgtacccttctatgtttgatggactgcagagcttgcaatatctctatttagagtataatgtcattaaggaaattaagcctctgacctttgatgctttgatt

SEQ ID NO: 674659 - DNA, 120 bp, Artificial Sequence
  ENSG00000185985_20 (sequence is synthesized)
aacctacagctactgtttctgaacaacaaccttcttcggtccttacctgataatatatttggggggacggccctaaccaggctgaatctgagaaacaaccatttttctcacctgcccgtg

SEQ ID NO: 674660 - DNA, 120 bp, Artificial Sequence
  ENSG00000185985_21 (sequence is synthesized)
aaaggggttctggatcagctcccggctttcatccagatagatctgcaggagaacccctgggactgtacctgtgacatcatggggctgaaagactggacagaacatgccaattcccctgtc

SEQ ID NO: 674661 - DNA, 120 bp, Artificial Sequence
  ENSG00000185985_22 (sequence is synthesized)
atcattaatgaggtgacttgcgaatctcctgctaagcatgcaggggagatactaaaatttctggggagggaggctatctgtccagacagcccaaacttgtcagatggaaccgtcttgtca

SEQ ID NO: 674662 - DNA, 120 bp, Artificial Sequence
  ENSG00000185985_23 (sequence is synthesized)
atgaatcacaatacagacacacctcggtcgcttagtgtgtctcctagttcctatcctgaactacacactgaagttccactgtctgtcttaattctgggattgcttgttgttttcatctta

SEQ ID NO: 674663 - DNA, 120 bp, Artificial Sequence
  ENSG00000185985_24 (sequence is synthesized)
tctgtctgttttggggctggtttattcgtctttgtcttgaaacgccgaaagggagtgccgagcgttcccaggaataccaacaacttagacgtaagctcctttcaattacagtatgggtct

SEQ ID NO: 674664 - DNA, 120 bp, Artificial Sequence
  ENSG00000185985_25 (sequence is synthesized)
tacaacactgagactcacgataaaacagacggccatgtctacaactatatccccccacctgtgggtcagatgtgccaaaaccccatctacatgcagaaggaaggagacccagtagcctat

SEQ ID NO: 674665 - DNA, 120 bp, Artificial Sequence
  ENSG00000185985_26 (sequence is synthesized)
taccgaaacctgcaagagttcagctatagcaacctggaggagaaaaaagaagagccagccacacctgcttacacaataagtgccactgagctgctagaaaagcaggccacaccaagagag

SEQ ID NO: 674666 - DNA, 120 bp, Artificial Sequence
  ENSG00000185985_27 (sequence is synthesized)
cctgagctgctgtatcaaaatattgctgagcgagtcaaggaacttcccagcgcaggcctagtccactataacttttgtaccttacctaaaaggcagtttgccccttcctatgaatctcga

SEQ ID NO: 674667 - DNA, 120 bp, Artificial Sequence
  ENSG00000185985_28 (sequence is synthesized)
cgccaaaaccaagacagaatcaataaaaccgttttatatggaactcccaggaaatgctttgtggggcagtcaaaacccaaccaccctttactgcaagctaagccgcaatcagaaccggac

SEQ ID NO: 674668 - DNA, 120 bp, Artificial Sequence
  ENSG00000185985_29 (sequence is synthesized)
tacctcgaagttctggaaaaacaaactgcaatcagtcagctgtgaagggaaatcatttacaaccctaaggcatcagaggatgctgctccgaactgttggaaacaaggacattagcttttg

SEQ ID NO: 674669 - DNA, 120 bp, Artificial Sequence
  ENSG00000185985_30 (sequence is synthesized)
tgtttgtttttgttctccctttcccagtgttaatgggggactttgaaaatgtttgggagataggatgaagtcatgattttgcttttgcaagttttcctttaaattatttctctctcgctc

SEQ ID NO: 674670 - DNA, 120 bp, Artificial Sequence
  ENSG00000185985_31 (sequence is synthesized)
tttttttttttttctttttcccttctcttcttaggaaccatcagtggacatgaatgtttctacaatgcatttcttcatagattttgtttatggttttgtttcttttttcttctttgtttt

SEQ ID NO: 674671 - DNA, 120 bp, Artificial Sequence
  ENSG00000185985_32 (sequence is synthesized)
tcttttttcttctttgtttttcagtgtgggagtgggaagaggagattatagtgactgaagaaagaataggcaaacttttcaaatgaaaatggatatttagtgtattttgtagaagatctc

SEQ ID NO: 674672 - DNA, 120 bp, Artificial Sequence
  ENSG00000185985_33 (sequence is synthesized)
caaagatcttttgtgactacaacttcttttgtaaataatgatatatggtatttccatcgtcagttaccgagtatagccactgggtatcactactttgtgttaaagtgccttcgcacttta

SEQ ID NO: 674673 - DNA, 120 bp, Artificial Sequence
  ENSG00000185985_34 (sequence is synthesized)
agtacattacttaaatgttgcttttagctttgataaattgaaaatattttaatgtgttgtatttttgaaattgaaaacactgtaaaatagattgatgtgtcagctatattaagtcaacgt

SEQ ID NO: 674674 - DNA, 120 bp, Artificial Sequence
  ENSG00000185985_35 (sequence is synthesized)
agaaaccagcctgtcatcaaatgattctagttctaggactttgtaggcttaactataaaatatttcctttcctctgggtttaagtgattttatttaagtcaactaaggggatttaacagt

SEQ ID NO: 674675 - DNA, 120 bp, Artificial Sequence
  ENSG00000185985_36 (sequence is synthesized)
ggactagaggtaataagccacctcagtcaggattaataattcattaataaaatatatttaacccaatatcagagtgaattgagcaattaatgcccttccataaatcattattttacacta

SEQ ID NO: 674676 - DNA, 120 bp, Artificial Sequence
  ENSG00000185985_37 (sequence is synthesized)
acatggtgagtgttttagattattttcctaattaaaagaacgtgacacagctagtaatatatttttctgcattgaattagatatttttatatatttaaatgaaaaagtctgtatttctaa

SEQ ID NO: 674677 - DNA, 120 bp, Artificial Sequence
  ENSG00000185985_38 (sequence is synthesized)
ctttttaattgaaattaatattttttctgcctattgaaacattttctataaacacacaccagtagaggccgccacacacctcatttaacaaagacatatgagccattaaagacctcgaag

SEQ ID NO: 674678 - DNA, 120 bp, Artificial Sequence
  ENSG00000185985_39 (sequence is synthesized)
gaagacttcatgggtgagattaaaacttcccaagtaagttctctgcaaaattcaaggtagcagagataaaaatgtatccattactctatttattttagatcacgggttagactcataatc

SEQ ID NO: 674679 - DNA, 120 bp, Artificial Sequence
  ENSG00000185985_40 (sequence is synthesized)
cttctcaagtttaacactttctgacaaaacagcattttcctcttgagtttaattgaagcattaatggggtgctatcaaatcaagtactatttgcgtctccaaatcgattaatagttacct

SEQ ID NO: 674680 - DNA, 120 bp, Artificial Sequence
  ENSG00000185985_41 (sequence is synthesized)
aaaccaagacattaagcatctttttccttctgccttctttaggcttgtgttacttgaagttttccttgtcagcttgagcaagactttcattttggtgttagcattaaaatgattttaatt

SEQ ID NO: 674681 - DNA, 120 bp, Artificial Sequence
  ENSG00000185985_42 (sequence is synthesized)
agccaagtctatataacatttatgaagccttattagactgtaaataattttagatgcaaacgtgattgtgtgatttaaacaaacagcccttctttacaacaaaaaatagttttgttttgt

SEQ ID NO: 674682 - DNA, 120 bp, Artificial Sequence
  ENSG00000185985_43 (sequence is synthesized)
ctattgtaaatccttatgcaactgggatggtgatctgcatataaagtagttcagcttttcaattccttattaaagcaagcgatggcgtctgaaagaagcacactgtttccttttcataaa

SEQ ID NO: 674683 - DNA, 120 bp, Artificial Sequence
  ENSG00000185985_44 (sequence is synthesized)
taggttactgcacataataatcctttatcgtcatgtggagattgaagtggatactgataacttacttttaaagctttaaaattaccaatagtatattgtctgtcactataaacaattcat

SEQ ID NO: 674684 - DNA, 120 bp, Artificial Sequence
  ENSG00000185985_45 (sequence is synthesized)
gtgataggctttcaattagaaattccttaaatccaaattatttggattaatgattactggtgtaaaatagttgtttgtaaaaacaatagaaggtaattgtgtgtatataataacgtaaag

SEQ ID NO: 674685 - DNA, 120 bp, Artificial Sequence
  ENSG00000185985_46 (sequence is synthesized)
ggcattgaagagaaacatatctttaacaacataaaatctctgaatatctacagtggcaagctaacatgctcattctttgattagaggtgataattcctatttcgatccattagaagaaag

SEQ ID NO: 674686 - DNA, 120 bp, Artificial Sequence
  ENSG00000185985_47 (sequence is synthesized)
ttgaaaatggtgggctgaaatgatcttcaagaaagttaatgtacagatattttacatttcacagaagaggaactagaatattatgctagttgaatgtggagaagactcctggaaaccact

SEQ ID NO: 674687 - DNA, 120 bp, Artificial Sequence
  ENSG00000185985_48 (sequence is synthesized)
tcatctttgagtgaagtatttatatataaaagagtttcaaaaatccttttctgactgctctcatttgatgcaatgataaatacagaatacagaggtaggtattttgggaagtgattgtga

SEQ ID NO: 674688 - DNA, 120 bp, Artificial Sequence
  ENSG00000185985_49 (sequence is synthesized)
aggcaaatttgcatatatattctgttaagatcattttcaggcttaaattatatgactagaggctcttgatgcagtgattccacttcagtgttcatttttatttttctgaaagtaaagata

SEQ ID NO: 674689 - DNA, 120 bp, Artificial Sequence
  ENSG00000185985_50 (sequence is synthesized)
ctcctgtaaaatgccattgtccatagaaaaaatattaactcattaagtttaaagacagatgataccttaatattaacttacttacacgattttaaagacgcctactgagagaactcaaat

SEQ ID NO: 674690 - DNA, 120 bp, Artificial Sequence
  ENSG00000185985_51 (sequence is synthesized)
ttataaactctgttgcctaataattatggtttaattctatatcctcttgcttgttacagttatacttaatttgcagtagatttttaaatgaaattatttgaatgtattccagactatttt

SEQ ID NO: 674691 - DNA, 120 bp, Artificial Sequence
  ENSG00000185985_52 (sequence is synthesized)
atttaaaatcatcatacatcatatactttgaacctttattttctaatgcaatcataaacattttaagttttattaactcactagcatccccactgactatattctgttttgctttatctg

SEQ ID NO: 674692 - DNA, 120 bp, Artificial Sequence
  ENSG00000185985_53 (sequence is synthesized)
ctcaagcactttcgaccatattttattttaggatttttatttttatcttccacagctggatattgctatttcacttttatttcacatgcagctttaagacgtatgagcatcagcacagca

SEQ ID NO: 674693 - DNA, 120 bp, Artificial Sequence
  ENSG00000185985_54 (sequence is synthesized)
aaatggttccagcctacagaatgcagtctcccagggccctgccaagaacatatctgtatgtctggccctacaaatgacaaatggtaattcccttctattttagctcttaattagttgctt

SEQ ID NO: 674694 - DNA, 120 bp, Artificial Sequence
  ENSG00000185985_55 (sequence is synthesized)
tcactatttccgaatatacctgtggctaagtttttattgaaacactcaaaaataccacttctcagtatgaacacaattgctaagagcctaatttggttctggactatggtcaacctgtgt

SEQ ID NO: 674695 - DNA, 120 bp, Artificial Sequence
  ENSG00000185985_56 (sequence is synthesized)
gccttgttagttctctccagcagctggtgagtaaggaaatgacccttcaatttcctcttctttttcctctgacctctgtgacttaatttttcttaatgtctccaagtcatcaagggctta

SEQ ID NO: 674696 - DNA, 120 bp, Artificial Sequence
  ENSG00000185985_57 (sequence is synthesized)
ataatttatgaattttacaaaaagcatttaaggaataagaaagaggttctgtgatttttcagactctgaaaattcattttgattctacatattccagaaatatactgggttggatgctag

SEQ ID NO: 674697 - DNA, 120 bp, Artificial Sequence
  ENSG00000185985_58 (sequence is synthesized)
agtgaagaaagccgtccagacaattctcccagtccattcatttcttcattcatttgttcattcagtagttattgagtgcttatttcctgggtgcctggctctaggctatgtcctgagaca

SEQ ID NO: 674698 - DNA, 120 bp, Artificial Sequence
  ENSG00000185985_59 (sequence is synthesized)
tacagtggacagggtctctaccctcctcacaacaccctcttcaccctccacgccaccccctactactcactctcaccctagcaaggagcttcgtgctaataagagagagtcttacctgaa

SEQ ID NO: 674699 - DNA, 120 bp, Artificial Sequence
  ENSG00000185985_60 (sequence is synthesized)
tggcaatcgcccagattaacagtggagacagtaatgcaatgcaggaagttaagtttttaaaggtgattctgtgcagtaaggtataaaacagatatataataaatagcctagcttagtcta

SEQ ID NO: 674700 - DNA, 120 bp, Artificial Sequence
  ENSG00000185985_61 (sequence is synthesized)
acatctctttagaattacacagctaaaaaggaaaaaaaacaccaaaataagataaaataaaacaaatttaaacaccaaaataagatataataaaacatttgtttttgcaaaataaggccc

SEQ ID NO: 674701 - DNA, 120 bp, Artificial Sequence
  ENSG00000185985_62 (sequence is synthesized)
aatgttatggcctaatgaaagctatatacttgtgctatctaaagcactactttgtaaagatgactacccaagattgtaaatacaaaatttaaaaaggtacttaaattttctggaatatcc

SEQ ID NO: 674702 - DNA, 120 bp, Artificial Sequence
  ENSG00000185985_63 (sequence is synthesized)
atgtttcagaggtaatatttactttctatttcagtggcttaaattataacgttttggcttaagtgtcttttatcaatacaatgataagacaccttaatcctgagagagaaaattaagtac

SEQ ID NO: 674703 - DNA, 120 bp, Artificial Sequence
  ENSG00000185985_64 (sequence is synthesized)
tgtatataggtgtactttgcttctcacaatgattgtgcaaaaagtcacgtgtaaattgaacttttgtaaatcaaattgtattttaaatgcattaggggagctgccatttagaggaaactt

SEQ ID NO: 674704 - DNA, 120 bp, Artificial Sequence
  ENSG00000185985_65 (sequence is synthesized)
gtgaattctttcataaagcagaaaaccattttataatacaaataaccattctctgatttatctcttttgtatgtttggattttcaatatcgactttgcttaaaacagagcccacctgcat

SEQ ID NO: 674705 - DNA, 120 bp, Artificial Sequence
  ENSG00000185985_66 (sequence is synthesized)
agtaactgtgttttgccaaggctgcttgtgctaccagtttgctggtggctaacggcttgtgcttgaaagtcttctgaagtctgatgtgaattgagctatcaagcaatgctatcatagcac

SEQ ID NO: 674706 - DNA, 120 bp, Artificial Sequence
  ENSG00000185985_67 (sequence is synthesized)
agtagcagtcctgaacagtctgagcagccaacccatttcaacaaaattgaacacaggactcttctgctcagcagcatctcttttctcagatgtggccatgttacagtagagggtattcca

SEQ ID NO: 674707 - DNA, 120 bp, Artificial Sequence
  ENSG00000185985_68 (sequence is synthesized)
taagcacatattccataaagtgctcagagtcacaggttttataataaattatgttattatgtaaacgaattgcatgcatgttgaaattttttagcagtactttagcttgaaagtactcgt

SEQ ID NO: 674708 - DNA, 120 bp, Artificial Sequence
  ENSG00000185985_69 (sequence is synthesized)
acaaatactgttagatttagttgcaaataattgttctcaagttattgcaataaatgtcaaatgaaacaagctcttgtgtaaatagacttctgtgcctaatagtgacattgtttcaaaaaa

SEQ ID NO: 674709 - DNA, 120 bp, Artificial Sequence
  ENSG00000185985_70 (sequence is synthesized)
gcggccgccctctaccctcaatccccactggagattcctcaccccgggaccgtccgcgcgggcgtggtcgggctccgcgcctcgcgcagcggggtggcacaggcggccagggagggccca

SEQ ID NO: 674710 - DNA, 120 bp, Artificial Sequence
  ENSG00000185985_71 (sequence is synthesized)
cgcacccggcgcgagctagaagcctccggtcggcctgcagtgcccaagtcccatggcgagggcagcccgagtggccgtcgcggctgtaggtccgcatgccgggcaccgcaccaggcgtct

SEQ ID NO: 674711 - DNA, 120 bp, Artificial Sequence
  ENSG00000185985_72 (sequence is synthesized)
agcaggtaggggcagggaaggtagggctgcgctggcggccggtgcccagttaccggcgatcggggacgctcggagacacctggtctcccggaagcgcccttcggaaatgggattcgaccc

SEQ ID NO: 674712 - DNA, 120 bp, Artificial Sequence
  ENSG00000185985_73 (sequence is synthesized)
ggcttgcgggcggcgggtgtttagaagaagaggctgcgggcaagcagtgccccctctctggttccccggactcctcttagccccctcgtggcctgatgggcggccgggacggaggtgggc

SEQ ID NO: 674713 - DNA, 120 bp, Artificial Sequence
  ENSG00000185985_74 (sequence is synthesized)
tgtaagcccgccggcacccaccgtgtcctgtggaaggcttggagacctgagccaggctctactcggttagatgcgagtgagacaggcgacggagttcgtctttaagcctcccttgcctca

SEQ ID NO: 674714 - DNA, 120 bp, Artificial Sequence
  ENSG00000185985_75 (sequence is synthesized)
gcaaggagagggagcgttttccttattttaatgaccgcctttccctcccttggggtcccagttcaccctgaacctttccacagccttaaaagcccgctctccctagcggagtgctgcggc

SEQ ID NO: 674715 - DNA, 120 bp, Artificial Sequence
  ENSG00000185985_76 (sequence is synthesized)
agttcttcagaagacacggggccaaatgaaacttacttaaagtggttatcgcgtttcaggctgatttgttcctagtaactacgttttggaaagcagctgtggactctcaaggacaggcag

SEQ ID NO: 674716 - DNA, 120 bp, Artificial Sequence
  ENSG00000185985_77 (sequence is synthesized)
gaacgaagacctccttagggtccgagtgtcgcttcccacagttagattacccatgaatttccttgattctgtaggtctcaagaatctcatgagcccccaaccacctccacctttctctct

SEQ ID NO: 674717 - DNA, 120 bp, Artificial Sequence
  ENSG00000185985_78 (sequence is synthesized)
gaatctctctcctgtctctgaaattcttcgcaaaaataatctgtcctcaaggaatattgaaagcgtcatcaatgtcttgaaggaaattactgtatctgagaaccgaaactagtatttgat

SEQ ID NO: 674718 - DNA, 120 bp, Artificial Sequence
  ENSG00000185985_79 (sequence is synthesized)
gtttcactttcaaatacatttttttttaataaaaaggatacctttaagtaaaacactaccactgctatttacgtttaagtagatttttaattcatattaagcagtagtgtgctttttgga

SEQ ID NO: 674719 - DNA, 120 bp, Artificial Sequence
  ENSG00000185985_80 (sequence is synthesized)
aagatgatggactgggactcataatccctgggttttgtttctatttgtagtttcttgagtaagtcagcactttccctggttaagaaatgacctcatctgtaaaatgaacctgacttctaa

SEQ ID NO: 674720 - DNA, 120 bp, Artificial Sequence
  ENSG00000185985_81 (sequence is synthesized)
ggtcttgttcggctctcacgtctttacttcagttaaatattgacataatacatgtttgttgaatgaatgactgaatgaataaatcttattgctctaggaactatgtgcttttaacctttg

SEQ ID NO: 674721 - DNA, 120 bp, Artificial Sequence
  ENSG00000185985_82 (sequence is synthesized)
gaaatacatagaaacaaatgcctcctttgctaggaaagggagcttaattgtgctcccactgcatcagactgcttccatctaatgatgcaattgcaatacagggtgggaggccatccacag

SEQ ID NO: 674722 - DNA, 120 bp, Artificial Sequence
  ENSG00000185985_83 (sequence is synthesized)
ggctgtccctctgcctcagagctcatctcaagtttgcccttctctatggagaaggaaaatttgagtctccagaaggaaagtattttgctaaacgccaagcaagaattagagggtaagggg

SEQ ID NO: 674723 - DNA, 120 bp, Artificial Sequence
  ENSG00000185985_84 (sequence is synthesized)
gcttctgatgcctggtccaaggctcttagaagaagaagaaggagaaagggagaaagctcaagaaaataatgcacagatcaccagctacaggtggccctagtgcctaagtttataaactac

SEQ ID NO: 674724 - DNA, 120 bp, Artificial Sequence
  ENSG00000185985_85 (sequence is synthesized)
ccccgcccttcccggagagaaaggagcttgtataaagggaacaatcctagaacctaggcttaacaaggaaggagaaggggagaagcaagggtcattctgttctcaagtggtttgttgtat

SEQ ID NO: 674725 - DNA, 120 bp, Artificial Sequence
  ENSG00000185985_86 (sequence is synthesized)
ctgtgtgtttatctattccacatttggccaggcagtgggactccgggaaagcaagctgaagtgttttgtgggacaggcacatcatttggtcaactccttttccctggttgattccctcct

SEQ ID NO: 674726 - DNA, 120 bp, Artificial Sequence
  ENSG00000185985_87 (sequence is synthesized)
tttcctgacccatctcccccttcctaccagaggcaaccaaggcctttccaggcaacagcagacattatttaccccttgcgaattgattccacaatggaagactcttgggtccaaggagct

SEQ ID NO: 674727 - DNA, 120 bp, Artificial Sequence
  ENSG00000185985_88 (sequence is synthesized)
gtaagataattaaggagaaaacagataatgaaggcaaaaatccaacacctggccattagcaatgctctggaaaggctatttaaacccgcattggatatcagagctgggagggcccataca

SEQ ID NO: 674728 - DNA, 120 bp, Artificial Sequence
  ENSG00000185985_89 (sequence is synthesized)
gtctacctacctgccttttgcagatggacacaggaagatccagaagctagtggcacatctagcaacagagccagatcagaacccaggtaagctcggtctcaggccaggattccttttcca

SEQ ID NO: 674729 - DNA, 120 bp, Artificial Sequence
  ENSG00000185985_90 (sequence is synthesized)
tctcctctctttctcaggagccagtcttcctgcaccagcttcctcttttctcctagctcccctgcccctgcagcctggagggctcaaccacccttcctttggctcccactcccagctgag

SEQ ID NO: 674730 - DNA, 120 bp, Artificial Sequence
  ENSG00000185985_91 (sequence is synthesized)
gctcagcctggcagtgcttttctgacacccacttcttttctccttcctccaggcaagaagtgcacgtttaaacctcattatctggctaagtataaacctcagggagaaaaggggtttgtt

SEQ ID NO: 674731 - DNA, 120 bp, Artificial Sequence
  ENSG00000185985_92 (sequence is synthesized)
tttgtttttctcagtctataagctaacattgagctgactttcagagtccaggcaaatatgtttggtgggtcaccacccagaaaggaattctcttagcactgaatcagggctctgtatgta

SEQ ID NO: 674732 - DNA, 120 bp, Artificial Sequence
  ENSG00000185985_93 (sequence is synthesized)
aagtataaatcccctaagagaactcctcaccctcctacacagacacattggtgcatgcacacacaccccactctctgcacagagagcatctgagctaggagctggcaagtggggcaccag

SEQ ID NO: 674733 - DNA, 62 bp, Artificial Sequence
  ENSG00000185985_94 (sequence is synthesized)
agagagcatctgagctaggagctggcaagtggggcaccagtcctgtagcaaagaggtcacac

SEQ ID NO: 674734 - DNA, 120 bp, Artificial Sequence
  ENSG00000185985_95 (sequence is synthesized)
ggaatctgggagaagaaccccccacccccacccctgccctccataggcattgtgtaggtgagagaaagagggaggagtgagagagaacacacagaggggcccaaggaggtgccaggccat

SEQ ID NO: 674735 - DNA, 120 bp, Artificial Sequence
  ENSG00000185985_96 (sequence is synthesized)
gcaatgatttcattctgccgtgttgctaaccccctcattctccctcgctcccactccgcctccttgctttaccatttttaatcgggcttccttgtttctttcttccctgcacccgcttct

SEQ ID NO: 674736 - DNA, 120 bp, Artificial Sequence
  ENSG00000185988_0 (sequence is synthesized)
tgggtgttgtgttgtgtgtccatgcatggtgactctgtgtctgggcgttgcgtgtttgtgtgtcgtattcaggcgtggtgttgtgcatccggtgctgtcttctggtccgtggcctctatg

SEQ ID NO: 674737 - DNA, 120 bp, Artificial Sequence
  ENSG00000185988_1 (sequence is synthesized)
caccaggcgtggatgtgtctgtgtctgtgtctctgtgccttcttgtgtgcatcatgtcttgtgtgtccaggcgggagggtgggagctgtgtgttgttttttccccggtgtgtgtgtggag

SEQ ID NO: 674738 - DNA, 120 bp, Artificial Sequence
  ENSG00000185988_2 (sequence is synthesized)
agacctggacgcgcctgcgtccctggctgccctgtgcctctgtacgcgctgccagcttgcacacccgtgcacacctgcccactgatctgctgacccctccccacagggcgccttcagccg

SEQ ID NO: 674739 - DNA, 120 bp, Artificial Sequence
  ENSG00000185988_3 (sequence is synthesized)
ctgctacaagctgacagacatgtccaccagcgccgtgttcgccctcaaggtggtgccgtgtggcggggctggggccgggtggcttcgcccgcagggaaaggtggagcgtgagattgccct

SEQ ID NO: 674740 - DNA, 120 bp, Artificial Sequence
  ENSG00000185988_4 (sequence is synthesized)
gcatagccgcctgcgaccccgcaacatcgtggctttccacggacactttgctgaccgcgaccacgtgtacatggtgctggagtactgcagccgccagtctttggcccacgtgctgagggc

SEQ ID NO: 674741 - DNA, 120 bp, Artificial Sequence
  ENSG00000185988_5 (sequence is synthesized)
gcggcagatcctgacggagccagaagtgcgcgactacctgcggggcctggtcagcggcctgcgctacctgcaccagcggtgcatcctgcaccgcgacctgaagctcagtaacttcttcct

SEQ ID NO: 674742 - DNA, 120 bp, Artificial Sequence
  ENSG00000185988_6 (sequence is synthesized)
taacaagaacatggaggtgaagattggagacctgggactggcggccaaggtggggccagggggccgctgccacagagtactctgtgggacccctaacttcctggaccctgaggttgtctc

SEQ ID NO: 674743 - DNA, 120 bp, Artificial Sequence
  ENSG00000185988_7 (sequence is synthesized)
cagaaacggtcactcctgccagtaggacatctgggctctgggctgcatcatgtacacggtgctgactggcaccccacccttcatggcctcacccctgtcggagatgtaccaaaacatccg

SEQ ID NO: 674744 - DNA, 120 bp, Artificial Sequence
  ENSG00000185988_8 (sequence is synthesized)
agcacccaacccggccgagcggcccagcctggaccacctgctgcaggacgacttcttcacacagggtttcactccagaccggctgccggcccactcctgccacagtccccccatcttcgc

SEQ ID NO: 674745 - DNA, 120 bp, Artificial Sequence
  ENSG00000185988_9 (sequence is synthesized)
catacccccgcctctgggcaggatcttccggaaggtgggccagcggctgctcacccagtgccggccaccctgccccttcacgcctaaagaggcctcgggtccaggagaaggtgggccaga

SEQ ID NO: 674746 - DNA, 120 bp, Artificial Sequence
  ENSG00000185988_10 (sequence is synthesized)
ccctgactccatggagtgggacggcgagagctccctgtctgcgaaagaggttccctgcctggaaggccccatccacctggtcgcacaagggaccctgcagagtgacctggccgggcccga

SEQ ID NO: 674747 - DNA, 120 bp, Artificial Sequence
  ENSG00000185988_11 (sequence is synthesized)
ggggagccggcggccagaggtggaggcggccctcagacacctgcagctgtgcctggatgtaggccccccggccacacaggaccccctgggagagcagcagcccatcctctgggcccccaa

SEQ ID NO: 674748 - DNA, 120 bp, Artificial Sequence
  ENSG00000185988_12 (sequence is synthesized)
atgggtggattattccagcaaatacggctttggctaccagctcttggacggggggcgcacgggacggcacccacatggccctgcgaccccccggagggaggggaccctccccacacctgt

SEQ ID NO: 674749 - DNA, 120 bp, Artificial Sequence
  ENSG00000185988_13 (sequence is synthesized)
gccacctgctggacccggcctctgcctcctgcgcttcctggcctctgagcacgccctgctgctgctgttcagcaatgggatggtgcaggtgagcttcagtggagtcccggcccaactggt

SEQ ID NO: 674750 - DNA, 120 bp, Artificial Sequence
  ENSG00000185988_14 (sequence is synthesized)
gctgagtggcgagggtgagggtttgcagctcaccctctgggagcaggggtcccctggcacctcctactccctggacgtcccgcggagccacggctgcgcccccaccaccggacagcacct

SEQ ID NO: 674751 - DNA, 120 bp, Artificial Sequence
  ENSG00000185988_15 (sequence is synthesized)
tcaccacgccctccgcatgctgcagagtatctagtgcccctgagggtcagagtggacccctgcatggtagtgccagggacccaggctccatttccattcctgtggctcccccagaggggc

SEQ ID NO: 674752 - DNA, 120 bp, Artificial Sequence
  ENSG00000185988_16 (sequence is synthesized)
tgtcctgggggagggctggggggcacacgggaggtgggttcttgccttgtggcatgactgttcaacccagactttgctgggatctcttcctttttcattaaagacaatttgaaatgctgt

SEQ ID NO: 674753 - DNA, 80 bp, Artificial Sequence
  ENSG00000185988_17 (sequence is synthesized)
cggctgcgccagagtccgcgcgatggagccccggccgcggcggcggcgcaggagtcgccccctggtcgccgccttcctgc

SEQ ID NO: 674754 - DNA, 83 bp, Artificial Sequence
  ENSG00000185988_18 (sequence is synthesized)
gacgttgcatcctccctgtttctcttagtggcagaggtgggttacattttcactaatgcagacattagcaccagaggccagtg

SEQ ID NO: 674755 - DNA, 120 bp, Artificial Sequence
  ENSG00000185988_19 (sequence is synthesized)
actgcactccagcctgggcgacagaacaaagaccctgtctcaacaacaacaaaagtagtaccagaagtggggttctgccataactccaaatctaaaacatgggacagttgcttaatgggt

SEQ ID NO: 674756 - DNA, 120 bp, Artificial Sequence
  ENSG00000185988_20 (sequence is synthesized)
taaaacatgggacagttgcttaatgggtggacaggaaagaagccgacactgaggctggaaagatggctggctatgctccgggacacagttggcacaaccgtcacctgtgctgccctgggg

SEQ ID NO: 674757 - DNA, 80 bp, Artificial Sequence
  ENSG00000185989_0 (sequence is synthesized)
aactggcggtcttgcaggcgggcggaccctcggccgcgctcggggctccggcgccgccgctcctcctgctcggcctgagc

SEQ ID NO: 674758 - DNA, 120 bp, Artificial Sequence
  ENSG00000185989_1 (sequence is synthesized)
cgcggacgcgcagcatggcggtggaggacgaggggctccgggtcttccagagcgtgaagatcaagatcggtgaagccaaaaaccttccctcttacccggggccgagcaagatgagggatt

SEQ ID NO: 674759 - DNA, 120 bp, Artificial Sequence
  ENSG00000185989_2 (sequence is synthesized)
gctactgcacggtgaacctggaccaggaggaggttttcaggaccaaaattgtggaaaagtcactctgcccgttttacggagaagacttttactgtgaaattcctcggagctttcgtcacc

SEQ ID NO: 674760 - DNA, 120 bp, Artificial Sequence
  ENSG00000185989_3 (sequence is synthesized)
tgtccttctacattttcgatagagacgttttccggagggattccatcatagggaaggtggccatccagaaggaggacttgcagaagtaccacaacagggacacctggttccagctgcagc

SEQ ID NO: 674761 - DNA, 120 bp, Artificial Sequence
  ENSG00000185989_4 (sequence is synthesized)
acgtggacgctgactcggaagtgcagggcaaagtgcacctggagctgcggctgagcgaggtcatcacagacactggggtcgtctgccacaagctcgccacacgcatcgtcgagtgccagg

SEQ ID NO: 674762 - DNA, 120 bp, Artificial Sequence
  ENSG00000185989_5 (sequence is synthesized)
gcctccccatcgtgaatgggcaatgtgacccctacgccaccgtgacgctggcaggacccttcagatcagaagcaaagaagacgaaagtgaagaggaagaccaacaatccccagttcgatg

SEQ ID NO: 674763 - DNA, 120 bp, Artificial Sequence
  ENSG00000185989_6 (sequence is synthesized)
aagtgttttattttgaggtgacccggccctgtagctacagcaagaagtcccactttgactttgaggaggaagacgtggacaagctcgaaatcagagttgacctctggaatgccagtaacc

SEQ ID NO: 674764 - DNA, 120 bp, Artificial Sequence
  ENSG00000185989_7 (sequence is synthesized)
tgaagtttggagatgaattcctgggagaactaaggatcccgttgaaagtcctgcggcagtccagctcctacgaggcgtggtacttcctccagccccgggacaatggtagcaagagcctaa

SEQ ID NO: 674765 - DNA, 120 bp, Artificial Sequence
  ENSG00000185989_8 (sequence is synthesized)
agccagacgacctgggctccctgcggctgaacgtggtatacacggaagaccacgtgttttcttctgactattacagccctctgcgggacctgctgttgaagtctgcggatgtggagcccg

SEQ ID NO: 674766 - DNA, 120 bp, Artificial Sequence
  ENSG00000185989_9 (sequence is synthesized)
tgtcagcgtctgcggcccacatcctgggcgaggtttgccgggagaagcaggaggcggccgtcccgctggtgcggctcttcctacactatggcagggtggtgccattcatcagtgccatcg

SEQ ID NO: 674767 - DNA, 120 bp, Artificial Sequence
  ENSG00000185989_10 (sequence is synthesized)
ccagcgcggaggtgaagcggacccaggaccccaacaccatcttccgaggaaactcactggcgtccaagtgcatcgacgagaccatgaagctggcggggatgcattacctgcatgtcaccc

SEQ ID NO: 674768 - DNA, 120 bp, Artificial Sequence
  ENSG00000185989_11 (sequence is synthesized)
tgaagcccgccatcgaggagatatgccagagccacaaaccctgtgaaatcgaccctgtgaagttgaaagacggagaaaaccttgaaaacaacatggagaacctacggcagtatgtggacc

SEQ ID NO: 674769 - DNA, 120 bp, Artificial Sequence
  ENSG00000185989_12 (sequence is synthesized)
gcgtcttccacgccatcactgagtctggggtgagctgcccgaccgtcatgtgtgacatcttcttctccctccgggaggcggcggccaagcgcttccaggatgacccggacgtcaggtaca

SEQ ID NO: 674770 - DNA, 120 bp, Artificial Sequence
  ENSG00000185989_13 (sequence is synthesized)
ctgcagtgagcagcttcatcttcctgaggttctttgcgcccgccattctctcccccaacctcttccagctcacgccgcaccacacggacccccagacgtccaggacgctgacattgatct

SEQ ID NO: 674771 - DNA, 120 bp, Artificial Sequence
  ENSG00000185989_14 (sequence is synthesized)
ccaagaccgttcagaccctcggcagcctgtccaagtccaaatctgcgagttttaaggagtcctacatggctacattttatgaattcttcaatgagcagaaatatgctgatgcggtgaaga

SEQ ID NO: 674772 - DNA, 120 bp, Artificial Sequence
  ENSG00000185989_15 (sequence is synthesized)
acttcttggatctgatttcgtcctcggggagaagagaccccaagagtgttgagcagcccatcgtgcttaaagaagggttcatgatcaagagggcccaaggacggaagcgctttgggatga

SEQ ID NO: 674773 - DNA, 120 bp, Artificial Sequence
  ENSG00000185989_16 (sequence is synthesized)
agaattttaagaagagatggtttcgcttgaccaaccatgaatttacctaccacaaaagcaaaggggaccagcctctctacagcattcccatcgagaacatcctggcagtggagaagctgg

SEQ ID NO: 674774 - DNA, 120 bp, Artificial Sequence
  ENSG00000185989_17 (sequence is synthesized)
aggagtctttcaaaatgaaaaacatgttccaggtcatccagccagagcgtgcgctgtacatccaggccaacaactgcgtggaggccaaggactggatcgacattctcaccaaagtgagcc

SEQ ID NO: 674775 - DNA, 120 bp, Artificial Sequence
  ENSG00000185989_18 (sequence is synthesized)
agtgcaaccagaagcgcctcaccgtctaccacccgtccgcctacctgagcggccactggctgtgctgtagggcgccatccgactcggctccgggctgctcgccctgcactggcggcctcc

SEQ ID NO: 674776 - DNA, 120 bp, Artificial Sequence
  ENSG00000185989_19 (sequence is synthesized)
cagccaacatccagctggacattgatggggaccgtgagacggagcgtatctactccctcttcaacttgtacatgagcaagctggagaagatgcaggaggcctgtgggagcaaatctgtgt

SEQ ID NO: 674777 - DNA, 120 bp, Artificial Sequence
  ENSG00000185989_20 (sequence is synthesized)
atgacggcccggagcaggaggagtattcgacgttcgtcattgacgacccccaggagacctacaagacgctaaagcaagtcatcgctggggttggggctttggagcaggagcacgcccagt

SEQ ID NO: 674778 - DNA, 120 bp, Artificial Sequence
  ENSG00000185989_21 (sequence is synthesized)
ataagagggacaagttcaagaagacgaaatatggaagccaggagcaccccatcggagacaagagcttccagaactacatccggcagcagtccgagacctccactcattccatttaaagtc

SEQ ID NO: 674779 - DNA, 120 bp, Artificial Sequence
  ENSG00000185989_22 (sequence is synthesized)
tgcgggacgcgcccagtggcgccagcaagctgcccatgcaaagccgcagcctttgggagggagaagagaaggaagagcgcagagccggcaaagtgagatgcacgccgtcccggcccatag

SEQ ID NO: 674780 - DNA, 120 bp, Artificial Sequence
  ENSG00000185989_23 (sequence is synthesized)
acaagtggcgctggggtttccctctcccagaaccgctgccaccaccgccacgccctccgcagaaagcccacctggccctgtggaacgtgtcgtcatttgattctgtgctttttgctcctt

SEQ ID NO: 674781 - DNA, 120 bp, Artificial Sequence
  ENSG00000185989_24 (sequence is synthesized)
gtttgtggggatctggggatcagctgaaggatcaggaagtgtgggctgtgccctagccacaccacagccagcctcagggagccacggcccgtctagtcgactgtgacatgcacctccggc

SEQ ID NO: 674782 - DNA, 120 bp, Artificial Sequence
  ENSG00000185989_25 (sequence is synthesized)
cgtgtgtgcgtcagtctcgtgcacgtctgtcttgcgtgcacggtgcgtgtgacgctgggctctgtggctctgtgcccgggaggcctgctggccccgcctcggctttcggcttcatcacat

SEQ ID NO: 674783 - DNA, 120 bp, Artificial Sequence
  ENSG00000185989_26 (sequence is synthesized)
tgggaggttcagagcattactctcccactgtgcctgccatccaggcagccatgggaggcggcctccctgttccactttcgaggttcgtttgattcctggctgaggggtcagttttatggc

SEQ ID NO: 674784 - DNA, 120 bp, Artificial Sequence
  ENSG00000185989_27 (sequence is synthesized)
tgggaggtgcagaattacacagaagtcccagtctgaggatgtccttggtgcttgggggatacgggttctgtccacagagtcccttggagggaaaggtgtgggctccagcttctccaggcg

SEQ ID NO: 674785 - DNA, 120 bp, Artificial Sequence
  ENSG00000185989_28 (sequence is synthesized)
tctgcggagcccacagttgaagcccacatcgttttgctgttgaatggggtttaaaatcagaattaacatttgccaccccccgtggaagtttgaagattttaaaaatagaaatgtacattt

SEQ ID NO: 674786 - DNA, 120 bp, Artificial Sequence
  ENSG00000185989_29 (sequence is synthesized)
ttcaagctgtttttctttatgtttttgaaggaccatttttaattagctctttgatacaaagtaactcagaacgtcaaaacctatacccactaaagggaaggctgccgggaaggcaaatgg

SEQ ID NO: 674787 - DNA, 120 bp, Artificial Sequence
  ENSG00000185989_30 (sequence is synthesized)
aacaggaatggagcctgtctcaggaaggccagctgcaggtcctccagaaaatcaaagaagggaagaaactctgagtttgaggtacaggggcttcggggtgcagacgtccctccagggccc

SEQ ID NO: 674788 - DNA, 120 bp, Artificial Sequence
  ENSG00000185989_31 (sequence is synthesized)
atggtcagtattgcacctgtgttatgaacccccagatgctgtgcagggcaggggcgggggctgctgttttattggggaggggagcatcctaaaaatggggtccaggcagacccctccaga

SEQ ID NO: 674789 - DNA, 120 bp, Artificial Sequence
  ENSG00000185989_32 (sequence is synthesized)
cctcacactgccgaggaggcctttcccaaagggcgtcctcccgggatgcagacggcaggtgtgtgggaagcgccgtttaaatacacagcacgacgtatccttgtaccgacttctcccggt

SEQ ID NO: 674790 - DNA, 120 bp, Artificial Sequence
  ENSG00000185989_33 (sequence is synthesized)
tcttgtttgaaaatactgtagttcaggctcttgatctagatggcagataggaactttcttgtcacaaaaatactggaggaaaatgttgtaaaaatagacttttggacacacagctgttgg

SEQ ID NO: 674791 - DNA, 120 bp, Artificial Sequence
  ENSG00000185989_34 (sequence is synthesized)
ggctgcactgagctgcaatttttaacatggatttataacttaatgtttctgtttataaaatactaatgatttgcaatgtattttactggccaattaaaacagatgttttattctttctga

SEQ ID NO: 674792 - DNA, 120 bp, Artificial Sequence
  ENSG00000185989_35 (sequence is synthesized)
agatgccagtgggggagatgccagcgtcagatgccagcgagggcaccgcctgtgacagcgaggcatccgcggtgatctgggcgcctgggggtcactgagctccgtttataaaccaggctt

SEQ ID NO: 674793 - DNA, 120 bp, Artificial Sequence
  ENSG00000185989_36 (sequence is synthesized)
tcaagtgcatctgtgacgtattcagaaaatagcacagccctgcaggggatcacagcaaacccctgggtctgccatccgcccaagagacacctacgtgtttcccccttggagccttccagt

SEQ ID NO: 674794 - DNA, 120 bp, Artificial Sequence
  ENSG00000185989_37 (sequence is synthesized)
tgcaccgtgaaatctcactgggctggaaattccagcctcctgctacagcctctgggaattttgtgtttgtgcagcagacagtcctcttggaaggattttcggagcaaacaaagtcaccgt

SEQ ID NO: 674795 - DNA, 120 bp, Artificial Sequence
  ENSG00000185989_38 (sequence is synthesized)
ccgtcgtcaagctttcacatctctccagggttgtaagaggagacggccgaggctgggcttccttcctcatggcctctgcatcctgtctcatctgcccgcggacttcgtctcctctctgcg

SEQ ID NO: 674796 - DNA, 120 bp, Artificial Sequence
  ENSG00000186001_0 (sequence is synthesized)
gctgagctggcgggcccgagtgttgtcggctgggaaatggcggccgcgggcttggtcgctgtggcagcggctgccgagtactctggcacggtagcgtcgggaggtaacctccctggtgtt

SEQ ID NO: 674797 - DNA, 120 bp, Artificial Sequence
  ENSG00000186001_1 (sequence is synthesized)
cactgcggcccaagctccggggcaggccctggttttggcccgggctcgtggagccgctctctcgatcgagccctggaggaggcggcggtcactggggtgctgagcctgagcggccggaaa

SEQ ID NO: 674798 - DNA, 120 bp, Artificial Sequence
  ENSG00000186001_2 (sequence is synthesized)
ctgagggagtttccccggggagcggccaaccacgacctgacggacaccacccgggcggacctgtcgcgaaatcgcctttcagaaattcctatagaagcatgtcactttgtttctctggaa

SEQ ID NO: 674799 - DNA, 120 bp, Artificial Sequence
  ENSG00000186001_3 (sequence is synthesized)
aatctcaacttgtaccaaaattgtattcgttatattccagaggcaattttaaacctacaagctctaacattcttaaatattagtcggaaccaactgtcaacattgccggtacacttgtgt

SEQ ID NO: 674800 - DNA, 120 bp, Artificial Sequence
  ENSG00000186001_4 (sequence is synthesized)
aatttgccattgaaagtcttaattgctagtaataacaaattggtgtcacttccagaagaaattggacaccttagacatttgatggaacttgatgtgagctgcaatgaaattcaaactata

SEQ ID NO: 674801 - DNA, 120 bp, Artificial Sequence
  ENSG00000186001_5 (sequence is synthesized)
ccttcccaaattggtaacctggaggccttgagagaccttaatgtaagaagaaatcacctagtacatttgcctgaagagctggcggagttgcctttgatacggttagacttctcatgcaat

SEQ ID NO: 674802 - DNA, 120 bp, Artificial Sequence
  ENSG00000186001_6 (sequence is synthesized)
aaaattaccacaatccctgtttgttatcggaacctcaggcacctacagacgatcaccctagataacaatccactacaatcacctcctgcacagatatgtataaaaggcaaagtccacata

SEQ ID NO: 674803 - DNA, 120 bp, Artificial Sequence
  ENSG00000186001_7 (sequence is synthesized)
tttaaatacctgaacatacaagcttgtaagattgctccagatctgccggattatgataggagaccgttgggttttggctcctgccatgaagaactgtactcaagtcgcccttatggagcc

SEQ ID NO: 674804 - DNA, 120 bp, Artificial Sequence
  ENSG00000186001_8 (sequence is synthesized)
cttgattcaggcttcaatagtgtggacagtggtgataagagatggtcagggaatgaacctacagatgaattttcagatctgcctcttcgagtagcagagattactaaagaacaaagacta

SEQ ID NO: 674805 - DNA, 120 bp, Artificial Sequence
  ENSG00000186001_9 (sequence is synthesized)
cgaagagaaagccagtaccaagagaaccgcggcagtttggtagtaacaaacggcggagtggaacatgatctggatcagattgactacatagacagctgcaccgcagaggaagaggaggcc

SEQ ID NO: 674806 - DNA, 120 bp, Artificial Sequence
  ENSG00000186001_10 (sequence is synthesized)
gaggtgagacagcccaagggaccagacccagacagccttagttcacagtttatggcgtatattgaacagcggcgaatctctcatgagggttcaccagtaaagccagtagccattagggag

SEQ ID NO: 674807 - DNA, 120 bp, Artificial Sequence
  ENSG00000186001_11 (sequence is synthesized)
tttcaaaaaacagaagatatgagaagatatttacatcaaaacagggttccagctgagccatcttccctcctgtcactatcagcaagtcacaatcagctgtcacacacagacctggaactt

SEQ ID NO: 674808 - DNA, 120 bp, Artificial Sequence
  ENSG00000186001_12 (sequence is synthesized)
catcagagaagggagcagttagtagagcgcactcggagagaggctcagcttgctgccctgcagtatgaggaggagaaaataaggaccaagcagatccagagagatgctgtcctggacttt

SEQ ID NO: 674809 - DNA, 120 bp, Artificial Sequence
  ENSG00000186001_13 (sequence is synthesized)
gtcaaacaaaaagcatcacaaagtccacaaaaacagcacccgctcctagatggcgtagatggtgagtgccccttcccatccagaaggtctcagcacactgatgatagtgccttgtgcatg

SEQ ID NO: 674810 - DNA, 120 bp, Artificial Sequence
  ENSG00000186001_14 (sequence is synthesized)
tcgctgtcagggttgaatcaagtgggctgtgctgctaccctgcctcattcttctgccttcacgcctcttaagagtgatgacagacctaatgctctattaagttcacctgcaacagaaaca

SEQ ID NO: 674811 - DNA, 120 bp, Artificial Sequence
  ENSG00000186001_15 (sequence is synthesized)
gttcatcattcccctgcatattcttttcctgctgctatccagagaaatcagcctcagcgccctgaaagcttccttttccgagcaggtgtcagggcagaaaccaacaaaggtcatgcttca

SEQ ID NO: 674812 - DNA, 120 bp, Artificial Sequence
  ENSG00000186001_16 (sequence is synthesized)
ccccttcctccatctgctgcacctaccactgattctacagattccataacaggacagaattcaagacagagagaagaagagctggaattaatagaccaactgcgtaaacatattgagtac

SEQ ID NO: 674813 - DNA, 120 bp, Artificial Sequence
  ENSG00000186001_17 (sequence is synthesized)
cggttgaaagtgtctctaccttgtgatctcggagcagctctaactgacggtgttgttctttgccatttggccaatcatgtgcgacctcgatctgtcccaagcattcatgttccctcacca

SEQ ID NO: 674814 - DNA, 120 bp, Artificial Sequence
  ENSG00000186001_18 (sequence is synthesized)
gctgtacctaaattaacaatggcgaaatgcaggcgaaatgtggaaaatttcctagaagcttgcagaaaaattggtgtacctcaggacaatctttgttccccttccgacatccttcagcta

SEQ ID NO: 674815 - DNA, 120 bp, Artificial Sequence
  ENSG00000186001_19 (sequence is synthesized)
aacctcagcgttaaaagaactgttgaaacgctcctttctcttggggcacactcagaagaatccagttttgtctgtctctctctgcagcttctgggttttgtggcattttactgtactgtg

SEQ ID NO: 674816 - DNA, 120 bp, Artificial Sequence
  ENSG00000186001_20 (sequence is synthesized)
atgttaactctctgtgtgctttattactggctcttccccgctcgctgaaagattgcactccggtgactttctgcctcattcctgtgcttggtaaaggaggtttgtttctcatccagaatt

SEQ ID NO: 674817 - DNA, 120 bp, Artificial Sequence
  ENSG00000186001_21 (sequence is synthesized)
tttatatttgcagatgagcaccccctcacattagtaaacatttacgattgctaacaaagagtaaaagaccagcattttttctcctggtcatccgtccattctcctggcctgtggccttgt

SEQ ID NO: 674818 - DNA, 120 bp, Artificial Sequence
  ENSG00000186001_22 (sequence is synthesized)
ttctcttaccataaatgctgaagcatttttactaatacaattctgaacttgtacttcgaatatgacatgtagagctttatttccaagtcacacaatacaactcccatctggccatttttc

SEQ ID NO: 674819 - DNA, 120 bp, Artificial Sequence
  ENSG00000186001_23 (sequence is synthesized)
cgtgcctcagcacaagtgttgaattgtggagtgactgaacctttgcagcagctgctcacgaggagaaccgtcgtgccttttctggttttggccgcacccggttacttagatttctgcttt

SEQ ID NO: 674820 - DNA, 120 bp, Artificial Sequence
  ENSG00000186001_24 (sequence is synthesized)
gaactgtgtcctgagatcctgaatccccgctttgtcggtaggcacaggtccatataagcatttgcggtctggacgtttcaaaggtattggccataattttaataattttagtttggtcag

SEQ ID NO: 674821 - DNA, 120 bp, Artificial Sequence
  ENSG00000186001_25 (sequence is synthesized)
aatgttcagtttgaagatcacccacattccctagactgctcttctgagcccagtctatacgctgtatgtgctgcacacgagcagatgggctggagctggcctctcagggtgggcaccttc

SEQ ID NO: 674822 - DNA, 120 bp, Artificial Sequence
  ENSG00000186001_26 (sequence is synthesized)
cagattgtgtttgttatgtgtgactgaggttcactcccagcattctgtttaaatttggaatttatgtgatttctaacatattcaaaccttcttaatagtgaaacagtagcaggagaagta

SEQ ID NO: 674823 - DNA, 120 bp, Artificial Sequence
  ENSG00000186001_27 (sequence is synthesized)
ttagggcagcagtccctgttctgtgctcaaggcagtgaatattgtctagctctttcagaatgcgtagcacttagctgctagacgttaatgctggaaactataattgcggttagattctag

SEQ ID NO: 674824 - DNA, 120 bp, Artificial Sequence
  ENSG00000186001_28 (sequence is synthesized)
tttcataagtggtgtttctgaatattcaggaaccttctgaactctgttaacaaaattgggataaaggatgaactcaagtgtgaagagagattgtgaggagcataatatccggtttagaat

SEQ ID NO: 674825 - DNA, 120 bp, Artificial Sequence
  ENSG00000186001_29 (sequence is synthesized)
tcagcctgagggaggagcataacatctgggtgtagaattcagcctgaggggctcactggtttggttttcttccatatgaaatgggacagctattttcacaggtcaaaagactgttcacta

SEQ ID NO: 674826 - DNA, 120 bp, Artificial Sequence
  ENSG00000186001_30 (sequence is synthesized)
ttaatgctgaaacactcaacactgtgatgatgaaaacttcagttttctgtgtcagtaggtgcctttcagactttggggaattgggttggttatatttttaagatgtctcagagttgaaac

SEQ ID NO: 674827 - DNA, 120 bp, Artificial Sequence
  ENSG00000186001_31 (sequence is synthesized)
acctgttaaaaaacacacacaggctctcatgtggtttaggggttgtaattgtacattctcttgagaacacacggcactccctctagtccagctgggaggtgagggtgccccagaaagcac

SEQ ID NO: 674828 - DNA, 120 bp, Artificial Sequence
  ENSG00000186001_32 (sequence is synthesized)
aggcttctgagtgtgaacaccggccgcgcaggtcctagggcgctgctgagaggaagagaccagggaatcagccttggagaaagcacgtctcttccgacagcaaaacactgggcaggttca

SEQ ID NO: 674829 - DNA, 120 bp, Artificial Sequence
  ENSG00000186001_33 (sequence is synthesized)
ttttaagtatcatttatctagacttgcagttgcactcaaagtatttctacaaagttgctagtttttttagatcaaaagattacagttacctcattttatcaaaataagtattaaataaaa

SEQ ID NO: 674830 - DNA, 120 bp, Artificial Sequence
  ENSG00000186001_34 (sequence is synthesized)
agtaagcacaagtaccaataactgcctcaaaaatacttgttatatattttattgtaactggttttataaaatttcctagtaatatcgtctcaatgaaaagcaaaacaaaaaacaaaaaac

SEQ ID NO: 674831 - DNA, 120 bp, Artificial Sequence
  ENSG00000186001_35 (sequence is synthesized)
aaaaaaacccaactagttgttttaacaaacatatataatctttttttagtggcaccagaattctatattctgttctttgtaagagcaatctcttttctttttggaatatttaatcttaac

SEQ ID NO: 674832 - DNA, 120 bp, Artificial Sequence
  ENSG00000186001_36 (sequence is synthesized)
agaaagctagtgataaatgctgttcttaagatttgcctttttctctcacaagaaagggttaacctaacaaattaacgatgcacacattaaggaagcgtttaacttcctcaagcaaacagt

SEQ ID NO: 674833 - DNA, 120 bp, Artificial Sequence
  ENSG00000186001_37 (sequence is synthesized)
gtcaacacttctcacatgttggtaatcaacatgttcctgcctaagcttacatagtagttccctggaataattcaggctgttaaataccaggatattaaatcctttacattttcaaatact

SEQ ID NO: 674834 - DNA, 120 bp, Artificial Sequence
  ENSG00000186001_38 (sequence is synthesized)
gcttttaattctgtaattcagatttttaattcagacaggcccttccatgaattattcaaattagggggaagtttctcaagagctcaggatacactgagtttcttgccctatctggtctgg

SEQ ID NO: 674835 - DNA, 120 bp, Artificial Sequence
  ENSG00000186001_39 (sequence is synthesized)
aaaccctggttttcacagtcaggattataatgcagatagcgtagaactcatgcaggctgagttatgttttcaaactatctttcattcttgtggtagggaacttaccctcaagtgtagtat

SEQ ID NO: 674836 - DNA, 120 bp, Artificial Sequence
  ENSG00000186001_40 (sequence is synthesized)
cttttactcttgagccatctggtagcgtggaattgtttttctatttttcacctgcctattttatagacctgtattgaccttttattcatcagggataaaggatgttgctttcaccctgcg

SEQ ID NO: 674837 - DNA, 120 bp, Artificial Sequence
  ENSG00000186001_41 (sequence is synthesized)
gtattgttttccctctgttgtatgtatagatatatgctacttgtcaattttccaattttgaaaatgatctgtatgtacttttagttgtattaataaagtgacagtgagtgtcagacacca

SEQ ID NO: 674838 - DNA, 120 bp, Artificial Sequence
  ENSG00000186001_42 (sequence is synthesized)
acattttagaagagaaaggtttgagccaggttgcagtgacggtccaggctctcctggaacttgccccacccaagcaacagcagcaccagttatctgctgtttgaggatccccaggacggt

SEQ ID NO: 674839 - DNA, 120 bp, Artificial Sequence
  ENSG00000186001_43 (sequence is synthesized)
gggcactggcctggccaaaacaaggaacaggacaccgtgattgctgctgccagctgtctgcttaaacaaagctcttgtgtgttctcagaagggaccgttcccatgattcctaacaggaat

SEQ ID NO: 674840 - DNA, 120 bp, Artificial Sequence
  ENSG00000186001_44 (sequence is synthesized)
attttgcttcatttctccattttaggggaggttatttccatttccattgaatttttttacgaagacaccattggttttctcagatgaaacttctcttactgaaaacccagcacctaactt

SEQ ID NO: 674841 - DNA, 120 bp, Artificial Sequence
  ENSG00000186001_45 (sequence is synthesized)
ggctgtgttttcctggagagcaggcgtgtttcacgtgccagaaagcacatcttctgtgttaggcacaagcatgctgtgccattgtttttacctggtctcaagacaactggtctgctggtt

SEQ ID NO: 674842 - DNA, 120 bp, Artificial Sequence
  ENSG00000186001_46 (sequence is synthesized)
tctaaacttggttgttcattagactctcctggagtatttgttaaaatacagattcacattcagtagagctggggtaaggcctaggaatctgcattttcaacaaccattgcacatgttttt

SEQ ID NO: 674843 - DNA, 72 bp, Artificial Sequence
  ENSG00000186001_47 (sequence is synthesized)
ctaggaatctgcattttcaacaaccattgcacatgtttttgtttttgttggagaaggagttctgctcagtcg

SEQ ID NO: 674844 - DNA, 120 bp, Artificial Sequence
  ENSG00000186001_48 (sequence is synthesized)
acaggcgtgagccactgcgcccggcgcccggcccattgcacgtgtttttcatgtagtggaaccactgttcaaagctagatatttgtatgtttgcgggggagggtaatggccccctgcatt

SEQ ID NO: 674845 - DNA, 120 bp, Artificial Sequence
  ENSG00000186001_49 (sequence is synthesized)
gaggagttggactgttctgtcaaaggcaaaacaaaaataatatagaaggcctaggttttgcatagtcttcttttttttaagagttggggtcttgccgtattgcccaggctggtctgaaac

SEQ ID NO: 674846 - DNA, 120 bp, Artificial Sequence
  ENSG00000186001_50 (sequence is synthesized)
agcctcccaaagtgctgggattactggagtgagccatcgggcctggcccagattttgcatagtaaaacagtgaaacagatagagttgtatttaaggtcagtattctaggcctcccttcaa

SEQ ID NO: 674847 - DNA, 120 bp, Artificial Sequence
  ENSG00000186001_51 (sequence is synthesized)
aaggtcagtattctaggcctcccttcaactgcagtcataccatcatagaagatagttctatgtcatcctgttatctggacattataataaacaacaagccctctatacacaggttccaaa

SEQ ID NO: 674848 - DNA, 120 bp, Artificial Sequence
  ENSG00000186001_52 (sequence is synthesized)
ccccgttatctagacattatcaacaacaagccctctctctatacagagtttccaaattctgaagctgatagcgcacttggtctcactgagcctccctccccgccctcctgctgctcctca

SEQ ID NO: 674849 - DNA, 120 bp, Artificial Sequence
  ENSG00000186001_53 (sequence is synthesized)
gacatctgggcctgcagacacattgcagttacagcacatacacttctagctcggaaaagcctagtttcttgtatttctttcaggtaactgccagtttctgtggctgaatttaagcactta

SEQ ID NO: 674850 - DNA, 120 bp, Artificial Sequence
  ENSG00000186001_54 (sequence is synthesized)
gtgccattgcaccccagcctgggcaacaaaagcgaaattccatctcaaaaaaagaaaacgcgccccatctcgctccaccacaagcgcctttatatactcaatgatgggtggaggaaaagg

SEQ ID NO: 674851 - DNA, 120 bp, Artificial Sequence
  ENSG00000186001_55 (sequence is synthesized)
ggaaaagggcccaagggctcacaccgcacaggagcctttactcaagtttcagctagttttccttcccctgcattttgaactccttttagttgttggtgatatcctttggtgttcactgcc

SEQ ID NO: 674852 - DNA, 120 bp, Artificial Sequence
  ENSG00000186001_56 (sequence is synthesized)
tttgtaaaacaagtaaataaagtaagcggaagatatctcttttgtttctgtagttgttaactgttctggattttctttacaatgcatccatttgggcataatgttatccctctttttatc

SEQ ID NO: 674853 - DNA, 120 bp, Artificial Sequence
  ENSG00000186001_57 (sequence is synthesized)
aggtaaatgtagcatctaaaagtagctttggatcaaatcatgttgaatacctggtcaaagtaatgttttcttccttgttcttgcagagaaacaaattcatcagaacattaccacttgacc

SEQ ID NO: 674854 - DNA, 72 bp, Artificial Sequence
  ENSG00000186001_58 (sequence is synthesized)
cctgggcaacatagcaagaccctgtctcccaaaaattaaaaaaaaaaaaaaaaaaccaggtgtggtggcacc

SEQ ID NO: 674855 - DNA, 86 bp, Artificial Sequence
  ENSG00000186001_59 (sequence is synthesized)
taaattgtacaacatctaacttcaatgcccaatcttatagaacaaaagtaaaatgtctttatgtaagaccccattatatttacagt

SEQ ID NO: 674856 - DNA, 120 bp, Artificial Sequence
  ENSG00000186001_60 (sequence is synthesized)
agtaaaatgtctttatgtaagaccccattatatttacagttcccaacagacccaccaactcttatatacccttatataacttgtttagaatttagccatgtgcatttttaaactgtgttt

SEQ ID NO: 674857 - DNA, 120 bp, Artificial Sequence
  ENSG00000186001_61 (sequence is synthesized)
gtttgtcaacattaagcctcagtacagtctccaaattatatgccaccagaaatgaaattcagcaaaggacaggattgtttttaacatacgcaagccagcctggccaacatggtgaaacct

SEQ ID NO: 674858 - DNA, 82 bp, Artificial Sequence
  ENSG00000186001_62 (sequence is synthesized)
ccaaaaatatactatgcaaggaataattctagaagacattacataatgcaatacttgcaacatttgcaactaattttcccat

SEQ ID NO: 674859 - DNA, 120 bp, Artificial Sequence
  ENSG00000186001_63 (sequence is synthesized)
ataatgcaatacttgcaacatttgcaactaattttcccatagggataaatggaaatttcaacttatttcaaattttgcacatattatgaaaccttattaatgtatttttatcaaactaaa

SEQ ID NO: 674860 - DNA, 120 bp, Artificial Sequence
  ENSG00000186001_64 (sequence is synthesized)
tcagatttgtatttgaattgttaggaaaaaccatgtgcagttttggctgataattgaaggaaaaatatcaaatgctttgaattttttttctcttttttcaaaccctctgcagaggtagga

SEQ ID NO: 674861 - DNA, 120 bp, Artificial Sequence
  ENSG00000186001_65 (sequence is synthesized)
aggtatgaatttcttttttatgtcaagatgcaaaaacaaatcatgatgcttttgttgggagaatttttgtattcagtattttgtatgtacctttttttttttaaattggaaagcacaatt

SEQ ID NO: 674862 - DNA, 120 bp, Artificial Sequence
  ENSG00000186001_66 (sequence is synthesized)
cggtttaacatttagctttgcttgactccagtgtaagatgaagatgaccttgtcacagctcccctgacctgaagcagagcccttcccatcactgacagtgttgggggttgagagcccccc

SEQ ID NO: 674863 - DNA, 120 bp, Artificial Sequence
  ENSG00000186001_67 (sequence is synthesized)
agcagagcccttcccatcactgacagtgtgtcggcagctgagagctcccccagcagagcccttcccatcactgaacagtgttggcggctgagagccccccagcagagcccttcccatcac

SEQ ID NO: 674864 - DNA, 120 bp, Artificial Sequence
  ENSG00000186001_68 (sequence is synthesized)
tgacagtgttgggggctgagagccccccagcagagcccttcccatcactgaacagtgttggcggctgagagccccccagcagagcccttcccatcactgacagtgttgggggctgagagc

SEQ ID NO: 674865 - DNA, 120 bp, Artificial Sequence
  ENSG00000186001_69 (sequence is synthesized)
ccccctagcagagcccttcccatcactgacagtgtctggggctgagagccccccctagcagagcccttcccatcactgacagtgttgggggctgagagccccccagcagagcccttccca

SEQ ID NO: 674866 - DNA, 120 bp, Artificial Sequence
  ENSG00000186001_70 (sequence is synthesized)
tcactgacagtgtctggggctgagagccccccagcagagcccttcccatcactgacagtgtctggggctgagagccccccctagcagagcccttcccatcactgacagtgtcgggttgag

SEQ ID NO: 674867 - DNA, 120 bp, Artificial Sequence
  ENSG00000186001_71 (sequence is synthesized)
agccacccccagcagagcccttgccacgtacagagattttctgtcagcagtttcccagtatttcagactcataatctgtgtttagcactccagtgttctcttgtaatagccaggtctgga

SEQ ID NO: 674868 - DNA, 120 bp, Artificial Sequence
  ENSG00000186001_72 (sequence is synthesized)
aacgacccatggaaagaggggcctttgtattctgctagaacacagagcatagtagtagatcacttttctgaagagctttttaaaatacagctaatcaaggagtttgcgatttctcttact

SEQ ID NO: 674869 - DNA, 120 bp, Artificial Sequence
  ENSG00000186001_73 (sequence is synthesized)
ttctacagctcagcagtgactaatgatgtgtgactatgcgaatgagtttgatgaattcgtaaaaactaagcgcttaaatggttatagaaatgaaaacatggatatttagaagcctttcta

SEQ ID NO: 674870 - DNA, 120 bp, Artificial Sequence
  ENSG00000186001_74 (sequence is synthesized)
tatacacagtgcagttgagatggtttacagcaaatttcgttttatttctgaaaatgttgtaaacatgtaattagtgaaagattttgtaaaacattgtcctgtatttttgtctgtaaatat

SEQ ID NO: 674871 - DNA, 120 bp, Artificial Sequence
  ENSG00000186001_75 (sequence is synthesized)
attgcataagttctaagtataaatatgtcagtatcatgtatgttattttaaattgcctgtacgccactttacacattgacattcaaataaaagccaacacttcagtggcgtgtaataaaa

SEQ ID NO: 674872 - DNA, 120 bp, Artificial Sequence
  ENSG00000186001_76 (sequence is synthesized)
atcttgactaaatagagtgtctcttttacttgtgtctatctgcatgaggacagaacaagtgattatcttgttaacggtaaatctgtcattggacatgtcactttactatccagctgccat

SEQ ID NO: 674873 - DNA, 120 bp, Artificial Sequence
  ENSG00000186001_77 (sequence is synthesized)
ttcctcaatttctagtgtcatagtaaagatcagtaagatgaaagtgaaagtgctgtgtgaaccataaaaggcccgtgcagatgcaaactgttactcagacctctctccagcttcctcgct

SEQ ID NO: 674874 - DNA, 120 bp, Artificial Sequence
  ENSG00000186001_78 (sequence is synthesized)
tttgtaaataacaaaagtttgctagcctcacaggcttaatcctttgcaggaactttgatttgttcctttctgctctccacacacatccaattaacaacgccattaatatttcttaacgtt

SEQ ID NO: 674875 - DNA, 120 bp, Artificial Sequence
  ENSG00000186001_79 (sequence is synthesized)
ctcttaaggtatctcttgttattgtaattcaccaggaagtttggggaggaggtggatataaggtcttgaattttttggtgaattgatctaacaatctgaaatataggatcgcataaatat

SEQ ID NO: 674876 - DNA, 120 bp, Artificial Sequence
  ENSG00000186001_80 (sequence is synthesized)
atgctagagatagtcatagagctcacattaattcttcgtattcagattgtttgatgtgtcattctgatttttttatcaaaggtgtttttcttgtgagttattatttcactttggttagta

SEQ ID NO: 674877 - DNA, 120 bp, Artificial Sequence
  ENSG00000186001_81 (sequence is synthesized)
tataatattgaattaactctgttgtctaatgtgcatgcaaaataatttgagtccaaaaaaactatcactaccaaaaccttctacagtaggggtcaaccaactatggcccctaggccacct

SEQ ID NO: 674878 - DNA, 120 bp, Artificial Sequence
  ENSG00000186001_82 (sequence is synthesized)
gtttataagtaaagctttatttttacatagccagtcccttttgtttatgcattgcctatggctgcttgcacagtaaacagctgaggtggaataattgtgaccaacatcatatacctacaa

SEQ ID NO: 674879 - DNA, 120 bp, Artificial Sequence
  ENSG00000186001_83 (sequence is synthesized)
tcgatctgtcccaagcattcatgttccctcaccagctgtacctaaattaacaatggcgaaatgcaggcgaaatgtggaaaatttcctagaagcttgcagaaaaattggtgtacctcaggt

SEQ ID NO: 674880 - DNA, 120 bp, Artificial Sequence
  ENSG00000186001_84 (sequence is synthesized)
aataaatttatcattttttatgttgcctaaatagacttggttgtcctaaaattttagaaatgtaaatctctaaaatcttacaggactagctctgagctaagtcgatcataattaacatga

SEQ ID NO: 674881 - DNA, 120 bp, Artificial Sequence
  ENSG00000186001_85 (sequence is synthesized)
agattgaaataagtataagtaatttgaaataattattctattttcctaaactttcccacttgctatttgacaactaaatatatccttcaaaaactaagtatatctcagattgagaatgct

SEQ ID NO: 674882 - DNA, 120 bp, Artificial Sequence
  ENSG00000186001_86 (sequence is synthesized)
gcagttggcttcagtgttctaacacttgctttgatactttttaaaatgttttagacttccagaaatgttgaaaaaatagcctagagttccttttgtatacttcagtcaatttcttctaat

SEQ ID NO: 674883 - DNA, 120 bp, Artificial Sequence
  ENSG00000186001_87 (sequence is synthesized)
gttaactaacgtctaatacaaacataggacagtaattcaaactaagtaacatgagaacaatacgattaactgaattacaggctttatttggatttcatcagtttttccatgaagctctgg

SEQ ID NO: 674884 - DNA, 120 bp, Artificial Sequence
  ENSG00000186001_88 (sequence is synthesized)
ctgcaatgaaattcaaactataccttcccaaattggtaacctggaggccttgagagaccttaatgtaagaagaaatcacctagtacatttgcctgaagacggagtctcactctgtcacgc

SEQ ID NO: 674885 - DNA, 66 bp, Artificial Sequence
  ENSG00000186001_89 (sequence is synthesized)
aagaatcttaaatagtgtcgttcccctgcctcaaacttccctgcacaccaatttcaatggccaaaa

SEQ ID NO: 674886 - DNA, 120 bp, Artificial Sequence
  ENSG00000186001_90 (sequence is synthesized)
agttgataatcctaaaaagccttggctattcatcagacatttgttaagcacagtggacagacatttcttaagcattgtgctagatattaaggatacagatataaagagtccagtctctac

SEQ ID NO: 674887 - DNA, 120 bp, Artificial Sequence
  ENSG00000186001_91 (sequence is synthesized)
aagttcatcgagtaagaggtcaatattctgattataaatgtgtttgtgtagatatatgtatagtttttaaaatttctagctaaacattttctaactagtaaatctagaaaaatgctataa

SEQ ID NO: 674888 - DNA, 120 bp, Artificial Sequence
  ENSG00000186007_0 (sequence is synthesized)
agtggctctgcggggaattgtgaggcggactgcgagggaaagggggccttgttgagtccgccaggattctaccatcagaaaagaggccaaacttctatcatcatggtggatgtgaagtgt

SEQ ID NO: 674889 - DNA, 120 bp, Artificial Sequence
  ENSG00000186007_1 (sequence is synthesized)
ctgagtgactgtaaattgcagaaccaacttgagaagcttggattttcacctggcccaatactaccttccaccagaaagttgtatgaaaaaaagttagtacagttgttggtctcacctccc

SEQ ID NO: 674890 - DNA, 120 bp, Artificial Sequence
  ENSG00000186007_2 (sequence is synthesized)
tgtgcaccacctgtgatgaatggacccagagagctggatggagcgcaggacagtgatgacagcgaaggtgggctgcaagagcaccaagcaccagaatcacatatgggactatcaccaaag

SEQ ID NO: 674891 - DNA, 120 bp, Artificial Sequence
  ENSG00000186007_3 (sequence is synthesized)
tgaagcttgctgtgcttggtattttcatcattgtggtgtttgtctacctgactgtggaaaataagtcgctgtttggttaagtaatttaggagcaaagcaatgctccaagcgaggcctcct

SEQ ID NO: 674892 - DNA, 120 bp, Artificial Sequence
  ENSG00000186007_4 (sequence is synthesized)
gcttcaggaaagaaccaaaacactaccctgaagggccagcctagcctgcagccctcccttgcagggagccttcccttgcactgtgctgctctcacagatcggtgtctgggctcagccagg

SEQ ID NO: 674893 - DNA, 120 bp, Artificial Sequence
  ENSG00000186007_5 (sequence is synthesized)
tggaaggaacctgcctaaccaggcacctgtgttaagagcatgatggttaggaaatcccccaagtcatgtcaactctcattaaaggtgcttccatatttgagcaggcgtcaaacaaggaaa

SEQ ID NO: 674894 - DNA, 120 bp, Artificial Sequence
  ENSG00000186007_6 (sequence is synthesized)
tgacagcgaagagcttaatatcattttgcaaggaaatatcatactctcaacagaaaaaagcaagaaactcaaaaaatggcctgaggcttccaccactaaacgcaaagctgtagataccta

SEQ ID NO: 674895 - DNA, 120 bp, Artificial Sequence
  ENSG00000186007_7 (sequence is synthesized)
agagtgaaactcacccagctttagtaaccaactcgattgcatagactttagataaccatgtgaaggggattctaccatcagaaaagaggccaaacttctatcatcatggtggatgtgaag

SEQ ID NO: 674896 - DNA, 120 bp, Artificial Sequence
  ENSG00000186009_0 (sequence is synthesized)
agtctgggcgtagagggtgcagggagcagacgggaggatctcaggccagggacgatggcggctctgcaggagaagaagacgtgtggccagcgcatggaggagttccagcgttactgctgg

SEQ ID NO: 674897 - DNA, 120 bp, Artificial Sequence
  ENSG00000186009_1 (sequence is synthesized)
aacccggacacggggcagatgctgggccgcaccctgtcccggtgggtgtggatcagcctgtactacgtggccttctacgtggtgatgactgggctcttcgccctgtgcctctatgtgctg

SEQ ID NO: 674898 - DNA, 120 bp, Artificial Sequence
  ENSG00000186009_2 (sequence is synthesized)
atgcagacagtggacccgtacacaccggactaccaagaccagctacggtcaccaggggtaaccttaaggccggatgtttacggggagaaaggcctggaaattgtctacaacgtctctgat

SEQ ID NO: 674899 - DNA, 120 bp, Artificial Sequence
  ENSG00000186009_3 (sequence is synthesized)
aacagaacctgggcagacctcacacagactctccacgccttcctagcaggctactctccagcagcccaggaggacagcatcaactgcacctccgagcagtacttcttccaggagagtttc

SEQ ID NO: 674900 - DNA, 120 bp, Artificial Sequence
  ENSG00000186009_4 (sequence is synthesized)
cgcgctcccaaccacaccaagttctcctgcaagttcacggcagatatgctgcagaactgctcaggcctggcggatcccaacttcggctttgaagaaggaaagccatgttttattattaaa

SEQ ID NO: 674901 - DNA, 120 bp, Artificial Sequence
  ENSG00000186009_5 (sequence is synthesized)
atgaacaggatcgtcaagttcctccccagcaacggctcggcccccagagtggactgcgccttcctggaccagccccgcgagctcggccagccgctgcaggtcaagtactaccctcccaac

SEQ ID NO: 674902 - DNA, 120 bp, Artificial Sequence
  ENSG00000186009_6 (sequence is synthesized)
aaccccctggtggcagcgaagctcctcaacatccccaggaacgctgaggtcgccatcgtgtgcaaggtcatggcggagcacgtgaccttcaacaatccccacgacccgtatgaagggaaa

SEQ ID NO: 674903 - DNA, 120 bp, Artificial Sequence
  ENSG00000186009_7 (sequence is synthesized)
gtggagttcaaactcaagattgagaagtgaaacggtttgcgcaggggtcctgggcacgcctgcggggtcgctcaaggacaccctcctggttgggcttaccttgcccgtcagttccctgcc

SEQ ID NO: 674904 - DNA, 120 bp, Artificial Sequence
  ENSG00000186009_8 (sequence is synthesized)
aaatcatccccaaagtggtttggagcaacggtgttgtcagtgtgcgaactccagagaagcgcccacatctgaaggacctgctcgcgagtatcagttcttccttgttgaattcttacagtt

SEQ ID NO: 674905 - DNA, 120 bp, Artificial Sequence
  ENSG00000186009_9 (sequence is synthesized)
tttagatggaatttgctgctataagaatgtccagctaccatgggaacgcaaggcagcaactctctaattaaccaggtcataaaaacgattcgtcttctatgtagacatcactttcttact

SEQ ID NO: 674906 - DNA, 120 bp, Artificial Sequence
  ENSG00000186009_10 (sequence is synthesized)
ataatttatttttctacacttcaatatgaactgccccccccacattaatataaaaactactaatgcactgatatgaaacacggcttacactaatgacattctgaattcttgcttttaaaa

SEQ ID NO: 674907 - DNA, 120 bp, Artificial Sequence
  ENSG00000186009_11 (sequence is synthesized)
ttgcaattcctaagttgtaaacataaaatatattaaagttactcttattgtatgtaaaaaaagaaatcgtgtttcctgatatgggagaaattaaataaaaaccaaacgcttccttaaaaa

SEQ ID NO: 674908 - DNA, 120 bp, Artificial Sequence
  ENSG00000186010_0 (sequence is synthesized)
gggatactgcgagtatggcggcgtcaaaggtgaagcaggacatgcctccgccggggggctatgggcccatcgactacaaacggaacttgccgcgtcgaggactgtcgggctacagcatgc

SEQ ID NO: 674909 - DNA, 120 bp, Artificial Sequence
  ENSG00000186010_1 (sequence is synthesized)
tggccatagggattggaaccctgatctacgggcactggagcataatgaagtggaaccgtgagcgcaggcgcctacaaatcgaggacttcgaggctcgcatcgcgctgttgccactgttac

SEQ ID NO: 674910 - DNA, 120 bp, Artificial Sequence
  ENSG00000186010_2 (sequence is synthesized)
aacctggaggaggaggccatcatcatgaaggacgtgcccgactggaaggtgggggagtctgtgttccacacaacccgctgggtgccccccttgatcggggagctgtacgggctgcgcacc

SEQ ID NO: 674911 - DNA, 120 bp, Artificial Sequence
  ENSG00000186010_3 (sequence is synthesized)
acagaggaggctctccatgccagccacggcttcatgtggtacacgtaggccctgtgccctccggccacctggatccctgcccctccccactgggacggaataaatgctctgcagacctgg

SEQ ID NO: 674912 - DNA, 120 bp, Artificial Sequence
  ENSG00000186010_4 (sequence is synthesized)
tgtgccgtcagctgcatcctcaggcgtggagacttagtggagacccaagggggcgaaccggaaggcttcctggaggaggaggcagcactggggttggggcaagagaaaagctaggagttg

SEQ ID NO: 674913 - DNA, 120 bp, Artificial Sequence
  ENSG00000186010_5 (sequence is synthesized)
gctgggggaaaaggagacagggtcggagggaggcttgaaggggtgctactaggggccctaggcaggggcccctcagggcactgaggccccacccccaccatcggccccatccccacagga

SEQ ID NO: 674914 - DNA, 120 bp, Artificial Sequence
  ENSG00000186010_6 (sequence is synthesized)
ggggaagcaaccaagattggccaggtgcctctgctgtgggctcctggcacgaaagggtgaagtccgtctgagtccaccgaccaatggtgacgcgcagcgccttcgcggcgcttcctgatt

SEQ ID NO: 674915 - DNA, 120 bp, Artificial Sequence
  ENSG00000186010_7 (sequence is synthesized)
ggcgggcatgcagggtgggcgggagggaggagaagagggggcgtcccctccctccacggatgcgcttaaaaggcggtggcggtggcggcagcgcccggcgcccgggctcacctcggccat

SEQ ID NO: 674916 - DNA, 120 bp, Artificial Sequence
  ENSG00000186010_8 (sequence is synthesized)
gagcagcgcagccggcccagacccgtcggaggcgcccgaagagcggcatttcctcaggtcagctggggagagggaagctggagacgggcatggttcccatggggccaggagcagcccgta

SEQ ID NO: 674917 - DNA, 120 bp, Artificial Sequence
  ENSG00000186010_9 (sequence is synthesized)
ggccccttggacttggctgtgcaatcccaggccccagaaagtgcagatccagacccagcacttccacttctaggctctgtcctcgagatgtctccatgtctgcaatcccagcactttggg

SEQ ID NO: 674918 - DNA, 120 bp, Artificial Sequence
  ENSG00000186010_10 (sequence is synthesized)
agttcaagaccagcctgggcaacagagggaaaccctgtcctcgccaccccaaaaaatgtgtctagtgaggagggttgggacccgtggatccagattaggacaggatatgagtggggggcc

SEQ ID NO: 674919 - DNA, 120 bp, Artificial Sequence
  ENSG00000186010_11 (sequence is synthesized)
tccagattaggacaggatatgagtggggggcctgcctcgggccctctaagcaggattttgtcagaggtgaccaggctcaaaccagaccacaccaggcagtggacacacagggccagatga

SEQ ID NO: 674920 - DNA, 120 bp, Artificial Sequence
  ENSG00000186010_12 (sequence is synthesized)
tgggagggcagaggtgccagccacggcagagacagggcctggggttggggagctcccacagctttctatagaaaccccaggaccaagggggtggtgggtgccaggtcccacaagggaagg

SEQ ID NO: 674921 - DNA, 120 bp, Artificial Sequence
  ENSG00000186010_13 (sequence is synthesized)
ctgtagcgcctgccacgcacaggggccactgatcctgggggatgggtcctagcaggctgtatatgggtggctgtgcctctacccataccccactgtccccacaggtgggggagtctgtgt

SEQ ID NO: 674922 - DNA, 120 bp, Artificial Sequence
  ENSG00000186010_14 (sequence is synthesized)
gggatacccatcaccaccagggagcagaatccgttccagggattggggtgagtccgacttcgagcagcagctgccccccaacatcatgtacccagcccgtgactacgtggagccctgggc

SEQ ID NO: 674923 - DNA, 120 bp, Artificial Sequence
  ENSG00000186010_15 (sequence is synthesized)
ttcgcgtagagtccctagacggggcgaaaacgggaaaaggggccttaactggggcacctggctcctttgagagctcggagtttctgactggcctgcgcaacaccccagaggcaaggtgaa

SEQ ID NO: 674924 - DNA, 120 bp, Artificial Sequence
  ENSG00000186010_16 (sequence is synthesized)
cgcgagggcctataatgcaagaaccaaggcgagtcacgccctgtctgggcaaaagaggagtaaagacccctcagctgcagcccggcagcgcattcctacccagggtccgccgccagagct

SEQ ID NO: 674925 - DNA, 120 bp, Artificial Sequence
  ENSG00000186010_17 (sequence is synthesized)
ttcccgcgcggtcggatagttacactactgtccgggacttcctagccgtgccgcggaccatctcaagtgcttccgccacactcatcatggcggtggcagtaagtcacttccgcccgggac

SEQ ID NO: 674926 - DNA, 120 bp, Artificial Sequence
  ENSG00000186010_18 (sequence is synthesized)
aaacggaacttgccgcgtcgaggactgtcggaaaacccctggcatgggggcagaggtgtcacagtccaagcagcctcactcctgagaagccgccagtgtcccctgattgcagagtgggca

SEQ ID NO: 674927 - DNA, 120 bp, Artificial Sequence
  ENSG00000186017_0 (sequence is synthesized)
gttctgctgcttcgaaagctggtaaggcctgagctctacccttctccaaaagaagagccaagagaaggtccttttctacaaatatcagagccatggctcaggagtcagtgatgttcagtg

SEQ ID NO: 674928 - DNA, 120 bp, Artificial Sequence
  ENSG00000186017_1 (sequence is synthesized)
atgtgtccgtagacttctctcaggaggagtgggaatgcctgaatgatgatcagagagatttatacagagatgtgatgttggagaattacagcaacctggtttcaatggggcattctattt

SEQ ID NO: 674929 - DNA, 120 bp, Artificial Sequence
  ENSG00000186017_2 (sequence is synthesized)
ctaaaccaaatgtgatctcctacttggagcaagggaaggagccctggttggctgacagagagctaacaagaggccagtggccagtcctggaatcaagatgtgagaccaagaaattatttc

SEQ ID NO: 674930 - DNA, 120 bp, Artificial Sequence
  ENSG00000186017_3 (sequence is synthesized)
tgaagaaagaaatttatgaaatagaatcaacccagtgggaaataatggaaaaactcacaagacgtgattttcagtgctccagtttcagagatgattgggaatgtaatcggcagtttaaga

SEQ ID NO: 674931 - DNA, 120 bp, Artificial Sequence
  ENSG00000186017_4 (sequence is synthesized)
aagaactcggctctcaggggggacatttcaatcaattggtattcactcatgaagatctgcccactttgagtcaccatccatccttcacattacagcaaatcattaacagtaaaaagaaat

SEQ ID NO: 674932 - DNA, 120 bp, Artificial Sequence
  ENSG00000186017_5 (sequence is synthesized)
tctgtgcatctaaagaatataggaaaacctttagacatggctcacagtttgctacacatgagataattcataccattgagaagccttatgaatgtaaggaatgtggaaagtcctttagac

SEQ ID NO: 674933 - DNA, 120 bp, Artificial Sequence
  ENSG00000186017_6 (sequence is synthesized)
atccctcaagactcactcatcatcagaaaattcatactggcaagaaaccctttgaatgtaaggaatgtggaaaaacctttatttgtggctcagaccttactcgacatcacagaattcaca

SEQ ID NO: 674934 - DNA, 120 bp, Artificial Sequence
  ENSG00000186017_7 (sequence is synthesized)
aaaccctatgaatgtaaggaatgtgggaaagcctttagtagtggttcaaacttcactcgacatcagagaattcacacaggtgagaagccttatgaatgcaaagaatgcgggaaggccttt

SEQ ID NO: 674935 - DNA, 120 bp, Artificial Sequence
  ENSG00000186017_8 (sequence is synthesized)
aggcctttagtagtggctcaaactttactcaacatcagagaattcatactggggaaaaaccctatgaatgtaaggaatgtggcaatgcctttagtcagagctcacaacttattaaacatc

SEQ ID NO: 674936 - DNA, 120 bp, Artificial Sequence
  ENSG00000186017_9 (sequence is synthesized)
aaagaatccatacaggtgagaaaccttacgaatgtaaggaatgtgaaaaggcttttcgttctggctcagaccttactagacatcagagaattcatactggggagaaaccctatgaatgta

SEQ ID NO: 674937 - DNA, 120 bp, Artificial Sequence
  ENSG00000186017_10 (sequence is synthesized)
agatatgtgggaaggcttattctcagagttcacagcttattagtcatcatagaattcatactagtgagaaaccctatgaatatagggaatgtggaaagaactttaattatgacccacaac

SEQ ID NO: 674938 - DNA, 120 bp, Artificial Sequence
  ENSG00000186017_11 (sequence is synthesized)
tcagcatcaaaatttgtactggtgatgaaacagaatatatgaaatgtgtagggaggcttttaattatggctcaaaacagaatttatcttgttaataattcctctagatagaataatgtag

SEQ ID NO: 674939 - DNA, 120 bp, Artificial Sequence
  ENSG00000186017_12 (sequence is synthesized)
aaacattttatttgtggactacagcttattcagcctgggaaaaataatgttggagaaatactctatgaatagaatatactttggaagcccttaactaaacgcttacttctcttgacatca

SEQ ID NO: 674940 - DNA, 120 bp, Artificial Sequence
  ENSG00000186017_13 (sequence is synthesized)
gataattcagtctagcaatatgatagataattcagtctgtcatactgaaaatgacagcacttttaacacctttctaaccttcttaacgtcagagaatttttgtagaaatgtagtcctgtg

SEQ ID NO: 674941 - DNA, 120 bp, Artificial Sequence
  ENSG00000186017_14 (sequence is synthesized)
attgtcattttttcccctaatttctctaattgttacattcttagtattttaatccatattaaatttatatggctataaatttcatctgtttacatcctgatttgtatactattttaaaaa

SEQ ID NO: 674942 - DNA, 120 bp, Artificial Sequence
  ENSG00000186017_15 (sequence is synthesized)
tacctttagtacctgggagaagtgacctctttatttttgaagatggcttattctttttgttctttataacattaaggctttcttattgtaaaaatgttcatgaacgacattttactcaat

SEQ ID NO: 674943 - DNA, 120 bp, Artificial Sequence
  ENSG00000186017_16 (sequence is synthesized)
agagattcttcattatcttcatggtgttttgttgtgttactgtaatatcacttatgaaatcctattggtggatatcgtagtctcctctagatattttgccataatacatgccaaaataca

SEQ ID NO: 674944 - DNA, 120 bp, Artificial Sequence
  ENSG00000186017_17 (sequence is synthesized)
agtccctgctggacattctccctaagcacatctttgtatcatatcttttaattgcagaagtaatgtgtgaatatattttccttataaaagatgcaaacattacaaaaaggcaaatgtacc

SEQ ID NO: 674945 - DNA, 120 bp, Artificial Sequence
  ENSG00000186017_18 (sequence is synthesized)
ctttgaccatatcccaaaggatagtctttatcagttcattatttattgctgatcatttttctgttcatatatacatgcgtgtctcagtaaaaattataaaatgggggataattataatac

SEQ ID NO: 674946 - DNA, 120 bp, Artificial Sequence
  ENSG00000186017_19 (sequence is synthesized)
ctacctcataatgctttgtgaggattaaatgaattaagatcgataaagtgcttagaattgtgcctgacatgataaatacatactcactgaatgttagtcatcgttattatattcatcatc

SEQ ID NO: 674947 - DNA, 120 bp, Artificial Sequence
  ENSG00000186017_20 (sequence is synthesized)
atcagtattattatttgtagaaaggctttttaacttctgcagaacttagtcaccattaggcagggtgtttgactgaagaaagaccctttgaaggtaacaagttaagaaaatttcccatca

SEQ ID NO: 674948 - DNA, 120 bp, Artificial Sequence
  ENSG00000186017_21 (sequence is synthesized)
tcatgtacttactattgaacatgaaataatcctaggtgttgggggggaaagtactgtgaataatgtgtgtgaaggactttattccgactaatactctttttgtcgcattatatacccagt

SEQ ID NO: 674949 - DNA, 120 bp, Artificial Sequence
  ENSG00000186017_22 (sequence is synthesized)
aggaaaaaaagtatgaaaagagaaacagcatcatatttaaaaaatggacagagatagaaacatagttacagatttaaaaggttctgttgaatattatgcttttttctaatatgtttgaaa

SEQ ID NO: 674950 - DNA, 120 bp, Artificial Sequence
  ENSG00000186017_23 (sequence is synthesized)
atttaaacaaaatggtttttaaggaaaatatacatcaatattgactccaagaaaattaggactcttcaaagactctcataaacacagagaacagggaaaaattagcatgtgatcagttaa

SEQ ID NO: 674951 - DNA, 120 bp, Artificial Sequence
  ENSG00000186017_24 (sequence is synthesized)
ctattactaatgaagcaccaaatccagtttctttctaaggaaaactttatcaaatgttcaaggaactatttcagttatatagaagtacacatcttggctcacgcctgtaatcccagcact

SEQ ID NO: 674952 - DNA, 81 bp, Artificial Sequence
  ENSG00000186017_25 (sequence is synthesized)
acttgaatggcacttcagcctgagcgacagaatgagactattaaaaaaaaaaaaaaaaagtccacagtgtagctttgtttg

SEQ ID NO: 674953 - DNA, 120 bp, Artificial Sequence
  ENSG00000186017_26 (sequence is synthesized)
taaaaaaaaaaaaaaaaagtccacagtgtagctttgtttggggttaagttagtgttttgaaatgggccttccctgtgctcaaaacatgctcagcaagcagctccccacgctggacagatc

SEQ ID NO: 674954 - DNA, 120 bp, Artificial Sequence
  ENSG00000186017_27 (sequence is synthesized)
gcatatgtggaaggatgaagtttatgtctgtagaactgttattttatgccccacttccttttttcttagatcctgtgtagacgggtctctctgaacattgtgttactttactttactggc

SEQ ID NO: 674955 - DNA, 120 bp, Artificial Sequence
  ENSG00000186017_28 (sequence is synthesized)
ataaggaagtaaaatatttcataataaatttgagaaaagtagagtgagcaaaaatacctgcaaatgagagaattactaaaaatggactgttgtaatgttttgcgttatcaaaatgaaaac

SEQ ID NO: 674956 - DNA, 120 bp, Artificial Sequence
  ENSG00000186017_29 (sequence is synthesized)
tgccaaatgagattttgtttactttcttttcttgtgtgcttatgtcttttataaagttcttcatctaaaattatagagatagtgcatttgcacccaaattaatgaaacaataccattaaa

SEQ ID NO: 674957 - DNA, 65 bp, Artificial Sequence
  ENSG00000186017_30 (sequence is synthesized)
agtgcatttgcacccaaattaatgaaacaataccattaaagagaaagaaaaggggggcagcctgg

SEQ ID NO: 674958 - DNA, 120 bp, Artificial Sequence
  ENSG00000186017_31 (sequence is synthesized)
aaaaaaaaaaaaagaaagaaaaaatgattatctttgcccttctccgttcctcattccctcccctctgtcaattttcttctgaataatatttaaaggttgtgtatattacccatatatttc

SEQ ID NO: 674959 - DNA, 120 bp, Artificial Sequence
  ENSG00000186017_32 (sequence is synthesized)
aatatttaaaggttgtgtatattacccatatatttcttcatgctaaaacattaacacacaattattttattatgtttttacagaaaaatggataactatacatttccctgaaatttgctt

SEQ ID NO: 674960 - DNA, 120 bp, Artificial Sequence
  ENSG00000186017_33 (sequence is synthesized)
ttttacattcaactgtacattttggattttccttcaatagatgatgatctaacagtctttctgatggttacagtatgttccacagtgttatttaccaatgccttttcaaccactttccca

SEQ ID NO: 674961 - DNA, 120 bp, Artificial Sequence
  ENSG00000186017_34 (sequence is synthesized)
attgtgatattatggattgtttgcgcttttttgccatctaaaagtaatgctgcaacaaacactttgtattcttgtctgttttatttctataaaataagcttcccaagtcatttccagtgt

SEQ ID NO: 674962 - DNA, 73 bp, Artificial Sequence
  ENSG00000186017_35 (sequence is synthesized)
gcctcccaagtagctggggttacaggtatatgccactacgcctggaaaattttgtatttttagtagagacggc

SEQ ID NO: 674963 - DNA, 120 bp, Artificial Sequence
  ENSG00000186017_36 (sequence is synthesized)
caaagtgctggcattataggcatgagccaccgcacccggcgtcatttccagtgttttctatgtttcctaggaaggttttgcttctggaagatttcagagggcaagagaataaaggagtgg

SEQ ID NO: 674964 - DNA, 120 bp, Artificial Sequence
  ENSG00000186017_37 (sequence is synthesized)
gcaagagaataaaggagtggagtgcagtttttcatatatgtgattctgtgagtgtgtatacacagagatttaatattttaatacatcaggaattgattatacgatctaatgcaggatgtc

SEQ ID NO: 674965 - DNA, 120 bp, Artificial Sequence
  ENSG00000186017_38 (sequence is synthesized)
agacttgtttctatccaggaataaaaccagttatgccagaagtaactattattcacctttctcctactgaattaaaatactatcagttgtatattaaatgctcacatctatttctgttct

SEQ ID NO: 674966 - DNA, 120 bp, Artificial Sequence
  ENSG00000186017_39 (sequence is synthesized)
ccatattctagcaatccttgacacttttcaatagcttttattacttggaaataaagatgtatgtatatattattaatatatagtttattatttggaaataaagatgtttcttcatgagaa

SEQ ID NO: 674967 - DNA, 120 bp, Artificial Sequence
  ENSG00000186017_40 (sequence is synthesized)
atatcctgttccacaggaatgttctgaatatggtagagttagaaaaaggaagctgcattgagtttttggggatgttttacatcttccgttatgtttcataagtccgttgtacctctcttt

SEQ ID NO: 674968 - DNA, 120 bp, Artificial Sequence
  ENSG00000186017_41 (sequence is synthesized)
gactcttctcataatgccatgtctttctttataatgaagggactggatttgaattctaggatatgctcatgataaatttgttttgttacttcttttgtaagcagggcattctatttctaa

SEQ ID NO: 674969 - DNA, 120 bp, Artificial Sequence
  ENSG00000186017_42 (sequence is synthesized)
agttgtgcgattatctttccatgcagacttgtcctctttctgaggctgtccagcgcctgggggcagtaggacgggtccgggaactaagcccatctcaaacacgtcggagtggctttcttt

SEQ ID NO: 674970 - DNA, 120 bp, Artificial Sequence
  ENSG00000186017_43 (sequence is synthesized)
gggggccaaggcccgagcctgaggcgggactccatgaggcctctggggcgcgagcggtttgactagggggggcgatcctttcggcggggctgacgcaaggcgcggacaggaattctgacg

SEQ ID NO: 674971 - DNA, 120 bp, Artificial Sequence
  ENSG00000186017_44 (sequence is synthesized)
atcgggaaccatcttgtccggccttgatacgtctctgactacgcttcccagaggtctcctcggcaagactgtacttctcgcggtaattcagcttccaactcacgcgctggcgggaccctc

SEQ ID NO: 674972 - DNA, 120 bp, Artificial Sequence
  ENSG00000186017_45 (sequence is synthesized)
gagaaggtccttttctacaaatatcagagccatggctcaggtgagatactgtttccttttgctcagatagagtgatttttacttctagtaactgtaaacatttgctttcctcatgatgat

SEQ ID NO: 674973 - DNA, 120 bp, Artificial Sequence
  ENSG00000186017_46 (sequence is synthesized)
gctttttgatgttagaaaaacaacacctttcaaaaagtttggttatgagcaatgtcagaattttgctgtaaaggaaaggatctctaacaggccaattcatagaaaaaaaaagaattgatt

SEQ ID NO: 674974 - DNA, 120 bp, Artificial Sequence
  ENSG00000186017_47 (sequence is synthesized)
tcatagaaaaaaaaagaattgattacataatcattgttagaaaatttaccctttttttttttttttcgagatggagtctcgctctgtcttctaggctggagtacagtggcacaatcttgg

SEQ ID NO: 674975 - DNA, 120 bp, Artificial Sequence
  ENSG00000186020_0 (sequence is synthesized)
gtggttattgagttaagcctggcgagtcgaggtgacccgggccgggctgcgggaggagctcgcggtgaggtggccccgcgctgccgggcgaggtcggtccacgtggagccgggagcctga

SEQ ID NO: 674976 - DNA, 120 bp, Artificial Sequence
  ENSG00000186020_1 (sequence is synthesized)
ggcctctgtacgcgggagctgcggacgatggtgttctgcaagtgaaggccccctgaagtggaagacagcattggtactaatggccaactcaagtttcattggggatcatgtccatggagc

SEQ ID NO: 674977 - DNA, 120 bp, Artificial Sequence
  ENSG00000186020_2 (sequence is synthesized)
tcctcatgctgtcatgccagaagtggaattccctgaccaattctttacagttctaaccatggaccatgaactggtgacactcagggatgtggtcatcaacttctctcaggaggaatggga

SEQ ID NO: 674978 - DNA, 120 bp, Artificial Sequence
  ENSG00000186020_3 (sequence is synthesized)
atatctggattctgctcagaggaacttgtactgggatgtgatgatggagaactacagcaacttactctcactggatttggagtccaggaatgagactaagcatttatctgtaggaaaaga

SEQ ID NO: 674979 - DNA, 120 bp, Artificial Sequence
  ENSG00000186020_4 (sequence is synthesized)
tattattcaaaacactggttctcagtgggaggtaatggaaagtagcaagttatgtggccttgaaggttccattttcagaaatgactggcaaagcaaaagcaagattgacttacaaggacc

SEQ ID NO: 674980 - DNA, 120 bp, Artificial Sequence
  ENSG00000186020_5 (sequence is synthesized)
tgaagtgggatatttcagtcaaatgaaaatcatctctgaaaatgtgcccagttacaaaactcatgaatctcttactttacctcggagaactcatgacagtgagaagccctatgaatacaa

SEQ ID NO: 674981 - DNA, 120 bp, Artificial Sequence
  ENSG00000186020_6 (sequence is synthesized)
ggaatatgagaaggtcttcagttgtgacttagagtttgatgaatatcagaaaatacatactggtggaaaaaactatgaatgtaatcaatgttggaaaacctttgggatagataactccag

SEQ ID NO: 674982 - DNA, 120 bp, Artificial Sequence
  ENSG00000186020_7 (sequence is synthesized)
tatgttacaactgaatattcatactggtgtgaaaccttgtaaatatatggaatatgggaatacatgtagtttttataaagactttaatgtataccagaaaattcataatgagaagttcta

SEQ ID NO: 674983 - DNA, 120 bp, Artificial Sequence
  ENSG00000186020_8 (sequence is synthesized)
taaatgtaaggaatacagaaggacctttgaaagagttggaaaagttactccacttcaaagagttcatgatggtgagaaacactttgaatgctcattctgtgggaaatcctttagagtgca

SEQ ID NO: 674984 - DNA, 120 bp, Artificial Sequence
  ENSG00000186020_9 (sequence is synthesized)
tgcacaacttactcgacatcagaaaatccatactgatgagaaaacttacaaatgtatggaatgtggcaaggacttcagatttcattcacagcttaccgaacatcagagaattcatactgg

SEQ ID NO: 674985 - DNA, 120 bp, Artificial Sequence
  ENSG00000186020_10 (sequence is synthesized)
tgagaaaccctacaaatgtatgcactgtgagaaggtttttagaattagttcacagctcattgaacatcagagaattcacactggtgagaaaccttatgcatgtaaggaatgtgggaaggc

SEQ ID NO: 674986 - DNA, 120 bp, Artificial Sequence
  ENSG00000186020_11 (sequence is synthesized)
ttttggagtatgtagagaacttgctcgtcatcagagaattcatactggtaagaaaccctatgaatgcaaagcatgtggaaaggtctttagaaatagttcatccctgactagacatcagag

SEQ ID NO: 674987 - DNA, 120 bp, Artificial Sequence
  ENSG00000186020_12 (sequence is synthesized)
gattcatactggtgaaaaaccctataaatgtaaagaatgtgagaaagcatttggagtaggtagtgaacttactcgacatgaaagaattcacagtggtcaaaaaccttatgaatgtaagga

SEQ ID NO: 674988 - DNA, 120 bp, Artificial Sequence
  ENSG00000186020_13 (sequence is synthesized)
gtgtggaaagttctttagacttacgtcagcccttattcaacatcaaagaattcatagtggtgagaaaccttatgaatgtaaggtatgtgggaaggcctttagacatagttcagcccttac

SEQ ID NO: 674989 - DNA, 120 bp, Artificial Sequence
  ENSG00000186020_14 (sequence is synthesized)
agaacatcagagaattcatactggagaaaaaccctatgaatgcaaggcatgtgggaaggcctttagacatagttcatcctttaccaaacatcagcgcattcatactgatgataaacccta

SEQ ID NO: 674990 - DNA, 120 bp, Artificial Sequence
  ENSG00000186020_15 (sequence is synthesized)
tgaatgtaaggagtgtgggaattcctttagtgttgttgggcatcttacttgccaaccgaaaatttacactggtgagaaatcatttgactgaaataaatgtataaagtggttttttatttc

SEQ ID NO: 674991 - DNA, 120 bp, Artificial Sequence
  ENSG00000186020_16 (sequence is synthesized)
tgattttcacaggaaaatactgtggatggatttaataggtaatcaaggcaattcagtatctccctctcttaaagtctgtttttagacttcatggtcattctgtatgtagacgtagaattg

SEQ ID NO: 674992 - DNA, 120 bp, Artificial Sequence
  ENSG00000186020_17 (sequence is synthesized)
cttagtcatagctgatatatacttatagctttgttagatgttgccaaatatttctcctttttatgttaaaaagtttttttcatgagtttctcatcctggcatgttttgtttacaatagct

SEQ ID NO: 674993 - DNA, 120 bp, Artificial Sequence
  ENSG00000186020_18 (sequence is synthesized)
tttgatgtttgtattattgctcttttgactattcagttttttaattgtaatattacttcaatatcttttctgcattgtaattctttgcttgtgatatctatacttacttattttcctcca

SEQ ID NO: 674994 - DNA, 120 bp, Artificial Sequence
  ENSG00000186020_19 (sequence is synthesized)
cagagttagcactcctagtcagatacaatgtatttttacagtcttacagctcatcattttgtgtaatgttgttttgttttgttttaaatgatagaagtgtgatctcctttccattttcat

SEQ ID NO: 674995 - DNA, 120 bp, Artificial Sequence
  ENSG00000186020_20 (sequence is synthesized)
ccaattgttgacttctctttaaatttctactttattttgatacaacatattccccccaaaaaaacacatacataggaactggttatattccaccataacacacacacacacacacacaca

SEQ ID NO: 674996 - DNA, 120 bp, Artificial Sequence
  ENSG00000186020_21 (sequence is synthesized)
tatcacatatactatatgtgtgtatatagtgtgtgatgtatatgtgtgtgatgtatactatatatgcccacacatgcactacataacacactatatatatatatatatatacacacacac

SEQ ID NO: 674997 - DNA, 120 bp, Artificial Sequence
  ENSG00000186020_22 (sequence is synthesized)
gggcactatatatatatagtgtgtatgtgtgttatattggaatataaccagttcctttaagcagtctttttacctgcaggctataccaaccaggatccaaatgaagagaactcttttaaa

SEQ ID NO: 674998 - DNA, 120 bp, Artificial Sequence
  ENSG00000186020_23 (sequence is synthesized)
tatttgataaaactactcacccagtaagtctcttaaaatttatcattctcttaaagtatcactctaaaatttgtcaaacacctttaaaaggggagaaaaaatgaccactgaacttacatt

SEQ ID NO: 674999 - DNA, 120 bp, Artificial Sequence
  ENSG00000186020_24 (sequence is synthesized)
aagagaatttacaactatatattaacatggcttcaattgtttttttaatctattatcattatttttctttttattccctctcagagttgacttactaggtttgggcatttcaacaatcag

SEQ ID NO: 675000 - DNA, 120 bp, Artificial Sequence
  ENSG00000186020_25 (sequence is synthesized)
cagaccttctttggtttaactaatctcatttaactccaaaatcatctctctcttaggactgctgacttggttatgcagtcaatgagatcacgagccactggttattggattttttttctt

SEQ ID NO: 675001 - DNA, 66 bp, Artificial Sequence
  ENSG00000186020_26 (sequence is synthesized)
tggagtgcagtggcgcagtcttggctcacctcaacctctgcctcccaggttcaggctattctcctg

SEQ ID NO: 675002 - DNA, 120 bp, Artificial Sequence
  ENSG00000186020_27 (sequence is synthesized)
ggcatgagccaccgcacccagcctggttattggatttatttatttattttgagatagagccttgctctgtcaccaggccggagtgcagtggtgtcatctcagatcactgcaacctccacc

SEQ ID NO: 675003 - DNA, 74 bp, Artificial Sequence
  ENSG00000186020_28 (sequence is synthesized)
atgcgccaccatgcccagctaattgtattttagtagatatggagtttcaccacgttggccaagacagtctcgat

SEQ ID NO: 675004 - DNA, 120 bp, Artificial Sequence
  ENSG00000186020_29 (sequence is synthesized)
ttttataagaaaattttactattattttcagataaatttatgtcactgtcattcattacattttaatttttgaaactgatgtctttcccagaatttatgtactctataacggtgtgaatg

SEQ ID NO: 675005 - DNA, 120 bp, Artificial Sequence
  ENSG00000186020_30 (sequence is synthesized)
attaccagtattaagccattttctcatctgatatattgagctatgttttatgtaagtattgcttattcaagtagttttaaaagatatgtaattggttgttgtttcatgtcctacacagta

SEQ ID NO: 675006 - DNA, 120 bp, Artificial Sequence
  ENSG00000186020_31 (sequence is synthesized)
agaacaagagtatgttaacctttttgtcaggatatttgctatttcatatctttgaaatagagtagtagctctatttctaactaaattctatttatgtaacaacacagctaatttactctt

SEQ ID NO: 675007 - DNA, 120 bp, Artificial Sequence
  ENSG00000186020_32 (sequence is synthesized)
ggatctcattctccctttttatcctgagttaccatcagtgctaatgttcctcttttgggtatagttctccaggagaacttgtcctatatttctttgtgtgtgtttttttccttccagctt

SEQ ID NO: 675008 - DNA, 120 bp, Artificial Sequence
  ENSG00000186020_33 (sequence is synthesized)
aaacaaattaaaactaaatatctaaaccttgtatacagacattaaaattagtgagagaaacaaaatatccttgtgtcttggcttttactttttgaagtcattaacaaataataaattaat

SEQ ID NO: 675009 - DNA, 120 bp, Artificial Sequence
  ENSG00000186020_34 (sequence is synthesized)
gaataaaatgtgtccttattatgttttccttgtttgtagttacagctatatttttatcatattaacatttttcacttaacttcgtaatgaacttatggcatttcacacttactcgaaacc

SEQ ID NO: 675010 - DNA, 120 bp, Artificial Sequence
  ENSG00000186020_35 (sequence is synthesized)
ataatataattattattggtggtattactgtttggtttttactatttttactcaaaaacataaaacttcaccattctttccattttcatttgcccctttattctttctgacttttctcta

SEQ ID NO: 675011 - DNA, 120 bp, Artificial Sequence
  ENSG00000186020_36 (sequence is synthesized)
agcctgcataggagctttattctcatattcaataggataggatattgcagtctcatcctgttttctgctgtcctgcaccattaaattttatatgtccttgaaggaattcaatttaatggc

SEQ ID NO: 675012 - DNA, 120 bp, Artificial Sequence
  ENSG00000186020_37 (sequence is synthesized)
aactaatatatgtatgttagggacaggtaaagagtctgtgactgagatttctggagttatataacccctgcgccaccccccaccccaactccaacttgccagaattcaccccttaacctg

SEQ ID NO: 675013 - DNA, 120 bp, Artificial Sequence
  ENSG00000186020_38 (sequence is synthesized)
caatgtgattgtatttggacatagggcaatgaggacataagaatgtgattctaatttgatacaaatggtgatcttatgagaagaggaaggagagacgtctcttcctatgctcacacacaa

SEQ ID NO: 675014 - DNA, 120 bp, Artificial Sequence
  ENSG00000186020_39 (sequence is synthesized)
aggaaagtccacatgaggacacaaggagaagccaagagagcccttaccaggaattaaacctgctaatccctattttaattagaacagtgagaaaataaatatctgtatttaagcctcaca

SEQ ID NO: 675015 - DNA, 120 bp, Artificial Sequence
  ENSG00000186020_40 (sequence is synthesized)
agtcgccgcgcggtgctagctgccggcgctcccctccgtttgcacccacggccgccctattgcggctggcactacgcttctgccaggaccccggctcccttttccgttgacctggtgttc

SEQ ID NO: 675016 - DNA, 120 bp, Artificial Sequence
  ENSG00000186020_41 (sequence is synthesized)
gttttccatgtgttgctgagagatggatgttaaaaatcaacaccaggactacagtaaggctgaaatcattgaagtgcttggagtgcagaactgaaagagtttcattggggatcatgtcca

SEQ ID NO: 675017 - DNA, 71 bp, Artificial Sequence
  ENSG00000186020_42 (sequence is synthesized)
cggctcactgcaagctcctcctcccggatttgcctgccacaactcctggctaattttttgcatttttagta

SEQ ID NO: 675018 - DNA, 120 bp, Artificial Sequence
  ENSG00000186020_43 (sequence is synthesized)
caggcgtgagccaccgcgcccagccgatttatgcccatctttacttcttttttttgacttttggtttagcatatagcatgtttattattcttgtttaagcctttcctcatttttaaaaat

SEQ ID NO: 675019 - DNA, 120 bp, Artificial Sequence
  ENSG00000186020_44 (sequence is synthesized)
ggtggcaaagtatacatgtaacataaaatttaccatcttaactatttgagtatacagctcagcagcattaagtatattcccatttttgtacaaccaacatccacaactttttcatcctgt

SEQ ID NO: 675020 - DNA, 120 bp, Artificial Sequence
  ENSG00000186020_45 (sequence is synthesized)
aaatgtgaaactatatccatgaaataataactacccttttccccctgcccccagcccctggcaaccacgacaagaaacctacaaactctcactacaagcgttaatagcctaaaagtggga

SEQ ID NO: 675021 - DNA, 120 bp, Artificial Sequence
  ENSG00000186020_46 (sequence is synthesized)
gaccagtaatactttctgattttatgaggtggactactctagatacttcatatgagtggaatcataagtagttatctttttgtgattggcttattagaatatcctcaaggttcagccaca

SEQ ID NO: 675022 - DNA, 120 bp, Artificial Sequence
  ENSG00000186020_47 (sequence is synthesized)
tcaaggttcagccacattgtagcatatgtcaaaatttccttccaaggctgaataatattacattgtatgtatatgccacatgtattagtctgttttgtgttgctataaaggaatacctga

SEQ ID NO: 675023 - DNA, 77 bp, Artificial Sequence
  ENSG00000186020_48 (sequence is synthesized)
ctgaggctgggtaatttataaagaaaaatggtttatttagcttatggttctataggctgtacaagaagcatatatgg

SEQ ID NO: 675024 - DNA, 120 bp, Artificial Sequence
  ENSG00000186020_49 (sequence is synthesized)
agcatatcacatggcaagagggaacaaaagggagagggaggaggtgccaggctcttttaaacaactagctataggatgaactcatatccatgtggaggacaccaagccattcatgagatc

SEQ ID NO: 675025 - DNA, 120 bp, Artificial Sequence
  ENSG00000186020_50 (sequence is synthesized)
cctccaacactgggggtcacatgtccgtgtgagattttgagggaacaaatatccaaatcatattaccacattttgtttatccattcatccactgatgaacatctgggttgtacgtatttc

SEQ ID NO: 675026 - DNA, 120 bp, Artificial Sequence
  ENSG00000186020_51 (sequence is synthesized)
ttggttattgtgaataatgctgctatgaatttctcctttttttatttaagtacttaacattcctctcaactctgctttagctgtatccttccaattttgatatgctgttgtcactttttc

SEQ ID NO: 675027 - DNA, 120 bp, Artificial Sequence
  ENSG00000186020_52 (sequence is synthesized)
atatttcaaaacattttccccttatttattcaatgatctgtagatctagaagtgtgttatttaatttccatgtattgaaggactgtataggtttcttattattggtttctaatgcacatt

SEQ ID NO: 675028 - DNA, 120 bp, Artificial Sequence
  ENSG00000186020_53 (sequence is synthesized)
ccctgtaatgtggcaatcttttgaagtttattgtgacttatggtccagccaatagtctatcatggggactgttcaggtacatgaaaagaatgtaatttttcaattgtgggtatggtgttc

SEQ ID NO: 675029 - DNA, 120 bp, Artificial Sequence
  ENSG00000186020_54 (sequence is synthesized)
tgtaaacaacaattaggtcatgttgactggtgtggttcatatcttctatacagttgtcccttgctatccacaggggactggttccaggacaccttgtggataccaaaacctacagatgcc

SEQ ID NO: 675030 - DNA, 120 bp, Artificial Sequence
  ENSG00000186020_55 (sequence is synthesized)
caagtttgttatataaaatggtgtagtagttgcatataacctatgcacaaccttctgtatattttaaaccatctctagattttttataatacttaatacaatgtaaatgctatgtaaata

SEQ ID NO: 675031 - DNA, 120 bp, Artificial Sequence
  ENSG00000186020_56 (sequence is synthesized)
attttatactgtattttaaaatttgtatttttttactgtcattgtgttttttctgaatatttgtgcattgctattggttgaatctgcatatatgaagagctgattacatatactactgaa

SEQ ID NO: 675032 - DNA, 120 bp, Artificial Sequence
  ENSG00000186020_57 (sequence is synthesized)
tttcttgcctacaagtgctatcaattactgagatataattgtggatttccaattatgcttgtggatctatttcttttgttctgttagtttttgcttcataaaatttaacactctcattat

SEQ ID NO: 675033 - DNA, 120 bp, Artificial Sequence
  ENSG00000186020_58 (sequence is synthesized)
aggttcatactagcatacatattcctgatgaacacagtcatgtgtcatgtaataacattttactcaatgatggacacatatacaatggtggtcccataagattacaatggagctgaaaaa

SEQ ID NO: 675034 - DNA, 120 bp, Artificial Sequence
  ENSG00000186020_59 (sequence is synthesized)
ttcctatcacttgtggacgttgtcatgcaacatatcactcaggtgtttgtggtgacgctgctgtaaataaacctactgtgcttccagttgtataaaagtatagcacatgcaattatgtat

SEQ ID NO: 675035 - DNA, 120 bp, Artificial Sequence
  ENSG00000186020_60 (sequence is synthesized)
tagcacatgcaattatgtatagtacgtaataggtgataataataagtgattacattactagtttatgtaatttattgtactatttgtattattattttagactgtactccttctacttat

SEQ ID NO: 675036 - DNA, 120 bp, Artificial Sequence
  ENSG00000186020_61 (sequence is synthesized)
tattccttccctcatgcaggtgtccatctttacctaagattcagttgtaggaagaagtcttaattttaaacagttcagagtactaattattgtaatataccaggtatttcatttagcaaa

SEQ ID NO: 675037 - DNA, 120 bp, Artificial Sequence
  ENSG00000186026_0 (sequence is synthesized)
gcagtgcattcggtggtagtttggtgtcagtcctgtgtcttgtcggtccttctaaacgtgtccccttacgatgctggctcgcaaccacctggaagttgactaaggggagaaggagtctcg

SEQ ID NO: 675038 - DNA, 120 bp, Artificial Sequence
  ENSG00000186026_1 (sequence is synthesized)
ttggaaaacggaggcacaattctgtcttctcttgaactgcataactgagaactctgcaaattccccaaagaaggaggaaaaatgaccatgttcaaggaggcagtgaccttcaaggatgtg

SEQ ID NO: 675039 - DNA, 120 bp, Artificial Sequence
  ENSG00000186026_2 (sequence is synthesized)
gctgtggtcttcaccgaggaggagctggggctgctggacgtttcccagaggaagctgtatcgagatgtcatgctggagaacttcagaaacctgctatcagtggggcatcaactttcccac

SEQ ID NO: 675040 - DNA, 120 bp, Artificial Sequence
  ENSG00000186026_3 (sequence is synthesized)
cgagatacttttcacttccaaagagaagaaaagttttggatcatggagacagcaacccaaagagaagggaattcaggaggcaagatccaaactgagttggagtctgttccagaaacagga

SEQ ID NO: 675041 - DNA, 120 bp, Artificial Sequence
  ENSG00000186026_4 (sequence is synthesized)
ccacatgaagagtggtcttgccagcaaatctgggaacaaactgcaagtgagttaactagacctcaagactccataagtagctctcagttctccacacaaggtgatgtcccctcccaggtt

SEQ ID NO: 675042 - DNA, 120 bp, Artificial Sequence
  ENSG00000186026_5 (sequence is synthesized)
gacgcaggactatctataattcacataggagagacaccttctgagcatgggaagtgtaaaaaattcttcagtgatgtctccatccttgatcttcatcaacaattacactcaggaaagata

SEQ ID NO: 675043 - DNA, 120 bp, Artificial Sequence
  ENSG00000186026_6 (sequence is synthesized)
tcccatacatgtaatgagtacaggaagagattctgttatagctcagctctttgtcttcatcagaaagttcacatgggagagaaacgctataagtgtgatgtgtgtagtaaggcatttagt

SEQ ID NO: 675044 - DNA, 120 bp, Artificial Sequence
  ENSG00000186026_7 (sequence is synthesized)
cagaactcacaactgcaaactcatcagagaatccacactggagagaaaccattcaaatgtgagcagtgtgggaaaagtttcagccgtagatcaggaatgtatgttcattgcaaattacac

SEQ ID NO: 675045 - DNA, 120 bp, Artificial Sequence
  ENSG00000186026_8 (sequence is synthesized)
acaggagaaaaacctcatatttgtgaggaatgtgggaaggccttcattcacaattcccagcttcgggaacatcaaagaatccatactggggagaagccattcaaatgttatatatgtggt

SEQ ID NO: 675046 - DNA, 120 bp, Artificial Sequence
  ENSG00000186026_9 (sequence is synthesized)
aagagcttccatagtagatcaaatcttaataggcattccatggtccacatgcaagagaaatcatttagatgtgatacctgtagtaatagctttggtcagagatcagcacttaatagtcat

SEQ ID NO: 675047 - DNA, 120 bp, Artificial Sequence
  ENSG00000186026_10 (sequence is synthesized)
tgcatggaccacacaaaagagaaactatacaaatgtgaagaatgtggaaggagcttcacttgtaggcaagatctttgtaagcatcagatggaccatacaggagacaaaccatataattgt

SEQ ID NO: 675048 - DNA, 120 bp, Artificial Sequence
  ENSG00000186026_11 (sequence is synthesized)
aatgtatgtgggaagggcttcaggtggtcctcatgtctttcaagacatcagcgggtccacaatggagaaacaacattcaagtgcgacggatgtgggaagagattttatatgaattcacag

SEQ ID NO: 675049 - DNA, 120 bp, Artificial Sequence
  ENSG00000186026_12 (sequence is synthesized)
ggccattcacatcagagagcctatagagaagaagaactgtataaatgtcagaagtgtgggaagggctacattagtaagtttaatcttgacttgcaccagagggtccacacgggagagaga

SEQ ID NO: 675050 - DNA, 120 bp, Artificial Sequence
  ENSG00000186026_13 (sequence is synthesized)
ccttataattgtaaggaatgtggaaagagcttcaggtgggcctcaggtattttgagacataagagactccatactggagaaaaaccattcaaatgtgaagagtgtgggaagaggtttact

SEQ ID NO: 675051 - DNA, 120 bp, Artificial Sequence
  ENSG00000186026_14 (sequence is synthesized)
gagaattcaaaacttcgtttccatcaaagaattcacactggagaaaagccttacaaatgtgaggagtgtggaaagggattcagatgggcctcaactcatctaacccatcaaagactccac

SEQ ID NO: 675052 - DNA, 120 bp, Artificial Sequence
  ENSG00000186026_15 (sequence is synthesized)
agcagagaaaaactattccaatgtgaggattgtgggaagagcagtgagcacagttcatgccttcaagaccaacaaagcgaccacagtggagaaaaaacatccaaatgtgaggactgtggg

SEQ ID NO: 675053 - DNA, 120 bp, Artificial Sequence
  ENSG00000186026_16 (sequence is synthesized)
aagcgctacgagaggcgcttgaatctagatatgattttatcattatttttaaatgatatataattattgtccatatttatgggttacagcatatttcaatacatgtatacaatgtataat

SEQ ID NO: 675054 - DNA, 120 bp, Artificial Sequence
  ENSG00000186026_17 (sequence is synthesized)
gatcaaatcagtgttattagcatatccatcacctcctttatcatttatttgtggatcatttatcatttctttgtgctttgaacgttcaaaaactgctgttctagttatttgaaaataagt

SEQ ID NO: 675055 - DNA, 120 bp, Artificial Sequence
  ENSG00000186026_18 (sequence is synthesized)
cacctttagtgctgtggaacactagaacttgttcctttcatcatcttactgtactttcatatctgttaacgaatctttcatcatccaccctctctcctacttttcccttctagtaattgc

SEQ ID NO: 675056 - DNA, 80 bp, Artificial Sequence
  ENSG00000186026_19 (sequence is synthesized)
ttgctatgccatgccagagtcttccaggcttgagtgtagtggcatgatcctttctcactgcagcctccacctcctgggtt

SEQ ID NO: 675057 - DNA, 89 bp, Artificial Sequence
  ENSG00000186026_20 (sequence is synthesized)
caggcgcccgccaccacacctgactaattgttgtatgcgacctggacttgaactcctgacttcagatgatccgcccacctcggcctccc

SEQ ID NO: 675058 - DNA, 120 bp, Artificial Sequence
  ENSG00000186026_21 (sequence is synthesized)
gccaccatgcccaccatgcctaaaaatttttgtatttttagtgaagatggggtttcaccacattggccaggctagccttgaactcccaaactcaaatggtccacctgccttggcctccca

SEQ ID NO: 675059 - DNA, 120 bp, Artificial Sequence
  ENSG00000186026_22 (sequence is synthesized)
ggcatgagccaccgtgcccagccaatgctatgctgcttctatgatgtcaactttttagcttccacatatgtgtgaaaacatgtggtatttatctttctgggcctgaatttacatcactca

SEQ ID NO: 675060 - DNA, 120 bp, Artificial Sequence
  ENSG00000186026_23 (sequence is synthesized)
gaatttacatcactcaacatcatgttctccaaagcttatctttatcttgccataaatgacagaattttattattttttatggttaaatagtgtacctttgtgtatgtatgccacattttc

SEQ ID NO: 675061 - DNA, 120 bp, Artificial Sequence
  ENSG00000186026_24 (sequence is synthesized)
tttaccattttctgttgatgaacacttagattggttccatatgttagctattgcaaatagtactataataaatataggagtgcagataggagttcaacacactgatttcctttcctttgg

SEQ ID NO: 675062 - DNA, 120 bp, Artificial Sequence
  ENSG00000186026_25 (sequence is synthesized)
atatacagctagtagtgggattgctggatcacttgaatgctgatatgcataagaggatctacactggagaaaaaccatggaagtgtggagattgtggtacatgcttcagtcagggctcac

SEQ ID NO: 675063 - DNA, 120 bp, Artificial Sequence
  ENSG00000186026_26 (sequence is synthesized)
atcttcaaattcagtgtctgttctgtagagaaaccttaataatgtgatatatgtgacagcaaagagttataagatatgaatatgttaattttagtagatacttccgaaaagtatttcaaa

SEQ ID NO: 675064 - DNA, 120 bp, Artificial Sequence
  ENSG00000186026_27 (sequence is synthesized)
ttttagtagatacttccgaaaagtatttcaaactggttgtaccactataaactctgaccattattaggcaagaattggctttttttttttttttcttttgagacagtcttgctctgtcac

SEQ ID NO: 675065 - DNA, 120 bp, Artificial Sequence
  ENSG00000186026_28 (sequence is synthesized)
ccctgcagccttgacctcccaggctcaagaaatccttctgcctcagcccctcaaaagctgggactataggcatgcaacaacacgcctggctaaatttttgttgtagagatggggtctcac

SEQ ID NO: 675066 - DNA, 75 bp, Artificial Sequence
  ENSG00000186026_29 (sequence is synthesized)
agagatggggtctcactatgttgcccaaattggtctcaaactcctgggctcaagcgattctgcgcacagcatttt

SEQ ID NO: 675067 - DNA, 120 bp, Artificial Sequence
  ENSG00000186026_30 (sequence is synthesized)
tttttgagatggggtctctcggtgttgcccaggctggattgcttattcacagatgcagttacagtgccctatagcctcgaactcctgggcctaagtgatcctcttgcttcaatcccctga

SEQ ID NO: 675068 - DNA, 120 bp, Artificial Sequence
  ENSG00000186026_31 (sequence is synthesized)
gaagctgggactacaggcatggaccaccacccctgattgatcttctttagtttctataacaaaatagtacactgtttccacaaacttgggaaggctagtatttgggggtggggggcgtgg

SEQ ID NO: 675069 - DNA, 120 bp, Artificial Sequence
  ENSG00000186026_32 (sequence is synthesized)
aaatcactaaacaacaaagaaaatctgatgaattggacagcataaaaatattggcataaagatgaacataacataagcaggaatatttaaagcacatactttttatagagtgtctcccct

SEQ ID NO: 675070 - DNA, 120 bp, Artificial Sequence
  ENSG00000186026_33 (sequence is synthesized)
gtaatgtctctggttaaatgaaagggtttcaaatgtgaagacaaccctaaccatactcattatctgtaaaagatgtagcattgtcatggactccttaataaacgtgaagactttaatcca

SEQ ID NO: 675071 - DNA, 120 bp, Artificial Sequence
  ENSG00000186038_0 (sequence is synthesized)
gaacaagtccggcttctgccttttattggctgtctgactgtaggaagttacttcctcttattgcaccttagttagctcgtttattacatgagggtaaagcagtatctacctgatagggga

SEQ ID NO: 675072 - DNA, 120 bp, Artificial Sequence
  ENSG00000186038_1 (sequence is synthesized)
ttgggaggattaaatgaggtaatccatttttaaagggcttagaatatacctgacacacagccagtgctcaacaaatgttagctttcattttatcacgggcgaccccacgccctgccttgg

SEQ ID NO: 675073 - DNA, 120 bp, Artificial Sequence
  ENSG00000186038_2 (sequence is synthesized)
ggcccctctcatatagggagcacagggttgctctccttcatctcacacattcgatgtccactacaggaaggggcgttactttcaccatcaattgctcagggtttggccagcacggggcgg

SEQ ID NO: 675074 - DNA, 120 bp, Artificial Sequence
  ENSG00000186038_3 (sequence is synthesized)
atcccactgctctgaattcagtgtttaatagaaagcccttccgtccggtcaccaacatcagcgtccccacccaagtcaacatctccttcgcgatgtctgccatcctagatgtgaatgaac

SEQ ID NO: 675075 - DNA, 120 bp, Artificial Sequence
  ENSG00000186038_4 (sequence is synthesized)
agctgcacctcttgtcatcattcctgtggctggaaatggtttgggataacccatttatcagctggaacccagaggaatgtgagggcatcacgaagatgagtatggcagccaagaacctgt

SEQ ID NO: 675076 - DNA, 120 bp, Artificial Sequence
  ENSG00000186038_5 (sequence is synthesized)
ggctcccagacattttcatcattgaactcatggatgtggataagaccccaaaaggcctcacagcatatgtaagtaatgaaggtcgcatcaggtataagaaacccatgaaggtggacagta

SEQ ID NO: 675077 - DNA, 120 bp, Artificial Sequence
  ENSG00000186038_6 (sequence is synthesized)
tctgtaacctggacatcttctacttccccttcgaccagcagaactgcacactcaccttcagctcattcctctacacagtggacagcatgttgctggacatggagaaagaagtgtgggaaa

SEQ ID NO: 675078 - DNA, 120 bp, Artificial Sequence
  ENSG00000186038_7 (sequence is synthesized)
gttctatgtggccatcaggcgcaggcccagtctctatgtcataaaccttctcgtgcccagtggctttctggttgccatcgatgccctcagcttctacctgccagtgaaaagtgggaatcg

SEQ ID NO: 675079 - DNA, 120 bp, Artificial Sequence
  ENSG00000186038_8 (sequence is synthesized)
tgtcccattcaagataacgctcctgctgggctacaacgtcttcctgctcatgatgagtgacttgctccccaccagtggcacccccctcatcggtgtctacttcgccctgtgcctgtccct

SEQ ID NO: 675080 - DNA, 120 bp, Artificial Sequence
  ENSG00000186038_9 (sequence is synthesized)
gatggtgggcagcctgctggagaccatcttcatcacccacctgctgcacgtggccaccacccagcccccacccctgcctcggtggctccactccctgctgctccactgcaacagcccggg

SEQ ID NO: 675081 - DNA, 120 bp, Artificial Sequence
  ENSG00000186038_10 (sequence is synthesized)
gagatgctgtcccactgcgccccagaaggaaaataagggcccgggtctcacccccacccacctgcccggtgtgaaggagccagaggtatcagcagggcagatgccgggccctgcggaggc

SEQ ID NO: 675082 - DNA, 120 bp, Artificial Sequence
  ENSG00000186038_11 (sequence is synthesized)
agagctgacagggggctcagaatggacaagggcccagcgggaacacgaggcccagaagcagcactcagtggagctgtggttgcagttcagccacgcgatggacgccatgctcttccgcct

SEQ ID NO: 675083 - DNA, 120 bp, Artificial Sequence
  ENSG00000186038_12 (sequence is synthesized)
ctacctgctcttcatggcctcctctatcatcaccgtcatatgcctctggaacacctaggcaggtgctcacctgccaacttcagtctggagcttctcttgcctccagggactggccaggtc

SEQ ID NO: 675084 - DNA, 120 bp, Artificial Sequence
  ENSG00000186038_13 (sequence is synthesized)
tcccccctttcctgagtaccaactatcatatccccaaagatgactgagtctctgctgtattccatgtatcccaatccggtcctgctgatcaattccaatcccagacatttctccctgttc

SEQ ID NO: 675085 - DNA, 120 bp, Artificial Sequence
  ENSG00000186038_14 (sequence is synthesized)
ctgcattttgttggcttccttcagtcctaccatatggttctaggtccctcttacgtcatctgcatagcagactatacctcttctgtccgctgacttgcccaataaataattctgcagaga

SEQ ID NO: 675086 - DNA, 120 bp, Artificial Sequence
  ENSG00000186038_15 (sequence is synthesized)
gtaaaataacaaattgtgtttatttaagccactgggtttgtgatttgttacaacagcaataaaaggcatgtaagatagaaggaaaccattcaacacatgtctaataagaaaaatagagga

SEQ ID NO: 675087 - DNA, 120 bp, Artificial Sequence
  ENSG00000186038_16 (sequence is synthesized)
agtgaaacatttataaatgtctgagaattttccaaaattgaagagatgagtcttcagaccaagggatctcaccaagatctgcaagttgatcacgtatgaactatctataaccatttacgt

SEQ ID NO: 675088 - DNA, 120 bp, Artificial Sequence
  ENSG00000186038_17 (sequence is synthesized)
tgcagtgaaatacctaagactaagataaagtcttaaaagcagactgaaccttaagcataggcaagaacaagacaaccagaacactctttgaaggaaggttacaaatgtcagtggtcaacc

SEQ ID NO: 675089 - DNA, 120 bp, Artificial Sequence
  ENSG00000186038_18 (sequence is synthesized)
aatgctattagtattcaaagtcagactctaggtgtggcctgtgctgctttaatctgggcattcctgggtcccagtacatgttcagagaagaacttagacaaagaagatggaaggaagctg

SEQ ID NO: 675090 - DNA, 120 bp, Artificial Sequence
  ENSG00000186038_19 (sequence is synthesized)
tggctcccagacattttcatcattgaactgtgcgtatcaagggctggtcagagggaagtcccatctcctggtagccacagagatcacagtttaccattggggccactcatggatgtggat

SEQ ID NO: 675091 - DNA, 120 bp, Artificial Sequence
  ENSG00000186038_20 (sequence is synthesized)
cctcttattgcaccttagttagctcgtttattacatgagggtaaagcagtatctacctgataggggattgggaggattaaatgaggaaggggcgttactttcaccatcaattgctcaggg

SEQ ID NO: 675092 - DNA, 120 bp, Artificial Sequence
  ENSG00000186047_0 (sequence is synthesized)
cgctgctgctccacctgcacgcggagcgcgccgggccgccagcggaggcgatggccagccctgcgcccttagtggcctccatcagccaccaaatggtggctctgcagaccttgcagctgc

SEQ ID NO: 675093 - DNA, 120 bp, Artificial Sequence
  ENSG00000186047_1 (sequence is synthesized)
ccttgcagctgctgcagcaggagtggggctggggggacggtccagtcgcccccgggaacccgcgggacccagaccacgtgtccaccgctccagcccgtcgctcaggcccgccgcgggccc

SEQ ID NO: 675094 - DNA, 120 bp, Artificial Sequence
  ENSG00000186047_2 (sequence is synthesized)
ggcgcgaggagcggggcgggggcgtggggaccaggagtcggcggaccgcggcgcgggcgaactccccagaggaggaggtagtgcgaggcgctgaggggggcgccgagttgctgcccttcc

SEQ ID NO: 675095 - DNA, 120 bp, Artificial Sequence
  ENSG00000186047_3 (sequence is synthesized)
cccgggaccgcgggccctgcaccctggcccagatggcgatgcgcagcgcgctggcccgcgtggtggactcgacttcggagctggtcagcgtggagcagacgctgctggggcccctccagc

SEQ ID NO: 675096 - DNA, 120 bp, Artificial Sequence
  ENSG00000186047_4 (sequence is synthesized)
ttagaaacatctgcagtcatttggctctacagattgaaggacagcagtttgacagagacttgaatgctgcccaccagtgtttgaagacaatagtcaagaagctgattcagtcacttgcta

SEQ ID NO: 675097 - DNA, 120 bp, Artificial Sequence
  ENSG00000186047_5 (sequence is synthesized)
attttccttcagatgcccacatggtagcctgtgcttccttgagacagatcttacagaatctcccagacatatgagtgttaaaggcatcgggagtaaaaccacagccagcactgttaagag

SEQ ID NO: 675098 - DNA, 120 bp, Artificial Sequence
  ENSG00000186047_6 (sequence is synthesized)
aaccagataccttaccttcctaattgagtcagcagacaatggatatttttatatccaaaggggaaagacttgatggtacgtggagcagtctgaccagtggcatctgtagccttcgggatt

SEQ ID NO: 675099 - DNA, 120 bp, Artificial Sequence
  ENSG00000186047_7 (sequence is synthesized)
atagcatgttaatgaaatttttttaaagcagtagttcatatttttaagtatattgacctatttgctgactttctgattgaaatacattctactttgtgaagctgatttgattatgtatgt

SEQ ID NO: 675100 - DNA, 120 bp, Artificial Sequence
  ENSG00000186047_8 (sequence is synthesized)
ctactttgtgaagctgatttgattatgtatgtatatatttattcatattattagtttttattgaatgataccttaatttgtattcatattaatgtaggtctaaagggtttaatgtggtta

SEQ ID NO: 675101 - DNA, 120 bp, Artificial Sequence
  ENSG00000186047_9 (sequence is synthesized)
ccctccagcaggagcggtcctttcccattcacctgaagaagtacgtgggaacctccccaacatcagatctctttggtggtgttacttaccacggaaggtaggaggaagactcacttgaac

SEQ ID NO: 675102 - DNA, 120 bp, Artificial Sequence
  ENSG00000186047_10 (sequence is synthesized)
taaagcccatggcgcagatgacaggcattagagatcctgcagtggagagagcatagcacagcagtcaagtcccatggagcatttcaaacctactcttccacttcctgtcattggcccttg

SEQ ID NO: 675103 - DNA, 120 bp, Artificial Sequence
  ENSG00000186047_11 (sequence is synthesized)
agtgaaagagctgtaatgcttccgtttgccaagctgcaggcagcaggaataaaagagctgtaaccctctctcctgctcaatgaacaacaggagagaagaagctgctgggtgccactccct

SEQ ID NO: 675104 - DNA, 120 bp, Artificial Sequence
  ENSG00000186047_12 (sequence is synthesized)
taattcttccaagagactacttgaaaaggatggcactatttagatgtgtgggttcttgggatatttgtttaaataatgaatcttcatatgtctattatagatctagatcttctggaaatg

SEQ ID NO: 675105 - DNA, 120 bp, Artificial Sequence
  ENSG00000186047_13 (sequence is synthesized)
aagactatccaaatgagaacacacaggtctacagtaagggagtcagctgcatcgcttgtattaatatttagcagactcatagacaggtggaggagtgggcatcctccatggtaaaaagag

SEQ ID NO: 675106 - DNA, 120 bp, Artificial Sequence
  ENSG00000186047_14 (sequence is synthesized)
aagcttcaggtatgccctgattggaggtcactggcataggccattcagagtcaggctaaatagaagtggcgcatcttatatgattgttttgggggaccatatttgaccttctctgagtag

SEQ ID NO: 675107 - DNA, 120 bp, Artificial Sequence
  ENSG00000186047_15 (sequence is synthesized)
ttcagagttacaaggggaggcaaaaaatagtgaagctgaccaccattgatcaagtccttattgttctgggtcaattgctgcagaggttgtgggtataaaccaaaaataaaattctaaggc

SEQ ID NO: 675108 - DNA, 120 bp, Artificial Sequence
  ENSG00000186047_16 (sequence is synthesized)
cccccagtcatctgagtggacctcctcctgagtcagtgcactctaaaatttaacctgaaagactggttcaggccatgaggggaaggagagtcagacttgcctcactatatcctccagcat

SEQ ID NO: 675109 - DNA, 120 bp, Artificial Sequence
  ENSG00000186047_17 (sequence is synthesized)
caacatcaacacagaccttaagtctgataagaaaccttacaatctattatctctgaagcctgctacctgtaggcttcgtctgcataataaaaccttcatctccacaaactcttatggtaa

SEQ ID NO: 675110 - DNA, 120 bp, Artificial Sequence
  ENSG00000186047_18 (sequence is synthesized)
agagaatttcagtgtatccccgcggggcgctggaacttcgtctgggtgcatttgtttttataagcctgggtactgcagagtcatttaaaaacatgtgcttgccagggcagaacatcatct

SEQ ID NO: 675111 - DNA, 120 bp, Artificial Sequence
  ENSG00000186047_19 (sequence is synthesized)
gatggcagcaaccacctggtgctggccacgactgaggagggaacacatcaggaaaaagcaacacttctctccatcgggaagaggtggacgccaaggccccgttcattccaccacctcaaa

SEQ ID NO: 675112 - DNA, 120 bp, Artificial Sequence
  ENSG00000186047_20 (sequence is synthesized)
tgtaaataaatagagccctggccttcctacagggttctgttgctcctttcataatgtgagatccatctagatccggcaggagaacttctctaaggccatcataaaggcagtaggaagtac

SEQ ID NO: 675113 - DNA, 120 bp, Artificial Sequence
  ENSG00000186047_21 (sequence is synthesized)
agcacagaggaggctcccctccaaagaagagtgaagcacatcgttagagaataagaacacggggaaattaagaggtgatcttcaaaggctacaatgaacagctcctctctgctttcacac

SEQ ID NO: 675114 - DNA, 120 bp, Artificial Sequence
  ENSG00000186047_22 (sequence is synthesized)
actatacaagaaaagacctccttcagttcaggaggctttggttaacagccacattctcaatattctgggtttcaaggccaagaaaataaatgtcacagtggaaacctcatgctttttcag

SEQ ID NO: 675115 - DNA, 120 bp, Artificial Sequence
  ENSG00000186047_23 (sequence is synthesized)
gtgatataatccaaaaaatgtgtacatctcaatagtataaaggactctgaatcagccagggctcaacttgctattctcttccttgcctgcaagacttgaccttgagtttcagtgtctctc

SEQ ID NO: 675116 - DNA, 120 bp, Artificial Sequence
  ENSG00000186047_24 (sequence is synthesized)
tttctcctttagctgccaccggctgctctgtctagcttctcacctgctggcttttcagcttcaactcctggctaatgagtgaagaaggtcactgtaggagtgtgaggaccatcaggagct

SEQ ID NO: 675117 - DNA, 120 bp, Artificial Sequence
  ENSG00000186047_25 (sequence is synthesized)
tcatatttcaataaccagtgccaaattctgaatgccagatgggatgagatgggatgttaaaccacttcttattaccacgttgttggcctccattgccttcgtattggtctccaattgcat

SEQ ID NO: 675118 - DNA, 120 bp, Artificial Sequence
  ENSG00000186047_26 (sequence is synthesized)
ggtctctgtggatctctgacttcttattacctccgattggaacgcgccacaaatcatcctgctttctttatcctctctcacctccaagtaatcctgtcatcttgctccaattagagccgc

SEQ ID NO: 675119 - DNA, 120 bp, Artificial Sequence
  ENSG00000186047_27 (sequence is synthesized)
ttccattaagaagatcgtgacaaattccctacccctgtttgctcttcaggaaaattatcccctggaaaagtggatgttatagtcgcttttcagaatgtattgtctgaatttcttgtcttc

SEQ ID NO: 675120 - DNA, 120 bp, Artificial Sequence
  ENSG00000186047_28 (sequence is synthesized)
caacattctcctaagccagttacctttgcactgaagtagaattcaaaaggagatagaggttctgaatttcttcctttgaccagatggaagtcgttacatcagaatgctgatgactgcaaa

SEQ ID NO: 675121 - DNA, 120 bp, Artificial Sequence
  ENSG00000186047_29 (sequence is synthesized)
atcttggacatattgttttcacaattaggaaatggcaaacacaaagttcttcagtgcaaagccagcatgcgagttcagcttccatttgctgctataaattttgttcttgttgctgccagt

SEQ ID NO: 675122 - DNA, 120 bp, Artificial Sequence
  ENSG00000186047_30 (sequence is synthesized)
aaacaccaactgttcaagtgaaatagtaaatccaaatgtgcctgttggatgagagtaaaaaaattatatgctgcataaatgctgatgcaaaaggatttttcaacacactaaaccagggta

SEQ ID NO: 675123 - DNA, 120 bp, Artificial Sequence
  ENSG00000186047_31 (sequence is synthesized)
gggaaaggaaccgagaaagaaagttgaactgaatgcagctctcactaacaacttcttggtaaaagcactaaaaaagctcttgatagaatgttgattcaacatactgtttaaacctcaagg

SEQ ID NO: 675124 - DNA, 120 bp, Artificial Sequence
  ENSG00000186047_32 (sequence is synthesized)
aaaaaaacaaacgcagaattgggatattggccttaggatatctgcttaaagtcctactttgagctctcatcagggttaccaaagaaggcgtacatagattgttacaaatcaaagcaaaga

SEQ ID NO: 675125 - DNA, 120 bp, Artificial Sequence
  ENSG00000186047_33 (sequence is synthesized)
gttccctcaaaactgatgtgggcacttggcccagaagttgtttgctaatgatcagtctaacagctgaaagtcaaagtcagtggctagtaccatctgcaataggatttaggaagttttgat

SEQ ID NO: 675126 - DNA, 120 bp, Artificial Sequence
  ENSG00000186047_34 (sequence is synthesized)
ctcacaaatttactgtaaggctaatcaatgaatgtttgtactcaggtctccctacagttaaatttaatgtgtaactggaattacgattcaaagagatagtttcataaatggtccctgaaa

SEQ ID NO: 675127 - DNA, 120 bp, Artificial Sequence
  ENSG00000186047_35 (sequence is synthesized)
tttaattttggattacctaagtttacaatggatttctcttctcctttccccaatatttttcttacgcagaaaaaaaaaaaaaaaatcctgtgtgaccttggagctggctgccctgagtcc

SEQ ID NO: 675128 - DNA, 120 bp, Artificial Sequence
  ENSG00000186047_36 (sequence is synthesized)
caggctctgatttgattctgatgctccagagcctgctttctcatgtaggtataggtagtaatgccccccgcccccgccactgggtcattgtgagggttaaacaagataatacttgttaaa

SEQ ID NO: 675129 - DNA, 120 bp, Artificial Sequence
  ENSG00000186047_37 (sequence is synthesized)
tgcctggcacagcccttgcacataaaatgtccttaataatattaattccccttccagattagactttgcaaacaaatgattgaaaaacagaacattcacgtggattggattctctagcgt

SEQ ID NO: 675130 - DNA, 120 bp, Artificial Sequence
  ENSG00000186047_38 (sequence is synthesized)
gataaggctccaggccaagaaccatgcagtaaagatcttccaaaccaaagtatttcagcatctgagaatggctagggcttatcttcatggctaaaataagcattttaatataaagcaggc

SEQ ID NO: 675131 - DNA, 120 bp, Artificial Sequence
  ENSG00000186047_39 (sequence is synthesized)
ttttttcttcattttcttatggaaaggaaagcattttcagaataatggttaaaatctgtcctttgtagatctgaaaatgtgagcaagtttcataccgaagtcaagatctactgaaagtgt

SEQ ID NO: 675132 - DNA, 120 bp, Artificial Sequence
  ENSG00000186047_40 (sequence is synthesized)
tagatgaatatataaggaccagacgctgctgtcaaaaataaaacagatgctggtgtcttgaatgcctccatgtgccaaagctgagttctttgacttatttttgtcattgaattaattggt

SEQ ID NO: 675133 - DNA, 120 bp, Artificial Sequence
  ENSG00000186047_41 (sequence is synthesized)
atatctggtttaattggccaaattgtttttgcttaaatgttcacattttcattgttatattgatatactcaatatttttgagggtacagaaaataccaatattggcaaatttggtatttt

SEQ ID NO: 675134 - DNA, 120 bp, Artificial Sequence
  ENSG00000186047_42 (sequence is synthesized)
tgccaattttgtgtgttcagaagaaaaattgttcatttccagatcccagatttatggaaatttaaaaatatatagtaaagtgttggtttctccttatggttacatctgaatgtatataaa

SEQ ID NO: 675135 - DNA, 120 bp, Artificial Sequence
  ENSG00000186047_43 (sequence is synthesized)
taaaaagccccaacaatgtccacccattcaggctcaaggcactgggtgccacattaaaagcctctgcaacgacacactgtgatctagggagcttccccaggtctcaacctgaccttctgt

SEQ ID NO: 675136 - DNA, 120 bp, Artificial Sequence
  ENSG00000186047_44 (sequence is synthesized)
tctgaccatttgcctcatactctgaccatgtggctcccgatcctgagctgattctcttgggctgcctcctgattctaggccttgattctgatcatgaaaactcatgggaaacgacgtctg

SEQ ID NO: 675137 - DNA, 120 bp, Artificial Sequence
  ENSG00000186047_45 (sequence is synthesized)
gcagatcattccaccccacctctgactatgctcagactagccctccaggacctcatccactagacttcccagtgcattcatccaaggagaatatcagggaagggagaggtcaagcatgag

SEQ ID NO: 675138 - DNA, 120 bp, Artificial Sequence
  ENSG00000186047_46 (sequence is synthesized)
tctgcttcctggtgactagaattcaggattctctcccatttaccactagggaaaaccctactgctaaggaccgtaaatgtcggaggatccccctgagtctcacagatggcacttgaagag

SEQ ID NO: 675139 - DNA, 120 bp, Artificial Sequence
  ENSG00000186047_47 (sequence is synthesized)
aagcagtatggagacacaggacacgaagaaggaaacagagaccctgaggacagaggctcatgcaactactgcaaatgaacaaacaccagaacaggcatttttgcactttcagacagggag

SEQ ID NO: 675140 - DNA, 120 bp, Artificial Sequence
  ENSG00000186047_48 (sequence is synthesized)
ttccaggactgagtgcacatacagtccatggttagatttccaggaaagcctcagtgaggggctgaattatgtgccattaactcaagatacagccatcttgggagtcagcatatctgtctg

SEQ ID NO: 675141 - DNA, 120 bp, Artificial Sequence
  ENSG00000186047_49 (sequence is synthesized)
agcccaggttataagtgcacactggtggtctatggttgcaggccggtgtcactgtcctgtcacagtcctgagatctccaaagcagcccaggtgacacatatgtccctgtctttgactctc

SEQ ID NO: 675142 - DNA, 120 bp, Artificial Sequence
  ENSG00000186047_50 (sequence is synthesized)
ctccagcccaactctgtgatactactatcaaggctccaaaatgcagctgttttgctacacaaattatgaataagttctacaaacttcttgaaccatctggaaagtgctcaaaacacaggg

SEQ ID NO: 675143 - DNA, 120 bp, Artificial Sequence
  ENSG00000186047_51 (sequence is synthesized)
ctgcacagacaaggactttaaggctcaactcactcccaggtaatattagtggctcttctcagcaagaacatgagcccaggtcccaatagcactattgaaaaaggcagttctgctgtagaa

SEQ ID NO: 675144 - DNA, 120 bp, Artificial Sequence
  ENSG00000186047_52 (sequence is synthesized)
tgggtccctctttttgctgtttccactgctgagtgcccccatcatgggcatgcaagattttttctgcaattttcctttcacaactttcatcaactgcctcttcaatttcctggtcttgca

SEQ ID NO: 675145 - DNA, 120 bp, Artificial Sequence
  ENSG00000186047_53 (sequence is synthesized)
caatctcaacccaacttacttaacagcactgattgttcagttcttatggacagtgtgtgcctttagtcttcctccaaggagagtgcttgacaaacataaaatggaaatcttaggaacact

SEQ ID NO: 675146 - DNA, 120 bp, Artificial Sequence
  ENSG00000186047_54 (sequence is synthesized)
gacaaacataaaatggaaatcttaggaacacttttacaccattggtgggaatgtaaattactttaaccattgtggaagatggtgtggcgattcttcaaagatctagaaccagaaatacca

SEQ ID NO: 675147 - DNA, 120 bp, Artificial Sequence
  ENSG00000186047_55 (sequence is synthesized)
cccaaaggaatataaatcattttattacaaagatacatgcacacatacgttcattgctgcacttttcacaatagcaaagacatggaatcaattcaaatgcccatcagtgatacactggat

SEQ ID NO: 675148 - DNA, 69 bp, Artificial Sequence
  ENSG00000186047_56 (sequence is synthesized)
atatacaccatggaatcctatgcagccattaaaaggacacagatcatgttctttgcagggacactcaaa

SEQ ID NO: 675149 - DNA, 85 bp, Artificial Sequence
  ENSG00000186047_57 (sequence is synthesized)
agggaacaacatacactggggcctgttggcagatgtggttggggagggggagcattaggacaaatagctaatgcatgctgggctt

SEQ ID NO: 675150 - DNA, 65 bp, Artificial Sequence
  ENSG00000186047_58 (sequence is synthesized)
acaacatacactggggcctgttggcagatgtggttggggagggggagcattaggagaaatcacca

SEQ ID NO: 675151 - DNA, 120 bp, Artificial Sequence
  ENSG00000186047_59 (sequence is synthesized)
ctggagagagggaagaagcaacgctcagcatttcgctgattttcaagtgcacaccgagcagcgcttcaggcagctttgggtcagaacacgcctgattcggacttcaggcgaaggcagagg

SEQ ID NO: 675152 - DNA, 120 bp, Artificial Sequence
  ENSG00000186047_60 (sequence is synthesized)
ccagcacgggtcaccgattcagagccgggggcggggccgaccacacacgctgtgagacccagaggccgaggagccgcgggttagaaaatgtgaccttggcgaccccaacgcccccgcctc

SEQ ID NO: 675153 - DNA, 120 bp, Artificial Sequence
  ENSG00000186049_0 (sequence is synthesized)
tcagcatcttatccccactttctggcctccccaccatgagccgccaattcacctacaagtcgggagctgctgccaaggggggcttcagcggctgctccgctgtgctctcagggggcagct

SEQ ID NO: 675154 - DNA, 120 bp, Artificial Sequence
  ENSG00000186049_1 (sequence is synthesized)
catcctcctaccgagcagggggcaaagggctcagtggaggcttcagcagtcggagcctttacagcctggggggtgcccggagcatctctttcaatgtggccagtggcagtgggtgggcag

SEQ ID NO: 675155 - DNA, 120 bp, Artificial Sequence
  ENSG00000186049_2 (sequence is synthesized)
gaggctatggatttggccggggccgggccagtggctttgctggcagcatgtttggcagtgtggccttggggtccgtgtgtccgtcgttgtgcccgcccgggggtatccatcaggtcacca

SEQ ID NO: 675156 - DNA, 120 bp, Artificial Sequence
  ENSG00000186049_3 (sequence is synthesized)
tcaacaagagcctcctggcacccctgaacgtggagctggaccctgaaatccagaaagtgcgtgcccaggagcgggagcagatcaaggtgctgaacaacaagttcgcctccttcattgaca

SEQ ID NO: 675157 - DNA, 120 bp, Artificial Sequence
  ENSG00000186049_4 (sequence is synthesized)
aggtgcggttcctggagcagcagaaccaggtgctggagaccaagtgggagctgctacagcagctggacctgaacaactgcaagaataacctggagcccatccttgagggctacatcagca

SEQ ID NO: 675158 - DNA, 120 bp, Artificial Sequence
  ENSG00000186049_5 (sequence is synthesized)
acctgcggaagcagctggagacgctgtctggggacagggtgaggctggactcggagctgaggagcgtgcgcgaagtggtggaggactacaagaagaggtatgaagaagaaataaacaagc

SEQ ID NO: 675159 - DNA, 120 bp, Artificial Sequence
  ENSG00000186049_6 (sequence is synthesized)
gcacaactgctgagaatgaatttgtggtgcttaagaaggacgtggacgcagcttacacgagcaaagtggagctgcaggccaaggtggatgccctggatggagaaatcaagttcttcaagt

SEQ ID NO: 675160 - DNA, 120 bp, Artificial Sequence
  ENSG00000186049_7 (sequence is synthesized)
gtctgtacgagggggagactgctcagatccagtcccacatcagcgacacgtccatcatcctgtccatggacaacaaccggaacctggacctggacagcatcattgctgaggtccgtgccc

SEQ ID NO: 675161 - DNA, 120 bp, Artificial Sequence
  ENSG00000186049_8 (sequence is synthesized)
agtatgaggagatcgcccggaagagcaaggccgaggccgaggccctgtaccagaccaagttccaggagctgcagctagcagccggccggcatggggatgacctgaaacacaccaaaaatg

SEQ ID NO: 675162 - DNA, 120 bp, Artificial Sequence
  ENSG00000186049_9 (sequence is synthesized)
ctcagagctgacccgtctcatccaaagactgcgctcggagattgagagtgtgaagaagcagtgtgccaacctggagacggccatcgctgacgccgagcagcggggggactgtgccctcaa

SEQ ID NO: 675163 - DNA, 120 bp, Artificial Sequence
  ENSG00000186049_10 (sequence is synthesized)
ggatgccagggccaagctggatgagctggagggcgccctgcagcaggccaaggaggagctggcacggatgctgcgcgagtaccaagagcttttgagcgtgaagctgtccctggatattga

SEQ ID NO: 675164 - DNA, 120 bp, Artificial Sequence
  ENSG00000186049_11 (sequence is synthesized)
gatcgccacctaccgcaagctgctggagggcgaggagtgcaggatgtccggagaatataccaactccgtgagcatttcggtcatcaacagctccatggccgggatggcaggcacaggggc

SEQ ID NO: 675165 - DNA, 120 bp, Artificial Sequence
  ENSG00000186049_12 (sequence is synthesized)
tggctttggattcagcaatgctggcacctacggctactggcccagctctgtcagcgggggctacagcatgctgcctgggggctgtgtcactggcagtgggaactgtagcccccgtgggga

SEQ ID NO: 675166 - DNA, 120 bp, Artificial Sequence
  ENSG00000186049_13 (sequence is synthesized)
agccaggaccaggctggggagtgcaagtgaattcagggactcccagggaaagaccttagctctaagctcacccaccaaaaaaaccatgagataaaagtgcaacacagcccatttcccagt

SEQ ID NO: 675167 - DNA, 120 bp, Artificial Sequence
  ENSG00000186049_14 (sequence is synthesized)
agtctgccttgccctggcagactgctccggactcttctaggaaattcctctgtctcatttgtcctcatctccttcttgctttgctttgctgtggacctctcctccttctccttgacctct

SEQ ID NO: 675168 - DNA, 120 bp, Artificial Sequence
  ENSG00000186049_15 (sequence is synthesized)
ctgcctcagtctttgttaatgttgaatcaggatttgagagctggagcccatctttctgcctccatccaaagaggccttttaactcagcctccccttctggaagaagacttggccttttct

SEQ ID NO: 675169 - DNA, 120 bp, Artificial Sequence
  ENSG00000186049_16 (sequence is synthesized)
ctgcctgcatgtccctgtgcagaggaaggctgtctctcaagggtaaccccaatctgcctgtgctgctctttcataccctgtctcagtaactatttggccatgtgctccctgggtacacaa

SEQ ID NO: 675170 - DNA, 120 bp, Artificial Sequence
  ENSG00000186049_17 (sequence is synthesized)
gttttcagatctactgatagacctgcaggaactctctcatgttagagcaatactggctcaggcaaaacacctggtgggaagttgtatcttgtatagccactgcatattacatagccagga

SEQ ID NO: 675171 - DNA, 120 bp, Artificial Sequence
  ENSG00000186049_18 (sequence is synthesized)
gtaccccttgaggctaattctaccaaccaagggatttgtgctcttcatctgtgggtacttgtccttgtttaggcctcacctccctgctcctgtgtcttaccaataaacttataaagccca

SEQ ID NO: 675172 - DNA, 120 bp, Artificial Sequence
  ENSG00000186049_19 (sequence is synthesized)
gctgacccgtctcatccaaagactgcgctcggagattgagagtgtgaagaagcaggtgaaggggactggagccttccttactcactcctaagggaggggtgaactgcttagcaccccctg

SEQ ID NO: 675173 - DNA, 120 bp, Artificial Sequence
  ENSG00000186049_20 (sequence is synthesized)
gctcccatctgaagtttggaacaattgcagattattttcataaagctgtggggcccagcgtagcaagcctctcagtctcaggttgacaggactccacctggatgtggctgggtctctgct

SEQ ID NO: 675174 - DNA, 120 bp, Artificial Sequence
  ENSG00000186049_21 (sequence is synthesized)
ccaggacatggggcaggacagaggagggctcaaccattgagagcatgggagaggtgaagcgaggcccagggaggaactcagggagaaatgctacctcctgaccccagtgtgccaacctgg

SEQ ID NO: 675175 - DNA, 120 bp, Artificial Sequence
  ENSG00000186051_0 (sequence is synthesized)
ccctgagggccctttctctttccatctcaggaactcaaacatgaccaggaagatcttcacaaataccagggagcggtggaggcagcagaatgtcaacagcgcctttgccaagctgaggaa

SEQ ID NO: 675176 - DNA, 120 bp, Artificial Sequence
  ENSG00000186051_1 (sequence is synthesized)
gctcatccccactcaccctccagacaaaaagctgagcaaaaatgaaacgcttcgcctggcaatgaggtatatcaacttcttggtcaaggtcttgggggagcaaagcctgcaacaaacggg

SEQ ID NO: 675177 - DNA, 120 bp, Artificial Sequence
  ENSG00000186051_2 (sequence is synthesized)
gaactctgcttgagaactaccaggttccttcacctggtccaagccaccacattccttagtgtggctctggctgtcatctcccagggcagcacttgcccagaaatcactgcctgtggacag

SEQ ID NO: 675178 - DNA, 120 bp, Artificial Sequence
  ENSG00000186051_3 (sequence is synthesized)
acttttgcatgttccagagttgacctgatgataactcgtgaagcatgaattctagcttcctgggaggtggctcagagacagctgcagggagctgaaagaagccatgaggaatgtcacttg

SEQ ID NO: 675179 - DNA, 120 bp, Artificial Sequence
  ENSG00000186051_4 (sequence is synthesized)
tgggccgccaccccccagggatgtcaggtagagcggcctacctctgcctattttaaatccaggttctgcataagacttttggagaaaaaattctaaataaaaaaaaaaaaaggctgaaaa

SEQ ID NO: 675180 - DNA, 120 bp, Artificial Sequence
  ENSG00000186063_0 (sequence is synthesized)
caaagtttggctgtggcggcaaatgggcttgggcggctcctcggcgggtggcggtggtggccgtagcggttcctcctggccctgttaatgtcggggccaggccgggggaggatggcgccc

SEQ ID NO: 675181 - DNA, 120 bp, Artificial Sequence
  ENSG00000186063_1 (sequence is synthesized)
tagaacccggccttgctggggtaggggcgggaggggacggggtggggaccggccatgtcggaggtgacccggagtctgctgcagcgctggggcgccagttttaggagaggcgccgacttc

SEQ ID NO: 675182 - DNA, 120 bp, Artificial Sequence
  ENSG00000186063_2 (sequence is synthesized)
gactcttggggccagctggtggaggcgatagacgagtatcagatattagcaagacatctacaaaaggaggcccaagctcaacacaataattctgaattcacagaagaacaaaagaaaacc

SEQ ID NO: 675183 - DNA, 120 bp, Artificial Sequence
  ENSG00000186063_3 (sequence is synthesized)
ataggcaaaattgcaacatgcttggaattgcgaagtgcagctttacagtccacacagtctcaagaagaatttaaactggaggacctgaagaagctagaaccaatcctaaagaatattctt

SEQ ID NO: 675184 - DNA, 120 bp, Artificial Sequence
  ENSG00000186063_4 (sequence is synthesized)
acatataataaagaattcccatttgatgttcagcctgtcccattaagaagaattttggcacctggtgaagaagagaatttggaatttgaagaagatgaagaagagggtggtgctggagca

SEQ ID NO: 675185 - DNA, 120 bp, Artificial Sequence
  ENSG00000186063_5 (sequence is synthesized)
gggtctcctgattcttttcctgctagagttcccggtactttattaccaaggttgccatcggaaccaggaatgacattactcactatcagaattgagaaaattggtttgaaagatgctggg

SEQ ID NO: 675186 - DNA, 120 bp, Artificial Sequence
  ENSG00000186063_6 (sequence is synthesized)
cagtgcatcgatccctatattacagttagtgtaaaggatctgaatggcatagacttaactcctgtgcaagatactcctgtggcttcaagaaaagaagatacatatgttcattttaatgtg

SEQ ID NO: 675187 - DNA, 120 bp, Artificial Sequence
  ENSG00000186063_7 (sequence is synthesized)
gacattgagctccagaagcatgttgaaaaattaaccaaaggtgcagctatcttctttgaattcaaacactacaagcctaaaaaaaggtttaccagcaccaagtgttttgctttcatggag

SEQ ID NO: 675188 - DNA, 120 bp, Artificial Sequence
  ENSG00000186063_8 (sequence is synthesized)
atggatgaaattaaacctgggccaattgtaatagaactatacaagaaacccactgactttaaaagaaagaaattgcaattattgaccaagaaaccactttatcttcatctacatcaaact

SEQ ID NO: 675189 - DNA, 120 bp, Artificial Sequence
  ENSG00000186063_9 (sequence is synthesized)
ttgcacaaggaatgatcctgacatgatgaacctggaacttctgtgaattttaccactcagtagaaaccatcatagctctgtgtagcatattcacccttcaacaggcaggaagcaagccgt

SEQ ID NO: 675190 - DNA, 120 bp, Artificial Sequence
  ENSG00000186063_10 (sequence is synthesized)
acccagaccagtaggccggacggagtccaatgcaaagctgtaccacagaattcagagtccagcacatcacactgacgtataggactccttgggatacaggtttattgtagattttgaaac

SEQ ID NO: 675191 - DNA, 120 bp, Artificial Sequence
  ENSG00000186063_11 (sequence is synthesized)
atgtttttacttttctattaattgtgcaattaatagtctattttctaatttaccactactcctaccctgcttcctggaacaatactgttgtgggtaggatgtgctcatcttcagacttaa

SEQ ID NO: 675192 - DNA, 120 bp, Artificial Sequence
  ENSG00000186063_12 (sequence is synthesized)
agggtagtgtcaaactgctttgagaggaatgggaccagttctgctgcctaagaaggtctgtctggatgtttataggcagcacctctgaagtggcctaaattcaccctgatctgatagttt

SEQ ID NO: 675193 - DNA, 120 bp, Artificial Sequence
  ENSG00000186063_13 (sequence is synthesized)
tcctgcttagaaagtgtgccttggccagatcagtatcccacatgggagtgttccctaggttgtagctgtgattgtttccagatgaccagattgtttttctgaaaatgagcatatttttag

SEQ ID NO: 675194 - DNA, 120 bp, Artificial Sequence
  ENSG00000186063_14 (sequence is synthesized)
tcatgtcgattagctgttcttctacatcacattgttactctttctgatgatgattctagggttaacattggaaccatctcaaaataattacaaagttttagatgggtttacaatgtcttc

SEQ ID NO: 675195 - DNA, 120 bp, Artificial Sequence
  ENSG00000186063_15 (sequence is synthesized)
taaacaatgtaatctaaaaataattgagtcagatgctaacgagatactgcaggcataactgctgtttttctgacaactgattgtgaaaccttaaaacctgcatacctcttcttacagtga

SEQ ID NO: 675196 - DNA, 120 bp, Artificial Sequence
  ENSG00000186063_16 (sequence is synthesized)
ggagtatgcaaaatctggaaagatattctattttttttatataggtagataggatcgccatttatttcctatttagatatactgacattcatccatatgaaaatatgcaggtcattagct

SEQ ID NO: 675197 - DNA, 120 bp, Artificial Sequence
  ENSG00000186063_17 (sequence is synthesized)
tactataatttacttttgacttaatggggcataaataaaactttcatagtacacatgaggtggatatttgatacacagaacatttgcggtgggctttctgtgggttagatgtaaagccca

SEQ ID NO: 675198 - DNA, 120 bp, Artificial Sequence
  ENSG00000186063_18 (sequence is synthesized)
catattttaatattcactattttaaatgagcaatgcatgaggggaatgcagtgtcagtacctggcctatttttaaactagtgtaatcaccctagtcataccattcagtatgtttgctttt

SEQ ID NO: 675199 - DNA, 120 bp, Artificial Sequence
  ENSG00000186063_19 (sequence is synthesized)
taaaataagtaaccacaactaagttgttgtagcccttgcacttcaagagatctagtctttactttcagttgtctgttaggtccattctgtttactagacggatgttaataaaaactatgc

SEQ ID NO: 675200 - DNA, 120 bp, Artificial Sequence
  ENSG00000186063_20 (sequence is synthesized)
gagcctgaatgaattctcagccaaatttagtcttgtctctcatcttgattggattaattccaaattctaaaatgattcagtccacaatagctctaggggatgaagaatttgccttacttt

SEQ ID NO: 675201 - DNA, 120 bp, Artificial Sequence
  ENSG00000186063_21 (sequence is synthesized)
gcccagttcctaagactgtgagttgtcaaatccctagactgtaagctcttcaaggagcaagaggcgcattttctccgtgtcatgtaatttttctaaggtgcttggcagcactctgtaccc

SEQ ID NO: 675202 - DNA, 120 bp, Artificial Sequence
  ENSG00000186063_22 (sequence is synthesized)
tgtggagtactcagtaccttttgtttgatgttgctgacaagacctgaaaaaaaatcccttaaaaaaaaaacccattaaagtgtagcaaaaccgatgtattattttttctcttttctcata

SEQ ID NO: 675203 - DNA, 120 bp, Artificial Sequence
  ENSG00000186063_23 (sequence is synthesized)
aaccataagatatgtatatcaaaatgataatttatatgaagcatctgctatccttcacataagtatagtttatatgaactacaaatacctttcatcaacattaaagaagcttaaattgaa

SEQ ID NO: 675204 - DNA, 120 bp, Artificial Sequence
  ENSG00000186063_24 (sequence is synthesized)
agtttagcttgtattataagctctccaatgaccaatggagatgcggggcaaggggattcagcggatctagctgttaatgccactgatttgtggtgaccaatatggattttctttctgtcg

SEQ ID NO: 675205 - DNA, 120 bp, Artificial Sequence
  ENSG00000186063_25 (sequence is synthesized)
ggcgccgacttcgactcttggggccagctggtggaggcgatagacgagtatcagatgctgtgagtcccacccaccccctcgctcggttgccttgggtggagtccgcgcaggatgtgaacc

SEQ ID NO: 675206 - DNA, 120 bp, Artificial Sequence
  ENSG00000186063_26 (sequence is synthesized)
gaagagagcaaaatgtgaattaatggaccacgcacaggagctccacgccctccttggatccctcctccttttcctgtatataatgtatagccgcagggtacaaattagcaagacatctac

SEQ ID NO: 675207 - DNA, 120 bp, Artificial Sequence
  ENSG00000186063_27 (sequence is synthesized)
attgccgcggcgttgcagtcccctcaaaacgcttcgttcatcatccctttctaacttctccctcggccttccttttgagctatggtctttttcccagacaggaagagaagagttgcccct

SEQ ID NO: 675208 - DNA, 120 bp, Artificial Sequence
  ENSG00000186063_28 (sequence is synthesized)
acctccggagccgagggagaatgccgcaatagcgatggcggccctcggcgcagtggggcggcctcaacctaacccggggcggggcctcgggggcggggtctcggcggggcggtcgctttg

SEQ ID NO: 675209 - DNA, 120 bp, Artificial Sequence
  ENSG00000186063_29 (sequence is synthesized)
tctctcatcaccgtatctgcagccaaggcttctcagggtggggctccgcaggcactggggctgagatccctcgccaccagccccagcgaggctgctctagggacaacggctccgctctct

SEQ ID NO: 675210 - DNA, 120 bp, Artificial Sequence
  ENSG00000186063_30 (sequence is synthesized)
ggggtgactcgccttcttccctctccgcctccgcagggacagttccattcaacaggtagcccttctttcctggggcgcaggccccagcaggctatctgcttagttcctttccaccgtctc

SEQ ID NO: 675211 - DNA, 120 bp, Artificial Sequence
  ENSG00000186063_31 (sequence is synthesized)
gcgggtcccccacttggcagtcagtttcctttcctcctcctctcccaggttgcttttcctcgatttccttttgaaattctctgaggaatacttgtgtgttctccgcccacgttccaagga

SEQ ID NO: 675212 - DNA, 120 bp, Artificial Sequence
  ENSG00000186063_32 (sequence is synthesized)
tgagtggccttgctctgtgtgtgtcttccttcttccatgcgtaggaaaggagggaactgtttgcgattgaggggatgggggggagcccaggaagcaacgagggccagggatacctcttct

SEQ ID NO: 675213 - DNA, 120 bp, Artificial Sequence
  ENSG00000186063_33 (sequence is synthesized)
gccaaaagaagggtctcctctcgcgctccttctccacccctctttctggtgagccgtgttttcagaattccacctcgatttcgtttcggtttctgggactgttatttggtaggctgtgag

SEQ ID NO: 675214 - DNA, 120 bp, Artificial Sequence
  ENSG00000186073_0 (sequence is synthesized)
ctggtccctggcccaacatgatactgaccaaagctcagtacgacgagatagcccagtgcctagtgtctgtgccgcctaccaggcagagcctgaggaagctgaagcagaggtttcccagtc

SEQ ID NO: 675215 - DNA, 120 bp, Artificial Sequence
  ENSG00000186073_1 (sequence is synthesized)
aatcgcaggccactctgctgagcatcttctcccaggagtaccagaaacacattaaaagaacacatgccaaacatcatacttcggaagcaattgaaagttattaccagaggtacctgaatg

SEQ ID NO: 675216 - DNA, 120 bp, Artificial Sequence
  ENSG00000186073_2 (sequence is synthesized)
gagtggtgaaaaatggagctgccccagtgctcctggacctggccaatgaggtggactatgcgccctcattaatggctcggcttatactggagaggtttctacaggaacacgaggaaactc

SEQ ID NO: 675217 - DNA, 120 bp, Artificial Sequence
  ENSG00000186073_3 (sequence is synthesized)
caccctccaagtctattataaatagtatgctacgggacccttctcagattccagatggagttctagcaaatcaggtctatcagtgcattgtgaacgactgctgttacggaccactagtgg

SEQ ID NO: 675218 - DNA, 120 bp, Artificial Sequence
  ENSG00000186073_4 (sequence is synthesized)
actgcatcaagcatgccattggtcatgagcatgaggtcctgctgagagacttgcttctagagaaaaacctgtccttcctagatgaagatcagcttcgtgcaaagggttatgacaaaacac

SEQ ID NO: 675219 - DNA, 120 bp, Artificial Sequence
  ENSG00000186073_5 (sequence is synthesized)
cagacttcattttacaagtaccagttgctgtagaagggcacataattcactggattgaaagcaaagcctcatttggtgatgaatgtagccaccacgcctacctgcatgaccagttctgga

SEQ ID NO: 675220 - DNA, 120 bp, Artificial Sequence
  ENSG00000186073_6 (sequence is synthesized)
gctactggaatagatttgggccaggcttagtcatctattggtatggatttatccaggagctggactgcaaccgggaaaggggcatcctgctcaaagcctgtttccccacgaacattgtca

SEQ ID NO: 675221 - DNA, 120 bp, Artificial Sequence
  ENSG00000186073_7 (sequence is synthesized)
ccttatgccacagcatagcttgaccctgaagatcctggaagagaagctgggaggaaaagagacccagcattgcattaccatcgtggaataatctagcgcaaacctaggaaagctgaagcc

SEQ ID NO: 675222 - DNA, 120 bp, Artificial Sequence
  ENSG00000186073_8 (sequence is synthesized)
acaaagtccaaagccacctttgtactcacctgcagagctccagaagaccttgatggcagcctgcctatgctgtgtgtttgctatattcaatctttacggcttcctgacttctgtgacagt

SEQ ID NO: 675223 - DNA, 120 bp, Artificial Sequence
  ENSG00000186073_9 (sequence is synthesized)
ttatttgaaagtattagttccattgtgcctggaaaccacactcctttagattgggggccgagaggcgacaacccaacattgaggagagtttatttttaaacatggctagttgtcagtatg

SEQ ID NO: 675224 - DNA, 120 bp, Artificial Sequence
  ENSG00000186073_10 (sequence is synthesized)
tacgtgagctagtatttttatgagtcgagttttttaaaggcacattctgtatactgcttagtatatgcattttataccatgtaattataaaacactcgagtaagttcagcattagaaatg

SEQ ID NO: 675225 - DNA, 120 bp, Artificial Sequence
  ENSG00000186073_11 (sequence is synthesized)
tttagctttgtatgaactgagtgtgccagaaataaacctggagcaatttttaaataagcaaaataaaggagatttttctatttgttcactttaatttattcacttttgtgtacttttatg

SEQ ID NO: 675226 - DNA, 120 bp, Artificial Sequence
  ENSG00000186073_12 (sequence is synthesized)
tactgcaaatcagatttcagtctaaagcgaaacatcagtaagttaataataaacctatcttttgggaagttgaatattaatctgtacccaaaacgtatttagtaaaatatttgcccccgc

SEQ ID NO: 675227 - DNA, 120 bp, Artificial Sequence
  ENSG00000186073_13 (sequence is synthesized)
caccctgccatgctgacataacaacttttataatgttgaatagatgatatgggaaatactaataacaacaatgtaatttttgcagacagctttaacttatatacattgcttgattttttt

SEQ ID NO: 675228 - DNA, 120 bp, Artificial Sequence
  ENSG00000186073_14 (sequence is synthesized)
caaaagactaaatatgtcatttatactttgtttattttctaccaaagaaggtttgtaaaaatatgcctgctgcttttccttttgaaggacacaaacctggtcccaacatgtgtggatttt

SEQ ID NO: 675229 - DNA, 120 bp, Artificial Sequence
  ENSG00000186073_15 (sequence is synthesized)
aactctgagtggggtgcattaaatcaaaagagagaggcagaagatgaaatgctaaagaagggtcaggcaaacttctgtttcagtataaaattcatcatgcaggcttctgagtgaaataga

SEQ ID NO: 675230 - DNA, 120 bp, Artificial Sequence
  ENSG00000186073_16 (sequence is synthesized)
atgatttgaaaccactactgtattgcctggatacacacacacacacacacacacactttatacaaaaatgttaaaagcaggtttcctggcatgttctaaactgttttttctttaggaata

SEQ ID NO: 675231 - DNA, 120 bp, Artificial Sequence
  ENSG00000186073_17 (sequence is synthesized)
aattacatttatctgcacagatgttgaaaatcctgttaaacccttgtcaaggatttgtttattttacattaaacaaatttattatgatgaacgtgaacaaataaattaaaaaataaaaaa

SEQ ID NO: 675232 - DNA, 120 bp, Artificial Sequence
  ENSG00000186073_18 (sequence is synthesized)
actctggtgtacagccagtccccgccgcggaggtgccggtggagcctgggaccgggcgagtctccgccccgcttttgcagctaggggtgtgtttcaggggggattggggcaagccaagca

SEQ ID NO: 675233 - DNA, 120 bp, Artificial Sequence
  ENSG00000186073_19 (sequence is synthesized)
accctgaagatcctggaagagaagctgggaggaaaaggtgaatccggaagcaattttactttcctgcactgtaagatcctggcaacatctgccctgaacttcagctgaactcttgctgcc

SEQ ID NO: 675234 - DNA, 120 bp, Artificial Sequence
  ENSG00000186073_20 (sequence is synthesized)
cgtagtcacaccactacctctttagacaaacatatcaagagtttctgttttccttcatcccttgctgatgtgaacagccaagaactacagacacaacccactcattatcagcatttctgt

SEQ ID NO: 675235 - DNA, 120 bp, Artificial Sequence
  ENSG00000186073_21 (sequence is synthesized)
aattctcctcccagttaccgaatcaccctcttatttttttttccctaagcctccgttcactgtctctccctctccctttctcttcatgtgcactcacagagacccagcattgcattacca

SEQ ID NO: 675236 - DNA, 120 bp, Artificial Sequence
  ENSG00000186073_22 (sequence is synthesized)
tcattccctggtatttcgagaatatgggagagaaccagtgtgccacacttaccaggtctttatcacctctgtgctgagtccagcaaggagaagcgttgatgcctttattcaacaaattcc

SEQ ID NO: 675237 - DNA, 120 bp, Artificial Sequence
  ENSG00000186073_23 (sequence is synthesized)
gccacccaaagtgctggaattacaggagcgaggaaacattttctaccaggaatctttatgaaatgtgtttgtaaataacaaaaaacattttcaaattgttggaaatttctcagcagttag

SEQ ID NO: 675238 - DNA, 120 bp, Artificial Sequence
  ENSG00000186073_24 (sequence is synthesized)
tgcattaaaaaaaaaaaagtttcaaccagcatgtgtttcctcatcttaaacaataagtagcaatgtttggaaaatgtttgttatattatctctctaaataaaagttgatagttcccgtaa

SEQ ID NO: 675239 - DNA, 120 bp, Artificial Sequence
  ENSG00000186073_25 (sequence is synthesized)
aagaggttgaaactaacggctataatgaagttttgggttctctaaagatttcatttatcggtgctattggtctccccattaaatgcatgcctgttctgtgtacctttgcacacagtttgc

SEQ ID NO: 675240 - DNA, 120 bp, Artificial Sequence
  ENSG00000186073_26 (sequence is synthesized)
ataacatataatatttattactgaaaccttgcaaacttcttaaattgtatagaaaaggctgtgaaacttactcttagagaacataaaaatatagagaatgaaggtcataactccaaatat

SEQ ID NO: 675241 - DNA, 120 bp, Artificial Sequence
  ENSG00000186073_27 (sequence is synthesized)
tgagtgatacagtgttttgaaaaaaaaaaaaccagaataaaacaaaattagttactagagtagaaaaaatatagttttaatatgtattgatacatgtctttttgccctcccccaatttag

SEQ ID NO: 675242 - DNA, 120 bp, Artificial Sequence
  ENSG00000186073_28 (sequence is synthesized)
taaagatgcactaggtgttaataatattcttcttatcatacagtgtattttaatctagcattttagaaaactttttacaagttcatagataaaagccctgtcagaatgtgacttttcatt

SEQ ID NO: 675243 - DNA, 120 bp, Artificial Sequence
  ENSG00000186073_29 (sequence is synthesized)
ttcagatgttgtgaactggatttctgcatgatttttatggaaatgactatacttttaaaatgtaaaacttttaataaaacaaaacaaatttaaagccctcaaaccttttcttggtggacc

SEQ ID NO: 675244 - DNA, 120 bp, Artificial Sequence
  ENSG00000186073_30 (sequence is synthesized)
tcatgtccccctgtgattcttaagtatatgttaactagtttcagatgtgttttgttcgctgactcaaaatcagctctttattttaagaaaagaaattgtgtaattagtacttaattgctt

SEQ ID NO: 675245 - DNA, 120 bp, Artificial Sequence
  ENSG00000186073_31 (sequence is synthesized)
tggatattttgggcatttggagaagagggtaattcaaaggccagagaaattaaactttcagaatgttctttatgcgtctgtaatttctttttaaaaaatgccctctaaagacagtcctga

SEQ ID NO: 675246 - DNA, 120 bp, Artificial Sequence
  ENSG00000186073_32 (sequence is synthesized)
caacttaaaaatgaatgaagacctgggttgtttttaaaaattaacatcatctttggatgtggttttattgatttatttaagataaattggagagaggaccattgaagtgctagaaaacaa

SEQ ID NO: 675247 - DNA, 120 bp, Artificial Sequence
  ENSG00000186073_33 (sequence is synthesized)
gatactatctagttcatctccttttcaggcaggtgttgtctaaatagctcacagatggcagtcttcttctcttacatttcaagatcttccaagatgaaaataaatttttccccactttaa

SEQ ID NO: 675248 - DNA, 120 bp, Artificial Sequence
  ENSG00000186073_34 (sequence is synthesized)
aaatattacatttgatcaaatttaaatatttgcataattaagaatggtatatggtctgctgggaccaactgcaacttggttgacatgggcacatatcctgtatctgcagtgatttgagag

SEQ ID NO: 675249 - DNA, 120 bp, Artificial Sequence
  ENSG00000186073_35 (sequence is synthesized)
gtctaggtcttgtttggtcatttaacttctctaggccagttatattgtgtataaattggaatgttggactagtaatctctacaattttgctagttcagaaaagtttctgaggcaaccatt

SEQ ID NO: 675250 - DNA, 120 bp, Artificial Sequence
  ENSG00000186073_36 (sequence is synthesized)
atctaaaaatctatgttttgtgaatctgaaggttaacaggtctgcttttaagtgataatattcctatattaattttgataatgagcacttgaactatgacattaatgaacttaatggtta

SEQ ID NO: 675251 - DNA, 120 bp, Artificial Sequence
  ENSG00000186073_37 (sequence is synthesized)
taaaatatattgggtttttaaatatataccttaaaccagaagacccttactttgtatctactgtagttgctgaataagacacataggaaggatttgaagattggtttcatattgattccc

SEQ ID NO: 675252 - DNA, 120 bp, Artificial Sequence
  ENSG00000186073_38 (sequence is synthesized)
aaccatttgtggaagtcatactaaaagtactatttcagattattgccattacctttttttcattctaactaatattatttttactttgttcttaatctttatcatttttttcttgaagaa

SEQ ID NO: 675253 - DNA, 120 bp, Artificial Sequence
  ENSG00000186073_39 (sequence is synthesized)
aacatcttatattactgttgaagaaacagtgaaacttgaagaaacagtttatgttacttaaacatctagtttccacttagaaaattcaaagaatcataagtaactacttggctcaaacat

SEQ ID NO: 675254 - DNA, 120 bp, Artificial Sequence
  ENSG00000186073_40 (sequence is synthesized)
atgcagttttataagagcctgtatgaaatgtgtgattctcaaggaaaacataaattgtaaaactgactataaaagagatatatatatcaacagatcagtagccaaagaaaaaacagttgc

SEQ ID NO: 675255 - DNA, 120 bp, Artificial Sequence
  ENSG00000186073_41 (sequence is synthesized)
ccacccaacaatggcaccaggcacagattgggttttgtggaggaattctactaaaatgttaaggagtggataggtccagtgttatttaaaatacttgaggccaggcatggtggctcatgc

SEQ ID NO: 675256 - DNA, 64 bp, Artificial Sequence
  ENSG00000186073_42 (sequence is synthesized)
cactttgggaggccgaggcaggcagattatttgaggtcaggagtttaagaccagcagtggcatg

SEQ ID NO: 675257 - DNA, 120 bp, Artificial Sequence
  ENSG00000186073_43 (sequence is synthesized)
agcaagacttcatctcaaaaaaaaaaacaaaaaaaaaggttgacttcaaagaaaaattttcccatcagtattaaggaaagagatgctgtcttttttacaaaattgagatgaacctcagat

SEQ ID NO: 675258 - DNA, 120 bp, Artificial Sequence
  ENSG00000186073_44 (sequence is synthesized)
agatgaacatgtagaacagacagttgggaccaaggatgaaagataacagtgagagttctccaataaaaccttgaactttgagcctagttggtgcctttgtgccttgttgataattaggga

SEQ ID NO: 675259 - DNA, 120 bp, Artificial Sequence
  ENSG00000186073_45 (sequence is synthesized)
attaaattaagaaaggaaattattgtcagtctggataggctttgtaaagacatggatactgttaaacgtgtacttgtattttactcattcatcttttgggggcattaagtgtcctggggc

SEQ ID NO: 675260 - DNA, 120 bp, Artificial Sequence
  ENSG00000186073_46 (sequence is synthesized)
ctagaacagtgaacaaggccacctgtttcgaaatgctgcttcctaccctggtaccatcatttcatctgaactttgccaagttgttacctcgtcctttcttagatctaggatgaaggaagc

SEQ ID NO: 675261 - DNA, 120 bp, Artificial Sequence
  ENSG00000186073_47 (sequence is synthesized)
aagccaaaggttgaaacagaggagatgggacagtcagagtttagtaaatagattaaaggaagaagatacccaatacacagcattttacatgtttggcataacatctttactataaaaact

SEQ ID NO: 675262 - DNA, 120 bp, Artificial Sequence
  ENSG00000186073_48 (sequence is synthesized)
agagagaaagagtgagagggagggagaaagagagacaggggtgtgtgtatgtgagagagagaaagagagagagcgagccagttgtagtttgttgaagttcaccacaaaaagatgggaagg

SEQ ID NO: 675263 - DNA, 120 bp, Artificial Sequence
  ENSG00000186073_49 (sequence is synthesized)
atccccagccacacttgatgttttgtgtttaagttttgaggtttgggattgttaattctcatattaagtcacccatgcaatttaaattgtagatattatgttagtaattttggtgcagtg

SEQ ID NO: 675264 - DNA, 120 bp, Artificial Sequence
  ENSG00000186073_50 (sequence is synthesized)
aacaggagtgcagcatctgtcttttaaagggatttttatgtgcatttggattgcttggtgacctttgaaattttgttttgcactgttatcagaaacgtaatcatttttctttctgaagca

SEQ ID NO: 675265 - DNA, 120 bp, Artificial Sequence
  ENSG00000186073_51 (sequence is synthesized)
gattttaacatctgaaaaggttgatgaagctaggatagttttagtgaaatattaatctatctttttcaatgtcaccattgcttttaaaactgttcatcagctaccggaaacatcagctta

SEQ ID NO: 675266 - DNA, 120 bp, Artificial Sequence
  ENSG00000186073_52 (sequence is synthesized)
aggcactggagttgattttaattaaatattctcattgtggtcagagtatagttacagaacagaaacttgtccaatcttcttcatctacagctcactttccaaattctcttgtttttaaag

SEQ ID NO: 675267 - DNA, 120 bp, Artificial Sequence
  ENSG00000186073_53 (sequence is synthesized)
tcatattatttcaatctgtatttctttatctcaatagttaacttgagattttttatatttcaaggaggggagattgttctgaatactggcaccaatccttcaaaatctagacagcttaag

SEQ ID NO: 675268 - DNA, 120 bp, Artificial Sequence
  ENSG00000186073_54 (sequence is synthesized)
gatattgacttttaacaaaatttaacttaaatgtctactttaaatatgtgtcttgtcattaaaaggttatttacatttgaaatgctgacctttcaagttgtgcacaagagtgttctaaaa

SEQ ID NO: 675269 - DNA, 120 bp, Artificial Sequence
  ENSG00000186073_55 (sequence is synthesized)
cagagtttctgaacattggccatgaaaccactgtcttgggctgacaaatggattggaaataagctacccaacactgggaatgggccattaattttaatcaaaggtgatgcaggaaggcga

SEQ ID NO: 675270 - DNA, 120 bp, Artificial Sequence
  ENSG00000186073_56 (sequence is synthesized)
atgggatgcatgacaatgtcaacagcccagtaggtgttaagagaccacacagccttccttgttacttggtcgggccattagttgaggttgggtgaagacagaaagccatgtctggaattg

SEQ ID NO: 675271 - DNA, 120 bp, Artificial Sequence
  ENSG00000186073_57 (sequence is synthesized)
aatgaccaggtcactccaaaatctaatggagaactccccatttcagaaatcacattgtactgccattagaagtcaaggacagcatttagaaaatattggtggattttttttttttttttt

SEQ ID NO: 675272 - DNA, 120 bp, Artificial Sequence
  ENSG00000186073_58 (sequence is synthesized)
tttttttaaacaatcacctttctagtttttcccaactttgtcaagcttcctgttttcctgccttctttccttcctaatagatcattgatatttacaggggactaagaaatcaaacagact

SEQ ID NO: 675273 - DNA, 120 bp, Artificial Sequence
  ENSG00000186073_59 (sequence is synthesized)
taggaaaaaaaatcttaaagccttaaaattgcttttcagaattacatattgttataaaactcaggtaaatgtcagaaacaatagcataccaaaggaattaagcaggataactaattcttt

SEQ ID NO: 675274 - DNA, 120 bp, Artificial Sequence
  ENSG00000186073_60 (sequence is synthesized)
atggcgatctcattgtccttgtctctttcttgtgtgtgggaatagtttcactaattgaaactaaactttcgtaattgctttattgaaggcattttttcataactgtgaaggccactgtgc

SEQ ID NO: 675275 - DNA, 120 bp, Artificial Sequence
  ENSG00000186073_61 (sequence is synthesized)
ttgcccctttactataaattttcaatactggctgataacatttgtaattttcacagtggtgaaagcctttattttaaatcagtaagtatattaccttattttgagtactttcaattacaa

SEQ ID NO: 675276 - DNA, 120 bp, Artificial Sequence
  ENSG00000186073_62 (sequence is synthesized)
aaaaggtagtatatgacagcttgaactcgtgatgtttataataacgaaaacatgcagaaaaataatgaaagaagcatatctgaagcatatttacgcttcagtgttgttcagaaagttcat

SEQ ID NO: 675277 - DNA, 120 bp, Artificial Sequence
  ENSG00000186073_63 (sequence is synthesized)
tatttctgacacagcactgcatgcataagaaagatatgtatgactacagtagtaatttttatacatatttaagaaataaaaacaaatatattcctatcttgttaattgaatagtgtttta

SEQ ID NO: 675278 - DNA, 120 bp, Artificial Sequence
  ENSG00000186073_64 (sequence is synthesized)
gacttcaggtgaaggacaggcagcaggagcagatgagatttagaataccaagactgtgtgtacacgcagatgtcagtggcagagaatgaagatcagcttcgtgcaaagggttatgacaaa

SEQ ID NO: 675279 - DNA, 120 bp, Artificial Sequence
  ENSG00000186074_0 (sequence is synthesized)
agtttgttcctgctgccaggctccactgaggggaacggggacctgtctgaagagaagatgcccctgctgacactctacctgctcctcttctggctctcaggctactccattgtcactcaa

SEQ ID NO: 675280 - DNA, 120 bp, Artificial Sequence
  ENSG00000186074_1 (sequence is synthesized)
atcaccggtccaacaacagtgaatggcttggagcggggctccttgaccgtgcagtgtgtttacagatcaggctgggagacctacttgaagtggtggtgtcgaggagctatttggcgtgac

SEQ ID NO: 675281 - DNA, 120 bp, Artificial Sequence
  ENSG00000186074_2 (sequence is synthesized)
tgcaagatccttgttaaaaccagtgggtcagagcaggaggtgaagagggaccgggtgtccatcaaggacaatcagaaaaaccgcacgttcactgtgaccatggaggatctcatgaaaact

SEQ ID NO: 675282 - DNA, 120 bp, Artificial Sequence
  ENSG00000186074_3 (sequence is synthesized)
gatgctgacacttactggtgtggaattgagaaaactggaaatgaccttggggtcacagttcaagtgaccattgacccagcaccagtcacccaagaagaaactagcagctccccaactctg

SEQ ID NO: 675283 - DNA, 120 bp, Artificial Sequence
  ENSG00000186074_4 (sequence is synthesized)
accggccaccacttggacaacaggcacaagctcctgaagctcagtgtcctcctgcccctcatcttcaccatattgctgctgcttttggtggccgcctcactcttggcttggaggatgatg

SEQ ID NO: 675284 - DNA, 120 bp, Artificial Sequence
  ENSG00000186074_5 (sequence is synthesized)
aagtaccagcagaaagcagccgggatgtccccagagcaggtactgcagcccctggagggcgacctctgctatgcagacctgaccctgcagctggccggaacctccccgcaaaaggctacc

SEQ ID NO: 675285 - DNA, 120 bp, Artificial Sequence
  ENSG00000186074_6 (sequence is synthesized)
acgaagctttcctctgcccaggttgaccaggtggaagtggaatatgtcaccatggcttccttgccgaaggaggacatttcctatgcatctctgaccttgggtgctgaggatcaggaaccg

SEQ ID NO: 675286 - DNA, 120 bp, Artificial Sequence
  ENSG00000186074_7 (sequence is synthesized)
ccacctccccggcaggggccctgaggagcccacggaatacagcaccatcagcaggccttagcctgcactccaggctccttcttggaccccaggctgtgagcacactcctgcctcatcgac

SEQ ID NO: 675287 - DNA, 120 bp, Artificial Sequence
  ENSG00000186074_8 (sequence is synthesized)
cgtctgccccctgctcccctcatcaggaccaacccggggactggtgcctctgcctgatcagccagcattgcccctagctctgggttgggcttggggccaagtctcagggggcttctagga

SEQ ID NO: 675288 - DNA, 120 bp, Artificial Sequence
  ENSG00000186074_9 (sequence is synthesized)
gttggggttttctaaacgtcccctcctctcctacatagttgaggagggggctagggatatgctctggggctttcatgggaatgatgaagatgataatgagaaaaatgttatcattattat

SEQ ID NO: 675289 - DNA, 120 bp, Artificial Sequence
  ENSG00000186074_10 (sequence is synthesized)
catgaagtaccattatcgtaatacaatgaacctttatttattgcctaccacatgttatgggctgaataatggcccccaaagatatctgtgtcctaatcctcagaacctgtgactgttacc

SEQ ID NO: 675290 - DNA, 120 bp, Artificial Sequence
  ENSG00000186074_11 (sequence is synthesized)
ttctgtggcagaaagggacagtgcagatgtatgtaagttaaggactttgagatagagaggttattcttgctgattcaggtgggcccaaaatatcaccacaagggtcctcataagaaagag

SEQ ID NO: 675291 - DNA, 120 bp, Artificial Sequence
  ENSG00000186074_12 (sequence is synthesized)
gccagaaggtcaaagaggtagagacaaagtgatgatggaagtggacgtgggtgtgacgtgagcaggggccatgaatgccgcagccttcagatgccagaaagggaaaggaatggattcccc

SEQ ID NO: 675292 - DNA, 120 bp, Artificial Sequence
  ENSG00000186074_13 (sequence is synthesized)
tgcctggagcctccaaaagaaaccagccctgcccacgccttgacttgagcccattgaaactgatcttgagctcctggcctccagaattgcaggagaataaatttgtgttgtttttaatga

SEQ ID NO: 675293 - DNA, 120 bp, Artificial Sequence
  ENSG00000186074_14 (sequence is synthesized)
ccagaaccactagaaatcattaggaccaccaggacagcctctccacagccatctgatgtggctgcctcagctcgacctcatgagggtcatcagtgctaagagtcaaggctactccattgt

SEQ ID NO: 675294 - DNA, 120 bp, Artificial Sequence
  ENSG00000186074_15 (sequence is synthesized)
gggagtgtatatatgtgtgtgtctctcagggcctgctctgtcctggtctctgaggtcctactcaagtgatttaattgtcactgagtgatctatcacttgagtcccgagtctcatagaacc

SEQ ID NO: 675295 - DNA, 120 bp, Artificial Sequence
  ENSG00000186075_0 (sequence is synthesized)
ccccgcgcgcgagaatcgaagcacgcacgcgttctcctgcgcgtccgctcccgccgttgcgacggacgggtaggggaggcgaccccggcgttctgctccgcactgtggaggaggtgggga

SEQ ID NO: 675296 - DNA, 120 bp, Artificial Sequence
  ENSG00000186075_1 (sequence is synthesized)
ggtgttgggccagggctgaggtaggagggagtctgtccctcgacgcctcctgcgacgccagcccctgagcgatgatgcgaacgtgcgtcctactctccgcggtgctctggtgcctcacag

SEQ ID NO: 675297 - DNA, 120 bp, Artificial Sequence
  ENSG00000186075_2 (sequence is synthesized)
gagtccaatgcccgcgttttaccttattcaataagaagggcttcatttatggcaagacaggacagccagacaaaatatatgtagagttacatcaaaatagtccagtccttatctgtatgg

SEQ ID NO: 675298 - DNA, 120 bp, Artificial Sequence
  ENSG00000186075_3 (sequence is synthesized)
attttaagctttctaaaaaagaaatagtggaccccacctacttatggattgggcctaatgaaaagacgttaacaggaaataatagaataaatataactgaaactggacagctgatggtga

SEQ ID NO: 675299 - DNA, 120 bp, Artificial Sequence
  ENSG00000186075_4 (sequence is synthesized)
aagattttttggagcctttgtctggactttacacatgtactctttcttataagactgttaaagcagaaactcaagaagaaaaaacagtcaaaaagagatatgactttatggtctttgcct

SEQ ID NO: 675300 - DNA, 120 bp, Artificial Sequence
  ENSG00000186075_5 (sequence is synthesized)
atcgggaacctgattattcatatcagatggctgtacgttttaccacaaggtcttgtatagggagatacaatgatgtattctttagagtgctgaagaaaatcttggatagtctaatttctg

SEQ ID NO: 675301 - DNA, 120 bp, Artificial Sequence
  ENSG00000186075_6 (sequence is synthesized)
ttttgcgccggggtggaaaggtgcttgcaatggatctgttgactgtgaagataccactaatcataatatcctccaggcaagagatcgaatagaagacttttttcggagccaagcatatat

SEQ ID NO: 675302 - DNA, 120 bp, Artificial Sequence
  ENSG00000186075_7 (sequence is synthesized)
tttctaccataactttaataaaactctaccagcaatgcattttgtggaccacagtttgcaagtagtacgtctggatagctgtcgaccaggctttggaaaaaatgaacgtctacacagtaa

SEQ ID NO: 675303 - DNA, 120 bp, Artificial Sequence
  ENSG00000186075_8 (sequence is synthesized)
ttgcgctagctgttgtgtggtttgtagtcctgcgacttttagtcctgatgttaatgtaacttgtcagacctgcgtttccgtccttacctatggagctaaatcttgcccacaaacttcaaa

SEQ ID NO: 675304 - DNA, 120 bp, Artificial Sequence
  ENSG00000186075_9 (sequence is synthesized)
caaaaatcagcaatatgaagattagaggtgaaagcattgttacttacttgtggaagtcggggacataagatgattttcacatcccagagcatcatagatagttccattaagtaaaatcag

SEQ ID NO: 675305 - DNA, 120 bp, Artificial Sequence
  ENSG00000186075_10 (sequence is synthesized)
taagaccaaaccactggaaaacatgcattttggaaactttaaaataaatggttaacatggcatttctaagaaggcatttaatccagtatctctagtgtacaaaggaaacttgaagtttta

SEQ ID NO: 675306 - DNA, 120 bp, Artificial Sequence
  ENSG00000186075_11 (sequence is synthesized)
atggattatttttaatgaaatgttttattgtttacaaacggtatgttgctgtgtacctaagagtatagtaaggtcaagaagagtatcaaagtataataaaataaaaattgtatactctcc

SEQ ID NO: 675307 - DNA, 120 bp, Artificial Sequence
  ENSG00000186075_12 (sequence is synthesized)
ggcgtgtatattatctttgtattagaaccaaaaaagttatttattttggtccctatgattttattttttaagataaattaatatactgtattttttaaagtataggtttaggtttacaga

SEQ ID NO: 675308 - DNA, 120 bp, Artificial Sequence
  ENSG00000186075_13 (sequence is synthesized)
tttacagaataatagagcagataatatatagagttccatacacccactgcaccccataccctcattcctccttacacaatttctcctattattaagatggtgcattagtgtggcacattt

SEQ ID NO: 675309 - DNA, 120 bp, Artificial Sequence
  ENSG00000186075_14 (sequence is synthesized)
gttacaaatgatgaaccaatattaatttattattaattatagcccatagttcacattaagattcattgtgttgtaaggttatgtgggttttgacaaattcataatggcatgtgtgcacca

SEQ ID NO: 675310 - DNA, 120 bp, Artificial Sequence
  ENSG00000186075_15 (sequence is synthesized)
ttgcagtctcatacagaatagtttcaccaccctcaaaatcctgtgcttcacttatttatccctcccgccgtgccctggcaaccactgatctttttactgtctctacagttttgccttttc

SEQ ID NO: 675311 - DNA, 120 bp, Artificial Sequence
  ENSG00000186075_16 (sequence is synthesized)
caaaatgtcatgtagttggttggagttatgcagtatgtagactttttagactggcttctttcacttagcaatatgcatttaaggttcctccatgtctttttgtgacttgatagctcattt

SEQ ID NO: 675312 - DNA, 120 bp, Artificial Sequence
  ENSG00000186075_17 (sequence is synthesized)
tttattgctgaataatgttcattgtatggatatagcatagtatgtttatccattcgcccattaaaggaaatcttgattgcttccagttttcagtgattaaaaataaagccgctataaaca

SEQ ID NO: 675313 - DNA, 120 bp, Artificial Sequence
  ENSG00000186081_0 (sequence is synthesized)
aacagagccaccttctgcgtcctgctgagctctgttctctccagcacctcccaacccactagtgcctggttctcttgctccaccaggaacaagccaccatgtctcgccagtcaagtgtgt

SEQ ID NO: 675314 - DNA, 120 bp, Artificial Sequence
  ENSG00000186081_1 (sequence is synthesized)
ccttccggagcgggggcagtcgtagcttcagcaccgcctctgccatcaccccgtctgtctcccgcaccagcttcacctccgtgtcccggtccgggggtggcggtggtggtggcttcggca

SEQ ID NO: 675315 - DNA, 120 bp, Artificial Sequence
  ENSG00000186081_2 (sequence is synthesized)
gggtcagccttgcgggtgcttgtggagtgggtggctatggcagccggagcctctacaacctggggggctccaagaggatatccatcagcactagtggtggcagcttcaggaaccggtttg

SEQ ID NO: 675316 - DNA, 120 bp, Artificial Sequence
  ENSG00000186081_3 (sequence is synthesized)
gtgctggtgctggaggcggctatggctttggaggtggtgccggtagtggatttggtttcggcggtggagctggtggtggctttgggctcggtggcggagctggctttggaggtggcttcg

SEQ ID NO: 675317 - DNA, 120 bp, Artificial Sequence
  ENSG00000186081_4 (sequence is synthesized)
gtggccctggctttcctgtctgccctcctggaggtatccaagaggtcactgtcaaccagagtctcctgactcccctcaacctgcaaatcgaccccagcatccagagggtgaggaccgagg

SEQ ID NO: 675318 - DNA, 120 bp, Artificial Sequence
  ENSG00000186081_5 (sequence is synthesized)
agcgcgagcagatcaagaccctcaacaataagtttgcctccttcatcgacaaggtgcggttcctggagcagcagaacaaggttctggacaccaagtggaccctgctgcaggagcagggca

SEQ ID NO: 675319 - DNA, 120 bp, Artificial Sequence
  ENSG00000186081_6 (sequence is synthesized)
ccaagactgtgaggcagaacctggagccgttgttcgagcagtacatcaacaacctcaggaggcagctggacagcatcgtgggggaacggggccgcctggactcagagctgagaaacatgc

SEQ ID NO: 675320 - DNA, 120 bp, Artificial Sequence
  ENSG00000186081_7 (sequence is synthesized)
aggacctggtggaagacttcaagaacaagtatgaggatgaaatcaacaagcgtaccactgctgagaatgagtttgtgatgctgaagaaggatgtagatgctgcctacatgaacaaggtgg

SEQ ID NO: 675321 - DNA, 120 bp, Artificial Sequence
  ENSG00000186081_8 (sequence is synthesized)
agctggaggccaaggttgatgcactgatggatgagattaacttcatgaagatgttctttgatgcggagctgtcccagatgcagacgcatgtctctgacacctcagtggtcctctccatgg

SEQ ID NO: 675322 - DNA, 120 bp, Artificial Sequence
  ENSG00000186081_9 (sequence is synthesized)
ggacagaagccgagtcctggtatcagaccaagtatgaggagctgcagcagacagctggccggcatggcgatgacctccgcaacaccaagcatgagatctctgagatgaaccggatgatcc

SEQ ID NO: 675323 - DNA, 120 bp, Artificial Sequence
  ENSG00000186081_10 (sequence is synthesized)
agaggctgagagccgagattgacaatgtcaagaaacagtgcgccaatctgcagaacgccattgcggatgccgagcagcgtggggagctggccctcaaggatgccaggaacaagctggccg

SEQ ID NO: 675324 - DNA, 120 bp, Artificial Sequence
  ENSG00000186081_11 (sequence is synthesized)
agctggaggaggccctgcagaaggccaagcaggacatggcccggctgctgcgtgagtaccaggagctcatgaacaccaagctggccctggacgtggagatcgccacttaccgcaagctgc

SEQ ID NO: 675325 - DNA, 120 bp, Artificial Sequence
  ENSG00000186081_12 (sequence is synthesized)
tggagggcgaggaatgcagactcagtggagaaggagttggaccagtcaacatctctgttgtcacaagcagtgtttcctctggatatggcagtggcagtggctatggcggtggcctcggtg

SEQ ID NO: 675326 - DNA, 120 bp, Artificial Sequence
  ENSG00000186081_13 (sequence is synthesized)
gaggtcttggcggcggcctcggtggaggtcttgccggaggtagcagtggaagctactactccagcagcagtgggggtgtcggcctaggtggtgggctcagtgtggggggctctggcttca

SEQ ID NO: 675327 - DNA, 120 bp, Artificial Sequence
  ENSG00000186081_14 (sequence is synthesized)
gtgcaagcagtggccgagggctgggggtgggctttggcagtggcgggggtagcagctccagcgtcaaatttgtctccaccacctcctcctcccggaagagcttcaagagctaagaacctg

SEQ ID NO: 675328 - DNA, 120 bp, Artificial Sequence
  ENSG00000186081_15 (sequence is synthesized)
ctgcaagtcactgccttccaagtgcagcaacccagcccatggagattgcctcttctaggcagttgctcaagccatgttttatccttttctggagagtagtctagaccaagccaattgcag

SEQ ID NO: 675329 - DNA, 120 bp, Artificial Sequence
  ENSG00000186081_16 (sequence is synthesized)
aaccacattctttggttcccaggagagccccattcccagcccctggtctcccgtgccgcagttctatattctgcttcaaatcagccttcaggtttcccacagcatggcccctgctgacac

SEQ ID NO: 675330 - DNA, 120 bp, Artificial Sequence
  ENSG00000186081_17 (sequence is synthesized)
gagaacccaaagttttcccaaatctaaatcatcaaaacagaatccccaccccaatcccaaattttgttttggttctaactacctccagaatgtgttcaataaaatgcttttataatataa

SEQ ID NO: 675331 - DNA, 120 bp, Artificial Sequence
  ENSG00000186081_18 (sequence is synthesized)
actgtgcaggtgtgaccggtgagctcacagctgccccccaggcatgcccagcccacttaatcattcacagctcgacagctctctcgcccagcccagttctggaagggataaaaagggggc

SEQ ID NO: 675332 - DNA, 120 bp, Artificial Sequence
  ENSG00000186081_19 (sequence is synthesized)
ttgtttctgtgccctggatttgtggacacgttctgaattagactggcagctgggaagggagaattatttcttcccattcagaggtgcggttcctggagcagcagaacaaggttctggaca

SEQ ID NO: 675333 - DNA, 120 bp, Artificial Sequence
  ENSG00000186081_20 (sequence is synthesized)
ctttgttttattttgttttacttttgctaaacacacgcagctagatccagtaccagtgtttcagtgtcctgccacccacgatgtactggtttctctctgggattcatgatagtttggttt

SEQ ID NO: 675334 - DNA, 120 bp, Artificial Sequence
  ENSG00000186081_21 (sequence is synthesized)
cttatctaaatttttcacatgggtgggttttttttcctcaagttgtcatatcacaatgagtgaaagatttgaatggaactgacattaaataacacaacacagaaccagatgaccgactcc

SEQ ID NO: 675335 - DNA, 120 bp, Artificial Sequence
  ENSG00000186081_22 (sequence is synthesized)
cattgcctactttctgttggaggaatttctgtccgtgccaagttctctcacagaatgtaactcctacaaggcaaaaactgctttcgacataatcacattttccaaatctcttatactttc

SEQ ID NO: 675336 - DNA, 120 bp, Artificial Sequence
  ENSG00000186081_23 (sequence is synthesized)
cccatagtgggtggagaagaatgtgaattataattctttcctaacaacttgtttctaggtcaatccctcttcattggaaaatccctctggagagttctcccttcctttaacttaagcagc

SEQ ID NO: 675337 - DNA, 120 bp, Artificial Sequence
  ENSG00000186081_24 (sequence is synthesized)
cttcagctgataaagcgaagctgctctactgtggggtgtacaacacacatacatgagatcagtgacttgtgcgtgataatgacacatcatcaacactatttcagtctgactcatggccat

SEQ ID NO: 675338 - DNA, 120 bp, Artificial Sequence
  ENSG00000186081_25 (sequence is synthesized)
atagctgacctcaactcacttttctggtctcttttcccccaccggtgttcctgggcactggctgtcctccaagcacctgagcaactcagcaatcttcttgacacttgtgccttttctgct

SEQ ID NO: 675339 - DNA, 120 bp, Artificial Sequence
  ENSG00000186081_26 (sequence is synthesized)
tttgctcacgtcctttgctcaacctcaatatccatgtcatgcccacctccatccacccttgtcctccagtaccccttccttcaggaaggctttcatgtttactccagctgagttaaactc

SEQ ID NO: 675340 - DNA, 120 bp, Artificial Sequence
  ENSG00000186081_27 (sequence is synthesized)
agctacctttggattgtcaaactactgtttgcttcaacctctgacattgcccattgcctactttctgttggaggaatttctgtccgtgccaagttctctcacagaatgtaactcctacaa

SEQ ID NO: 675341 - DNA, 120 bp, Artificial Sequence
  ENSG00000186081_28 (sequence is synthesized)
agttggaccagtcaacatctgtaagtagctttgaacagacattaacaacgacaataatatgggatatatttagtgccaactcagaattctgctgtttctagatccaaacttttcccatcc

SEQ ID NO: 675342 - DNA, 120 bp, Artificial Sequence
  ENSG00000186081_29 (sequence is synthesized)
cagcatatggttatttataataatacacttagtaagttgtgggtggtggaggggaaggacagattgggacaggaagcaatgtggcttatgtctcatctcttaaagggtaagccatgcatc

SEQ ID NO: 675343 - DNA, 120 bp, Artificial Sequence
  ENSG00000186081_30 (sequence is synthesized)
ctatgcttcttggaccctgtcccctgccttgtccctagtacctagctccccccagtacctagctcctcccctcagtacctagctcccctcagtacctagctccctgtagtacctagctcc

SEQ ID NO: 675344 - DNA, 120 bp, Artificial Sequence
  ENSG00000186086_0 (sequence is synthesized)
aattctgttattgcaactgcagaccgttacctggtacactggctgctacctccctcactcttgtcagagtcggagctacaggcagtgccttcagctctgagctcaggcatcccggtccct

SEQ ID NO: 675345 - DNA, 120 bp, Artificial Sequence
  ENSG00000186086_1 (sequence is synthesized)
ctgagctcaggcatcccggtccctgtttttgcggttaaggactctaaagtgttgtgtcgtgttcatcaactttttctcaacctccctggctctacctcttctgccacaaacgtcagcatg

SEQ ID NO: 675346 - DNA, 120 bp, Artificial Sequence
  ENSG00000186086_2 (sequence is synthesized)
agcgagagggcagagatgaacatcctagaaatcaaccaggaattgcgctcgcagctggcagagagcaatcagcagttccgagacctcaaagagaaattccttataactcaagctactgcc

SEQ ID NO: 675347 - DNA, 120 bp, Artificial Sequence
  ENSG00000186086_3 (sequence is synthesized)
tactccctggccaaccagctgaagaaatacaagtgtgaagagtacaaagacatcatagactctgtgctgagggatgaactgcagtccatggagaagctggcagagaagctcaggcaagct

SEQ ID NO: 675348 - DNA, 120 bp, Artificial Sequence
  ENSG00000186086_4 (sequence is synthesized)
tggagaagctggcagagaagctcaggcaagctgaggagctcaggcagtataaagccctggttcactctcaggcaaaagagctgacccagttacgggagaagttacgggaagggagagatg

SEQ ID NO: 675349 - DNA, 120 bp, Artificial Sequence
  ENSG00000186086_5 (sequence is synthesized)
ctcctcactcctgatgaccctgacaagtcccagggtcaggacctccgagagcagctggctgaggggcacaggctggcagagcaccttgttcacaagctgagcccagaaaatgatgaagat

SEQ ID NO: 675350 - DNA, 120 bp, Artificial Sequence
  ENSG00000186086_6 (sequence is synthesized)
gaagatgaggatgaagacgacaaagacgaggaggttgagaaagtacaggaatcacctgcccccagagaggtgcagaagactgaagaaaaggaagtccctcaggactcactggaggaatgt

SEQ ID NO: 675351 - DNA, 120 bp, Artificial Sequence
  ENSG00000186086_7 (sequence is synthesized)
gctgtcacttgttcaaatagtcacaacccttctaactccaaccagcctcacaggagcaccaaaatcacatttaaggaacacgaagtcgactctgctctggttgtagagagtgaacaccct

SEQ ID NO: 675352 - DNA, 120 bp, Artificial Sequence
  ENSG00000186086_8 (sequence is synthesized)
catgatgaagaggaggaagctctaaacattcccccagaaaatcaaaatgaccatgaggaggaggaggggaaagcgccagtgccccccagacaccatgacaagtccaactcttaccggcat

SEQ ID NO: 675353 - DNA, 120 bp, Artificial Sequence
  ENSG00000186086_9 (sequence is synthesized)
cgtgaagtctctttcttggcattggatgaacagaaagtttgctccgctcaggatgttgccagggattactccaatcccaaatgggatgaaacctcacttggcttcctcgaaaagcaaagt

SEQ ID NO: 675354 - DNA, 120 bp, Artificial Sequence
  ENSG00000186086_10 (sequence is synthesized)
tggatggatgttgcttgactccttccatccttcctgacctgactccctcctaccacccttattggagcactttgtactcttttgaagacaagcaagtcagcttggctcttgtagacaaaa

SEQ ID NO: 675355 - DNA, 120 bp, Artificial Sequence
  ENSG00000186086_11 (sequence is synthesized)
ttaaaaaggatcaagaggagatagaagaccaaagcccaccatgccccaggctcagccaggagctgccagaggtgaaggagcaggaagtcccagaggactctgtgaatgaagtttacttga

SEQ ID NO: 675356 - DNA, 120 bp, Artificial Sequence
  ENSG00000186086_12 (sequence is synthesized)
ctccctcagttcaccatgacgtgtctgactgccaccagccttatagcagcaccttgtcctcattggaggatcagcttgcctgctctgctctggatgtagcctcccccaccgaggcggcct

SEQ ID NO: 675357 - DNA, 120 bp, Artificial Sequence
  ENSG00000186086_13 (sequence is synthesized)
gtccccaagggacttggagtggagacttgagccaccaccggtcagaggttcaaatttcacaggcacagctggaaccaagcaccctggtgcccagttgtctgcgactacagctggatcaag

SEQ ID NO: 675358 - DNA, 120 bp, Artificial Sequence
  ENSG00000186086_14 (sequence is synthesized)
ggttccactgtgggaacggcttggcccagcggggcctttcctccaccacctgcagcttctcagccaatgctgattctgggaaccaatggcccttccaagagctggttttagagccctctc

SEQ ID NO: 675359 - DNA, 120 bp, Artificial Sequence
  ENSG00000186086_15 (sequence is synthesized)
tggggatgaagaaccctccccagctggaagatgatgcacttgaaggctcagcaagcaacacacaagggcgtcaagtcactggccggattcgtgcctcccttgtcctgatactgaagacca

SEQ ID NO: 675360 - DNA, 120 bp, Artificial Sequence
  ENSG00000186086_16 (sequence is synthesized)
tcagaagaagactcccgttcagcaagtggagactggcattcagattcgctggcccgcatgctgagagtgcagagataccaaatactgctgaaaggatgcaaaggatgataggatgaaaga

SEQ ID NO: 675361 - DNA, 120 bp, Artificial Sequence
  ENSG00000186086_17 (sequence is synthesized)
atgtcacaaaaagcagcttttccacttgataaaaacaactaaaacagcaaagcaagtttaagtccaaacacaatactgcaggggtccttcactgaggattgaatttcagacacagaatac

SEQ ID NO: 675362 - DNA, 120 bp, Artificial Sequence
  ENSG00000186086_18 (sequence is synthesized)
tcttgatgacttcaagccactatgctcctttgatttgagaagccacattccatccccctccaattgtgatcaacacctagggagaccaatgcccagatggacaaatagcattgactggcg

SEQ ID NO: 675363 - DNA, 120 bp, Artificial Sequence
  ENSG00000186086_19 (sequence is synthesized)
ttagccctgtttctcaattcccatcatgtagagaacaggagtccgcagctgctggcaggagacagcatgtcagccgggactctgccagggcagagtatgagcaatgccatgttcttgctg

SEQ ID NO: 675364 - DNA, 120 bp, Artificial Sequence
  ENSG00000186088_0 (sequence is synthesized)
agagccgcccggtggtcgtgtccgggcgatggctcttcgcctggtcgccgacttcgacctcgggaaggacgtgctcccgtggttgcgggcgcagcgggcagtgtcggaggccagcggggc

SEQ ID NO: 675365 - DNA, 120 bp, Artificial Sequence
  ENSG00000186088_1 (sequence is synthesized)
cggaagcggcggcgcagatgttttagaaaacgattatgagagcttacatgtattaaatgttgaaagaaatggaaatattatttatacctataaggatgataagggaaatgtcgtctttgg

SEQ ID NO: 675366 - DNA, 120 bp, Artificial Sequence
  ENSG00000186088_2 (sequence is synthesized)
attatatgattgtcaaaccagacaaaatgagcttctatatacctttgagaaagacttgcaagttttcagttgctctgtcaacagtgaaaggactttgcttgctgcaagtttagttcagtc

SEQ ID NO: 675367 - DNA, 120 bp, Artificial Sequence
  ENSG00000186088_3 (sequence is synthesized)
tactaaagaaggaaaaaggaacgaacttcaaccaggatcaaagtgcttgactttgttggttgaaatccaccctgttaacaatgtgaaggttctaaaggctgtggatagctatatttgggt

SEQ ID NO: 675368 - DNA, 120 bp, Artificial Sequence
  ENSG00000186088_4 (sequence is synthesized)
tcagtttctctacccacatattgaaagtcatcctcttccagagaaccatctgttactgatttcagaagagaaatatattgaacaatttcgtatccatgtcgcccaagaagatggaaatag

SEQ ID NO: 675369 - DNA, 120 bp, Artificial Sequence
  ENSG00000186088_5 (sequence is synthesized)
agtggtgattaaaaattctggccatctcccaagagacagaatagctgaggatttcgtttgggctcagtgggatatgtcagaacagagattatattacattgacctgaagaaatcaaggag

SEQ ID NO: 675370 - DNA, 120 bp, Artificial Sequence
  ENSG00000186088_6 (sequence is synthesized)
tatcttaaaatgtatccagttttatgctgatgagagctataacttaatgtttgaagtacccttggacatatcattaagcaactcaggatttaaacttgtcaactttggatgtgattatca

SEQ ID NO: 675371 - DNA, 120 bp, Artificial Sequence
  ENSG00000186088_7 (sequence is synthesized)
tcaataccgagataaattttccaaacacctgactctgtgtgtttttaccaaccatacaggaagtttgtgtgtatgttacagcccgaagtgtgcctcttggggacaaatcacatattcagt

SEQ ID NO: 675372 - DNA, 120 bp, Artificial Sequence
  ENSG00000186088_8 (sequence is synthesized)
gttttacattcataaaggacacagcaagaccttcaccacttctcttgagaatgttgggtcacacatgacaaagggcattacttttctcaaccttgactattatgtggctgtttacttacc

SEQ ID NO: 675373 - DNA, 120 bp, Artificial Sequence
  ENSG00000186088_9 (sequence is synthesized)
tggtcatttcttccacctacttaatgttcaacatccagacctgatctgccacaatctctttctgacaggaaataatgaaatgattgatatgctacctcattgccctttacagtcattgtc

SEQ ID NO: 675374 - DNA, 120 bp, Artificial Sequence
  ENSG00000186088_10 (sequence is synthesized)
agggtccctggtattggattgttgttctggaaagctctatagagcactgctcagccagtcgtctttattacagcttctgcagaacacttgcttagactgtgagaagatggctgcgttgca

SEQ ID NO: 675375 - DNA, 120 bp, Artificial Sequence
  ENSG00000186088_11 (sequence is synthesized)
ctgcgcgctctactgcggtcaaggtgcgcagttcctggaagcccagattattcagtggatttctgagaatgtctctgcctgccattcatttgacctcattcaggaatttataattgcttc

SEQ ID NO: 675376 - DNA, 120 bp, Artificial Sequence
  ENSG00000186088_12 (sequence is synthesized)
ttcatactggagtgtatattcagagacaagtaacatggacaaactattgccacattcctcagtgctcacttggaatacagaaattcctggaataactcttgtgacagaagacattgcatt

SEQ ID NO: 675377 - DNA, 120 bp, Artificial Sequence
  ENSG00000186088_13 (sequence is synthesized)
cacacttccactataacaacagtgtggtcaggagagagtggcacaacctgatctctgaagagaaaacaggaaaaagaaggtctgcggcatacgtgaggaatattcttgataatgcagtaa

SEQ ID NO: 675378 - DNA, 120 bp, Artificial Sequence
  ENSG00000186088_14 (sequence is synthesized)
aggtgatttctaacctagaagcaagaaatttggggccaagattaacacccctcctgcaggaggaagacagccaccagcggctgctcatggggctgatggtgtctgagctaaaagaccatt

SEQ ID NO: 675379 - DNA, 120 bp, Artificial Sequence
  ENSG00000186088_15 (sequence is synthesized)
ttttgagacacctacagggtgtagaaaagaagaaaattgaacagatggttctggactacatttcaaaactgctggatctcatttgccacatcgtagaaaccaattggaggaaacataatc

SEQ ID NO: 675380 - DNA, 120 bp, Artificial Sequence
  ENSG00000186088_16 (sequence is synthesized)
ttcattcctgggttctccacttcaatagtcgtggcagtgctgctgaatttgcagtttttcacatcatgaccaggattctggaagctacaaacagtttgtttttacctctgcctcctggtt

SEQ ID NO: 675381 - DNA, 120 bp, Artificial Sequence
  ENSG00000186088_17 (sequence is synthesized)
ttcatactctgcacaccatcctcggggtccagtgtctccctttgcataacctgctgcattgcattgacagtggagtgttgcttctcactgaaacagctgtcataaggctcatgaaagatc

SEQ ID NO: 675382 - DNA, 120 bp, Artificial Sequence
  ENSG00000186088_18 (sequence is synthesized)
tggataatacagagaaaaatgaaaaactgaaattcagtatcattgtgcggcttcctccgcttattgggcagaagatttgtagactttgggatcatcctatgagttctaacatcatttcgc

SEQ ID NO: 675383 - DNA, 120 bp, Artificial Sequence
  ENSG00000186088_19 (sequence is synthesized)
ggaaccacgtgacgcgactgcttcagaactataagaaacagcctcggaattctatgattaacaagtcatcgttcagtgtagaatttctgcctctgaactacttcattgaaattctgacag

SEQ ID NO: 675384 - DNA, 120 bp, Artificial Sequence
  ENSG00000186088_20 (sequence is synthesized)
atatagagtcctccaatcaagccctgtatccttttgaaggacatgacaatgtggatgcagaatttgtagaggaagcagctctgaaacacaccgcgatgcttttaggcttatgaaaaagaa

SEQ ID NO: 675385 - DNA, 120 bp, Artificial Sequence
  ENSG00000186088_21 (sequence is synthesized)
aacgcaattggatctgctgctgccattttaatcttgctcattaaccttactcctttgagaattctttaacaatatttaaaattggtaacaaaaatagtttagccataattgtttagccat

SEQ ID NO: 675386 - DNA, 120 bp, Artificial Sequence
  ENSG00000186088_22 (sequence is synthesized)
gtgagtttcaggttggtacacgttcagacagaactgctgtatcacattccaattttgaatagccagtgagcaatcaagtgtagagaaatgataaatggcctaagaaggcatacagtggca

SEQ ID NO: 675387 - DNA, 120 bp, Artificial Sequence
  ENSG00000186088_23 (sequence is synthesized)
taaacgatgctcttcctagtagcttaataggccacaagctagtttctgttgcactctgaaataaaatatgctttaaaaatgtagggaacagtgcttagaaaagcaaaaactaggtgtgtc

SEQ ID NO: 675388 - DNA, 120 bp, Artificial Sequence
  ENSG00000186088_24 (sequence is synthesized)
attgaaataataggcataaaaattaaatgttacataagaacactatttggaaagagggtccttttaaaaactgaatttgtactaaatcagatttgccatgtccagtacagaataatttgt

SEQ ID NO: 675389 - DNA, 120 bp, Artificial Sequence
  ENSG00000186088_25 (sequence is synthesized)
acttagtatttgcagcagggtttgtctttgtgaattcagatgaaacatatttatttttttttatttataaaaggttgatttaggaatattttgtcagtcattaaaaaacctgaaaacata

SEQ ID NO: 675390 - DNA, 120 bp, Artificial Sequence
  ENSG00000186088_26 (sequence is synthesized)
tttgtcaggtaccttcccaagagtaggctatgattcttctgtcagtcattcccacattcaatgagttgcaaagcctgtacatgttaccatgcctctctgattcagtgcctccattacctc

SEQ ID NO: 675391 - DNA, 120 bp, Artificial Sequence
  ENSG00000186088_27 (sequence is synthesized)
ttatccacgttcaggcaatagcttctctacaggtcttcataccttctgtagcaaattattactccaactcattctttgcctgttgccatattaatatcccaatggtaaatcttctgttct

SEQ ID NO: 675392 - DNA, 120 bp, Artificial Sequence
  ENSG00000186088_28 (sequence is synthesized)
gcttaaaaactttcattacctcctcaaagtctctcaaattaataaatctctatcattcagcattcaacctctgtcacctgcactcataagcacagaactggtcacatttttaaaaatgtc

SEQ ID NO: 675393 - DNA, 120 bp, Artificial Sequence
  ENSG00000186088_29 (sequence is synthesized)
tattttttgtaattgattgtctgcctcccccagcagactgcaaggtgtatgggagcagcagttgtgcctgttttgctcatttttatactcttagccccttgccaggtgtgtggaagggat

SEQ ID NO: 675394 - DNA, 120 bp, Artificial Sequence
  ENSG00000186088_30 (sequence is synthesized)
gtgctgaataaattagcttttccaaccttacctcttaatctttctctcctctaatatgattccaacccagctggatcatttactattttctgaatatgccctgtgctttctcatcttcgg

SEQ ID NO: 675395 - DNA, 120 bp, Artificial Sequence
  ENSG00000186088_31 (sequence is synthesized)
acctctgttcatgttctattaacacagctgccagttattaacagtgacattatggttgaaagcctaccctacaatcacacagttgatgcaaatttcaacttacacattattatttctgtg

SEQ ID NO: 675396 - DNA, 120 bp, Artificial Sequence
  ENSG00000186088_32 (sequence is synthesized)
atcctgggcaagttgcctagctcctgtgaatcttggcttttggtttttccatttatgaaatgggaatctagtaattcccaccccatacttttgtatgaggatcagatgagccaggacaca

SEQ ID NO: 675397 - DNA, 120 bp, Artificial Sequence
  ENSG00000186088_33 (sequence is synthesized)
ggttgaaagccttggtacatgtccagtatgggtcgctattgttatattgcatgctaggctcttcacagacctggctctagttctcaaagcagccctgtgggaaaggtactggtggttcca

SEQ ID NO: 675398 - DNA, 120 bp, Artificial Sequence
  ENSG00000186088_34 (sequence is synthesized)
atttagagatgaagaaatggaggctcagaaaggcttagttgcctgcagctggtgagtaatacagctggattctggcctagggctgctcatgccaaacctggctttttctactgtccgcac

SEQ ID NO: 675399 - DNA, 120 bp, Artificial Sequence
  ENSG00000186088_35 (sequence is synthesized)
tcatttccactgataggaattgcatctgtcctttgaagctccccgcaaatgccatcacttccaagagagctgttttgattctctcctggtctgataccttctcccatgcatgatgttttt

SEQ ID NO: 675400 - DNA, 120 bp, Artificial Sequence
  ENSG00000186088_36 (sequence is synthesized)
atctgttgtcagtagtagtatacttagagatctgggtttctgtgggtagctctacccgtgagacaggcttgagaatgcctgcctctcaattgaattcctataaatttactatctggccat

SEQ ID NO: 675401 - DNA, 120 bp, Artificial Sequence
  ENSG00000186088_37 (sequence is synthesized)
attgtcttaattctttcttttctatactttagtccaagtagactctaaaagcctttctctagggcatacccagagataagccatataaactattgccttctggtccaaatttgtttccct

SEQ ID NO: 675402 - DNA, 120 bp, Artificial Sequence
  ENSG00000186088_38 (sequence is synthesized)
tcagcaaaatggtcctcatcccaacaaccttttagtctggacatacgaaatctgaaatgcttctgtactcttttgctatcttactgtagaatcacaaacatatcaaaccgtaaaaccatt

SEQ ID NO: 675403 - DNA, 120 bp, Artificial Sequence
  ENSG00000186088_39 (sequence is synthesized)
gagcaggcccttgctctgtttctgtgcaggaagagacccaaggagcaaggaatgtatacttaccggaaacttactatagacccagcgtgatatttagttacgaataatacagagaaggaa

SEQ ID NO: 675404 - DNA, 120 bp, Artificial Sequence
  ENSG00000186088_40 (sequence is synthesized)
aatgtttttaggatcctgtttgcccgtgacaacatatctgtatggacagcaattacagttcttatcactttattttaaaattgtgcttattgtggagaatcagcttacaccagaagtggt

SEQ ID NO: 675405 - DNA, 120 bp, Artificial Sequence
  ENSG00000186088_41 (sequence is synthesized)
ttcccttttagcctcggaattctatgattaacaagtcatcgttcagtgtagaatttctgcctctgaactacttcattgaaattctgacagatatagagtcctccaatcaaggtaatttac

SEQ ID NO: 675406 - DNA, 120 bp, Artificial Sequence
  ENSG00000186088_42 (sequence is synthesized)
tcccctgttctcagggtcttaccacttttcccttgacacatcagtccttccctattcacttctttgtcttctttccaaaatccttttaacatacaagtagacccttatagcaattggttt

SEQ ID NO: 675407 - DNA, 120 bp, Artificial Sequence
  ENSG00000186088_43 (sequence is synthesized)
acattagcagtaccaaatttactacctagagtaaattaccaaataatcacctctgaagttttaaaagagtcaagaggtttaaagcccatttggttgatgcaaatgttcttggtgctgaag

SEQ ID NO: 675408 - DNA, 120 bp, Artificial Sequence
  ENSG00000186088_44 (sequence is synthesized)
tttaaatttaagaacacattcttaaaaaattcattttactaaaatacaattatgattttaatgagctgtgagcacaaagttataaatgtttcacggacccatggtaaccctttttccctg

SEQ ID NO: 675409 - DNA, 120 bp, Artificial Sequence
  ENSG00000186088_45 (sequence is synthesized)
ctttttttttttttttttttcttcttaaatacaaagaagacccaaagggtggataagtgtacgttcattataaataaatggaaagggaaagaaaagatgagtgaggtgctcagctttaag

SEQ ID NO: 675410 - DNA, 120 bp, Artificial Sequence
  ENSG00000186088_46 (sequence is synthesized)
agagagtggcacaacctgatctctgaagaggtatgagtgggtcagtgagaacaaagccagcagcgaggcatagtggactggatccaggtgatgcctttaaatcataaggctggcttccat

SEQ ID NO: 675411 - DNA, 120 bp, Artificial Sequence
  ENSG00000186088_47 (sequence is synthesized)
gtgcagcactcttcccaattgccagggacttgatcattgtcattactgatctcaatgggcagagatgcttctatgatctctgttctcctagggaggaaactgaaaagcagaaagtttaag

SEQ ID NO: 675412 - DNA, 120 bp, Artificial Sequence
  ENSG00000186088_48 (sequence is synthesized)
gggacacacagcacattcatagtagaagtatgattaatatccatgtctcagatgtgttctcaggttacttatgtagttaaaaattgatattaaaaaatctaggtgttcccaacttagtgg

SEQ ID NO: 675413 - DNA, 120 bp, Artificial Sequence
  ENSG00000186088_49 (sequence is synthesized)
tcattaggggttggggtagttggagggagaatagtggacgtgactcactgtccaggggtgacccagggaaatctttgggggtgatcgaagacttctatgtgttgattgtggtggtacatt

SEQ ID NO: 675414 - DNA, 120 bp, Artificial Sequence
  ENSG00000186088_50 (sequence is synthesized)
gtgggacatgaatctaaacatgataaaatgacatagaatgacacacacacattgtgccaatgtcaatttttgattttgatattgtgctctagttaggtaagatataagcactgaggagac

SEQ ID NO: 675415 - DNA, 120 bp, Artificial Sequence
  ENSG00000186088_51 (sequence is synthesized)
tgggtggagggtacattgcatctctctctagtatcgctgcatgtagattagtgttgttgtgtgtagtatatagttgactcgcagtttcctgtgaatctgtaattgtttcagaataaaata

SEQ ID NO: 675416 - DNA, 120 bp, Artificial Sequence
  ENSG00000186088_52 (sequence is synthesized)
tttcttaaaactttaaaaaaaatctaggtgttctgattacctggaaagtatatttcttctctctgatgctcttaactgtattgcattatatccttgacgtgaaaagtcaccgataaaacc

SEQ ID NO: 675417 - DNA, 120 bp, Artificial Sequence
  ENSG00000186088_53 (sequence is synthesized)
gactgtgagaagatggctgcgttgcactgcgcgctctactgcggtcaaggtgcgcagttcctggaagcccagtggaggcagagagcagatttaaataccaacagagttctgtctgacttt

SEQ ID NO: 675418 - DNA, 120 bp, Artificial Sequence
  ENSG00000186088_54 (sequence is synthesized)
cattcctcagtgctcacttggaatacaattgtgcagggtggagcagctattgtggacacgcacagggtgacatcaggaagtccaagaagagcgatataaagaaacctgtggttataacct

SEQ ID NO: 675419 - DNA, 120 bp, Artificial Sequence
  ENSG00000186088_55 (sequence is synthesized)
gcatcccacctcccggggggttcatcggcagcgcaggggctttgccaagacaggagtgctcctggaagcttcacgttttgagaaagaatccgtgaccaccaagcaaaccaccctatacct

SEQ ID NO: 675420 - DNA, 120 bp, Artificial Sequence
  ENSG00000186088_56 (sequence is synthesized)
aacggtggaacagtttgtccccacatttgcgagacgtgtttatgtgtctgttgaaccgtgtccgtggctcaggggacatgggcctcggcggtgaggcgcaagagggcaggggccgcctcc

SEQ ID NO: 675421 - DNA, 120 bp, Artificial Sequence
  ENSG00000186088_57 (sequence is synthesized)
aggctgcgcgcggcggggcgagagcccccagccgcccccgagctccgcacctgtgcaggctggggctgcgcgcgagatgctcggctcccggccctgccactccgggctttttgatgattt

SEQ ID NO: 675422 - DNA, 120 bp, Artificial Sequence
  ENSG00000186088_58 (sequence is synthesized)
acagagcctgggctcactgaccagcccaggaggaaccagcctctgccttaccaggccatcaatccctgaagccaggggatctgccctgccagacacgggcatgtgtgtgtgtgtttcagg

SEQ ID NO: 675423 - DNA, 120 bp, Artificial Sequence
  ENSG00000186088_59 (sequence is synthesized)
cttatcatccttgcattgctgggggtttcgcaacacggggaacgttgctggtctggctgaggtttctgtcgtgccacccctcctgccctgcttatggagctactgtatgtgtcagggccg

SEQ ID NO: 675424 - DNA, 120 bp, Artificial Sequence
  ENSG00000186088_60 (sequence is synthesized)
tttgcatcctgttactagtcagtctatcttaatgcactttaggaaactcttccctttccttgcacgtgctttgcgtatactagttccccataaagaatgtcactgcctgaaacagaacat

SEQ ID NO: 675425 - DNA, 120 bp, Artificial Sequence
  ENSG00000186088_61 (sequence is synthesized)
tctgtgaaatgcagggctgttggattcacatgttaaattgtttcatctcaatcacgagggttgtgtaggatccagggaagatttatcccggggggtcaagagatatcgatgccctcccag

SEQ ID NO: 675426 - DNA, 120 bp, Artificial Sequence
  ENSG00000186088_62 (sequence is synthesized)
aaggagttgccagcccactgagcagggtggttctgccctcttgcctggcactggatctcaagtatttaagaagaaaagaatggaatacaaagaagttagaagcgctttggggcagatttt

SEQ ID NO: 675427 - DNA, 120 bp, Artificial Sequence
  ENSG00000186088_63 (sequence is synthesized)
ccagcaagactgggtttgtctgcccctagggccactacactgtagtgtgcattgcaaatcatggtggagaaggtaccatttgatttaacatatcacttttccacctttacctaactacct

SEQ ID NO: 675428 - DNA, 120 bp, Artificial Sequence
  ENSG00000186088_64 (sequence is synthesized)
ttgtagtctgataacttgtgccagttagtattatttgctgcagtaattgactggccccctcagctcagtaactcccaaggctactgaactacagggttcagaaagtagaagggagccatg

SEQ ID NO: 675429 - DNA, 120 bp, Artificial Sequence
  ENSG00000186088_65 (sequence is synthesized)
cagtccttccaccgagcgctgttccctcaatttatgaccccagaagggttaagagaaggcccaagtccctctgtttccagtggagcagaggttcttagcagtgagttttagtgttgaaca

SEQ ID NO: 675430 - DNA, 120 bp, Artificial Sequence
  ENSG00000186088_66 (sequence is synthesized)
aaaatcaaagctagagcctactggggttgaggaatgtgttggtttctttctttctcggtcattccctgtttcacacagctctgataagttcaccttgtaggactaggtcacacttaggtg

SEQ ID NO: 675431 - DNA, 120 bp, Artificial Sequence
  ENSG00000186088_67 (sequence is synthesized)
atgaaaaattttcatcctgtgttatgttttctcaatgactcagagaagggaaacccaggctgattcttcttccttctaacccatctcctgaaaactgctcagagcctaactattgctctg

SEQ ID NO: 675432 - DNA, 120 bp, Artificial Sequence
  ENSG00000186088_68 (sequence is synthesized)
accttttaatatcttgctgttagagtggccgcacggctcttcccatgtctgtctaggcaccaggacctccggggacagctgctgaatgtgcttttgcgatgggagtccctgggtgatggc

SEQ ID NO: 675433 - DNA, 120 bp, Artificial Sequence
  ENSG00000186088_69 (sequence is synthesized)
cttgcggttctccttatttcctgtcatacagagctgccctctggctgtgcccacaggatgcattttggcatttcccttggcttggtgctgcttgctttctagctgtctgatcctaccggg

SEQ ID NO: 675434 - DNA, 120 bp, Artificial Sequence
  ENSG00000186088_70 (sequence is synthesized)
tctcaagggaggaaatgactcagtgtgtttaatacaggtttccctgctaagcctcaatctggggaagtcctgttggttttgggaagtgagcagcagttctctatgtggtttaaaaaaaca

SEQ ID NO: 675435 - DNA, 120 bp, Artificial Sequence
  ENSG00000186088_71 (sequence is synthesized)
aaaaaaaaaaaaaaaaagagacagaaaatgaagtgggtaaagaagattctttaagtctattttagaatccctattgggtctagaatgccatcttctgtacaaagtattcactcagaaatg

SEQ ID NO: 675436 - DNA, 120 bp, Artificial Sequence
  ENSG00000186090_0 (sequence is synthesized)
atgcagaaacactctccaggccccccagccctggccctcctctctcagtctctgctcactacaggaaatggcgacactttgattatcaattgcccaggctttggccagcacagggtggac

SEQ ID NO: 675437 - DNA, 120 bp, Artificial Sequence
  ENSG00000186090_1 (sequence is synthesized)
cctgcagcctttcaagcagtgtttgacagaaaggctattggtccagtcaccaactacagtgtcgccactcatgtcaacatctccttcaccttgtctgccatctggaactgctattccagg

SEQ ID NO: 675438 - DNA, 120 bp, Artificial Sequence
  ENSG00000186090_2 (sequence is synthesized)
attcacaccttcaactgccaccatgcccggccttggcacaatcaatttgtgcagtggaacccagatgaatgcggaggcatcaagaagtccggcatggcaactgagaacctatggctttca

SEQ ID NO: 675439 - DNA, 120 bp, Artificial Sequence
  ENSG00000186090_3 (sequence is synthesized)
gatgtcttcatcgaggagtctgtggatcagacacctgcaggtctcatggctagtatgtcaatagtgaaggccacatcaaacacaataagccaatgtgggtggtcagcatctgcaaactgg

SEQ ID NO: 675440 - DNA, 120 bp, Artificial Sequence
  ENSG00000186090_4 (sequence is synthesized)
acaccttctatttccccttccatggacagagcccgggcatggagaaggatgtccaggagctttcaaatacatcacagaacctcattcagaacaaggagggagtgggtactgctgggtatc

SEQ ID NO: 675441 - DNA, 120 bp, Artificial Sequence
  ENSG00000186090_5 (sequence is synthesized)
caaaaaagaacaataaaggtgaccgtggccactaaccagtatgaacaagccatcttccatgtggccatcaggcgcaggtgcaggcccagcccctacgtggtaaactttctggtgcccagt

SEQ ID NO: 675442 - DNA, 120 bp, Artificial Sequence
  ENSG00000186090_6 (sequence is synthesized)
aatgacttgctcccagccactagcacttcatcacatgcttcactagtggcgcctctggccctcatgcagacccccttgcctgcaggtgtctacttcgccctgtgcctgtccctgatggtg

SEQ ID NO: 675443 - DNA, 120 bp, Artificial Sequence
  ENSG00000186090_7 (sequence is synthesized)
ggcagcctgctggagaccatcttcatcacccacctgctgcacgtggccaccacccagcccctacctctgcctcggtggctccactccctgctgctgcactgcaccggccaagggagatgc

SEQ ID NO: 675444 - DNA, 120 bp, Artificial Sequence
  ENSG00000186090_8 (sequence is synthesized)
tgtcccactgcgccccagaagggaaataagggcccgggtctcacccccacccacctgcccggtgtgaaggagccagaggtatcagcagggcagatgccaggccctggggaggcagagctg

SEQ ID NO: 675445 - DNA, 120 bp, Artificial Sequence
  ENSG00000186090_9 (sequence is synthesized)
acagggggctcagaatggacaagggcccagcgggaacacgaggcccagaagcagcactcggtggagctgtgggtgcagttcagccacgcgatggacgccctgctcttccgcctctacctg

SEQ ID NO: 675446 - DNA, 120 bp, Artificial Sequence
  ENSG00000186090_10 (sequence is synthesized)
ctcttcatggcctcctccatcatcaccgtcatatgcctctggaacacctaggcaggtgctcacctgcaaacttcagtctggacttctttttgccagagaactccagaaaccagtcaggct

SEQ ID NO: 675447 - DNA, 120 bp, Artificial Sequence
  ENSG00000186090_11 (sequence is synthesized)
ctcagtcagccttgtggccctgtcaaccgcctcatttttaacccagtcctctgtgtagtttcagaccagacctgaatagtctcctatgccctccaaaagtcgggtccttgctcctgcatg

SEQ ID NO: 675448 - DNA, 120 bp, Artificial Sequence
  ENSG00000186090_12 (sequence is synthesized)
ccatcagccccactcagccctcccatacctccctggctcctcaggattcaggttcctagggtacgtccttgattaaatcaccccaatatgcccctttgcagaaagtattggcttttccct

SEQ ID NO: 675449 - DNA, 120 bp, Artificial Sequence
  ENSG00000186090_13 (sequence is synthesized)
tgaacaaggagagggtggtggcatgggacctgccttcctggagttaatcatctagatgaaagctgctattccaggattcacaccttcaactggtgacatcgttcctgtggctaaatatgg

SEQ ID NO: 675450 - DNA, 120 bp, Artificial Sequence
  ENSG00000186090_14 (sequence is synthesized)
atggaaagaggctggttccatgggaaaggattcctccttggcttcatcctccacctgctgctgcaagattcacaccttcaactggtgacatcgttcctgtggctaaatatgtggaaccca

SEQ ID NO: 675451 - DNA, 120 bp, Artificial Sequence
  ENSG00000186090_15 (sequence is synthesized)
ctagattcaggcccagttaaagcacaggtggcttagatcaaaaatcattattgccacatggaccagccttggaagtgaacaaggagagggtggtggcatgggacctgccttcctggagtt

SEQ ID NO: 675452 - DNA, 120 bp, Artificial Sequence; identical to SEQ ID NO: 620219
  ENSG00000186092_0 (sequence is synthesized)

SEQ ID NO: 675453 - DNA, 120 bp, Artificial Sequence; identical to SEQ ID NO: 613630
  ENSG00000186092_1 (sequence is synthesized)

SEQ ID NO: 675454 - DNA, 120 bp, Artificial Sequence; identical to SEQ ID NO: 613631
  ENSG00000186092_2 (sequence is synthesized)

SEQ ID NO: 675455 - DNA, 120 bp, Artificial Sequence
  ENSG00000186092_3 (sequence is synthesized)
atagccatgggctttgacagatatatagcaatatgcaagcccctacactacactacaattatgtgtggcaacgcatgtgtcggcattatggctgtcacatggggaattggctttctccat

SEQ ID NO: 675456 - DNA, 120 bp, Artificial Sequence; identical to SEQ ID NO: 613633
  ENSG00000186092_4 (sequence is synthesized)

SEQ ID NO: 675457 - DNA, 120 bp, Artificial Sequence; identical to SEQ ID NO: 613634
  ENSG00000186092_5 (sequence is synthesized)

SEQ ID NO: 675458 - DNA, 120 bp, Artificial Sequence; identical to SEQ ID NO: 613635
  ENSG00000186092_6 (sequence is synthesized)

SEQ ID NO: 675459 - DNA, 120 bp, Artificial Sequence; identical to SEQ ID NO: 613636
  ENSG00000186092_7 (sequence is synthesized)

SEQ ID NO: 675460 - DNA, 120 bp, Artificial Sequence
  ENSG00000186092_8 (sequence is synthesized)
tagtatttgtgtacacctgttccttcctgtgtgaccctaagtttagtagaagaaaggagagaaaatatagcctagcttataaatttaaaaaaaaatttatttggtccattttgtgaaaaa

SEQ ID NO: 675461 - DNA, 120 bp, Artificial Sequence
  ENSG00000186092_9 (sequence is synthesized)
cataaaaaaagaactgtcacatcttaatttaaaaaatatatgcttagtggtaaggagatatatgtcaacttttaagaggttgaaaaacaaacgcctcccattataagtttatacttcacc

SEQ ID NO: 675462 - DNA, 120 bp, Artificial Sequence
  ENSG00000186092_10 (sequence is synthesized)
tcccaccactataacaacccagaatccatgagggcattatcaggagtgagtggaagagtaagtttgccaatgtgaaatgtgccttctaggtcctagacgtctgtggtataactgctcata

SEQ ID NO: 675463 - DNA, 120 bp, Artificial Sequence
  ENSG00000186092_11 (sequence is synthesized)
agcagtagaaagaatttagagggatccaggctctcatcacgttggcacaaagtatattacttggatccatctatgtcattttccatggttaatgtttaaaagcacaggctttaaagtaaa

SEQ ID NO: 675464 - DNA, 120 bp, Artificial Sequence
  ENSG00000186092_12 (sequence is synthesized)
aaacaaagagctggattcaactctactgactcttattaatcatgattttgggcacattacgtagctttcatgagctttagtttctacatttataaacaggagattatacctattatgcat

SEQ ID NO: 675465 - DNA, 120 bp, Artificial Sequence
  ENSG00000186092_13 (sequence is synthesized)
ggttattatgaaggaaaatgacaaaatagatataaatcaaatagcccacttcgagacatattaagcatgaataaacattagatactattaaaatcctatatattaacaaagccaaaagtt

SEQ ID NO: 675466 - DNA, 120 bp, Artificial Sequence
  ENSG00000186092_14 (sequence is synthesized)
tcaaactttactttttcccaacattcttgtgaaatatgacacatcccaatcttaacagatgctcatttgggatactgtacttgtgagtggaagtgtgtatatttgtgtgcaagtgtgtac

SEQ ID NO: 675467 - DNA, 120 bp, Artificial Sequence
  ENSG00000186092_15 (sequence is synthesized)
tcatatacttccaccttaccaccctagaaaggcatgatgaaaatttaagatagaaggaaaatataaattgaaaaaaaaaaaccttaacaaatgattctgacaaatatcttctctttccag

SEQ ID NO: 675468 - DNA, 120 bp, Artificial Sequence
  ENSG00000186092_16 (sequence is synthesized)
ggagaatcactgagccagaataaaattgaacactaaatattctaagaaaaaaggaatctagtttgtcaaaatgtgacttgaattaatagataaggagagtcagatgataagagggtcaaa

SEQ ID NO: 675469 - DNA, 120 bp, Artificial Sequence
  ENSG00000186092_17 (sequence is synthesized)
attatgtttatcttaggaaaagtagaatagaaaatttataagcagattaaaaacacataataaaagtagtaaataataatgacagtatctcaaatcagtgcaggggggaaaggcctacta

SEQ ID NO: 675470 - DNA, 120 bp, Artificial Sequence
  ENSG00000186092_18 (sequence is synthesized)
atgtgatggtgggataattggatagcaatatgggaaaagatatatttaatttatttgctacaccaaatgccaggacaatctctaagtgaattcaagacataactcttttttcaaaaaaac

SEQ ID NO: 675471 - DNA, 120 bp, Artificial Sequence
  ENSG00000186094_0 (sequence is synthesized)
agccgcgcgccggccacccgcgcgcctgccgcccgttgcccaggcaaccgtcgtgccgcgtcttcctgaggtagctcctgtcagcccactgatcccaccacccgctccctactgccccgc

SEQ ID NO: 675472 - DNA, 120 bp, Artificial Sequence
  ENSG00000186094_1 (sequence is synthesized)
ggtcttcgcgtgagctcggagactgagggacaacaaaaatggcggaggggagccagtcggcgcctgaggcaggcaatgatatgggaaatgatgatgccattggagggaatgtgagcaaat

SEQ ID NO: 675473 - DNA, 120 bp, Artificial Sequence
  ENSG00000186094_2 (sequence is synthesized)
atatagtgcttccaactggctattgtggacagcccaagaaaggacatcttatctttgatgcttgctttgaaagtggtaacctgggccgggtggaccaggtctctgagtttgagtatgatc

SEQ ID NO: 675474 - DNA, 120 bp, Artificial Sequence
  ENSG00000186094_3 (sequence is synthesized)
tgttcattaggccggacacctgtaatccacgcttccgagtctggttcaactttactgttgaaaatgtgaaagaatcacagagggtcattttcaacattgttaacttcagtaaaaccaaga

SEQ ID NO: 675475 - DNA, 120 bp, Artificial Sequence
  ENSG00000186094_4 (sequence is synthesized)
gtctctatagagatgggatggcccctatggtgaaatctaccagcagaccaaaatggcaaaggctgccacccaaaaatgtttactactaccgctgcccggaccataggaagaactatgtga

SEQ ID NO: 675476 - DNA, 120 bp, Artificial Sequence
  ENSG00000186094_5 (sequence is synthesized)
tgtcctttgccttttgttttgaccgagaagaagatatttaccagtttgcttactgctacccatatacatacactcgcttccaacattaccttgacagcctgcaaaagagaaacatggatt

SEQ ID NO: 675477 - DNA, 120 bp, Artificial Sequence
  ENSG00000186094_6 (sequence is synthesized)
acttctttcgggagcagctgggccagagtgtgcaacaacgaaagcttgacctcctgacgataaccagccctgacaatctccgggaaggggcagagcagaaggtggtattcatcacaggac

SEQ ID NO: 675478 - DNA, 120 bp, Artificial Sequence
  ENSG00000186094_7 (sequence is synthesized)
gagtccacccaggggaaacaccctcatcatttgtgtgccaagggatcattgacttccttgtaagccagcaccctattgcctgtgtcctccgggaatacctggtcttcaagatcgcaccaa

SEQ ID NO: 675479 - DNA, 120 bp, Artificial Sequence
  ENSG00000186094_8 (sequence is synthesized)
tgctcaatcctgatggagtctacctgggcaattacaggtgttctctgatgggatttgatctgaatcgtcactggctggatccctctccatgggtccatcctaccctgcatggagtgaaac

SEQ ID NO: 675480 - DNA, 120 bp, Artificial Sequence
  ENSG00000186094_9 (sequence is synthesized)
aactcatcgtccagatgtacaacgacccaaaaacaagcctggagttttatattgacatccatgcccactccaccatgatgaatggcttcatgtatggcaacatctttgaggatgaggaac

SEQ ID NO: 675481 - DNA, 120 bp, Artificial Sequence
  ENSG00000186094_10 (sequence is synthesized)
ggttccagaggcaggccatttttcccaagctcctctgccagaatgctgaggacttctcctattccagcacatcctttaaccgggacgctgtgaaagcaggaactggccgtcgcttcctcg

SEQ ID NO: 675482 - DNA, 120 bp, Artificial Sequence
  ENSG00000186094_11 (sequence is synthesized)
gtggactcctggaccacacttcctattgctacaccctagaggtctccttctacagctacatcatcagtggcaccacggctgctgtgccctacactgaagaagcctatatgaagctggggc

SEQ ID NO: 675483 - DNA, 120 bp, Artificial Sequence
  ENSG00000186094_12 (sequence is synthesized)
gaaagaaaaatcccctccttacaagcacccactcctgcggggcccagccagcaactaccccaacagcaaaggggacaagaagagctcagtgaaccacaaagacccttcaaccccttttta

SEQ ID NO: 675484 - DNA, 120 bp, Artificial Sequence
  ENSG00000186094_13 (sequence is synthesized)
aagacacggagtcctgggaggtcttatggggacaggagcatgcattttctgctggggaatgaaattaatcactcttctctagcttccaaggatttgtggattaatgcataggctagtgaa

SEQ ID NO: 675485 - DNA, 120 bp, Artificial Sequence
  ENSG00000186094_14 (sequence is synthesized)
agggaagggatacaatgagaaacttcatcactgattttccctttttccaatggaaaatcaattgtaagccttcagctcaaaaagctcaggaacaaaataggagatcggaaccaggtgagc

SEQ ID NO: 675486 - DNA, 120 bp, Artificial Sequence
  ENSG00000186094_15 (sequence is synthesized)
acagatgctattttctacaacatagagatcttccaagatgaggaaaacctacacatcccttttaagagatttgacacatatcaggtcagttctttcaaagccactttacatttttaagtt

SEQ ID NO: 675487 - DNA, 120 bp, Artificial Sequence
  ENSG00000186094_16 (sequence is synthesized)
ttatagttactgcagatggttaccttttaaataggcttggttgtttacagctttagaaatgcagtgtttgtattttctgatccaaaacaacagcaacaacacatgcaaccaaagggcaaa

SEQ ID NO: 675488 - DNA, 120 bp, Artificial Sequence
  ENSG00000186094_17 (sequence is synthesized)
tgcatcctagggaacaatgggacagaatttttgaaatcaacggtggacttaaatatatggtcactgtatctaagctgcatgcttgctgattccctcaaaccccagcatgcagatttagaa

SEQ ID NO: 675489 - DNA, 120 bp, Artificial Sequence
  ENSG00000186094_18 (sequence is synthesized)
aactgttttgagagctgtttcccaatttcctcggtagtttaattaaaattttagctctaaagacaaaaagcactggtcactcattttaaaaggtttattatggttaaggtctccagatcc

SEQ ID NO: 675490 - DNA, 120 bp, Artificial Sequence
  ENSG00000186094_19 (sequence is synthesized)
caggtgacagggattaagcctggcccctgaagatgtaggcattgctaatctgcaatgaggaaagggtgattgccaggcaaggaagatgcaaaagacagaaggatgcaccctgaggcaggg

SEQ ID NO: 675491 - DNA, 120 bp, Artificial Sequence
  ENSG00000186094_20 (sequence is synthesized)
aggaatgataaaataaaacagtagtagcaattcccaaggtgtggcaagctaaatattggcatttttgtgaagagtaaagtgcctttgtatgatgaatgggtccaggggggtctgctccct

SEQ ID NO: 675492 - DNA, 120 bp, Artificial Sequence
  ENSG00000186094_21 (sequence is synthesized)
tcctgtctgtggaaacagcaggctgagtcaccatgacagcctgctaattaaaatgacctcccggaaatgaggattagaacacagggagaggaagggaggctccagggaggaaaatccctt

SEQ ID NO: 675493 - DNA, 120 bp, Artificial Sequence
  ENSG00000186094_22 (sequence is synthesized)
gtttgtttgtttgtttgtttgtttgagttggagattattgaagtttgctacaaaaatcaaaaagaaaacttgttctcctttgcatgctagttttcagaaatgatgacaaagagccatatg

SEQ ID NO: 675494 - DNA, 120 bp, Artificial Sequence
  ENSG00000186094_23 (sequence is synthesized)
agttttcagaaatgatgacaaagagccatatgttgattggctacaaatgtcatgttgtatatacagcttctcccctgggttcgttttgcccagaggaacacaaataaagtgttttgtgca

SEQ ID NO: 675495 - DNA, 120 bp, Artificial Sequence
  ENSG00000186094_24 (sequence is synthesized)
ctgggaaagggcagcattgtattgggaaagtccactagaagctgcaaattaggaatacatagctaaaaccagggaggcactaggcctgctcttctctgaatccagcagacccaaggacct

SEQ ID NO: 675496 - DNA, 120 bp, Artificial Sequence
  ENSG00000186094_25 (sequence is synthesized)
tctcccaatctcttttcctgcaacctctcacaaatagtggattcagttttggaggtctggagggttaaaggaaatatattggagtgtatccatatttgtcagggatctttggttacaagc

SEQ ID NO: 675497 - DNA, 120 bp, Artificial Sequence
  ENSG00000186094_26 (sequence is synthesized)
tgaagtgaaaactaagagcttgggcatatcctggatgtaaagaagtaggcccctgtgatagcaatggaagaaagtctgcaggtaaatggtacattgaggcttatgacccagcatctaata

SEQ ID NO: 675498 - DNA, 120 bp, Artificial Sequence
  ENSG00000186094_27 (sequence is synthesized)
aaagcttatttaatgtttttgattaaatgaatgagtaagttgggcctgctcccaagcactaagccctgaggtcagggtgttataagccttattctaaataccaatttctgatacggatag

SEQ ID NO: 675499 - DNA, 120 bp, Artificial Sequence
  ENSG00000186094_28 (sequence is synthesized)
ggcttttcatgtacatgcttgatgttcatgggcttgatgactggatgggactaagatataaggtgcaggtctccggtacctgccacttggtaaggtcagggaccttgaggaatggtcgtg

SEQ ID NO: 675500 - DNA, 120 bp, Artificial Sequence
  ENSG00000186094_29 (sequence is synthesized)
catccagccgagagtatccaagtctgacaggtcaggaattaggcccccagctcaggtaagggctgagactctcaggtgaggatggaggtgcttcttcttctggtggcgtctttggattgt

SEQ ID NO: 675501 - DNA, 120 bp, Artificial Sequence
  ENSG00000186094_30 (sequence is synthesized)
ccagtttgcctcagcccttagtatgatactcctaccccaattgccatgctccaaatctttcccaggccagccggacccatggcctgcccatatcttactctgcttccatctctctcccct

SEQ ID NO: 675502 - DNA, 120 bp, Artificial Sequence
  ENSG00000186094_31 (sequence is synthesized)
ctcttctctcatgatgcagtgagtctcctgccatctaagctatgcaagtccacaggctggatgaccatccccagggttgctgaggaagagcttgatgatcttgactccttctaaccctga

SEQ ID NO: 675503 - DNA, 120 bp, Artificial Sequence
  ENSG00000186094_32 (sequence is synthesized)
acatacaaaaacatatgttctcttttcatcttttgtctaacctatcctctcccactttctcttccctctactcactatttccccttctacttacttttctcacccttgttccctctcctt

SEQ ID NO: 675504 - DNA, 120 bp, Artificial Sequence
  ENSG00000186094_33 (sequence is synthesized)
ctatgccctcctcctccctcctcacctgtcctgtgcttctctttccttacttctttttccccctcctcccctcctttctgtcctctctctcatcccatcctccttttctttctctcctct

SEQ ID NO: 675505 - DNA, 120 bp, Artificial Sequence
  ENSG00000186094_34 (sequence is synthesized)
ttgcctgtcttctgtcttccttgtctttcccctctcatcctctgtgcatctttctctctgcctttgcatttcctttgacaaattccttttcctcttagtttcttcataaaatttctctga

SEQ ID NO: 675506 - DNA, 120 bp, Artificial Sequence
  ENSG00000186094_35 (sequence is synthesized)
aaactccaaagccttccatgatgaaattagaagttattttctagtttgcctaattttttaaggattaggtagtaactctagtttcccgagtgttgattttaatatcaaggtcactgcatc

SEQ ID NO: 675507 - DNA, 120 bp, Artificial Sequence
  ENSG00000186094_36 (sequence is synthesized)
agagctgtaacagatcgtggcagattctgctttccttgatcctttgttttcgggttgatctatgtctcctttcctaacacttagttttctcagagaagtggagggaggaggaaggaactt

SEQ ID NO: 675508 - DNA, 120 bp, Artificial Sequence
  ENSG00000186094_37 (sequence is synthesized)
tagatgaaatgaactctgtatttctgcaaattccccctccctggaggtagaagtgctcttttagcattttttcaacccttggtgagtgtttatggaattcctctgtgcaggaaaacatct

SEQ ID NO: 675509 - DNA, 120 bp, Artificial Sequence
  ENSG00000186094_38 (sequence is synthesized)
ccaggtaccttgccaggaacatcggaagtagggcaatggccctagaaggaggggctgtcagggggtaggccaggtgttagagcaatgttccacatcctgttggacacagagatattatga

SEQ ID NO: 675510 - DNA, 120 bp, Artificial Sequence
  ENSG00000186094_39 (sequence is synthesized)
ttggaactgagagttccctatgtacagtcatcaagactgagggtcatcttgcagtctgctttaatacccacctgactcagcaaggccaagggagtaggctctgctctgaggaagagggtc

SEQ ID NO: 675511 - DNA, 120 bp, Artificial Sequence
  ENSG00000186094_40 (sequence is synthesized)
tgtgggttccaaagtcctggccacctgttatgtgccacattgcccctcttcatgccccatacacaccttagatgatgcatatggcctatgccttctccagaatctgctaactcctataac

SEQ ID NO: 675512 - DNA, 120 bp, Artificial Sequence
  ENSG00000186094_41 (sequence is synthesized)
acatgcatatgcttcattccacattgtacttgctttgctctcccataatattatggcaaagggacagagagctgcctggaataagagtttgagcttgtgcactaaaggggattctgcaac

SEQ ID NO: 675513 - DNA, 120 bp, Artificial Sequence
  ENSG00000186094_42 (sequence is synthesized)
ccttattcatagtgagatgagggtccctccagaggaggcctgcccttagtttgttgttttttgctgtccaatctgacaggctctcctaccttttcttagcacttctgacatgcttctgtc

SEQ ID NO: 675514 - DNA, 120 bp, Artificial Sequence
  ENSG00000186094_43 (sequence is synthesized)
ttagaagaaaatgtgtttcttagtagaaagcccacccttggttcaggcccaaggtttccacccctcaacagccaacactcatttatcaaaagtaaacacagcattagtacataccaggaa

SEQ ID NO: 675515 - DNA, 120 bp, Artificial Sequence
  ENSG00000186094_44 (sequence is synthesized)
tcataaaaggcacctagggtaaaatactgaataaaaaggcatgattcctgactcacagaactttcagtctacttggggagacagaaaagggaagagataattacaatgtatgtgataaat

SEQ ID NO: 675516 - DNA, 120 bp, Artificial Sequence
  ENSG00000186094_45 (sequence is synthesized)
tctggtggaggaattccagaaggctctgggacattttcatttgacaagtatatattgagtgcctgtcataggtcaggtaaagttctaggcacagggaatgtaacagagaacatactaaag

SEQ ID NO: 675517 - DNA, 120 bp, Artificial Sequence
  ENSG00000186094_46 (sequence is synthesized)
acaagaatgtctttacatgggggaaagagggaactcacacgcagtcctaggagtcagggaagatttcccaggaaaagagacatctaaactgagattttttgtttgtttgtttttgagatg

SEQ ID NO: 675518 - DNA, 120 bp, Artificial Sequence
  ENSG00000186094_47 (sequence is synthesized)
ctgagattacaggtgtaagccactgagcccggcctaaactgagtttttaatatgaactagtcaaactgggtgagggtgttgttgaagggaggatgtggtagacagagaggggagtacaga

SEQ ID NO: 675519 - DNA, 120 bp, Artificial Sequence
  ENSG00000186094_48 (sequence is synthesized)
aggtatgggcagaagctgtaagtggtcccttagggctgaaggacttcagactcaatgataagtctgaagtggaaagatgtaagaagtttgatcttgaatgtagacaatggaaggacagat

SEQ ID NO: 675520 - DNA, 120 bp, Artificial Sequence
  ENSG00000186094_49 (sequence is synthesized)
tcgagggggccagtattgtagacagggacatgcattaggaggctgttataaaaatccaggtgagaaataatccaggccaagaccagagtggtggctgtagaatacttagaatgtggaact

SEQ ID NO: 675521 - DNA, 120 bp, Artificial Sequence
  ENSG00000186094_50 (sequence is synthesized)
gagaagacttggtaattgactatttgggagtggcgacagggaatgggagctcgtgattggaaggggttaaggtgagtagagaggctatgcacaagctgagcaggtcgtgatactgatgga

SEQ ID NO: 675522 - DNA, 120 bp, Artificial Sequence
  ENSG00000186094_51 (sequence is synthesized)
cctaccctgccttgttctgtcctctagaggatgagaagaggaaacaaactgcaccagggaagctcaggccgattcaatgcatgcaagggtgatttaacctgggttctgtttgaaatactt

SEQ ID NO: 675523 - DNA, 120 bp, Artificial Sequence
  ENSG00000186094_52 (sequence is synthesized)
cctgctggaagatggagctggtgaaatcatttgcttctgaaggagaatggtggcctttccaaatttgactatcagatatgaatttgacctaatctcgggaatgtttccggctggaagatg

SEQ ID NO: 675524 - DNA, 120 bp, Artificial Sequence
  ENSG00000186094_53 (sequence is synthesized)
gagctggtgaaatcatttgcttctgaaggagaatggtggcctttccaaatttgactatcagatatgaatttgacctaatctcgggaatgtttccggtaagactgcagactctcaggtgct

SEQ ID NO: 675525 - DNA, 120 bp, Artificial Sequence
  ENSG00000186094_54 (sequence is synthesized)
taagaagtcactgaggctctggacaaacaggaacgtattagctttttgcctactgactacacagcctccaccattcacccaaaatggatctgcatctcccaggtgcatctgcaagcacac

SEQ ID NO: 675526 - DNA, 120 bp, Artificial Sequence
  ENSG00000186094_55 (sequence is synthesized)
aaaaacacacactgggaaggggtatgagctgaggttagtcctaggtgctgcactttctattcctgacatatcaggatgtgtgggagggaggccaaagctgcagcaccaggctgggcttcc

SEQ ID NO: 675527 - DNA, 120 bp, Artificial Sequence
  ENSG00000186094_56 (sequence is synthesized)
agtcctgttgctactgtggaagctggctccagacaggtgggggcagcaaagagccagcctgtatggtcagctgggattctagttgaccaaagctgttgggagaactcaagctcatcagtg

SEQ ID NO: 675528 - DNA, 120 bp, Artificial Sequence
  ENSG00000186094_57 (sequence is synthesized)
tggcaagttagacaacttgatctggacacatgcataaatggaacaggggtccagatacccacaggattaatactaataaaccattttgcttaagcagcaaaactcggtttatatattgaa

SEQ ID NO: 675529 - DNA, 120 bp, Artificial Sequence
  ENSG00000186103_0 (sequence is synthesized)
gcatttccagagagagacacaccacgtaggactgaaaatggttactctaaggggattcgtgacagatttcagaaaccatgaggaacagaatggccccagagaatccccagccagaccctt

SEQ ID NO: 675530 - DNA, 120 bp, Artificial Sequence
  ENSG00000186103_1 (sequence is synthesized)
tcatcaataggaattattccaacatgaaggtgataccaccacaggatccagctagtcccagtttcactctgttatccaagctggagtgcagtggcacggtctcggcttactgcagcctca

SEQ ID NO: 675531 - DNA, 120 bp, Artificial Sequence
  ENSG00000186103_2 (sequence is synthesized)
ctcagcctcccgagtagctgcgactacagcaatacggagaaggcataaagaacgtacttctttcacccaccaacagtatgaggagctagaagctctgtttagccagaccatgttcccaga

SEQ ID NO: 675532 - DNA, 120 bp, Artificial Sequence
  ENSG00000186103_3 (sequence is synthesized)
ctctgtttagccagaccatgttcccagatagaaatcttcaggagaaactagctttgagactcgacctaccggagtcaacagtaaaggtttggttcaggaaccggcgattcaaattgaaga

SEQ ID NO: 675533 - DNA, 120 bp, Artificial Sequence
  ENSG00000186103_4 (sequence is synthesized)
agcagcagcagcagcaatcagcaaagcaacgaaaccagatccttccatccaagaagaatgtgcccacctcccccagaacatcccccagtccttatgctttttctcctgtgatttcagatt

SEQ ID NO: 675534 - DNA, 120 bp, Artificial Sequence
  ENSG00000186103_5 (sequence is synthesized)
tctacagctcccttccatctcagcccttagacccttccaattgggcatggaactctaccttcactgagagttctaccagtgacttccaaatgcaagatactcagtgggagaggctggtgg

SEQ ID NO: 675535 - DNA, 120 bp, Artificial Sequence
  ENSG00000186103_6 (sequence is synthesized)
cctcggttcctgctttgtactctgatgcctatgacatattccaaatcatagaactgtacaatcttcctgatgagaatgagatatccagctcttctttccactgtctgtatcagtatctct

SEQ ID NO: 675536 - DNA, 120 bp, Artificial Sequence
  ENSG00000186103_7 (sequence is synthesized)
cacccacaaagtaccaggtaggaggacagggttcctctctcagcatctttgctggtccagctgtaggcctatctcctgcacaaacctggcccaatatgacaagccaagcctttgaagcct

SEQ ID NO: 675537 - DNA, 120 bp, Artificial Sequence
  ENSG00000186103_8 (sequence is synthesized)
acagtctaacagatagcctggaattccagaaaacctccaatatggtagacttgggatttctctgaccagagtactaataaatatagatcatttagaaaagtggtcttcttgcctcttgta

SEQ ID NO: 675538 - DNA, 120 bp, Artificial Sequence
  ENSG00000186103_9 (sequence is synthesized)
catgactgtttttttcctttgtctcattttaacccaacatctgggtctgtgtctctgatttccatgtaaatgttgcaaaaagagttttccaagtagagctgggcactacgtaatcagccc

SEQ ID NO: 675539 - DNA, 120 bp, Artificial Sequence
  ENSG00000186103_10 (sequence is synthesized)
cacaagtctccctgagaagcctgcctagtccctttcatggccaatgagactccaaaattcccttcccaaaactatcttggattttctaaaagtaggacagtggttttgggggttatccac

SEQ ID NO: 675540 - DNA, 120 bp, Artificial Sequence
  ENSG00000186103_11 (sequence is synthesized)
tggttttgggggttatccacttttatttttttgaaactagctctcattctgtcacccaggctggaatacagtggtacagtcacggctcacaaaagccttgacctcctgggctcaggtgat

SEQ ID NO: 675541 - DNA, 120 bp, Artificial Sequence
  ENSG00000186103_12 (sequence is synthesized)
ccaccacacctggctaattttttttttttgagactgagtctcgcactgtcacccagggtggagtgcagtggcgggatctcagctcagtgcaacctccacctcctggggttcaagtgattc

SEQ ID NO: 675542 - DNA, 120 bp, Artificial Sequence
  ENSG00000186103_13 (sequence is synthesized)
gcccaggctggtctccaactcctggacttaacgccatccacctgccacagcctcccaaagtgctaggaatacaggagtgcaccatcgcacccggctgggttatctagtttaaaaacactt

SEQ ID NO: 675543 - DNA, 120 bp, Artificial Sequence
  ENSG00000186103_14 (sequence is synthesized)
tagtttaaaaacactttttttcaaggaaaccgaagaaaccatcatccacttttctctctgtatcattctgattttagtatatgtgttgtggaagtgagtacactatcatccacttttaat

SEQ ID NO: 675544 - DNA, 120 bp, Artificial Sequence
  ENSG00000186103_15 (sequence is synthesized)
cactatcatccacttttaatgacagaaagttataaacttacattttgtttccaatttttcattttttgtttgttatttgttttttgtagacagcactctgtcacccaggctggagtgcag

SEQ ID NO: 675545 - DNA, 64 bp, Artificial Sequence
  ENSG00000186103_16 (sequence is synthesized)
agccttctgagtagctgagactacagattgttgcccaggctgaatttgggtttttttaaaatga

SEQ ID NO: 675546 - DNA, 120 bp, Artificial Sequence
  ENSG00000186103_17 (sequence is synthesized)
gccttgttgcccaggctgaatttgggtttttttaaaatgagactttcagtcctaatttgaggggaaattactgtcaccactagttttaatatagtacaatgaaaaaataatatatatata

SEQ ID NO: 675547 - DNA, 120 bp, Artificial Sequence
  ENSG00000186103_18 (sequence is synthesized)
tatagtacaatggtccagacataataagaggtgtaaaaactatcacaggaagaaataaaaacagatttttgaaggtgagatgataaacttgcaaaactcacaaaataaagagtcaaactt

SEQ ID NO: 675548 - DNA, 120 bp, Artificial Sequence
  ENSG00000186103_19 (sequence is synthesized)
aacttttagaatgacaagttagcatattttccagccacatgatcaacctacaaaattaataccatttctgaacaccagtaataaagaaacataagggctgggggtggtggctcatgcctg

SEQ ID NO: 675549 - DNA, 120 bp, Artificial Sequence
  ENSG00000186103_20 (sequence is synthesized)
aaaataaaaaataaaaaataaaagaaacataagataagtacctctcaatgaaaaatgtaaaagtacctagaaattcacaaaaaaattaatacctctgtggagaaaacttcaaaacttaaa

SEQ ID NO: 675550 - DNA, 89 bp, Artificial Sequence
  ENSG00000186103_21 (sequence is synthesized)
aaatgtaaaagtacctagaaattcacaaaaaaattaatacctctgtggagaaaacttcaaaacttaaaaaaggacatagaaaatgtttt

SEQ ID NO: 675551 - DNA, 120 bp, Artificial Sequence
  ENSG00000186103_22 (sequence is synthesized)
aggctgaggcaggagaatcacaaggattgaaactatgcagtgtgttctccaaacatgatggaacgaaattagaaatcaataaaatttgggaaattcacaaatatgtggatattaaacaac

SEQ ID NO: 675552 - DNA, 120 bp, Artificial Sequence
  ENSG00000186103_23 (sequence is synthesized)
acattcctaaataaccagtggttaaagaggtaatcacagtctgagcaacatggcaaaaccctgtgtctacaaaaaataaaaaattagctgggcatgacggccagagcccatggtcccagc

SEQ ID NO: 675553 - DNA, 84 bp, Artificial Sequence
  ENSG00000186103_24 (sequence is synthesized)
aaattagctgggcatgacggccagagcccatggtcccagctactcgagaggctgaggtaagagcatcccttgagccacagaggt

SEQ ID NO: 675554 - DNA, 120 bp, Artificial Sequence
  ENSG00000186103_25 (sequence is synthesized)
taaatagaagaaatcatgagtaaaattggaaaacacttttaactgaaaaaaacaaaagcacaacaaaccaaaacatgggatgaagctaaatcaatgcttagaaggaaatttatagcttca

SEQ ID NO: 675555 - DNA, 120 bp, Artificial Sequence
  ENSG00000186103_26 (sequence is synthesized)
aatacttatatacatattttttaaaagtagctttacataggaaggaagtggcatagttttatcaatatctgtcaaattaaacttcaaggcaaaacttttttattgagatggagtcttgct

SEQ ID NO: 675556 - DNA, 79 bp, Artificial Sequence
  ENSG00000186103_27 (sequence is synthesized)
tctcagcctcccaaagggctgagattacaggtgtgagctacctcacctggccaaaacagtttttttagaaatgaagtat

SEQ ID NO: 675557 - DNA, 120 bp, Artificial Sequence
  ENSG00000186103_28 (sequence is synthesized)
acctcacctggccaaaacagtttttttagaaatgaagtatattagacaacaacaaaaggaacaactaacctgaaatatataataactttgaacttaaatatacttaacaacatataccaa

SEQ ID NO: 675558 - DNA, 120 bp, Artificial Sequence
  ENSG00000186103_29 (sequence is synthesized)
aaatatatgaggcaaattttagcaaaaattaaaattcttaagaaaacttcactaatatatagtcataatgtggtatattcatagaacattctcaataattgataataacagtccaaagaa

SEQ ID NO: 675559 - DNA, 120 bp, Artificial Sequence
  ENSG00000186103_30 (sequence is synthesized)
agcagaaagaaggaaagcctagaacagaaataaatgaaatagagaatagaaaagcaatacagaaaaaaaattatgaaatcaaaagctggttctttgaaaagatctacaaaatggcaaaca

SEQ ID NO: 675560 - DNA, 120 bp, Artificial Sequence
  ENSG00000186103_31 (sequence is synthesized)
tttagctagattgaccaccccctcaaaagactcaaattactagaatcagaaacaaaagtcaagattttattaccaaacttatagaaataaaaattattagaaagaaatactatgaacaat

SEQ ID NO: 675561 - DNA, 120 bp, Artificial Sequence
  ENSG00000186103_32 (sequence is synthesized)
tgaatgccaacaaattagataaatgaaatggacaaattcctaggaagacacagaataccaaatctgactccacaagaaatagatgttgtgaatagagcttgctatggtatgaatgtgtcc

SEQ ID NO: 675562 - DNA, 120 bp, Artificial Sequence
  ENSG00000186103_33 (sequence is synthesized)
cccacagctcatgcgttggaaacttaatccccaaagcaacagctttgagaggtgagacctttaagggttactaggcagagcccccatgaatggattaatgccattattgtgggagtgggt

SEQ ID NO: 675563 - DNA, 120 bp, Artificial Sequence
  ENSG00000186103_34 (sequence is synthesized)
tagttatctcagaagtgggttcctgataaaaggatgagttcggccttcttcttccccaaaatctttatccccacccccacctctatctttctctctctctcttacctcctcctctccctt

SEQ ID NO: 675564 - DNA, 120 bp, Artificial Sequence
  ENSG00000186103_35 (sequence is synthesized)
ccttctgccatgggaggatgaaacatgaaggccctggccaggtgtggcccctccatcttccgtctgagactggaagacttcccagccttcagaactgtaagaaataaatctctcttcata

SEQ ID NO: 675565 - DNA, 120 bp, Artificial Sequence
  ENSG00000186104_0 (sequence is synthesized)
cctgggtctcagggctgctgtggagttcgcacctccagctcgggccgatgtggaagctttggagagctgaagagggcgcggcggcgctcggcggcgcgctcttcctgctgctcttcgcgc

SEQ ID NO: 675566 - DNA, 120 bp, Artificial Sequence
  ENSG00000186104_1 (sequence is synthesized)
taggggtccgccagctgctgaagcagaggcggccgatgggcttccccccggggccgccggggctgccatttatcggcaacatctattccctggcagcctcatccgagcttccccatgtct

SEQ ID NO: 675567 - DNA, 120 bp, Artificial Sequence
  ENSG00000186104_2 (sequence is synthesized)
acatgagaaagcagagccaggtgtacggagagatcttcagtttagatcttggaggcatatcaactgtggttctaaatggctatgatgtagtaaaggaatgccttgttcatcaaagcgaaa

SEQ ID NO: 675568 - DNA, 120 bp, Artificial Sequence
  ENSG00000186104_3 (sequence is synthesized)
tttttgcagacagaccatgccttcctttattcatgaagatgacaaaaatgggaggcttactcaattccagatatggccgaggatgggttgatcacagacgattagctgtaaacagttttc

SEQ ID NO: 675569 - DNA, 120 bp, Artificial Sequence
  ENSG00000186104_4 (sequence is synthesized)
gatattttggatatggccaaaagtcttttgaatctaaaatcttggaagaaaccaaatttttcaatgatgctattgaaacatacaaaggtagaccttttgactttaaacagttaataacga

SEQ ID NO: 675570 - DNA, 120 bp, Artificial Sequence
  ENSG00000186104_5 (sequence is synthesized)
atgctgtttcaaacataaccaatctgatcatttttggagaacgattcacttatgaagacaccgattttcagcacatgattgagttatttagtgaaaatgtggaactagctgccagtgcct

SEQ ID NO: 675571 - DNA, 120 bp, Artificial Sequence
  ENSG00000186104_6 (sequence is synthesized)
cagtcttcttgtataatgcctttccatggattggcatcctgccttttggaaaacatcaacagctgtttagaaatgcagctgtagtctatgattttctctccagactcattgaaaaagctt

SEQ ID NO: 675572 - DNA, 120 bp, Artificial Sequence
  ENSG00000186104_7 (sequence is synthesized)
cagtcaacagaaagcctcagctacctcagcattttgttgatgcttatttagatgagatggatcaaggtaaaaatgacccatcatctactttctccaaagaaaacctaattttctcagtgg

SEQ ID NO: 675573 - DNA, 120 bp, Artificial Sequence
  ENSG00000186104_8 (sequence is synthesized)
gtgaactcatcattgctggaactgaaactacaaccaatgtgctacggtgggcgattcttttcatggccctttatcctaatattcaaggacaagttcagaaagagattgatttaattatgg

SEQ ID NO: 675574 - DNA, 120 bp, Artificial Sequence
  ENSG00000186104_9 (sequence is synthesized)
gattctgtaatatagttccattagggattttccatgcaacctctgaagatgcagttgtacgtggttattccattcctaaaggcacaacagtaattacaaatctttattctgtacactttg

SEQ ID NO: 675575 - DNA, 120 bp, Artificial Sequence
  ENSG00000186104_10 (sequence is synthesized)
atgaaaagtactggagagacccagaagtgttccatcctgagcgatttctggacagcagtggatattttgccaagaaggaagctttggttcctttttccctaggaagaagacattgtcttg

SEQ ID NO: 675576 - DNA, 120 bp, Artificial Sequence
  ENSG00000186104_11 (sequence is synthesized)
gagaacacttggctcggatggaaatgttcttgttttttacagcattgcttcagaggtttcatttgcattttccacatgaactagttccagatctgaagcccaggttaggcatgacattgc

SEQ ID NO: 675577 - DNA, 120 bp, Artificial Sequence
  ENSG00000186104_12 (sequence is synthesized)
agccccaaccctacctcatctgtgctgaaagacgctgaaactgcctgggatgttttcgggaacaagaatgtatatttgccttatccctgaacttggtttaatcaaatcaatgtgtgtatt

SEQ ID NO: 675578 - DNA, 120 bp, Artificial Sequence
  ENSG00000186104_13 (sequence is synthesized)
agaataaaagtcacagcatcaaaaagccaaatgaacacagatgtgtcttaaaatagtactagagcagaaacaagcactagtcgtgattgtttttcaagattttatgacttctggggtaaa

SEQ ID NO: 675579 - DNA, 120 bp, Artificial Sequence
  ENSG00000186104_14 (sequence is synthesized)
attctctgttgagagacacaaaggtgcaaatgatgggtgttgcttaaaatgctaagaagggtcatggacgccctaagctgagcatcttgtttagtaccaggtactttcatcccttcttga

SEQ ID NO: 675580 - DNA, 120 bp, Artificial Sequence
  ENSG00000186104_15 (sequence is synthesized)
ctccatctgccttctgtcctggggggccttggttccagaaaccagctcccttctgatcaggtattgtcattaataaactgtgtggtaccagtccagtttaatagaggactacagaagaaa

SEQ ID NO: 675581 - DNA, 120 bp, Artificial Sequence
  ENSG00000186104_16 (sequence is synthesized)
ttaaaacacaaataaatgagttaggactatagaggtattttagatatggtgggagatggtagaagaaatatgtatttaatgtagagcctgccagtgctttcatatcttgcttcctgctct

SEQ ID NO: 675582 - DNA, 120 bp, Artificial Sequence
  ENSG00000186104_17 (sequence is synthesized)
gtcttcataagaactgtgtcattcttcttataaatgagggtctgtgtgaccctgagtgtccatcttcatagcagttaagtagataggacattacaataatatatttaaaatttaaaatga

SEQ ID NO: 675583 - DNA, 120 bp, Artificial Sequence
  ENSG00000186104_18 (sequence is synthesized)
cgcatgccctcaggtgcgggcgtcttgcgagtcggcctcgcagctctgtggaagctgcacgcggcttgtcggaaaatcaaggcgttctgagttctagatggttaatagcaggttcttcgg

SEQ ID NO: 675584 - DNA, 120 bp, Artificial Sequence
  ENSG00000186104_19 (sequence is synthesized)
tgtctgcagtcgacgaacgactggtgtaggcgtttgctgtgagaatggagaatgcaggggaacgcccctgactgagaagcgggccctgggaaacgattgtgaacgcgtgaatgaattgat

SEQ ID NO: 675585 - DNA, 120 bp, Artificial Sequence
  ENSG00000186104_20 (sequence is synthesized)
gactaaaatccgctgcgggggtcctacagcgcagatggtaatgccgttctgactggctgggaacggcaccttagcagatacttaaaaggcgccttctgtgtgccactgtcactgccaact

SEQ ID NO: 675586 - DNA, 120 bp, Artificial Sequence
  ENSG00000186104_21 (sequence is synthesized)
tggtgactcatttaaaactcataaccagccggtgaggtcggtacttcgctcctcctcattctgcggaggggaaagcagcacggaaatgccctgtgactggcagcggaaaaggcgaccacc

SEQ ID NO: 675587 - DNA, 120 bp, Artificial Sequence
  ENSG00000186104_22 (sequence is synthesized)
tttctcaagccatggctcctccttgctttttatgatccctggtgtccacaatttgaagctctaccctgaagctctatcctgaaatacatttgccctctgttctgccttcatagtgacaca

SEQ ID NO: 675588 - DNA, 120 bp, Artificial Sequence
  ENSG00000186104_23 (sequence is synthesized)
actttaagttcatggctcttttactatccttgtggaatggcatctttttattgtctctgctaaagttcccttctgcgaagagactttcctttaataggactacattactgcattgtcccc

SEQ ID NO: 675589 - DNA, 120 bp, Artificial Sequence
  ENSG00000186104_24 (sequence is synthesized)
actttgctcggctggtagccattcccttttacttagaactcttctactgtcacttttgactaataccactgcttatggcaggcagtccatgttcttttcccaaggttctggatataccta

SEQ ID NO: 675590 - DNA, 120 bp, Artificial Sequence
  ENSG00000186104_25 (sequence is synthesized)
gtgctcacttggcagagcccacccgtgtgccaaagactctggtggccccattactcagctggttagttgttaccacttggcagtcctcatgacctttgctgatataactttctgctgaac

SEQ ID NO: 675591 - DNA, 120 bp, Artificial Sequence
  ENSG00000186104_26 (sequence is synthesized)
ttttgttctctgctaagcctcctgttttcttctgaagtagtgtgtaccatggctaaatctccttgacttgtttgcacagggataaggcttgtctcagtattttggctgtaaaatgctatc

SEQ ID NO: 675592 - DNA, 120 bp, Artificial Sequence
  ENSG00000186104_27 (sequence is synthesized)
ctgaaaggatggcaataagcaatctttacattccactgataagggaatatcgttctctcactgactggcctcttatattgggttaactagaatagactacaggaggtgtgacattgtaag

SEQ ID NO: 675593 - DNA, 120 bp, Artificial Sequence
  ENSG00000186104_28 (sequence is synthesized)
tgaacctggggtgaggcacagggcagacaactccagcaaggcatggaatggatcctgttttgccttccccttaactgagaggcagccacctaacctatgtggtaaatgcctttcctccaa

SEQ ID NO: 675594 - DNA, 120 bp, Artificial Sequence
  ENSG00000186104_29 (sequence is synthesized)
ggttaggttcccttagagccctcttcattcactttgtggaatacagagagccaaatacaaatgggcttagttacaatatgtttatacttcaaagttgtctctcaggtatttgacaatcct

SEQ ID NO: 675595 - DNA, 120 bp, Artificial Sequence
  ENSG00000186104_30 (sequence is synthesized)
ctccctcactagcctcattcatcttggaaatagaaggagattcctagatatcattgaacattttgaggtaaaatgaatcataaaagagcatatatatcaaatatattttctatggcaata

SEQ ID NO: 675596 - DNA, 120 bp, Artificial Sequence
  ENSG00000186104_31 (sequence is synthesized)
gtttaatggcaaaccttaaactagacccaggcctcccgagtccagtacccttttcattatactgttggtaagactgtgactttaggcactgaatggcataatgaaatcacacagttttgc

SEQ ID NO: 675597 - DNA, 120 bp, Artificial Sequence
  ENSG00000186104_32 (sequence is synthesized)
atgccttatagaaggagggcactctgaacattgtcagttgagtaataactgcctatattttcagggacgtaacaaatcctggaagagccgcacttaccacttgtagatttccatggttat

SEQ ID NO: 675598 - DNA, 120 bp, Artificial Sequence
  ENSG00000186104_33 (sequence is synthesized)
gtctaggtttctagaatagaaagtcactaatggtttacgttcctttcatggttcacgaatagtttacgttgttaaagggaagctggacgagataataaagatcttcagtttagatcttgg

SEQ ID NO: 675599 - DNA, 120 bp, Artificial Sequence
  ENSG00000186104_34 (sequence is synthesized)
gcctgacgctagcggtgaagaaggcagatacagccttttaaggagttggcagatgagtgggagagagaaaactaatctcattatcggccacaggctgtggtcagtgttttgaaggaaaag

SEQ ID NO: 675600 - DNA, 120 bp, Artificial Sequence
  ENSG00000186105_0 (sequence is synthesized)
gtggaggtcagcagtgccacagaacaaactggagttaagaaatgtcgttcttcagatttaaaaagaaaacctttactgaatcagctgagtgttaataatacgaatttccttttcttgcca

SEQ ID NO: 675601 - DNA, 120 bp, Artificial Sequence
  ENSG00000186105_1 (sequence is synthesized)
attctgatctgaacagaaaatccaagaacagggatatgtgtggattacagttttctctgccttgcctacgactgtttctggttgttacctgttatcttttattattactccacaaagaaa

SEQ ID NO: 675602 - DNA, 120 bp, Artificial Sequence
  ENSG00000186105_2 (sequence is synthesized)
tacttggatgttcgtctgtttgtcagctctgcactgggagacaaattaactgccgtaacttaggcctttcgagtattcctaagaattttcctgaaagtacagtttttctgtatctgactg

SEQ ID NO: 675603 - DNA, 120 bp, Artificial Sequence
  ENSG00000186105_3 (sequence is synthesized)
ggaataatatatcttatataaatgaaagtgaattaacaggacttcattctcttgtagcattgtatttggataattctaacattctgtatgtatatccaaaagcctttgttcaattgaggc

SEQ ID NO: 675604 - DNA, 120 bp, Artificial Sequence
  ENSG00000186105_4 (sequence is synthesized)
atctatattttctatttctaaataataatttcatcaaacgcttagatcctggaatatttaagggacttttaaatcttcgtaatttatatttacagtataatcaggtatcttttgttccga

SEQ ID NO: 675605 - DNA, 120 bp, Artificial Sequence
  ENSG00000186105_5 (sequence is synthesized)
gaggagtatttaatgatctagtttcagttcagtacttaaatctacaaaggaatcgcctcactgtccttgggagtggtacctttgttggtatggttgctcttcggatacttgatttatcaa

SEQ ID NO: 675606 - DNA, 120 bp, Artificial Sequence
  ENSG00000186105_6 (sequence is synthesized)
acaataacattttgaggatatcagaatcaggctttcaacatcttgaaaaccttgcttgtttgtatttaggaagtaataatttaacaaaagtaccatcaaatgcctttgaagtacttaaaa

SEQ ID NO: 675607 - DNA, 120 bp, Artificial Sequence
  ENSG00000186105_7 (sequence is synthesized)
gtcttagaagactttctttgtctcataatcctattgaagcaatacagccctttgcatttaaaggacttgccaatctggaatacctcctcctgaaaaattcaagaattaggaatgttacta

SEQ ID NO: 675608 - DNA, 120 bp, Artificial Sequence
  ENSG00000186105_8 (sequence is synthesized)
gggatgggtttagtggaattaataatcttaaacatttgatcttaagtcataatgatttagagaatttaaattctgacacattcagtttgttaaagaatttaatttaccttaagttagata

SEQ ID NO: 675609 - DNA, 120 bp, Artificial Sequence
  ENSG00000186105_9 (sequence is synthesized)
acagaataattagcattgataatgatacatttgaaaatatgggagcatctttgaagatccttaatctgtcatttaataatcttacagccttgcatccaagggtccttaagccgttgtctt

SEQ ID NO: 675610 - DNA, 120 bp, Artificial Sequence
  ENSG00000186105_10 (sequence is synthesized)
cattgattcatcttcaggcaaattctaatccttgggaatgtaactgcaaacttttgggccttcgagactggctagcatcttcagccattactctaaacatctattgtcagaatcccccat

SEQ ID NO: 675611 - DNA, 120 bp, Artificial Sequence
  ENSG00000186105_11 (sequence is synthesized)
ccatgcgtggcagagcattacgttatattaacattacaaattgtgttacatcttcaataaatgtatccagagcttgggctgttgtaaaatctcctcatattcatcacaagactactgcgc

SEQ ID NO: 675612 - DNA, 120 bp, Artificial Sequence
  ENSG00000186105_12 (sequence is synthesized)
taatgatggcctggcataaagtaaccacaaatggcagtcctctggaaaatactgagactgagaacattactttctgggaacgaattcctacttcacctgctggtagattttttcaagaga

SEQ ID NO: 675613 - DNA, 120 bp, Artificial Sequence
  ENSG00000186105_13 (sequence is synthesized)
atgcctttggtaatccattagagactacagcagtgttacctgtgcaaatacaacttactacttctgttaccttgaacttggaaaaaaacagtgctctaccgaatgatgctgcttcaatgt

SEQ ID NO: 675614 - DNA, 120 bp, Artificial Sequence
  ENSG00000186105_14 (sequence is synthesized)
cagggaaaacatctctaatttgtacacaagaagttgagaagttgaatgaggcttttgacattttgctagcttttttcatcttagcttgtgttttaatcatttttttgatctacaaagttg

SEQ ID NO: 675615 - DNA, 120 bp, Artificial Sequence
  ENSG00000186105_15 (sequence is synthesized)
ttcagtttaaacaaaaactaaaggcatcagaaaactcaagggaaaatagacttgaatactacagcttttatcagtcagcaaggtataatgtaactgcctcaatttgtaacacttccccaa

SEQ ID NO: 675616 - DNA, 120 bp, Artificial Sequence
  ENSG00000186105_16 (sequence is synthesized)
attctctagaaagtcctggcttggagcagattcgacttcataaacaaattgttcctgaaaatgaggcacaggtcattctttttgaacattctgctttataactcaactaaatattgtcta

SEQ ID NO: 675617 - DNA, 120 bp, Artificial Sequence
  ENSG00000186105_17 (sequence is synthesized)
taagaaacttcagtgccatggacatgatttaaactgaaacctccttatataattatatactttagttggaaatataatgaattatatgaggttagcattattaaaatatgtttttaataa

SEQ ID NO: 675618 - DNA, 120 bp, Artificial Sequence
  ENSG00000186106_0 (sequence is synthesized)
accgcctccttgaagctgccgctgtcgctgctgctcgttcgagtcgcagatccttgccagcacattacagaatatttttgttgaaccttcttgagaattcagagaaactgctgagtgacc

SEQ ID NO: 675619 - DNA, 120 bp, Artificial Sequence
  ENSG00000186106_1 (sequence is synthesized)
actgaacgaaaagatctaatcttaaggcttacgcgtgttccatccaccacatcagaacaatgtcgtatgtttttgtaaatgattcttctcagactaacgtgcccttgctgcaagcctgta

SEQ ID NO: 675620 - DNA, 120 bp, Artificial Sequence
  ENSG00000186106_2 (sequence is synthesized)
ttgatggggactttaattattccaagcggcttttggaaagtggctttgacccaaatattcgtgacagcaggggcagaacaggccttcaccttgcagcagctcgagggaatgtagacatct

SEQ ID NO: 675621 - DNA, 120 bp, Artificial Sequence
  ENSG00000186106_3 (sequence is synthesized)
gccagttactgcataaattcggtgccgatcttctggccacagattatcaaggaaacacagctcttcacctctgtggccatgtggatactatccaatttttggtttccaatggactcaaaa

SEQ ID NO: 675622 - DNA, 120 bp, Artificial Sequence
  ENSG00000186106_4 (sequence is synthesized)
ttgatatttgcaatcatcaaggtgctacccctttagttctggcaaagcgcagaggagtaaataaagatgtcatccgattgctggaatctttggaagaacaggaggtgaaaggatttaaca

SEQ ID NO: 675623 - DNA, 120 bp, Artificial Sequence
  ENSG00000186106_5 (sequence is synthesized)
gaggaacccactcgaaactggagaccatgcaaacagctgagagtgaaagtgccatggaaagccattcactcctcaatcccaacctgcagcaaggtgaaggagtcctctccagcttccgaa

SEQ ID NO: 675624 - DNA, 120 bp, Artificial Sequence
  ENSG00000186106_6 (sequence is synthesized)
ccacgtggcaggagtttgtggaggatctgggcttctggagagtattgctgttgatcttcgtcattgctttgctgtctcttggcattgcttattatgtgagtggggtgctacccttcgtgg

SEQ ID NO: 675625 - DNA, 120 bp, Artificial Sequence
  ENSG00000186106_7 (sequence is synthesized)
aaaaccagcctgaactggtgcattaaaggagctcatggaagatgaggcaattaattgcctgtttcctggcttccaatgtttgttctcagtttctcagaatttttcttagcgcaaagcagt

SEQ ID NO: 675626 - DNA, 120 bp, Artificial Sequence
  ENSG00000186106_8 (sequence is synthesized)
gagggcagtacatgttctttttgcatttttaattattgtaatccttttagataatgatgtgttcatttgaactaactacatactatgatcaagtatattgcatcctaacgctacctctga

SEQ ID NO: 675627 - DNA, 120 bp, Artificial Sequence
  ENSG00000186106_9 (sequence is synthesized)
ctcaacctgactttgtaggaaagcctacacgtagccttgtttgataaaaacacggaagtgactagagaatggaagataaaggaagaagctaggaagtccttgctatcaaaaccttatcct

SEQ ID NO: 675628 - DNA, 120 bp, Artificial Sequence
  ENSG00000186106_10 (sequence is synthesized)
aatataggaccaattgaagtattcaaaaagaaaaacagtatcttatatgattagtttttgttggtggttttgttttcatttatttttgcaagagccactttttatttactttctctaggg

SEQ ID NO: 675629 - DNA, 120 bp, Artificial Sequence
  ENSG00000186106_11 (sequence is synthesized)
aaaacttgaagtacttttttcaaatcttgtgtgcaaattagtattgttagcatctatttggcttattttagtatttttaagtctagtcacaaaccaaacaaaacttttgaaaatgagcta

SEQ ID NO: 675630 - DNA, 120 bp, Artificial Sequence
  ENSG00000186106_12 (sequence is synthesized)
tattttgttcaaagataattgatttgatcttatatttatttgtttttaggataatttttgatctttttgtaaactgctttgcttgttaatatctgtgaaaaataaatgagttcattttgt

SEQ ID NO: 675631 - DNA, 120 bp, Artificial Sequence
  ENSG00000186106_13 (sequence is synthesized)
tcactttccaattttcccgagtatcctagtcatcaaagataacagttcatcagaattacagtcagaaaatcctttttctactgaatagttagcagggaaaaataattctgatatttaact

SEQ ID NO: 675632 - DNA, 120 bp, Artificial Sequence
  ENSG00000186106_14 (sequence is synthesized)
gtcataattctgtagtgctattatagtgaaaaactcagttctataagctagctgtgttgtcacagttttatcatagttcataattatttcatgtgcaatcctatttggaggccctgttag

SEQ ID NO: 675633 - DNA, 120 bp, Artificial Sequence
  ENSG00000186106_15 (sequence is synthesized)
acttttaacaatcccatccatatctgtaattctctgatggcaagaatggatggagcatttctgagttaacagtgctggacagtatcgtactgggtgtcataaactctttatgaatggtaa

SEQ ID NO: 675634 - DNA, 120 bp, Artificial Sequence
  ENSG00000186106_16 (sequence is synthesized)
tattatgtaaattgaaatctggccctcaaactatattgcagctttcagcagtatgtttgaaggcctcttttgttaatgattctgtaatgtatgaattatgttcttgagtggttaaaaaag

SEQ ID NO: 675635 - DNA, 120 bp, Artificial Sequence
  ENSG00000186106_17 (sequence is synthesized)
aatatgaaggcttgataattatttattgggtaaagtcaggaaattgtagtgaaagaactaatggttttgttttttggaataaaggcacctaagctattgctaattgaattgctgctagaa

SEQ ID NO: 675636 - DNA, 120 bp, Artificial Sequence
  ENSG00000186106_18 (sequence is synthesized)
ttagaaattatgctttagaatagaattggtatttctgtgattctttttgcttcttggtattttctcttgtatctatgtatctagtattgaggcttgctctttcatgtggctttatcctct

SEQ ID NO: 675637 - DNA, 120 bp, Artificial Sequence
  ENSG00000186106_19 (sequence is synthesized)
ctttaatagctgttgtaaaattcctgagtaactggctgcttcaggatcagcttgcagagtcttgcttttaggttagatacaaacaaagtaaatcatagttggtgtaaatccagcaaaaaa

SEQ ID NO: 675638 - DNA, 120 bp, Artificial Sequence
  ENSG00000186106_20 (sequence is synthesized)
cagctggctttggaatggagaacactacaattcaaatttgaagtatattcagaagaaaactttggaattagctttacatttgtttgtaaatctaaacaaatatgcaaaattggtcaaaat

SEQ ID NO: 675639 - DNA, 120 bp, Artificial Sequence
  ENSG00000186106_21 (sequence is synthesized)
gtaagtatatagcatttttaaagattaatggttccttttatgtgctgatttctttgtattctgttctctgcattcatcattcaggaataccaccaataaatgtatttatatatcccttaa

SEQ ID NO: 675640 - DNA, 120 bp, Artificial Sequence
  ENSG00000186106_22 (sequence is synthesized)
ggtacttggcccggggcctgtgggcagcgcctgggctagagccacttgatatctcctgcaccgtccctgtagcactggaggtccagtaggcctggccggggccctgaggggcgagggtgc

SEQ ID NO: 675641 - DNA, 120 bp, Artificial Sequence
  ENSG00000186106_23 (sequence is synthesized)
ccgggcttcccacaccttccgcggcgactggagggagccgggccgaggaagcgaccgcgggtccgtgatggcttcttcgcggtctgtgtgttcacgagggccgggcagaggcctgcgagg

SEQ ID NO: 675642 - DNA, 120 bp, Artificial Sequence
  ENSG00000186106_24 (sequence is synthesized)
gttctcgtttgcgcttgcgggttagggctgtggtccggggaacccctgggcagcgcgggcagccctggctcgcggttaatcggggggtggagcgcggaagccacgccgcaggtccagctg

SEQ ID NO: 675643 - DNA, 120 bp, Artificial Sequence
  ENSG00000186106_25 (sequence is synthesized)
ctcggccggggcgagacggtgctttcgcggcgtgtgcttgcaggagcgcacagttcaggcgccgggacaagctgttggggtgtgagtgagctctccagaatggcacatggctccggggtg

SEQ ID NO: 675644 - DNA, 120 bp, Artificial Sequence
  ENSG00000186106_26 (sequence is synthesized)
cccgggttaaaaggaaggatttgcacaccttccacttagggctcgggtaatcgcaaacttcctcccttaattggcttgcagtgctaaaaagcagatcgttctctctgaggttttcccaac

SEQ ID NO: 675645 - DNA, 75 bp, Artificial Sequence
  ENSG00000186106_27 (sequence is synthesized)
gggtgaatgcaccctccacctcccaggctcgagtgatcctcctgcctcagccttgaatatctgggacaacaggca

SEQ ID NO: 675646 - DNA, 120 bp, Artificial Sequence
  ENSG00000186106_28 (sequence is synthesized)
cttttgaaggtaggaggaaaaagaagcgagtatggagtactgaaggccaagtaaagagtttttcagggagaaagtgaccaactgtgtctcctcctgctgattgacaagtcaagtaagatg

SEQ ID NO: 675647 - DNA, 120 bp, Artificial Sequence
  ENSG00000186106_29 (sequence is synthesized)
aagactaggagatgaccattggatttagtaataggaaggtccttggtgaccttgcaagagcactttcaggagaatagtgaggaagaaaacctgattggtgtggtttcaagagacaacagg

SEQ ID NO: 675648 - DNA, 120 bp, Artificial Sequence
  ENSG00000186106_30 (sequence is synthesized)
aggaagagcattggagactgcagtatggacagctctttggaagagtatttctacccatggcaaattccaccacaccgtcaaggctgagaatgggaagcttgtcatcaatggaaatcccat

SEQ ID NO: 675649 - DNA, 120 bp, Artificial Sequence
  ENSG00000186106_31 (sequence is synthesized)
caccatcttccaggagcaagatcctaccaaaatcaaatggggtgatgctgaagctgagtatgccgtggagtccactggcatcttcatgaccatagagaaggctggggctcacttaatggg

SEQ ID NO: 675650 - DNA, 120 bp, Artificial Sequence
  ENSG00000186106_32 (sequence is synthesized)
ggagccaaaagggtcatcatctctaccccctctgctgatgcccccatattcataatgggcatgatccctgagaagtctgaaaacagcctcaagatcatcagcaatgccttctgtaccacc

SEQ ID NO: 675651 - DNA, 120 bp, Artificial Sequence
  ENSG00000186106_33 (sequence is synthesized)
taatcccccggccaagcccatccatgacaactttggcattgtggaaggacttgtgaccacaatccatgctgccactcctgcccagaagactcgatggcctctgtgggaaactgtggcata

SEQ ID NO: 675652 - DNA, 120 bp, Artificial Sequence
  ENSG00000186106_34 (sequence is synthesized)
tgtctgtggggctctccagaacatcatccctgcatctactggtgttgccaaggctgtgggcaaggccatccccgagctgaacaggaagctcactagcatggccttccgtgtccttctgca

SEQ ID NO: 675653 - DNA, 120 bp, Artificial Sequence
  ENSG00000186106_35 (sequence is synthesized)
aacgtgttggttgtggacctgacctgccatctggagaaacctgccaaatatgatgacatcaaaaaggtggtgaagcaggcgtcagagggcccctcaagggcatcttgggctacactgaac

SEQ ID NO: 675654 - DNA, 120 bp, Artificial Sequence
  ENSG00000186106_36 (sequence is synthesized)
accaggttgtttcctctgactttaacagtgacactcactcttccactttcgatgctggggctgccattgccctcagtgaccactttgtcaagctcatttcctcgtacaacagtgaatttg

SEQ ID NO: 675655 - DNA, 120 bp, Artificial Sequence
  ENSG00000186106_37 (sequence is synthesized)
gctacagcaacagggtggtggcccatatggcctccaaggagtaagactgctcgacaaccagccccagtgagagcacaagaggaagaaagagaccttcagcttctgggcagtccctgccat

SEQ ID NO: 675656 - DNA, 120 bp, Artificial Sequence
  ENSG00000186106_38 (sequence is synthesized)
gctcagtcccccaccacactgggaatctcccctcttcacagtttccatgcagaccccacaaagagctctatcttgtcgtgtaccatcaataaagtcctctgtactcaaaaaaaaaaaaaa

SEQ ID NO: 675657 - DNA, 120 bp, Artificial Sequence
  ENSG00000186106_39 (sequence is synthesized)
atccaggccatctaatctctaggtcagtgtcctgtgctcctgagcctcagaaggcaagaaagaagggatacagacgtcagcgtccctgttgggtggggctgtttccgtcacgacttgtgt

SEQ ID NO: 675658 - DNA, 120 bp, Artificial Sequence
  ENSG00000186106_40 (sequence is synthesized)
catggagcatcatctcaaagctctgcagttaggaggcagagggacctgctaccacctgtcccctcctctccagtcctgccctgcaggcagcccgggcacctgctgtcttcctggcctccc

SEQ ID NO: 675659 - DNA, 120 bp, Artificial Sequence
  ENSG00000186106_41 (sequence is synthesized)
agatcctcaagatggagctccaggaaccatcccctcctccgcccgggcaggatgccacctccacaaggcaaatcacatccatttgatcttgaacaaaaggctgccgtggtgtctgaaatg

SEQ ID NO: 675660 - DNA, 120 bp, Artificial Sequence
  ENSG00000186106_42 (sequence is synthesized)
acaactcccaggcgggtgatgtcatgctgttttgtttgtctccatggactgtggggatccaatttcagttgtgaagaaaacggtctggggaaaaaagttacttcattcggaaaattccga

SEQ ID NO: 675661 - DNA, 120 bp, Artificial Sequence
  ENSG00000186106_43 (sequence is synthesized)
gaagccataaatacagtttgcagctgaggaaagcactttcacactcagacaatggatttgggtggaagaaaagacttcccgcccctaaggctgagccccttcactcccacccatggccac

SEQ ID NO: 675662 - DNA, 120 bp, Artificial Sequence
  ENSG00000186106_44 (sequence is synthesized)
cggcagcccgcttctgccagcagatagatgtgtgcatggctctggcaagatctcaagcaaccccccttccccaaggagactctccgtgacccagtggcaagttggcaggggatgtgtttt

SEQ ID NO: 675663 - DNA, 120 bp, Artificial Sequence
  ENSG00000186106_45 (sequence is synthesized)
ccctggttctcatcctaaattgtctcctgcccagagtccatccctgaagtatcaggcacttccctctcgtaaatggttgacctgcatctctgagctgctgttaaagcaaatttaaaataa

SEQ ID NO: 675664 - DNA, 80 bp, Artificial Sequence
  ENSG00000186111_0 (sequence is synthesized)
ctcccttggccggcggcgcttgttgttcggcggcggcggtcgcagctcgggtccccctcgggcgcccccgccgccgtccg

SEQ ID NO: 675665 - DNA, 120 bp, Artificial Sequence
  ENSG00000186111_1 (sequence is synthesized)
gcgctgaggcgggggccgtgccctcggaggcggcgtgggcggcagagagcggggcggcggcaggtttggctcagaagaaggcggccccaacagaggttctgtccatgacggcacagccgg

SEQ ID NO: 675666 - DNA, 120 bp, Artificial Sequence
  ENSG00000186111_2 (sequence is synthesized)
gccctggccatgggaagaagttgggccatcgaggtgtggacgcatccggcgaaaccacctacaagaagaccacctcctccaccctgaagggtgccatccagctgggcatcggctacaccg

SEQ ID NO: 675667 - DNA, 120 bp, Artificial Sequence
  ENSG00000186111_3 (sequence is synthesized)
tgggccacctgagctccaagcccgaacgcgacgtgctcatgcaggacttctacgtggtggagagcatcttcttccccagcgaaggcagcaacctcacccccgcccaccacttccaggact

SEQ ID NO: 675668 - DNA, 120 bp, Artificial Sequence
  ENSG00000186111_4 (sequence is synthesized)
tccgcttcaagacctatgcacctgtcgccttccgctacttccgggagctctttgggatccggccagatgattacttgtactccctgtgcaatgagccgctgatcgagctgtccaacccgg

SEQ ID NO: 675669 - DNA, 120 bp, Artificial Sequence
  ENSG00000186111_5 (sequence is synthesized)
gcgccagtggctccctcttctacgtcaccagcgacgacgagttcatcatcaagaccgtcatgcacaaggaggccgagttcctgcagaagctgctccctggctactacatgaacctcaacc

SEQ ID NO: 675670 - DNA, 120 bp, Artificial Sequence
  ENSG00000186111_6 (sequence is synthesized)
agaacccgcggacgctgctgcccaagttctatgggctgtactgcgtgcagtcggggggcaagaacatccgcgtcgtggtcatgaacaacatcctgccccgcgtggtcaagatgcacctca

SEQ ID NO: 675671 - DNA, 120 bp, Artificial Sequence
  ENSG00000186111_7 (sequence is synthesized)
agttcgacctcaagggctccacctacaagcggcgcgccagcaagaaggagaaggagaagagcttccccacctacaaggacctggacttcatgcaggacatgcccgaggggctcctgctgg

SEQ ID NO: 675672 - DNA, 120 bp, Artificial Sequence
  ENSG00000186111_8 (sequence is synthesized)
acgccgacaccttcagcgccctggtcaagacgctgcagcgggactgcctggtcctggaaagtttcaagatcatggactacagcctgctgctgggcgtgcacaacatcgaccagcacgagc

SEQ ID NO: 675673 - DNA, 120 bp, Artificial Sequence
  ENSG00000186111_9 (sequence is synthesized)
gcgagcggcaggcgcagggcgcccagagcacctcagatgagaagcggcctgtgggccagaaggcgctctactccacggccatggagtccatccagggtggcgccgcgcgcggggaggcca

SEQ ID NO: 675674 - DNA, 120 bp, Artificial Sequence
  ENSG00000186111_10 (sequence is synthesized)
tcgaatcggatgacacgatgggcgggatccccgctgtgaacggccgcggggagcggctgctgctgcacattggcatcatcgacatcctgcagtcctacaggttcatcaagaaactggagc

SEQ ID NO: 675675 - DNA, 120 bp, Artificial Sequence
  ENSG00000186111_11 (sequence is synthesized)
acacctggaaggccctcgtccacgatggggacacggtgtccgtccaccgccccagcttctatgccgagcgctttttcaagttcatgagcaacacggtctttcggaagaactcctccctga

SEQ ID NO: 675676 - DNA, 120 bp, Artificial Sequence
  ENSG00000186111_12 (sequence is synthesized)
agtcctcgccctccaagaaggggcgcggcggagccttgctagctgtgaaaccgctggggcccaccgctgccttctcggccagccagatccctagcgagcgggaggaggcccagtacgacc

SEQ ID NO: 675677 - DNA, 120 bp, Artificial Sequence
  ENSG00000186111_13 (sequence is synthesized)
tgcggggggcccgcagctaccccacgctggaggacgaaggccggcccgacctcctgccctgcacgccaccttctttcgaagaagccactacagcctccattgccacgactctgtcatcca

SEQ ID NO: 675678 - DNA, 120 bp, Artificial Sequence
  ENSG00000186111_14 (sequence is synthesized)
catccctctccattcctgagcggtccccctcggagacgtcggagcagccgcggtacaggcggcgcacacagtcgtctggacaggatggcaggccgcaggaggagccacccgcggaagagg

SEQ ID NO: 675679 - DNA, 120 bp, Artificial Sequence
  ENSG00000186111_15 (sequence is synthesized)
atctgcagcagattacagtgcaggtggagcctgcgtgcagcgtggagattgtggtccccaaagaggaggacgcaggggtggaggcttccccggccggtgcctctgctgctgttgaagtag

SEQ ID NO: 675680 - DNA, 120 bp, Artificial Sequence
  ENSG00000186111_16 (sequence is synthesized)
aaactgccagccaggcctcagacgaggagggcgcacctgccagccaggcctcggacgaggaggacgcgcccgccaccgacatctactttcccaccgatgagaggagctgggtgtactccc

SEQ ID NO: 675681 - DNA, 120 bp, Artificial Sequence
  ENSG00000186111_17 (sequence is synthesized)
cgctccactatagcgcccaggcccccccggcctccgacggcgagagcgacacataatttctatgcagcccccgacccagagccgagctccacttctgctccggctgcccccgaaggcgct

SEQ ID NO: 675682 - DNA, 120 bp, Artificial Sequence
  ENSG00000186111_18 (sequence is synthesized)
cgctgcccaccccgctgaggcccagagctcgggagatgcccgcctcgccgccccaccggacctcgtcctccccctgcacggatgccgacggccgggcccctccccgacaagcctcccagg

SEQ ID NO: 675683 - DNA, 120 bp, Artificial Sequence
  ENSG00000186111_19 (sequence is synthesized)
cggcaccccggtcggcagcctgcccctgtgagacccaccctcccgagcggccaatcgcatttgagtccttatttggcacagagacggaagcacgtgtgtgccgttttaggaaaagaacaa

SEQ ID NO: 675684 - DNA, 120 bp, Artificial Sequence
  ENSG00000186111_20 (sequence is synthesized)
aaaagacacaaacaaaccaaccagagggagaagagcccctgcccactgcactctttggttctctgctgtgcctgcctgtgtcctgaggaagaagccaggctgttcgcggtggcctctggg

SEQ ID NO: 675685 - DNA, 120 bp, Artificial Sequence
  ENSG00000186111_21 (sequence is synthesized)
ggctggggtcccgagcaactctgcctccatccacgtgggaagcggaccctcctgccctcagcttgggtttgggggcctcagtgcaggacatctggcctgaacatcgactgtggggacagc

SEQ ID NO: 675686 - DNA, 120 bp, Artificial Sequence
  ENSG00000186111_22 (sequence is synthesized)
cctcgccctgccaagcactgcggccactcagcagctatgttcccgccgcagtggggccctgacgcccacctcccaggtgcccctcgagcaaaaacctctggcgcctccaatccagaccca

SEQ ID NO: 675687 - DNA, 120 bp, Artificial Sequence
  ENSG00000186111_23 (sequence is synthesized)
ccacagctggagggccaggcctcctcttccccaggctgccacccacgctggcggagctcagggctggggacttgtccttctcttccaacgtaggccactcagcaactggcatggagggcc

SEQ ID NO: 675688 - DNA, 120 bp, Artificial Sequence
  ENSG00000186111_24 (sequence is synthesized)
caggcaacggagacgttttctccatggcaggacagagcgggaggccgggccttgggccacaggagaccagctcagggcggaaggtcaggctccccgccccctccacgtggagacatggcc

SEQ ID NO: 675689 - DNA, 120 bp, Artificial Sequence
  ENSG00000186111_25 (sequence is synthesized)
tagggggccaggcccggctccacaggagtctccttcaggactggtgtggatgtccgccgcctctttcttgtttaagtgatgtgatgtctccgaggaggggagagaagactttgtttccga

SEQ ID NO: 675690 - DNA, 120 bp, Artificial Sequence
  ENSG00000186111_26 (sequence is synthesized)
ctcatcaccctccaagagggcagcgctcccagtggtgggactcagcccagactgccctggggcagcttcctgggcccgctgcgctcagagggtgctggttggaggccagagctcggcaga

SEQ ID NO: 675691 - DNA, 120 bp, Artificial Sequence
  ENSG00000186111_27 (sequence is synthesized)
gtcacccaccctgcccttccccaggacccctgagaggggcttattggtgatggctgtgggaatcccccacttccaagatgtgcccaggatgtgaggagctggagtggaagctgcaccttt

SEQ ID NO: 675692 - DNA, 120 bp, Artificial Sequence
  ENSG00000186111_28 (sequence is synthesized)
gggaagaattcctctccagacctggcagagcctggtgtggggtctgagacggccggagaacctcccaggcagggctctgtgttttgtctgttacaacctccgtatgacgccacgccaccc

SEQ ID NO: 675693 - DNA, 120 bp, Artificial Sequence
  ENSG00000186111_29 (sequence is synthesized)
gctgttcacgtcccgtcggcctcctgcacagcccacacgctgcgcccggaaggcccctgctgtggagaagccggacccatccccgaggtccccagcgaggacacacactccacgagagca

SEQ ID NO: 675694 - DNA, 120 bp, Artificial Sequence
  ENSG00000186111_30 (sequence is synthesized)
gcccctccactctgcccaggagaggggccgaccctcctcgggaaccggccagccgcgtggctcccagcatccatcaggacaagcccacgtggggtcctccctgcgtgctcagagggtctg

SEQ ID NO: 675695 - DNA, 120 bp, Artificial Sequence
  ENSG00000186111_31 (sequence is synthesized)
tccagccctgggaagcgaccttggcctcagttcacagcctggtgctcatctgctggcaccgggcatccacccatcagcccccgccctgtccctccgaaggacacccagcaggcacccccc

SEQ ID NO: 675696 - DNA, 120 bp, Artificial Sequence
  ENSG00000186111_32 (sequence is synthesized)
ggggaggcaggggcagaggtcagaaggggtgtctgggacctggatggccagcagggacaggggcattgtcatctcaaaggcccaacccccagaggccacaccagtcctcccagggagtcc

SEQ ID NO: 675697 - DNA, 120 bp, Artificial Sequence
  ENSG00000186111_33 (sequence is synthesized)
tcgagtcgccctgcccagagccctggcaccagagacgccaagagcctgtggggtgactcggagcagcaggtgtggccccgggcgggcggcaccgcgtccagggcagcctccctccgctga

SEQ ID NO: 675698 - DNA, 120 bp, Artificial Sequence
  ENSG00000186111_34 (sequence is synthesized)
gtgacacgggacaccagtgcccggccgacgcgcctttgcaggagaaatgtgcaaacctctgtggataccatttcatttccattcttgtgttgtctccaaggcccttttggagatatactt

SEQ ID NO: 675699 - DNA, 120 bp, Artificial Sequence
  ENSG00000186111_35 (sequence is synthesized)
ggtgttggttgtgttttttggttccttttcagagaactgtaaaccgaggctgacgtgctccactgactgtgccgaggggcgggggcaggaggacggcaagacctatttataatatttagc

SEQ ID NO: 675700 - DNA, 120 bp, Artificial Sequence
  ENSG00000186111_36 (sequence is synthesized)
gaactcggtctccctcagatcccccgcgagggaggctgctggacccaccccgctgtcccccatgatagaagtctgtaaataccttggtgaccaatgcccacttcccctcctgggtcacct

SEQ ID NO: 675701 - DNA, 120 bp, Artificial Sequence
  ENSG00000186111_37 (sequence is synthesized)
ctgatggctgctgtccactgagaacgtgggcagtgtccaaattcctgtactgtaaagactaaaaggcgtttgctctgagactgacaaggcggaaacttccatgtgtctcctgccaggctc

SEQ ID NO: 675702 - DNA, 120 bp, Artificial Sequence
  ENSG00000186111_38 (sequence is synthesized)
tgtccccctacgccatcccgacacgtccccgttcccccgaaacctggctcagtgcaatactcccattgccatggggtccttcaccatggtactgtctccacagccctcagtccccacccc

SEQ ID NO: 675703 - DNA, 120 bp, Artificial Sequence
  ENSG00000186111_39 (sequence is synthesized)
aggagaggcgcctgccacctcctcctcatctccggtggttcaatcgctccgcctgtccccaacccagtcccatttttatggccaaactgattctgaaacaaaatgaaactgcaaacctcg

SEQ ID NO: 675704 - DNA, 120 bp, Artificial Sequence
  ENSG00000186111_40 (sequence is synthesized)
tgtgtcttaactccccccagggatgccactccattcctccgccccgtggtctggtgcgtgacaatccaaagcgccgagacgagggtgctgtgtccctcaaacccagagtggtgggcgcct

SEQ ID NO: 675705 - DNA, 120 bp, Artificial Sequence
  ENSG00000186111_41 (sequence is synthesized)
ctgaaaccatacagccactcctggccccaaacactggtttgcatcccaggttcctcgcccacctacccccgccacaccccgtctttttagagatctctctaataaatcgggtaataagca

SEQ ID NO: 675706 - DNA, 120 bp, Artificial Sequence
  ENSG00000186111_42 (sequence is synthesized)
cgtcaccccttttcctgggactggtttgtgcgcgtcctggtctccggatggtacggggggcctgggggccatgtcgtgctgtgtgtctgtgtcctgatgccctgccaggtgggcagcaga

SEQ ID NO: 675707 - DNA, 120 bp, Artificial Sequence
  ENSG00000186111_43 (sequence is synthesized)
gaagggagaagggtcctcggtcctgcccctgccccggcaccccccaccttctgcttggcagtcagctgtccccacctgctccccgccacctccctccgcctctcccacccgaccacgggg

SEQ ID NO: 675708 - DNA, 120 bp, Artificial Sequence
  ENSG00000186111_44 (sequence is synthesized)
gtggccgcctcatccgctgtcctctgttttccttcctcctccggcccacccggcccgccccgtccagttcacggatgggaggtactggatttactctccccgccatcgccgactgcgggc

SEQ ID NO: 675709 - DNA, 120 bp, Artificial Sequence
  ENSG00000186111_45 (sequence is synthesized)
cgtgacgctgagcgcctcggggactgtaagtgaccgcagccggccaccctggggagaaggggcagtgcccctcgggcagcagggagccgcaggtccccggccggaagctcagtgtctgac

SEQ ID NO: 675710 - DNA, 120 bp, Artificial Sequence
  ENSG00000186111_46 (sequence is synthesized)
gtcagttgttttccagaagggctttgggtaaatcacggctgcaattgaggtcagccacgctggccccggaccaggcgctgggctgcatgcgtcactgggaatgtcattcggtcccacgtc

SEQ ID NO: 675711 - DNA, 120 bp, Artificial Sequence
  ENSG00000186111_47 (sequence is synthesized)
gaaccgggcgctccatagggcagcaccatcaccaggtgcacagctgaggcccagggtctgcttcggaccccggccagaccccagcgagcccctctctgcccctggacccagccctctcgt

SEQ ID NO: 675712 - DNA, 120 bp, Artificial Sequence
  ENSG00000186111_48 (sequence is synthesized)
gtcagggtgtcttgggtggacgcttctcactcgtgcagacctggctgcccgtggccccgctggctgcacaggggaggttgcacaggtcagcagagtggctgcagggccgggctctgaacc

SEQ ID NO: 675713 - DNA, 120 bp, Artificial Sequence
  ENSG00000186111_49 (sequence is synthesized)
gcagggccatggagacggggaggagatggtctctccacacccacctcacagatggaggcgctgaggcctcggctcccctgggagcctgggagaccacacggtttagtcaaaatccagatc

SEQ ID NO: 675714 - DNA, 120 bp, Artificial Sequence
  ENSG00000186111_50 (sequence is synthesized)
cccaagctctcaaggaggtccccctgggacgccacatgggccccacgtagctgtgagatcctcagggcctgctgttgtcattatgaccaataagcaaggggcccagagagcctaagagac

SEQ ID NO: 675715 - DNA, 120 bp, Artificial Sequence
  ENSG00000186111_51 (sequence is synthesized)
ctgcccagcaccgcacagccagaacggggcgcagacccaaagcaggagtgtcccctcgagacaaagcctccgccgaggccgccgtgactccccgcccatcagcaaacctctccgagcacc

SEQ ID NO: 675716 - DNA, 120 bp, Artificial Sequence
  ENSG00000186111_52 (sequence is synthesized)
tctgtgtgccaggcactgtggagtgaccccaagaggtggagaccacttccccggctgctctaggcagctccgtcccacggagccagcgggaagccagccaccgcgaagccgtgccccgga

SEQ ID NO: 675717 - DNA, 120 bp, Artificial Sequence
  ENSG00000186111_53 (sequence is synthesized)
ctggcgggggagcaggtgagcgtaccagcctgtggcgtgagcagagcgtgcagggcgccagcccagcgggtctgggtcccagtggcttcaggatgactgctgcacgtgtggcctcactaa

SEQ ID NO: 675718 - DNA, 120 bp, Artificial Sequence
  ENSG00000186111_54 (sequence is synthesized)
ggctgctccaccaagtcgcattcagttgccttcagtgcccgcggtggacgtgttttcagacggcagggcggtcaccggggtgcagcctctggatgggacacacgtgggtctcccgtgcac

SEQ ID NO: 675719 - DNA, 120 bp, Artificial Sequence
  ENSG00000186111_55 (sequence is synthesized)
ccaccgagagcagcacagtgcccatgggggccgaggggcgctggcagggctgatagggtggggcatcgccgacccaggcccagccacagcgcagcctcttccagtctctgtctgactcac

SEQ ID NO: 675720 - DNA, 120 bp, Artificial Sequence
  ENSG00000186111_56 (sequence is synthesized)
tgacggcacagccgggccctggccatgggaagaagttgggccatcgagaccacctcctccaccctgaagggtgccatccagctgggcatcggctacaccgtgggccacctgagctccaag

SEQ ID NO: 675721 - DNA, 120 bp, Artificial Sequence
  ENSG00000186113_0 (sequence is synthesized)
atgatgatggttttaaggaatctgagcatggagcccacctttgcccttttaggtttcacagattacccaaagcttcagattcctctcttccttgtgtttctgctcatgtatgttatcaca

SEQ ID NO: 675722 - DNA, 120 bp, Artificial Sequence
  ENSG00000186113_1 (sequence is synthesized)
gtggtaggaaaccttgggatgatcataataatcaagattaaccccaaatttcacactcctatgtactttttccttagtcacctctcttttgttgatttttgttactcttccattgtcact

SEQ ID NO: 675723 - DNA, 120 bp, Artificial Sequence
  ENSG00000186113_2 (sequence is synthesized)
cccaagctgcttgagaacttggtaatggcagataaaagcatcttctactttagctgcatgatgcagtacttcctgtcctgcactgctgtggtgacagagtctttcttgctggcagtgatg

SEQ ID NO: 675724 - DNA, 120 bp, Artificial Sequence
  ENSG00000186113_3 (sequence is synthesized)
tttggccccttggtactcctttgttatgctctccggttaaacttctctggacctaatgtaatcaaccacttcttttgtgagtatactgctctcatctctgtgtctggctctgatatactc

SEQ ID NO: 675725 - DNA, 120 bp, Artificial Sequence
  ENSG00000186113_4 (sequence is synthesized)
atcccccacctgctgcttttcagcttcgccaccttcaatgagatgtgtacactactgatcatcctcacttcctatgttttcatttttgtgactgtactaaaaatccgttctgttagtggg

SEQ ID NO: 675726 - DNA, 120 bp, Artificial Sequence
  ENSG00000186113_5 (sequence is synthesized)
cgccacaaagccttctccacctgggcctcccacctgacttctatcaccatcttccatgggaccatccttttcctttactgtgtacccaactccaaaaactctcggcaaacagtcaaagtg

SEQ ID NO: 675727 - DNA, 120 bp, Artificial Sequence
  ENSG00000186113_6 (sequence is synthesized)
gcctctgtattttacacagttgtcaaccccatgctgaaccctctgatctacagcctaaggaataaagacgtgaaggatgctttctggaagttaatacatacacaagttccatttcactga

SEQ ID NO: 675728 - DNA, 120 bp, Artificial Sequence
  ENSG00000186115_0 (sequence is synthesized)
agcagacagagagaggaggttgtctgggacagactgctcctgacagaaggatgtcccagctgagcctgtcctggctgggcctctggccagtggcagcatccccttggctgctcctcctgc

SEQ ID NO: 675729 - DNA, 120 bp, Artificial Sequence
  ENSG00000186115_1 (sequence is synthesized)
tggtcggggcctcctggctcctggcccatgtcctggcctggacctacgccttctatgacaactgccgccgccttcggtgtttcccacaacccccaagacggaactggttttggggacacc

SEQ ID NO: 675730 - DNA, 120 bp, Artificial Sequence
  ENSG00000186115_2 (sequence is synthesized)
agggcatggtcaaccccacagaggagggcatgagagttctgactcagctggtggccacctacccccagggctttaaggtctggatgggacccatctcccccctcctcagtttgtgccacc

SEQ ID NO: 675731 - DNA, 120 bp, Artificial Sequence
  ENSG00000186115_3 (sequence is synthesized)
ccgacatcatccggtctgtcatcaacgcctcagctgccattgcaccaaaggacaagttcttctacagcttcctggagccctggctgggggatgggctcctgctgagtgctggtgacaagt

SEQ ID NO: 675732 - DNA, 120 bp, Artificial Sequence
  ENSG00000186115_4 (sequence is synthesized)
ggagccgccaccgtcggatgctgacgcctgccttccatttcaacatcctgaagccctatatgaagattttcaatgagagtgtgaacatcatgcacgccaagtggcagctcctggcctcag

SEQ ID NO: 675733 - DNA, 120 bp, Artificial Sequence
  ENSG00000186115_5 (sequence is synthesized)
agggtagtgcctgtttggatatgtttgagcacatcagcctcatgaccttggacagtctacagaaatgtgtcttcagctttgacagccattgtcaggagaaacccagtgaatatattgccg

SEQ ID NO: 675734 - DNA, 120 bp, Artificial Sequence
  ENSG00000186115_6 (sequence is synthesized)
ccatcttggagctcagtgcccttgtatcaaaaagacaccatgagatcctcctgcatattgacttcctgtattatctcacccctgatgggcagcgtttccgcagggcctgccgcctggtgc

SEQ ID NO: 675735 - DNA, 120 bp, Artificial Sequence
  ENSG00000186115_7 (sequence is synthesized)
acgacttcacagatgccgtcatccaggagcggcgccgcactctccctagccagggtgttgatgacttcctccaagccaaggccaaatccaagactttggacttcattgatgtactcctgc

SEQ ID NO: 675736 - DNA, 120 bp, Artificial Sequence
  ENSG00000186115_8 (sequence is synthesized)
tgagcaaggatgaagacgggaagaagttatctgatgaggacataagagcagaagctgacacctttatgtttgagggccatgacaccacggccagtggtctctcctgggtcctgtaccacc

SEQ ID NO: 675737 - DNA, 120 bp, Artificial Sequence
  ENSG00000186115_9 (sequence is synthesized)
aatgggacgacctggcccatttgcccttcctgaccatgtgcatgaaggagagcctgcggctgcatcccccagtcccggtcatctcccgccatgtcacccaggacattgtgctcccagacg

SEQ ID NO: 675738 - DNA, 120 bp, Artificial Sequence
  ENSG00000186115_10 (sequence is synthesized)
gccgggtcatccccaaaggcattatctgcctcatcagtgttttcggaacccatcacaacccagctgtgtggccggaccctgaggtctacgacccctttcgctttgacccagagaacatca

SEQ ID NO: 675739 - DNA, 120 bp, Artificial Sequence
  ENSG00000186115_11 (sequence is synthesized)
aggagaggtcacctctggcttttattcccttctcggcagggcccaggaactgcatcgggcagacgttcgcgatggcggagatgaaggtggtcctggcgctcacgctgctgcgcttccgcg

SEQ ID NO: 675740 - DNA, 120 bp, Artificial Sequence
  ENSG00000186115_12 (sequence is synthesized)
tcctgcctgaccacaccgagccccgcaggaagccggagctggtcctgcgcgcagagggcggactttggctgcgggtggagcccctgagctgagttctgcagagacccactctgaccccac

SEQ ID NO: 675741 - DNA, 120 bp, Artificial Sequence
  ENSG00000186115_13 (sequence is synthesized)
taaaatgacccctgattcatcaaaagtgaagcctagaattaccctaagaccctgttccacagtcctgtattccatcctagatatctactcaaaataattgagacaagtgttcaaacagaa

SEQ ID NO: 675742 - DNA, 120 bp, Artificial Sequence
  ENSG00000186115_14 (sequence is synthesized)
agacgcttgtgcgtgaatgttcatggcggccctattcacagtagccaaacgatgaaaacaaccccaagctatatattaccagatgaaaggataaacaaaatgtggtccatccatacaatg

SEQ ID NO: 675743 - DNA, 120 bp, Artificial Sequence
  ENSG00000186115_15 (sequence is synthesized)
gagtattacacagccataaaaaggaatgaagcagtgatccctactacactgtggatgaaccttgaatgcatgatactgaatgaaagacgtcagatgcaaaaggtcacatagtgtactgtc

SEQ ID NO: 675744 - DNA, 120 bp, Artificial Sequence
  ENSG00000186115_16 (sequence is synthesized)
cttttatacgaaatttccagaacaggccaatctgaagagatgcatagcggattggtggctttcagcagctgtggggaggtgggactgaggagcgactgctaatcagtatggggtttcctc

SEQ ID NO: 675745 - DNA, 120 bp, Artificial Sequence
  ENSG00000186115_17 (sequence is synthesized)
ccgggatggtgaaaatgttccggacctagatagtgacgaaggtagcacgacactgtgagtgcactaaatgctattgaattggacactttgaaatggtgaatttcgtggtatgtgaattct

SEQ ID NO: 675746 - DNA, 120 bp, Artificial Sequence
  ENSG00000186115_18 (sequence is synthesized)
acctcaatcaaaaaaatttgctattttatctcacatacattttttttctgtccaggttgttcatataataatatgctgtgagcatctttccatgacattaaatcatcttaggaaacatta

SEQ ID NO: 675747 - DNA, 120 bp, Artificial Sequence
  ENSG00000186115_19 (sequence is synthesized)
tcagaagaaggtctcctatacacacaaagcctggcgtgcacctttggggatatgggctgctggtgggtggggccctggcaggcagtcatccacatctttctccccacgtgcatcaagcct

SEQ ID NO: 675748 - DNA, 120 bp, Artificial Sequence
  ENSG00000186115_20 (sequence is synthesized)
ctgggtcctgtaccaccttgcaaagcacccagaataccaggagcgctgccggcaggaggtgcaagaacttctgaaggaccgtgagcctaaagagattgaatggtctacgacccctttcgc

SEQ ID NO: 675749 - DNA, 120 bp, Artificial Sequence
  ENSG00000186115_21 (sequence is synthesized)
ctggctgggtgagtatctgcaggtgaacagggttgggaaaaacgttggggggccaggggagggagaggtccttgcccatggcccttggctgccctgctaggggatgggctcctgctgagt

SEQ ID NO: 675750 - DNA, 120 bp, Artificial Sequence
  ENSG00000186115_22 (sequence is synthesized)
cagagaggaaggccatgaggtgagggctctggccatggtgaccaagaggggtctaggagtgcaagatggacttggatttctggaaaaaggatgaatcttcagagactgtctcagattaga

SEQ ID NO: 675751 - DNA, 120 bp, Artificial Sequence
  ENSG00000186115_23 (sequence is synthesized)
ctcaagagcccttagagctagtgtgactttttatgggggtgggggttggggggggttactgccttctctccaggatgaagacgggaagaagttatctgatgaggacataagagcagaagc

SEQ ID NO: 675752 - DNA, 120 bp, Artificial Sequence
  ENSG00000186115_24 (sequence is synthesized)
tgacacctttatgtttgagggtgagggccccagtgtggggctagagaggggaccgggatctctcccttccaggaacagggtgggtagacccccacaaccttcccatcccccttcccccat

SEQ ID NO: 675753 - DNA, 120 bp, Artificial Sequence
  ENSG00000186115_25 (sequence is synthesized)
ggtgctgtctaccttcgggtgctgaagcagcccagagacccaagcctgccttgctgccccccaggccatgacaccacggccagtggtctctcctgggtcctgtaccaccttgcaaagcac

SEQ ID NO: 675754 - DNA, 120 bp, Artificial Sequence
  ENSG00000186115_26 (sequence is synthesized)
gagccctccctgctctacctccggcactgcccgtccctgcctctccactgtccctggaggtccctgggccgttctctgggcctcaggatctcaccgtccatcccgtctgccctgcaggat

SEQ ID NO: 675755 - DNA, 120 bp, Artificial Sequence
  ENSG00000186118_0 (sequence is synthesized)
agatgggctgactggctgggcagatgggtgggtgagttccctctccccagagccatcggccaggtaccaaagctcagctgtatggattcccaacaggaggacctgcgcttccctgggatg

SEQ ID NO: 675756 - DNA, 120 bp, Artificial Sequence
  ENSG00000186118_1 (sequence is synthesized)
tgggtctcattgtactttggaatcctggggctgtgttctgtgataactggagggtgcattatctttctgcactggaggaagaacttgaggcgggaagagcatgcccagcagtgggtggag

SEQ ID NO: 675757 - DNA, 120 bp, Artificial Sequence
  ENSG00000186118_2 (sequence is synthesized)
gtgatgagagctgccacattcacctacagcccattgttgtactggattaacaagcgacggcgctacggcatgaatgcagccatcaacacgggccctgcccctgctgtcaccaagactgag

SEQ ID NO: 675758 - DNA, 120 bp, Artificial Sequence
  ENSG00000186118_3 (sequence is synthesized)
actgaggtccagaatccagatgttctgtgggatttggacatccccgaaggcaggagccatgctgaccaagacagcaaccccaaggcggaagcccctgctcccctgcaacctgcactgcag

SEQ ID NO: 675759 - DNA, 120 bp, Artificial Sequence
  ENSG00000186118_4 (sequence is synthesized)
ctggctccacagcagccccaggccagatccccattcccacttcccatctttcaggaggtgccctttgccccacccttgtgcaacctaccccccctgctgaaccactctgtctcctatcct

SEQ ID NO: 675760 - DNA, 120 bp, Artificial Sequence
  ENSG00000186118_5 (sequence is synthesized)
ttggccacctgtcctgaaaggaatgttctcttccattccctcctgaatctggcccaggaagaccatagcttcaatgccaagccttttccttcagaactgtagcctcctctcactgaaggt

SEQ ID NO: 675761 - DNA, 120 bp, Artificial Sequence
  ENSG00000186118_6 (sequence is synthesized)
gggagctgcaggaatcaggtgcagagtaggaaatggaactaacctcaggaaggtggtattgacagaggtcaggacccacctggatgtcatgctatgaaacattaaaagaaaaaaaaaaaa

SEQ ID NO: 675762 - DNA, 120 bp, Artificial Sequence
  ENSG00000186118_7 (sequence is synthesized)
ggctgactggctgggcagatgggtgggtgagttccctctccccagagccatcggccaggtaccaaagctcagctgtatggattcccaacaggaggacctgcgcttccctgggacccattg

SEQ ID NO: 675763 - DNA, 120 bp, Artificial Sequence
  ENSG00000186118_8 (sequence is synthesized)
cgagagtaattatgtgacttgttcaagttctacccgacagctgagctcttttcaagatggcagctgcctcccaagcctccttttcctctgcttcctgacatcctccttgaactccagcca

SEQ ID NO: 675764 - DNA, 120 bp, Artificial Sequence
  ENSG00000186118_9 (sequence is synthesized)
cagtgacctattctctcccaaagaaacaccaggattactccttgaagagtccttattcaggccctttttgacccctggaatcctctctccttccattctctcaacccaaatgccacaatc

SEQ ID NO: 675765 - DNA, 120 bp, Artificial Sequence
  ENSG00000186118_10 (sequence is synthesized)
ttccttaccgtctgaaccaggtgtgagctcctagggtcagggacagtgacattaacatctctgtgtcccacctgctcacagaacagggccagtcctggagtgggctctctgggacagtac

SEQ ID NO: 675766 - DNA, 120 bp, Artificial Sequence
  ENSG00000186118_11 (sequence is synthesized)
tcatcatcaggtccttcttgtctgggttttgtctgattgaagcccctcctgggacaggggcagagccttcaactctgctcaatccaacctatgctcatggagatcagccctgagccctgc

SEQ ID NO: 675767 - DNA, 120 bp, Artificial Sequence
  ENSG00000186118_12 (sequence is synthesized)
tgggtgggtgagttccctctccccagagccatcggccaggtaccaaagctcagctgtatggattcccaacaggaggacctgcgcttccctgggagaagaacttgaggcgggaagagcatg

SEQ ID NO: 675768 - DNA, 120 bp, Artificial Sequence
  ENSG00000186119_0 (sequence is synthesized)
tcagattcgaagaaacagaagcgatgctgctgactgatagaaatacaagtgggaccacgttcaccctcttgggcttctcagattacccagaactgcaagtcccactcttcctggtttttc

SEQ ID NO: 675769 - DNA, 120 bp, Artificial Sequence
  ENSG00000186119_1 (sequence is synthesized)
tggccatctacaatgtcactgtgctagggaatattgggttgattgtgatcatcaaaatcaaccccaaactgcatacccccatgtactttttcctcagccaactctcctttgtggatttct

SEQ ID NO: 675770 - DNA, 120 bp, Artificial Sequence
  ENSG00000186119_2 (sequence is synthesized)
gctattcctccatcattgctcccaagatgttggtgaaccttgttgtcaaagacagaaccatttcatttttaggatgcgtagtacaattctttttcttctgtacctttgtggtcactgaat

SEQ ID NO: 675771 - DNA, 120 bp, Artificial Sequence
  ENSG00000186119_3 (sequence is synthesized)
cctttttattagctgtgatggcctatgaccgcttcgtggccatttgcaaccctctgctctacacagttaacatgtcccagaaactctgcgtgctgctggttgtgggatcctatgcctggg

SEQ ID NO: 675772 - DNA, 120 bp, Artificial Sequence
  ENSG00000186119_4 (sequence is synthesized)
tgctttaaagttatgttttcatggtttcaacacaatcaatcacttcttctgtgagttctcctcactactctccctttcttgctctgatacttacatcaaccagtggctgctattctttct

SEQ ID NO: 675773 - DNA, 120 bp, Artificial Sequence
  ENSG00000186119_5 (sequence is synthesized)
tgccacctttaatgaaatcagcacactactcatcgttctcacatcttatgcgttcattgttgtaaccatcctcaagatgcgttcagtcagtgggcgccgcaaagccttctccacctgtgc

SEQ ID NO: 675774 - DNA, 120 bp, Artificial Sequence
  ENSG00000186119_6 (sequence is synthesized)
ctcccacctgactgccatcaccatcttccatggcaccatcctcttcctttactgtgtgcccaactccaaaaactccaggcacacagtcaaagtggcctctgtgttttacaccgtggtgat

SEQ ID NO: 675775 - DNA, 120 bp, Artificial Sequence
  ENSG00000186119_7 (sequence is synthesized)
ccccatgttgaatcccctgatctacagtctgagaaataaagatgtcaaggatacagtcaccgagatactggacaccaaagtcttctcttactgagcctgttactttcatggagtttgtca

SEQ ID NO: 675776 - DNA, 120 bp, Artificial Sequence
  ENSG00000186130_0 (sequence is synthesized)
cttccaggctaagtccatcttccggcttgggcagacgctgccgcggaatccttgactctagttttctgagtcgattgtgatcatggctgctgagtctgatgttctgcatttccagtttga

SEQ ID NO: 675777 - DNA, 120 bp, Artificial Sequence
  ENSG00000186130_1 (sequence is synthesized)
acagcaaggagatgtggtcttgcagaaaatgaatcttttgagacagcagaatttattttgtgatgtatcaatttacattaatgacactgagttccaggggcacaaggtgattttggctgc

SEQ ID NO: 675778 - DNA, 120 bp, Artificial Sequence
  ENSG00000186130_2 (sequence is synthesized)
ttgctccacttttatgagagatcagtttttactcacacagtcaaaacatgtcagaatcaccatcttacagagtgcagaagttggcagaaaattgttactgtcttgctatactggagcact

SEQ ID NO: 675779 - DNA, 120 bp, Artificial Sequence
  ENSG00000186130_3 (sequence is synthesized)
tgaagttaaaaggaaagagcttttgaaatacttgactgctgccagttaccttcagatggttcacattgtggaaaagtgcacagaagctttgtcaaagtatctggaaattgatctttctat

SEQ ID NO: 675780 - DNA, 120 bp, Artificial Sequence
  ENSG00000186130_4 (sequence is synthesized)
gaaaaacaacaaccaacacactgacctgtgtcagtcttctgatcctgatgttaagaatgaagatgaaaattctgataaagactgtgagataattgaaatttcagaagatagtcctgtaaa

SEQ ID NO: 675781 - DNA, 120 bp, Artificial Sequence
  ENSG00000186130_5 (sequence is synthesized)
catagatttccatgttaaagaagaggaaagcaatgctttgcagtctacagtagagagtctgacatcagagagaaaggaaatgaagtcaccagagctgtctacagtagacataggttttaa

SEQ ID NO: 675782 - DNA, 120 bp, Artificial Sequence
  ENSG00000186130_6 (sequence is synthesized)
agacaatgaaatttgtatccttcatgtagaatccatcagtacagctggtgtcgaaaatgggcagttttcacagccttgtacctcttcaaaagcaagcatgtatttctctgaaacacagca

SEQ ID NO: 675783 - DNA, 120 bp, Artificial Sequence
  ENSG00000186130_7 (sequence is synthesized)
ttcattgatcaattctacagttgagagcagagtggctgaagttcctgggaatcaagatcagggcttattttgtgagaatactgaaggaagttatggtacagtgagtgagattcagaatct

SEQ ID NO: 675784 - DNA, 120 bp, Artificial Sequence
  ENSG00000186130_8 (sequence is synthesized)
ggaggaaggttattcactgaggcaccagtgccccaggtgtcctcgaggctttcttcatgttgaaaactatctgcgccaccttaaaatgcataaactattcttatgcttacagtgcggaaa

SEQ ID NO: 675785 - DNA, 120 bp, Artificial Sequence
  ENSG00000186130_9 (sequence is synthesized)
aacatttacacagaagaaaaatctcaaccgacacatccgaggacacatgggcatacggccctttcagtgtactgtgtgcttgaagacatttactgccaaaagcacacttcaggaccactt

SEQ ID NO: 675786 - DNA, 120 bp, Artificial Sequence
  ENSG00000186130_10 (sequence is synthesized)
gaacatacacagtggggatcggccatacaaatgccactgttgtgatatggatttcaagcacaagtctgctctcaaaaagcacttaacctctgtccatggcagaagcagtggtgaaaaact

SEQ ID NO: 675787 - DNA, 120 bp, Artificial Sequence
  ENSG00000186130_11 (sequence is synthesized)
atctaggcctgatctcaaaaggcaaagtctactataattataatcacagacttgttatataaagtttgtattattctattacgcaagtctttctgtagagatgcagcatttgtaatattt

SEQ ID NO: 675788 - DNA, 120 bp, Artificial Sequence
  ENSG00000186130_12 (sequence is synthesized)
catccccccaatctttgtttcttatattttgtcggcttacacataatcattctttctgaacttctaacagttccaaagttatgggaggcacagtaaagctgatgggattctgtctcatct

SEQ ID NO: 675789 - DNA, 120 bp, Artificial Sequence
  ENSG00000186130_13 (sequence is synthesized)
cataccttacatataagtctcagtagtatccctagagaaatagtgttcctctcttatatattcttgattctagtgacaaaggatccagcagtatttgcagattccgatttggagtctcta

SEQ ID NO: 675790 - DNA, 120 bp, Artificial Sequence
  ENSG00000186130_14 (sequence is synthesized)
ggtaattgatttaagtataaaatccaatcatataaaaactttaatgaattaggataacaagaagagaaaataaaggtaaaaacactattacctgtttctagtcactttagaacagatggc

SEQ ID NO: 675791 - DNA, 120 bp, Artificial Sequence
  ENSG00000186130_15 (sequence is synthesized)
actaaaaaaatttttttttaactttttaccagctgttcttggattccaaactaaacaccaagatacttttcattttaaaatgtataaagtaacaattcagattcacttgggaatagcaga

SEQ ID NO: 675792 - DNA, 120 bp, Artificial Sequence
  ENSG00000186130_16 (sequence is synthesized)
atttttttatacagggttaataatccttaaaatacttttatttccatgccttattagtatacatacttaagaaatggttcattgggcccgagtttcttgattttatttaatacaatcgga

SEQ ID NO: 675793 - DNA, 120 bp, Artificial Sequence
  ENSG00000186130_17 (sequence is synthesized)
gtaaaattataccattggcatgaagctgtgaaaaatgagaaattctacctttaccagggatatctgttctactgttttaaaagttcctctctattttattttttatttaacatgaagtaa

SEQ ID NO: 675794 - DNA, 120 bp, Artificial Sequence
  ENSG00000186130_18 (sequence is synthesized)
aattgaaatttcttcttggtgtatagttctgtgaattttaacagaaagatttgtgcaccactactgcagtcggtacagaacagttccttcactcccaatagctctcttatgctgtccctt

SEQ ID NO: 675795 - DNA, 120 bp, Artificial Sequence
  ENSG00000186130_19 (sequence is synthesized)
tgtagtcagctccttctagctctaatcctggcaacagttctccgtcactattattttgccttttctggactgtcatataaacagaatcttatagtacgttccctcttgaaatgctttttc

SEQ ID NO: 675796 - DNA, 120 bp, Artificial Sequence
  ENSG00000186130_20 (sequence is synthesized)
acccagcataatgactttgaggttcatccatgtcattttaaattttgaattggcaatatatattctagctgttactagatgagcaatttaaaaaggtgtagctattagtgttgtattttt

SEQ ID NO: 675797 - DNA, 120 bp, Artificial Sequence
  ENSG00000186130_21 (sequence is synthesized)
tcatttacattaatgtaatttccattcactatgtgttgataaaaatcttaaccatccctagagttttatatttccaaaaatatgccaaaaggaaaactatgactgtatgattattttagc

SEQ ID NO: 675798 - DNA, 120 bp, Artificial Sequence
  ENSG00000186130_22 (sequence is synthesized)
gagagtcatatttgagatggtgttctgagccatagttctctaacatctccgtctacatataacacaaaacttttataaattattttaacaaagattaaaatatactgcagggcaaataat

SEQ ID NO: 675799 - DNA, 120 bp, Artificial Sequence
  ENSG00000186130_23 (sequence is synthesized)
attctctaaaacacaggaactgcttttcgtaaagaagactgactagatgcatctttctttgaagctgttctagtcctcctctagttaacttagctttatgtagaatttctactgtattta

SEQ ID NO: 675800 - DNA, 120 bp, Artificial Sequence
  ENSG00000186130_24 (sequence is synthesized)
atttctattgaagcccttctgtattttaaaatgtaatatactttgtaccatttataaaaattgtgtgatgaatgaatcacatgttcgttgttataagtgttaacctttttttgacaattt

SEQ ID NO: 675801 - DNA, 120 bp, Artificial Sequence
  ENSG00000186130_25 (sequence is synthesized)
tgtgggaaagacattctccactgaattttaactttccttgagactttcaagaatgcaggtctcgtttgatgaaaaaaccgacttcataacccaatgttactagttagcgacattgtgctg

SEQ ID NO: 675802 - DNA, 120 bp, Artificial Sequence
  ENSG00000186130_26 (sequence is synthesized)
aatttctccttgaactttttaactttatatgtaaaataactttgatcttggtcatttgaaagatcatttccaggtctaaaattccatgattttgtatttaattcttcctgagaacagaag

SEQ ID NO: 675803 - DNA, 120 bp, Artificial Sequence
  ENSG00000186130_27 (sequence is synthesized)
aggggaaagcaagagaggacggttttgtgtctttatgaactttgttacttaagtactccattggagacataatttttctaattagtggatctttttccactggaaagtgtgatagctcat

SEQ ID NO: 675804 - DNA, 120 bp, Artificial Sequence
  ENSG00000186130_28 (sequence is synthesized)
tgctaatttttcattcatagttcattgcttccatttgacctaagattggccatttgttggtgtgaaaatattttcttttcagaaatagtttactagtgattgaagtacttttcttatttt

SEQ ID NO: 675805 - DNA, 120 bp, Artificial Sequence
  ENSG00000186130_29 (sequence is synthesized)
tgcttcctattataaaatggcgtggggggaagggggaaggatggagatgggaggagagggtaaaagaatagtactctgattttttaagaattagtatctactatcttggatatttgaaaa

SEQ ID NO: 675806 - DNA, 120 bp, Artificial Sequence
  ENSG00000186130_30 (sequence is synthesized)
aaaattggttgaaactatgtttaagttttatgtgtgccttgtaagattgttgtaaaattttttgtgagcactttgagatttttgctgggggaggggtgttttgtgaaagtgatggttatt

SEQ ID NO: 675807 - DNA, 120 bp, Artificial Sequence
  ENSG00000186130_31 (sequence is synthesized)
atttatattatttattcctgttcagtagcacggaatgatctccaaacattcctaggagagtgtctgtttgcatgatatgtctaaaaattttcaggaaaatggaatctttttttaaagttc

SEQ ID NO: 675808 - DNA, 120 bp, Artificial Sequence
  ENSG00000186130_32 (sequence is synthesized)
aggtatgacaaagtatagaatttattcatttaacatattcacatttagtttatgtttctgatatgacagaaaaatgaaaagtgtttgagttcagcctcttcatttactccatttacatat

SEQ ID NO: 675809 - DNA, 120 bp, Artificial Sequence
  ENSG00000186130_33 (sequence is synthesized)
aaaagatcttgaaaaggtagttgttacttcgttgtcagagaaaaacacttgccctttttcctgggatgtaactatcttacatgtttacataagaaataataaactggaggtgggaatgga

SEQ ID NO: 675810 - DNA, 120 bp, Artificial Sequence
  ENSG00000186132_0 (sequence is synthesized)
gcttgcgcaaacgccgggagtagccgaaggggacgccgggaacaggaatttcttcacatggctcctggagaagtgaccatcacagttcgcctcatccgttcctttgaacatcgcaatttc

SEQ ID NO: 675811 - DNA, 120 bp, Artificial Sequence
  ENSG00000186132_1 (sequence is synthesized)
aaacctgtagtgtatcacggagtgaatttggaccaaactgtaaaggaatttatcgtatttctaaagcaagatatccctttaaggaccaacctgccaccaccattcagaaattataaatat

SEQ ID NO: 675812 - DNA, 120 bp, Artificial Sequence
  ENSG00000186132_2 (sequence is synthesized)
tgaaagaagacagcactctgaaagcagctggaatcgccagtgaaactgaaattgcattcttctgtgaagaagattataagaactacaaagctaatcccatttcatcctggtgaaaacatc

SEQ ID NO: 675813 - DNA, 120 bp, Artificial Sequence
  ENSG00000186132_3 (sequence is synthesized)
tcgagggcttcctttttgcatacctgtattaagctctttattccactgctgaatttttgaaattgacaaacaaatcttaaaaaattaatcccaggctatactctttgagctaaaatctgg

SEQ ID NO: 675814 - DNA, 120 bp, Artificial Sequence
  ENSG00000186132_4 (sequence is synthesized)
ttatttctttctcttcaggtctttccttctctctttctttttctttgttgttgtaaaataatatattatgagaaaaacatttgatctttttaaagggaaataaattgttattaaaaatta

SEQ ID NO: 675815 - DNA, 120 bp, Artificial Sequence
  ENSG00000186132_5 (sequence is synthesized)
tcgagagttgggttcagtcctggcccgttgtggggacggcacgcgggggaaggggaggggacggagaccgaagaacggaggtccttatgtttcttttctttccttaaatcttgcccggcc

SEQ ID NO: 675816 - DNA, 120 bp, Artificial Sequence
  ENSG00000186132_6 (sequence is synthesized)
tgaagaggccggaagttgcatctctggacaagtaaactctgagacctgggaatggcgggcgggacccgctcctcccttggggtctagaggagacccccggagatggtccctgatgagcag

SEQ ID NO: 675817 - DNA, 120 bp, Artificial Sequence
  ENSG00000186132_7 (sequence is synthesized)
cgtgatggtggaaagctggactggtctcccgaaaggcgaagccgaggcttcttcctctgaacttttgggccagctgaggggcccacggacatagggcacccacaataggcgtgtgtctgc

SEQ ID NO: 675818 - DNA, 120 bp, Artificial Sequence
  ENSG00000186132_8 (sequence is synthesized)
tgtgtgtttgtgttcggccgtcctgcttctctgtttccacacgtacacatgcccctgtgttactttggttcatcttctgtactctgtcagttttctgctggtcagaacatctgtgactgt

SEQ ID NO: 675819 - DNA, 120 bp, Artificial Sequence
  ENSG00000186132_9 (sequence is synthesized)
acttttggcacgttctttgacttgcttgtggccgtagtgtcaggcctgtattgcacatttatgtctgtggtgcatttctccatctggaatttcttcacatggctcctggagaagtgacca

SEQ ID NO: 675820 - DNA, 120 bp, Artificial Sequence
  ENSG00000186132_10 (sequence is synthesized)
caaagaattcctggatgttcttcacacagattccttgtgttaacattttgctatgtttgttttattcctgcggaggccaaagcaactccatcttggatactgatctgccatattgacttc

SEQ ID NO: 675821 - DNA, 120 bp, Artificial Sequence
  ENSG00000186132_11 (sequence is synthesized)
tcattagccccagtttcaagatacctctaagatttccaggttatctactattccctatgtaagaacaggtacttactataaatcctgaccttaggtcaagcaaccttgatgttattgtac

SEQ ID NO: 675822 - DNA, 120 bp, Artificial Sequence
  ENSG00000186136_0 (sequence is synthesized)
atggccaccgaattggacaaaatctttctgattctggcaatagcagaattcatcatcagcatgctggggaatgtgttcattggactggtaaactgctctgaagggatcaagaaccaaaag

SEQ ID NO: 675823 - DNA, 120 bp, Artificial Sequence
  ENSG00000186136_1 (sequence is synthesized)
gtcttctcagctgacttcatcctcacctgcttggctatctccacaattggacaactgttggtgatactgtttgattcatttctagtgggacttgcttcacatttatataccacatataga

SEQ ID NO: 675824 - DNA, 120 bp, Artificial Sequence
  ENSG00000186136_2 (sequence is synthesized)
ctaggaaaaactgttattatgctttggcacatgactaatcacttgacaacctggcttgccacctgcctaagcattttctatttctttaagatagcccacttcccccactcccttttcctc

SEQ ID NO: 675825 - DNA, 120 bp, Artificial Sequence
  ENSG00000186136_3 (sequence is synthesized)
ctcaatataatagataaaagtaatctgactttatatttagatgaaagtaaaactctctatgataaactctctattttaaaaactcttctcagcttgaccagttttatccccttttctctg

SEQ ID NO: 675826 - DNA, 120 bp, Artificial Sequence
  ENSG00000186136_4 (sequence is synthesized)
ttcctgacctccttgctttttttatttctgtccttggtgagacatactagaaatttgaagctcagttccttgggctctagagactccagcacagaggcccataggagggccatgaaaatg

SEQ ID NO: 675827 - DNA, 120 bp, Artificial Sequence
  ENSG00000186136_5 (sequence is synthesized)
gtgatgtctttccttttcctcttcatagttcattttttttccttacaagtggccaattggatattttttatgttgtggaacaacaagtgcataaagtttgtcatgttagccttaaatgcc

SEQ ID NO: 675828 - DNA, 120 bp, Artificial Sequence
  ENSG00000186136_6 (sequence is synthesized)
tttccctcgtgccactcatttattctcattctgggaaacagcaagctgcaacagacagctgtgaggctactgtggcatcttaggaactatacaaaaacaccaaaccctttacctttgtag

SEQ ID NO: 675829 - DNA, 120 bp, Artificial Sequence
  ENSG00000186141_0 (sequence is synthesized)
agagtggcacgcgctttttgcttttccgcgtcttcttcggtggcgatccgcgtcctagaaagggcggtgggctccacctcggcctagaaggccagcgggagccgtaggaagccgtcgcgg

SEQ ID NO: 675830 - DNA, 120 bp, Artificial Sequence
  ENSG00000186141_1 (sequence is synthesized)
gaagctcagccgaattggagttggagcccccggattgcgctgaccctgagctctcagactccccagtacaatgactcaagcagaaattaagctctgttctttgttgctgcaagagcattt

SEQ ID NO: 675831 - DNA, 120 bp, Artificial Sequence
  ENSG00000186141_2 (sequence is synthesized)
tggagagattgtagaaaaaattggagtccatctgataagaaccggcagccagccactaagagtaattgcccatgacacaggaacatcactggatcaggtgaagaaagccctgtgtgtcct

SEQ ID NO: 675832 - DNA, 120 bp, Artificial Sequence
  ENSG00000186141_3 (sequence is synthesized)
cgtccaacataacctggtgagttatcaagtgcacaaacgtggtgtggtggagtatgaagcccagtgcagccgggtattgcgaatgcttagatatccccggtacatctatactaccaaaac

SEQ ID NO: 675833 - DNA, 120 bp, Artificial Sequence
  ENSG00000186141_4 (sequence is synthesized)
tctgtacagtgacactggagagctgattgttgaggagcttctgttgaacggcaaactgacaatgtcagctgttgtgaagaaagtggcagaccggctcacagagaccatggaggatggcaa

SEQ ID NO: 675834 - DNA, 120 bp, Artificial Sequence
  ENSG00000186141_5 (sequence is synthesized)
gaccatggactatgctgaagtatcaaacacatttgtgcgactggcagacacacactttgtacaacgctgcccttcggtacctaccactgagaattcagaccctgggccaccaccacctgc

SEQ ID NO: 675835 - DNA, 120 bp, Artificial Sequence
  ENSG00000186141_6 (sequence is synthesized)
ccccacacttgtcattaatgaaaaggacatgtacctggttcctaaactcagcttgatagggaaaggtaaaaggaggagatcatctgatgaagatgctgctggggagcccaaggccaagag

SEQ ID NO: 675836 - DNA, 120 bp, Artificial Sequence
  ENSG00000186141_7 (sequence is synthesized)
accaaaatatactacagataacaaggagcccattccagatgatgggatttattggcaggccaaccttgacagattccaccaacacttccgtgaccaagccattgtgagcgcagttgctaa

SEQ ID NO: 675837 - DNA, 120 bp, Artificial Sequence
  ENSG00000186141_8 (sequence is synthesized)
caggatggaccagacaagcagcgagattgtgcgaaccatgctccgaatgagtgagattaccacttcctctagtgctcccttcacccagccattgtcttccaatgagatcttcagatccct

SEQ ID NO: 675838 - DNA, 120 bp, Artificial Sequence
  ENSG00000186141_9 (sequence is synthesized)
acctgttggctataacatctctaagcaagttcttgatcagtatctcactctgctggcagatgatccactagagtttgttggaaagtctggcgacagtggtggaggaatgtatgtcatcaa

SEQ ID NO: 675839 - DNA, 120 bp, Artificial Sequence
  ENSG00000186141_10 (sequence is synthesized)
cctccataaggcattagcatccctagccacagccactctggagtccgtcgtacaggagagatttgggtctcgctgtgctagaatattccgtctagttttgcagaagaaacacatagagca

SEQ ID NO: 675840 - DNA, 120 bp, Artificial Sequence
  ENSG00000186141_11 (sequence is synthesized)
gaagcaagtggaagactttgcaatgattcctgcaaaggaggcaaaggatatgctatataagatgctctcagaaaatttcatgtcactccaggaaattcccaaaacaccagaccatgcccc

SEQ ID NO: 675841 - DNA, 120 bp, Artificial Sequence
  ENSG00000186141_12 (sequence is synthesized)
atccaggaccttctatttatatactgtgaacatcctgtcagctgcccgaatgttgttgcacaggtgctacaagagcatagccaacttgatagaaaggaggcaatttgaaaccaaagagaa

SEQ ID NO: 675842 - DNA, 120 bp, Artificial Sequence
  ENSG00000186141_13 (sequence is synthesized)
taagcgtctactagaaaaatctcagagggtagaagccatcattgcatctatgcaggctactggtgcagaggaagcacagttacaagaaatagaggagatgatcacagctcctgaacgtca

SEQ ID NO: 675843 - DNA, 120 bp, Artificial Sequence
  ENSG00000186141_14 (sequence is synthesized)
gcagctagagaccctgaaacgtaatgtcaacaagttggatgccagtgagatccaggtggacgaaaccatcttcctgctggagtcttacattgagtgcaccatgaagagacagtgatccag

SEQ ID NO: 675844 - DNA, 120 bp, Artificial Sequence
  ENSG00000186141_15 (sequence is synthesized)
tggatgcattatttgcagtgggataagtcgcagagtcttcaactaaacccccctctctatcccctgcagcccaggatacacctgaaagaatttggcatatttagatccattgctgtagtc

SEQ ID NO: 675845 - DNA, 120 bp, Artificial Sequence
  ENSG00000186141_16 (sequence is synthesized)
tcccctcatcaaatcttggcagtgggaagaaccttaaatcaacaaggttaatcatctatcagatgcatctgttcccataaagaagttacccacacctatggttacctatatccctggcaa

SEQ ID NO: 675846 - DNA, 120 bp, Artificial Sequence
  ENSG00000186141_17 (sequence is synthesized)
taggaaacttcctaagaagttaattttattttcagatgtctatgcctgttctttattttgttgagataggtgatagatagatagatagatagataatttgttgttgttgagacaggatct

SEQ ID NO: 675847 - DNA, 120 bp, Artificial Sequence
  ENSG00000186141_18 (sequence is synthesized)
gagacaggatctcactctgtcactcaggctggggtgtaatagcgcaatcacagctccctacagccttgacctcctgagctcaagcagtccttccacctcagcctctggagtagctgggac

SEQ ID NO: 675848 - DNA, 120 bp, Artificial Sequence
  ENSG00000186141_19 (sequence is synthesized)
ccacacatacccagctattttttatttatttatttatttttttgtagagacagggcctccctgtgttgcccaggctgatgaactgtaatttttaacacacacagtgtagggaatgtgaaa

SEQ ID NO: 675849 - DNA, 120 bp, Artificial Sequence
  ENSG00000186141_20 (sequence is synthesized)
gactatcacagagtagaagaaaaaattattttcagggttagcaggtggattgtcccaagcagtcacactagaatctgtggactgaagccacatttgccagctccaggcttctaacacatc

SEQ ID NO: 675850 - DNA, 120 bp, Artificial Sequence
  ENSG00000186141_21 (sequence is synthesized)
tgaaactgtgtatgtagaacagctagctcaatgcctggcatatggtaagcacacagtaaattagcgccttcctcttctccatggttccttaaaactggcaacgctaaattctctctctca

SEQ ID NO: 675851 - DNA, 120 bp, Artificial Sequence
  ENSG00000186141_22 (sequence is synthesized)
gtatcacggatataatttgtcccagcagctttaattcatttaaagcagttagatgttttataatatcttcagttttctctcaccaatgtgttttctaattgtttaaacacttgagtgtca

SEQ ID NO: 675852 - DNA, 120 bp, Artificial Sequence
  ENSG00000186141_23 (sequence is synthesized)
aacaattgccagccaccatactaaacacaacatacaaggatagataaataagacaccatctctgccctcaagccagtcaccatcatttactaagcacctgttttgtgctaagtactgggg

SEQ ID NO: 675853 - DNA, 120 bp, Artificial Sequence
  ENSG00000186141_24 (sequence is synthesized)
taagccttggggatataaagattaataaattttgagcatacagtctagtaggaggagacaaataagtacataagtaccaggaagtattaggggtgctacagtagaagagtaaacactatg

SEQ ID NO: 675854 - DNA, 120 bp, Artificial Sequence
  ENSG00000186141_25 (sequence is synthesized)
tacagagaggccagaaagggaaaagggtcaggcagggaagggaacacagagagtgacaatgtatagtttgaaagatgaggatgctttatttgcaaactatcttaacaagggattcgtaac

SEQ ID NO: 675855 - DNA, 120 bp, Artificial Sequence
  ENSG00000186141_26 (sequence is synthesized)
cagaatatataaggagctcaaacaatagcaaaaagaacaatccaacttaaaaatggccaaaagatcttaataggtagttttcgaaagaagatacacaaatggccgacagatacatcaaaa

SEQ ID NO: 675856 - DNA, 120 bp, Artificial Sequence
  ENSG00000186141_27 (sequence is synthesized)
aatgttcaacatcactaatcagagaaatggaaatcaaaatcaatgagataacatctcaccccaattcattacttttatcaagaagaaagaatgaatgctagtgaggatgtggaaaaagga

SEQ ID NO: 675857 - DNA, 120 bp, Artificial Sequence
  ENSG00000186141_28 (sequence is synthesized)
gagccctgcctggtacactgttgggaatgtaaattggtacagccactgtggaagactacagaggttcctcaaaaaactaaaaacagaactatgctccagcagttccactactgggtatat

SEQ ID NO: 675858 - DNA, 120 bp, Artificial Sequence
  ENSG00000186141_29 (sequence is synthesized)
atatatctccaaaaggaaagaaatcaatgtatcaaaaagatacctgcactcccatgtttattgcagcagtattcacgatagccaaaacatggaatcaacctaagtgcccatcaatagatg

SEQ ID NO: 675859 - DNA, 120 bp, Artificial Sequence
  ENSG00000186141_30 (sequence is synthesized)
aaaggctaaagaaaatgtattattcagccataagaatgaatgaaatcctgtcattggcagcaacatggatggaattggaggtcattatgttaagtaaaataaaccaagcacagaaacaaa

SEQ ID NO: 675860 - DNA, 120 bp, Artificial Sequence
  ENSG00000186141_31 (sequence is synthesized)
gctgtctgaacgtggcggcactgactggaccaagagaccacgtccgaaacgggaacctgtgtaaaggaagtgtagagctaggagccaagcgccttggaagccctttccgaggatggcaaa

SEQ ID NO: 675861 - DNA, 120 bp, Artificial Sequence
  ENSG00000186141_32 (sequence is synthesized)
caggaattcaagaccagcctggaaaatatagtgagaccatgtctccaccacccccaaaagattaaaaaattagcggagcatggtggtgcatgcctgtagttccggctacttgggggactg

SEQ ID NO: 675862 - DNA, 120 bp, Artificial Sequence
  ENSG00000186141_33 (sequence is synthesized)
tgcttgagccggaggtggaagttgcagtgagctgatatcatgccaccgcactccatcctaggtaacagagcaagacccagtctcaaaataaataaataaaataaacacaggtactgaatg

SEQ ID NO: 675863 - DNA, 120 bp, Artificial Sequence
  ENSG00000186141_34 (sequence is synthesized)
actaggaaacaggaaagtgaaattcccaaaacaccagaccatgccccatccaggaccttctatttatatactgtgaacatcctgtcagctgcccgaatgttgttgcacaggtgctacaag

SEQ ID NO: 675864 - DNA, 120 bp, Artificial Sequence
  ENSG00000186141_35 (sequence is synthesized)
tgcccacttcgccctgagctgctgaaatagaactatgtgcattccttgtctgtcttctctttcctcagagcatagccaacttgatagaaaggaggcaatttgaaaccaaagagaataagt

SEQ ID NO: 675865 - DNA, 120 bp, Artificial Sequence
  ENSG00000186141_36 (sequence is synthesized)
aagtaacattttcagttgagttatttacatctttcaagatcaagggcctcaggggaaatttcctctagaaataggaatcaatagacgctgggcctggcagggtggctcatgcctgtaatc

SEQ ID NO: 675866 - DNA, 120 bp, Artificial Sequence
  ENSG00000186143_0 (sequence is synthesized)
agctcccattggggtcggcgaacctggtgccaccccttagacaaagtcccagtctcccagaggcttttaccagctggccccattccttctgctgctgggtataataaggtcctctcaacg

SEQ ID NO: 675867 - DNA, 120 bp, Artificial Sequence
  ENSG00000186143_1 (sequence is synthesized)
ctgaagtgcctgtgaaacacagcccagaggagttctcattggtcctatgggctttgtcttcctctctgccccacccagataatcgctgctgcccctccactcccaagatgcagctgtgat

SEQ ID NO: 675868 - DNA, 120 bp, Artificial Sequence
  ENSG00000186143_2 (sequence is synthesized)
tctccatccccacacatccctcatcaatggttgactgcaaagaagtgagaagccaagcttagattcatgctcatgcctgaacaccctgagagcctggtgctggagggctgggtatcccct

SEQ ID NO: 675869 - DNA, 120 bp, Artificial Sequence
  ENSG00000186143_3 (sequence is synthesized)
tggcctgccaccagcacctgcacccacaccaggctggagccacgctctgcgcacagaaggtggccttgatttctcaggcacagctgacctcagagatactggtcctgactctgccaggtc

SEQ ID NO: 675870 - DNA, 120 bp, Artificial Sequence
  ENSG00000186143_4 (sequence is synthesized)
tcttatccctagtcttgttgccccagttccttctggattcaaggcgatgttgcctcaaaacaaggaccaggtgctgccacagacctcagtgctccctgggcgccccacttggggcttctc

SEQ ID NO: 675871 - DNA, 120 bp, Artificial Sequence
  ENSG00000186143_5 (sequence is synthesized)
acaacttgtggactcctctcctcacaacctacagcctctctctccccatcagggcctccctccctctcaaccaccgttctcttccactcagtcccgtcgtccctcctcccctccaccagc

SEQ ID NO: 675872 - DNA, 120 bp, Artificial Sequence
  ENSG00000186143_6 (sequence is synthesized)
atccccctctcctggcttccaattcggctcttgtgactcaaattctgactttgctccacatccctattctccctctctcccaagttcccctactttctttcaccagaactacctctctct

SEQ ID NO: 675873 - DNA, 120 bp, Artificial Sequence
  ENSG00000186143_7 (sequence is synthesized)
cccccgtccacgtgcatcctctccctccaaccactggctgtacccctctccccctctgaccccttccttttctccctcccagcctcagaactcctcccttccccactcaccttgccagtc

SEQ ID NO: 675874 - DNA, 120 bp, Artificial Sequence
  ENSG00000186143_8 (sequence is synthesized)
acatggcgctggcatcagtacagggacactgggtccgggtcccctggagtggtggagagatgcgtgccaagcgagaaggatcctgcacagttcagggacccaggggccctggcccaggcc

SEQ ID NO: 675875 - DNA, 120 bp, Artificial Sequence
  ENSG00000186143_9 (sequence is synthesized)
ctggtggtccagctggggcaccgccgcatcgcacacgacctgcggctactgcttttgcagcacctgtggctaggcagaaccggccaggccccagtcgtggagtatcctatatgcctggtg

SEQ ID NO: 675876 - DNA, 120 bp, Artificial Sequence
  ENSG00000186143_10 (sequence is synthesized)
tgcctccggccccgcagcccctcctgccccctccccaggtacaggactggaccccggctgcttgctttccctcaactactgccctgtgtgcagggccaggaatctgggccactccggata

SEQ ID NO: 675877 - DNA, 120 bp, Artificial Sequence
  ENSG00000186143_11 (sequence is synthesized)
ggcatcggcttcggcctccgcctgcctcagggccaggccagggccttgcatctgctgcccgagaaaaggccgaaggaagcagggcctcagggcaaggctactcaggcctgtgggcatcaa

SEQ ID NO: 675878 - DNA, 120 bp, Artificial Sequence
  ENSG00000186143_12 (sequence is synthesized)
ttgccagcatctcagcctccagcagctcaggcccgggccgacccagtcccaggcacaccctcccagaccaggagcttcaggtctgcaggccttcaatcaccaaactccccacgatgtttc

SEQ ID NO: 675879 - DNA, 120 bp, Artificial Sequence
  ENSG00000186143_13 (sequence is synthesized)
tccgggcctccacctcgggcaccaaaacaggtcactacctccctgaagcccaggccttgccctggcccaaagaggccagtttctctggagctcattctccaaaagtcatcagtctagttc

SEQ ID NO: 675880 - DNA, 120 bp, Artificial Sequence
  ENSG00000186143_14 (sequence is synthesized)
cagagccacggaggccccctggaacaccccctccaaacccaaccctcccaaccaggccccagatctcggggagtccccgagacaccctgaagggctggctggccggaggtcaggtgtgtt

SEQ ID NO: 675881 - DNA, 120 bp, Artificial Sequence
  ENSG00000186143_15 (sequence is synthesized)
ctcctgctctgaaccctgggagccccttgtggagtctgctgtctccaggctgaagaggaccaagggcaccaaggccccattcagccctccgtgtatctaataaagtctgaccctgtgaaa

SEQ ID NO: 675882 - DNA, 120 bp, Artificial Sequence
  ENSG00000186146_0 (sequence is synthesized)
gaatattatcattgcagactgaagtgcaatgctgatgaacatgcaattagatactgtgctgacttcagcatctgctgcaaactgaagatcattgaaattgacggacaaaagaagtggtga

SEQ ID NO: 675883 - DNA, 120 bp, Artificial Sequence
  ENSG00000186150_0 (sequence is synthesized)
gttgatagggagaagccaacatctcccgcaggaccccctaatcttcagggcagctcccagagcatggatccctcctgattccactcagcccgatgttcctcacagtcaagctgctcctgg

SEQ ID NO: 675884 - DNA, 120 bp, Artificial Sequence
  ENSG00000186150_1 (sequence is synthesized)
gccagagatgcagtctgaaggtgtcagggcaagagagtgtagccacgctgaagagactggtgtccaggcggctgaaggtgcctgaggagcagcagcacctgcttttccgtggccagctcc

SEQ ID NO: 675885 - DNA, 120 bp, Artificial Sequence
  ENSG00000186150_2 (sequence is synthesized)
tggaggatgacaagcacctctctgactactgcattgggcccaatgcctctatcaatgtcatcatgcagcccttggagaagatggcgctaaaggaggcccaccagccgcagacccagcccc

SEQ ID NO: 675886 - DNA, 120 bp, Artificial Sequence
  ENSG00000186150_3 (sequence is synthesized)
tgtggcaccagctgggactggtcctagctaaacactttgaaccacaggatgccaaggccgtgctgcagctgctaaggcaggagcacgaggagcgcctgcagaagataagcctggagcacc

SEQ ID NO: 675887 - DNA, 120 bp, Artificial Sequence
  ENSG00000186150_4 (sequence is synthesized)
tggagcagctggcccagtacctcctggcagaggagcctcacgtggagccagctggagagagggagcttgaggcgaaggcacggcctcagagctcctgtgacatggaggagaaggaggagg

SEQ ID NO: 675888 - DNA, 120 bp, Artificial Sequence
  ENSG00000186150_5 (sequence is synthesized)
cagcagctgatcagtaaacgggccatcctacccatttgcatgctaaaattctcccggcctcatccttacgtgttccctggtgacttttcctactacttcctgctgatgtggatgcgtcca

SEQ ID NO: 675889 - DNA, 120 bp, Artificial Sequence
  ENSG00000186150_6 (sequence is synthesized)
ggtcctccctctgaaatgcagagtgaaccaaccctcatcaccatgcttcccctagaagggttctgatcaccggagggcagccccaaaggccacagtcccctcctgtgctggcagctttgc

SEQ ID NO: 675890 - DNA, 120 bp, Artificial Sequence
  ENSG00000186150_7 (sequence is synthesized)
ccacacatacccagcagctccccaggctgaaagcagccctggcccagggtctccatggttctaggcagaccctctttctccttcgggacagaaagacaatgtgagttcattttcctccat

SEQ ID NO: 675891 - DNA, 120 bp, Artificial Sequence
  ENSG00000186150_8 (sequence is synthesized)
cctcagaccgtgacatctcccctaggctccccagcagccaagaggagaggaatgtcaggtagctgccccttgccttctgggtgaggctgcccctgctgttctcctgcttgtgcttccagc

SEQ ID NO: 675892 - DNA, 120 bp, Artificial Sequence
  ENSG00000186150_9 (sequence is synthesized)
ttaagggacaggcacagcagaggtgagagtgggaggagggcacgtaccgggtgccagccctggagccctcagggagacagacacagaccaagaatagcaggaaactgagcctcaggcaga

SEQ ID NO: 675893 - DNA, 120 bp, Artificial Sequence
  ENSG00000186150_10 (sequence is synthesized)
aaaaaagttcagcaaagtcatacactccctgtggccagcgtgaacagagccatgccccaccctcccagactgatcagtcagtaggtatcacagctcacattacctgcccagcgctgccca

SEQ ID NO: 675894 - DNA, 120 bp, Artificial Sequence
  ENSG00000186150_11 (sequence is synthesized)
aggctccctggaaggaaaaatggtatctgtcaatgaggatccttgccctcacagagcacgcagcctagatgcagagagctgctatacatgtgaaaagtaaagtggtgacatgaaactaga

SEQ ID NO: 675895 - DNA, 120 bp, Artificial Sequence
  ENSG00000186153_0 (sequence is synthesized)
gcagtgcgcaggcgtgagcggtcgggccccgacgcgcgcgggtctcgtttggagcgggagtgagttcctgagcgagtggacccggcagcgggcgataggggggccaggtgcctccacagt

SEQ ID NO: 675896 - DNA, 120 bp, Artificial Sequence
  ENSG00000186153_1 (sequence is synthesized)
cagccatggcagcgctgcgctacgcggggctggacgacacggacagtgaggacgagctgcctccgggctgggaggagagaaccaccaaggacggctgggtttactacgccaatcacaccg

SEQ ID NO: 675897 - DNA, 120 bp, Artificial Sequence
  ENSG00000186153_2 (sequence is synthesized)
aggagaagactcagtgggaacatccaaaaactggaaaaagaaaacgagtggcaggagatttgccatacggatgggaacaagaaactgatgagaacggacaagtgttttttgttgaccata

SEQ ID NO: 675898 - DNA, 120 bp, Artificial Sequence
  ENSG00000186153_3 (sequence is synthesized)
taaataaaagaaccacctacttggacccaagactggcgtttactgtggatgataatccgaccaagccaaccacccggcaaagatacgacggcagcaccactgccatggaaattctccagg

SEQ ID NO: 675899 - DNA, 120 bp, Artificial Sequence
  ENSG00000186153_4 (sequence is synthesized)
gccgggatttcactggcaaagtggttgtggtcactggagctaattcaggaatagggttcgaaaccgccaagtcttttgccctccatggtgcacatgtgatcttggcctgcaggaacatgg

SEQ ID NO: 675900 - DNA, 120 bp, Artificial Sequence
  ENSG00000186153_5 (sequence is synthesized)
caagggcgagtgaagcagtgtcacgcattttagaagaatggcataaagccaaggtagaagcaatgaccctggacctcgctctgctccgtagcgtgcagcattttgctgaagcattcaagg

SEQ ID NO: 675901 - DNA, 120 bp, Artificial Sequence
  ENSG00000186153_6 (sequence is synthesized)
ccaagaatgtgcctcttcatgtgcttgtgtgcaacgcagcaacttttgctctaccctggagtctcaccaaagatggcctggagaccacctttcaagtgaatcatctggggcacttctacc

SEQ ID NO: 675902 - DNA, 120 bp, Artificial Sequence
  ENSG00000186153_7 (sequence is synthesized)
ttgtccagctcctccaggatgttttgtgccgctcagctcctgcccgtgtcattgtggtctcctcagagtcccatcgatttacagatattaacgactccttgggaaaactggacttcagtc

SEQ ID NO: 675903 - DNA, 120 bp, Artificial Sequence
  ENSG00000186153_8 (sequence is synthesized)
gcctctctccaacaaaaaacgactattgggcgatgctggcttataacaggtccaagctctgcaacatcctcttctccaacgagctgcaccgtcgcctctccccacgcggggtcacgtcga

SEQ ID NO: 675904 - DNA, 120 bp, Artificial Sequence
  ENSG00000186153_9 (sequence is synthesized)
catgcaacagggagctgccaccaccgtgtactgtgctgctgtcccagaactggagggtctgggagggatgtacttcaacaactgctgccgctgcatgccctcaccagaagctcagagcga

SEQ ID NO: 675905 - DNA, 120 bp, Artificial Sequence
  ENSG00000186153_10 (sequence is synthesized)
cagaagctcagagcgaagagacggcccggaccctgtgggcgctcagcgagaggctgatccaagaacggcttggcagccagtccggctaagtggagctcagagcggatgggcacacacacc

SEQ ID NO: 675906 - DNA, 120 bp, Artificial Sequence
  ENSG00000186153_11 (sequence is synthesized)
cgccctgtgtgtgtcccctcacgcaagtgccagggctgggccccttccaaatgtccctccaacacagatccgcaagagtaaaggaaataagagcagtcacaacagagtgaaaaatcttaa

SEQ ID NO: 675907 - DNA, 120 bp, Artificial Sequence
  ENSG00000186153_12 (sequence is synthesized)
gtaccaatgggaagcagggaattcctggggtaaagtatcacttttctggggctgggctaggcataggtctctttgctttctggtggtggcctgtttgaaagtaaaaacctgcttggtgtg

SEQ ID NO: 675908 - DNA, 120 bp, Artificial Sequence
  ENSG00000186153_13 (sequence is synthesized)
taggttccgtatctccctggagaagcaccagcaattctctttcttttactgttatagaatagcctgaggtcccctcgtcccatccagctaccaccacggccaccactgcagccgggggct

SEQ ID NO: 675909 - DNA, 120 bp, Artificial Sequence
  ENSG00000186153_14 (sequence is synthesized)
ggccttctcctacttagggaagaaaaagcaagtgttcactgctccttgctgcattgatccaggagataattgtttcattcatcctgaccaagactgagccagcttagcaactgctgggga

SEQ ID NO: 675910 - DNA, 120 bp, Artificial Sequence
  ENSG00000186153_15 (sequence is synthesized)
gacaaatctcagaaccttgtcccagccagtgaggatgacagtgacacccagagggagtagaatacgcagaactaccaggtggcaaagtacttgtcatagactcctttgctaatgctatgc

SEQ ID NO: 675911 - DNA, 120 bp, Artificial Sequence
  ENSG00000186153_16 (sequence is synthesized)
aaaaaattctttagagattataacaaatttttcaaatcattccttagataccttgaaaggcaggaagggaagcgtatatacttaagaatacacaggatattttggggggcagagaataaa

SEQ ID NO: 675912 - DNA, 120 bp, Artificial Sequence
  ENSG00000186153_17 (sequence is synthesized)
acgttagttaatccctttgtctgtcaatcacagtctcagttctcttgctttcacattgtacttaaacctcctgctgtgcctcgcatcctatgcttaataaaagaacatgcttgaatatca

SEQ ID NO: 675913 - DNA, 120 bp, Artificial Sequence
  ENSG00000186153_18 (sequence is synthesized)
gatgcgcacgccccttccctgcggcggggaggctgacaaggctccgctctatctctagcgcctcggagcgctctccggctttgctgtctagcccggcggcagcgcgatctcttaggcact

SEQ ID NO: 675914 - DNA, 120 bp, Artificial Sequence
  ENSG00000186153_19 (sequence is synthesized)
cagtgtcacgcattttagaagaatggaaaacaaaataccaccctccgccagaaaagtgcagaataaaaattttccactagcaaaagaaggaaaaaataaaagatcttgaatagtctcatc

SEQ ID NO: 675915 - DNA, 120 bp, Artificial Sequence
  ENSG00000186153_20 (sequence is synthesized)
gtttaccttggcgaggcctttcaccaagtccatggtttcagactgcctggtagaaggaggtcacttctgattgtcagtgactttgagctgagtgctgaaataaaatgataaacaagtcaa

SEQ ID NO: 675916 - DNA, 120 bp, Artificial Sequence
  ENSG00000186153_21 (sequence is synthesized)
ttcagctcgtgagaatcggttcgaaaccgccaagtcttttgccctccatggtgcacatgtgatcttggcctgcaggaacatggcaagggcgagtgaagcagtgtcacgcattttagaaga

SEQ ID NO: 675917 - DNA, 120 bp, Artificial Sequence
  ENSG00000186153_22 (sequence is synthesized)
atggatgaaagactgagtcttagggaacaaacagccgagagatgaaatgccacagggatgtctaggttcaaacagcaacagagagagaaggagaaattcctgcagatcatcagggactga

SEQ ID NO: 675918 - DNA, 120 bp, Artificial Sequence
  ENSG00000186153_23 (sequence is synthesized)
ggctaactgaagctttggaatggatacagtgctactctcagctgaaagcacaaatcacttccatcacgtatatgagattcctcttgcagcactgcagaggggtgataagcaagagttgat

SEQ ID NO: 675919 - DNA, 120 bp, Artificial Sequence
  ENSG00000186153_24 (sequence is synthesized)
cgatgacagaacacccacccaatttcttgactcattcttcaacgggcagggtctatacatgtggtatggctgcaatgtttgttgataacccctacattcacaaaacgggcgcatgggaac

SEQ ID NO: 675920 - DNA, 120 bp, Artificial Sequence
  ENSG00000186153_25 (sequence is synthesized)
ttgtttgctgccttctgccatgtgaggacacagcaagaaagcacatacaggaagtagagatggagccctcattagacgccagatctgctggtgccatgatcttggacttcccagcctcta

SEQ ID NO: 675921 - DNA, 120 bp, Artificial Sequence
  ENSG00000186153_26 (sequence is synthesized)
ggaattgaggtgtagagctgttgaagaacttgcccagggttgcagagctctttcacaggggcagagcatgggctgaacaccagacctgtctcacactaaagcatgtaagaagtgcctttg

SEQ ID NO: 675922 - DNA, 120 bp, Artificial Sequence
  ENSG00000186153_27 (sequence is synthesized)
cctcctgccatgattctgaggcctcctcagccatgtggaactagctgtgtaatattccacaacccagaggagcagcttgaagccagctaaactgtcattggttggacacagtgatcctcg

SEQ ID NO: 675923 - DNA, 120 bp, Artificial Sequence
  ENSG00000186153_28 (sequence is synthesized)
ggtctcttgtgttttcacatgtcttgggaacagaagtgctggcagctttggtttcaggccatctttccaaggaacgttgtctagcaaagaaacttgcaaggtacagatagtgtctccctc

SEQ ID NO: 675924 - DNA, 120 bp, Artificial Sequence
  ENSG00000186153_29 (sequence is synthesized)
aggagcagaggacaggatggctttctttccagtataataaagacagtgcctccttccaggacaacggtttggcagatttgcttgataaaggttggggtttctaagcttggggctcctcag

SEQ ID NO: 675925 - DNA, 120 bp, Artificial Sequence
  ENSG00000186153_30 (sequence is synthesized)
ccatgactgaaacgtactatgagcacggcatctaccgggctgttccacatcctccctgtgggactaggggccagggcaatgggaatcagtgcagaaataaagctcatgctgtttgctctg

SEQ ID NO: 675926 - DNA, 120 bp, Artificial Sequence
  ENSG00000186153_31 (sequence is synthesized)
ttctgaacctgaagaactttgtagattgaaagctgtagcttgtggacctctctctgtggagatcagcatctcagtatccagggggaagccatctcttcacccaaagcttccgctaggaga

SEQ ID NO: 675927 - DNA, 120 bp, Artificial Sequence
  ENSG00000186153_32 (sequence is synthesized)
ctccaggtaccccaagctggtttgggtttataccagtttgaaccgagggaccttcagctgaggaacatgtgctctgtgtgctggaagctcctggaggccccagggttatctctgctcact

SEQ ID NO: 675928 - DNA, 86 bp, Artificial Sequence
  ENSG00000186153_33 (sequence is synthesized)
gggaggatactcaagcatacccgtgtagaagaactgagcctcctgccaacagccatcaacagggagctgccaccaccgtgtactgt

SEQ ID NO: 675929 - DNA, 82 bp, Artificial Sequence
  ENSG00000186153_34 (sequence is synthesized)
gcttcctctccgtggaactggttcgaaaccgccaagtcttttgccctccatggtgcacatgtgatcttggcctgcaggaaca

SEQ ID NO: 675930 - DNA, 66 bp, Artificial Sequence
  ENSG00000186153_35 (sequence is synthesized)
atgctgacgtatgctgccttctctctctgcttcggctacctaaaagggaagggccctctatcctgt

SEQ ID NO: 675931 - DNA, 120 bp, Artificial Sequence
  ENSG00000186153_36 (sequence is synthesized)
gacgcgcactccagcgcagcgcgtgcggtgcaaagtgaaagtaactgttaaggagcttcagggaaaagggtccagggttcccagtaggggccggcccccttggtgggcctcgggtccagc

SEQ ID NO: 675932 - DNA, 120 bp, Artificial Sequence
  ENSG00000186153_37 (sequence is synthesized)
gggggtcacctggtggcttcccggcgcgccctctgctgttcaggatgcagcactgcgcggcgcggcgagggcaaagcggcctcatccccgccaaaaaataaagatgttttaaaaagcgca

SEQ ID NO: 675933 - DNA, 120 bp, Artificial Sequence
  ENSG00000186153_38 (sequence is synthesized)
acatcagaatcatctgaatcatcagaattgtgtattttggaaaaatcggattcatcaaatgaatcttcagccaacaactgttcgagaattatgttaacatcacatgcaggaatgctacat

SEQ ID NO: 675934 - DNA, 120 bp, Artificial Sequence
  ENSG00000186153_39 (sequence is synthesized)
cttcagccaacaactgttcgagaattatgttaacatcacatgcaggaatgctacattttctcggatttgacattttcagtgatggagaactattatattttgtaaatggaaataccacta

SEQ ID NO: 675935 - DNA, 120 bp, Artificial Sequence
  ENSG00000186160_0 (sequence is synthesized)
atatgggtgtgagctgtcatgcacatggctcctatctgaaaatcttgttcttctagaatccaggtctgctggccaacatctcagcagttttcaccctgcagacttaattaggcttcctct

SEQ ID NO: 675936 - DNA, 120 bp, Artificial Sequence
  ENSG00000186160_1 (sequence is synthesized)
tccttatgtcccctccctgaatatggcattttgaaagcccagtgttgcccagggggcatctcctttgtgtttatgagagacctgcattctccctggctcagttctctcaggctctccaga

SEQ ID NO: 675937 - DNA, 120 bp, Artificial Sequence
  ENSG00000186160_2 (sequence is synthesized)
gctcaggacctctgagaagaatggagccctcctggcttcaggaactcatggctcaccccttcttgctgctgatcctcctctgcatgtctctgctgctgtttcaggtaatcaggttgtacc

SEQ ID NO: 675938 - DNA, 120 bp, Artificial Sequence
  ENSG00000186160_3 (sequence is synthesized)
agaggaggagatggatgatcagagccctgcacctgtttcctgcaccccctgcccactggttctatggccacaaggagttttacccagtaaaggagtttgaggtgtatcataagctgatgg

SEQ ID NO: 675939 - DNA, 120 bp, Artificial Sequence
  ENSG00000186160_4 (sequence is synthesized)
aaaaatacccatgtgctgttcccttgtgggttggaccctttacgatgttcttcagtgtccatgacccagactatgccaagattctcctgaaaagacaagatcccaaaagtgctgttagcc

SEQ ID NO: 675940 - DNA, 120 bp, Artificial Sequence
  ENSG00000186160_5 (sequence is synthesized)
acaaaatccttgaatcctgggttggtcgaggacttgtgaccctggatggttctaaatggaaaaagcaccgccagattgtgaaacctggcttcaacatcagcattctgaaaatattcatca

SEQ ID NO: 675941 - DNA, 120 bp, Artificial Sequence
  ENSG00000186160_6 (sequence is synthesized)
ccatgatgtctgagagtgttcggatgatgctgaacaaatgggaggaacacattgcccaaaactcacgtctggagctctttcaacatgtctccctgatgaccctggacagcatcatgaagt

SEQ ID NO: 675942 - DNA, 120 bp, Artificial Sequence
  ENSG00000186160_7 (sequence is synthesized)
gtgccttcagccaccagggcagcatccagttggacagtaccctggactcatacctgaaagcagtgttcaaccttagcaaaatctccaaccagcgcatgaacaattttctacatcacaacg

SEQ ID NO: 675943 - DNA, 120 bp, Artificial Sequence
  ENSG00000186160_8 (sequence is synthesized)
acctggttttcaaattcagctctcaaggccaaatcttttctaaatttaaccaagaacttcatcagttcacagagaaagtaatccaggaccggaaggagtctcttaaggataagctaaaac

SEQ ID NO: 675944 - DNA, 120 bp, Artificial Sequence
  ENSG00000186160_9 (sequence is synthesized)
gatactactcagaaaaggcgctgggattttctggacatacttttgagtgccaaaagcgaaaacaccaaagatttctctgaagcagatctccaggctgaagtgaaaacgttcatgtttgca

SEQ ID NO: 675945 - DNA, 120 bp, Artificial Sequence
  ENSG00000186160_10 (sequence is synthesized)
ggacatgacaccacatccagtgctatctcctggatcctttactgcttggcaaagtaccctgagcatcagcagagatgccgagatgaaatcagggaactcctaggggatgggtcttctatt

SEQ ID NO: 675946 - DNA, 120 bp, Artificial Sequence
  ENSG00000186160_11 (sequence is synthesized)
acctgggaacacctgagccagatgccttacaccacgatgtgcatcaaggaatgcctccgcctctacgcaccggtagtaaacatatcccggttactcgacaaacccatcacctttccagat

SEQ ID NO: 675947 - DNA, 120 bp, Artificial Sequence
  ENSG00000186160_12 (sequence is synthesized)
ggacgctccttacctgcaggaataactgtgtttatcaatatttgggctcttcaccacaacccctatttctgggaagaccctcaggtctttaaccccttgagattctccagggaaaattct

SEQ ID NO: 675948 - DNA, 120 bp, Artificial Sequence
  ENSG00000186160_13 (sequence is synthesized)
gaaaaaatacatccctatgccttcataccattctcagctggattaaggaactgcattgggcagcattttgccataattgagtgtaaagtggcagtggcattaactctgctccgcttcaag

SEQ ID NO: 675949 - DNA, 120 bp, Artificial Sequence
  ENSG00000186160_14 (sequence is synthesized)
ctggctccagaccactcaaggcctccccagcctgttcgtcaagttgtcctcaagtccaagaatggaatccatgtgtttgcaaaaaaagtttgctaattttaagtcctttcgtataagaat

SEQ ID NO: 675950 - DNA, 120 bp, Artificial Sequence
  ENSG00000186160_15 (sequence is synthesized)
taatgagacaattttcctaccaaaggaagaacaaaaggataaatataatacaaaatatatgtatatggttgtttgacaaattatataacttaggatacttctgactggttttgacatcca

SEQ ID NO: 675951 - DNA, 120 bp, Artificial Sequence
  ENSG00000186160_16 (sequence is synthesized)
ttaacagtaattttaatttctttgctgtatctggtgaaacccacaaaaacacctgaaaaaactcaagctgacttccactgcgaagggaaattattggtttgtgtaactagtggtagagtg

SEQ ID NO: 675952 - DNA, 120 bp, Artificial Sequence
  ENSG00000186160_17 (sequence is synthesized)
gctttcaagcatagtttgatcaaaactccactcagtatctgcattacttttatctctgcaaatatctgcatgatagctttattctcagttatctttccccataataaaaaatatctgcca

SEQ ID NO: 675953 - DNA, 120 bp, Artificial Sequence
  ENSG00000186166_0 (sequence is synthesized)
agaggccgccggatggcgtaggatcggccgctggtggtggtgataccgggtacccgggctatggcgccggcgcagcgctgccctctgtgccgccagaccttcttctgtggtcgcgggcac

SEQ ID NO: 675954 - DNA, 120 bp, Artificial Sequence
  ENSG00000186166_1 (sequence is synthesized)
gtttacagccgcaagcaccagcggcagctgaaggaggctttggagaggctcctgccccaggtggaggcggcccgcaaggccatccgcgccgctcaggtggagcgctatgtgcccgaacac

SEQ ID NO: 675955 - DNA, 120 bp, Artificial Sequence
  ENSG00000186166_2 (sequence is synthesized)
gagcgatgctgctggtgcctgtgctgcggctgtgaggtgcgggaacacctgagccatggaaacctgacggtgctgtacggggggctgctggagcatctggccagcccagagcacaagaaa

SEQ ID NO: 675956 - DNA, 120 bp, Artificial Sequence
  ENSG00000186166_3 (sequence is synthesized)
gcaaccaacaaattctggtgggagaacaaagctgaggtccagatgaaagagaagtttctggtcactccccaggattatgcgcgattcaagaaatccatggtgaaaggtttggattcctat

SEQ ID NO: 675957 - DNA, 120 bp, Artificial Sequence
  ENSG00000186166_4 (sequence is synthesized)
gaagaaaaggaggataaagtgatcaaggagatggcagctcagatccgtgaggtggagcagagccgacaggaggtggttcggtctgtcttagagcctcaggcagtgccagacccagaagag

SEQ ID NO: 675958 - DNA, 120 bp, Artificial Sequence
  ENSG00000186166_5 (sequence is synthesized)
ttacagcagccctcaaatttggacctgccaccagctccagagcttgactggatggagacaggaccatctctgacattcattggccatcaggatataccaggagttggtaacatccactca

SEQ ID NO: 675959 - DNA, 120 bp, Artificial Sequence
  ENSG00000186166_6 (sequence is synthesized)
ggtgccacacctccctggatgatccaagatgaagaatacattgctgggaaccaagaaataggaccatcctatgaagaatttcttaaagaaaaggaaaaacagaagttgaaaaaactcccc

SEQ ID NO: 675960 - DNA, 120 bp, Artificial Sequence
  ENSG00000186166_7 (sequence is synthesized)
ccagaccgagttggggccaactttgatcacagctccaggaccagtgcaggctggctgccctcttttggccgcgtctggaataatggacgccgctggcagtccagacatcaattcaaaact

SEQ ID NO: 675961 - DNA, 120 bp, Artificial Sequence
  ENSG00000186166_8 (sequence is synthesized)
gaagctgcagcaatgaagaagcagtcacatacagaaaaaagctaatcatgctctctaccaactaccatgaggctaaaagcaaagtcaacaaacccctattataccttccaccaaattctt

SEQ ID NO: 675962 - DNA, 120 bp, Artificial Sequence
  ENSG00000186166_9 (sequence is synthesized)
tatcattgtctttcttaggaaacagacatactcattcatttgatttaataaagttttatttttccaaatgtacagctggttggacctgtaaaaaaaaattaaaagaatcagaaccataaa

SEQ ID NO: 675963 - DNA, 120 bp, Artificial Sequence
  ENSG00000186166_10 (sequence is synthesized)
agaagagggctcttcagcacctagaagctggaaagggatgaacaggtaagactattagggaatctcttgttgggaatttgacatcttagaacattctgcaaccttttgcctgggaaatgg

SEQ ID NO: 675964 - DNA, 120 bp, Artificial Sequence
  ENSG00000186166_11 (sequence is synthesized)
tgattttctacctattcaagccactgctgcctccactgcaggcttttccttcttccttcactgttccctagtagtgttctcagacctcttctcaccctccaaagcgatcctattcacatg

SEQ ID NO: 675965 - DNA, 120 bp, Artificial Sequence
  ENSG00000186166_12 (sequence is synthesized)
tattgacacttaggagtgccaactcctaaatcttgccctctgtagaactcatagttccaactcaacacaggacattaaatatcccacaggcatctgaaactaacccccaccactcctata

SEQ ID NO: 675966 - DNA, 120 bp, Artificial Sequence
  ENSG00000186166_13 (sequence is synthesized)
tttccaatcactagatgcagatcctttccttttccatctcccatatcctgtcaacaagcggtcaattttaacctgtctgcctccattcagcctttgggcaatttctactcccccttcaat

SEQ ID NO: 675967 - DNA, 120 bp, Artificial Sequence
  ENSG00000186166_14 (sequence is synthesized)
cctgcctcacaaacagaaaatcattgtaccacttatgattttactctacacttcagctgtattgtgttgcttcgggcttttgcagttgccattgtctaaaacctgctttccttccctcat

SEQ ID NO: 675968 - DNA, 120 bp, Artificial Sequence
  ENSG00000186166_15 (sequence is synthesized)
gttgcaaatgtaatttacgtaacttgtgcttaatgctcttccccaattatatgtatgctgtgagggcaaggttttgctcccctggcatgtaatagccactctacttacagacatctccac

SEQ ID NO: 675969 - DNA, 120 bp, Artificial Sequence
  ENSG00000186166_16 (sequence is synthesized)
tgttatgactgtgagcttcctgaggacagggttgtcttagagtgacttactgtgctttcaaagtttaacatcagctggggtgcagaattagcattgtggcagcagtcacacccacctctt

SEQ ID NO: 675970 - DNA, 120 bp, Artificial Sequence
  ENSG00000186166_17 (sequence is synthesized)
ttaaagtgtgctttgtctatcgtttctaggatttttttttttaatcatgcctagactttaactagcactttttttcccatttccaactacaggatataccaggagttggtaacatccact

SEQ ID NO: 675971 - DNA, 120 bp, Artificial Sequence
  ENSG00000186166_18 (sequence is synthesized)
gccgcaagcaccagcggcagctgaaggaggctttggagaggctcctgccccaggtgcggaggcaaggctagagatgggatgggagtgcggggcaggtcagtgaaggccagagcgggtgtg

SEQ ID NO: 675972 - DNA, 120 bp, Artificial Sequence
  ENSG00000186166_19 (sequence is synthesized)
ggagcttactctattaactggaaagttcaggagggacttacgaagaatctgctgtcttcatagcacttcttattctaggtactatattggacacaaaaatgtgacagttcttgaggttta

SEQ ID NO: 675973 - DNA, 120 bp, Artificial Sequence
  ENSG00000186166_20 (sequence is synthesized)
tttcaagtgaactcgtgcagttcaaacttgtgctgtgcaagagtcaactgtatttgcttattttctcaaaaaggaatgcctaaaggataatcaagaaactaatgaaactgccagatgtgg

SEQ ID NO: 675974 - DNA, 120 bp, Artificial Sequence
  ENSG00000186166_21 (sequence is synthesized)
gtttgggatacacctaccacattatccaaccgttccacccctaactagagaaaagaaagcctgtctacatagacttgtacacaaatcttcagaacagcttcacttgtagcagctccaaat

SEQ ID NO: 675975 - DNA, 120 bp, Artificial Sequence
  ENSG00000186166_22 (sequence is synthesized)
tggaaacaattcagatgtctatcaacaggcaaatggattaacaatggaatagtattccaggatgaagacagaattattgatacgtacgacacagatgaatctcagaagtccagacctggc

SEQ ID NO: 675976 - DNA, 120 bp, Artificial Sequence
  ENSG00000186166_23 (sequence is synthesized)
ccacacacagaaaatcctaaaaaatacaaaccaataaagcaactgaaagatcaccgattgcctggacatgaaaatattttaatgggggcagtgatacttacagggggatgtttggggtct

SEQ ID NO: 675977 - DNA, 120 bp, Artificial Sequence
  ENSG00000186166_24 (sequence is synthesized)
agattgtaatggcttcgctcaaaagtcaccaaatttaagtgtgtatcgtttatgtcagttgtgcctcaaagccattttaaaatgactgtcacatatggggtatgtcgctttaaattagcc

SEQ ID NO: 675978 - DNA, 120 bp, Artificial Sequence
  ENSG00000186166_25 (sequence is synthesized)
tagggccttctaaagctccagaattcctgggctttgcttttagacatttctagctcttaatgaggagaggtaagctaacagctaggacatgtttcacaatagcctgaagacttaaaaaaa

SEQ ID NO: 675979 - DNA, 120 bp, Artificial Sequence
  ENSG00000186166_26 (sequence is synthesized)
catttgatgacaacctcctaggggagatggggagggaagtgggagatggcctcatagcagcttctggcagaccttccaccctcgtgttccaggaggattaaacaagcctttcagccacaa

SEQ ID NO: 675980 - DNA, 120 bp, Artificial Sequence
  ENSG00000186166_27 (sequence is synthesized)
ttcggtaaggtgtggctcaagccattgtctccttggatatattcaaggctctcagggaacactgttgatagtggtattggtattatactgaaactttgtgttgagaaccagggttttgag

SEQ ID NO: 675981 - DNA, 120 bp, Artificial Sequence
  ENSG00000186166_28 (sequence is synthesized)
aaccagggttttcactatggcaaaaggaagatacaagtaaggaatggaggcatttgaatagggaggtgacagtacaaattactgatttaaggccaggcatagtggctgatgcctgtaatc

SEQ ID NO: 675982 - DNA, 120 bp, Artificial Sequence
  ENSG00000186166_29 (sequence is synthesized)
gcttgagcccaggagttcgagaccagcatgggtgacatggcaaaaccctgtttctacaaaaaacacaaaaattagccaggcatagtggtgctgtcctgtagtcctacctactcaggaagc

SEQ ID NO: 675983 - DNA, 120 bp, Artificial Sequence
  ENSG00000186166_30 (sequence is synthesized)
catagtggtgctgtcctgtagtcctacctactcaggaagctaaggcaggaggatctcttgagcctgggagcctcttgagcagaggttgcagcgagctgaggttgtgccactgcactccag

SEQ ID NO: 675984 - DNA, 120 bp, Artificial Sequence
  ENSG00000186166_31 (sequence is synthesized)
acagagcgagcccgtctcaaaaaaaagacaaagaaatttaggacagtatgcaagatttggcctggattcttctgaggatgtgaagtaatggaaacagtaagactgttccagactagggga

SEQ ID NO: 675985 - DNA, 120 bp, Artificial Sequence
  ENSG00000186166_32 (sequence is synthesized)
ggactttgggattggaggtgagagtagagaaggcataatgcacgtttttgagacgagggaaatgtgaatatagcctgtatgcctacactcaagtctgaagacatgtaaaccatgtctata

SEQ ID NO: 675986 - DNA, 120 bp, Artificial Sequence
  ENSG00000186166_33 (sequence is synthesized)
ctaaccagccaaatatttgaacactaaaaggaagaattttcttaatgtggtaatggtatcatggttgtatagaatgttcctcctcttgggagatgtgtgttgaaaatagggtttgacgtc

SEQ ID NO: 675987 - DNA, 120 bp, Artificial Sequence
  ENSG00000186166_34 (sequence is synthesized)
taaacctattttgttttggcaaaaaggacgtgtgtctgtacaaaagaagtggagccagtatggcaaaatgtttacaaggactctgggtgagaggtacataggtgcttactatactgtttt

SEQ ID NO: 675988 - DNA, 120 bp, Artificial Sequence
  ENSG00000186166_35 (sequence is synthesized)
gtttctgaatttggaatttctcaaaattaaaaaaatatctactgaggagcttttcgttttaactggtggggaatgggttctgggtggttttgccccttttctttttagattcaagaaatc

SEQ ID NO: 675989 - DNA, 120 bp, Artificial Sequence
  ENSG00000186174_0 (sequence is synthesized)
cgtgcgtgtcttgtctccctgtccacgtgtgagctgtgagtgtgtgtgagtcagagttcgggtgtctgtgggtctctgagcctctgctggcagcacccggggctcgccaagctcttgccg

SEQ ID NO: 675990 - DNA, 120 bp, Artificial Sequence
  ENSG00000186174_1 (sequence is synthesized)
gctggcgcgcgcccagcccctggcgggacttgtccgtgtgtctgtccgcgcgcggggcctggagaagcacgctgcagtcctgtccgcctcccgctcgctgcctcgctggctgtcgctcgc

SEQ ID NO: 675991 - DNA, 120 bp, Artificial Sequence
  ENSG00000186174_2 (sequence is synthesized)
tcgctctgcctctccgcccgggctctgccgaagggggcggggtgggggtgcagggcggggggaggggaggctcctgcattcttgcggtcggggaggaatccgagccagcgttactggtct

SEQ ID NO: 675992 - DNA, 120 bp, Artificial Sequence
  ENSG00000186174_3 (sequence is synthesized)
cgttactggtctccagaagagcccagctgcagccccggggccccgccaggcctctcgctgcccgcccgggcctgctgggatgggcacgggctaggcctcgagctggggacggggcggggc

SEQ ID NO: 675993 - DNA, 120 bp, Artificial Sequence
  ENSG00000186174_4 (sequence is synthesized)
ccgggccccctccacggctggagcgctctgggggtggggcacgaggggtaccccaccctgggtgaggggcgcgtctgggagcaggaatccctcagggggccaggggagacctcacagccg

SEQ ID NO: 675994 - DNA, 120 bp, Artificial Sequence
  ENSG00000186174_5 (sequence is synthesized)
ccccacacggcacctttgctacctagccttttagtgaattctgtctctgccgcccgtcggggcggaggcttgctggagactgcaagccccctgagggcaaggtgcgggagggatggggac

SEQ ID NO: 675995 - DNA, 120 bp, Artificial Sequence
  ENSG00000186174_6 (sequence is synthesized)
agggctggcctccaggatcgagaccccatctcgtaatcctctttttccagtgccaccccaccctatccagctccctagtcccagggctgttgggtcctcccttctcccctccccctctga

SEQ ID NO: 675996 - DNA, 120 bp, Artificial Sequence
  ENSG00000186174_7 (sequence is synthesized)
caccccctccccaagtcacgagttttctctttggggcttgttgctgcagtccgtgctccagtaccgagtacctggctgggccctgggcacgcacaggggccgtagccccactgtgtgtgg

SEQ ID NO: 675997 - DNA, 120 bp, Artificial Sequence
  ENSG00000186174_8 (sequence is synthesized)
gagccatgaggatcctggctaacaagacaaggttaccccaccccaggaggagagaagctccagggagcccgccgctgtccccccgcggtcattgcccccctgccccagccaagccaatgc

SEQ ID NO: 675998 - DNA, 120 bp, Artificial Sequence
  ENSG00000186174_9 (sequence is synthesized)
acccagaaaataaattgaccaatcatggcaagacagggaatggcggggcccaatctcagcaccagaatgtgaaccaaggacccacctgcaacgtgggctcgaagggcgtgggggcgggga

SEQ ID NO: 675999 - DNA, 120 bp, Artificial Sequence
  ENSG00000186174_10 (sequence is synthesized)
accatggggccaaggccaaccagatctcgcctagcaactcaagtctgaagaacccccaggcaggggtgccccctttcagctcgctcaagggcaaggtgaagagggaccggagtgtgtctg

SEQ ID NO: 676000 - DNA, 120 bp, Artificial Sequence
  ENSG00000186174_11 (sequence is synthesized)
tggactctggagagcagcgagaggctgggaccccatccctggattcagaggccaaagaggtggcgccgcggagtaagcggcgctgtgtgctggagcggaagcagccgtacagtggggacg

SEQ ID NO: 676001 - DNA, 120 bp, Artificial Sequence
  ENSG00000186174_12 (sequence is synthesized)
aatggtgctctggaccggacagtgaggaggacgacaagcccattggggccacccacaattgtaatgtagcagacccagccatggcggccccacagctgggtcccggccaaaccacccaac

SEQ ID NO: 676002 - DNA, 120 bp, Artificial Sequence
  ENSG00000186174_13 (sequence is synthesized)
agcgagagcagcgtgccaggcgccccgcacggccctcctcctggccttcggcctgatgcccctgggggcgggggcgggggcgggggcgtccccggaaagcctccctcgcagttcgtatat

SEQ ID NO: 676003 - DNA, 120 bp, Artificial Sequence
  ENSG00000186174_14 (sequence is synthesized)
tcgtatatgtcttcaccacccacctggccaacacggctgcagaggcagtgctgcagggccgggccgactccatcctcgcctaccaccagcagaacgtgccccgggccaagcttgaccagg

SEQ ID NO: 676004 - DNA, 120 bp, Artificial Sequence
  ENSG00000186174_15 (sequence is synthesized)
cccctaaagtgccccccaccccagaaccgctacccctgagcacgccgtcagcaggcaccccgcagtcccagccacctccactgccgccgccgccacccccggcccctggcagtgccccgc

SEQ ID NO: 676005 - DNA, 120 bp, Artificial Sequence
  ENSG00000186174_16 (sequence is synthesized)
ctgctctgcccccagaggggcctcctgaggacagcagtcaggacctggcccccaactcggtgggagctgccagcacaggtggtgggactgggggcacccaccctaacaccccgacggcta

SEQ ID NO: 676006 - DNA, 120 bp, Artificial Sequence
  ENSG00000186174_17 (sequence is synthesized)
ccaccgccaacaaccctctgcctcctggaggagaccccagcagtgcccccggccctgccctgctgggggaggcagccgcccctggaaatgggcagcgcagcctggtgggctcagagggct

SEQ ID NO: 676007 - DNA, 120 bp, Artificial Sequence
  ENSG00000186174_18 (sequence is synthesized)
tgtccaaagagcagctggagcatcgggaacggtccctccagacgctgcgagacattgagcgactgctgctccgcagcggagagactgagcccttcctcaaggggcccccaggaggagcgg

SEQ ID NO: 676008 - DNA, 120 bp, Artificial Sequence
  ENSG00000186174_19 (sequence is synthesized)
gtgaggggggcccaccagcacaagccccccctcccccccagcagccacccacggcccctcccagcgggctgaagaaatatgaggaacccttgcagtccatgatttcacagacacagagcc

SEQ ID NO: 676009 - DNA, 120 bp, Artificial Sequence
  ENSG00000186174_20 (sequence is synthesized)
tagggggccccccgctggagcatgaagtgcctgggcaccccccgggtggggacatggggcagcagatgaacatgatgatacagaggctgggccaggacagcctcacgcctgagcaggtgg

SEQ ID NO: 676010 - DNA, 120 bp, Artificial Sequence
  ENSG00000186174_21 (sequence is synthesized)
cctggcgcaagctgcaggaggagtactacgaagagaaacggcggaaagaggaacagattgggctgcatgggagccgtcctctgcaggacatgatgggcatggggggcatgatggtgaggg

SEQ ID NO: 676011 - DNA, 120 bp, Artificial Sequence
  ENSG00000186174_22 (sequence is synthesized)
ggcccccgcctccttaccacagcaagcctggggatcagtggccacctggaatgggtgcgcagctgcgggggcccatggatgttcaagatcccatgcagctccggggcggacctccctttc

SEQ ID NO: 676012 - DNA, 120 bp, Artificial Sequence
  ENSG00000186174_23 (sequence is synthesized)
ctgggccccgtttcccaggcaaccagatacaacgggtacctgggtttgggggcatgcagagtatgcccatggaggtgcccatgaatgccatgcagaggcccgtgagaccaggcatgggct

SEQ ID NO: 676013 - DNA, 120 bp, Artificial Sequence
  ENSG00000186174_24 (sequence is synthesized)
ggaccgaagacttgccccctatggggggacccagcaattttgcccagaacaccatgccctacccaggtgggcagggtgaggcggagcgattcatgactccccgggtccgtgaggagctgc

SEQ ID NO: 676014 - DNA, 120 bp, Artificial Sequence
  ENSG00000186174_25 (sequence is synthesized)
tgcggcaccagctgctggagaagcggtcgatgggcatgcagcgccccctgggcatggcaggcagtggcatgggacagagcatggagatggagcggatgatgcaggcgcaccgacagatgg

SEQ ID NO: 676015 - DNA, 120 bp, Artificial Sequence
  ENSG00000186174_26 (sequence is synthesized)
atcctgccatgtttcccgggcagatggctggtggtgagggcctggcgggcactcccatgggcatggagtttggtggaggccggggcctcctgagccctcccatggggcagtctgggctga

SEQ ID NO: 676016 - DNA, 120 bp, Artificial Sequence
  ENSG00000186174_27 (sequence is synthesized)
gggaggtggacccacccatggggccaggcaacctcaacatgaacatgaatgtcaacatgaacatgaacatgaacctgaacgtgcagatgaccccgcagcagcagatgctgatgtcgcaga

SEQ ID NO: 676017 - DNA, 120 bp, Artificial Sequence
  ENSG00000186174_28 (sequence is synthesized)
agatgcggggccctggggacttgatggggccccagggcctcagtcctgaggagatggcccgggttcgggcccagaacagcagtggcgtgatgggcggcccgcagaagatgctgatgcctt

SEQ ID NO: 676018 - DNA, 120 bp, Artificial Sequence
  ENSG00000186174_29 (sequence is synthesized)
cacagtttcccaaccagggccagcagggattctctggaggccagggaccctaccaagccatgtcccaggacatgggcaatacccaagacatgttcagccctgatcagagctcaatgccca

SEQ ID NO: 676019 - DNA, 120 bp, Artificial Sequence
  ENSG00000186174_30 (sequence is synthesized)
tgagcaacgtgggcaccacccggctcagccacatgcctctgccccctgcgtccaatcctcctgggaccgtgcattcagccccaaaccgggggctaggcaggcggccttcggacctcacca

SEQ ID NO: 676020 - DNA, 120 bp, Artificial Sequence
  ENSG00000186174_31 (sequence is synthesized)
tcagtattaatcagatgggctcaccgggcatggggcacttgaagtcgcccacccttagccaggtgcactcacccctggtcacctcgccctctgccaacctcaagtcaccccagactccct

SEQ ID NO: 676021 - DNA, 120 bp, Artificial Sequence
  ENSG00000186174_32 (sequence is synthesized)
cacagatggtgcccttgccttctgccaacccgccaggacctctcaagtcgccccaggtcctcggctcctccctcagtgtccgttcacccactggctcgcccagcaggctcaagtctcctt

SEQ ID NO: 676022 - DNA, 120 bp, Artificial Sequence
  ENSG00000186174_33 (sequence is synthesized)
ccatggcggtgccttctccaggctgggttgcctcacctaagacggccatgcccagcccgggggtctcccagaacaagcagccgcctctcaacatgaactcttccaccaccctgagcaaca

SEQ ID NO: 676023 - DNA, 120 bp, Artificial Sequence
  ENSG00000186174_34 (sequence is synthesized)
tggaacagggtaccctcccgcctagcggcccccggagcagctcctcagcacctcccgccaaccctcccagcggcctcatgaaccccagcctaccattcacttcctccccagaccccacac

SEQ ID NO: 676024 - DNA, 120 bp, Artificial Sequence
  ENSG00000186174_35 (sequence is synthesized)
cttcccagaaccccctgtcactgatgatgacccagatgtccaagtacgccatgcccagctccaccccgctctaccacaatgccatcaagaccatcgccacctcagacgacgagctgctgc

SEQ ID NO: 676025 - DNA, 120 bp, Artificial Sequence
  ENSG00000186174_36 (sequence is synthesized)
ccgaccggcccctgctgccccccccaccaccaccgcagggctccgggccagggatcagcaacagccagcccagccagatgcacctgaactcagccgctgcccagagccctatgggcatga

SEQ ID NO: 676026 - DNA, 120 bp, Artificial Sequence
  ENSG00000186174_37 (sequence is synthesized)
acctgccaggccagcagcccctgtcccatgagcccccgcccgccatgctgccctcccccacccctctgggctccaacattccactgcatcccaacgcacaggggacaggggggccccctc

SEQ ID NO: 676027 - DNA, 120 bp, Artificial Sequence
  ENSG00000186174_38 (sequence is synthesized)
aaaactccatgatgatggccccagggggccccgactccctgaatgccccctgtggcccagtgcccagctcctcccagatgatgcccttcccccctcggctgcagcagccccatggtgcca

SEQ ID NO: 676028 - DNA, 120 bp, Artificial Sequence
  ENSG00000186174_39 (sequence is synthesized)
gccatggcccccactgggggtgggggcggggggcctggcctgcagcagcactacccgtcaggcatggccctgcctcccgaggacctgcccaaccagccgccaggccccatgcctccccag

SEQ ID NO: 676029 - DNA, 120 bp, Artificial Sequence
  ENSG00000186174_40 (sequence is synthesized)
acctgatgggcaaagccatggctgggcgcatgggcgacgcatacccaccgggtgtgctccctggggtggcatcagtgctgaacgaccccgagctgagcgaggtgatccggcccaccccaa

SEQ ID NO: 676030 - DNA, 120 bp, Artificial Sequence
  ENSG00000186174_41 (sequence is synthesized)
agccaagcagcaccctccagtacttccccaagagcgagaaccagccccccaaggctcagccccctaatctgcatctcatgaacctgcagaacatgatggcggagcagactccctctcggc

SEQ ID NO: 676031 - DNA, 120 bp, Artificial Sequence
  ENSG00000186174_42 (sequence is synthesized)
ctcccaacctcccaggccagcagggcgtccagcgggggctcaacatgtccatgtgccaccctggacagatgtccttgctgggcaggacaggcgtgcccccacagcaggggatggtgcccc

SEQ ID NO: 676032 - DNA, 120 bp, Artificial Sequence
  ENSG00000186174_43 (sequence is synthesized)
atggcctgcaccagggggtcatgtcccctccacaaggcctcatgacccagcagaatttcatgctgatgaagcagcggggcgtggggggcgaggtctacagccagccgccccacatgctct

SEQ ID NO: 676033 - DNA, 120 bp, Artificial Sequence
  ENSG00000186174_44 (sequence is synthesized)
ccccgcagggctccctcatgggccccccgccccagcagaacctcatggtgtcccacccccttcggcagcgcagtgtgtccctggacagccagatgggctacctcccggcaccaggcggca

SEQ ID NO: 676034 - DNA, 120 bp, Artificial Sequence
  ENSG00000186174_45 (sequence is synthesized)
tggccaacctgcccttctagaagtcgctgccagggctggagccggggcaatgttgcaaatacgataaccttaacaaagttcttcccctcaatgttgggatggcctgggtcgcggggtggg

SEQ ID NO: 676035 - DNA, 120 bp, Artificial Sequence
  ENSG00000186174_46 (sequence is synthesized)
gtggagggggtgggagggggcttgtgtagggagtggcatttgtggaaaccagatgtgctggcagcttagggggaagtggcagtgtggggtgggggattttgcattggggttggttccatt

SEQ ID NO: 676036 - DNA, 120 bp, Artificial Sequence
  ENSG00000186174_47 (sequence is synthesized)
tcggccaccaggactgcccctcccccactcctcccaattcctatggagcctctctattttacctctttccgtgcatccctgcacccgccacacccccttcagctatgcttttggagtcct

SEQ ID NO: 676037 - DNA, 120 bp, Artificial Sequence
  ENSG00000186174_48 (sequence is synthesized)
ggatgggaatctggggggagagaggaaggacaggtcaggtctcccccagccccttctgctcctgtctcctcgtgtccgcattgctggagctccacctccctcttggtttctccgcacccg

SEQ ID NO: 676038 - DNA, 120 bp, Artificial Sequence
  ENSG00000186174_49 (sequence is synthesized)
cccattttccttctgtctttacctgcttcgtatcctttccctgctgatgtggctgacccctctcccacccctccctgcaggcggctggccaggtgggcaggtgccagccggagctgtaaa

SEQ ID NO: 676039 - DNA, 120 bp, Artificial Sequence
  ENSG00000186174_50 (sequence is synthesized)
tagagcgctgcgcttttgtgctggtttgtgcgtgtgctgtatttctgtgttttgatagaagtcacacaaaaaaaaaaggataaaagaaacccttccccccttcttcaagttattgctccc

SEQ ID NO: 676040 - DNA, 120 bp, Artificial Sequence
  ENSG00000186174_51 (sequence is synthesized)
tccattcccctggacccagggacatgcagccctacatggccacccactgtttgcagtgtctctgggtccctaagggataccattcctgtctcgtccccaaatggtaagatgacgtaaatg

SEQ ID NO: 676041 - DNA, 120 bp, Artificial Sequence
  ENSG00000186174_52 (sequence is synthesized)
acccactcctaaactgaggtcagaccacctaggcttccacctggtgagccctagcagggctgagacccccagggcggcagcctgtctgctgctgagtgattcagggagaacatgtgtgca

SEQ ID NO: 676042 - DNA, 120 bp, Artificial Sequence
  ENSG00000186174_53 (sequence is synthesized)
cgtgcatgtgtgtttgcccacaccggtgacacggggccctggctttccactttggatgcccgggcatccgctgctgctacatcttagccagaacttgaagtcttttgtcccagtttggga

SEQ ID NO: 676043 - DNA, 120 bp, Artificial Sequence
  ENSG00000186174_54 (sequence is synthesized)
tgaaggaaaggaggaagaggcggtggctgtgtggcccccttgagtggagccatggaaggggtggcatggtgccactggggcctgtggctgtagtagccctgggccaggtaacctccaggg

SEQ ID NO: 676044 - DNA, 120 bp, Artificial Sequence
  ENSG00000186174_55 (sequence is synthesized)
ccctgacttttccagaggctgctgccacctacttcttatcaaagaagggggagaacagttcatctgagtcagtgcacctcccctccagtctccactccctgaggatggaatcggggaaac

SEQ ID NO: 676045 - DNA, 120 bp, Artificial Sequence
  ENSG00000186174_56 (sequence is synthesized)
agcatcctgccgcctcctctctgcctgcccactcaccggcaaggttgtccctctgcccagggctcagggccatgtaccagatctgtctgtgcccacccaggcacagccactgcctccccc

SEQ ID NO: 676046 - DNA, 120 bp, Artificial Sequence
  ENSG00000186174_57 (sequence is synthesized)
ttggctccctgctcctacccaggagagctccctatccgcctttggtcagagctgaagccatatacgactgggtgtttgtccccctactttggccccaggagtaaaaaaacttctcctttt

SEQ ID NO: 676047 - DNA, 120 bp, Artificial Sequence
  ENSG00000186174_58 (sequence is synthesized)
ctcacttcctttcctgcctcgggaggtggcagggcagttccctggctgaggccttttgcgccccacctccaggaccaagggccattctagacagggtgtcttctaccaggacccgtccct

SEQ ID NO: 676048 - DNA, 120 bp, Artificial Sequence
  ENSG00000186174_59 (sequence is synthesized)
agccttcctggcctggagggcctggtcttgcactggcagctgtaatacaaagggaactcgccccacttctcccagcctggtgctgtcctctcggcccaccatcggccaggtccagcgctt

SEQ ID NO: 676049 - DNA, 120 bp, Artificial Sequence
  ENSG00000186174_60 (sequence is synthesized)
cctctggggctgacaacaggcccctgactcaccccggtcacctcccagggtccatggccagggcctctgtgtttggggggccacttgcccttcatcctgccaggcgctttgcccgccctg

SEQ ID NO: 676050 - DNA, 120 bp, Artificial Sequence
  ENSG00000186174_61 (sequence is synthesized)
cctcagcctgggccctgtgcccttgagccctccacccctggcccaagacccccccaaactgtctgactctgtgtttcctgccctgaggagagaggggtcagattgcagcgggccgagtgc

SEQ ID NO: 676051 - DNA, 120 bp, Artificial Sequence
  ENSG00000186174_62 (sequence is synthesized)
cctctccgtcccctctcctcccacccacgccacaggccagcctactcttccctccatccatggccacacccccagccattttgtaccattatataaatatatatataaatataaatatat

SEQ ID NO: 676052 - DNA, 120 bp, Artificial Sequence
  ENSG00000186174_63 (sequence is synthesized)
aaatacaatatgtgaagacatcttcttggtttttattttgaaacaatttttaggcttgttccgggggtctctgtgctgcctgtactgtattgacctgttttataggtgcctttttattaa

SEQ ID NO: 676053 - DNA, 120 bp, Artificial Sequence
  ENSG00000186174_64 (sequence is synthesized)
aaagaaaattcaaaatccagcctcttgcctctttgcatctgcttcagactcccccatcgattacccagcttgcgaggagatactcagagaaaaaagggacgtcttagggcttcctcgttg

SEQ ID NO: 676054 - DNA, 120 bp, Artificial Sequence
  ENSG00000186174_65 (sequence is synthesized)
tcctgccgtgaagacactctcacgtgagccacagctgttatttccccagtggggcctcccaaggagcttggctgcttggcttgagtgggacaagggcaggggtccctgactccccacctg

SEQ ID NO: 676055 - DNA, 120 bp, Artificial Sequence
  ENSG00000186174_66 (sequence is synthesized)
atcaaaggctggggaggtggtagggagcacccagaactgccggacgggcctcccacaccccaggtgagcaaacaagcacggagcagcttcctgcggttccatctgagtgacatcctcacg

SEQ ID NO: 676056 - DNA, 120 bp, Artificial Sequence
  ENSG00000186174_67 (sequence is synthesized)
ggggcagggcacggcttcctggggcctggggacttccctgcctcagtgtgtttcttacacttccctgcctaaggtgatgccacggaggggatggttgagatgactcccacgggccccttc

SEQ ID NO: 676057 - DNA, 120 bp, Artificial Sequence
  ENSG00000186174_68 (sequence is synthesized)
cagtccacctttctccgttccgactctgagtttcctcgggtctatagcttatgggaagggagtgaggaggggacaagccagcctccttccccatcaatgcccacaacctcccatcccctg

SEQ ID NO: 676058 - DNA, 120 bp, Artificial Sequence
  ENSG00000186174_69 (sequence is synthesized)
gacccagccaccctaggagttctccaccccaccccatctcgcctggcggaggggaccgccgggtttgattgatccatctccctccttggggttcgggaagaaagctcttttcttccctct

SEQ ID NO: 676059 - DNA, 120 bp, Artificial Sequence
  ENSG00000186174_70 (sequence is synthesized)
gtcgggtttctttcttgcttctcggccttcacgcttcctcaggtcactggctggcctccaagggcacctagagtcagccctgcctgcagaccacccaggatccggtgacatggggtggac

SEQ ID NO: 676060 - DNA, 120 bp, Artificial Sequence
  ENSG00000186174_71 (sequence is synthesized)
ccagcgctgtttcggtcagagccaggggcagctacctgaactcaaccagtctgagcttcctgcttggtcaagatgactgcaggcttgggggcctggcagaatgtctgtgtttttagggac

SEQ ID NO: 676061 - DNA, 120 bp, Artificial Sequence
  ENSG00000186174_72 (sequence is synthesized)
tgagttgtccgaaggccacactctgctgccagctggcctttcctcagccttaacctccactcatcccctggtgctcagcttctggctttgtttgacaggtgggcaggaggagagagggga

SEQ ID NO: 676062 - DNA, 120 bp, Artificial Sequence
  ENSG00000186174_73 (sequence is synthesized)
agctgtggaggtcagcagcccctaagctgatggagtgtgttctgggaggggcaggcgctctccgttggcaagggcagaagtagaagttgtttcttgagcattggatgattaggatgggag

SEQ ID NO: 676063 - DNA, 120 bp, Artificial Sequence
  ENSG00000186174_74 (sequence is synthesized)
gtgcgtgaggttctctcagcccaggggggtgcagatgggtaaggacagccttcactgtgcctttgagctgctttccgctccctgggctccagcctagccccagggccggcagaagagctg

SEQ ID NO: 676064 - DNA, 120 bp, Artificial Sequence
  ENSG00000186174_75 (sequence is synthesized)
gcagggatgttctagaaatgggggttggttcctctagctaccccaaatgaggatactcctaggacactcttagccacggtgagcccttaggatcccagctcctgttggaaggagcatcca

SEQ ID NO: 676065 - DNA, 120 bp, Artificial Sequence
  ENSG00000186174_76 (sequence is synthesized)
gcatcactgcctgccccaaggaaaagcagcaataaaaggggacactgggacctagaacgtggtgagagaggtggcattctctgactcagagagactgctcctgcgccagctagggaagag

SEQ ID NO: 676066 - DNA, 120 bp, Artificial Sequence
  ENSG00000186174_77 (sequence is synthesized)
ctggcacagggaggcagggccggtacagcccagcttcgtcaggagccgcgacaggtcactgcggaacttcacgccggcgaaagtgtagagcatggggttgaggcagcagtgggccaggcc

SEQ ID NO: 676067 - DNA, 120 bp, Artificial Sequence
  ENSG00000186174_78 (sequence is synthesized)
caggaactcacacatggtgatggccacggggagagagccattcagcttgcaggtattgtccacggccttcagcctcgccagggtgtccaggaagatgacgatgtggtagggtgaccagca

SEQ ID NO: 676068 - DNA, 120 bp, Artificial Sequence
  ENSG00000186174_79 (sequence is synthesized)
gaggaagaagatgcttgtcaccaggatggccaccctgactgccttctgccgctgagggcgccgctgggcctggcgcaacctgtgcactacccccacgtagcaccagcccatcaccagcat

SEQ ID NO: 676069 - DNA, 120 bp, Artificial Sequence
  ENSG00000186174_80 (sequence is synthesized)
gggcagcaggaatcccgccacatggtagaggaatcgggaggtgaaccaggcatgcgtttctgcttggttctcttgggagaaggtgcaacgtggcagggagttgttgtgatggccttggct

SEQ ID NO: 676070 - DNA, 120 bp, Artificial Sequence
  ENSG00000186174_81 (sequence is synthesized)
gactttggcgaagagaatctctggcaaggcaaggaggaagcccaccagccagatggtcccacaggtgatgtggatggagaggaggcggcggtggcggtaggcatggacggcgtggacaat

SEQ ID NO: 676071 - DNA, 120 bp, Artificial Sequence
  ENSG00000186174_82 (sequence is synthesized)
ggccaggtagcggtccacggcgatgcaggccaggagcaggctgctgcagtagaagttgactttgtgcagggcaatcacagttttgcagaggaaggtccccaggacccagcccacagagcc

SEQ ID NO: 676072 - DNA, 120 bp, Artificial Sequence
  ENSG00000186174_83 (sequence is synthesized)
gaaggaagcaagcaagcaagcaagggaaggaggagcaggagcaggagccggagccctgaggttcggggccgagaccccggccccgcgccccggccccggcgggtgtgcgcgctctcccgc

SEQ ID NO: 676073 - DNA, 120 bp, Artificial Sequence
  ENSG00000186174_84 (sequence is synthesized)
cactgcccggcgcccgcgaccatgctccgcggttgggaggcaggaacccaggcacccagcgatccccggatagcctctcccgggccgggctggtattgagatcaaggcgtccaggatcaa

SEQ ID NO: 676074 - DNA, 120 bp, Artificial Sequence
  ENSG00000186174_85 (sequence is synthesized)
aagatcaccgcctgcccgccccctctgcatctccaactggcgagcaggaggacccccatccacacaacgaccctgacctggtcatggcgtccagctccggcctggcgtgaggacccccca

SEQ ID NO: 676075 - DNA, 120 bp, Artificial Sequence
  ENSG00000186184_0 (sequence is synthesized)
cccctccctcttcaaggtgtgttgaccgactacagtttaagcctgtcgtcccacaaaaggcccgggagggccggggtcccaggaagggccatcctgggtcaacaccgccccagttgggaa

SEQ ID NO: 676076 - DNA, 120 bp, Artificial Sequence
  ENSG00000186184_1 (sequence is synthesized)
gtcgggccgctttcggacttgccactgggaagggaagtgatttgggggcggcaggtaaggccgcgccccttcgccatcacctggggaaaggtaccagagttgagccggggcgcccgcagg

SEQ ID NO: 676077 - DNA, 120 bp, Artificial Sequence
  ENSG00000186184_2 (sequence is synthesized)
ggaaaggtaccagagttgagccggggcgcccgcaggcctgtctgggcctcggggtaaggcggcgctggccccgccccctgcccctcccgccgcgagtggcctcgcgtggtcgcccaggtg

SEQ ID NO: 676078 - DNA, 120 bp, Artificial Sequence
  ENSG00000186184_3 (sequence is synthesized)
cgggggctgggggtggagcctcatgccccgccccgcggctgggccctgccgcgccgctgcggctcctcctccctccttccgtcctccgcgccttccgtcggtcggtccttgcttcctgct

SEQ ID NO: 676079 - DNA, 120 bp, Artificial Sequence
  ENSG00000186184_4 (sequence is synthesized)
aagaggatcaggagctggagagaaaaatatctggattgaagacctcaatggctgaaggcgagaggaagacagccctggaaatggtccaggcagctggaacagatagacactgtgtgacat

SEQ ID NO: 676080 - DNA, 120 bp, Artificial Sequence
  ENSG00000186184_5 (sequence is synthesized)
ttgtattgcacgaggaagaccataccctaggaaattctctacgttacatgatcatgaagaacccggaagtggaattttgtggttacactacgacccatccttcagagagcaaaattaatt

SEQ ID NO: 676081 - DNA, 120 bp, Artificial Sequence
  ENSG00000186184_6 (sequence is synthesized)
tacgcattcagactcgaggtacccttccagctgttgagccatttcagagaggcctgaatgagctcatgaatgtctgccaacatgtgcttgacaagtttgaggccagcataaaggactata

SEQ ID NO: 676082 - DNA, 120 bp, Artificial Sequence
  ENSG00000186184_7 (sequence is synthesized)
aggatcaaaaagcaagcagaaatgaatccacattctagtcctttatgcagtatacaaggagaactgtcctgtaggatattctcttcctgatggtgcagaacccagaattagaagtttgtg

SEQ ID NO: 676083 - DNA, 120 bp, Artificial Sequence
  ENSG00000186184_8 (sequence is synthesized)
gttacagcatactctgtccttcagaaaggcgtgattctagctgttgaccccttgcagctgttggaatctctgcaagaacctctgtattcttctaataaattccctcttttatttaaacta

SEQ ID NO: 676084 - DNA, 120 bp, Artificial Sequence
  ENSG00000186184_9 (sequence is synthesized)
cctcccccactcgccccgggctgtccccgccgcccgcctgattcccctgcggaagccccgctggctaggtgtctgcgcgcacccccggccgccgccaagagtggcacagctggggaagga

SEQ ID NO: 676085 - DNA, 120 bp, Artificial Sequence
  ENSG00000186184_10 (sequence is synthesized)
gtggcacagctggggaaggagtgaacatccagaggaatcgcggggcggggtggggggaggccaggagaacaggtggcgcagggaagcagaaacgtagttgcgctggacagctggagtcgg

SEQ ID NO: 676086 - DNA, 120 bp, Artificial Sequence
  ENSG00000186184_11 (sequence is synthesized)
ggacaagaagggccgattcgagaggaagcgcacctgagggagcacagcgaaggccgggacgcagggagctggatggagagcgagcctgggcggcgaaagttgaaaatgcaactgcaagct

SEQ ID NO: 676087 - DNA, 120 bp, Artificial Sequence
  ENSG00000186184_12 (sequence is synthesized)
accttcgtattctgtggtgactcatctcgcacgtgacccccctccctcttcaaggaaagcaatagaagaactgcttaaggaggcaaaacgtgggaaaactagagctgaaacaatgggacc

SEQ ID NO: 676088 - DNA, 120 bp, Artificial Sequence
  ENSG00000186184_13 (sequence is synthesized)
ggtgaggaggtttgaggagccactggggagaaagggaaaaggaagtctacagccggagaggacgcgctctgggggtagaaggaatcctaggacggaaaggataaggtgggaaacagtttt

SEQ ID NO: 676089 - DNA, 120 bp, Artificial Sequence
  ENSG00000186184_14 (sequence is synthesized)
gtgtcctcttgctagcaccaataaaagatttctaattaacacaattaaaaacacattgccctctcataaagagcaagaccatgaacaaaaagagggcgataaggaaccagcgaagagcca

SEQ ID NO: 676090 - DNA, 120 bp, Artificial Sequence
  ENSG00000186184_15 (sequence is synthesized)
ggcccagaaagaagaaaacccgaagaaacacagaagccatccttacaagcacagcttccgcgctcgaggttccgccagttactccccgccacgaaagcggagcagccaggacaagtacga

SEQ ID NO: 676091 - DNA, 120 bp, Artificial Sequence
  ENSG00000186184_16 (sequence is synthesized)
aaagcggtccaaccggcggtgaggctggaaccagggccagccagccctgcgggcctccgtgctccttcggggtgcggtgtgcggagaaggcctgagctggcagggcaaacacctgagagt

SEQ ID NO: 676092 - DNA, 120 bp, Artificial Sequence
  ENSG00000186184_17 (sequence is synthesized)
gactttgacattaggtcctttgttgtttttaaagaggctgctggccacaggcaaaaaaaatgacctagcaactcttgaggaaacaagtgcaaaggaggatgtcttggcaagtttaagcta

SEQ ID NO: 676093 - DNA, 120 bp, Artificial Sequence
  ENSG00000186184_18 (sequence is synthesized)
ctggttccaattttttggtcatttctcagaaaaataaaatacttataaatcctatattttactttttgggggtattacatttaaaatttagaaatcatcagtccagtgaccatatttatg

SEQ ID NO: 676094 - DNA, 120 bp, Artificial Sequence
  ENSG00000186184_19 (sequence is synthesized)
aaaagctgtagccctccaaggtctgggaatttatcgagaagctctttgatagctctgcatttgttttcccttaggtgaacaatgtaggaaatcctcaaagtggctttgaatttaatgctc

SEQ ID NO: 676095 - DNA, 120 bp, Artificial Sequence
  ENSG00000186184_20 (sequence is synthesized)
cacttcagttaccagaggttaaaaatgggttttgttgtttcctgtgcattctcaaactcatttattagatagaacaatctttctatatttaatttttttaatatataggtcttaagtggt

SEQ ID NO: 676096 - DNA, 120 bp, Artificial Sequence
  ENSG00000186184_21 (sequence is synthesized)
gctttaaaaagaaccctcacaagttaaaaattaagagttgtttcagtgctagatcttaccagctaaagacttgtgataccactatatagtatagttgttccagaaatcttcattttaaat

SEQ ID NO: 676097 - DNA, 120 bp, Artificial Sequence
  ENSG00000186184_22 (sequence is synthesized)
agaagtgtttacaatgccttttttcccccagtattggttttcaatacctgttttcatatacaattacaaacctttcaaacctgtattccttctttatactcaggaaaatgtcaccaagca

SEQ ID NO: 676098 - DNA, 120 bp, Artificial Sequence
  ENSG00000186184_23 (sequence is synthesized)
ccctcctccccagttcacaaaaggaagaagatgaagattctgtctccctgttccccctccccagttttccaaagtgtctgagcatatgcctggctgtcctcagatcatcaccatgccaca

SEQ ID NO: 676099 - DNA, 120 bp, Artificial Sequence
  ENSG00000186184_24 (sequence is synthesized)
tccctgctccctacttcctggcagccaagaaaagccctttctacatgctagaaggaaatacatccaaaaagttagcattggagtgttagaaactagaatagacctctccgccaccgagct

SEQ ID NO: 676100 - DNA, 120 bp, Artificial Sequence
  ENSG00000186184_25 (sequence is synthesized)
gctgtgtcacgccctcagcctgctagggagtgacaagcccaagtcattcttgatccaccccttctcccaccccagatcccagggactcatcctgtgactttgtaaccacactcattcctt

SEQ ID NO: 676101 - DNA, 120 bp, Artificial Sequence
  ENSG00000186184_26 (sequence is synthesized)
tcaaacacagaggaggaattattgcttcatctgactttattcaaatctagttatgtattggcctaaattatttgtgcaaaatttgaaatgttttttatttaaatattagaaatagcacaa

SEQ ID NO: 676102 - DNA, 120 bp, Artificial Sequence
  ENSG00000186184_27 (sequence is synthesized)
gaggatcaggagctggagaggaaagcaatagaagaactgcttaaggaggcaaaacgtgggaaaactagagctgaaacaatgggacccatgggttgcttattacagggacaagatacaaac

SEQ ID NO: 676103 - DNA, 120 bp, Artificial Sequence
  ENSG00000186184_28 (sequence is synthesized)
taaaatcagccaaaataagacacaaagattaaagccactgttatcctctgctccgtgaagaggacatgctaccctcccagcatcagtgtgtgataataagcatggaatattgccaagcaa

SEQ ID NO: 676104 - DNA, 120 bp, Artificial Sequence
  ENSG00000186184_29 (sequence is synthesized)
ggaagctcatctgcggctcagcattcaaagtttttattgcggtttcattaaataggtttgaagtcatgatatgctaccctcccagcatcagtgtgtgataataggcatggaatattgcca

SEQ ID NO: 676105 - DNA, 120 bp, Artificial Sequence
  ENSG00000186184_30 (sequence is synthesized)
agcaaggaagctcacctgagcctcagtgttcaaagtttttattgaggtttcattacataggtttgattgatggatggatggatggatggatggattacatgactgatctcagtttccagg

SEQ ID NO: 676106 - DNA, 120 bp, Artificial Sequence
  ENSG00000186184_31 (sequence is synthesized)
ttgactgataccacgtaacccaaagctctcaccctaagtcacatgttagtctctctggcatggccagctcccactctaagactcttaggtgtgaccagctccaccctaaacaaagacatt

SEQ ID NO: 676107 - DNA, 120 bp, Artificial Sequence
  ENSG00000186184_32 (sequence is synthesized)
tctatgacattactttctggaagctaaggcaaaggccagccctctctttgggccaaaccaaactcttgactacatgggcaggaaatgtataagagaagctggaaaatcttgtcacaccag

SEQ ID NO: 676108 - DNA, 120 bp, Artificial Sequence
  ENSG00000186184_33 (sequence is synthesized)
gactcaggacccacttgaaaggtctcccactagtcaaagatgatataatttgatttaaaaaacaaataaatgattaaaacacctaaaatatgttaaaatctgtaaggtcataatgataat

SEQ ID NO: 676109 - DNA, 120 bp, Artificial Sequence
  ENSG00000186184_34 (sequence is synthesized)
cataataacaaacctggtagtcccttttataggatgctagagcaccaaatcactattcacaaaactgataaataggaagaagtaagcatttaccctgttccctgtacaaattatacttca

SEQ ID NO: 676110 - DNA, 120 bp, Artificial Sequence
  ENSG00000186184_35 (sequence is synthesized)
aagtcaccaattaattgatgaaagaaaactttacagaagaattgtaactaatatattagaaggattatagaataatattatcatcatttgagtttcaacacattcattaacccttatacc

SEQ ID NO: 676111 - DNA, 120 bp, Artificial Sequence
  ENSG00000186184_36 (sequence is synthesized)
acagaaagatgcaagaagagcaaaccaccacctctggggcatccttgtcaaaaaattgaacctgaatctgatcaagtctctagttagaactactagtttgcaagaaatacagagggcaga

SEQ ID NO: 676112 - DNA, 120 bp, Artificial Sequence
  ENSG00000186184_37 (sequence is synthesized)
gaaacatgttaaatgacaccataaggctgcaatcacaaaaatccaaaatgtgagaaatgctacaggacaaagaacccagtttctttaacaaatgaattgcaaggagaaaagaaagaagag

SEQ ID NO: 676113 - DNA, 120 bp, Artificial Sequence
  ENSG00000186184_38 (sequence is synthesized)
tatgctgtgaattaatagatttgaggaacatcaaataaaatgggtaccttgtttgtgtctttatccaaactaactgtaaaaagttattcaacaattgagggtatttgatgatattaagga

SEQ ID NO: 676114 - DNA, 120 bp, Artificial Sequence
  ENSG00000186184_39 (sequence is synthesized)
actgatgttgattttttaggtgtgatagtattgctgttattttaatttttaaaagccattatcttttagaaatgtattctgatatatttatggatgaaattatataatgaaataatccaa

SEQ ID NO: 676115 - DNA, 120 bp, Artificial Sequence
  ENSG00000186184_40 (sequence is synthesized)
gactttgtgatgatcttccgcttaataaatgatcagcggagcatcactggctgtgtggggctccctccagtaagtaggtctaggaccttagccgcatctgctgctcatcccacatcttga

SEQ ID NO: 676116 - DNA, 120 bp, Artificial Sequence
  ENSG00000186184_41 (sequence is synthesized)
caaaagtacacaagaacctctagtgcttccatgtctccaaatgccatctccattacacttcaaaatgcacccccaacctaggatgattgggctgtccttcttagctgataaaaacagcag

SEQ ID NO: 676117 - DNA, 120 bp, Artificial Sequence
  ENSG00000186184_42 (sequence is synthesized)
aaaaacttgatttgttttctttatttctgtcaactattgctatcaggtaatatgcagtatgtttaaccctctgaaacatgaaacccctgtaagtaagtaatccaggacacacacctcctg

SEQ ID NO: 676118 - DNA, 120 bp, Artificial Sequence
  ENSG00000186184_43 (sequence is synthesized)
tagcactgtgtcctactcagtcttagtccagctaaatgtggaagtgtatgcacatttggatctttctagacattttctgtaagtaccataagagaagcataaggcatccccatttgattg

SEQ ID NO: 676119 - DNA, 120 bp, Artificial Sequence
  ENSG00000186184_44 (sequence is synthesized)
ttagaaggctagctggtttgcaagaaagggacagaacttggaagaggctagggccagtccttgtgaggccaccaccagcatcatctctgccagatcatgacacgccactgcagctgtgcc

SEQ ID NO: 676120 - DNA, 120 bp, Artificial Sequence
  ENSG00000186184_45 (sequence is synthesized)
acttcatccatcccttacacagcctcctcaaggagttctcctggcacagcacataccctgcttactgcagagcatgtgaggcccttggccaagcacagcgactcacacctgtaatcccag

SEQ ID NO: 676121 - DNA, 68 bp, Artificial Sequence
  ENSG00000186184_46 (sequence is synthesized)
caggcatggtggtgtgtgcctgtaatccagctattcaggaggttgagacaggagaatcgctggaactc

SEQ ID NO: 676122 - DNA, 120 bp, Artificial Sequence
  ENSG00000186184_47 (sequence is synthesized)
ccatctcaaaaaaacaaaaaacaaaacaaaaaaacctgtgagacccatgctccgggggactggccttgccaggtcttgaacttacaggtagaacaagtggtaaccacagaaagacttgat

SEQ ID NO: 676123 - DNA, 120 bp, Artificial Sequence
  ENSG00000186184_48 (sequence is synthesized)
gacttgatcctattttaataacctgattctcatctcttacgaccacaaagtatgcttatccttctacgtcgatgtccgcattggtctgggaccctgactactcctagggaagaggaatca

SEQ ID NO: 676124 - DNA, 120 bp, Artificial Sequence
  ENSG00000186184_49 (sequence is synthesized)
gactgcccttctaagtggtatctatactttcaaggacaagggtgccttgtatgaaagaccaagggtcatttcttatctttccttatgcaagcagttggttttgcaggaccagccatggtt

SEQ ID NO: 676125 - DNA, 120 bp, Artificial Sequence
  ENSG00000186184_50 (sequence is synthesized)
ccctggagacccggcccaacttctggtacaaagtagagaactggacaaacatgttttgctgggccctgcagctttcactgagagacacacagttttggggatggggcttggccactgtca

SEQ ID NO: 676126 - DNA, 120 bp, Artificial Sequence
  ENSG00000186184_51 (sequence is synthesized)
atcacttaaggcccgtagatgttgcctcagtgtggtggcatctgccaccaaggccagatctagggatctagttgctaactcagcagcagccttctgtttttctacaagcctatagaaatg

SEQ ID NO: 676127 - DNA, 120 bp, Artificial Sequence
  ENSG00000186184_52 (sequence is synthesized)
ttttggtttcttttcctcctcctccttctccagaattggctttattaacagcaagaattcaagcagtctccctggtctctcatgcagttcaatccccgacagcctttcctgtaaatgcca

SEQ ID NO: 676128 - DNA, 120 bp, Artificial Sequence
  ENSG00000186184_53 (sequence is synthesized)
cctgctgtcacatgctccatccgggcctttgttgtcaggctcacttctttctacatcttcctccattgacttcagcagctccttcatgcatgccacagttttttctgaagtctttggatg

SEQ ID NO: 676129 - DNA, 120 bp, Artificial Sequence
  ENSG00000186184_54 (sequence is synthesized)
cattttcataatgacaacatcaaagttcctgcttctctctgtgttaccaaatactttgttggagttgttgatctgacttgggactttgtaacattcactgaggcagacatgtattttagc

SEQ ID NO: 676130 - DNA, 120 bp, Artificial Sequence
  ENSG00000186184_55 (sequence is synthesized)
catagttcaaatcctcctctctgggagctggccttgcacctctggaaaagaaccacatgttttgatcacagtggcttccaccaagagctggggaccactgacaaatggctggcccttccc

SEQ ID NO: 676131 - DNA, 120 bp, Artificial Sequence
  ENSG00000186184_56 (sequence is synthesized)
gaagccgggcggagcctgccaacaaccattatcagcctgtccgagtagaccctatcttcttatttgaaaaaaaaccccactttctttagaaaagttagatatgtgaagatgctggtctac

SEQ ID NO: 676132 - DNA, 120 bp, Artificial Sequence
  ENSG00000186184_57 (sequence is synthesized)
agggtccttttgaaaacatctaacatcttctatgggacgtttccacagttcaccacctgaaacacttggaccacacatgtttgcacatcctggactttctgtctgatacatctaggactg

SEQ ID NO: 676133 - DNA, 120 bp, Artificial Sequence
  ENSG00000186184_58 (sequence is synthesized)
aacaatgggttctcccagaagttccagagggaattcctacaattctcgcttcaagatggcgctccagctgcatcacctgcaggcctgggctaggatatgtcttgactctccttatgacac

SEQ ID NO: 676134 - DNA, 120 bp, Artificial Sequence
  ENSG00000186184_59 (sequence is synthesized)
tgtcttggtggctcacttgggtgagtgtggggccaatccaagggaagttgcggggaagctcaaaaaggtaactcagtttttcttgggagaagagagattctgagcagattggaacgtacc

SEQ ID NO: 676135 - DNA, 120 bp, Artificial Sequence
  ENSG00000186184_60 (sequence is synthesized)
atcaacagtgccttcttcctcctgagctgatatctgaatgagtccctattcacaggaagaccctggcccaccttgatgtcccactcaactgtaatccattggtcctttttgggcaatgac

SEQ ID NO: 676136 - DNA, 120 bp, Artificial Sequence
  ENSG00000186184_61 (sequence is synthesized)
tgagtcctctcctgaccaaggaaaggaatgcatctcaagcctctccccatcaggccttcattagccccatcccctacacccactgactctgctcccactcccgccactgtatcgcccagc

SEQ ID NO: 676137 - DNA, 120 bp, Artificial Sequence
  ENSG00000186184_62 (sequence is synthesized)
gttgcttcctgcaggaaaccctgctgaggagtctagtggaggcagagatgccctgtgttgaacactccaccatgcattatgtcattttctccacacaacagccctgagaggaaggaagtg

SEQ ID NO: 676138 - DNA, 120 bp, Artificial Sequence
  ENSG00000186184_63 (sequence is synthesized)
ttattcccattttatagaagagaaaactgatgctcaaacaggttaaataatttctcaactattgactgaagagcatgggatacaagttctaggccattgtcggcaaagtctgtatgcttc

SEQ ID NO: 676139 - DNA, 120 bp, Artificial Sequence
  ENSG00000186184_64 (sequence is synthesized)
acagcttggctgtgggatgtgctcctctgccttcaggagccaacccatcaccttggccaaccctttgaccagtgcaaacactgcatctttgtcagcctcctctgctagcacagccacccg

SEQ ID NO: 676140 - DNA, 120 bp, Artificial Sequence
  ENSG00000186184_65 (sequence is synthesized)
gccacctctataaccaatgccaacagctcttgcaagagcaggaaagactctccttagaccagagtgtcccatcctcagcactattggcattttgaacctgataactctttgtggtgatga

SEQ ID NO: 676141 - DNA, 120 bp, Artificial Sequence
  ENSG00000186184_66 (sequence is synthesized)
ggtgttgtcctgtgcagtataggatgtttaacagcatccctagcctctagttgttctctggttgagaacaactgccctagggtactcatcctgtcagctctctctgcttttgagccaaag

SEQ ID NO: 676142 - DNA, 120 bp, Artificial Sequence
  ENSG00000186184_67 (sequence is synthesized)
ttcctgagaaagaaaggtctctgatgcaaagcctgtccccactatagcactttgaaacactactcttgctgggacaggcacctaaccaggctccctctcaccatctgtcttagtccagtc

SEQ ID NO: 676143 - DNA, 120 bp, Artificial Sequence
  ENSG00000186184_68 (sequence is synthesized)
cagctgctataaccatatccatgctggatagatgatacatgacagaaatttatttgcacacaattccggagcctggatgtacaagatcagggtgtcaggatgctcgagttctggtgaggg

SEQ ID NO: 676144 - DNA, 120 bp, Artificial Sequence
  ENSG00000186184_69 (sequence is synthesized)
ctctcttgcaggttgcagatggctgtcttcttgctgggtcttcacatggcagaaagagcatgaaggagctctctgcagtcccttttctaagggcactaatctcattcatgagagttccac

SEQ ID NO: 676145 - DNA, 120 bp, Artificial Sequence
  ENSG00000186184_70 (sequence is synthesized)
cctcataacctaatcacctcccaaaggccccaccttctaataccatcatcttggatattaggatttcaacacatgaatttcggtggacacagactttaagttcattgcaccgtcactgtc

SEQ ID NO: 676146 - DNA, 120 bp, Artificial Sequence
  ENSG00000186184_71 (sequence is synthesized)
ctggtgctccctgatgtacagccccttcttggggaactcagatggccccaagtggaattagtttaatcattggtcaggctccctttcaacagagtgtgtccctgaatgctccatgccccc

SEQ ID NO: 676147 - DNA, 120 bp, Artificial Sequence
  ENSG00000186184_72 (sequence is synthesized)
ccccattttcaacattcatctttaccctctgatacagtttggatctgtctccctgcccaaatctcatgtggaattgtaatccccagtgttagaggtggggcctggtgggaggtgactgga

SEQ ID NO: 676148 - DNA, 120 bp, Artificial Sequence
  ENSG00000186184_73 (sequence is synthesized)
gggggcggatttccccctttcatgggaaattcatatgaatttcccaattcatatattcttatgatagagttctcacgagatctagttgtttaaaagtgtgtggcacctttgccatctctc

SEQ ID NO: 676149 - DNA, 75 bp, Artificial Sequence
  ENSG00000186184_74 (sequence is synthesized)
tctagttgtttaaaagtgtgtggcacctttgccatctctctcttccccttctccagccatgtaagatgtgcctgt

SEQ ID NO: 676150 - DNA, 120 bp, Artificial Sequence
  ENSG00000186184_75 (sequence is synthesized)
tctgacctctgtgagtgaggctatgctaatgcctgactgcttatacttcacctgtacagtactagtccacacaattcctatgtggagtgttgttggcttgattttgaagtattgtttggg

SEQ ID NO: 676151 - DNA, 120 bp, Artificial Sequence
  ENSG00000186184_76 (sequence is synthesized)
gttctctgtaaatcaaagttttatagaaatgtggctattctacattcgtttttgtttaataccagccaccctgaataacatgattttgagaatcagcatactcctaaagtagcccatcat

SEQ ID NO: 676152 - DNA, 120 bp, Artificial Sequence
  ENSG00000186184_77 (sequence is synthesized)
atggcagacacctcaaggctaagagaaatatgaacgttctcatttgtatagggtcatctttttgaaaatgaaagatttattaacacctgaaaaagataatacatagtatataagtagatc

SEQ ID NO: 676153 - DNA, 120 bp, Artificial Sequence
  ENSG00000186184_78 (sequence is synthesized)
taagcacattaattagcaatttgattggttgcagcctctcctaggtaaacttgaatcatgaaggtactgaaatatatcctgcacagaaattcaccagggcaggagattgagtaaagtgct

SEQ ID NO: 676154 - DNA, 120 bp, Artificial Sequence
  ENSG00000186184_79 (sequence is synthesized)
cctccacagagcatagcctggcatcctgaaatagaagtgtaagaatttttttaagtaaaagattattgcatatttatggattctttacacaatttttttattctatagtagatcctttag

SEQ ID NO: 676155 - DNA, 120 bp, Artificial Sequence
  ENSG00000186184_80 (sequence is synthesized)
ctcctgtatttaatatacagcagaatatactttttagtttccttggaaaggaacagttttcactgtctggtaataaaacgcaagatgcaataaatttaatccaaaataagttacagtaaa

SEQ ID NO: 676156 - DNA, 120 bp, Artificial Sequence
  ENSG00000186184_81 (sequence is synthesized)
atgaacttcagtaggaaatttagtcccaggaaggaagaaaggtttaaagtgttccagccagtcttgtctcaagaattccaatcgtctttttttttcctccctggtactcagagtttacac

SEQ ID NO: 676157 - DNA, 120 bp, Artificial Sequence
  ENSG00000186184_82 (sequence is synthesized)
taggtggcatgcaaggaaagctaacaaattcagaaactcgattctgtgggagcaggattctttggtactaatcacgatagtgggtccagctttggagttaaccatttgatttgtgatggt

SEQ ID NO: 676158 - DNA, 120 bp, Artificial Sequence
  ENSG00000186184_83 (sequence is synthesized)
cttgcttcctgcttcgcctccgcgcctcgcgctatgggacagagcccccgatccgccagcaccacctgaggatccagaaaccgccccagcgatggaagaggatcaggagctggagagaag

SEQ ID NO: 676159 - DNA, 120 bp, Artificial Sequence
  ENSG00000186184_84 (sequence is synthesized)
tttaactgtctcatatcaaaaatatttttccagtttgtaatttttttctcttcaatgttgcttctctttatattaatagtttctttttaatttatgtgttcaaaattgtcaaccatttaa

SEQ ID NO: 676160 - DNA, 120 bp, Artificial Sequence
  ENSG00000186184_85 (sequence is synthesized)
aaaaaaatttgccccagcaatcatgcttcaaaagttagttcctttcccaagatcatggacctggaatgaattgattttcagaacttagtagggtgactgcctctcaaatcttttcctttt

SEQ ID NO: 676161 - DNA, 120 bp, Artificial Sequence
  ENSG00000186184_86 (sequence is synthesized)
agtctacagccggagaggacgcgctctgggggtagaaggaatcctaggacggaaaggataaggaaagcaatagaagaactgcttaaggaggcaaaacgtgggaaaactagagctgaaaca

SEQ ID NO: 676162 - DNA, 120 bp, Artificial Sequence
  ENSG00000186185_0 (sequence is synthesized)
aatttgaacgcaaggcgccgggtggaggttggcgcgggtaggggagggtgtggggcgctctctcccggtgtgggtactgctgtctgtggtgtggctgtgggacccgtgagcaagcagcga

SEQ ID NO: 676163 - DNA, 120 bp, Artificial Sequence
  ENSG00000186185_1 (sequence is synthesized)
cgccagcggcggagaaccgacgaaaggtgtcaccacagtgatggcagtggaggacagcacgctgcaagtagtggtacgggtgcggccccccacccctcgggagctggacagtcagcggcg

SEQ ID NO: 676164 - DNA, 120 bp, Artificial Sequence
  ENSG00000186185_2 (sequence is synthesized)
gccagtggttcaggtggtggacgagcgggtgctggtgtttaaccctgaggagcccgatggagggttccctggcctgaaatggggtggcacccatgatggccccaagaagaagggcaaaga

SEQ ID NO: 676165 - DNA, 120 bp, Artificial Sequence
  ENSG00000186185_3 (sequence is synthesized)
cctgacgtttgtctttgaccgggtctttggcgaggcggccacccaacaggacgtgttccagcacaccacgcacagcgtcctggacagcttcctccagggctacaactgctcagtgtttgc

SEQ ID NO: 676166 - DNA, 120 bp, Artificial Sequence
  ENSG00000186185_4 (sequence is synthesized)
ctacggggccaccggggctgggaagacacacaccatgctgggaagggagggggaccccggcatcatgtacctgaccaccgtggaactgtacaggcgcctggaggcccgccagcaggagaa

SEQ ID NO: 676167 - DNA, 120 bp, Artificial Sequence
  ENSG00000186185_5 (sequence is synthesized)
gcacttcgaggtgctcatcagctaccaggaggtgtataatgaacagatccatgacctcctggagcccaaggggccccttgccatccgcgaggaccccgacaagggggtggtggtgcaagg

SEQ ID NO: 676168 - DNA, 120 bp, Artificial Sequence
  ENSG00000186185_6 (sequence is synthesized)
actttctttccaccagccagcctcagccgagcagctgctggagatactgaccagggggaaccgtaaccgcacgcagcaccccactgatgccaacgcgacttcctcccgctcccatgccat

SEQ ID NO: 676169 - DNA, 120 bp, Artificial Sequence
  ENSG00000186185_7 (sequence is synthesized)
cttccagatctttgtgaagcagcaggaccgggttccaggactgacccaggctgtccaggtggccaagatgagcctgattgacctggctggctcagagcgggcatccagcacccatgcgaa

SEQ ID NO: 676170 - DNA, 120 bp, Artificial Sequence
  ENSG00000186185_8 (sequence is synthesized)
gggggagcggctgcgggagggggccaacatcaaccgctctctgctggcgctcatcaacgtcctcaatgccttggccgatgcaaagggccgcaagacccatgtgccctaccgggacagcaa

SEQ ID NO: 676171 - DNA, 120 bp, Artificial Sequence
  ENSG00000186185_9 (sequence is synthesized)
actgacccgcctgctcaaagactccctcgggggcaactgccgcacagtgatgatcgctgccatcagcccctccagcctgacctacgaggacacgtacaacaccctcaaatatgccgaccg

SEQ ID NO: 676172 - DNA, 120 bp, Artificial Sequence
  ENSG00000186185_10 (sequence is synthesized)
ggccaaggagatcaggctctcgctgaagagcaatgtgaccagcctggactgtcacatcagccagtatgctaccatctgccaacagctccaggctgaggtagccgctctgaggaagaagct

SEQ ID NO: 676173 - DNA, 120 bp, Artificial Sequence
  ENSG00000186185_11 (sequence is synthesized)
ccaagtgtatgaggggggaggccagcccccaccacaggacctcccaggatctcccaagtcgggaccaccaccagaacaccagccctgcaccccagagctccctgcagggcctagagccct

SEQ ID NO: 676174 - DNA, 120 bp, Artificial Sequence
  ENSG00000186185_12 (sequence is synthesized)
tcaagaggagagtctggggatggaggcccaggtggagagggccatggaagggaactcttcagaccaggagcagtccccagaggatgaggatgaaggcccagctgaggaggttccaaccca

SEQ ID NO: 676175 - DNA, 120 bp, Artificial Sequence
  ENSG00000186185_13 (sequence is synthesized)
gatgccagagcagaaccccacacatgcactgccagagtcccctcgcctgaccctgcagcccaagccagtcgtgggccacttctcagcacgggaactggatggggaccgttctaagcagtt

SEQ ID NO: 676176 - DNA, 120 bp, Artificial Sequence
  ENSG00000186185_14 (sequence is synthesized)
ggccctaaaggtgctgtgcgttgcccagcggcagtactccctgctccaagcagccaacctcctgacgcccgacatgatcacagagtttgagaccctacagcagctggtgcaagaggaaaa

SEQ ID NO: 676177 - DNA, 120 bp, Artificial Sequence
  ENSG00000186185_15 (sequence is synthesized)
aattgagcctggggcagaggccttgaggacttcaggcctggccaggggggcacctctggctcaggagctgtgttcagagtcaatccctgtgccgtctcctctctgcccagagcctccagg

SEQ ID NO: 676178 - DNA, 120 bp, Artificial Sequence
  ENSG00000186185_16 (sequence is synthesized)
atacactggccctgtgacccggactatggcgaggcgactgagtggccccctgcacaccctgggaatcccgcctggacccaactgcaccccagcccaggggtcccgatggcccatggagaa

SEQ ID NO: 676179 - DNA, 120 bp, Artificial Sequence
  ENSG00000186185_17 (sequence is synthesized)
ggagaccaagcgccttggaggcagacagtcccatggccccaaagcggggcaccaagcgccagcgccagtccttcctgccctgcctaaggagagggtctctgcctgacacccaaccttcac

SEQ ID NO: 676180 - DNA, 120 bp, Artificial Sequence
  ENSG00000186185_18 (sequence is synthesized)
aggggcccagcacccccaaaggagaaagggcctcctccccctgccattcccctcgcgtttgcccagccacagtcatcaaaagccgggtgcccctgggcccttccgccatgcagaactgct

SEQ ID NO: 676181 - DNA, 120 bp, Artificial Sequence
  ENSG00000186185_19 (sequence is synthesized)
ccaccccgctggctctgcccactcgagacctcaatgccacctttgatctctctgaggagcctccctcaaagcccagtttccatgaatgcattggctgggacaaaataccccaggagctga

SEQ ID NO: 676182 - DNA, 120 bp, Artificial Sequence
  ENSG00000186185_20 (sequence is synthesized)
gcaggctggaccagcccttcatccccagggcacctgtgcccctgttcaccatgaagggccccaagccaacatcttccctccctgggacctctgcctgcaagaagaagcgcgttgcgagtt

SEQ ID NO: 676183 - DNA, 120 bp, Artificial Sequence
  ENSG00000186185_21 (sequence is synthesized)
cctcagtctcccatggccgcagccgcatcgcccgcctccccagcagcactttgaagaggccagctgggccccttgtactcccagagctgcccttgagtcccctgtgccctagcaaccgga

SEQ ID NO: 676184 - DNA, 120 bp, Artificial Sequence
  ENSG00000186185_22 (sequence is synthesized)
ggaatggaaaggacctcatcagggtggggagagcactctcagcagggaacggcgtcaccaaggtgtcctgaccgccagaatgtcctgaccaccaaggtgtcctaacctaccggcccctct

SEQ ID NO: 676185 - DNA, 120 bp, Artificial Sequence
  ENSG00000186185_23 (sequence is synthesized)
gctggatacccctcttggacctgtagccacctgcaccaggagctggacctgccttccttacctgggagcaattagtgccaacacacctttgctgtattaacatccctccccagacatcca

SEQ ID NO: 676186 - DNA, 120 bp, Artificial Sequence
  ENSG00000186185_24 (sequence is synthesized)
tcctgctactcaccctctgttaatctcctgttacactcagcttcttggcatgtacatattcatttgtgagtgttaatgtgctgctgttttttgttttttggtggtttttgttttttgttt

SEQ ID NO: 676187 - DNA, 62 bp, Artificial Sequence
  ENSG00000186185_25 (sequence is synthesized)
ttcaagtagctaattttcgtctttttaatagagagggggtttttccatgttggccaggctgg

SEQ ID NO: 676188 - DNA, 64 bp, Artificial Sequence
  ENSG00000186185_26 (sequence is synthesized)
cgtgttgctgttttaaaggtgctgccatgttcccccatcttttttttttttgagatggagtctc

SEQ ID NO: 676189 - DNA, 120 bp, Artificial Sequence
  ENSG00000186185_27 (sequence is synthesized)
gcgtgagccactgcgcccggcctcccctctcatttatgatgccctctgtgcaggcagacggctcttgggctcttttccccacctgtctctaacacaggccccacggtgatggccacaggc

SEQ ID NO: 676190 - DNA, 120 bp, Artificial Sequence
  ENSG00000186185_28 (sequence is synthesized)
agtagaggaggaatgaggatgggttggggagcggggagtcgcggcttggctcttcctggtttctgagagggacatcttcatccctactccccttggtccccaaccacagtcctggtgaag

SEQ ID NO: 676191 - DNA, 120 bp, Artificial Sequence
  ENSG00000186185_29 (sequence is synthesized)
atgtggatgataatggtgccttgatttccaaatgaagacagctttattgcttaactctattgtacataggatacacgttcagtgtaaaataaagtgtaaaggggaattcaggcttaatgc

SEQ ID NO: 676192 - DNA, 120 bp, Artificial Sequence
  ENSG00000186185_30 (sequence is synthesized)
tgcacctagatataaatgctaatgatacttgggtttatagccttctgatcctttatttctgcatatatatatagatatatacatatatttttggtataacaataaaccgtctccatcctt

SEQ ID NO: 676193 - DNA, 120 bp, Artificial Sequence
  ENSG00000186185_31 (sequence is synthesized)
gcctgggccatggaggccgatgaagacaagaaggaggaggggacggggagctgagacccagaagaaaggagggcctagggtattgccaagcatctcagggatgctgctgatgagacaggt

SEQ ID NO: 676194 - DNA, 120 bp, Artificial Sequence
  ENSG00000186185_32 (sequence is synthesized)
cctagggttaagggtttgcacccagtgcctgcccagcaactgactgtcacctagagtgctgtgtccaatgagtaaatggcaccccagcccgtaagagcagggcctactattcgagagaag

SEQ ID NO: 676195 - DNA, 120 bp, Artificial Sequence
  ENSG00000186185_33 (sequence is synthesized)
gtgaacttaggggtgtgtgtcattgtctctcaaaccagaaaatccctgactcctcctaccctcagctactgcccatttgtcacctaagcatctgtcccttatggactctatacgacctgg

SEQ ID NO: 676196 - DNA, 80 bp, Artificial Sequence
  ENSG00000186187_0 (sequence is synthesized)
ggcgcggctggcggggccggcggcggctgaagcgagagcgcgacgcgacgcgaccgcggcttcccgagctgcgcctggcc

SEQ ID NO: 676197 - DNA, 80 bp, Artificial Sequence
  ENSG00000186187_1 (sequence is synthesized)
cgagagcgcgacgcgacgcgaccgcggcttcccgagctgcgcctggccgcccagcgccgcggcccgcccgaggcctggag

SEQ ID NO: 676198 - DNA, 80 bp, Artificial Sequence
  ENSG00000186187_2 (sequence is synthesized)
ctcgccgccgcctccctccctccttccctgcggctcccccggctttcggagcccgggggcggcctgtggcgcgcggagcc

SEQ ID NO: 676199 - DNA, 120 bp, Artificial Sequence
  ENSG00000186187_3 (sequence is synthesized)
tgtggcgcgcggagcccgcgccggactgcgcctctttggaccttgaggggaaacatgcgtttgccttggatcgtttgaaattctgagtttgggatccccgcccgcccgcctgcctcttcc

SEQ ID NO: 676200 - DNA, 120 bp, Artificial Sequence
  ENSG00000186187_4 (sequence is synthesized)
gccccgcgggttttttccttttttccttttgctttttttccttttctccctccgggtctcctttttgactccctccccctttatgctcgcccagccctccccctgctgctgagaagtggg

SEQ ID NO: 676201 - DNA, 120 bp, Artificial Sequence
  ENSG00000186187_5 (sequence is synthesized)
ctgagaagtgggggagggtctcggcctccaggttcccgccccaccggggcccgggcgagcatggggggcaagcagagcacggcggcccgctcccggggccccttcccgggggtctccacc

SEQ ID NO: 676202 - DNA, 120 bp, Artificial Sequence
  ENSG00000186187_6 (sequence is synthesized)
gatgacagcgccgtgccgccgccgggaggggcgccccatttcgggcactaccggacgggcggcggggccatggggctgcgcagccgctcggtcagctcggtggcaggcatgggcatggac

SEQ ID NO: 676203 - DNA, 120 bp, Artificial Sequence
  ENSG00000186187_7 (sequence is synthesized)
gggggggtgccctttggcctctacacccccgcctcccggggcaccggcgactccgagagggcgcccggcggcggagggtctgcgtccgactccacctatgcccatggcaatggttaccag

SEQ ID NO: 676204 - DNA, 120 bp, Artificial Sequence
  ENSG00000186187_8 (sequence is synthesized)
gagacgggcggcggtcaccatagagacgggatgctgtacctgggctcccgagcctcgctggcggatgctctacctctgcacatcgcacccaggtggttcagctcgcatagtggtttcaag

SEQ ID NO: 676205 - DNA, 120 bp, Artificial Sequence
  ENSG00000186187_9 (sequence is synthesized)
tgccccatttgctccaagtctgtggcttctgacgagatggaaatgcactttataatgtgtttgagcaaacctcgcctctcctacaacgatgatgtgctgactaaagacgcgggtgagtgt

SEQ ID NO: 676206 - DNA, 120 bp, Artificial Sequence
  ENSG00000186187_10 (sequence is synthesized)
gtgatctgcctggaggagctgctgcagggggacacgatagccaggctgccctgcctgtgcatctatcacaaaagctgcatagactcgtggtttgaagtgaacagatcttgtccggaacac

SEQ ID NO: 676207 - DNA, 120 bp, Artificial Sequence
  ENSG00000186187_11 (sequence is synthesized)
cctgcggactgacctgcgggcttgcttgctgactcctctcaaagggacagagcgcccctgctccagggaggaggctcaccggaccctggggcagagctgagcttgggacaccagcgggaa

SEQ ID NO: 676208 - DNA, 120 bp, Artificial Sequence
  ENSG00000186187_12 (sequence is synthesized)
cagggcaccccttctgcactgacttccagatcatggttctcccttcctccctgaggacaccaaattggatgagagcaagtttgagagaagaatgaatcaactgctatccttcccctcacc

SEQ ID NO: 676209 - DNA, 120 bp, Artificial Sequence
  ENSG00000186187_13 (sequence is synthesized)
cctcagcccaggagggaaagggcattttctttttcatctttgaaaggcattgtgggtctgtctttaaagtgtttacaaaaaaaaattatataaaaaaaaagtctagtgtcgactggtgtt

SEQ ID NO: 676210 - DNA, 120 bp, Artificial Sequence
  ENSG00000186187_14 (sequence is synthesized)
ttccctcgtgatgtttacagcttgctgtttgctgcccagccataacccactcagtgacagacgaacacagctaaggcctcgctgccagccttctgacggcgggcgagcacacggtctctt

SEQ ID NO: 676211 - DNA, 120 bp, Artificial Sequence
  ENSG00000186187_15 (sequence is synthesized)
cccctgccccaactggccctctccaccaccaacttctctactttgggtttgtttggttttttccctctatttttctggctggttttttgctcttttctccccttgagaccctaatatctt

SEQ ID NO: 676212 - DNA, 120 bp, Artificial Sequence
  ENSG00000186187_16 (sequence is synthesized)
gacttcattgccaaaaaacaacccattgagaactttcttcctactgatcccatctcttttcccttctttcctcctggttccggtcagttcagaggatttaacaatcacaagtgtcctgca

SEQ ID NO: 676213 - DNA, 120 bp, Artificial Sequence
  ENSG00000186187_17 (sequence is synthesized)
aaaatgcctgaacattattcttaggccctcgtggattttttttttcagaaaacttaaacaaaaaaagacttactaagaaatatgtacagctacccctgttttcaggcactatgtttgaga

SEQ ID NO: 676214 - DNA, 120 bp, Artificial Sequence
  ENSG00000186187_18 (sequence is synthesized)
acattttagccattgatgttcacacgtggcatcagcccatgcaagataggtttctgtatttatatattaaaatacaaaaaaaaacttataaaatgtttaaaaaaatgttcaaagcttggg

SEQ ID NO: 676215 - DNA, 120 bp, Artificial Sequence
  ENSG00000186187_19 (sequence is synthesized)
ctgcgtgattttattttaatgaagtgttatacaatcaagaaatgggggcaagggcctgccccccactccctcacctacctccttagcattccttcaggctgctactcggggctccaggtg

SEQ ID NO: 676216 - DNA, 120 bp, Artificial Sequence
  ENSG00000186187_20 (sequence is synthesized)
tgtgaattggtcctcagatagtcaggcctgggtggagggagtggcaagtcaggcgtgcctcctacaagcttcctaacctcttaagcatcatggaaccagtcagccctctgtggagtcatt

SEQ ID NO: 676217 - DNA, 120 bp, Artificial Sequence
  ENSG00000186187_21 (sequence is synthesized)
gtgctggacctctgaaaagatctgcaggggccaagatgttgcagccaccggaggctgcaaggatgtgggttcttccaggtgtgggcccagcccccctccttccagcctttgctccccatc

SEQ ID NO: 676218 - DNA, 120 bp, Artificial Sequence
  ENSG00000186187_22 (sequence is synthesized)
ccacgttccactcgccctgcctgttgttcagtttgcgtctcagtgctgactcacgggcatgcttcattgaggcccaggaagaggccctggtttggggctgtgccagctcagagcccttga

SEQ ID NO: 676219 - DNA, 120 bp, Artificial Sequence
  ENSG00000186187_23 (sequence is synthesized)
accagaaccaactgctcaggctcacaaaagttggcaaaatgcgggctgggcaggcagctcggggcagggagcagcagtgcaggcctggcctgtgtccccgtgcccagcgggctcccggag

SEQ ID NO: 676220 - DNA, 120 bp, Artificial Sequence
  ENSG00000186187_24 (sequence is synthesized)
cagcattccagagcctcctgcagagccagcgaaggaaagctctagagggagacgactccaccgcctctctgctctgacccttctcaggcccgcctgatgtgctggaccatccccctgctg

SEQ ID NO: 676221 - DNA, 120 bp, Artificial Sequence
  ENSG00000186187_25 (sequence is synthesized)
ccacggcccctggctccgcagtcaccctccatcagatgcttccagaagcacctactctgtgcaagggcattcacaacaggccagtgggcaaacgtgagccagggccagcggagaaacact

SEQ ID NO: 676222 - DNA, 120 bp, Artificial Sequence
  ENSG00000186187_26 (sequence is synthesized)
aaagaagactcggtggttcagagcctgggtctcagcgcgggacccgtctggggtgaagaccttggggctgttgtgagtcggtggcaggaacgtgggctctagactgtgcattcaggctct

SEQ ID NO: 676223 - DNA, 120 bp, Artificial Sequence
  ENSG00000186187_27 (sequence is synthesized)
cctacttggcagaatgatcttggggaaacgacttcatctgaacttcagatatttcacatgtgaagcggggacaaaaccatgcagctcagaggtccctgtgggggctgggggagctgccct

SEQ ID NO: 676224 - DNA, 120 bp, Artificial Sequence
  ENSG00000186187_28 (sequence is synthesized)
gcaggtcttggcacatgcacagcaggctccccatagctttgtcaccacaaagggcactgttctattcacagcacctcctgcttctgcctggcaactgtgtctccctgtgctatatttaat

SEQ ID NO: 676225 - DNA, 120 bp, Artificial Sequence
  ENSG00000186187_29 (sequence is synthesized)
tccaccagcaaagctggcgaggcagggcccagccctgaaggagatctccttgcctgacccctggacctggaaatggaggcttcatgtgcccgccttggcggcttaagcctgctgctttgg

SEQ ID NO: 676226 - DNA, 120 bp, Artificial Sequence
  ENSG00000186187_30 (sequence is synthesized)
cagtgccatgggtgagccgagcagctgtgaggtgggtggggcagggctgtagcccacgccgggtgctattccaggctctaggggctggtgctcatccccacccccagcgacttccgtcct

SEQ ID NO: 676227 - DNA, 120 bp, Artificial Sequence
  ENSG00000186187_31 (sequence is synthesized)
acctggcatgctgcagccctctgccggctgtggtgtcctctgaatttggacccaggttgcctgctcttgttgtgggggtgggattggggctgtctgtgtttcccaggtggagctcatgtt

SEQ ID NO: 676228 - DNA, 120 bp, Artificial Sequence
  ENSG00000186187_32 (sequence is synthesized)
tgtgatcctctatctggacagctctccagaatcctgtgttgcccctgttctgcctttctgggatgggagagaaggtgagggagccggcgagcaggttctaccctctctgctaagggccta

SEQ ID NO: 676229 - DNA, 120 bp, Artificial Sequence
  ENSG00000186187_33 (sequence is synthesized)
gcacactttgatgaggttcctggacgtgagaccctcacaaagaccaaccattcctctaatagccatttaacggtactgcagttcatgggaaaatgtcctcattcttaggagatagatgct

SEQ ID NO: 676230 - DNA, 120 bp, Artificial Sequence
  ENSG00000186187_34 (sequence is synthesized)
ggattatataggtgaatgccttcaagaaatgtgtaatttaattccaaatagttccccccaaaatacacaaagcaaataaggccaaaatgttcattgttgaatctgcagtggctggtattt

SEQ ID NO: 676231 - DNA, 120 bp, Artificial Sequence
  ENSG00000186187_35 (sequence is synthesized)
cagtgaacagtgtacttgttctttcaacttttctgtatgtttggaatttttcttaataaaagattgtgggaaatggtcatttgctgagcgcctcctagttgccaggcactggagggcgca

SEQ ID NO: 676232 - DNA, 120 bp, Artificial Sequence
  ENSG00000186187_36 (sequence is synthesized)
tcaaagaagagtcctacccaggagggagagcgcagctgctgcaggattctcgcctggaagagtgggtggctggctggctggctggaaggggaggggcgagagggctgtctcggtgatgag

SEQ ID NO: 676233 - DNA, 120 bp, Artificial Sequence
  ENSG00000186187_37 (sequence is synthesized)
cacacgcgtgctggggtggtttggggagagggctgagatttgtcaccagtgagcccttggcacggtctctgctccccaccagggcagcacgggacagaaacgtcacggaggagtagcctc

SEQ ID NO: 676234 - DNA, 120 bp, Artificial Sequence
  ENSG00000186187_38 (sequence is synthesized)
atgatgtgctgactaaagacgcgggtgagtgtgtgatctgcctggaggagctgctgcagggggacacgatagccaggctgccctgcctgtgcatctatcacaaaagggacagagcgcccc

SEQ ID NO: 676235 - DNA, 120 bp, Artificial Sequence
  ENSG00000186187_39 (sequence is synthesized)
cttccaggacatctgtttcctctgttacacattgctgcaagaagcaaaacttgtttctgctttggagcctttgagatgaagagaaaaatcttcaagctttcagaagccaaaggaacaaat

SEQ ID NO: 676236 - DNA, 120 bp, Artificial Sequence
  ENSG00000186187_40 (sequence is synthesized)
tattaaggaaaagagtcacactggcaccagatttcctatttacaacaccaagaagctagaagatggtggaatttcatctacagaccacggggataaaaggaatgcagctcaagcatcctg

SEQ ID NO: 676237 - DNA, 120 bp, Artificial Sequence
  ENSG00000186187_41 (sequence is synthesized)
atacctaccgtctggaaactaggctttctgcgaggctgcggagcctggcgatttagggactcacggcgtgtgttcacttgtggaagggcagagcgaagcctacctattggagttccattt

SEQ ID NO: 676238 - DNA, 64 bp, Artificial Sequence
  ENSG00000186187_42 (sequence is synthesized)
tggaagggcagagcgaagcctacctattggagttccatttattggcatcaccctcctcagagaa

SEQ ID NO: 676239 - DNA, 120 bp, Artificial Sequence
  ENSG00000186187_43 (sequence is synthesized)
aaaggtaggaggggttggcaaggtagcttagtgcaccccacctcccagaggggcggacccccatctccagccattctgtctcctttggttatgggatgacctctcccccgacctctggct

SEQ ID NO: 676240 - DNA, 120 bp, Artificial Sequence
  ENSG00000186187_44 (sequence is synthesized)
ccagaggtgtgctctggtttgagggctcaggtggtgggagctgatggggagacccgtagagcctcacaggttggaggagcttcggatcccactgggaaggttggttctccgtctgtctcc

SEQ ID NO: 676241 - DNA, 120 bp, Artificial Sequence
  ENSG00000186187_45 (sequence is synthesized)
ctgcctcttcttcctctacgggtccctctgctccacaggggtagaacatcaatctgtgcgaggaaggccaggcggagggtgtacccactgccttgcactggccttctccctagagggccg

SEQ ID NO: 676242 - DNA, 120 bp, Artificial Sequence
  ENSG00000186187_46 (sequence is synthesized)
caatactgatctcctttccctctctatggatgtatctattctggacatttcatataaatgggttcatacaataggtggtttcttttactttgtgtagtatttttgacgtttatccatgtt

SEQ ID NO: 676243 - DNA, 120 bp, Artificial Sequence
  ENSG00000186187_47 (sequence is synthesized)
ttagcatgtggtggttcttccttttcttggcttagtaatattccattgtgtggatacatcatcttttgtttatccgttgcgcagtttgtagacactgggttgtttccacctttgggctgt

SEQ ID NO: 676244 - DNA, 120 bp, Artificial Sequence
  ENSG00000186187_48 (sequence is synthesized)
tgtgaacaatgctgctgtgaacctccgtgcacaaggattttcttggggacctgtttcttcctctcattcttgcctcctaccactctacccattaccatatttttccaaaccagacatcag

SEQ ID NO: 676245 - DNA, 120 bp, Artificial Sequence
  ENSG00000186187_49 (sequence is synthesized)
cacactggctacgtgtgtgtttaggaaagcatctgtggagggaaacagcttgcctcatgctgcccctgcttcctgtctacccttctccaagcctttttcgtccgctgtcacctaggcttt

SEQ ID NO: 676246 - DNA, 120 bp, Artificial Sequence
  ENSG00000186187_50 (sequence is synthesized)
tggttaatcacatgttgagattaatcccattttgtctttgggtaattaacatgtgatgtccacgcattatctccacggtgaaagtcttaaggtcaacgtccctcttggggttctgtgtcc

SEQ ID NO: 676247 - DNA, 120 bp, Artificial Sequence
  ENSG00000186187_51 (sequence is synthesized)
cctgcagagccgggcacagcttggggcagctaagcagtcccctagttcctaggcccttgcttgccccatgccacctgtccactggtgactaaccctcctgcactctcccctgtccccctt

SEQ ID NO: 676248 - DNA, 120 bp, Artificial Sequence
  ENSG00000186187_52 (sequence is synthesized)
acagttaaaagtagcagggcccagatatgccttgggactccagtgtgagcctcgtccttgtttccagctggaaggaaggcaccctcttgcccaagacaggacactgtgctgcctggggcc

SEQ ID NO: 676249 - DNA, 120 bp, Artificial Sequence
  ENSG00000186187_53 (sequence is synthesized)
agcacctgttgaatcctcgagcccagagcttcttcctgacactcaggcctttcaaagcctgactctcagggccactgctgcacagggtgacaaccgggcatggcacgcagtgtggctggt

SEQ ID NO: 676250 - DNA, 120 bp, Artificial Sequence
  ENSG00000186187_54 (sequence is synthesized)
gcagaggaggcttaaggctggcctgggagagattcttggtctagctcccagcacggagccttgcttgtgtcccagggcggcactaaccagaaccagaaaaggaaatctttggccctcggg

SEQ ID NO: 676251 - DNA, 120 bp, Artificial Sequence
  ENSG00000186187_55 (sequence is synthesized)
gagaattatgccaattatctgtctggttcctgtctttgaaaatgcccagatgttggtttacaaatcaggaagctgtcttggggcaatctctgttccctctttgatgcagagagcctttct

SEQ ID NO: 676252 - DNA, 120 bp, Artificial Sequence
  ENSG00000186187_56 (sequence is synthesized)
ctgtaaacactggagagcagggcttcactgtctggctcccctcccgcctcttgcaggaaggactagatgctgctgatcagctgatcatggctgagccgggtagagcttggggctctccta

SEQ ID NO: 676253 - DNA, 120 bp, Artificial Sequence
  ENSG00000186187_57 (sequence is synthesized)
gagcttcacagctgttcttttgacccaggaaggagctctttcaggactgtggcacccagagccgtggccctcctgccatgccattgttcccacttccctgcccttgggagtcttggagac

SEQ ID NO: 676254 - DNA, 120 bp, Artificial Sequence
  ENSG00000186187_58 (sequence is synthesized)
agctgactagctgccctgaggggtccaccgctctcaccttctcactggtggctgctgccattctcctgggctctgcacagaaagctttggtccttctgaaagccactctgccccttcctg

SEQ ID NO: 676255 - DNA, 120 bp, Artificial Sequence
  ENSG00000186187_59 (sequence is synthesized)
cagcaccagatccccctgagccggtactgctgcctccacctgggccaagactagtcttggtgttcacccttcttcgtgcttcagaaagtagggatatctggggacatgactgtgtttccc

SEQ ID NO: 676256 - DNA, 120 bp, Artificial Sequence
  ENSG00000186187_60 (sequence is synthesized)
tggggtcctttcagaagagacttaggaagctcctgctcaggaatctggccctctgaaagagccccttcaaagcagcctgggcagcaggtaacgtggtttcccttgcggccccctcctccc

SEQ ID NO: 676257 - DNA, 120 bp, Artificial Sequence
  ENSG00000186187_61 (sequence is synthesized)
ctcaaggcttggggtcaggtcactttgggggcctgcagtttagggagccgggctgcccttatgccactgagaagaaagcaggagcagagggaaggagcacctcatcagtgagcagttagt

SEQ ID NO: 676258 - DNA, 120 bp, Artificial Sequence
  ENSG00000186187_62 (sequence is synthesized)
catccggaaatgattttccctgggaaggacaagagatacaaaccaacatggacagttatgaagaacaggctcagaagagttaggatcagttggggaagagaccagtacaatctacattcc

SEQ ID NO: 676259 - DNA, 120 bp, Artificial Sequence
  ENSG00000186187_63 (sequence is synthesized)
taaagaaagttcaggaatatcccctgggaatgtgcacgggcaggaaaaggagcctgagcggtgggtttgtgcctggcttggcctcatcctcgctcacctctgagtctccgcctcttctat

SEQ ID NO: 676260 - DNA, 120 bp, Artificial Sequence
  ENSG00000186187_64 (sequence is synthesized)
ggtaacggggataatctcactccctgttgccataaggacattgcacttactaaacagccatgggcagtgcattgttccctgcaaagtgctggtcagcgatcatttgaccactgcttcttc

SEQ ID NO: 676261 - DNA, 120 bp, Artificial Sequence
  ENSG00000186187_65 (sequence is synthesized)
ccatgccgcttccagatgaatctgaggcctccaggccagactcgatccctctatcccacagcactgggtgctgactccacacatccccctggcttaccgctgggtctggcctccccattt

SEQ ID NO: 676262 - DNA, 120 bp, Artificial Sequence
  ENSG00000186187_66 (sequence is synthesized)
ctcccccaggggtaccccacttgctgccaaccatccacccctgacccccatctcacctgtcccctccaagttctgggctggcattttcctttttctggcaaacaagtagacaaaaccccc

SEQ ID NO: 676263 - DNA, 120 bp, Artificial Sequence
  ENSG00000186187_67 (sequence is synthesized)
ataaaaaccaaaagcccaactccatctcacagccaaaggttttgggacctttttcttcccccctccctttctctctctcttgctttcgttttcttttgttaggtttattttatttattcc

SEQ ID NO: 676264 - DNA, 120 bp, Artificial Sequence
  ENSG00000186187_68 (sequence is synthesized)
aagtaaactcccagaacagctgatgatgtcagacaaatcagggacatttgctctttttacctccacctcaaaaactgatgacaaggggagaagaaagagccaggggggagagtgaggcag

SEQ ID NO: 676265 - DNA, 120 bp, Artificial Sequence
  ENSG00000186187_69 (sequence is synthesized)
gggagtagaacctgcccaggcacatggctgcaaattccccgtgtgctgtttggcttctggggtcctgtgtagacgccccagccccgcctgccctcttgggatgcagctgccctgggatga

SEQ ID NO: 676266 - DNA, 120 bp, Artificial Sequence
  ENSG00000186188_0 (sequence is synthesized)
agtcgcctcccagatgagcactctctcagaccgctgcgggccgccaggcgccgggaatgtcccctgaatgcgcgcgggcagcgggcgacgcgcccttgcgcagcctggagcaagccaacc

SEQ ID NO: 676267 - DNA, 120 bp, Artificial Sequence
  ENSG00000186188_1 (sequence is synthesized)
gcacccgctttcccttcttctccgacgtcaagggcgaccaccggctggtgctggccgcggtggagacaaccgtgctggtgctcatctttgcagtgtcgctgctgggcaacgtgtgcgccc

SEQ ID NO: 676268 - DNA, 120 bp, Artificial Sequence
  ENSG00000186188_2 (sequence is synthesized)
tggtgctggtggcgcgccgacgacgccgcggcgcgactgcctgcctggtactcaacctcttctgcgcggacctgctcttcatcagcgctatccctctggtgctggccgtgcgctggactg

SEQ ID NO: 676269 - DNA, 120 bp, Artificial Sequence
  ENSG00000186188_3 (sequence is synthesized)
aggcctggctgctgggccccgttgcctgccacctgctcttctacgtgatgaccctgagcggcagcgtcaccatcctcacgctggccgcggtcagcctggagcgcatggtgtgcatcgtgc

SEQ ID NO: 676270 - DNA, 120 bp, Artificial Sequence
  ENSG00000186188_4 (sequence is synthesized)
acctgcagcgcggcgtgcggggtcctgggcggcgggcgcgggcagtgctgctggcgctcatctggggctattcggcggtcgccgctctgcctctctgcgtcttcttccgagtcgtcccgc

SEQ ID NO: 676271 - DNA, 120 bp, Artificial Sequence
  ENSG00000186188_5 (sequence is synthesized)
aacggctccccggcgccgaccaggaaatttcgatttgcacactgatttggcccaccattcctggagagatctcgtgggatgtctcttttgttactttgaacttcttggtgccaggactgg

SEQ ID NO: 676272 - DNA, 120 bp, Artificial Sequence
  ENSG00000186188_6 (sequence is synthesized)
tcattgtgatcagttactccaaaattttacagatcacaaaggcatcaaggaagaggctcacggtaagcctggcctactcggagagccaccagatccgcgtgtcccagcaggacttccggc

SEQ ID NO: 676273 - DNA, 120 bp, Artificial Sequence
  ENSG00000186188_7 (sequence is synthesized)
tcttccgcaccctcttcctcctcatggtctccttcttcatcatgtggagccccatcatcatcaccatcctcctcatcctgatccagaacttcaagcaagacctggtcatctggccgtccc

SEQ ID NO: 676274 - DNA, 120 bp, Artificial Sequence
  ENSG00000186188_8 (sequence is synthesized)
tcttcttctgggtggtggccttcacatttgctaattcagccctaaaccccatcctctacaacatgacactgtgcaggaatgagtggaagaaaattttttgctgcttctggttcccagaaa

SEQ ID NO: 676275 - DNA, 120 bp, Artificial Sequence
  ENSG00000186188_9 (sequence is synthesized)
agggagccattttaacagacacatctgtcaaaagaaatgacttgtcgattatttctggctaatttttctttatagccgagtttctcacacctggcgagctgtggcatgcttttaaacaga

SEQ ID NO: 676276 - DNA, 120 bp, Artificial Sequence
  ENSG00000186188_10 (sequence is synthesized)
gttcatttccagtaccctccatcagtgcaccctgctttaagaaaatgaacctatgcaaatagacatccacagcgtcggtaaattaaggggtgatcaccaagtttcataatattttccctt

SEQ ID NO: 676277 - DNA, 60 bp, Artificial Sequence
  ENSG00000186188_11 (sequence is synthesized)
acatggtgagacccccgtctctactaaaaataaaaccaggagaatctcttgaacctggga

SEQ ID NO: 676278 - DNA, 76 bp, Artificial Sequence
  ENSG00000186188_12 (sequence is synthesized)
caaccgatttgttatgggttccttttaaatgtgaacttttttagtgtgtttgtaatatgatcaaatttaataaata

SEQ ID NO: 676279 - DNA, 120 bp, Artificial Sequence
  ENSG00000186188_13 (sequence is synthesized)
tgtgtttgtaatatgatcaaatttaataaatatttatttatgactgttcagcaatcacatctcctacatataaagccacaccatagtggtttctgaagtgagtcttagaaccgattcagg

SEQ ID NO: 676280 - DNA, 120 bp, Artificial Sequence
  ENSG00000186188_14 (sequence is synthesized)
gatttctcctctgaagggtcacagccaccctgtgccctaccttggactcgcaagggtttaggatcattcgttgatgtcaagagcaattgaagaatttctaaggaacagttaaagatgact

SEQ ID NO: 676281 - DNA, 120 bp, Artificial Sequence
  ENSG00000186188_15 (sequence is synthesized)
tacttttttttttttttcatttataaaaatgctatggacccttttaagagaatcggcatcatgaaatgagagagaaagtaggatggctctgaaatgtttgagagtgagttcaggagtggt

SEQ ID NO: 676282 - DNA, 120 bp, Artificial Sequence
  ENSG00000186188_16 (sequence is synthesized)
ttactcctgacgcatccagcagagatgcctcttaagcaccagccatggcagacagtgtcctttgtgctaggaatacagtggtgaaccagacagccatggccctctctcagggaacttacc

SEQ ID NO: 676283 - DNA, 120 bp, Artificial Sequence
  ENSG00000186188_17 (sequence is synthesized)
ttcgagtcaggggcagaaaaactaaataaaagtcaataaactatatctatatacagatacctatatatttgagatgagggtcttgctccaatgcccaggctggagtgcaacggcacaatc

SEQ ID NO: 676284 - DNA, 67 bp, Artificial Sequence
  ENSG00000186188_18 (sequence is synthesized)
tggctacaagtcaataaatagtatagcatcacagagcgaataagcactgtgaagaaaatgggacggg

SEQ ID NO: 676285 - DNA, 120 bp, Artificial Sequence
  ENSG00000186188_19 (sequence is synthesized)
atcacagagcgaataagcactgtgaagaaaatgggacgggggctatggtagtgatgggaatttagatcagatggggaggggcctaaggagacctttctgaggagtgacaaattggatcaa

SEQ ID NO: 676286 - DNA, 120 bp, Artificial Sequence
  ENSG00000186188_20 (sequence is synthesized)
aaggtaagcgacaagaaagggccacctgtgtgaatgggggaagggacacagaagagatgttagtgcaaggaggctgacacgcttgaagggagagtggcgtaagccgactattgatggagc

SEQ ID NO: 676287 - DNA, 120 bp, Artificial Sequence
  ENSG00000186188_21 (sequence is synthesized)
ctcctctgcactaggcactgcctttaatgctgagatgaggggtacccggctggggcctgtcagttgaggccagagaaattgcagggttagatcacatagggcctaggagtttattctgtt

SEQ ID NO: 676288 - DNA, 120 bp, Artificial Sequence
  ENSG00000186188_22 (sequence is synthesized)
ctccaagcccctggaggttggcaactggaggctgacgtgacctgatgaatgtgtgcaaagattaccctggctgctgggcagggaatagactctgaggagcatgagtgaaaatggagacca

SEQ ID NO: 676289 - DNA, 120 bp, Artificial Sequence
  ENSG00000186188_23 (sequence is synthesized)
gttgggcagctgctgaagtgtgacatggggatgggaccttggaggtgagtggcattagggagggattgtgagaaatgacttgtaaatataccttgggaaggtaaaacaaagatgatttat

SEQ ID NO: 676290 - DNA, 120 bp, Artificial Sequence
  ENSG00000186188_24 (sequence is synthesized)
tgatgggaaggatggaattgatagaatgtgagggaaagggagaactcaaggggaatactctgattttttagcctgtcattggttggatggtgaagcaggcaacaaaaatgggggggcctg

SEQ ID NO: 676291 - DNA, 120 bp, Artificial Sequence
  ENSG00000186188_25 (sequence is synthesized)
ggcaaagattaggggggggggagccaagagtttcatttggagctcatcagtttgaaatctcagtgagacttccaaattgaataggcagttggatgcagagatgtggagcttgggcctgga

SEQ ID NO: 676292 - DNA, 120 bp, Artificial Sequence
  ENSG00000186188_26 (sequence is synthesized)
gatgcacattgtttggagatataaatggtgtttatagacctatggttttataatacatcccttggagagatagagagaaaccagagccaaagaccgaacccagggtcactccaccacttg

SEQ ID NO: 676293 - DNA, 120 bp, Artificial Sequence
  ENSG00000186188_27 (sequence is synthesized)
gaggctgggccagtggctggaatgcacagcagcacggggcctggtgtatagtaggtgttcaacaaatctttgttgctgaggaaatcagcaccagcagtagtgactgcttatgcagtttct

SEQ ID NO: 676294 - DNA, 120 bp, Artificial Sequence
  ENSG00000186188_28 (sequence is synthesized)
ggagcagcttgcttctgaagtcagattcatggatatcacaagctcgaagacaaacgaacagagatgttttgctcactttagttaatagatttgatcaattaaacctgtttttggaagtga

SEQ ID NO: 676295 - DNA, 120 bp, Artificial Sequence
  ENSG00000186188_29 (sequence is synthesized)
ctggatgaagctactgagatttgagaggttacctgtaacagaagttgctgttaccttaaccttcacagcatcaaacacatcactaactcctaaaaaagactgaaaagggttttaccataa

SEQ ID NO: 676296 - DNA, 120 bp, Artificial Sequence
  ENSG00000186188_30 (sequence is synthesized)
ctcacagaactaatgcaagacatttgtgtccttaccctcatgaaaattaagcactagcaaccagctccattttatacaaagtaacatttatacccacatctggaccgaggccaagaaaaa

SEQ ID NO: 676297 - DNA, 120 bp, Artificial Sequence
  ENSG00000186188_31 (sequence is synthesized)
tgaaaaacaaggaagtggagcagcatttatcttctgactgcatttaaaagatgtcaaaataattggttgaaaaatggaaaggttagtcagtccatgttttcaggtacaaagagataaatt

SEQ ID NO: 676298 - DNA, 120 bp, Artificial Sequence
  ENSG00000186190_0 (sequence is synthesized)
atgcagccagtcatgctggccctgtggtccctgcttctgctctggggcctggcgactccatgccaggagctgctagagacggtgggcacgctcgctcggattgacaaggatgaactcggc

SEQ ID NO: 676299 - DNA, 120 bp, Artificial Sequence
  ENSG00000186190_1 (sequence is synthesized)
aaagccatccagaactcactggttggggagcccattctgcagaatgtgctgggatcggtcacagctgtgaaccggggcctcttgggctcaggagggctgcttggaggaggcggcttgctg

SEQ ID NO: 676300 - DNA, 120 bp, Artificial Sequence
  ENSG00000186190_2 (sequence is synthesized)
ggccacggaggggtttttggcgttgtcgaggagctctctggtctgaagattgaggagctcacgctgccaaaggtgttgctgaagctgctgccgggatttggggtgcagctgagcctgcac

SEQ ID NO: 676301 - DNA, 120 bp, Artificial Sequence
  ENSG00000186190_3 (sequence is synthesized)
accaaagtgggcatgcattgctctggcccccttggtggccttctgcagctggctgcggaggtgaacgtgacatcgcgggtggcgctggccgtgagctcaaggggcacacccatccttatc

SEQ ID NO: 676302 - DNA, 120 bp, Artificial Sequence
  ENSG00000186190_4 (sequence is synthesized)
ctcaagcgctgcagcacgctcctgggccacatcagcctgttctcagggctgctgcccacaccactctttggggtcgtggaacagatgctcttcaaggtgcttccgggactgctgtgcccc

SEQ ID NO: 676303 - DNA, 120 bp, Artificial Sequence
  ENSG00000186190_5 (sequence is synthesized)
gtggtggacagtgtgctgggtgtggtgaatgagctcctgggggctgtgctgggcctggtgtcccttggggctcttgggtccgtggaattctctctggccacattgcctctcatctccaac

SEQ ID NO: 676304 - DNA, 120 bp, Artificial Sequence
  ENSG00000186190_6 (sequence is synthesized)
ggacatcaaccctatcgtgaagagtgtagctggtgatatcattgacttccccaagtcccgtgccccagccaaggtgccccccaagaaggaccacacatcccaggtgatggtgccactgta

SEQ ID NO: 676305 - DNA, 120 bp, Artificial Sequence
  ENSG00000186190_7 (sequence is synthesized)
cctcttcaacaccacgtttggactcctgcagaccaacggcgccctcgacatggacatcacccctgagctggttcccagcgatgtcccactgacaactacagacctggcagctttgctccc

SEQ ID NO: 676306 - DNA, 120 bp, Artificial Sequence
  ENSG00000186190_8 (sequence is synthesized)
tgaggccctggggaagctgcccctgcaccagcaactcctactgttcctgcgggtgagggaagctcccacggtcacactccacaacaagaaggccttggtctccctcccagccaacatcca

SEQ ID NO: 676307 - DNA, 120 bp, Artificial Sequence
  ENSG00000186190_9 (sequence is synthesized)
tgtgctgttctatgtccctaaggggacccctgaatccctctttgagctgaactccgtcatgactgtgcgtgcccagctggctccctcggctaccaagctgcacatctccctgtccctgga

SEQ ID NO: 676308 - DNA, 120 bp, Artificial Sequence
  ENSG00000186190_10 (sequence is synthesized)
acggctcagtgtcaaggtggcctcctcctttacccatgcctttgacggatcgcgtttagaagaatggctcagccatgtggtcggggcagtgtatgcaccaaagcttaacgtggccctgga

SEQ ID NO: 676309 - DNA, 120 bp, Artificial Sequence
  ENSG00000186190_11 (sequence is synthesized)
tgttggaattcccctgcctaaggttcttaatatcaatttttccaattcagttctggagatcgtagagaatgctgttgtgctgaccgtggcatcctgaggctgagacatggccaccagcct

SEQ ID NO: 676310 - DNA, 120 bp, Artificial Sequence
  ENSG00000186191_0 (sequence is synthesized)
atgtggatggcctggtgtgtggctgcgctgtctgtggtggctgtgtgtggcaccagccacgagacaaacacggtcctcagggtgacgaaagatgtgttgagcaatgccatttcaggcatg

SEQ ID NO: 676311 - DNA, 120 bp, Artificial Sequence
  ENSG00000186191_1 (sequence is synthesized)
ctgcagcaaagtgatgctctccactcggccctgagagaggtgcccttgggtgttggtgatattccctacaatgacttccatgtccgaggaccccccccagtatataccaacggcaaaaaa

SEQ ID NO: 676312 - DNA, 120 bp, Artificial Sequence
  ENSG00000186191_2 (sequence is synthesized)
cttgatggtatttaccagtatggtcacattgagaccaacgacaacactgctcagctggggggcaaataccgatatggtgagatccttgagtccgagggaagcatcagggacctccgaaac

SEQ ID NO: 676313 - DNA, 120 bp, Artificial Sequence
  ENSG00000186191_3 (sequence is synthesized)
agtggctatcgcagtgccgagaatgcatatggaggccacaggggcctcgggcgatacagggcagcacctgtgggcaggcttcaccggcgagagctgcagcctggagaaatcccacctgga

SEQ ID NO: 676314 - DNA, 120 bp, Artificial Sequence
  ENSG00000186191_4 (sequence is synthesized)
gttgccactggggcggtgggcccaggtggtttgctgggcactggaggcatgctggcagctgatggcatcctcgcaggccaaggtggcctgctcggcggaggtggtctccttggtgatgga

SEQ ID NO: 676315 - DNA, 120 bp, Artificial Sequence
  ENSG00000186191_5 (sequence is synthesized)
ggacttcttggaggagggggtgtcctgggcgtgctcggcgagggtggcatcctcagcactgtgcaaggcatcacggggctgcgtatcgtggagctgaccctccctcgggtgtccgtgcgg

SEQ ID NO: 676316 - DNA, 120 bp, Artificial Sequence
  ENSG00000186191_6 (sequence is synthesized)
ctcctgcccggcgtgggtgtctacctgagcttgtacacccgtgtggccatcaacgggaagagtcttattggcttcctggacatcgcagtagaagtgaacatcacagccaaggtccggctg

SEQ ID NO: 676317 - DNA, 120 bp, Artificial Sequence
  ENSG00000186191_7 (sequence is synthesized)
accatggaccgcacgggttatcctcggctggtcattgagcgatgtgacaccctcctagggggcatcaaagtcaagctgctgcgagggcttctccccaatctcgtggacaatttagtgaac

SEQ ID NO: 676318 - DNA, 120 bp, Artificial Sequence
  ENSG00000186191_8 (sequence is synthesized)
tgtccagtacaccttctccagcctcccgcttgtgaccggggaattcctggagctggacctcaacacgctggttggggaggctggaggaggactcatcgactacccattggggtggccagc

SEQ ID NO: 676319 - DNA, 120 bp, Artificial Sequence
  ENSG00000186191_9 (sequence is synthesized)
tgtgtctcccaagccgatgccagagctgcctcccatgggtgacaacaccaagtcccagctggccatgtctgccaacttcctgggctcagtgctgactctactgcagaagcagcatgctct

SEQ ID NO: 676320 - DNA, 120 bp, Artificial Sequence
  ENSG00000186191_10 (sequence is synthesized)
agacctggatatcaccaatggcatgtttgaagagcttcctccacttaccacagccacactgggagccctgatccccaaggtgttccagcagtaccccgagtcctgcccacttatcatcag

SEQ ID NO: 676321 - DNA, 120 bp, Artificial Sequence
  ENSG00000186191_11 (sequence is synthesized)
gatccaggtgctgaacccaccatctgtgatgctgcagaaggacaaagcgctggtgaaggtgttggccactgccgaggtcatggtctcccagcccaaagacctggagactaccatctgcct

SEQ ID NO: 676322 - DNA, 120 bp, Artificial Sequence
  ENSG00000186191_12 (sequence is synthesized)
cattgacgtggacacagaattcttggcctcattttccacagaaggagataagctcatgattgatgccaagctggagaagaccagcctcaacctcagaacctcaaacgtgggcaactttga

SEQ ID NO: 676323 - DNA, 120 bp, Artificial Sequence
  ENSG00000186191_13 (sequence is synthesized)
tattggcctcatggaggtgctggtggagaagatttttgacctggcattcatgcccgcaatgaacgctgtgctgggttctggcgtccctctccccaaaatcctcaacatcgactttagcaa

SEQ ID NO: 676324 - DNA, 120 bp, Artificial Sequence
  ENSG00000186191_14 (sequence is synthesized)
tgcagacattgacgtgttggaggaccttttggtgctgagcgcatgagtgacagaggcagagatgctgctgcaactggaagaagctggaaccagtcccagagaggctcggcctggaaacag

SEQ ID NO: 676325 - DNA, 120 bp, Artificial Sequence
  ENSG00000186191_15 (sequence is synthesized)
tcccctgcccagagtcccctcagcctccatgacaggtccctccctggccccccaaccctcttcctcccttgccccaaccctgagaaagggtccagccactaccctgttggcaaacattcc

SEQ ID NO: 676326 - DNA, 120 bp, Artificial Sequence
  ENSG00000186191_16 (sequence is synthesized)
cttccatggtcagcctgccaggaggaggggagtcaccttggggctggaggcctctcagaccccatcctgacagcaggttgagtattcccactttcaataaaagactccactttcccggca

SEQ ID NO: 676327 - DNA, 120 bp, Artificial Sequence
  ENSG00000186191_17 (sequence is synthesized)
aaaagcagaggggctggggaacaggacttctcaagactcagcggcagggacctcctaggggggtctgaaataacagtcccaaagtaataacaatagctgctctttattgagtgtctacta

SEQ ID NO: 676328 - DNA, 120 bp, Artificial Sequence
  ENSG00000186191_18 (sequence is synthesized)
tgtatgagatacaacttgtttgtgatttgggagcagaagttcaaaaagggaagcagtgccagcatgtggatggcctggtgtgtggctgcgctgtctgtggtggctgtgtgtggcaccagc

SEQ ID NO: 676329 - DNA, 80 bp, Artificial Sequence
  ENSG00000186193_0 (sequence is synthesized)
gctattgtcgccgtgggctgagctcgccgggccggcccctccgtggggccgcgctgggacgcacgcgggtggacgagggg

SEQ ID NO: 676330 - DNA, 120 bp, Artificial Sequence
  ENSG00000186193_1 (sequence is synthesized)
ggccgcgtgcctccccccgcacccgcgcccagcacggaggggctgccgcgcgccttcctgcagagcctgcgcaccctgttcgacatcctggacgaccggcggcgcggctgcgtgcacctg

SEQ ID NO: 676331 - DNA, 120 bp, Artificial Sequence
  ENSG00000186193_2 (sequence is synthesized)
cctgcgcgagatcgagtcccgctggcagggcaccgacgcgcgggagctgccccgcggggtgctggagggcttgcgccaggtggccccggccagcggctacctgaccttcgagcgcttcgt

SEQ ID NO: 676332 - DNA, 80 bp, Artificial Sequence
  ENSG00000186193_3 (sequence is synthesized)
ccttcgagcgcttcgtggccggcctgcgcacctccctgctgagcgccgacggcggcccccgggaccccacgcgcgccccg

SEQ ID NO: 676333 - DNA, 80 bp, Artificial Sequence
  ENSG00000186193_4 (sequence is synthesized)
cgacgagccgcggacggtcctggagaggaagcccctgcccctgggcgtgcgcgcccctctggccggtcccagcgccgccg

SEQ ID NO: 676334 - DNA, 120 bp, Artificial Sequence
  ENSG00000186193_5 (sequence is synthesized)
gaggcggcgccctgccccgcggagcccgagcggtcccagagcgcggcgctggaaccgagctccagcgcggacgcaggtgcagtggcgtgcagggccctggaggcggactcaggggatgcc

SEQ ID NO: 676335 - DNA, 120 bp, Artificial Sequence
  ENSG00000186193_6 (sequence is synthesized)
tccccgtgcccgaggggaacgtcggaggcacaccatcgccagcggcgtggactgcggcctgctgaagcagatgaaggagctggagcaggagaaggaggtgctgctgcagggtttggagat

SEQ ID NO: 676336 - DNA, 120 bp, Artificial Sequence
  ENSG00000186193_7 (sequence is synthesized)
gatggcgcggggccgcgactggtaccagcagcagctgcaacgagtgcaggagcgccagcgccgcctgggccagagcagagccagcgccgactttggggctgcagggagcccccgcccact

SEQ ID NO: 676337 - DNA, 120 bp, Artificial Sequence
  ENSG00000186193_8 (sequence is synthesized)
ggggcggctactgcccaaggtacaagaggtggcccggtgcctgggggagctgctggctgcagcctgtgccagccgggccctgcccccgtcctcctccgggcccccctgccctgccctgac

SEQ ID NO: 676338 - DNA, 120 bp, Artificial Sequence
  ENSG00000186193_9 (sequence is synthesized)
gtccacctcacccccggtctggcagcagcagaccatcctcatgctgaaggagcagaaccgactcctcacccaggaggtgaccgagaagagtgagcgcatcacgcagctggagcaggagaa

SEQ ID NO: 676339 - DNA, 120 bp, Artificial Sequence
  ENSG00000186193_10 (sequence is synthesized)
gtcggcgctcattaagcagctgtttgaggcccgcgccctgagccagcaggacgggggacctctggattccaccttcatctagtccttgtgggccgcgtgggcccccagggccagcctggc

SEQ ID NO: 676340 - DNA, 120 bp, Artificial Sequence
  ENSG00000186193_11 (sequence is synthesized)
actcagcccttcgagggtgggcgccccatcgcacccaccctctctggctggagacccccggcaggcccaggcacagtcccggagtgggcgccttcctgccgcccttgccagatgggctcc

SEQ ID NO: 676341 - DNA, 120 bp, Artificial Sequence
  ENSG00000186193_12 (sequence is synthesized)
ccaggcctgcccccggctggtccccgcaccgagcgcttgactccgttttggctcctggtgctgacatgggctggggctctcttgagtccgcatagtccgcagctactactgccgctgtca

SEQ ID NO: 676342 - DNA, 120 bp, Artificial Sequence
  ENSG00000186193_13 (sequence is synthesized)
gtggacagtggggtacccctccatgagttagcgtccccccgtttccagcggtgccgccctgggtcccatcttcagggaaaggcactgcccacgccaggctgcacttccaacaacgggcag

SEQ ID NO: 676343 - DNA, 120 bp, Artificial Sequence
  ENSG00000186193_14 (sequence is synthesized)
cagagggcgcggggcggctccgacgcgggtccaagggcagcttcccgctcaaccagggcaccaggacgaggtggctgtagctcggacggacggaagtagatggagggggtggggacggcc

SEQ ID NO: 676344 - DNA, 120 bp, Artificial Sequence
  ENSG00000186193_15 (sequence is synthesized)
atcggcacgccgggtgggcgagagcttggcctgcatgtgcctcccacagaccctggggtgatggccttccccctcttggccgggacgttgccccacgttgagtcccacacaacatcctgt

SEQ ID NO: 676345 - DNA, 120 bp, Artificial Sequence
  ENSG00000186193_16 (sequence is synthesized)
gagcctggctccccaggagggcccccagacagctcccaggcacgtcataggcaaagcctgttcccccgactcaggatttccaaggcctggggtcctgctcacccccctttgctctcacgc

SEQ ID NO: 676346 - DNA, 120 bp, Artificial Sequence
  ENSG00000186193_17 (sequence is synthesized)
ccagcctgtccccaggtttcagctgggagaggccacctccctcagccaaggaaaacgagaacccccagggtacaggaggaggctggggcaggtccccttgggtgtcactccctcagcccc

SEQ ID NO: 676347 - DNA, 120 bp, Artificial Sequence
  ENSG00000186193_18 (sequence is synthesized)
tgcccaggcccactcccgctggtgctggagtacgcactggtgggggggccctgctcagcccaacctggagggtcccagtgtcaccagaaccaggggcacggcaacagcatcgatgggttc

SEQ ID NO: 676348 - DNA, 120 bp, Artificial Sequence
  ENSG00000186193_19 (sequence is synthesized)
gttctgcagcccagggcccccgatgcggggtcagtgcgtggggggcgcagggcccccgatgccgatgcggggtcagtgtgtgtggggcgcagggcctccgatgcggggtcagtgcgtggg

SEQ ID NO: 676349 - DNA, 120 bp, Artificial Sequence
  ENSG00000186193_20 (sequence is synthesized)
gcagggccccctcgtgtccagggcactttggtacactgtcccacaaggcacctgtctcagaggaggggccctggcaggcagcgtggcaactcccttccggagcccagctccatgctaacc

SEQ ID NO: 676350 - DNA, 120 bp, Artificial Sequence
  ENSG00000186193_21 (sequence is synthesized)
tgcccacagcaaccccacagagccacattccctgctgcacctggtctgcaggggtgtcccaggacaggcccaagtcagcccagcatgcagctgccctcctaccctgaagatgggagtggg

SEQ ID NO: 676351 - DNA, 120 bp, Artificial Sequence
  ENSG00000186193_22 (sequence is synthesized)
ctttccaggggacataaggatgtcaggcctggacctcctgggcaggaaagggtgcaggtcctgagggcctgtgccccacagccccagcaccaggtggactgcagcgcagtgggtgggcca

SEQ ID NO: 676352 - DNA, 120 bp, Artificial Sequence
  ENSG00000186193_23 (sequence is synthesized)
gtggcagccagggagaagccccccgtcagcaggctggggtctgcccaccagggcctccccacgtctgcctttgagggtgcctgccatgccctgggggatcctggcatctttactggactg

SEQ ID NO: 676353 - DNA, 120 bp, Artificial Sequence
  ENSG00000186193_24 (sequence is synthesized)
gaagcaggagacagaacagtgtctgtcccggggtgacttcatcaggagaccgcccacatagagctggaccccgcagctgaagcggaaatgtgagacaggctggcacctccggaaaaactg

SEQ ID NO: 676354 - DNA, 120 bp, Artificial Sequence
  ENSG00000186193_25 (sequence is synthesized)
cctttcagccttggtgttccgtgcaaggtgaaaagaaataggtcctcccagtttacagcttgaaatcaggctagtgagtggccctggagaccacgaggggagaatttaaaggccccggct

SEQ ID NO: 676355 - DNA, 120 bp, Artificial Sequence
  ENSG00000186193_26 (sequence is synthesized)
ggcagggtctaggtggctggcagaggcacatgcagaccctgcctggagcctgccctaggacgctgggcgggtcagtctccgtgcaggatgtgagcagcgtccctgggctctatccgcgag

SEQ ID NO: 676356 - DNA, 120 bp, Artificial Sequence
  ENSG00000186193_27 (sequence is synthesized)
gtgccagtagcgtgtgcaggtacatacacgtgcgtgcacactgtgatgacacccggaaatgtctcaggatgttgaaatgtgtccttgggggcagaagtgtccccagttgagaatctgccc

SEQ ID NO: 676357 - DNA, 120 bp, Artificial Sequence
  ENSG00000186193_28 (sequence is synthesized)
cagaggaacacacccacaccaggcctcaggattttgtgttgatcaagttccaaggaaaaggaacatctcagccgggcgtggtggttcacgcctggaatcccagcacttgaggccaggagt

SEQ ID NO: 676358 - DNA, 120 bp, Artificial Sequence
  ENSG00000186193_29 (sequence is synthesized)
tccagagcagcctgggcaacgcagtgagagaccccatctctacaaaaaaaaaaaagaaagaaagaaaatgagagatccaggtttaaaaattcataaacaccacaaggaaacaatacacta

SEQ ID NO: 676359 - DNA, 120 bp, Artificial Sequence
  ENSG00000186193_30 (sequence is synthesized)
tgagacccagcagaagcaacagattgactctagacccagatactagaattatcagagagaatataaagtaacagtgttttatatatctaaagaaataaaagagatttctggaaacatgaa

SEQ ID NO: 676360 - DNA, 120 bp, Artificial Sequence
  ENSG00000186197_0 (sequence is synthesized)
aattgccaaagcaggaagtgagctcgtggaagaagcgaaggaggagaagaagaagggaggggaaggcggaggagggcaggggcgcgcagagccacggtttgctccaggcgcgtcggaacc

SEQ ID NO: 676361 - DNA, 120 bp, Artificial Sequence
  ENSG00000186197_1 (sequence is synthesized)
gcaggacttttcatccccgtggtcccacggtcctcccgcgccccggaggcctgccagccccgctcggacgctcgtttgcccctaacccgccgccatggcttcaccggacgaccctctgcg

SEQ ID NO: 676362 - DNA, 120 bp, Artificial Sequence
  ENSG00000186197_2 (sequence is synthesized)
cgcagatcatatggtaaaggaaccagtggaagacacagaccctagcactttatcctttaatatgtcagacaaatatcccattcaagatacggaactccctaaagctgaagaatgtgatac

SEQ ID NO: 676363 - DNA, 120 bp, Artificial Sequence
  ENSG00000186197_3 (sequence is synthesized)
aattactttgaactgcccacgaaattcagatatgaaaaatcagggagaagaaaatggctttccagatagcactggagatcctcttccagagatcagcaaggacaactcctgcaaagaaaa

SEQ ID NO: 676364 - DNA, 120 bp, Artificial Sequence
  ENSG00000186197_4 (sequence is synthesized)
ctgtacttgttcctcctgcttgctccgggcccccaccataagtgacttgctcaatgatcaggacttactagacgtgatcaggataaagctggatccgtgtcacccaacggtgaaaaactg

SEQ ID NO: 676365 - DNA, 120 bp, Artificial Sequence
  ENSG00000186197_5 (sequence is synthesized)
gaggaattttgcaagcaaatgggggatgtcctatgacgaattgtgcttcctggagcagaggccacagagccccaccttggagttcttgctccggaacagtcagaggacggtgggccagct

SEQ ID NO: 676366 - DNA, 120 bp, Artificial Sequence
  ENSG00000186197_6 (sequence is synthesized)
gatggagctctgcaggctctaccacagggccgacgtggagaaggttctgcgcaggtgggtggacgaggagtggcccaagcgggagcgtggagacccctccaggcacttctagagctcttc

SEQ ID NO: 676367 - DNA, 120 bp, Artificial Sequence
  ENSG00000186197_7 (sequence is synthesized)
ttcttccttcattggcctctccggatgttgaaacaaccacaggtcaagaaggaatgtgaatctgttgttttataagagtttaggacaaggacgtggaacagtggacactggttttcccca

SEQ ID NO: 676368 - DNA, 120 bp, Artificial Sequence
  ENSG00000186197_8 (sequence is synthesized)
aagctggcagttttgtggaggggtagcttgtttcggtggtggatctctgtttatttttgcacatctgttataatttaatattcaaatctggaattaagaaaacatattttctagtatcct

SEQ ID NO: 676369 - DNA, 120 bp, Artificial Sequence
  ENSG00000186197_9 (sequence is synthesized)
ctaagggccaaagtcctacaatcggaatggattcatgccacgttgaagataaaattatcctctctctgaaatacggtaaagatttaaataggtcctgagactgttgatagccccagacat

SEQ ID NO: 676370 - DNA, 120 bp, Artificial Sequence
  ENSG00000186197_10 (sequence is synthesized)
acccacagcattatatgtaacatctctcctgatcagtgccattcccacggtttcaaagaaaacagctacaaggaatgcttacctgagtgtctgcagcaccctccacttctctcctaggca

SEQ ID NO: 676371 - DNA, 120 bp, Artificial Sequence
  ENSG00000186197_11 (sequence is synthesized)
atgagacccagtggctagaaattcaccatgtctattctcaagatccatgccagggagctctttgactctcgtgggaatcccactgttgaggttgatctcttcacctcagaaggtctcttc

SEQ ID NO: 676372 - DNA, 120 bp, Artificial Sequence
  ENSG00000186197_12 (sequence is synthesized)
agcctgttgagcccatcaataaaactattgcacctgtcctggttagcaagaaactgaacgtcacagaacaagagaagattgacaaacttatgatagagatggatggaacagaaaataaat

SEQ ID NO: 676373 - DNA, 120 bp, Artificial Sequence
  ENSG00000186197_13 (sequence is synthesized)
ctaaatttggtgcaaatgccattctgggagtgtccctcgctgcctgcaaagctagtgctgttgagaagggggttcccctgtaccaccacatcgccgacttgtctggcaactccaaagtca

SEQ ID NO: 676374 - DNA, 120 bp, Artificial Sequence
  ENSG00000186197_14 (sequence is synthesized)
tcttgccagtcccggtgttcaatgtcatcaatggcagttctcatgctgtcaccaagctggccatgcaggagttcatggtcctcccagtcggtgcagcaaacttcagggaagccatgccca

SEQ ID NO: 676375 - DNA, 120 bp, Artificial Sequence
  ENSG00000186197_15 (sequence is synthesized)
ttggagcggaggtttaccacagcctgaagaatgtcatcaaggagaaatatgggaaagatgccaccggtgtgggggatggaggcgcgtttgctcccaacatcctggagaataaagaaggcc

SEQ ID NO: 676376 - DNA, 120 bp, Artificial Sequence
  ENSG00000186197_16 (sequence is synthesized)
tggagctgctgaagactgcgattgggaaagctggctacactgataaggtgatcgtcagcatggacgtagaggcctccgagttcttcaggtctggaaagtatgacctggaattcaagtttc

SEQ ID NO: 676377 - DNA, 120 bp, Artificial Sequence
  ENSG00000186197_17 (sequence is synthesized)
tcgacgaccccaccaggtacatctcacctgactgtctggctgacctgtacaagtccttcatcaaaaactacccagtggtgtctactgaagatccctttgaccaggatgactggggagctt

SEQ ID NO: 676378 - DNA, 120 bp, Artificial Sequence
  ENSG00000186197_18 (sequence is synthesized)
ggcagaagttcacggccagtgcaggaatccaggtagtggaggatgatctcagagtgaccaacccaaagaggacagcctcggccgtgaatgagaagaagtgcaactgcctcctgctcaaag

SEQ ID NO: 676379 - DNA, 120 bp, Artificial Sequence
  ENSG00000186197_19 (sequence is synthesized)
tgaaccagattcgctctgtgactgagtcccttcaggcgtgcaagctggcccaggccaatggttggtgtgtcatggtgcctcatcattctggggagactgaaaataccttcatcactgacc

SEQ ID NO: 676380 - DNA, 120 bp, Artificial Sequence
  ENSG00000186197_20 (sequence is synthesized)
tggtggtggggctgtgacctgggcagctcaagactggtgccccttgctgatctgagcgcttggccaagtacaaccagctcctcagaattgaagaggagctgggcagcaaggctaagtttg

SEQ ID NO: 676381 - DNA, 120 bp, Artificial Sequence
  ENSG00000186197_21 (sequence is synthesized)
ccggcaggaacttcagaaaccccccagccaagtaagctgtgggcaggcaagcccttcagtcacctggtggctaattagacccctccccttgtgtcaactccggcagctcaagacccccga

SEQ ID NO: 676382 - DNA, 120 bp, Artificial Sequence
  ENSG00000186197_22 (sequence is synthesized)
acccccgagcaacatttgtaggggccgctgctagttagctacccttgcccaccgccgtggagttcgcacctcttccttagaacttctacagaagcaggttgcagtgagccgagattgcgc

SEQ ID NO: 676383 - DNA, 120 bp, Artificial Sequence
  ENSG00000186197_23 (sequence is synthesized)
accagtctggagacagagtgagagtccgtcccagaaaaaaaaaaaaaaaaaaagaacttctacagaagccaagctccctggagccctgttggcagctctagccttgcagtcatgtaattg

SEQ ID NO: 676384 - DNA, 120 bp, Artificial Sequence
  ENSG00000186197_24 (sequence is synthesized)
gcccaaatcaccggagccacgtgaccctccagtgtcatctccggggtggccacaggcaagatccccagtgattttgtgctcaaaataaaaagcctcattgacccatgagaaaaaagaaaa

SEQ ID NO: 676385 - DNA, 120 bp, Artificial Sequence
  ENSG00000186197_25 (sequence is synthesized)
ccgaaggcagaccaagaggaagtttatcctcccacctacaaattccccagagagctttcatctagaaggtttgactctggccagacaaccagcgagcatcttctcgcaatctgttgcttc

SEQ ID NO: 676386 - DNA, 120 bp, Artificial Sequence
  ENSG00000186197_26 (sequence is synthesized)
ttctgatcccggacgaccgtaaggtgcaaactcaaagacctacttccaagctgccgtccatgtgctgcccaatgaagctgcaacacgtgaacctctgtggaaggcgcccaccttttctcc

SEQ ID NO: 676387 - DNA, 120 bp, Artificial Sequence
  ENSG00000186197_27 (sequence is synthesized)
agtccttctctcactgagtgccctatcaaaatggaagaatccctgaatgaacccatttcaagtttgaattgtggtaaaatattgcaatcccaagtgttggttgcctacagcttcctactg

SEQ ID NO: 676388 - DNA, 120 bp, Artificial Sequence
  ENSG00000186197_28 (sequence is synthesized)
gatgctgggccacactctgggcctgctggcacccctgggccggtggctgctgcccctcagggtgctcaccacctagaccagaagaaccaagcccagtgacccctgaatcttcccctgagg

SEQ ID NO: 676389 - DNA, 120 bp, Artificial Sequence
  ENSG00000186197_29 (sequence is synthesized)
caggtccccgaagcttcatggaggatgttcctcagctgaccaagtgagctgagtgaaaaaagaaagaagaaagaaagaagaaagagaaagagaaagaaaggagagaaaaagaaaaaagaa

SEQ ID NO: 676390 - DNA, 120 bp, Artificial Sequence
  ENSG00000186198_0 (sequence is synthesized)
gccagagctaccagatgggtccagctgccgcaggctctccaggcactgtcccctaagtgacagctgttactgcctgggagagctcaagtgcaaagactatcctgttctcccataaagagg

SEQ ID NO: 676391 - DNA, 120 bp, Artificial Sequence
  ENSG00000186198_1 (sequence is synthesized)
aggaaaaggaagatacagaaatcggtgctgctcccaacagcagatcaaggcagtcgtcaggaactcaggatccggggggtcttcacggcttctctgcccaggggccagaaccgaggaggc

SEQ ID NO: 676392 - DNA, 120 bp, Artificial Sequence
  ENSG00000186198_2 (sequence is synthesized)
caggagggctgctggggctaaggggtctaaggacctcgttgcacacgctaccaggagcaggggcatggagcacagtgagggggctcccggagacccagccggtactgtggtaccccagga

SEQ ID NO: 676393 - DNA, 120 bp, Artificial Sequence
  ENSG00000186198_3 (sequence is synthesized)
ggtcattataagcatggtcctcctgggaagaagcatccaggcaagcagaaaagaaaagatgcagccaccagaaaaagaaactccagaagtcctgcatttggatgaggccaaggatcacaa

SEQ ID NO: 676394 - DNA, 120 bp, Artificial Sequence
  ENSG00000186198_4 (sequence is synthesized)
cagcctaaacaacctaagagaaactttgctctcagaaaagccaaacttggcccaggtggaacttgagttaaaagagagagatgtgctgtcagttttccttccggatgtaccagaaactga

SEQ ID NO: 676395 - DNA, 120 bp, Artificial Sequence
  ENSG00000186198_5 (sequence is synthesized)
gagctagtgagggttcagagaagccccatcctaagccagacacatgatgtgggctcagctcagtggcctgaaacctctcaggttttagagtctctcccaagaagccgcttttttcttttt

SEQ ID NO: 676396 - DNA, 120 bp, Artificial Sequence
  ENSG00000186198_6 (sequence is synthesized)
ctttctttctttttttttttcttagcagatacaatgaatgaactgcaagcaaactaaaattctgttattaaaaaaaatcttttattaaaatgctcctggaagggagcaggtggtattgca

SEQ ID NO: 676397 - DNA, 120 bp, Artificial Sequence
  ENSG00000186204_0 (sequence is synthesized)
agctcttccctgggcctcaggtcctcaccctgcatcccctctgccctgcaggatgtcgctgctgagcctgccctggctgggcctcagaccggtggcaacgtccccatggctactcctgct

SEQ ID NO: 676398 - DNA, 120 bp, Artificial Sequence
  ENSG00000186204_1 (sequence is synthesized)
gctggttgtgggctcctggctactcgcccgcatcctggcttggacctatgccttctataacaactgccgccggctccagtgtttcccacagcccccaaaacggaactggttttggggtca

SEQ ID NO: 676399 - DNA, 120 bp, Artificial Sequence
  ENSG00000186204_2 (sequence is synthesized)
cctgggcctgatcactcctacagaggagggcttgaagaactcgacccagatgtcggccacctattcccagggctttacggtatggctgggtcccatcatccccttcatcgttttatgcca

SEQ ID NO: 676400 - DNA, 120 bp, Artificial Sequence
  ENSG00000186204_3 (sequence is synthesized)
ccctgacaccatccggtctatcaccaatgcctcagctgccattgcacccaaggataatctcttcatcaggttcctgaagccctggctgggagaagggatactgctgagtggcggtgacaa

SEQ ID NO: 676401 - DNA, 120 bp, Artificial Sequence
  ENSG00000186204_4 (sequence is synthesized)
gtggagccgccaccgtcggatgctgacgcccgccttccatttcaacatcctgaagtcctatataacgatcttcaacaagagtgcaaacatcatgcttgacaagtggcagcacctggcctc

SEQ ID NO: 676402 - DNA, 120 bp, Artificial Sequence
  ENSG00000186204_5 (sequence is synthesized)
agagggcagcagtcgtctggacatgtttgagcacatcagcctcatgaccttggacagtctacagaaatgcatcttcagctttgacagccattgtcaggagaggcccagtgaatatattgc

SEQ ID NO: 676403 - DNA, 120 bp, Artificial Sequence
  ENSG00000186204_6 (sequence is synthesized)
caccatcttggagctcagtgcccttgtagagaaaagaagccagcatatcctccagcacatggactttctgtattacctctcccatgacgggcggcgcttccacagggcctgccgcctggt

SEQ ID NO: 676404 - DNA, 120 bp, Artificial Sequence
  ENSG00000186204_7 (sequence is synthesized)
ttcacagacgctgtcatccgggagcggcgtcgcaccctccccactcagggtattgatgattttttcaaagacaaagccaagtccaagactttggatttcattgatgtgcttctgctgagc

SEQ ID NO: 676405 - DNA, 120 bp, Artificial Sequence
  ENSG00000186204_8 (sequence is synthesized)
aaggatgaagatgggaaggcattgtcagatgaggatataagagcagaggctgacaccttcatgtttggaggccatgacaccacggccagtggcctctcctgggtcctgtacaaccttgcg

SEQ ID NO: 676406 - DNA, 120 bp, Artificial Sequence
  ENSG00000186204_9 (sequence is synthesized)
aggcacccagaataccaggagcgctgccgacaggaggtgcaagagcttctgaaggaccgcgatcctaaagagattgaatgggacgacctggcccagctgcccttcctgaccatgtgcgtg

SEQ ID NO: 676407 - DNA, 120 bp, Artificial Sequence
  ENSG00000186204_10 (sequence is synthesized)
aaggagagcctgaggttacatcccccagctcccttcatctcccgatgctgcacccaggacattgttctcccagatggccgagtcatccccaaaggcattacctgcctcatcgatattata

SEQ ID NO: 676408 - DNA, 120 bp, Artificial Sequence
  ENSG00000186204_11 (sequence is synthesized)
ggggtccatcacaacccaactgtgtggccggatcctgaggtctacgaccccttccgctttgacccagagaacagcaaggggaggtcacctctggcttttattcctttctccgcagggccc

SEQ ID NO: 676409 - DNA, 120 bp, Artificial Sequence
  ENSG00000186204_12 (sequence is synthesized)
aggaactgcatcgggcaggcgttcgccatggcggagatgaaagtggtcctggcgttgatgctgctgcacttccggttcctgccagaccacactgagccccgcaggaagctggaattgatc

SEQ ID NO: 676410 - DNA, 120 bp, Artificial Sequence
  ENSG00000186204_13 (sequence is synthesized)
atgcgcgccgagggcgggctttggctgcgggtggagcccctgaatgtaagcttgcagtgactttctgacccatccacctgtttttttgcagattgtcatgaataaaacggtgctgtcacc

SEQ ID NO: 676411 - DNA, 120 bp, Artificial Sequence
  ENSG00000186204_14 (sequence is synthesized)
ttgtatcctttttctgagtcaacctaaattccatgggggtgacactggtgggcctctacattagcctgctcatgcagtacattgcatgacatacaatgggcattaggcttagggaatcta

SEQ ID NO: 676412 - DNA, 120 bp, Artificial Sequence
  ENSG00000186204_15 (sequence is synthesized)
ctttaatagtggcagaaacaagcctgatattggtccaggaggagtcattgccttatctctccaggtggttatctgcaaatacaactctgagaaatggctcaggtaagaacatcacagtct

SEQ ID NO: 676413 - DNA, 120 bp, Artificial Sequence
  ENSG00000186204_16 (sequence is synthesized)
tgcattggtggcatacgcagcaaggatgctcagggctgatgaagaagtgcctcttccaacacagggatatttttgaaatgaatttattacaatggagatgaataaagcaaacatttactc

SEQ ID NO: 676414 - DNA, 120 bp, Artificial Sequence
  ENSG00000186204_17 (sequence is synthesized)
atcatatgcctgagaaaatgtcatgtcccaatgccaggatataagttgtctaagttaattttaataatcctgtgaggttatggttatttttgtcctattgcagatgatgaactgagggcc

SEQ ID NO: 676415 - DNA, 120 bp, Artificial Sequence
  ENSG00000186204_18 (sequence is synthesized)
agagagattagggagctggacagagttcaaccagccaggaagtgagctaggactggtggagcagagattctatcctggtttatctggccccaaagcagatcaccttgaccgttattgaat

SEQ ID NO: 676416 - DNA, 120 bp, Artificial Sequence
  ENSG00000186204_19 (sequence is synthesized)
atttgacaggtgggacctagaggagggcaatatgttgaccaagggcacatagagcataggagacagagctgagacttgaatgcaggtctcttgactccaagccatgggtcttcatctcct

SEQ ID NO: 676417 - DNA, 120 bp, Artificial Sequence
  ENSG00000186204_20 (sequence is synthesized)
atactaacagtttctgctcgcatcccagtctggtcctcgctggcaatgggttcctggggcagaggaccaggaggctggttgtgggggagtccatcctgatgtttgggactggggaggggc

SEQ ID NO: 676418 - DNA, 120 bp, Artificial Sequence
  ENSG00000186204_21 (sequence is synthesized)
atagagcttcatgtcaaatgtcaggtgaaataaattggttttgatccaaagggcactgggagccatggaagatgcttgagaaagggaaggtcacagataggttttagagatgactttatt

SEQ ID NO: 676419 - DNA, 120 bp, Artificial Sequence
  ENSG00000186204_22 (sequence is synthesized)
gcatgcagcccacagggcactgctaattctgaaactgtgaggagcatgatattttattcaacttataagttagtgtgttagtctttcacatttttatgtgtatctatatgtctatgtctt

SEQ ID NO: 676420 - DNA, 120 bp, Artificial Sequence
  ENSG00000186204_23 (sequence is synthesized)
tatgataaaagatgcaccaaacccctggatcacagcagcccattaattatttacagcagtaacagcaggtggagtaggatggtagtgctggctccccattcctagggcaacacaatgttt

SEQ ID NO: 676421 - DNA, 120 bp, Artificial Sequence
  ENSG00000186204_24 (sequence is synthesized)
ttacctgtaaatgcacaagaatttgcaccaaggagaggggcccccacattatgagtattatagcttatataggacagctagctcatatgctccttctttattacagggtgaaagttagag

SEQ ID NO: 676422 - DNA, 120 bp, Artificial Sequence
  ENSG00000186204_25 (sequence is synthesized)
acagagaaagagagagagagagaatgctttgttctggcgtataaactacccctctcctgtgagatggcaatttctagagttttataacccaaatatcttctggaaagataagattctctg

SEQ ID NO: 676423 - DNA, 120 bp, Artificial Sequence
  ENSG00000186204_26 (sequence is synthesized)
ggtttaccactctagaatgtcagcaaatatttttggagcaatacataatttctaacctccaaggcaaattgccattcaaatatcctgtaccccaggttgccagtatctttttctctgaaa

SEQ ID NO: 676424 - DNA, 120 bp, Artificial Sequence
  ENSG00000186204_27 (sequence is synthesized)
gtctgtattatgcagaaaaatgaaaatattcgagaaccattgattcctgtcaccagggtccaaagaggaggcaaaggatctgggggaagcccttggagttggggctttggtgatggtgaa

SEQ ID NO: 676425 - DNA, 120 bp, Artificial Sequence
  ENSG00000186204_28 (sequence is synthesized)
caagagagatctagacgtgcagagtgcatttgagtttctggaagatcagagcttcagagattatctcaggttagactccggagtctcagagatagtataatttgtgtgtgtgtgtgtgtg

SEQ ID NO: 676426 - DNA, 120 bp, Artificial Sequence
  ENSG00000186204_29 (sequence is synthesized)
tttgtgtgtgtgtgtgtgaattccaaggttcctagtggagggggcagggttttgatgaggaaaatccaacatcacctcaccccaaaacacacacaagtgtctctccaaggctgctggaca

SEQ ID NO: 676427 - DNA, 120 bp, Artificial Sequence
  ENSG00000186204_30 (sequence is synthesized)
ccagatggagtcttggggtggagggaccatggacacatctggtctggaattttggctcttctgggtggcactgggccattgctcttcctctctgagccttggtttcctcatctgtaaaat

SEQ ID NO: 676428 - DNA, 120 bp, Artificial Sequence
  ENSG00000186204_31 (sequence is synthesized)
ctgaagccctggctgggtgagtacctgcaggtgaaaggggttggggacaaccttgcggggagggtaggggaagtgctgctcttgcccactgtccttggctgccctactaggagaagggat

SEQ ID NO: 676429 - DNA, 120 bp, Artificial Sequence
  ENSG00000186204_32 (sequence is synthesized)
agcccagcccagcccagccccgcctcctacggccttccctagatcaggggccagggccaaagacctcccagcagaagaggagaagaggttgtgtgggacaagctgctcccgacagaagga

SEQ ID NO: 676430 - DNA, 120 bp, Artificial Sequence
  ENSG00000186204_33 (sequence is synthesized)
gacattgtctctgcaatacttcaaagttcaaccaggtggttatctgcaaatacaactctgagaaatggctcaggacaagtggcagcacctggcctcagagggcagcagtcgtctggacat

SEQ ID NO: 676431 - DNA, 120 bp, Artificial Sequence
  ENSG00000186204_34 (sequence is synthesized)
gggacaagctgctcccgacagaaggtaccaggctgggggtggcagggctggaaggtcctggcctgggatgaagaggggactgcctaaggctggggtggctccaagatgctggcatgggaa

SEQ ID NO: 676432 - DNA, 120 bp, Artificial Sequence
  ENSG00000186204_35 (sequence is synthesized)
ggggatgataatccctacttgaaaggtcatttacttggcacacagtaggttctcagaaggtgtcagtttctgtgtttttctcacagaatccctgtaaactcaagagagtaaaaatgaaga

SEQ ID NO: 676433 - DNA, 120 bp, Artificial Sequence
  ENSG00000186204_36 (sequence is synthesized)
ttgtgtagtagtcattgctgattataaaccacttcagaactcattggcttagagccataagggtttacaattgctaacgagtctgtgagacagctggccagttcttctggatgtggaagg

SEQ ID NO: 676434 - DNA, 120 bp, Artificial Sequence
  ENSG00000186204_37 (sequence is synthesized)
gatcactcttggcacatgagcagctgtgggtcggggggcagctttgctgatcctggctcagttcattcacgtttggggcttcagtaccttcagactcatctgggatgggctcagctgtga

SEQ ID NO: 676435 - DNA, 120 bp, Artificial Sequence
  ENSG00000186204_38 (sequence is synthesized)
cacctggactttcccccatgtgattctctgcctccagaaggcaccctgttgttcacatggcagagactgggctccgagaaactgagaggaggctgcaatgtctgtggacattgtctctgc

SEQ ID NO: 676436 - DNA, 120 bp, Artificial Sequence
  ENSG00000186204_39 (sequence is synthesized)
cttctgtgtggtctctgcagtacccacgtccctccttgagtactcgtgcccctcattgagacttccttctcaatgtcttctccctccattgccatctgctccctgtcttggtgttctggg

SEQ ID NO: 676437 - DNA, 120 bp, Artificial Sequence
  ENSG00000186205_0 (sequence is synthesized)
ccgccgccacctcgcggagaagccagccatgggcgccgccggctcctccgcgctggcgcgctttgtcctcctcgcgcaatcccggcccgggtggctcggggttgccgcgctgggcctgac

SEQ ID NO: 676438 - DNA, 120 bp, Artificial Sequence
  ENSG00000186205_1 (sequence is synthesized)
tgaccgcggtggcgctgggggctgtcgcctggcgccgcgcatggcccacgcggcgccggcggctgctgcagcaggtgggcacagtggcgcagctctggatctaccctgtgaaatcctgca

SEQ ID NO: 676439 - DNA, 120 bp, Artificial Sequence
  ENSG00000186205_2 (sequence is synthesized)
agggggtgccggtgagcgaggcggagtgcacggccatggggctgcgcagcggcaacctgcgggacaggttttggcttgtgatcaaccaggagggaaacatggttactgctcgccaggaac

SEQ ID NO: 676440 - DNA, 120 bp, Artificial Sequence
  ENSG00000186205_3 (sequence is synthesized)
ctcgcctggtcctgatttccctgacctgcgatggtgacaccctgactctcagtgcagcctacacaaaggacctactactgcctatcaaaacgcccaccacaaatgcagtgcacaagtgca

SEQ ID NO: 676441 - DNA, 120 bp, Artificial Sequence
  ENSG00000186205_4 (sequence is synthesized)
gagtgcacggcctggagatagagggcagggactgtggcgaggccaccgcccagtggataaccagcttcctgaagtcacagccctaccgcctggtgcacttcgagcctcacatgcgaccga

SEQ ID NO: 676442 - DNA, 120 bp, Artificial Sequence
  ENSG00000186205_5 (sequence is synthesized)
gacgtcctcatcaaatagcagacttgttccgacccaaggaccagattgcttactcagacaccagcccattcttgatcctttctgaggcgtcgctggcggatctcaactccaggctagaga

SEQ ID NO: 676443 - DNA, 120 bp, Artificial Sequence
  ENSG00000186205_6 (sequence is synthesized)
agaaagttaaagcaaccaacttcaggcccaatattgtaatttcaggatgcgatgtctatgcagaggattcttgggatgagcttcttattggtgacgtggaactgaaaagggtgatggctt

SEQ ID NO: 676444 - DNA, 120 bp, Artificial Sequence
  ENSG00000186205_7 (sequence is synthesized)
gttccagatgcattttaaccacagtggacccagacaccggtgtcatgagcaggaaggaaccgctggaaacactgaagagttatcgccagtgtgacccttcagaacgaaagttatatggaa

SEQ ID NO: 676445 - DNA, 120 bp, Artificial Sequence
  ENSG00000186205_8 (sequence is synthesized)
aatcaccactctttgggcagtattttgtgctggaaaacccagggaccatcaaagtgggagaccctgtgtacctgctgggccagtaatgggaaccgtatgtcctggaatattagatgcctt

SEQ ID NO: 676446 - DNA, 120 bp, Artificial Sequence
  ENSG00000186205_9 (sequence is synthesized)
ttaaaaatgttctcaaaaatgacaacacttgaagcatggtgtttcagaactgagacctctacattttctttaaatttgtgattttcacatttttcgtcttttggacttctggtgtctcaa

SEQ ID NO: 676447 - DNA, 120 bp, Artificial Sequence
  ENSG00000186205_10 (sequence is synthesized)
tgcttcaatgtcccagtgcaaaaagtaaagaaatatagtctcaataacttagtaggacttcagtaagtcacttaaatgacaagacaggattctgaaaactccccgtttaactgattatgg

SEQ ID NO: 676448 - DNA, 120 bp, Artificial Sequence
  ENSG00000186205_11 (sequence is synthesized)
aatagttctttctcctgcttctccgtttatctaccaagagcgcagacttgcatcctgtcactaccactcgttagagaaagagaagaagagaaagaggaagagtgggtgggctggaagaat

SEQ ID NO: 676449 - DNA, 120 bp, Artificial Sequence
  ENSG00000186205_12 (sequence is synthesized)
atcctagaatgtgttattgcccctgttcatgaggtacgcaatgaaaattaaattgcaccccaaatatggctggaatgccacttcccttttcttctcaagccccgggctagcttttgaaat

SEQ ID NO: 676450 - DNA, 120 bp, Artificial Sequence
  ENSG00000186205_13 (sequence is synthesized)
ggcataaagactgaggtgaccttcaggaagcactgcagatattaattttccatagatctggatctggccctgctgcttctcagacagcattggatttcctaaaggtgctcaggaggatgg

SEQ ID NO: 676451 - DNA, 120 bp, Artificial Sequence
  ENSG00000186205_14 (sequence is synthesized)
ttgtgtagtcatggaggacccctggatccttgccattcccctcagctaatgacggagtgctccttctccagttccgggtgaaaaagttctgaattctgtggaggagaagaaaagtgattc

SEQ ID NO: 676452 - DNA, 120 bp, Artificial Sequence
  ENSG00000186205_15 (sequence is synthesized)
agtgatttcagatagactactgaaaacctttaaagggggaaaaggaaagcatatgtcagttgtttaaaacccaatatctattttttaactgattgtataactctaagatctgatgaagta

SEQ ID NO: 676453 - DNA, 120 bp, Artificial Sequence
  ENSG00000186205_16 (sequence is synthesized)
tattttttattgccattttgtcctttgattatattgggaagttgactaaacttgaaaaatgtttttaaaactgtgaataaatggaagctactttgactagtttcagatcttactaacttc

SEQ ID NO: 676454 - DNA, 85 bp, Artificial Sequence
  ENSG00000186205_17 (sequence is synthesized)
atggaagctactttgactagtttcagatcttactaacttcttggcacaaagttagactgtgaaagctgactgaggctgggcacag

SEQ ID NO: 676455 - DNA, 120 bp, Artificial Sequence
  ENSG00000186205_18 (sequence is synthesized)
gcccagaaaatataatgggatcctgtcgctacaaaatgtttttaaaatgcactcggtgtggtggtgtgtgcctgcagtcctggctatggctactcgggaggatgaggtagaaggattggt

SEQ ID NO: 676456 - DNA, 120 bp, Artificial Sequence
  ENSG00000186205_19 (sequence is synthesized)
tgagcccaggagcgggagattgaggctgcagtgagttatgattgcaccactacactccagcctgagtgatagagtgagaccctatctctaaaaaagaaacaggaaaaaaaaagaaagctg

SEQ ID NO: 676457 - DNA, 120 bp, Artificial Sequence
  ENSG00000186205_20 (sequence is synthesized)
actgaggtgaatgggcaaagccagtaattctgacacctgaccacagctgggtcttctgcataatggacctcctcacccacagcctcccaggcaagcacccatgtttgaaggactatcaag

SEQ ID NO: 676458 - DNA, 120 bp, Artificial Sequence
  ENSG00000186205_21 (sequence is synthesized)
tcaacatgctttttaccaaaagctgcacatttttcactttgattttataaaagaggtcagtaatcgctgaaatctagctgagccctgaagtaaagttctgagcaaagaggtgcatgtgct

SEQ ID NO: 676459 - DNA, 120 bp, Artificial Sequence
  ENSG00000186205_22 (sequence is synthesized)
tgttttatggttggtgaattattacagtttgttttctgcatgcttggcatgaggtgaataattacatcaattttccagagaacctgggccatcaccttccccaacaagtccagttgatgt

SEQ ID NO: 676460 - DNA, 120 bp, Artificial Sequence
  ENSG00000186205_23 (sequence is synthesized)
tgaaactacagatagattgagacaaagcgaagtgttcagcaagtagcattactaatgggaccgggggacccgtgggagagtgagtgtacacaggatttaggaaaccatgtgaatatgggc

SEQ ID NO: 676461 - DNA, 120 bp, Artificial Sequence
  ENSG00000186205_24 (sequence is synthesized)
tctctgggaatagccaataggtagggagcaatcagaaacccaaggtttggtggctcttcctaggtatttataattagtggcaagtgaaagccttagtcctgaatttctaaccacttgtaa

SEQ ID NO: 676462 - DNA, 120 bp, Artificial Sequence
  ENSG00000186205_25 (sequence is synthesized)
gaactaacagccacttctctgtgccccgtccgggcagtaaccatcattctccatggacaggctctcggggtagctagctctgcagggcagcacccacgtggaagggagcacccagaaacc

SEQ ID NO: 676463 - DNA, 120 bp, Artificial Sequence
  ENSG00000186205_26 (sequence is synthesized)
ctcctcactgggcagacctgtccttctgtgcctcacagtgtgaggaagattcctgtttgaagagagaagttccagtgacctctagaatctcagagtagttgccaagctttctgtcagtga

SEQ ID NO: 676464 - DNA, 120 bp, Artificial Sequence
  ENSG00000186205_27 (sequence is synthesized)
gatttaaaggccatttacttgtgtttattttatatttaatgagttggttaatgccagagacaaagctgatatcccatttattttggatactgagcatttgcacactattccacttgaaat

SEQ ID NO: 676465 - DNA, 120 bp, Artificial Sequence
  ENSG00000186205_28 (sequence is synthesized)
atagaatcaggaatgtaggccatcccagactttcagatcttacaacagcaaatgacagatgtttgagatcaggccaaaatatccaccctcggtgggcatctcctctgtgtggcaacttat

SEQ ID NO: 676466 - DNA, 120 bp, Artificial Sequence
  ENSG00000186205_29 (sequence is synthesized)
gctgcagccacagtggggagtcacaaactcagagctggaggtcttgaaaaggacaatgtgggccaggctccggaggggctgcctaaaggcttgcttttgtgactctcctgcagaaaatgt

SEQ ID NO: 676467 - DNA, 120 bp, Artificial Sequence
  ENSG00000186205_30 (sequence is synthesized)
ggccgttgtcctatagggagaaatactcctcctctccttctccctttactgataacggggcatggtgaggagatgagcttgtgagggtctgccagtttggtaagagtgcatggggaggtt

SEQ ID NO: 676468 - DNA, 120 bp, Artificial Sequence
  ENSG00000186205_31 (sequence is synthesized)
gggtaaattagactagccaaatgggacttcgggaaaccatttatgaggctgtcaccaacagtgatggcaggctgaaattccaggcaagtgctcccagcattccaagagtgtatcaaatta

SEQ ID NO: 676469 - DNA, 120 bp, Artificial Sequence
  ENSG00000186205_32 (sequence is synthesized)
aagcaacccatgatggtggagaacagatacattaaagttccttgaaaatgacagagtggctctcagaccagaccttgattgtgggtataatcggagtgttgctaccacaccctaacactg

SEQ ID NO: 676470 - DNA, 120 bp, Artificial Sequence
  ENSG00000186205_33 (sequence is synthesized)
catttcccgtgttttattggtccatggaattctgaaagtttgcctttcgggatgcttctaaaaacaattccatggaccagtaagtttggaaagtcctgcgtgcctcacttctcttcaaag

SEQ ID NO: 676471 - DNA, 120 bp, Artificial Sequence
  ENSG00000186205_34 (sequence is synthesized)
gcaaaaggctctggagaggccttcatgaagacatctgtgtttaatgctgcccttcccaaaggtctgtttttgactgtcttttgagaaatgatcctctgatctctaggcagaatgccagtg

SEQ ID NO: 676472 - DNA, 120 bp, Artificial Sequence
  ENSG00000186205_35 (sequence is synthesized)
agccaaggaatcccagttagcaggaggggtgcactcatgggaagactgaagaagttaaaagttcccgccaagtgaaggagacctatcttgggacacttccccttgtcctctcccttgccc

SEQ ID NO: 676473 - DNA, 120 bp, Artificial Sequence
  ENSG00000186205_36 (sequence is synthesized)
ctcttgctggagtaaaaggatggaactgggacttgataggttaaaggaggtgtggagaagtgtcttagaccagctctcctgttgtgggccttagggagaagcactctctttcttcgggat

SEQ ID NO: 676474 - DNA, 120 bp, Artificial Sequence
  ENSG00000186205_37 (sequence is synthesized)
cattttccaaacatgcatttttggatggatagggtggatcagggtgagggaagggaaaccaaactctctctaaccttgcccttacagcaatacctgtgatgtaagttacaaaaccacctg

SEQ ID NO: 676475 - DNA, 120 bp, Artificial Sequence
  ENSG00000186205_38 (sequence is synthesized)
tgatgtaagttacaaaaccacctgtgatgaaagtgctccaggatgcttcatgcaccagggaggggtgccctgtttctcttctgctagcttctcctttcttttttttttttcttctttttt

SEQ ID NO: 676476 - DNA, 73 bp, Artificial Sequence
  ENSG00000186205_39 (sequence is synthesized)
tgagcagtagcaagatttattgtggagagcgaaagaacaaagcttcggaaggggacccaaatgggctgctgct

SEQ ID NO: 676477 - DNA, 120 bp, Artificial Sequence
  ENSG00000186205_40 (sequence is synthesized)
aagtgagcagtagcaagatttattgtggagagcgaaagaacaaagcttcggaaggggacccaaatgggctgctgctgctggctggggtggccaccttttattcccttatttgtccctgcc

SEQ ID NO: 676478 - DNA, 76 bp, Artificial Sequence
  ENSG00000186205_41 (sequence is synthesized)
acaatcctttagctagacacagagtgccgattggtgagtttttacactgactggtgcatttataatcctctagcta

SEQ ID NO: 676479 - DNA, 88 bp, Artificial Sequence
  ENSG00000186205_42 (sequence is synthesized)
atttacaatcctttagctagacacagaacactgactggtgcatttataatcctctagctagaaagaaaagttctccaagtccccacta

SEQ ID NO: 676480 - DNA, 120 bp, Artificial Sequence
  ENSG00000186205_43 (sequence is synthesized)
gttgtgagccaccacgcccggccctagcttttcctttctgttgcaagtcctctcaactagtgttgccttccaccctacaaagcagaattacctcagaagtcctatggccctgactctatc

SEQ ID NO: 676481 - DNA, 120 bp, Artificial Sequence
  ENSG00000186205_44 (sequence is synthesized)
tatgtctgcacaaagcactactgtgctttgctgtctgcaagaacagagattgtttgcttcaaccactttctctgaatggatgaatgagttatgatgatatctaaagttacccaatttcaa

SEQ ID NO: 676482 - DNA, 120 bp, Artificial Sequence
  ENSG00000186205_45 (sequence is synthesized)
gcaagaggaagaatctggctcggtaccacagatgttcttggaattgggatagtaaaaaagtccctgaggcatcccttggtctgctctgaccacactctcttcacaggaagaggcttgggc

SEQ ID NO: 676483 - DNA, 120 bp, Artificial Sequence
  ENSG00000186205_46 (sequence is synthesized)
cacagctctgactataactctgctcttcctccaaacacagctgaggaattgggtggtggggcacctgctcccatgctctgtggcctggctcagagagaagagttgccttaattacattat

SEQ ID NO: 676484 - DNA, 120 bp, Artificial Sequence
  ENSG00000186205_47 (sequence is synthesized)
tattcttcctggacaggctgtaggttgtgtaaagtaacaaaaaggactgagaagtgacttcccattcagcctcttccaaggccatttttgataggcaggtcaaattcactcacatttggt

SEQ ID NO: 676485 - DNA, 120 bp, Artificial Sequence
  ENSG00000186205_48 (sequence is synthesized)
tatttgttggccagtctagtgcattcacccttgctggtcctcagtcatgctcctttacctttacagagcatcctagactgctcttcctcttaccttccttgtgaaacccacaacccctag

SEQ ID NO: 676486 - DNA, 120 bp, Artificial Sequence
  ENSG00000186205_49 (sequence is synthesized)
tccctccccttccctggcatttgttatgccctctaccaatccctgacctggtattggtcagtctccaatcctggtggatccctgtgggaactaagttaagtctaacttttgtctccctct

SEQ ID NO: 676487 - DNA, 120 bp, Artificial Sequence
  ENSG00000186205_50 (sequence is synthesized)
ttagaatttactgggagtactgtaaataaactattgttgttataattatttctgattaacatttttacacctaacaaagtctcagagagattgaatttactgggttgaagggaggagcac

SEQ ID NO: 676488 - DNA, 120 bp, Artificial Sequence
  ENSG00000186205_51 (sequence is synthesized)
cttccacatgacctgcccagcaattaaagccgcttgttagtccgaggcccaggacggccgaggacagctggagagctcttcgttgcaggcagctctggttaacatcaaccgggaaagctc

SEQ ID NO: 676489 - DNA, 120 bp, Artificial Sequence
  ENSG00000186205_52 (sequence is synthesized)
tttgtaaacacatgaataattgatcgtccagcgctcacatagctaccgcggatctgagcccgtatgactcatttgcgagccattcctgtcgtctggatgccataacattggaggaatgat

SEQ ID NO: 676490 - DNA, 120 bp, Artificial Sequence
  ENSG00000186205_53 (sequence is synthesized)
gatcgtttcttggaggttcttctgtggccagagttgccaagaccaaggctgtaatggtttgttatgatgacctttgttattccattaggctcaattgctttaaaaaatgatgtgtgcata

SEQ ID NO: 676491 - DNA, 120 bp, Artificial Sequence
  ENSG00000186205_54 (sequence is synthesized)
ctttaggaacgtttttaccctttatgttgacctgacatcatagtttatattataaaatgtattaatgacagaagagtgttttcatgtcccaaggacaaattttaacaaccataatctgcc

SEQ ID NO: 676492 - DNA, 120 bp, Artificial Sequence
  ENSG00000186205_55 (sequence is synthesized)
ctcagtcatcataaatataaatgtattggtcaaacagatctcgttaatgtggccaagataaatgcaagtctatattttaaggcagtcgaagtcctagagaatatatctggagcttttgtg

SEQ ID NO: 676493 - DNA, 120 bp, Artificial Sequence
  ENSG00000186205_56 (sequence is synthesized)
gggctaagagatcttgtatatatgctatcaaaaggctgagaaaattaacatgttcccccctctgattttgcattggacagatataaatgtcttggggatgtcaagtaagattgttcacat

SEQ ID NO: 676494 - DNA, 120 bp, Artificial Sequence
  ENSG00000186205_57 (sequence is synthesized)
agtttctggacaccattaatgcctgatggggtgaatcttagttcttaaagctatattctgctcattatgctcacagggcttttgaaaagagaacaaaataaagatttcaagtcttagcaa

SEQ ID NO: 676495 - DNA, 120 bp, Artificial Sequence
  ENSG00000186205_58 (sequence is synthesized)
tgcccctttggatctttccttggatttgacttcttttttaagatttattcagcacttaataagtgcagacttctgtgtggaggatacaaatgttgatgggtcagagactgtcatcaagga

SEQ ID NO: 676496 - DNA, 120 bp, Artificial Sequence
  ENSG00000186205_59 (sequence is synthesized)
ggcagttcagtatctaaggcttctaaggagaattctgagttgacagggaaaaatggaatcaaagcaattgagttttaaccttttatcctcagaggagccaattatattcttcacttttgc

SEQ ID NO: 676497 - DNA, 120 bp, Artificial Sequence
  ENSG00000186205_60 (sequence is synthesized)
agggaaagtgacgtacacactgatccccatggttgaaggaatggctggagtctgccgttgttgcttccatgacattttgcccctaatggaaagaatatagcacagttactgcatgggtac

SEQ ID NO: 676498 - DNA, 120 bp, Artificial Sequence
  ENSG00000186205_61 (sequence is synthesized)
gattgtgtgtggggtggggtggagcatggaggctatgtctaggaactaggcacacctaaccactgaaaagttggtgtgccatgtgttataacaatgtctatttccttatcagattgctta

SEQ ID NO: 676499 - DNA, 120 bp, Artificial Sequence
  ENSG00000186205_62 (sequence is synthesized)
atttcaggatgcgatgtctatgcagaggtaacactatgcccctttggatctttccttggatttgacttcttttttaaggattcttgggatgagcttcttattggtgacgtggaactgaaa

SEQ ID NO: 676500 - DNA, 120 bp, Artificial Sequence
  ENSG00000186205_63 (sequence is synthesized)
atttttccctgaatgaggtaagcttttaaatacttatattgcaatctgtatttcatgtttgtccatgtcttgatttgtgtttatttgccatggttagatatttacccatattttcttaca

SEQ ID NO: 676501 - DNA, 120 bp, Artificial Sequence
  ENSG00000186205_64 (sequence is synthesized)
gttaatttttttgtttaatttttaattcatttgaaattgtgttgaaacttttttcacagtcccatatgggcatttggtccatgcccaaaagactaaacaagggcatgcttgcaaattgca

SEQ ID NO: 676502 - DNA, 120 bp, Artificial Sequence
  ENSG00000186205_65 (sequence is synthesized)
aaatgaaaaggcttagacatgctacggtagtatacagactcttcgagcaaagattccaagaatcttctggattcaggtttcttttgacagcccaacctattctcttatgagggagctgta

SEQ ID NO: 676503 - DNA, 120 bp, Artificial Sequence
  ENSG00000186205_66 (sequence is synthesized)
acctcagcccacagtttcctaaagatttcggatgagttcttggggcgctggggtcgtgatcacaggcagtacacctgttttcatggtcgaagatgttacttgattttctcacatgccttg

SEQ ID NO: 676504 - DNA, 120 bp, Artificial Sequence
  ENSG00000186205_67 (sequence is synthesized)
cctgctattaataagatacacagaattagggactttggctatggattattcagacaaacagcctcaaacctcaaaccatctcaagccatgcctacattatctttgtcaaagggtcaaagg

SEQ ID NO: 676505 - DNA, 120 bp, Artificial Sequence
  ENSG00000186205_68 (sequence is synthesized)
ttataggagcatttggaattttattttaattcttcacttgcactttttgggacagtgtgcaggtggggtgctggggccaagatacagcagaggccaatcagaactcaggagaaatgtggc

SEQ ID NO: 676506 - DNA, 120 bp, Artificial Sequence
  ENSG00000186205_69 (sequence is synthesized)
aggagcaggaagaaggcagaacaaattctactcgttgaaaggcctcaagttctgggtgattatgaacctgaaccccaggatctagaaatagatgttgcaatggaaatcagtgtcagatta

SEQ ID NO: 676507 - DNA, 120 bp, Artificial Sequence
  ENSG00000186205_70 (sequence is synthesized)
gcagggcagatgtttaaatggcccaagatagatgcaaatgctttgactttgtaaaaataattattgccaattgaagccccaaggagtcaaagcagccttcctgtctatatcctccactgt

SEQ ID NO: 676508 - DNA, 120 bp, Artificial Sequence
  ENSG00000186205_71 (sequence is synthesized)
gtgtgccctcccaccctcctataaaagcaactaagggaagccctgggctgccaaatggcaagttgagactgagagggtgccttggtgggctgtaagggtttgactggagaaaggagggtg

SEQ ID NO: 676509 - DNA, 120 bp, Artificial Sequence
  ENSG00000186205_72 (sequence is synthesized)
ataaaatttttaaaaggtggggggctggaactggcagagtataagtggcactgtgtgttgctcagctgaactccatgccctgtgaacaatataagcaacagtcctgctatttccactgac

SEQ ID NO: 676510 - DNA, 120 bp, Artificial Sequence
  ENSG00000186207_0 (sequence is synthesized)
agtctacctgtctcctgagtgatctgctgcagtgcctgaaccaggtagagtgcttctcaggaccaggatgaactcttggtgctggtgttttgggcagaaagagcccctgggtggaggttg

SEQ ID NO: 676511 - DNA, 120 bp, Artificial Sequence
  ENSG00000186207_1 (sequence is synthesized)
aggccattcttgaagaaagacaaggataaagaaggattttggaggggaaggttcttctggaaggggagggtggaagctttattcagcttctacagagatgtcctgccagcagagccagca

SEQ ID NO: 676512 - DNA, 120 bp, Artificial Sequence
  ENSG00000186207_2 (sequence is synthesized)
gcagtgccagcctcctcccaaatgtacccctaaatgccctcccaagtgtactcctaagtgtcctcccaagtgtcccccaaaatgccctccccagtgttcagccccatgcccacctccagt

SEQ ID NO: 676513 - DNA, 120 bp, Artificial Sequence
  ENSG00000186207_3 (sequence is synthesized)
gctctgggggctgctgcagctctgagggtggtggctgctgcctgagccaccacaggccccgccagtccctccgacgccgacctcagagttccagctgctgtggcagtggcagtggccagc

SEQ ID NO: 676514 - DNA, 120 bp, Artificial Sequence
  ENSG00000186207_4 (sequence is synthesized)
agtctgggggctccagctgctgccacagctctgggggctctggctgctgccacagctctggaggctgctgctgacctgggccatgaggagcacggaggagaaggactggcagatcccagg

SEQ ID NO: 676515 - DNA, 120 bp, Artificial Sequence
  ENSG00000186207_5 (sequence is synthesized)
tgctgaagatgtgtgtcagcctgaggcttcttttctctcatttcccatggaaggacttcggaaatgccttaagttcccctctttatcctgcccatgttcactccattgtagggttgaagt

SEQ ID NO: 676516 - DNA, 120 bp, Artificial Sequence
  ENSG00000186207_6 (sequence is synthesized)
ctagcttgtgatattttctggcctggctttccctctcagacatagctctttggagaactaggtgttgtaattcagttatgaagctattttctctgtaacaataaagctttttattcctga

SEQ ID NO: 676517 - DNA, 120 bp, Artificial Sequence
  ENSG00000186212_0 (sequence is synthesized)
aactttcgctgtgaggactcgttgcgagaggctagagtcgcgcaggggcggcctcggagccgccctctctcacgcagactgccgcggggactcagccttggggccacccggaggggaccc

SEQ ID NO: 676518 - DNA, 120 bp, Artificial Sequence
  ENSG00000186212_1 (sequence is synthesized)
ccctcctggcgcgctcacgggctgcgggcagcgctggcctccgcggctgatgggggcggctagtgccgccccgggcgcaggtgacactcgcccggccagggtttcctctggctggggaga

SEQ ID NO: 676519 - DNA, 120 bp, Artificial Sequence
  ENSG00000186212_2 (sequence is synthesized)
gagagccccgggagggcgagactcagacacctctggggcggaggacaaggcagcgatggcccgagagctgagccaggaggcactactggactttctgtgccaggctgggggccgcgtgac

SEQ ID NO: 676520 - DNA, 120 bp, Artificial Sequence
  ENSG00000186212_3 (sequence is synthesized)
caacgctgccttgctgagccacttcaagagctttctccgagaccccgacgcgtcccccagccagcaccagcaccgccgcgagctcttcaagggcttcgtcaactcggtcgccgcagtgcg

SEQ ID NO: 676521 - DNA, 120 bp, Artificial Sequence
  ENSG00000186212_4 (sequence is synthesized)
ccaggaccccgacggcaccaagtacgtggtgctcaagaggagatacagggaccttttgggggaggaggggctgcagcgaccccgcgagccgcccgcggccgcccccagtgcagggggagc

SEQ ID NO: 676522 - DNA, 120 bp, Artificial Sequence
  ENSG00000186212_5 (sequence is synthesized)
cgaggcgcgcgccggggggagccgccccagcagcagcccaggcggcggcggcgcgagaaggagccggaggaggagccagcaggtgcagcagccagagccgccgacgcagcttgcaatgga

SEQ ID NO: 676523 - DNA, 120 bp, Artificial Sequence
  ENSG00000186212_6 (sequence is synthesized)
cgcagcttgcaatggactcccgggcagcgactcccgtagggcgcccgggaagggcggcggatcgaagggcagtcccggacagaggccgccggtgcccgcagctgcagcggcaggggccca

SEQ ID NO: 676524 - DNA, 120 bp, Artificial Sequence
  ENSG00000186212_7 (sequence is synthesized)
ggcgagagcgagctgcgcggcggcgaagacgcagggccgctgctgctgggaatgcctccagaacaacctggctgtactgccgggagagctcggcgcactcccgcactcggccaccgcgga

SEQ ID NO: 676525 - DNA, 120 bp, Artificial Sequence
  ENSG00000186212_8 (sequence is synthesized)
ggagaagccggcacgggctctgcctgcccaggatgaccgcggggcttccagggagcgggaagaaggcgcgctagctgagccggcgcctgtgcctgcagtggctcactcgcctcccgccac

SEQ ID NO: 676526 - DNA, 120 bp, Artificial Sequence
  ENSG00000186212_9 (sequence is synthesized)
cgtcgaggctgcgacaagcagggcttccccgcctgctctcctgcccggccccgctccccgcggagaccggccggagctgctgacccccagctccctgcattattcgaccctgcagcagca

SEQ ID NO: 676527 - DNA, 120 bp, Artificial Sequence
  ENSG00000186212_10 (sequence is synthesized)
gcagcagcgcactcgagagtgggtggccaggcacccgcaggtgcccgaggcccgtgatcagggccctatccgcgcctggtcggtgctgccagacaacttcctccagctgcccttggaacc

SEQ ID NO: 676528 - DNA, 120 bp, Artificial Sequence
  ENSG00000186212_11 (sequence is synthesized)
cggctccacggagcctaattcagagccgccagacccctgtctttcctcgcactctctctttcctgttgttccggatgagtcctgggaatcctgggcggggaacccttcattgactgtctt

SEQ ID NO: 676529 - DNA, 120 bp, Artificial Sequence
  ENSG00000186212_12 (sequence is synthesized)
tcgcagcattcgttgtcagctgtccctccaagatctggatgactttgtggaccaggagagtgatggcagtgaggagagcagcagtgggcccaaagactccccgggggcttctgaagaggg

SEQ ID NO: 676530 - DNA, 120 bp, Artificial Sequence
  ENSG00000186212_13 (sequence is synthesized)
gctgcaggttgtcttgggaaccccagatagggggaagctcaggaatccagctgggggcctttctgtatctcggaaggagggcagccccagccggagccctcagggtctcagaaacagagg

SEQ ID NO: 676531 - DNA, 120 bp, Artificial Sequence
  ENSG00000186212_14 (sequence is synthesized)
ggatggtcacatctctcagcaggtccctgcaggggctaatggccttgcaggccaccccctgaagcctttgccttggccagttcctaagttaaggaggtccctcaggaggagctctctggc

SEQ ID NO: 676532 - DNA, 120 bp, Artificial Sequence
  ENSG00000186212_15 (sequence is synthesized)
agggagagccaaattgtcctcctctgatgaggagtacctcgatgagggcttgctgaaaagaagtcggcgcccacctcgatccaggaagccctccaaggcaggaacggcacccagcccaag

SEQ ID NO: 676533 - DNA, 120 bp, Artificial Sequence
  ENSG00000186212_16 (sequence is synthesized)
ggttaaggctgttgtggccgagcggggttggcgacacagcctgtgggtccccagtggggaggggtctgcagccttggccccccacagaacttctgagcacaaatcatccctggttccact

SEQ ID NO: 676534 - DNA, 120 bp, Artificial Sequence
  ENSG00000186212_17 (sequence is synthesized)
agatgccagggagcatgagtggattgtgaagcttgccagtggctcctggattcaggtgtggactttgttctgggaggaccctcaactggccttgcacaaagactttttgactgggtacac

SEQ ID NO: 676535 - DNA, 120 bp, Artificial Sequence
  ENSG00000186212_18 (sequence is synthesized)
tgcgttgcactggatagccaaacatggtgacctcagggcccttcaggacttggtgtctggagcaaagaaggcagggattgtccttgatgtaaacgtgaggtccagttgtggatatacccc

SEQ ID NO: 676536 - DNA, 120 bp, Artificial Sequence
  ENSG00000186212_19 (sequence is synthesized)
gctgcaccttgcagccattcacggccaccagggggtcatcaaattgctagtgcaaaggttggcttctcgggtaaatgtcagggacagcagtgggaagaagccatggcagtatctaaccag

SEQ ID NO: 676537 - DNA, 120 bp, Artificial Sequence
  ENSG00000186212_20 (sequence is synthesized)
taatacctctggggaaatatggcagctgttgggagctcctcggggcaagcccattttccctgtctatcccttagttggaagttcttcccctaccagaaaggccaagagcaaggaaatatc

SEQ ID NO: 676538 - DNA, 120 bp, Artificial Sequence
  ENSG00000186212_21 (sequence is synthesized)
tagaagtgtcacccgaaaaacttccttcgctgcactactcaaaagtcagcacaacaagtggaaactggccaaccagtatgagaaattccacagtccaagggaaagagaagagtatagtga

SEQ ID NO: 676539 - DNA, 120 bp, Artificial Sequence
  ENSG00000186212_22 (sequence is synthesized)
ctgaggtgggtctctctgtccaacatgcaggcagcactccctcatcctgctcagtgagagaattcagggggaatagaaaagctgctgagagttggtaaagaggatggtcgagtgagatgg

SEQ ID NO: 676540 - DNA, 120 bp, Artificial Sequence
  ENSG00000186212_23 (sequence is synthesized)
tgttgacctccctggatcttatgtcactacatcctggacctcaagagggtcatccaagctttttgaaagctgaactccttgactggagaaacctagacaagaggcggggccaggtgcttg

SEQ ID NO: 676541 - DNA, 120 bp, Artificial Sequence
  ENSG00000186212_24 (sequence is synthesized)
atatctaggaggcattcttcctcttcccttgccaccatggagctgggcacagtaagccatattgtttcctgaagcaggagtcccaggccttggctagagagggaacagatgtctaacaaa

SEQ ID NO: 676542 - DNA, 120 bp, Artificial Sequence
  ENSG00000186212_25 (sequence is synthesized)
aagagaagcaattcgaggaattgatgaagcacaattaaaatcctctctggctagtagctctctggcttctgttcatttgaagaataaatcttggctgacagtgggaagcaccaggtttga

SEQ ID NO: 676543 - DNA, 120 bp, Artificial Sequence
  ENSG00000186212_26 (sequence is synthesized)
aatcagatggctttatttttctttttttggcatttaaatcagtgaaataaaattattactggagagcacagttcgatttaagagattcctcagccctgttctcaagtcttcttttgaatt

SEQ ID NO: 676544 - DNA, 120 bp, Artificial Sequence
  ENSG00000186212_27 (sequence is synthesized)
ccatgcatggtggttaatgggtaaaatgattaatgcctcctttgggtcttctcactgatcagagaagcagctgggtaagatccagttatgacttggactccattcctaagaggaatgact

SEQ ID NO: 676545 - DNA, 120 bp, Artificial Sequence
  ENSG00000186212_28 (sequence is synthesized)
gtcattcaggccctgcttttttgtatcaacccgaagggaactttccaaatgtaaaaaccatgtggctcatttacatagtgactgaaaccatctttcatggaaactccctgtgtaacaaac

SEQ ID NO: 676546 - DNA, 120 bp, Artificial Sequence
  ENSG00000186212_29 (sequence is synthesized)
agaattatcgttactagttttcagaggtttgaatggccaacgtttgtactcataaaaagagagaaatgatttcactctggggaaacagtaagggttaagagaatgcatccttaccaggac

SEQ ID NO: 676547 - DNA, 120 bp, Artificial Sequence
  ENSG00000186212_30 (sequence is synthesized)
tatctaagccgctaaatataattgtatttgcactaaacttgttgccaattaagattaaatattagcctttaagtactctatatctaacatgaagtgctcctttttaattgcttttgaaga

SEQ ID NO: 676548 - DNA, 120 bp, Artificial Sequence
  ENSG00000186212_31 (sequence is synthesized)
gaccgataacttgtgagttcatggagtgagaaaatggctagtctataaacgtcagtagagcatcaagatttcagaataagttcaaagagggctgaaatacatgttcaagtggaaattgtt

SEQ ID NO: 676549 - DNA, 120 bp, Artificial Sequence
  ENSG00000186212_32 (sequence is synthesized)
aattttttatgggaatgttttcatgagatgtgacaatgatgctgtattttaagtctttttgtgtttcttctggttatttgcccccattaaaagatcaatagatctttataatttattata

SEQ ID NO: 676550 - DNA, 120 bp, Artificial Sequence
  ENSG00000186222_0 (sequence is synthesized)
ggaagcgagcgctgcgcagtcgggtggtcgcgggccatggagggtagcttttcggatggcggagcgctgccggaggggctcgcggaagaggccgagccgcagggcgccgcctggagcggg

SEQ ID NO: 676551 - DNA, 120 bp, Artificial Sequence
  ENSG00000186222_1 (sequence is synthesized)
gacagtggcactgtttcccagagccacagcagcgcctcggggccgtgggaggacgagggcgcggaggacggcgcgccgggccgcgacctgccgctgcttcgccgcgccgctgcgggctac

SEQ ID NO: 676552 - DNA, 120 bp, Artificial Sequence
  ENSG00000186222_2 (sequence is synthesized)
gccgcctgcctgctgcccggggccggggcgcggcccgaggtcgaggccctggacgcgagcctagaggacctgcttaccagagtggacgagttcgtgggcatgctggacatgcttcgcggc

SEQ ID NO: 676553 - DNA, 120 bp, Artificial Sequence
  ENSG00000186222_3 (sequence is synthesized)
gactcgtcccacgtcgtcagcgagggcgtgccgcgcatccacgcgaaggccgccgagatgcggcgcatctacagcaggatcgaccggctggaggccttcgtgaggatggtggggggccgc

SEQ ID NO: 676554 - DNA, 120 bp, Artificial Sequence
  ENSG00000186222_4 (sequence is synthesized)
gtggccaggatggaggagcaggtcaccaaggccgaggccgagctgggcaccttccccagggcgttcaagaagctcctgcacacgatgaacgtgccctcgctctttagcaagtctgctccc

SEQ ID NO: 676555 - DNA, 120 bp, Artificial Sequence
  ENSG00000186222_5 (sequence is synthesized)
tcgaggccacagcaagccggctacgaagcccccgtcctgtttcggaccgaagactacttcccttgttgcagtgaaaggcctcagctctgacggcctgaccactgcggcaagaggacccca

SEQ ID NO: 676556 - DNA, 120 bp, Artificial Sequence
  ENSG00000186222_6 (sequence is synthesized)
catatatgatgttggagtgtgggattttaaagtttactttctacaaactctccgtagtatattcatgattcagtgtagaatgtatagactttatgtcttccaagtttaaaaaaagagaca

SEQ ID NO: 676557 - DNA, 74 bp, Artificial Sequence
  ENSG00000186222_7 (sequence is synthesized)
ggggtcgccactgcacccagcctgtgtcttccagctctaatcagaaagctgcttgtcgagggcatggggaatca

SEQ ID NO: 676558 - DNA, 120 bp, Artificial Sequence
  ENSG00000186222_8 (sequence is synthesized)
ctctaatcagaaagctgcttgtcgagggcatggggaatcaaactgaatgaacttttctctgcactgtggcaaaactgttatttttatggattttactaaatggcgttaccttttcaagat

SEQ ID NO: 676559 - DNA, 120 bp, Artificial Sequence
  ENSG00000186222_9 (sequence is synthesized)
ttatatgtttgtataatcataagaaaattgagccattaaagccttgttattcaatcctaatagtcagttttctagaacctacttttagggtaaatggtacattatttaatattatattaa

SEQ ID NO: 676560 - DNA, 120 bp, Artificial Sequence
  ENSG00000186222_10 (sequence is synthesized)
acctcctatagcgtggattgtagaccaaaggaaatggtacaatttctgagaatatatgttgattttttgtgactaattccaaagttgtatttgaaagtatgacctcacagtcttcatttg

SEQ ID NO: 676561 - DNA, 89 bp, Artificial Sequence
  ENSG00000186222_11 (sequence is synthesized)
tccatagcaaacggttgccaatgtttggtttataatttaaatgttaatagaaattttgagttttattggaaatgatttccttctgaaaa

SEQ ID NO: 676562 - DNA, 120 bp, Artificial Sequence
  ENSG00000186226_0 (sequence is synthesized)
attcactcacttcctgaggtgccgaaggaccctgtgctgcctgtgactttgctcctaagtacctactgccgagatgtcctgccagcagagccagcagcagtgccagccccctcccaagtg

SEQ ID NO: 676563 - DNA, 120 bp, Artificial Sequence
  ENSG00000186226_1 (sequence is synthesized)
cactcccaagtgccctcccaagtgtcccacccccaaatgccctccaaagtgtccccctaagtgccctccagtctcttcctgctgcagtgtcagctccggaggctgctgtggctccagctc

SEQ ID NO: 676564 - DNA, 120 bp, Artificial Sequence
  ENSG00000186226_2 (sequence is synthesized)
tgggggcagctgtggctccagctctgggggctgctgcagctctgggggaggtggctgctgcctgagccaccacaggcaccacaggtcccaccgtcacagaccccagagctctgactgctg

SEQ ID NO: 676565 - DNA, 120 bp, Artificial Sequence
  ENSG00000186226_3 (sequence is synthesized)
cagccagccctcagggggctccagctgctgtggagggggcagcggccagcactctggaggctgctgctgaagtggaccttgacttcctcttccttctgattctgcctgaatagctgagag

SEQ ID NO: 676566 - DNA, 120 bp, Artificial Sequence
  ENSG00000186226_4 (sequence is synthesized)
gttccagcaaaagcttgaagtcttgcctggagaatccctctgctctggtgtcaggaaacccaaaatctttctccttaatggcatttagagactttcttctgcagatccatggctgccctg

SEQ ID NO: 676567 - DNA, 120 bp, Artificial Sequence
  ENSG00000186226_5 (sequence is synthesized)
ggaactccaaagcacacacctacttcctccccagctcacgctgctgtattctgtgctgcctgaactgaagaaataaaatccagaatctgccccccaacttgctaccagcctgcttgattt

SEQ ID NO: 676568 - DNA, 120 bp, Artificial Sequence
  ENSG00000186226_6 (sequence is synthesized)
tcctgtttgtgtcatccttgttctgctcccctgtgtctgctggtggctgctgaggccttggtggacagaggatggggaaaggggtcaggaggaaaaagcttgcatttctgtgtgttttgt

SEQ ID NO: 676569 - DNA, 120 bp, Artificial Sequence
  ENSG00000186226_7 (sequence is synthesized)
gttttttcttctttcggtgttttccttttaaaccaagggactgaaatagcattgagaaatatttttctttcaaattctggttcctttcacctatgtaaccgcatccctcaggcatggcca

SEQ ID NO: 676570 - DNA, 120 bp, Artificial Sequence
  ENSG00000186226_8 (sequence is synthesized)
ggaggccgacttcatcctccttcccactatcacctcttcattcttgtgttcctcgttccccactccttccactaacaatctccctggactcctcctccatactgtatgtgcatgcattca

SEQ ID NO: 676571 - DNA, 120 bp, Artificial Sequence
  ENSG00000186226_9 (sequence is synthesized)
cacacacatatgtacatgcacatagatgagatgaatctgcattgtaaaaaaattaaatcacatttagtgctgtataatttgcatgcaataaaattcaataaaattaaatgtaaaattaaa

SEQ ID NO: 676572 - DNA, 120 bp, Artificial Sequence
  ENSG00000186226_10 (sequence is synthesized)
gaaacccaggctgggataaaagggctcagggccagagcaccccattcactcacttcctgaggtgccgaaggaccctgtgctgcctgtgactttggtatgtgtcctctgggaacagaagca

SEQ ID NO: 676573 - DNA, 120 bp, Artificial Sequence
  ENSG00000186230_0 (sequence is synthesized)
acttctggcggcgccctcatggttgcgttagcatggctacctagggatctgttcactgatttagagggtcccagagctctgggtcgggactgaggtgaaagagcggaaaaacgcgagaag

SEQ ID NO: 676574 - DNA, 120 bp, Artificial Sequence
  ENSG00000186230_1 (sequence is synthesized)
cggtgttccttctacacagaggctagagtgcggatcggctgagtcggctgcaggcgcccctgcctccgtcagcgtccaggtgaccgccgttcccgccccgctcttccctgggtggactgg

SEQ ID NO: 676575 - DNA, 120 bp, Artificial Sequence
  ENSG00000186230_2 (sequence is synthesized)
aggaggccgcgccgatgaacctgaccgaggattgtatggtctttgaggatgtggccatatatttctcccaagaggaatgggggatccttaatgatgctcagagacacctgcacagcaatg

SEQ ID NO: 676576 - DNA, 120 bp, Artificial Sequence
  ENSG00000186230_3 (sequence is synthesized)
tgatgttggagaactttgcgcttttgtcatcagtaggttgttggcatggagccaaggatgaggaggtaccttccaagcagtgtgtttctgtaagagtgttacaggtcacaattccaaagc

SEQ ID NO: 676577 - DNA, 120 bp, Artificial Sequence
  ENSG00000186230_4 (sequence is synthesized)
cagctttgtccaccctgaaggcccagccctgcaagatgtgtagctcaattctgaaggacattctgcacctggctgagcacgatggaacacaccctgagcaagggctgtacacatgtgcag

SEQ ID NO: 676578 - DNA, 120 bp, Artificial Sequence
  ENSG00000186230_5 (sequence is synthesized)
cagagcatgacctgcaccaaaaggagcagattagagagaagctcaccagaagtgatgagtggaggccttcatttgtgaaccacagtgctcacgtgggagagaggaacttcacatgcacgc

SEQ ID NO: 676579 - DNA, 120 bp, Artificial Sequence
  ENSG00000186230_6 (sequence is synthesized)
agggtggcaaggattttactgccagctcagaccttctccagcaacaggtcttaaacagtgggtggaagctgtacagggatacccaggatggggaagcctttcaaggtgaacagaatgatt

SEQ ID NO: 676580 - DNA, 120 bp, Artificial Sequence
  ENSG00000186230_7 (sequence is synthesized)
tcaactccagccaaggtgggaaagacttttgccaccaacatgggctgtttgagcaccaaaaaacccataatggggagaggccttatgagttcagtgaatgtggggaattgtttaggtaca

SEQ ID NO: 676581 - DNA, 120 bp, Artificial Sequence
  ENSG00000186230_8 (sequence is synthesized)
actccaaccttattaaatatcagcaaaatcatgctggagaaaggccttatgagggcactgaatatggaaagacctttattagaaagtccaacctagttcagcaccagaaaattcacagtg

SEQ ID NO: 676582 - DNA, 120 bp, Artificial Sequence
  ENSG00000186230_9 (sequence is synthesized)
aaggctttctttcaaaaaggtctgaccccattgaacatcaggagattctcagtagaccaacaccttatgaatgcacccagtgtgggaaggcctttcttacacaggctcatctggttggtc

SEQ ID NO: 676583 - DNA, 120 bp, Artificial Sequence
  ENSG00000186230_10 (sequence is synthesized)
accagaaaacccatactggagaacagccctatgaatgcaacaagtgtgggaagttttttatgtataactccaaactcatcagacatcagaaagttcacactggggagaggcgttacgagt

SEQ ID NO: 676584 - DNA, 120 bp, Artificial Sequence
  ENSG00000186230_11 (sequence is synthesized)
gcagtgaatgtgggaaattgtttatggacagcttcacactcggtagacatcagagagttcatactggagaaaggccttttgaatgcagcatatgtggaaaattctttagtcaccgctcca

SEQ ID NO: 676585 - DNA, 120 bp, Artificial Sequence
  ENSG00000186230_12 (sequence is synthesized)
cactcaatatgcaccagagagttcatgctggcaaaaggctttataagtgtagcgaatgtgggaaagcctttagcctcaaacataatgttgttcagcatctgaaaattcatactggagaac

SEQ ID NO: 676586 - DNA, 120 bp, Artificial Sequence
  ENSG00000186230_13 (sequence is synthesized)
ggccttatgagtgcactgaatgtgagaaggcctttgttagaaagtcccacctagttcagcaccagaaaatccacactgatgcattttcaaaaaggtctgacctcattcaacacaagagga

SEQ ID NO: 676587 - DNA, 120 bp, Artificial Sequence
  ENSG00000186230_14 (sequence is synthesized)
ttgacattaggccaaggccttatacatgcagtgaatgtgggaaggccttccttacacaggctcatctggttggtcaccagaaaatccatactggagaacggccttatgaatgcactcaat

SEQ ID NO: 676588 - DNA, 120 bp, Artificial Sequence
  ENSG00000186230_15 (sequence is synthesized)
gtgcgaaggcctttgttagaaagtcccacctagttcagcatgagaaaatccacactgatgcattttcaaaaaggtctgacctcattcaacacaagaggattgacctcaggccaaggcctt

SEQ ID NO: 676589 - DNA, 120 bp, Artificial Sequence
  ENSG00000186230_16 (sequence is synthesized)
atgtgtgtagtgaatgtgggaaggccttccttacacaggctcatctagatggtcaccagaaaatccagactggagaacggcgttatgaatgcaatgaatgtgggaaattctttttggaca

SEQ ID NO: 676590 - DNA, 120 bp, Artificial Sequence
  ENSG00000186230_17 (sequence is synthesized)
acttgttattcatcagagaattcacactggagaaaagccttataaatgcagcaaatgtgggaaattctttagatatcgctgtacactgagtagacatcagaaagttcacactggagaaag

SEQ ID NO: 676591 - DNA, 120 bp, Artificial Sequence
  ENSG00000186230_18 (sequence is synthesized)
accttatgagtgtagtgaatgtgggaaattttttagagatagctacaaactcattattcatcagagagttcatactggagaaaagccttatgaatgcagcaactgtgggaagtttcttag

SEQ ID NO: 676592 - DNA, 120 bp, Artificial Sequence
  ENSG00000186230_19 (sequence is synthesized)
ataccgctctacattcattaaacatcataaagtttgcactggggagaagcctcatgagtgcagtaaatgtagggaattgtttaggactaaatcgagccttattatacatcagcagtctca

SEQ ID NO: 676593 - DNA, 120 bp, Artificial Sequence
  ENSG00000186230_20 (sequence is synthesized)
cactggagaaagtccttttaagttaagggaatgtgggaaagacttcaacaaatgtaatactggtcagcgccaaaaaactcacactggagaaaggtcttatgagtgtggtgaatccagcaa

SEQ ID NO: 676594 - DNA, 120 bp, Artificial Sequence
  ENSG00000186230_21 (sequence is synthesized)
agtgtttaaatacaactccagcctcattaaacatcagataattcatactggaaaaaggccttagtggagtgaatgcaggaaagtcaccaaaactgtcacctcattcagcaccaaaaggtt

SEQ ID NO: 676595 - DNA, 120 bp, Artificial Sequence
  ENSG00000186230_22 (sequence is synthesized)
cacatcggaccaagaacctattaatatatgtaaatctaatgttgaaagagttcagatggaaatctgcgaggatttcctgctgggaactacattaaaaacatttatgtccaggcgtggtgg

SEQ ID NO: 676596 - DNA, 120 bp, Artificial Sequence
  ENSG00000186230_23 (sequence is synthesized)
ggtgacagggcgagactctgtctcaaaaagaaaaaaattataattgtggcaaattacaggtaacttaaaatctaccatcttaacccatatttaactgtactgttcagtagtgttaagtca

SEQ ID NO: 676597 - DNA, 120 bp, Artificial Sequence
  ENSG00000186230_24 (sequence is synthesized)
gtcattcgcattgttgtcaattaatatccagaagttttttcaacttaatgaaactaaaacattataccctttaaaccaggggtccacaacccccaggctgcaaactggtaccagtctgtg

SEQ ID NO: 676598 - DNA, 120 bp, Artificial Sequence
  ENSG00000186230_25 (sequence is synthesized)
gcctgttaggaaccgggccagcatcactacctgagcttcacctcctgtcagatgagcagcattagattctcatagcagcctgagccctattgtgaactgtgcctgtgagggatctaggtt

SEQ ID NO: 676599 - DNA, 120 bp, Artificial Sequence
  ENSG00000186230_26 (sequence is synthesized)
aatctaactaatacctgatgatctgaggtgggacagttttattctgaaactgtctgccccctcctctgtccctgatgcgtggaaaaattggcttccatgaaaccagtccctggtgccaaa

SEQ ID NO: 676600 - DNA, 120 bp, Artificial Sequence
  ENSG00000186230_27 (sequence is synthesized)
agtccctggtgccaaagaggttggggaccgctgctttaaactactcctcttcctcattccctacgccaaccagcccctgacaatactactgtatgaattttactataaatatctcatatg

SEQ ID NO: 676601 - DNA, 120 bp, Artificial Sequence
  ENSG00000186230_28 (sequence is synthesized)
aggaaacttaagttttagtcttttgtgacttattttgaggcttatttccctaaatgtcttcaaggtttatccatgttgtagcatagcttatgattttcatcttttttaaaggccgaataa

SEQ ID NO: 676602 - DNA, 120 bp, Artificial Sequence
  ENSG00000186230_29 (sequence is synthesized)
aatcccattgtagtcatgtgtcgcctaacaagaggactgtgttctgagtaatcatcttaaggtgattttgtcattgtgtgaacaaagagtgtacttacacaaacctgaagggcacagcct

SEQ ID NO: 676603 - DNA, 120 bp, Artificial Sequence
  ENSG00000186230_30 (sequence is synthesized)
attacgcacctaggctatatgatatggtccattgcgcctcagatataaaccttaacagcatgttacagtattgaatattgtaggtaattgaaacacaatgataagtaaatgtgtatctaa

SEQ ID NO: 676604 - DNA, 120 bp, Artificial Sequence
  ENSG00000186230_31 (sequence is synthesized)
acatatctaagtttccaaaaggtactgtaaaaatgtatgaaaaatggtaaaaactttatagggcactaacatgaacgaagcttgcgggacccctctggttgagtcagggagtgagttgtg

SEQ ID NO: 676605 - DNA, 120 bp, Artificial Sequence
  ENSG00000186230_32 (sequence is synthesized)
agtgaatgtgaagctctaggacattactgtaccctattgtagatgttataaacattgtacacttaggctactctaaattaattttttctttagtaataaattaaccttagtctactgtaa

SEQ ID NO: 676606 - DNA, 120 bp, Artificial Sequence
  ENSG00000186230_33 (sequence is synthesized)
tgaaagagcggaaaaacgcgagaagcggtgttccttctacacagaggctagagtgcggatcggctgagtcggctgcaggcgcccctgcctccgtcagcgtccaggccgaaagaatgaggg

SEQ ID NO: 676607 - DNA, 120 bp, Artificial Sequence
  ENSG00000186230_34 (sequence is synthesized)
acccagaaggaatgctgaaggcagtcacgacccaggcacaagtgtttcttgtgattaggcataattgaagcctgttaacaataatgtgaacttgtgatcaattaagcagctgaccagtcg

SEQ ID NO: 676608 - DNA, 120 bp, Artificial Sequence
  ENSG00000186230_35 (sequence is synthesized)
tgtgaacttgtgatcaattaagcagctgaccagtcgttacctcctcctccctttcatcctacccaataaatgtggagggctgtggaagctcaggggctgcctttgctcactagaagcagg

SEQ ID NO: 676609 - DNA, 76 bp, Artificial Sequence
  ENSG00000186231_0 (sequence is synthesized)
atttactagggagcagtttccccgcgcgacagttcgggagcgcgcaggcagtcgcgcgcacacacgcacgcacaca

SEQ ID NO: 676610 - DNA, 120 bp, Artificial Sequence
  ENSG00000186231_1 (sequence is synthesized)
caaacacgctaggacgctcgtcttcgctactgcatccccgaaccagcagagcgaagctactgcgggttctgttaacctcagcatcgtggggcgaagcagagccattgtgcatcaaggaga

SEQ ID NO: 676611 - DNA, 120 bp, Artificial Sequence
  ENSG00000186231_2 (sequence is synthesized)
ggccggtgcctgcgctgccgtctctggcacctaacccagcagaccgctcaccccatcggctggaatgcttgctgattcctctgcacacttctaaggctgagaacctgaggaacccagctg

SEQ ID NO: 676612 - DNA, 120 bp, Artificial Sequence
  ENSG00000186231_3 (sequence is synthesized)
gaaaatgccgtctgaacgctgcctcagtattcaagaaatgctgacaggccagaggctctgccactccgaatctcacaatgacagtgtcctggcagcgctgaatcagcagaggagtgatgg

SEQ ID NO: 676613 - DNA, 120 bp, Artificial Sequence
  ENSG00000186231_4 (sequence is synthesized)
catcctctgcgacatcaccctgattgctgaggaacagaaattccatgctcacaaggcagtcctagcagcatgcagtgactatttccgggcaatgttcagtctttgtatggtggaaagtgg

SEQ ID NO: 676614 - DNA, 120 bp, Artificial Sequence
  ENSG00000186231_5 (sequence is synthesized)
agctgatgaggttaatttgcacggtgtgaccagccttggcttaaagcaggctctggagtttgcatacacaggacagattttgctggagccaggtgtgatccaggatgtgctagcagcggg

SEQ ID NO: 676615 - DNA, 120 bp, Artificial Sequence
  ENSG00000186231_6 (sequence is synthesized)
cagtcacctacagctgttggagcttctcaatttatgctcccactatctcatccaggaattaaatagctttaattacttggatctgtacagacttgctgacctctttaacctcactttgtt

SEQ ID NO: 676616 - DNA, 120 bp, Artificial Sequence
  ENSG00000186231_7 (sequence is synthesized)
ggagaaggcagtgatcgatttcttagtgaaacatctctctgaactcctgaagagccgcccagaagaagttctaacgcttccctattgcctgcttcaggaggtgctgaagagcgaccgcct

SEQ ID NO: 676617 - DNA, 120 bp, Artificial Sequence
  ENSG00000186231_8 (sequence is synthesized)
gacctccctgagtgaagagcagatctggcagctagctgtgaggtggttggaacacaactgccactaccagtacatggacgagctcctgcaatacatccgctttggcctaatggatgtgga

SEQ ID NO: 676618 - DNA, 120 bp, Artificial Sequence
  ENSG00000186231_9 (sequence is synthesized)
tactctccatacagttgccctgtcccacccccttgtccaagcaagtgagactgcaacagcccttgtcaacgaggccctggaataccaccagagcatctatgcacagcctgtctggcagac

SEQ ID NO: 676619 - DNA, 120 bp, Artificial Sequence
  ENSG00000186231_10 (sequence is synthesized)
tcgcaggaccaaaccacgattccagtcagacactctgtatatcattggtgggaaaaagcgcgaggtctgcaaggtcaaggaacttcggtacttcaatcctgttgatcaggagaatgctct

SEQ ID NO: 676620 - DNA, 120 bp, Artificial Sequence
  ENSG00000186231_11 (sequence is synthesized)
catagctgccattgccaactggagtgagctggctcccatgcctgtgggaaggagccaccattgtgtggcagtcatgggggacttcctgtttgtggcaggaggggaagttgagcatgccag

SEQ ID NO: 676621 - DNA, 120 bp, Artificial Sequence
  ENSG00000186231_12 (sequence is synthesized)
tggccggacgtgtgctgtgaggactgcctgtcgctatgacccccgcagtaattcctgggcagagatagcacccatgaaaaactgccgggagcattttgtgctgggtgccatggaggaata

SEQ ID NO: 676622 - DNA, 120 bp, Artificial Sequence
  ENSG00000186231_13 (sequence is synthesized)
cctctatgcagttgggggcagaaatgaactgcgccaggttctgcctacagttgagcgatattgccccaagaagaacaaatggacttttgttcagtcctttgacagatccctttcatgcca

SEQ ID NO: 676623 - DNA, 120 bp, Artificial Sequence
  ENSG00000186231_14 (sequence is synthesized)
tgctggatatgtggctgatggtcttctttggatatcaggtggagtaactaatacggcacaatatcagaacaggctaatggtgtatgaacctaaccagaataagtggataagccgtagccc

SEQ ID NO: 676624 - DNA, 120 bp, Artificial Sequence
  ENSG00000186231_15 (sequence is synthesized)
ttgtgcgccatatagattcttacaacatagacactgaccagtggacacgttgtaatttcaacctgctgactggccaaaatgaatctggagttgctgtccataatgggagaatatatttag

SEQ ID NO: 676625 - DNA, 120 bp, Artificial Sequence
  ENSG00000186231_16 (sequence is synthesized)
ttggtggatattcaatttggacaaatgagcctctggcttgtatccaggtactggatgtaagcagagaaggcaaagaagaagtattctatgggcctacactcccttttgcttccaatggaa

SEQ ID NO: 676626 - DNA, 120 bp, Artificial Sequence
  ENSG00000186231_17 (sequence is synthesized)
tagcagcatgcttccttccagctccatattttacatgccctaaccttcaaactcttcaagtgcctcatcacaggattggcaccatctgaaaagccaagccatcatgaacaggaggaaaac

SEQ ID NO: 676627 - DNA, 120 bp, Artificial Sequence
  ENSG00000186231_18 (sequence is synthesized)
atagctctgactgttggatactgggcatgaaaagactcagtgctccatgcttccttgtcttgctttataggtcttatattcggataaatttaagcaaaaaatgaacaattttctaaaata

SEQ ID NO: 676628 - DNA, 120 bp, Artificial Sequence
  ENSG00000186231_19 (sequence is synthesized)
cgttattgaaaactcgtcacccttctcagtgtatgtcaacattcaatatgtatgacttttattgtggtatagcttagtgccaatttaaggtatattgtgttccatgggtctttagagcat

SEQ ID NO: 676629 - DNA, 120 bp, Artificial Sequence
  ENSG00000186231_20 (sequence is synthesized)
tctttgtacactttttctaatcagcactgtcttaagacaacataacactgttagtaaggcaatttattggacacaatggcatcgatgatcttaaaaatatatatattctgtacttaatcc

SEQ ID NO: 676630 - DNA, 120 bp, Artificial Sequence
  ENSG00000186231_21 (sequence is synthesized)
ctttattatttaaagccgggcttgtaatttttctttttaaaatttaacattatgcagccctgctcagtagagactcactcagcattatgacatcataaatttttaaatgccatattttat

SEQ ID NO: 676631 - DNA, 120 bp, Artificial Sequence
  ENSG00000186231_22 (sequence is synthesized)
tcaaggtgatacgaataataatagacatacactggaacagcagttgttgaaatacccagatttttcaccttggttactctgaccttgggtcagaacctaactttacagtgcttcagtttt

SEQ ID NO: 676632 - DNA, 120 bp, Artificial Sequence
  ENSG00000186231_23 (sequence is synthesized)
cccaccttttaaggaggataattactgatttccacgttaatttaaaagaacattatgaggattaggcgaacactttgtaatactttgcccaagaaaaagaaaaatgttgttactgaaatt

SEQ ID NO: 676633 - DNA, 120 bp, Artificial Sequence
  ENSG00000186231_24 (sequence is synthesized)
ataaggtattttattgtctttagaaccttgtaattgaacagggagattatttttgaagtttaaaaattactagatagaatttggaaacatgttgtggaataaatgattctaaaaagcatg

SEQ ID NO: 676634 - DNA, 120 bp, Artificial Sequence
  ENSG00000186231_25 (sequence is synthesized)
tgaaagagacacacaatgaggaaatagggagtttctcaaaatctaaacttgtacaggtatctaaacttgcctcaagtaactctcagatgtcttatttaaaatcatttagtgaaaaatgac

SEQ ID NO: 676635 - DNA, 120 bp, Artificial Sequence
  ENSG00000186231_26 (sequence is synthesized)
atttaaagctaaaaaataatttagttgtactaattatggtaccataaagtgctttgacataaatttgaacctagaattggcagttctaataaaagtttttccactttgttaaaggttatg

SEQ ID NO: 676636 - DNA, 120 bp, Artificial Sequence
  ENSG00000186231_27 (sequence is synthesized)
tcaatcttgagtgcttgtggaattcttcaccaccaatacatattttattactatctcttttaataatgcataggaattcttttttagactagtttttgggtttgctttgtctataacaaa

SEQ ID NO: 676637 - DNA, 120 bp, Artificial Sequence
  ENSG00000186231_28 (sequence is synthesized)
aaataaatacaacaacttaataatcacatttgaaaacaaatttaacaagtataatgtgagtttttcttttttcctaacttcctcaggacctaggtcacctttattaaaaggaagaattca

SEQ ID NO: 676638 - DNA, 120 bp, Artificial Sequence
  ENSG00000186231_29 (sequence is synthesized)
ctcttttttccttggcagtttaatcattcaggaatccctctcttaaaggaaattgttattttattcatgtaacctttttttgtaatcaaaagtgaataaaaacgatctttttgtcttaca

SEQ ID NO: 676639 - DNA, 120 bp, Artificial Sequence
  ENSG00000186231_30 (sequence is synthesized)
ggttcactgcagattatcaatcagtggaaagtgatagaagcaatggatcagcagaatgggtatagaggcaatgttcagtctttgtatggtggaaagtggagctgatgaggttaatttgca

SEQ ID NO: 676640 - DNA, 120 bp, Artificial Sequence
  ENSG00000186231_31 (sequence is synthesized)
cggtgtgaccagccttggcttaaagcaggctctggagtttgcatacacaggacaggccatgcctcttctgcaagactatacaacatccttgctcctctgatgggagctgcactaatttcg

SEQ ID NO: 676641 - DNA, 120 bp, Artificial Sequence
  ENSG00000186231_32 (sequence is synthesized)
tgaatgtcagtcaaagcctccttccttgaggagttggcgaaagacgggtttctctttctgactagatggaaaaggagatataaagatttttcagaataagatgagtattttgctggagcc

SEQ ID NO: 676642 - DNA, 120 bp, Artificial Sequence
  ENSG00000186260_0 (sequence is synthesized)
aggttcacaataaaggtgctaagaaagagaatgtaagacaggaaaataattaaatattcttaccgagtgtcttcaataggccgtgtttaagaggcgtcttacactccctgttgccagtgg

SEQ ID NO: 676643 - DNA, 120 bp, Artificial Sequence
  ENSG00000186260_1 (sequence is synthesized)
ctggaacacaatggatcacacaggggcgatagacaccgaggatgaagtgggacctttagcccatcttgctccaagtcctcagagtgaagctgtggctcatgaattccaggaactctcctt

SEQ ID NO: 676644 - DNA, 120 bp, Artificial Sequence
  ENSG00000186260_2 (sequence is synthesized)
gcagtccagtcaaaacttaccccctctgaacgaaaggaaaaatgtgctccagctgaggctgcaacaaaggaggacgagagaacaactagtggaccagggcatcatgccacctttgaagag

SEQ ID NO: 676645 - DNA, 120 bp, Artificial Sequence
  ENSG00000186260_3 (sequence is synthesized)
cccagcggcattccatgaacagataaaaagcttggaacgagccagaactgaaaactttttgaaacacaagattcggagtcgaccagatcgttctgaacttgtcaggatgcacattttaga

SEQ ID NO: 676646 - DNA, 120 bp, Artificial Sequence
  ENSG00000186260_4 (sequence is synthesized)
agaaacatttgcagagccatccctgcaggctactcagatgaagttgaaaagagctcgactagcagatgatctgaatgaaaagattgctcaaagacctggtcctatggagctggtagagaa

SEQ ID NO: 676647 - DNA, 120 bp, Artificial Sequence
  ENSG00000186260_5 (sequence is synthesized)
aaacatccttcctgtggactccagtgttaaagaagcaattataggcgttgggaaggaggactatccccacactcagggcgatttctcatttgatgaagacagcagtgacgctttgtctcc

SEQ ID NO: 676648 - DNA, 120 bp, Artificial Sequence
  ENSG00000186260_6 (sequence is synthesized)
ggaccagcctgcgagtcaggagtcacaggggtcagccgcgtccccaagtgagccaaaagttagtgaatcgccatctcctgtgactacaaacactccagcgcagtttgcttcagtgtcccc

SEQ ID NO: 676649 - DNA, 120 bp, Artificial Sequence
  ENSG00000186260_7 (sequence is synthesized)
aacagttcctgaattcttgaaaactcctccaactgcagatcagcctcccccacggcctgcagctcctgtcctccccacaaacactgtgtcctcagcaaagcctggcccagcactggtgaa

SEQ ID NO: 676650 - DNA, 120 bp, Artificial Sequence
  ENSG00000186260_8 (sequence is synthesized)
gcaaagccatcccaagaatccaaatgacaaacaccgtagcaaaaagtgcaaagatcccaaaccacgggtaaagaagttaaagtaccaccaatacattccaccagatcagaagggtgagaa

SEQ ID NO: 676651 - DNA, 120 bp, Artificial Sequence
  ENSG00000186260_9 (sequence is synthesized)
gaatgagccgcagatggactctaactacgcccgcctgctccagcagcagcagctgttcctgcaactgcagatcctgagtcagcagaagcagcactacaactaccagaccatcctgcctgc

SEQ ID NO: 676652 - DNA, 120 bp, Artificial Sequence
  ENSG00000186260_10 (sequence is synthesized)
accattcaagccactcaatgacaaaaatagtaacagtgggaattcagctttgaacaatgccacacctaacacaccaagacagaatacatctactcctgtgagaaagccaggacctctgcc

SEQ ID NO: 676653 - DNA, 120 bp, Artificial Sequence
  ENSG00000186260_11 (sequence is synthesized)
ttctagcctggatgacttaaaggtatcagaactgaagacagaactgaagttaaggggtctgccagtgtcaggcaccaaaccggacctcattgagcgcctaaaaccctaccaggaagtgaa

SEQ ID NO: 676654 - DNA, 120 bp, Artificial Sequence
  ENSG00000186260_12 (sequence is synthesized)
cagcagcggccttgctgctgggggcatcgtggcagtgtcatcatcagccattgtcaccagtaacccagaagtcactgtggccttgccggttacaacactacacaacactgtgactagctc

SEQ ID NO: 676655 - DNA, 120 bp, Artificial Sequence
  ENSG00000186260_13 (sequence is synthesized)
agtctctactctcaaggcagaattgccacctacaggaaccagcaacgcaacccgtgtggaaaatgttcattcccctctgcccatttcaccatctccctccgaacagtccagtctcagtac

SEQ ID NO: 676656 - DNA, 120 bp, Artificial Sequence
  ENSG00000186260_14 (sequence is synthesized)
tgatgacacaaacatggcagacactttcaccgagattatgaccatgatgtcgccttcacagttcttgagttcatctcctttgagaatgacaaataatgaagacagtctgagtcccaccag

SEQ ID NO: 676657 - DNA, 120 bp, Artificial Sequence
  ENSG00000186260_15 (sequence is synthesized)
cagcactctgtcaaacctggaactggatgcagccgaaaaggatcgcaagcttcaggagaaagagaagcaaatcgaagagctgaagaggaaactggaacaagagcagaagctcgtggaagt

SEQ ID NO: 676658 - DNA, 120 bp, Artificial Sequence
  ENSG00000186260_16 (sequence is synthesized)
gctgaaaatgcaacttgaggttgaaaaacgagggcagcagcagcggcccctggaagcccagcccagtgccccaggtcattctgtcaagtcagatcagaagcacggcagccttggctcctc

SEQ ID NO: 676659 - DNA, 120 bp, Artificial Sequence
  ENSG00000186260_17 (sequence is synthesized)
catcaaagatgaggcctcactccctgactgctccagctccaggcagcccatcccagtagccagccacgctgtaggccagcccgtctctacaggtggccagacccttgttgccaaaaaggc

SEQ ID NO: 676660 - DNA, 120 bp, Artificial Sequence
  ENSG00000186260_18 (sequence is synthesized)
tgtagttatcaagcaagaggtccctgtgggccaggcagagcagcagagtgtcgtctcgcagttttatacttcaccacaagcaggaatgcagactcagcctcagatagcaactgctgcaca

SEQ ID NO: 676661 - DNA, 120 bp, Artificial Sequence
  ENSG00000186260_19 (sequence is synthesized)
aataccaactgctgccttggcctcaggcttggccccaactgtacctcagacacaagacacgttcccgcagcatgtgctcagtcagcctcaacaagtcagaaaggttttcacaaactcagc

SEQ ID NO: 676662 - DNA, 120 bp, Artificial Sequence
  ENSG00000186260_20 (sequence is synthesized)
atcatcaaatacagttcttccatatcagagacatcctgccccagctgtccagcagccctttatcaataaggcctccaacagtgttcttcaatccagaaatgctccgcttccatccctgca

SEQ ID NO: 676663 - DNA, 120 bp, Artificial Sequence
  ENSG00000186260_21 (sequence is synthesized)
aaatggacctaacacacccaacaagcctagttcacccccgccaccccagcaatttgtcgtccagcactctctatttgggagtccagtcgccaagacaaaagatcccccccgctatgagga

SEQ ID NO: 676664 - DNA, 120 bp, Artificial Sequence
  ENSG00000186260_22 (sequence is synthesized)
ggccatcaagcagacacgcagcacacaggcccctctgccagagatttccaacgctcacagtcagcagatggatgacctctttgatatcctcattaagagtggagagatctccctccccat

SEQ ID NO: 676665 - DNA, 120 bp, Artificial Sequence
  ENSG00000186260_23 (sequence is synthesized)
aaaagaagaaccttctcctatttccaaaatgagaccagtgacagccagcatcaccacaatgccagtgaatacagtggtgtcccggccaccaccccaagtccaaatggcaccacctgtatc

SEQ ID NO: 676666 - DNA, 120 bp, Artificial Sequence
  ENSG00000186260_24 (sequence is synthesized)
tttagaacctatgggcagtttatctgccagcttagagaaccaactagaagctttcttggatggaactttaccctcagccaatgaaattcctccactacaaagcagcagtgaagacagaga

SEQ ID NO: 676667 - DNA, 120 bp, Artificial Sequence
  ENSG00000186260_25 (sequence is synthesized)
gcccttctctctgatcgaggacctccagaatgatctgctgagtcactcaggtatgctggaccattcacactcacccatggagacttccgagacccagtttgctgcaggtactccctgtct

SEQ ID NO: 676668 - DNA, 120 bp, Artificial Sequence
  ENSG00000186260_26 (sequence is synthesized)
gtctctcgacctgtcagactcaaacttggacaacatggagtggttggacattaccatgcccaactcctcttcaggactcactcctctcagcaccaccgcgccgagcatgttctctgctga

SEQ ID NO: 676669 - DNA, 120 bp, Artificial Sequence
  ENSG00000186260_27 (sequence is synthesized)
ctttctagacccacaggacctaccgctgccatgggactaacgtcacagatttcttttctgagagttgatgaggtttaagaacatgaagattctaaaaggtcagtttttagagatagatct

SEQ ID NO: 676670 - DNA, 120 bp, Artificial Sequence
  ENSG00000186260_28 (sequence is synthesized)
atagttgcattgttgcaatcaaaatatgttgtcacagaaagaataggtggaaggtcatagcctggaacccaagtttgaaaacatttcattgtgttcagtagtgaatttctacagtttaac

SEQ ID NO: 676671 - DNA, 120 bp, Artificial Sequence
  ENSG00000186260_29 (sequence is synthesized)
atagcacagggccttctgaaaatcgcacttgtcaaagacgactcatctatttctccagacttcagtaaagaatgaaaagtacctttagataaaaacaaagaagagtaatatatgcagcac

SEQ ID NO: 676672 - DNA, 120 bp, Artificial Sequence
  ENSG00000186260_30 (sequence is synthesized)
agtgacgttaggattctggtaattaactacatttaaatctctggtcactttaagaccctaaataaaaggcagacagctccactcaaaaactaaggctgatgtgagggaggtgagaggtca

SEQ ID NO: 676673 - DNA, 120 bp, Artificial Sequence
  ENSG00000186260_31 (sequence is synthesized)
ctgcacttggtacttcctagagacggccggagccaggcccaagacacagcagaggtcaaaggcagtggagagccttggccagttcagtgacagcttctggctgaagacttttggttctat

SEQ ID NO: 676674 - DNA, 120 bp, Artificial Sequence
  ENSG00000186260_32 (sequence is synthesized)
tcagaaacctgtgtcgtttttttggtgttgtagtttattttgtgattttttggaatcgtactttatatttccaaatttaaatttaaatgcaagatctttcaacataaacagaagatacct

SEQ ID NO: 676675 - DNA, 120 bp, Artificial Sequence
  ENSG00000186260_33 (sequence is synthesized)
acaaaatactgtcagaagtccaggtatactgataacactgaaaattctattagcaaccttctgggttggttagattgattttaatgtatatattagacatttgtatgtatgctctgacat

SEQ ID NO: 676676 - DNA, 120 bp, Artificial Sequence
  ENSG00000186260_34 (sequence is synthesized)
tgtgatttgtacagcctacgctggggtaaggaaatgggtatccaaggtcctacttttttaatagctcgaatatttctagagtacttgagccacatgtatttctgtatttaaagaattgct

SEQ ID NO: 676677 - DNA, 120 bp, Artificial Sequence
  ENSG00000186260_35 (sequence is synthesized)
atggaaggtaaggggaaggtctgtcatctacccaggacattcccatgatgagtacaggtcagattgtgccacaaggtgggcctccacgtccctgccctggccctctttcttctgtcacta

SEQ ID NO: 676678 - DNA, 120 bp, Artificial Sequence
  ENSG00000186260_36 (sequence is synthesized)
accctggttatcattttacaggcttgtaactggatattctaccagagctctcactatattgtcaagcctaagattgaaaaactggaggctttattagtgtttttatatagaaaacagtta

SEQ ID NO: 676679 - DNA, 120 bp, Artificial Sequence
  ENSG00000186260_37 (sequence is synthesized)
ttacatatgtgttaagtcatttcttaagaattttctaaaatgccaactatcacaggattatttcaagctagtcattgaggtatatgacaaaatgtaaataacaaaaaactgaaatctacc

SEQ ID NO: 676680 - DNA, 120 bp, Artificial Sequence
  ENSG00000186260_38 (sequence is synthesized)
aaaagagcatggagatttttcttaaataataatattgtgctctccacctcacccttgtgtaaaccctcaggtcaggttggttcccctgggtcacaaaatggtaaatgttccatactgaca

SEQ ID NO: 676681 - DNA, 120 bp, Artificial Sequence
  ENSG00000186260_39 (sequence is synthesized)
tgccggaggcagcctgacccgttatttggaaagaatttgtgaattatttctgggtttgtgttttgcctaagagctgatcttatttctgatttgtgtgtgtgtggtttataaattttacta

SEQ ID NO: 676682 - DNA, 120 bp, Artificial Sequence
  ENSG00000186260_40 (sequence is synthesized)
cgtgtaacaaaagtctgcttttccagcatgagcacactggagccctctgctcactggcacttcctgactcaaaggcactaacagtgctcatgtgccttccagacggttcaaggcagaggc

SEQ ID NO: 676683 - DNA, 120 bp, Artificial Sequence
  ENSG00000186260_41 (sequence is synthesized)
cactgtgctcagtgtagtctgtgatgaatagtttaagtgttcagaaattggtaaaccaacacacgggatacaataactctctgttaaccagaacaccgtcatttgaccaagccctacaag

SEQ ID NO: 676684 - DNA, 120 bp, Artificial Sequence
  ENSG00000186260_42 (sequence is synthesized)
agtttaccacactagatgttctgtgaatcctcgagtcagttccattgagaggggcctgtctccagggccaggctatttacttgggaaagtatttttcttacagttcttggccacagtttt

SEQ ID NO: 676685 - DNA, 120 bp, Artificial Sequence
  ENSG00000186260_43 (sequence is synthesized)
tttgctgagggtttctgtctgggcctatcaggtccatacttagaccctgagcatcttcttcattcagatttgaatggcttattaaattagcaccaaatatcagtgggactgtagaaggta

SEQ ID NO: 676686 - DNA, 120 bp, Artificial Sequence
  ENSG00000186260_44 (sequence is synthesized)
accgaacactagtaccattgactctcgttgaataactttatatttccataatcctgaattgtgtagatagttttctagctctcgggtccctttattgctttttaaaatagggtttgaaac

SEQ ID NO: 676687 - DNA, 120 bp, Artificial Sequence
  ENSG00000186260_45 (sequence is synthesized)
atgccacaggaaggttgctctccaaaaatacacagtgcagtgcaagaaaatgctatctcattggcctactctcctatgaattgctaaagtgcccacttcacatatgtgtttaaaccttta

SEQ ID NO: 676688 - DNA, 120 bp, Artificial Sequence
  ENSG00000186260_46 (sequence is synthesized)
taaaccagtatttcacttttaaaaagacaaggcatctctacccattaactctgcaagccactccacttgcaccattccgcttgaccctcctctctcctggcttgggtcaccagccaggca

SEQ ID NO: 676689 - DNA, 120 bp, Artificial Sequence
  ENSG00000186260_47 (sequence is synthesized)
cctgtgacacgagtgctgctctccaggatctccactacatgttccaggttggagtgaggacgcgctatgtgctcacactcatgtgacatgaccaaagatgatactctgtaaacaaggccc

SEQ ID NO: 676690 - DNA, 120 bp, Artificial Sequence
  ENSG00000186260_48 (sequence is synthesized)
ttctgaccggactcagtgcgtgtgatggtgagtgcaatgaggaagggtggatattgactaaagactggttgttgttgttgtttaggttagtgtcacagccattacagcacaagtcaaagt

SEQ ID NO: 676691 - DNA, 120 bp, Artificial Sequence
  ENSG00000186260_49 (sequence is synthesized)
cgccagttgaattttcattatgcacgtgtgtggtttaagcagtggtactgttgtatatcatattgtaaagtatcatactgccaagaaaataactcctagaaaggcattatctcacatccc

SEQ ID NO: 676692 - DNA, 120 bp, Artificial Sequence
  ENSG00000186260_50 (sequence is synthesized)
catcttactttcctacatgttctcaaaacacagtagtaccagccttacctttctgctgtatgtagatagtcagatcatcctactgggggtgggatgaatttaaaagttataccaaaattt

SEQ ID NO: 676693 - DNA, 120 bp, Artificial Sequence
  ENSG00000186260_51 (sequence is synthesized)
ctgtaaagtctttgaaagtctaggagtaggtggtcatcttgtacatttcagcaaagcatccactaggaaacctcataggacagtgttagtggttcacgttctagtgtttttcctgaaatg

SEQ ID NO: 676694 - DNA, 120 bp, Artificial Sequence
  ENSG00000186260_52 (sequence is synthesized)
tgcaatctactgtatagtattgccacataattgtacatagatgtattctgaatttgtggaatttcttgcttagatactattgtgtttgtttcatatgaatatttttgtaattctaaaaga

SEQ ID NO: 676695 - DNA, 120 bp, Artificial Sequence
  ENSG00000186260_53 (sequence is synthesized)
gatcttatttaaatttcctttttaaaagccgcatggttctgtgatccatgtaactgacactttttggctttcagtgctgtttagaaacagtggcaaaggcagggtggtgctgcctgcaag

SEQ ID NO: 676696 - DNA, 120 bp, Artificial Sequence
  ENSG00000186260_54 (sequence is synthesized)
ctgctgcctatggaaggcaaagtcatagtaatgagatagcacctctgaactgtgcagtcagcataccctgagtgatggctcaggggcgcactacctattttgtcaccagagctgactcag

SEQ ID NO: 676697 - DNA, 120 bp, Artificial Sequence
  ENSG00000186260_55 (sequence is synthesized)
gcttcctggaccctcaaccccagatcattccaggcagcatagctttcttcacagtcctttcagaattcccaggctgaaatcagccatagcagttgacaaaacagctatccccacaagtga

SEQ ID NO: 676698 - DNA, 120 bp, Artificial Sequence
  ENSG00000186260_56 (sequence is synthesized)
tgagatagtccctttactgtcctcaaatggacttggccttagagacgtggtaaagcactttggcagggtttaaaatatttgtgagaagcccacatttcagtatacatcctcactggcttc

SEQ ID NO: 676699 - DNA, 120 bp, Artificial Sequence
  ENSG00000186260_57 (sequence is synthesized)
catgcacccacctgacggtagcctcacagaagtcctggctgtcactcaggtggggagctcatggtgccgctggggactttttagagaaatgtaaagagaatagctattcagtgtctacta

SEQ ID NO: 676700 - DNA, 120 bp, Artificial Sequence
  ENSG00000186260_58 (sequence is synthesized)
gcagagcaacatgtgtcaatttaaccaaattcacaaataaccctccatttttcaatatctgctactgtaaacatgaatattgaatactgacaagagaatacccatacaaatcgtcccacc

SEQ ID NO: 676701 - DNA, 120 bp, Artificial Sequence
  ENSG00000186260_59 (sequence is synthesized)
gccctagaggccacagaattagcccaaaattatcaaagaacattaactggaaggtcaggtttttcaaggaacatagcttacaaatgcatcagtgtgtatctggagagcatcctaactgca

SEQ ID NO: 676702 - DNA, 120 bp, Artificial Sequence
  ENSG00000186260_60 (sequence is synthesized)
tttcaactcatcttttaagtgatttcagtcaaaactggaaaacaactaagatgtagtaatttttttttcctggttcaaaccttcaataacttgctcattcagcagtctctctgagctaca

SEQ ID NO: 676703 - DNA, 120 bp, Artificial Sequence
  ENSG00000186260_61 (sequence is synthesized)
tttttatttgtaaagtgactctgtctgcatggcaatgagcaggtgcgtgttttttccacattcgccctttcttgcagtatccagggaaacacatcattacaaagggtttctacctgaaat

SEQ ID NO: 676704 - DNA, 120 bp, Artificial Sequence
  ENSG00000186260_62 (sequence is synthesized)
ctttcatggaaggcctacaattcgaaaagctgcacatgtttacagaagagctcttaccctccatgcaaacactttgctctgtggtgtcacagctttgtgacaataagatggcaatctcgg

SEQ ID NO: 676705 - DNA, 120 bp, Artificial Sequence
  ENSG00000186260_63 (sequence is synthesized)
atctacaaggtgctgtcgggaatcaaataaaatatgttatcagagatatcatcacatctatagtgtttaacagagctttatgccaactactaagacaaagctttaacaaagtttatagaa

SEQ ID NO: 676706 - DNA, 120 bp, Artificial Sequence
  ENSG00000186260_64 (sequence is synthesized)
tactgaaactcgtaacaattacctctctacgtgatgctgtaaggaatcttgctaatttggtaggaagaggaagcatttaggaaagggtttagtatctaccaaaagtacttgacctcaagt

SEQ ID NO: 676707 - DNA, 120 bp, Artificial Sequence
  ENSG00000186260_65 (sequence is synthesized)
aaccaatagtaatgcaaacttgctttaaaggaaccaaaggcattgccaagtatttgccaaaaggaggcactttttatttaaaatttgagactaatgagatctcaaaaatcagccccaaaa

SEQ ID NO: 676708 - DNA, 120 bp, Artificial Sequence
  ENSG00000186260_66 (sequence is synthesized)
aggtattatccatttaaggttataattttcactaagatgtagatatttctcttattgttttcatgtaaaatagtatagagttgttttgttggtttaagagtaacattcagtagtaataca

SEQ ID NO: 676709 - DNA, 120 bp, Artificial Sequence
  ENSG00000186260_67 (sequence is synthesized)
aagttttttttctatgtagaaattagttttcttttcttgcttgcaatagaaatgcaatgtgataggtgtttctcttcttattttcattgtcacattatgtcttagcatctcactttatga

SEQ ID NO: 676710 - DNA, 120 bp, Artificial Sequence
  ENSG00000186260_68 (sequence is synthesized)
aaaaaaggagaaagataccaatctacagagccctgcttgttgaagcactagtttaatcaacaaaaaattatggcaatcgggggtccattcatctattgcctttatgttgttttttaaaag

SEQ ID NO: 676711 - DNA, 120 bp, Artificial Sequence
  ENSG00000186260_69 (sequence is synthesized)
aaaaaccatgatgcctttgtatttgctgtttgcacccctgaaatcaattccatatcatgtttgaatgccatacattttgcacatgtactgtacataagtaatgcatactgtatttttata

SEQ ID NO: 676712 - DNA, 120 bp, Artificial Sequence
  ENSG00000186260_70 (sequence is synthesized)
tgtgtgcacatttatcatcagatcttttgtacatagtggcagtattgtagctgatcgggaaatgtttgatatctcagcaattttgcatttttgtgtctcaaataaaagacattttgatgt

SEQ ID NO: 676713 - DNA, 120 bp, Artificial Sequence
  ENSG00000186260_71 (sequence is synthesized)
gggacagccaccgcctgctgttgttgctcagccccaggctttactgaccacgcagactgctcagctgctgctcccagtgtccatccagggctcgagtgtcacctcagtgcaactccctgt

SEQ ID NO: 676714 - DNA, 120 bp, Artificial Sequence
  ENSG00000186260_72 (sequence is synthesized)
aggatcatttaaggccaggagctcgagaccagcctgcacaacatagcaagactcctctacaaaaaatgtttaaagtagctgggcgtggtgatgcacgcctgtagtcccaactactcagaa

SEQ ID NO: 676715 - DNA, 120 bp, Artificial Sequence
  ENSG00000186260_73 (sequence is synthesized)
ggcaagagagaggttcccttgcaaccacaatctgggtgacacagccagatcctgtctttccctgtctgttaaaaaacaaaaacttctgaaataaaattactttttacttctttggctcat

SEQ ID NO: 676716 - DNA, 120 bp, Artificial Sequence
  ENSG00000186260_74 (sequence is synthesized)
aaagatttcccctctttgggagcccagtttattcctgtttggtagtaatattttggtcagttcagcagtctgtcatggaggagaaccctgtagaggtactggatggtttttaataacagg

SEQ ID NO: 676717 - DNA, 120 bp, Artificial Sequence
  ENSG00000186260_75 (sequence is synthesized)
cagaatttcactttccattcagttctttcattattttcccagtaagtatctttggtagtgacgttacctttggaaataatctttagattcagccattttagcacaagcagatgatttcat

SEQ ID NO: 676718 - DNA, 120 bp, Artificial Sequence
  ENSG00000186260_76 (sequence is synthesized)
gctggaatggcattggaaagtaggttcctgtgctgatgccggggaagtacattgtggatatgactgcattctcctcccactttctccatctccggtgtgttgcaccgtaatttcacaagt

SEQ ID NO: 676719 - DNA, 120 bp, Artificial Sequence
  ENSG00000186260_77 (sequence is synthesized)
ggcaaagctatctcagtgatgactaagaagtcaggagcttcttatttgagtatttattatattaatgggtattggatatagtcatattctcagtctttggctgcctcatctttgtctaca

SEQ ID NO: 676720 - DNA, 120 bp, Artificial Sequence
  ENSG00000186260_78 (sequence is synthesized)
aaatgaatattttctattcattatctgttcaggaaattttcatcgctcacagagatattccagagtctccagaagacacaatactgtcaatttttaacataaacaaatagagatagatga

SEQ ID NO: 676721 - DNA, 120 bp, Artificial Sequence
  ENSG00000186260_79 (sequence is synthesized)
catatacttttaatacttaagatacaaaatctaacaaagtaatgttaaaatttgcaaacactctaagcatgcacattaaaaaatagaattaaggtttttttctggaattactataccttc

SEQ ID NO: 676722 - DNA, 120 bp, Artificial Sequence
  ENSG00000186260_80 (sequence is synthesized)
cacagttctgatgagtcccacactcacaagtatatttgtaaatttcagttttttaaaagccagaagaaataaaactgctttccctgcagagtgcctcattatgtaccttgtcacttactt

SEQ ID NO: 676723 - DNA, 120 bp, Artificial Sequence
  ENSG00000186260_81 (sequence is synthesized)
tcctgggtcctgagtgttttccagtcctcctacttattagacttaccttatttaggaaagtggattaaaaaaaccatacatataccgttcttcttaggcctttagtacatgtctttggta

SEQ ID NO: 676724 - DNA, 120 bp, Artificial Sequence
  ENSG00000186260_82 (sequence is synthesized)
ctttggtatgtacttgttctccttcaaataaaatgtgttttgctttgtatctgaatcttgttgctaggcacagcccttgaccattttgataggtgtttttttttttttttgagacagagt

SEQ ID NO: 676725 - DNA, 120 bp, Artificial Sequence
  ENSG00000186260_83 (sequence is synthesized)
aggcctgagtcacagcacccggccaattttgataggtttaaagcagcatcttagcttaggtgctgtgaaaccttcaggatgctgtggttaactcactggtgatgacttttaaaccttcca

SEQ ID NO: 676726 - DNA, 120 bp, Artificial Sequence
  ENSG00000186260_84 (sequence is synthesized)
cctgacctcgtgatccacctacgtcggcctcccaaagtgctcggattgcaggcgtgagccaccacgcccaggttaaaccttccatcttttaagaacccacatttaccttagacagtagct

SEQ ID NO: 676727 - DNA, 120 bp, Artificial Sequence
  ENSG00000186260_85 (sequence is synthesized)
actaagtgtgatcagatttacacagtacacttggaccagtataatgtccaaattattaccctaaaagaaaataagagttgaactgttataaaatcagaacacacagttgtgcacaataat

SEQ ID NO: 676728 - DNA, 120 bp, Artificial Sequence
  ENSG00000186260_86 (sequence is synthesized)
ggtcttctgtaatggggagggaagagtgaggagactttatcctttatggtcatttacaggaaaagttaatatgtatgccagaatataaggtggcaagcccaaatataaagcagtctcccc

SEQ ID NO: 676729 - DNA, 120 bp, Artificial Sequence
  ENSG00000186260_87 (sequence is synthesized)
ttataaacttctaaggaaatagattaaatggtaaaattttaaatttattaatgtagttacattttatgaagcattgcaataatgtagaaggattgctttaaccactctcattgttcataa

SEQ ID NO: 676730 - DNA, 120 bp, Artificial Sequence
  ENSG00000186260_88 (sequence is synthesized)
aaccatcctactcaaagtctatatgtgaatctttgtggtcagtgtttttatcagtagtagaacccctgtgcatcatccatctagcactaatttccagggtacatcttcatttctgtctct

SEQ ID NO: 676731 - DNA, 120 bp, Artificial Sequence
  ENSG00000186260_89 (sequence is synthesized)
ttggtttgagttacagcagctttgtaacatgtgcatgatttggcactgaacatttcttttttttttttttttttcattaggcaaacatttattaagcacttaatatgtacaagggacaag

SEQ ID NO: 676732 - DNA, 120 bp, Artificial Sequence
  ENSG00000186260_90 (sequence is synthesized)
ggagacgcattttttaatgttgtctttctttagtaacagtcaaaataccacacagaaaataacttaaaacttaaccacagtgttattattgaccaattgggtttaatacgttttcttcaa

SEQ ID NO: 676733 - DNA, 120 bp, Artificial Sequence
  ENSG00000186260_91 (sequence is synthesized)
aagatgtttgatattttgtaggagacaaaataattatttagcttatgagaagatagggcataattttggaaatccaggcctctgaaggatggaggtgcatgttttagacacaaataatct

SEQ ID NO: 676734 - DNA, 82 bp, Artificial Sequence
  ENSG00000186260_92 (sequence is synthesized)
tctgaaggatggaggtgcatgttttagacacaaataatcttcccggtatctttgaataaatcccatatttggtagtactgat

SEQ ID NO: 676735 - DNA, 120 bp, Artificial Sequence
  ENSG00000186260_93 (sequence is synthesized)
agtaactcgtcatttaacattagatatatctccaaatgctatccctccccccggcactgaaaatttcatgtctaaatcacaagtaccattcacaaaacagtttttttttttaaattgtct

SEQ ID NO: 676736 - DNA, 120 bp, Artificial Sequence
  ENSG00000186260_94 (sequence is synthesized)
acagtttttttttttaaattgtcttagttgtatactcataatctctataacataatacttgtttgatttgtcattggttgttacattttatggggtctagtttctgttttagaatttggc

SEQ ID NO: 676737 - DNA, 120 bp, Artificial Sequence
  ENSG00000186260_95 (sequence is synthesized)
tttttttaagcagataatgtattcatgtggtttaaaatgttatgattacctagtgaaaaggaggttaccctcccaatcttgtcccttacctgcacagttactttcccagaattaactgtt

SEQ ID NO: 676738 - DNA, 120 bp, Artificial Sequence
  ENSG00000186260_96 (sequence is synthesized)
actagtgttctttctgagagaataatatttgactacgttttaaaaagcagtttttaaaaggctactttgtaacgacacccaacactttgcattttaaggttctaactgggaataatgtat

SEQ ID NO: 676739 - DNA, 120 bp, Artificial Sequence
  ENSG00000186260_97 (sequence is synthesized)
tggtttttttctcttttccttcttttttctaattctgattaaaatatttctgtaagcctgaaagtagcttcaaaagaagttggtttttaagccaatgtgttttcttcaagagtccttttt

SEQ ID NO: 676740 - DNA, 120 bp, Artificial Sequence
  ENSG00000186260_98 (sequence is synthesized)
tgttcaatacggagtaaatgaaagaacatctcattctgagaaactgtgcaaagactccactatgagattgttccctcttttctaataaatgacttcaggaagttattatagaagccttat

SEQ ID NO: 676741 - DNA, 120 bp, Artificial Sequence
  ENSG00000186260_99 (sequence is synthesized)
tttatattcagacatataatttcaggcttatgatatattaacctaatttgcatatacattccaaggcataaaaggcatccttatttggctgtcagaaatctaggtttttggggaaatgct

SEQ ID NO: 676742 - DNA, 120 bp, Artificial Sequence
  ENSG00000186260_100 (sequence is synthesized)
gctcaaaggatacaaatttcagttagataggaggaataagtttaagagatctattgcaaaacatggtagccaaggttaataacaatgtattgtattgaaaattgctaagatagtagattt

SEQ ID NO: 676743 - DNA, 120 bp, Artificial Sequence
  ENSG00000186260_101 (sequence is synthesized)
taagtgttgtcaccacgaaaaaaatagtaaacatttgaaataatgatgtgttaattcaattgagcaattccacagtgcatacatatttcaaaaaaaagtacatgataaatatatataatt

SEQ ID NO: 676744 - DNA, 120 bp, Artificial Sequence
  ENSG00000186260_102 (sequence is synthesized)
actgaccacgcagactgctcagctgctgctcccagtgtccatccagggctcgagtgtcacctcagtgcaactccctgtaggcagcctcaaactccaggtgtgaagtgtgtcttctaacta

SEQ ID NO: 676745 - DNA, 120 bp, Artificial Sequence
  ENSG00000186260_103 (sequence is synthesized)
ctttgccttacagcatgcatggaatgcaaaccctgctaaggaaggcaccatacctgagctcttccataaatgcgtccagagcagaccccacggagaaaacgtatgcatgtgtgagagggt

SEQ ID NO: 676746 - DNA, 120 bp, Artificial Sequence
  ENSG00000186260_104 (sequence is synthesized)
tattcagaaatctgaatatctagcactgtttttatatagtgaaaaaaacacaggatgcttttctagtcctgttaccttttcccttgaatgaacacagtatcatccatgcagacatttttt

SEQ ID NO: 676747 - DNA, 120 bp, Artificial Sequence
  ENSG00000186260_105 (sequence is synthesized)
tacacaccagtgacgtgatcattgtgatcatagtctgccgctgagcactttctggcaaggcacagcatctagtactttaaatggccggcttcacttaatcctcccttctcctagaagatc

SEQ ID NO: 676748 - DNA, 120 bp, Artificial Sequence
  ENSG00000186260_106 (sequence is synthesized)
taagtgataccacccatctctggataaggacgctgaggcctaggagtactcagggagttcccccaaggatggagctggcatttaaacccaggtgttctgcccgcagagcctttattctta

SEQ ID NO: 676749 - DNA, 120 bp, Artificial Sequence
  ENSG00000186260_107 (sequence is synthesized)
tgcccattcttatattctgcctcccacatttagttcttgaaagtcactgcttatatgaagatgtctaaactaaggaaaacatgaccacaaatttaggagtgaggatgtaattgaaagaga

SEQ ID NO: 676750 - DNA, 120 bp, Artificial Sequence
  ENSG00000186260_108 (sequence is synthesized)
tgagaaaacactgatgagcatgaaattcccttttgtgcgtacataacctatgtatttaccgtgtcatgcagttttggtaagttttcaccaaacatggagcacgagtgaacaagaaaccat

SEQ ID NO: 676751 - DNA, 120 bp, Artificial Sequence
  ENSG00000186260_109 (sequence is synthesized)
ttgaagcagtgctcctcagcctcgacacccaaatacctgaaacaggcgagaggaatcatctcgtacccctgtggttaggaggcagggcccacagaccctttggcagatgcaaaaattctg

SEQ ID NO: 676752 - DNA, 120 bp, Artificial Sequence
  ENSG00000186260_110 (sequence is synthesized)
attcctctgttttatctttagggtatctgtgaaattgaaagtctattccataataaatccttaaattttttggtccaaatcttccattgctgtagtagaaacgagaaccgtgtttttatc

SEQ ID NO: 676753 - DNA, 120 bp, Artificial Sequence
  ENSG00000186260_111 (sequence is synthesized)
cttgggtctgagggcgccctggccccattgctggctctccctagggaatgcacacaccgcttgcaagcagcaattgggacagttaggtctcacgagttgccttgctgttattcaagtatt

SEQ ID NO: 676754 - DNA, 120 bp, Artificial Sequence
  ENSG00000186260_112 (sequence is synthesized)
acagtacctgagctattatgtgtagaactgccttaggttcttattatttccatttccattttctcaaaattttcaaatgaaaaatcttagctacttaggaataataagagcatgcagtga

SEQ ID NO: 676755 - DNA, 120 bp, Artificial Sequence
  ENSG00000186260_113 (sequence is synthesized)
ctggtctgatgtttccctctctggtttagaatcattaaagttcagatttctgtgcagatgaagtgtgtatctgtaaccttggtcttatttcatttagatacaatccccaagtgaccagtg

SEQ ID NO: 676756 - DNA, 120 bp, Artificial Sequence
  ENSG00000186260_114 (sequence is synthesized)
attctacacctaagttctgatttctaactttgattctgacaattaaattgatgtttttttcaattcacctcctagacttcaccacaagcaggaatgcagactcagcctcagatagcaact

SEQ ID NO: 676757 - DNA, 120 bp, Artificial Sequence
  ENSG00000186260_115 (sequence is synthesized)
atatatggcctctgcgtttaatgaagacataacaagaaaagcaaaaagtctgattcacggcttgcctttggttcttgtagtctaagtttaaaaactgacaagtgttacagttggtcagca

SEQ ID NO: 676758 - DNA, 120 bp, Artificial Sequence
  ENSG00000186260_116 (sequence is synthesized)
ctctgcagatttgcgattcatagctacaaaatagaagaccctctttgacagaagccttgatcctgacatagcagttaagaagaatgttgcttggactgcttgatcaaaccactgccacgt

SEQ ID NO: 676759 - DNA, 120 bp, Artificial Sequence
  ENSG00000186260_117 (sequence is synthesized)
gtatttgcaggtcaagctgggaactaaagggtaatggctgccttcagctgcttaaagacataattggccagtgattggggtattgtggggagcaaccagggacccagggaccagagtgtt

SEQ ID NO: 676760 - DNA, 120 bp, Artificial Sequence
  ENSG00000186260_118 (sequence is synthesized)
ctgcgcaccgcacttcgctcttctgcaaattaagcttttctcctgcttgatgctgcctgtcttcagaagcctctcaccatgatcgatagctccaagaagcagcaacagggcttcccagag

SEQ ID NO: 676761 - DNA, 120 bp, Artificial Sequence
  ENSG00000186260_119 (sequence is synthesized)
attttaactgctggggattttgaaccattaaaagaaaaggaatgccttgaggggagcaaccagaaaagtctcaaggaagtgctccagctgaggctgcaacaaaggaggacgagagaacaa

SEQ ID NO: 676762 - DNA, 120 bp, Artificial Sequence
  ENSG00000186260_120 (sequence is synthesized)
agtaatgattttcatttctttgttatcagagcttatcacacagtgtctgaagtccacatggtgagagtggcctgcattccattccagtttctgtcctccaaaataggttctgaattttta

SEQ ID NO: 676763 - DNA, 120 bp, Artificial Sequence
  ENSG00000186260_121 (sequence is synthesized)
caagttagaaatgccttttcacaattattcatccagatttgcctattattagaacaccaaaatagtactagatgctctgagaaaagcgtaagtagtataatacctggcataaacagctaa

SEQ ID NO: 676764 - DNA, 120 bp, Artificial Sequence
  ENSG00000186260_122 (sequence is synthesized)
aagaagagaaggatgggcatgaaagctggagtggtcaaaggaaagcctggtggaaaagacaggatctttgtatatagaaggctcgagaagggcctttccaggcacaggggaatgctgtga

SEQ ID NO: 676765 - DNA, 120 bp, Artificial Sequence
  ENSG00000186260_123 (sequence is synthesized)
gcactagtacagaggaaggaatagagtaagtagtgcctcttcattggaaggtgagaaaaattgcctaaacaaagaatctgattaatttttaagtaaaaagtggaagacaaaaatcgagta

SEQ ID NO: 676766 - DNA, 120 bp, Artificial Sequence
  ENSG00000186260_124 (sequence is synthesized)
cagccaatgtctaaggggacttgaagctgggcagaagaccttactcaacacagcagatagacaacggagtgcttcagagcaggctgctgacgcagtgaggccaaaatataagaaaaaaca

SEQ ID NO: 676767 - DNA, 120 bp, Artificial Sequence
  ENSG00000186260_125 (sequence is synthesized)
gctggatgctggtgttgaagggacgtctggagacaatgaagagctctggcagcagagtgagtgtttcagaagacagttaaaggccttggtgacgaacaactgcggagaaggaaggtgttt

SEQ ID NO: 676768 - DNA, 120 bp, Artificial Sequence
  ENSG00000186260_126 (sequence is synthesized)
tcaaagtttgaacccaactgtgggggacggaagggagtgaattctgacaatttctgaaactgaattcacagcaagacatcaatggctaattttaattacgtaataaagaaaatttctgga

SEQ ID NO: 676769 - DNA, 120 bp, Artificial Sequence
  ENSG00000186260_127 (sequence is synthesized)
cggaagtaaggctggcgtagggccgccatgttgcagcaggatagtaatgatgacactaaagatgtttcactgtttgatgcggaagaggagacgactaatagaccaagaaaagtcaaaatc

SEQ ID NO: 676770 - DNA, 120 bp, Artificial Sequence
  ENSG00000186260_128 (sequence is synthesized)
gatcgcgcggcggcggcgggagcggcggcggcggcggccggggaggttcacaataaaggtgctaagaaagagaatgtaagacaggaaaataattaaatattcttaccgagatcactcctg

SEQ ID NO: 676771 - DNA, 120 bp, Artificial Sequence
  ENSG00000186260_129 (sequence is synthesized)
taaactctcacaagagatgtttataaaacacttggaacaatacagattgtactaagaaaatgtgctttgatcaactgtggagatacaaagcaggaaacttaataaatcaagtcctatttg

SEQ ID NO: 676772 - DNA, 120 bp, Artificial Sequence
  ENSG00000186265_0 (sequence is synthesized)
agttatttcacagatgccactggggtaggtaaactgacccaactctgcagcactcagaagacgaagcaaagccttctacttgagcagtttttccatcactgatatgtgcaggaaatgaag

SEQ ID NO: 676773 - DNA, 120 bp, Artificial Sequence
  ENSG00000186265_1 (sequence is synthesized)
acattgcctgccatgcttggaactgggaaattattttgggtcttcttcttaatcccatatctggacatctggaacatccatgggaaagaatcatgtgatgtacagctttatataaagaga

SEQ ID NO: 676774 - DNA, 120 bp, Artificial Sequence
  ENSG00000186265_2 (sequence is synthesized)
caatctgaacactccatcttagcaggagatccctttgaactagaatgccctgtgaaatactgtgctaacaggcctcatgtgacttggtgcaagctcaatggaacaacatgtgtaaaactt

SEQ ID NO: 676775 - DNA, 120 bp, Artificial Sequence
  ENSG00000186265_3 (sequence is synthesized)
gaagatagacaaacaagttggaaggaagagaagaacatttcatttttcattctacattttgaaccagtgcttcctaatgacaatgggtcataccgctgttctgcaaattttcagtctaat

SEQ ID NO: 676776 - DNA, 120 bp, Artificial Sequence
  ENSG00000186265_4 (sequence is synthesized)
ctcattgaaagccactcaacaactctttatgtgacagatgtaaaaagtgcctcagaacgaccctccaaggacgaaatggcaagcagaccctggctcctgtatcgtttacttcctttgggg

SEQ ID NO: 676777 - DNA, 120 bp, Artificial Sequence
  ENSG00000186265_5 (sequence is synthesized)
ggattgcctctactcatcactacctgtttctgcctgttctgctgcctgagaaggcaccaaggaaagcaaaatgaactctctgacacagcaggaagggaaattaacctggttgatgctcac

SEQ ID NO: 676778 - DNA, 120 bp, Artificial Sequence
  ENSG00000186265_6 (sequence is synthesized)
cttaagagtgagcaaacagaagcaagcaccaggcaaaattcccaagtactgctatcagaaactggaatttatgataatgaccctgacctttgtttcaggatgcaggaagggtctgaagtt

SEQ ID NO: 676779 - DNA, 120 bp, Artificial Sequence
  ENSG00000186265_7 (sequence is synthesized)
tattctaatccatgcctggaagaaaacaaaccaggcattgtttatgcttccctgaaccattctgtcattggaccgaactcaagactggcaagaaatgtaaaagaagcaccaacagaatat

SEQ ID NO: 676780 - DNA, 120 bp, Artificial Sequence
  ENSG00000186265_8 (sequence is synthesized)
gcatccatatgtgtgaggagttaagtctgtttctgactccaacagggaccattgaatgatcagcatgttgacatcattgtctgggctcaacaggatgtcaaataatatttctcaatttga

SEQ ID NO: 676781 - DNA, 120 bp, Artificial Sequence
  ENSG00000186265_9 (sequence is synthesized)
gaatttttactttagaaatgttcatgttagtgcttgggtcttaagggtccataggataaatgattaaaatttctctcagaaacttatttgggagctttttatattatagccttgaataac

SEQ ID NO: 676782 - DNA, 120 bp, Artificial Sequence
  ENSG00000186265_10 (sequence is synthesized)
aaaatctctccaaaactggttgacatcatgagtagcagaatagtagaacgtttaaacttagctacattttacccaatatacaaactcgatcttgcctttgaagctattggaaagacttgt

SEQ ID NO: 676783 - DNA, 120 bp, Artificial Sequence
  ENSG00000186265_11 (sequence is synthesized)
agggaaaagaggtttgtgttacctgcatcagttcactacacactcttgaaaacaaaatgtcccaatttgactaaccaaccataaatacagtaatgattgtatatttcaagtcagtcttcc

SEQ ID NO: 676784 - DNA, 120 bp, Artificial Sequence
  ENSG00000186265_12 (sequence is synthesized)
aaaataagaaatttttgctgtgtcagtctaagaatggtgtttcttaaatgcaaaggagaaatcattttaggcttgatgtaagaaaatgaaaataataaatggtgcaataaaaatatagaa

SEQ ID NO: 676785 - DNA, 120 bp, Artificial Sequence
  ENSG00000186265_13 (sequence is synthesized)
aattggatatagggtagatgttccacatacctggcaaacaaatgcttatatctactctgttagattgataagcaaatataggtattaatggagcagtcaacgtatagcacatttatgagg

SEQ ID NO: 676786 - DNA, 120 bp, Artificial Sequence
  ENSG00000186265_14 (sequence is synthesized)
aaagtagagactcactgggtcacatagactaatggataggaatgtgacataatgctgctgaattaatatacttatgggcatctgaatagtttaaaagttagtcagaataggtatcactgg

SEQ ID NO: 676787 - DNA, 120 bp, Artificial Sequence
  ENSG00000186265_15 (sequence is synthesized)
gcaagtgaagatagcttaaactgcttcatgcttgacttgatagcaagttaaagtgcaattaatggaatggaggaaaacccagaatatttaattggtctgtaggggtcaatttgctttcat

SEQ ID NO: 676788 - DNA, 120 bp, Artificial Sequence
  ENSG00000186265_16 (sequence is synthesized)
tcaccacatctgcatcttgctgttcttcttactaaggaatcagggcaaatcatctgtagtgacatattttagtttgctaatcatttattttaaaatactgaggttgcagccacttaagag

SEQ ID NO: 676789 - DNA, 120 bp, Artificial Sequence
  ENSG00000186265_17 (sequence is synthesized)
tatagcaaaagatggattcagatttttggactttccaaagtacttgagttaaactatttcaaaaatagcctataattttattcaacagtttgaggctattcgaattctcaggtgctgcta

SEQ ID NO: 676790 - DNA, 120 bp, Artificial Sequence
  ENSG00000186265_18 (sequence is synthesized)
ctgaataatgtaatagtcttcatacaaagtggatagcaaaggttaaaatccatttcaacaaatatgtgagctgagctgctgcacaaaggaatgtgatgtgtgtgtgtgtgtgtgtgtgtg

SEQ ID NO: 676791 - DNA, 120 bp, Artificial Sequence
  ENSG00000186265_19 (sequence is synthesized)
tgtgtgttaggtggggtgggtgacaacagaaatggtgcacgagaaactgatcaaattgacattatattttcagtttgcttatgaagctcaaaatactagagtaaatgggtcattaaagaa

SEQ ID NO: 676792 - DNA, 120 bp, Artificial Sequence
  ENSG00000186265_20 (sequence is synthesized)
aataatatgtgaaattatggagtttagaatacaagtggggtatatatacaaaaagacaaaactgaggttttgtggtggagagattttcttaagtaacactggcattaagttttagctcct

SEQ ID NO: 676793 - DNA, 120 bp, Artificial Sequence
  ENSG00000186265_21 (sequence is synthesized)
tagatttgggggtgcaaatattcttttgagtcactgttattttgccaattacacctagaatttcaagcaaccaattcgagataggctgttttagccaggctgcatttgtggacaacttat

SEQ ID NO: 676794 - DNA, 120 bp, Artificial Sequence
  ENSG00000186265_22 (sequence is synthesized)
gtaagaaagacatgttagaatagctgcttgtggtattcttaaaaatagaaacaggaaatatggggaggatacatttagctgtcctcttatcagatgaacacacgaaattgaacagttcct

SEQ ID NO: 676795 - DNA, 120 bp, Artificial Sequence
  ENSG00000186265_23 (sequence is synthesized)
tccttcatgattctctcaaacttaaaagcaaaatatttctgtcttatttaaaatatccttagtatgtcttatagtaaagataatgctgataatgatttcatctctaagatgtattaatat

SEQ ID NO: 676796 - DNA, 120 bp, Artificial Sequence
  ENSG00000186265_24 (sequence is synthesized)
gtactgtttgccaaaatcacaaatcatttatgtttttattccttttcaaaatggtgtcagagacatacatgcattttcccaaatgactctacttcactattatttacatggcttatttca

SEQ ID NO: 676797 - DNA, 120 bp, Artificial Sequence
  ENSG00000186265_25 (sequence is synthesized)
ttagtttatagagggtttgagaaaaagaatatgtagataatttaatggtttttcacaaattttaagcttgtgattgtgctcaatgagaaggtaaagttattaaaacttatttgaaatcaa

SEQ ID NO: 676798 - DNA, 120 bp, Artificial Sequence
  ENSG00000186265_26 (sequence is synthesized)
agtgtagctatagaaactgagctagatagagcaacacttattctgtgtgacacaggaataacctttgactgggcaaaagtgcttctggtattttggagtgagaacttctggagttcagaa

SEQ ID NO: 676799 - DNA, 120 bp, Artificial Sequence
  ENSG00000186265_27 (sequence is synthesized)
ccttctctggattctgaagaattctctcttaccccaattcttcatctgcaactccatggctctttctatggcctctctgtatctttcatcatctttcttgagactgctggaacctctctc

SEQ ID NO: 676800 - DNA, 120 bp, Artificial Sequence
  ENSG00000186265_28 (sequence is synthesized)
agtgaactaggtagtaggagatcttggctacataggtgacaggacagcagcatttctggcattgagtatggaatgtccccagagcaaggacttccagtctcttccaagtgatatactaga

SEQ ID NO: 676801 - DNA, 120 bp, Artificial Sequence
  ENSG00000186265_29 (sequence is synthesized)
tccctccccttccttttagatatgccatggggctatgtggactgaaaagtgatgaaccagagagagagctggaaagcaaaatgaactctctgacacagcaggaagggaaattaacctggt

SEQ ID NO: 676802 - DNA, 120 bp, Artificial Sequence
  ENSG00000186272_0 (sequence is synthesized)
gtcaatatggctgcgttgggatctgttcaccttcaggctgagtcgagactgaggtgaaaaagcggaaaaacgcgagaaaaggtttccccgttgtacagaggctagagtgaggctcggttg

SEQ ID NO: 676803 - DNA, 120 bp, Artificial Sequence
  ENSG00000186272_1 (sequence is synthesized)
aatcggttgcaggcgttggtgcctctgtcagcgtccaggtcactgccgctcccgccccgctcttccctggctgtgctggcggaggctgcgccgatgaacctgactgaggattatatggtt

SEQ ID NO: 676804 - DNA, 120 bp, Artificial Sequence
  ENSG00000186272_2 (sequence is synthesized)
tttgaggacgtggccatacatttctcccaggaggagtggggaattcttaatgacgttcagagacacctgcacagcgatgtgatgctggagaactttgcacttttgtcctcagtaggttgt

SEQ ID NO: 676805 - DNA, 120 bp, Artificial Sequence
  ENSG00000186272_3 (sequence is synthesized)
tggcatggagccaaggatgaggaggcaccttccaagcaatgtgtttctgtaggagtgtcacaggtcacaactttaaagccagctttgtccacccagaaggcccagccctgtgagacatgt

SEQ ID NO: 676806 - DNA, 120 bp, Artificial Sequence
  ENSG00000186272_4 (sequence is synthesized)
agctcacttctgaaggacattctacacctggctgagcatgacggaacacaccccaagcgtacagccaagctttacctgcaccaaaaggagcatcttagagagaagctcaccagaagtgat

SEQ ID NO: 676807 - DNA, 120 bp, Artificial Sequence
  ENSG00000186272_5 (sequence is synthesized)
gaagggaggccttcgtttgtgaatgacagtgttcacctggcaaagaggaacctcacatgcatgcagggtggcaaggattttactggtgattcagatcttcaacaacaggctcttcacagt

SEQ ID NO: 676808 - DNA, 120 bp, Artificial Sequence
  ENSG00000186272_6 (sequence is synthesized)
gggtggaagccacacagggacactcatggtgtggaggcctttcaaagtggacagaataattacagctgcacccaatgtgggaaagacttttgccaccaacatacactgtttgagcaccag

SEQ ID NO: 676809 - DNA, 120 bp, Artificial Sequence
  ENSG00000186272_7 (sequence is synthesized)
aaaatccacacagaggaaaggccttatgagtgcagtgaatgtggcaaattgtttaggtacaactccgaccttattaaacatcagcgaaatcatactggagaaaggccttataagtgtagt

SEQ ID NO: 676810 - DNA, 120 bp, Artificial Sequence
  ENSG00000186272_8 (sequence is synthesized)
gaatgtggaaaagccttcagcctcaaatacaatgttgttcaacaccagaaaattcacactggagaaaggccttatgagtgcagtgaatgtgggaaagcttttcttagaaagtctcaccta

SEQ ID NO: 676811 - DNA, 120 bp, Artificial Sequence
  ENSG00000186272_9 (sequence is synthesized)
cttcagcaccagaggattcacaccaggccaaggccttatgtgtgtagtgaatgtgggaaggccttccttacacaggctcaccttgttggtcaccagaaaattcatactggagaacggcct

SEQ ID NO: 676812 - DNA, 120 bp, Artificial Sequence
  ENSG00000186272_10 (sequence is synthesized)
gatgcaatgaatgtgggaaatactttatgtacagttcagcactcattagacatcagaaagttcacactggagaaaggcctttttattgctgtgaatgtgggaaattctttatggacagct

SEQ ID NO: 676813 - DNA, 120 bp, Artificial Sequence
  ENSG00000186272_11 (sequence is synthesized)
gcacactcattattcaccagagagttcatactggagaaaaaccttatgaatgcaacgaatgtgggaaattctttagataccgttccacactcattagacatcagaaagttcacactggag

SEQ ID NO: 676814 - DNA, 120 bp, Artificial Sequence
  ENSG00000186272_12 (sequence is synthesized)
aaaagccttatgagtgtagtgaatgtgggaagttctttatggacacttccacactcattattcatcagagagttcatactggagaaaagccttatgaatgcaacaaatgtgggaaattct

SEQ ID NO: 676815 - DNA, 120 bp, Artificial Sequence
  ENSG00000186272_13 (sequence is synthesized)
ttaggtattgcttcacactgaatagacatcagagagttcactctggagagaggccttatgaatgcagtgaatgtggcaaattctttgtggacagctgtacactgaagagtcatcagagag

SEQ ID NO: 676816 - DNA, 120 bp, Artificial Sequence
  ENSG00000186272_14 (sequence is synthesized)
ttcacactggagaaagaccttttgaatgcagcatttgtgggaaatcctttagatgtcgctccacacttgatacacatcagagaattcacactggtgaaaggccttatgagtgtagtgaat

SEQ ID NO: 676817 - DNA, 120 bp, Artificial Sequence
  ENSG00000186272_15 (sequence is synthesized)
gtgggaaattctttaggcacaactcaaatcatattagacatcggagaaatcactttggagaaaggtcttttgagtgcactgagtgtgggagagtttttagccaaaattcccacctcattc

SEQ ID NO: 676818 - DNA, 120 bp, Artificial Sequence
  ENSG00000186272_16 (sequence is synthesized)
ggcaccaaaaagttcacactagggaaagaacttacaaatgcagcaaatgtgggaaattttttatggacagctccacactcattagtcatgagagagttcatactggagaaaagccttatg

SEQ ID NO: 676819 - DNA, 120 bp, Artificial Sequence
  ENSG00000186272_17 (sequence is synthesized)
agtgcagtgaatgtgggaaagtctttagatacaactccagcctcattaaacatcggagaattcacactggagagagaccttatcagtgcagtgaatgtggaagagtctttaaccaaaatt

SEQ ID NO: 676820 - DNA, 120 bp, Artificial Sequence
  ENSG00000186272_18 (sequence is synthesized)
ctcatctcattcagcaccagaaagttcacaccagataaagaatgtatatataaagcagatggggaaagacttcacacagaaatctactctgatttagcactgggacctacgttttaaaaa

SEQ ID NO: 676821 - DNA, 120 bp, Artificial Sequence
  ENSG00000186272_19 (sequence is synthesized)
aagtattcttgtagaatacagataacataaaatctaacatcttaaccatgttaaagtgtatagttcagtactgttaagtcattcacattgtgcaatgaatatctagaagtcttttcaact

SEQ ID NO: 676822 - DNA, 120 bp, Artificial Sequence
  ENSG00000186272_20 (sequence is synthesized)
tatgaaactaagtctataccttttaaaaccttattcctcactccatccagcctcttgacaagcaccgctctgtatgaattttactagtccgggtacctcatataagaaaacttaagtttt

SEQ ID NO: 676823 - DNA, 120 bp, Artificial Sequence
  ENSG00000186272_21 (sequence is synthesized)
attttgtggcttattttgcttaacgttatatttttaaggtttcatgttctaatccattagaatttccatcctttttaaaggctgaataaaattctgttagtcatgtgttgcttaacagtg

SEQ ID NO: 676824 - DNA, 120 bp, Artificial Sequence
  ENSG00000186272_22 (sequence is synthesized)
gccacctgttccttttactgttccctttgtagtgccctcaacatatgacctgtacttaaggtgttgtgaggtctggatgtatatatttcagcagtccctgaacaccagctctactgtcac

SEQ ID NO: 676825 - DNA, 120 bp, Artificial Sequence
  ENSG00000186272_23 (sequence is synthesized)
atcagatctctctgggtctggacacagtcttctacacattgttcaccagaagctatggcctgttgaaagccattcactgaggagtaacttggggactccacttctgtgctctgcactgta

SEQ ID NO: 676826 - DNA, 120 bp, Artificial Sequence
  ENSG00000186272_24 (sequence is synthesized)
ccactccctatgttgttccccatcatcaggactctttcgttatgggtttctgtcagtcccggttctgcccagtaggctttcctctcactggctttaatgtcccatgcctgtcaccaatcc

SEQ ID NO: 676827 - DNA, 120 bp, Artificial Sequence
  ENSG00000186272_25 (sequence is synthesized)
ccatataagccctattagttggcaatccttttaatctctattttacacataagggcaccgagacttaaggaagttcagtcctcatcaagacactgaaccctgaggacttactgtgtaccc

SEQ ID NO: 676828 - DNA, 120 bp, Artificial Sequence
  ENSG00000186272_26 (sequence is synthesized)
aggtggttgtacagtcagcctgtaggatgctgcaatgctgtcttaatcctcatggcctgcctcttcccacagggttcatagcagtggcagcaatgcttatggatgctggacaggattata

SEQ ID NO: 676829 - DNA, 120 bp, Artificial Sequence
  ENSG00000186272_27 (sequence is synthesized)
cctccgagtgccgaagccccgaggaggggccctgcaggtcaggcccctgtgtcccaaagagaggagcgttcttgtgtggggtaccggtgtccgcggtgctgtgaggcgggggagctcctg

SEQ ID NO: 676830 - DNA, 120 bp, Artificial Sequence
  ENSG00000186272_28 (sequence is synthesized)
tcagggacctgcacgtgcgaggcttagaggtgctgcagagcgggcggcactggggagcccgagcgtctttgtctccacggagctgaggggttcatagcagtggcagcaatgcttatggat

SEQ ID NO: 676831 - DNA, 120 bp, Artificial Sequence
  ENSG00000186280_0 (sequence is synthesized)
gcgggcgtttgaaatcagtgccttagagtagaccctaaacctcattttataccttcaagaaccaattacttaatgtctcttccgtcttttccgtccccgaccccctcccagactccttca

SEQ ID NO: 676832 - DNA, 120 bp, Artificial Sequence
  ENSG00000186280_1 (sequence is synthesized)
ttccggtactgcgtggacggaaagccccgggtagccgacaccacgtccccggctagcgggagagagcgtggaaaaggattacaccaaactgtttaaatccaacgactcctgcttccatcc

SEQ ID NO: 676833 - DNA, 120 bp, Artificial Sequence
  ENSG00000186280_2 (sequence is synthesized)
tttctcctgagctagaaccaacaaacctagagagttgggcttcggaaaaactagtgttttcatttaattggatatgaagaaagaacaaatatgtacggggcaaccacgatctttacaaag

SEQ ID NO: 676834 - DNA, 120 bp, Artificial Sequence
  ENSG00000186280_3 (sequence is synthesized)
aacataagttccaggaaagcaggaaccttgtctctcttgttcactgggtgtatcctctgcatatagaacagtgcctggcacataataggtgctgaattttgttctaaacactgaggacat

SEQ ID NO: 676835 - DNA, 120 bp, Artificial Sequence
  ENSG00000186280_4 (sequence is synthesized)
tctctgctacatttgggtcgtacccccaggtctgagtaattcaatagacttaagaagacagagcccagcagcaaccgaaacataacagagttgcaggatcagctaacgtcaatgcctggg

SEQ ID NO: 676836 - DNA, 120 bp, Artificial Sequence
  ENSG00000186280_5 (sequence is synthesized)
caaagctgctgcccagagtggaatctcactagtgaataaacaagcccaagaaagattatcatctcatttgcaaaaaaaaaagtacgctggtagatcctgctacctcatagataacaccag

SEQ ID NO: 676837 - DNA, 120 bp, Artificial Sequence
  ENSG00000186280_6 (sequence is synthesized)
tcaaatttttttttaaagtagcattttcctacattgtcaactatctagaacatacctaaaaactaagagtttactgcttattaaatggaaactatgaagtctaaggccaactgtgcccag

SEQ ID NO: 676838 - DNA, 120 bp, Artificial Sequence
  ENSG00000186280_7 (sequence is synthesized)
aatccaaattgtaacataatgatatttcatccaaccaaagaagagtttaatgattttgataaatatattgcttacatggaatcccaaggtgcacacagagctggcttggctaagataatt

SEQ ID NO: 676839 - DNA, 120 bp, Artificial Sequence
  ENSG00000186280_8 (sequence is synthesized)
ccacccaaagaatggaaagccagagagacctatgataatatcagtgaaatcttaatagccactcccctccagcaggtggcctctgggcgggcaggggtgtttactcaataccataaaaaa

SEQ ID NO: 676840 - DNA, 120 bp, Artificial Sequence
  ENSG00000186280_9 (sequence is synthesized)
aagaaagccatgactgtgggggagtatcgccatttggcaaacagtaaaaaatatcagactccaccacaccagaatttcgaagatttggagcgaaaatactggaagaaccgcatctataat

SEQ ID NO: 676841 - DNA, 120 bp, Artificial Sequence
  ENSG00000186280_10 (sequence is synthesized)
tcaccgatttatggtgctgacatcagtggctccttgtttgatgaaaacactaaacaatggaatcttgggcacctgggaacaattcaggacctgctggaaaaggaatgtggggttgtcata

SEQ ID NO: 676842 - DNA, 120 bp, Artificial Sequence
  ENSG00000186280_11 (sequence is synthesized)
gaaggcgtcaatacaccctacttgtactttggcatgtggaaaaccacgtttgcttggcatacagaggacatggacctttacagcatcaactacctgcaccttggggagcccaaaacttgg

SEQ ID NO: 676843 - DNA, 120 bp, Artificial Sequence
  ENSG00000186280_12 (sequence is synthesized)
gggttgtggggccttcctgcggcacaaggtggccctcatctcgcctacagttctcaaggaaaatgggattcccttcaatcgcataactcaggaggctggagagttcatggtgacctttcc

SEQ ID NO: 676844 - DNA, 120 bp, Artificial Sequence
  ENSG00000186280_13 (sequence is synthesized)
ctatggctaccatgctggcttcaaccatggtttcaactgcgcagaggccatcaattttgccactccgcgatggattgattatggcaaaatggcctcccagtgtagctgtggggaggcaag

SEQ ID NO: 676845 - DNA, 120 bp, Artificial Sequence
  ENSG00000186280_14 (sequence is synthesized)
ggtgaccttttccatggatgccttcgtgcgcatcctgcaacctgaacgctatgacctgtggaaacgtgggcaagaccgggcagttgtggaccacatggagcccagggtaccagccagcca

SEQ ID NO: 676846 - DNA, 120 bp, Artificial Sequence
  ENSG00000186280_15 (sequence is synthesized)
agagctgagcacccagaaggaagtccagttacccaggagagcagcgctgggcctgagacaactcccttcccactgggcccggcattccccttggcctatggctgcccgcagtgggacacg

SEQ ID NO: 676847 - DNA, 120 bp, Artificial Sequence
  ENSG00000186280_16 (sequence is synthesized)
gtgccacacccttgtgtgctcttcactcccacgccgatctgcagttagtggcactgctacgcagccccgggctgctgctgtccacagctctaagaagcccagctcaactccatcatccac

SEQ ID NO: 676848 - DNA, 120 bp, Artificial Sequence
  ENSG00000186280_17 (sequence is synthesized)
ccctggtccatctgcacagattatccacccgtcaaatggcagacgtggtcgtggtcgccctcctcagaaactgagagctcaggagctgaccctccagactccagccaagaggcccctctt

SEQ ID NO: 676849 - DNA, 120 bp, Artificial Sequence
  ENSG00000186280_18 (sequence is synthesized)
ggcgggcacaacatgcacagcttcgggcccagaacctgagcccctacctgaggatggggctttgatggacaagcctgtaccactgagcccagggctccagcatcctgtcaaggcttctgg

SEQ ID NO: 676850 - DNA, 120 bp, Artificial Sequence
  ENSG00000186280_19 (sequence is synthesized)
gtgcagctgggcccctgtgccctaagtccacgggctgtctttatatcccactgccctgctgtgtgacagtttgatgaaactggttacatttacatcccaaaactttggttgagtttgcag

SEQ ID NO: 676851 - DNA, 120 bp, Artificial Sequence
  ENSG00000186280_20 (sequence is synthesized)
gactctaggcatgcatgaaagagcccccctggtgatgcccttggatgctgccaagtccatggtagttttcaattttgccatacttttgttcttcctaccggaccctggaatgtctttgga

SEQ ID NO: 676852 - DNA, 120 bp, Artificial Sequence
  ENSG00000186280_21 (sequence is synthesized)
tattgctaaaatctatttctgcagctgaggttttatccactggacacatttgtgtgtgagaactaggtcttgttgaggttagcgtaacctggtatatgcaactaccatcctctgggccaa

SEQ ID NO: 676853 - DNA, 120 bp, Artificial Sequence
  ENSG00000186280_22 (sequence is synthesized)
ctgtggaagctgctgcacttgtgaagaatcctgagctttgattcctcttcagtctacgcatttctctcttcccctccctcaccccctttttcttataaaactaggttctttatacagata

SEQ ID NO: 676854 - DNA, 120 bp, Artificial Sequence
  ENSG00000186280_23 (sequence is synthesized)
aggtcagtagagttccagaataaaagatatgacttttctgagttatttatgtacttaaaatatgttgtcacagtatttgttcccaaatatattaaaggtaaccaaaatgttaaaatctga

SEQ ID NO: 676855 - DNA, 120 bp, Artificial Sequence
  ENSG00000186281_0 (sequence is synthesized)
agtccacgccttgtggcggctttgcggagctgctgctttggcgggagttggaagctggtgtgaggtgagaggcgcggtggtcgctccccggcgaggccaggtttctgtggggagaaggag

SEQ ID NO: 676856 - DNA, 120 bp, Artificial Sequence
  ENSG00000186281_1 (sequence is synthesized)
agtgccagaggtgactggttcatggttcttctaggctctcatggccaccatgttggaaggcagatgccaaactcagccaaggagcagccccagtggccgagaggctagcctgtggtcgtc

SEQ ID NO: 676857 - DNA, 120 bp, Artificial Sequence
  ENSG00000186281_2 (sequence is synthesized)
aggctttgggatgaagctggaggctgtcactccattcctggggaagtatcgcccctttgtgggtcgctgttgccagacctgcacccccaagagctgggagtccctcttccacagaagcat

SEQ ID NO: 676858 - DNA, 120 bp, Artificial Sequence
  ENSG00000186281_3 (sequence is synthesized)
aacggacctaggcttctgcaatgtgatcctggtgaaggaggagaacacaaggtttcggggctggctggttcggaggctctgctatttcctgtggtccctggagcagcacatccccccctg

SEQ ID NO: 676859 - DNA, 120 bp, Artificial Sequence
  ENSG00000186281_4 (sequence is synthesized)
ccaggatgtcccacagaagatcatggaaagcaccggggtgcagaacctcctctcagggagggtcccaggaggcactggggaaggccaggtgcctgaccttgtgaagaaggaggtacagcg

SEQ ID NO: 676860 - DNA, 120 bp, Artificial Sequence
  ENSG00000186281_5 (sequence is synthesized)
catcctgggtcacatccaggccccaccccgtcccttcctggtcaggctgttcagctgggcgctgctgaggttcctgaactgcctgttcctgaatgtgcagctccacaagggtcagatgaa

SEQ ID NO: 676861 - DNA, 120 bp, Artificial Sequence
  ENSG00000186281_6 (sequence is synthesized)
gatggtccagaaggccgcccaggcaggcttgccgcttgtcctcctctctactcacaaaaccctcctggatgggatcctgctgccctttatgctgctctcccagggcctgggtgtgcttcg

SEQ ID NO: 676862 - DNA, 120 bp, Artificial Sequence
  ENSG00000186281_7 (sequence is synthesized)
tgtggcctgggactcccgcgcctgctcccctgccctcagagctctgctgaggaagcttggggggcttttcctgcccccagaggccagcctctccctggacagctctgaggggctccttgc

SEQ ID NO: 676863 - DNA, 120 bp, Artificial Sequence
  ENSG00000186281_8 (sequence is synthesized)
cagggctgtggtccaggcggtcatagagcagctgctggttagtgggcagcccctgctcatcttcctggaggaacctcctggggctctggggccacggctgtcagccctgggccaggcttg

SEQ ID NO: 676864 - DNA, 120 bp, Artificial Sequence
  ENSG00000186281_9 (sequence is synthesized)
ggtggggtttgtggtgcaggcagtccaggtgggcatcgtcccagatgctctgctggtaccagtggccgtcacctatgacctggttccggatgcaccgtgtgacatagaccatgcctcggc

SEQ ID NO: 676865 - DNA, 120 bp, Artificial Sequence
  ENSG00000186281_10 (sequence is synthesized)
ccccctggggctgtggacaggagctctggctgtcctacgtagcttgtggagccgctggggctgcagccaccggatctgctcccgggtgcacctagctcagcccttttccctgcaggaata

SEQ ID NO: 676866 - DNA, 120 bp, Artificial Sequence
  ENSG00000186281_11 (sequence is synthesized)
atcgtcagtgccagaagctgctggggcggcagacagaccctggagcagctactgcagcccatcgtgctgggccaatgtactgctgtcccagacactgagaaggagcaggagtggaccccc

SEQ ID NO: 676867 - DNA, 120 bp, Artificial Sequence
  ENSG00000186281_12 (sequence is synthesized)
ataactgggcctctcctggccctcaaggaagaggaccagctcctggtcaggagactgagctgtcatgtcctgagtgccagtgtagggagctctgcggtgatgagcacggccattatggca

SEQ ID NO: 676868 - DNA, 120 bp, Artificial Sequence
  ENSG00000186281_13 (sequence is synthesized)
acgctgctgctcttcaagcatcagaagctcctgggggagttctcctggctgacggaggagatactgttgcgtggctttgatgtaggcttctctgggcagctgcggagcctgctgcagcac

SEQ ID NO: 676869 - DNA, 120 bp, Artificial Sequence
  ENSG00000186281_14 (sequence is synthesized)
tcactgagcctgctgcgggcgcacgtggccctgctgcgcatccgtcagggtgacttgctggtggtgccgcagcctggcccaggcctcacacacctggcacaactgagtgctgagctgctg

SEQ ID NO: 676870 - DNA, 120 bp, Artificial Sequence
  ENSG00000186281_15 (sequence is synthesized)
cccgtcttcctgagcgaggctgtgggcgcctgtgcagtgcgggggctgctggcaggcagagtgccgccccaggggccctgggagctgcagggcatattgctgctgagccagaatgagctg

SEQ ID NO: 676871 - DNA, 120 bp, Artificial Sequence
  ENSG00000186281_16 (sequence is synthesized)
taccgccagatcctgctgctgatgcacctgctgccgcaagacctgctgctgctaaagccctgccagtcttcctactgctactgtcaggaggtgctggaccggctcatccaatgcgggctc

SEQ ID NO: 676872 - DNA, 120 bp, Artificial Sequence
  ENSG00000186281_17 (sequence is synthesized)
ctggttgctgaggagaccccaggctcccggccagcctgtgacacagggcgacagcgattgagcagaaagctgctgtggaaaccgagtggggactttactgatagtgacagtgatgacttc

SEQ ID NO: 676873 - DNA, 120 bp, Artificial Sequence
  ENSG00000186281_18 (sequence is synthesized)
ggagaggctgacggccggtacttcaggctcagccagcagtcacactgcccagatttctttcttttcctctgccgcctgctcagcccgctgctcaaggcctttgcacaggctgccgccttc

SEQ ID NO: 676874 - DNA, 120 bp, Artificial Sequence
  ENSG00000186281_19 (sequence is synthesized)
ctccgccagggccagctgcccgatactgagttgggctacacagagcagctgttccagttcctgcaggccaccgcccaggaagaagggatcttcgagtgtgcggacccaaagctcgccatc

SEQ ID NO: 676875 - DNA, 120 bp, Artificial Sequence
  ENSG00000186281_20 (sequence is synthesized)
agtgctgtctggaccttcagagacctaggggttctgcagcagacgccgagccctgcaggccccaggctccacctgtcccctacttttgccagcctggacaatcaggaaaaactagaacag

SEQ ID NO: 676876 - DNA, 120 bp, Artificial Sequence
  ENSG00000186281_21 (sequence is synthesized)
ttcatccggcagttcatttgtagctagaactgtgaggaggagcctgtgctgagacttctcagccccagaacacagctgtgtcctagagccagaagatggagaggaggctgcaaaccctta

SEQ ID NO: 676877 - DNA, 120 bp, Artificial Sequence
  ENSG00000186281_22 (sequence is synthesized)
gctgctctataaatataatcattgaggcttgattgtcccttgccatctcttgctttttcccttctttgatgtgataaacaaggggacgagacgagttgtcttttccccagcccagcagca

SEQ ID NO: 676878 - DNA, 120 bp, Artificial Sequence
  ENSG00000186281_23 (sequence is synthesized)
gtttttcagcgtcagagtctcaggatctcgatgtggacaggcaccctgatacaaaagaacgctcagaattttgctagagccgaaccccagcttggaggagcgtaagccctgggataactt

SEQ ID NO: 676879 - DNA, 120 bp, Artificial Sequence
  ENSG00000186281_24 (sequence is synthesized)
ctttaatcagaatctggcctgagtccctgctcgaagctcaagcacccggggcctcgcggccgcctgcagtactcccctcccaccgcgggccagggccgactggaaaacggagcaggccat

SEQ ID NO: 676880 - DNA, 120 bp, Artificial Sequence
  ENSG00000186281_25 (sequence is synthesized)
ccccagagcacgggtcccgtggccacgttgagtgtcgcagagtacgggacgcagggcggggcttctggaccagcgcgcatcccaattggctctcggggctgccttttagccggacgcgcg

SEQ ID NO: 676881 - DNA, 120 bp, Artificial Sequence
  ENSG00000186281_26 (sequence is synthesized)
gaggtgggcaatccgctccttcccttgagcagtccacgccttgtggcggctttgcggagctgctgctttggcgggagttggaagctggtgtgaggctctcatggccaccatgttggaagg

SEQ ID NO: 676882 - DNA, 120 bp, Artificial Sequence
  ENSG00000186281_27 (sequence is synthesized)
ctagtggaggtgggccctctctgaaggatcttccctcctgctctgggagctgtgcccaggtttcggggctggctggttcggaggctctgctatttcctgtggtccctggagcagcacatc

SEQ ID NO: 676883 - DNA, 120 bp, Artificial Sequence
  ENSG00000186281_28 (sequence is synthesized)
aatcaatgctagggagcagatctccagggaggaagacagagtgggcctggaatattcttcagcatcactgcttccattcccagccacgcctggcaagagggaggaaacatcctgtcacag

SEQ ID NO: 676884 - DNA, 120 bp, Artificial Sequence
  ENSG00000186281_29 (sequence is synthesized)
aacctatgttttctgggtggacgaaaccaggtgtcctggaggaagcagcgtcagagtctcaggatctcgatgtggacaggcaccctgatacaaaagaacggtaagatggggtacaaaatg

SEQ ID NO: 676885 - DNA, 120 bp, Artificial Sequence
  ENSG00000186281_30 (sequence is synthesized)
gtaaggcccgccctccattgggttggggatggtgggagcagaagagcagaggctgggccaagcccttaagtcaggagcagtccccatctggtcctgcttcctggcctctctgttcccagc

SEQ ID NO: 676886 - DNA, 120 bp, Artificial Sequence
  ENSG00000186281_31 (sequence is synthesized)
catacagcagtccagtccccatcagctggtgggaaaaatcccctgctctttgccgaccttcccttatgtctcacggccctgctcccatggggcttcctctaacgtctttccatcatggtc

SEQ ID NO: 676887 - DNA, 120 bp, Artificial Sequence
  ENSG00000186281_32 (sequence is synthesized)
ttaacaaccatgacgtcagtgcgtcggtgcagttaccttaagagttgtctaaaggctcctttgcttttgggaaatgtgctcagaggaagaactctgcagctgaactgtccctccctctgg

SEQ ID NO: 676888 - DNA, 120 bp, Artificial Sequence
  ENSG00000186281_33 (sequence is synthesized)
gatctgggcctttgcgggtgggtcactgaaccgtcccctctcggggtcagccagtcaccagggttctccattccaagtgtctgcacctgaggtgctctgtgataccttggggacatctga

SEQ ID NO: 676889 - DNA, 120 bp, Artificial Sequence
  ENSG00000186281_34 (sequence is synthesized)
agaagaatggaacccttctcctacaggaggagcaggcagccagggccatcataagggagcagctaagtgcatgcacaaagatggtggcctgaggccaggaggctgcagctgcttccccaa

SEQ ID NO: 676890 - DNA, 120 bp, Artificial Sequence
  ENSG00000186281_35 (sequence is synthesized)
ggccacacccagccctgccttctgagcggagtctccttagctttgggtggagatggtgttaactgaatggaatgatacgtgtaaggggcttagcacagcgcctccacagagggcccttat

SEQ ID NO: 676891 - DNA, 120 bp, Artificial Sequence
  ENSG00000186281_36 (sequence is synthesized)
agggagatccatctgtatcttcttcagtgcccctctagtagaggctgtgggttgatgtgtgggccctacgatgagatccaggggaaggcccccagctcctggcctgctctcagcctgtgt

SEQ ID NO: 676892 - DNA, 120 bp, Artificial Sequence
  ENSG00000186281_37 (sequence is synthesized)
gatgataaacaccactgctccgggtgtacgttcctcatccctggggtggagttgggatgtgtggctaggaagacttgctagatcatggagggaccaggctgctgggcctcaacctgacca

SEQ ID NO: 676893 - DNA, 120 bp, Artificial Sequence
  ENSG00000186281_38 (sequence is synthesized)
gagaatgtgagaccttccagccccttgggcccctaggtggacaccagctcccgataggaggcacaatattgtgtcctgtggctgagccccacttagggctgtggggggcacaaaggaatc

SEQ ID NO: 676894 - DNA, 120 bp, Artificial Sequence
  ENSG00000186281_39 (sequence is synthesized)
gtccttacaatcatctggcagcacctgtcaaggccattaccatcatctcatttcatcctctgaagaccttgatagggagggatttttcctgtgtcatggataaggaaagaggagcttggg

SEQ ID NO: 676895 - DNA, 120 bp, Artificial Sequence
  ENSG00000186281_40 (sequence is synthesized)
acaaggtcacgcaccagtttgggcctgagataaaactgagcagggtgggaccagaggatacctctggagaccaggatgggtgggcagccctgatgtccgcccgagagcagtgtcctcggc

SEQ ID NO: 676896 - DNA, 120 bp, Artificial Sequence
  ENSG00000186281_41 (sequence is synthesized)
cccgtgtgtgctgtgggggtgggcagcccctggccttgcagcggggaagcctagctcgcacctctgctccctgtgccttgggatatagccacctatgccccggttctgtgtgtctctctg

SEQ ID NO: 676897 - DNA, 120 bp, Artificial Sequence
  ENSG00000186281_42 (sequence is synthesized)
gatagcactggacatgtgtgcctctgaggttctctgcacacctcctgctccccacatttcttggccacagggctactgcccttgagggtgggaattcacttcctctcactctgcaagttg

SEQ ID NO: 676898 - DNA, 120 bp, Artificial Sequence
  ENSG00000186281_43 (sequence is synthesized)
gcccagcaggtgctggggcatggctctggccatcctcttgggtctctaggtctgcttttactggtttcacctgcatgtacctggtctgggggtgtagggttgatccctggccagcttgtc

SEQ ID NO: 676899 - DNA, 120 bp, Artificial Sequence
  ENSG00000186281_44 (sequence is synthesized)
gcagtccacgccttgtggcggctttgcggagctgctgctttggcgggagttggaagctggtgtgaggtgagaggcgcggtggtcgctccccggcgaggccaggctctcatggccaccatg

SEQ ID NO: 676900 - DNA, 120 bp, Artificial Sequence
  ENSG00000186283_0 (sequence is synthesized)
gggcttaagggagcctggctaggccggcagccggatggtcccgcagctcggggccggccatgcttcgcggtccgtggcgccagctttggctctttttcctgctgctgctcccgggcgcgc

SEQ ID NO: 676901 - DNA, 120 bp, Artificial Sequence
  ENSG00000186283_1 (sequence is synthesized)
ctgagccccgcggcgcctccaggccgtgggagggaaccgacgagccgggctcggcctgggcctggccgggcttccagcgcctgcaggagcagctcagggcggcgggtgccctctccaagc

SEQ ID NO: 676902 - DNA, 120 bp, Artificial Sequence
  ENSG00000186283_2 (sequence is synthesized)
ggtactggacgctcttcagctgccaggtgtggcccgacgactgtgacgaggacgaggaggcagccacggggcccctgggctggcgccttcctctgttgggccagcggtacctggacctcc

SEQ ID NO: 676903 - DNA, 120 bp, Artificial Sequence
  ENSG00000186283_3 (sequence is synthesized)
tgaccacgtggtactgcagcttcaaagactgctgccctagaggggattgcagaatctccaacaactttacaggcttagagtgggacctgaatgtgcggctgcatggccagcatttggtcc

SEQ ID NO: 676904 - DNA, 120 bp, Artificial Sequence
  ENSG00000186283_4 (sequence is synthesized)
agcagctggtcctaagaacagtgaggggctacttagagacgccccagccagaaaaggcccttgctctgtcgttccacggctggtctggcacaggcaagaacttcgtggcacggatgctgg

SEQ ID NO: 676905 - DNA, 120 bp, Artificial Sequence
  ENSG00000186283_5 (sequence is synthesized)
tggagaacctgtatcgggacgggctgatgagtgactgtgtcaggatgttcatcgccacgttccactttcctcaccccaaatatgtggacctgtacaaggagcagctgatgagccagatcc

SEQ ID NO: 676906 - DNA, 120 bp, Artificial Sequence
  ENSG00000186283_6 (sequence is synthesized)
gggagacgcagcagctctgccaccagaccctgttcatcttcgatgaagcggagaagctgcacccagggctgctggaggtccttgggccacacttagaacgccgggcccctgagggccaca

SEQ ID NO: 676907 - DNA, 120 bp, Artificial Sequence
  ENSG00000186283_7 (sequence is synthesized)
gggctgagtctccatggactatctttctgtttctcagtaatctcaggggcgatataatcaatgaggtggtcctaaagttgctcaaggctggatggtcccgggaagaaattacgatggaac

SEQ ID NO: 676908 - DNA, 120 bp, Artificial Sequence
  ENSG00000186283_8 (sequence is synthesized)
tggagtaccgtcacgtgaggctgtgtgcacgggatgccttcctgagccaggagctcctgtataaagaagagacactggatgaaatagcccagatgatggtgtatgtccccaaggaggaac

SEQ ID NO: 676909 - DNA, 120 bp, Artificial Sequence
  ENSG00000186283_9 (sequence is synthesized)
aactcttttcttcccagggctgcaagtctatttcccagaggattaactacttcctgtcatgaaggctagaggaagacttcctggaactgcctttcttccactaacaggaccctgggacct

SEQ ID NO: 676910 - DNA, 120 bp, Artificial Sequence
  ENSG00000186283_10 (sequence is synthesized)
gtaggagcaccccgtttgggactgtgaggtgtttgagggtgtggactggcatccagcagccactaacaaacacacaactggtgtgtaaaaggcaggccttacattagaagccaagccaat

SEQ ID NO: 676911 - DNA, 120 bp, Artificial Sequence
  ENSG00000186283_11 (sequence is synthesized)
cctttttcttttttttggaggtcccaccgagatagataggaacttggattgctgaattcaaaaacagagcccattcttaagatcacttggtgccttaaagacacgcattccaaagtggaa

SEQ ID NO: 676912 - DNA, 120 bp, Artificial Sequence
  ENSG00000186283_12 (sequence is synthesized)
tgtggttgaagaaagtgggccaggtggttgaagaaagccatgtgggagctcagcaaatcccaagggcttattatgacactccagatggtctccttagcatctcagctcttctgcaaggaa

SEQ ID NO: 676913 - DNA, 120 bp, Artificial Sequence
  ENSG00000186283_13 (sequence is synthesized)
gagcttgggtgttaggcctcagaggctgtagggtccttgggttacagagccggggagaacgaagttctgtgacccaggggtggagaatacactctaggtttgcaggctggtgggctttca

SEQ ID NO: 676914 - DNA, 120 bp, Artificial Sequence
  ENSG00000186283_14 (sequence is synthesized)
aattggtacttccagaggaaagccaagctgcttctgttgtgagcgaatcagccaagagcctgaggctgaagggaaaagtacacagaggaagatattttacaaaccaggtcagtgtaggcc

SEQ ID NO: 676915 - DNA, 120 bp, Artificial Sequence
  ENSG00000186283_15 (sequence is synthesized)
aagacttatggtctacagattttggcgggggaggggggaccttttcaaagacaatagggggtcttgacatgtttgttgtatgtaaagatgataagattaaaatttttgattttcctaaaa

SEQ ID NO: 676916 - DNA, 120 bp, Artificial Sequence
  ENSG00000186283_16 (sequence is synthesized)
actagctggcagtggaggcttccacacgcccccaggttcagaacctttcctcaagaaaaaacagcacaaactctggtacagaaagcagcagccagctgtggtagctcacgcctgtaatcc

SEQ ID NO: 676917 - DNA, 120 bp, Artificial Sequence
  ENSG00000186283_17 (sequence is synthesized)
ctaggaactgactcagcagaagagaacagcttcgattccccatgcttttactcaccaaattatccttaaaaactctgatccccaagttttctgagactgatttgagtaataataaaactc

SEQ ID NO: 676918 - DNA, 120 bp, Artificial Sequence
  ENSG00000186283_18 (sequence is synthesized)
ctgcttttggacgcagggcttgaggaccgacagtgggccgagtcggggctgggagttagaatctgagttctgggtgtccctctgtccctgacaagttgtgtggcaaggttgccgcatcac

SEQ ID NO: 676919 - DNA, 120 bp, Artificial Sequence
  ENSG00000186283_19 (sequence is synthesized)
ccctaggatggggtgagggagtatcactctgtggggtttcacagcaccctggatcctgccttccagcccctgccaagtaatctcaggggcgatataatcaatgaggtggtcctaaagttg

SEQ ID NO: 676920 - DNA, 87 bp, Artificial Sequence
  ENSG00000186283_20 (sequence is synthesized)
tagtccttgaatcccttctgctacaaagtctgccctctggcttcttattctaaggccaaacaggaggagtaactgattccacccgag

SEQ ID NO: 676921 - DNA, 120 bp, Artificial Sequence
  ENSG00000186283_21 (sequence is synthesized)
ttctaaggccaaacaggaggagtaactgattccacccgagagagattcagagttgcttggtttcttggctgttggctgttgtggtggatgggcctgtgtgtgccttttgctgtgactacc

SEQ ID NO: 676922 - DNA, 120 bp, Artificial Sequence
  ENSG00000186283_22 (sequence is synthesized)
gaggggattgcagaatctccaacaactttacaggcaagaacttcgtggcacggatgctggtggagaacctgtatcgggacgggctgatgagtgactgtgtcaggatgttcatcgccacgt

SEQ ID NO: 676923 - DNA, 120 bp, Artificial Sequence
  ENSG00000186288_0 (sequence is synthesized)
gcggatgcggatgcggatgcgaaggtggcggccgaggtggcggccgaggtggcggctgcggcggccgccgcggatgcagatgcggatgagaccctcggtgactgtgaggggaacccagat

SEQ ID NO: 676924 - DNA, 120 bp, Artificial Sequence; identical to SEQ ID NO: 661315
  ENSG00000186288_1 (sequence is synthesized)

SEQ ID NO: 676925 - DNA, 120 bp, Artificial Sequence; identical to SEQ ID NO: 661316
  ENSG00000186288_2 (sequence is synthesized)

SEQ ID NO: 676926 - DNA, 120 bp, Artificial Sequence; identical to SEQ ID NO: 661317
  ENSG00000186288_3 (sequence is synthesized)

SEQ ID NO: 676927 - DNA, 120 bp, Artificial Sequence; identical to SEQ ID NO: 661318
  ENSG00000186288_4 (sequence is synthesized)

SEQ ID NO: 676928 - DNA, 120 bp, Artificial Sequence; identical to SEQ ID NO: 661319
  ENSG00000186288_5 (sequence is synthesized)

SEQ ID NO: 676929 - DNA, 120 bp, Artificial Sequence; identical to SEQ ID NO: 661320
  ENSG00000186288_6 (sequence is synthesized)

SEQ ID NO: 676930 - DNA, 120 bp, Artificial Sequence; identical to SEQ ID NO: 661321
  ENSG00000186288_7 (sequence is synthesized)

SEQ ID NO: 676931 - DNA, 120 bp, Artificial Sequence
  ENSG00000186288_8 (sequence is synthesized)
tgtgaataatcttactaatctgtgccatttgtaggttaaaggctgcctcttctccctgtggtttgatttaaaaagcattttcattctctctttgtttactgcacaggtggtacaatttca

SEQ ID NO: 676932 - DNA, 120 bp, Artificial Sequence
  ENSG00000186288_9 (sequence is synthesized)
cccagagagaaccacttttacctttttggtgtgctgcttttccaggctctcttctctccctctctctcctttgctcacccccaccccgccttcccttttaacacaccgttatagaatggt

SEQ ID NO: 676933 - DNA, 120 bp, Artificial Sequence
  ENSG00000186288_10 (sequence is synthesized)
tcatgtatgtggtgtttcttaacctgctttttcagcaactaaaaccaaacaaaaatcaacccattgaacttctttccatgttatcaacaggcttatgaaacgtcatcttcagtgcctgca

SEQ ID NO: 676934 - DNA, 120 bp, Artificial Sequence
  ENSG00000186288_11 (sequence is synthesized)
gagtgctccagtgtatccgtggaccttaacatttctgtaatcattcccgcattgttggacattcaggtggtgcctagttctttccctgtgtttaagaccaacattgcgtgctctgtgctt

SEQ ID NO: 676935 - DNA, 120 bp, Artificial Sequence
  ENSG00000186288_12 (sequence is synthesized)
tgatgagtgaatccttccttgtcaagccaaatctttgctagcatcccggtggtctccttaactgcggacttgcaagatccacatatagacattttaaagacttttcctgtgtgttgccaa

SEQ ID NO: 676936 - DNA, 120 bp, Artificial Sequence
  ENSG00000186288_13 (sequence is synthesized)
aaggcccccttcataagcattgtaccgatttgcactcgtgccggccagcgcagctagtaaagagtatgcccgtttcccctgcatagtctcctggtcactgtaattgatcgtgtgtgtgcg

SEQ ID NO: 676937 - DNA, 120 bp, Artificial Sequence
  ENSG00000186288_14 (sequence is synthesized)
tgtgtgtgtgtgtgtgtgtgtcttggccagcttggcgggctacaaagggtgtttcgctgtcctcggtagttttgctggaaacaaacactgcttatgaccccattcccctgtgccctcttc

SEQ ID NO: 676938 - DNA, 120 bp, Artificial Sequence
  ENSG00000186288_15 (sequence is synthesized)
tgtgccctcttcctgtccttttccctgttgtcagaaaagtaattcagcgtcattgcaagaaaaaaaaatcacaaagcagacaagttaccagaagaaaattaaagtcaccagtaatcattt

SEQ ID NO: 676939 - DNA, 120 bp, Artificial Sequence
  ENSG00000186288_16 (sequence is synthesized)
ctgatgattacacacacattccagaaacattttcatgcacacctctctgatattttctagaactacctgaaacatttttgtctgtaggtctagtttttttcttatgcatatatcatatat

SEQ ID NO: 676940 - DNA, 120 bp, Artificial Sequence
  ENSG00000186288_17 (sequence is synthesized)
gtatattatgatgtacagactgtttttatatctgcttttcacacatacatgtgtgtgtatatttatacacacacatattcttgaacttcatttcatgtcattaaagatacttttaaaata

SEQ ID NO: 676941 - DNA, 120 bp, Artificial Sequence
  ENSG00000186297_0 (sequence is synthesized)
gcagagggccgatcctccagcccagagacgacatgtggcgctcgggcgagtgccttgcagagagaggagtagcttgctggctttgaacgcgtggcgtggcagatatttcagaaagcttca

SEQ ID NO: 676942 - DNA, 120 bp, Artificial Sequence
  ENSG00000186297_1 (sequence is synthesized)
agaacaagctggagaagggaagagttattcctccatattcacctgcttcaactactattcttattgggaatggacaatggaatgttctctggttttatcatgatcaaaaacctccttctc

SEQ ID NO: 676943 - DNA, 120 bp, Artificial Sequence
  ENSG00000186297_2 (sequence is synthesized)
ttttgtatttccatgaacttatccagtcactttggcttttcacagatgccaaccagttcagtgaaagatgagaccaatgacaacatcacgatatttaccaggatcttggatgggctcttg

SEQ ID NO: 676944 - DNA, 120 bp, Artificial Sequence
  ENSG00000186297_3 (sequence is synthesized)
gatggctacgacaacagacttcggcccgggctgggagagcgcatcactcaggtgaggaccgacatctacgtcaccagcttcggcccggtgtccgacacggaaatggagtacaccatagac

SEQ ID NO: 676945 - DNA, 120 bp, Artificial Sequence
  ENSG00000186297_4 (sequence is synthesized)
gtgtttttccgacaaagctggaaagatgaaaggcttcggtttaaggggcccatgcagcgcctccctctcaacaacctccttgccagcaagatctggaccccagacacgttcttccacaac

SEQ ID NO: 676946 - DNA, 120 bp, Artificial Sequence
  ENSG00000186297_5 (sequence is synthesized)
gggaagaagtccatcgctcacaacatgaccacgcccaacaagctgctgcggctggaggacgacggcaccctgctctacaccatgcgcttgaccatctctgcagagtgccccatgcagctt

SEQ ID NO: 676947 - DNA, 120 bp, Artificial Sequence
  ENSG00000186297_6 (sequence is synthesized)
gaggacttcccgatggatgcgcacgcttgccctctgaaatttggcagctatgcgtaccctaattctgaagtcgtttacgtctggaccaacggctccaccaagtcggtggtggtggcggaa

SEQ ID NO: 676948 - DNA, 120 bp, Artificial Sequence
  ENSG00000186297_7 (sequence is synthesized)
gatggctccagactgaaccagtaccacctgatggggcagacggtgggcactgagaacatcagcaccagcacaggcgaatacacaatcatgacagctcacttccacctgaaaaggaagatt

SEQ ID NO: 676949 - DNA, 120 bp, Artificial Sequence
  ENSG00000186297_8 (sequence is synthesized)
ggctactttgtcatccagacctaccttccctgcataatgaccgtgatcttatcacaggtgtccttttggctgaaccgggaatcagtcccagccaggacagtttttggggtcaccacggtg

SEQ ID NO: 676950 - DNA, 120 bp, Artificial Sequence
  ENSG00000186297_9 (sequence is synthesized)
ctgaccatgacgaccctcagcatcagcgccaggaactctctgcccaaagtggcctacgccaccgccatggactggttcatagccgtgtgctatgccttcgtcttctcggcgctgatagag

SEQ ID NO: 676951 - DNA, 120 bp, Artificial Sequence
  ENSG00000186297_10 (sequence is synthesized)
tgggcctgggatggcaaaaaagccttggaagcagccaagatcaagaaaaagcgtgaagtcatactaaataagtcaacaaacgcttttacaactgggaagatgtctcaccccccaaacatt

SEQ ID NO: 676952 - DNA, 120 bp, Artificial Sequence
  ENSG00000186297_11 (sequence is synthesized)
ccgaaggaacagaccccagcagggacgtcgaatacaacctcagtctcagtaaaaccctctgaagagaagacttctgaaagcaaaaagacttacaacagtatcagcaaaattgacaaaatg

SEQ ID NO: 676953 - DNA, 120 bp, Artificial Sequence
  ENSG00000186297_12 (sequence is synthesized)
tcccgaatcgtattcccagtcttgttcggcactttcaacttagtttactgggcaacgtatttgaatagggagccggtgataaaaggagccgcctctccaaaataaccggccacactccca

SEQ ID NO: 676954 - DNA, 120 bp, Artificial Sequence
  ENSG00000186297_13 (sequence is synthesized)
aactccaagacagccatacttccagcgaaatggtaccaaggagaggtcttgctcacagggactctccatatgtgagcactatctttcaggaaatttttgcatgtttaataatatgtacaa

SEQ ID NO: 676955 - DNA, 120 bp, Artificial Sequence
  ENSG00000186297_14 (sequence is synthesized)
ataatattgccttgatgtttctatatgtaacttcagatgtttccaagatgtcccattgataattcgagcaaacaactttctggaaaaacaggatacgatgactgacactcagatgcccag

SEQ ID NO: 676956 - DNA, 120 bp, Artificial Sequence
  ENSG00000186297_15 (sequence is synthesized)
tatcatacgttgatagtttacaaacaagatacgtatatttttaactgcttcaagtgttacctaacaatgttttttatacttcaaatgtcatttcatacaaattttcccagtgaataaata

SEQ ID NO: 676957 - DNA, 120 bp, Artificial Sequence
  ENSG00000186297_16 (sequence is synthesized)
ttttaggaaactctccatgattattagttgaccaactatattgcgagaaacagagatcataaagagcacgttttccattatgaggaaacttggacatttatgtacaaaatgaattgcctt

SEQ ID NO: 676958 - DNA, 120 bp, Artificial Sequence
  ENSG00000186297_17 (sequence is synthesized)
tgataattcttactgttctgaaattaggaaagtactgcatgatcttacacgaagaaatagaataggcaaacttttatgcaggcagattaataacagaaatacatcatatgttagatacac

SEQ ID NO: 676959 - DNA, 120 bp, Artificial Sequence
  ENSG00000186297_18 (sequence is synthesized)
aaaatatttccctgaggaaaaaaaatcaactgcttaaattttttgggaagaaaaagaaacatttcttaccccacaccacccactacctgaacaatagccaagaaaggaaaggagatgtta

SEQ ID NO: 676960 - DNA, 120 bp, Artificial Sequence
  ENSG00000186297_19 (sequence is synthesized)
aaacaaacagtgttttgatgacattctcagcacttggcccatgtgatcgctgtctctgaaacactgaccacctctccctacagccagcgtgtagtgcttcagtggtgagaaattgtaatt

SEQ ID NO: 676961 - DNA, 120 bp, Artificial Sequence
  ENSG00000186297_20 (sequence is synthesized)
gagttattttccattttatttccttgtatgtatttcatgactggacttactgctctgtcagcttttgtatatgaatcttaaatgttcattaaaaaataaaaaatgaactgatcttgtgga

SEQ ID NO: 676962 - DNA, 120 bp, Artificial Sequence
  ENSG00000186297_21 (sequence is synthesized)
gaagatgctgttgagggccctggagaaacttcagcagaacagggcctctccccttgcaggccgagccgggggccctgcgccctccccctccgcccagctcggccaagggcgcatttgctg

SEQ ID NO: 676963 - DNA, 80 bp, Artificial Sequence
  ENSG00000186297_22 (sequence is synthesized)
ggcgcggagcggagctgcagggcggcggcgggagcgcggggcgcaagagccgctccgccgggagtgccggggaagttcgc

SEQ ID NO: 676964 - DNA, 120 bp, Artificial Sequence
  ENSG00000186297_23 (sequence is synthesized)
tgccggggaagttcgcgctggcagcatggggcggtgacgccgcaccggccttccgcgcctgccagccgggcgagagcaggcggaggagaaggaggatgcatcctcaccgacggctcgcct

SEQ ID NO: 676965 - DNA, 120 bp, Artificial Sequence
  ENSG00000186297_24 (sequence is synthesized)
gctcgaggccaggggacttggagtcgctgctgcaccgcgcgctcccagcccaggaggaaggcgctgcctggcggagcgcttggctcgtacccggggcaggagcaggggaagtctgcgaaa

SEQ ID NO: 676966 - DNA, 120 bp, Artificial Sequence
  ENSG00000186297_25 (sequence is synthesized)
gctaattggttgttaaaaatggctaaaatattgacataaaccaattccttagaatcacagaatgatagactttgagcctcaggttaggtggttggataactagccccaagcagagtatcc

SEQ ID NO: 676967 - DNA, 120 bp, Artificial Sequence
  ENSG00000186297_26 (sequence is synthesized)
ttggatgttggagaactgaggtgtatcaaggccaaacaatcccctaggcactatgggagctgtgttctcagatcctcgtctcaggagacaagcctccacgtgactccctggtttctgtat

SEQ ID NO: 676968 - DNA, 120 bp, Artificial Sequence
  ENSG00000186298_0 (sequence is synthesized)
cttctcgtggttccagtggggagagaaggaggaagtagggagcggggtggcaggggggggacccgccgcggctgctgccaccgccgccaccaccgcctctgctcgtggcgtgggaaagga

SEQ ID NO: 676969 - DNA, 120 bp, Artificial Sequence
  ENSG00000186298_1 (sequence is synthesized)
ggtgtgagtcccgggcgcgagccggcggcggcgccgctgcgggagggtcggcggtgggaaggcgatggcggatttagataaactcaacatcgacagcattatccaacggctgctggaagt

SEQ ID NO: 676970 - DNA, 120 bp, Artificial Sequence
  ENSG00000186298_2 (sequence is synthesized)
gagagggtccaagcctggtaagaatgtccagcttcaggagaatgaaatcagaggactgtgcttaaagtctcgtgaaatctttctcagtcagcctatcctactagaacttgaagcaccact

SEQ ID NO: 676971 - DNA, 120 bp, Artificial Sequence
  ENSG00000186298_3 (sequence is synthesized)
caaaatatgtggtgacatccatggacaatactatgatttgctgcgactttttgagtacggtggtttcccaccagaaagcaactacctgtttcttggggactatgtggacaggggaaagca

SEQ ID NO: 676972 - DNA, 120 bp, Artificial Sequence
  ENSG00000186298_4 (sequence is synthesized)
gtcattggagacgatctgcctcttactggcctacaaaataaaatatcctgagaatttttttcttctcagagggaaccatgaatgtgccagcatcaacagaatttatggattttatgatga

SEQ ID NO: 676973 - DNA, 120 bp, Artificial Sequence
  ENSG00000186298_5 (sequence is synthesized)
atgtaaaagaagatacaacattaaactatggaaaactttcacagactgttttaactgtttaccgatagcagccatcgtggatgagaagatattctgctgtcatggaggtttatcaccaga

SEQ ID NO: 676974 - DNA, 120 bp, Artificial Sequence
  ENSG00000186298_6 (sequence is synthesized)
tcttcaatctatggagcagattcggcgaattatgcgaccaactgatgtaccagatcaaggtcttctttgtgatcttttgtggtctgaccccgataaagatgtcttaggctggggtgaaaa

SEQ ID NO: 676975 - DNA, 120 bp, Artificial Sequence
  ENSG00000186298_7 (sequence is synthesized)
tgacagaggagtgtccttcacatttggtgcagaagtggttgcaaaatttctccataagcatgatttggatcttatatgtagagcccatcaggtggttgaagatggatatgaattttttgc

SEQ ID NO: 676976 - DNA, 120 bp, Artificial Sequence
  ENSG00000186298_8 (sequence is synthesized)
aaagaggcagttggtcactctgttttctgcgcccaattattgcggagagtttgacaatgcaggtgccatgatgagtgtggatgaaacactaatgtgttcttttcagattttaaagcctgc

SEQ ID NO: 676977 - DNA, 120 bp, Artificial Sequence
  ENSG00000186298_9 (sequence is synthesized)
agagaaaaagaagccaaatgccacgagacctgtaacgcctccaaggggtatgatcacaaagcaagcaaagaaatagatgtcgttttgacactgcctagtcgggacttgtaacatagagta

SEQ ID NO: 676978 - DNA, 120 bp, Artificial Sequence
  ENSG00000186298_10 (sequence is synthesized)
ctggtcagcttgctcagatagatctgtgtttgtgggggcccttccttccatttttgatttagtgaatggcatttgctggttataacagcaaatgaaagactcttcactccaaaaagaaaa

SEQ ID NO: 676979 - DNA, 120 bp, Artificial Sequence
  ENSG00000186298_11 (sequence is synthesized)
gtgttttgttttttaattctctgttccttttgcaaacaattttaatgatggtgttaaagctgtacaccccaggacagtttatcctgtctgaggagtaagtgtacaattgatcttttttaa

SEQ ID NO: 676980 - DNA, 120 bp, Artificial Sequence
  ENSG00000186298_12 (sequence is synthesized)
ttcagtacaacccataatcatgtaaatgctcattttctttaggacataaagagagccctagggtgctctgaatctgtacatgttcttgtcataaaatgcatactgttgatacaaaccact

SEQ ID NO: 676981 - DNA, 120 bp, Artificial Sequence
  ENSG00000186298_13 (sequence is synthesized)
gtgaacattttttatttgagaattttgtttcaaagggattgctttttcctctcattgtcttgttatgtacaaactagtttttatagctatcaacattaggagtaactttcaaccttgcca

SEQ ID NO: 676982 - DNA, 120 bp, Artificial Sequence
  ENSG00000186298_14 (sequence is synthesized)
gcatcactggtatgatgtatatttaattaaagcacacttttccccgaccgtatacttaaaatgacaaagccattcttttaaatatttgtgactctttcctaaagccaaagtttctgttga

SEQ ID NO: 676983 - DNA, 120 bp, Artificial Sequence
  ENSG00000186298_15 (sequence is synthesized)
attatgttttgacacacccctaagtacaaggtggtatggttgtatacacatgctgccttcttggggattcaaaaacaggtttttgattttgaatagcaattagtgatatagtgctgttta

SEQ ID NO: 676984 - DNA, 120 bp, Artificial Sequence
  ENSG00000186298_16 (sequence is synthesized)
agctactaacgataaaaggtaataacattttatacaatttccatatagtctattcattaagtaatctttttacagttgcatcaggcctgaacccgtccattcagaaagcttcaaattata

SEQ ID NO: 676985 - DNA, 120 bp, Artificial Sequence
  ENSG00000186298_17 (sequence is synthesized)
gaaacaatactgttctatacgagtgaccgattatgctttctttggcctacattctttattctgcggtgaagttgaggcttataagttaaaacaaaggaactaacttactgtccaccagtt

SEQ ID NO: 676986 - DNA, 120 bp, Artificial Sequence
  ENSG00000186298_18 (sequence is synthesized)
tatacagaactcacagtacctatgacttttttaaactaagatctgttaaaaaagaaatctgtttcaacagatgaccgtgtacaataccgtgtggtgaaaatgaattcagacttattaaat

SEQ ID NO: 676987 - DNA, 120 bp, Artificial Sequence
  ENSG00000186298_19 (sequence is synthesized)
gatgaacttgttaaatcttctcagtgtctatttatcagcacaatacacacaggagaactgttgatggcatattgaatagattttcctgaataaattgctctggaaaccacacggttgcat

SEQ ID NO: 676988 - DNA, 120 bp, Artificial Sequence
  ENSG00000186298_20 (sequence is synthesized)
tttggttttgcttctttcaaatagtctgttttccaaagatggattataatacagatactaatactctttgagttgtaacctggagacatctatttgtgtaatagagtgatgaggtggaac

SEQ ID NO: 676989 - DNA, 120 bp, Artificial Sequence
  ENSG00000186298_21 (sequence is synthesized)
tttcaggtagagcatgctttcaacatgatttccttttaatatgtttacactttgctgattgaaaaatataattgctactttttgcctagtgttcacttatgctgagtaggctaagttttt

SEQ ID NO: 676990 - DNA, 120 bp, Artificial Sequence
  ENSG00000186298_22 (sequence is synthesized)
attttcccttaaccagtgtgtattatagttgaataatgtgtggatcccttgtaaaagaaaaaattaattatggcaccttttcccagtgttgaattataaatttttgcattgcatattggc

SEQ ID NO: 676991 - DNA, 120 bp, Artificial Sequence
  ENSG00000186298_23 (sequence is synthesized)
tccttaatgcttatggctcttttactgtaaatctaaaaccttaatgacaatgtaatgttcagctaaaattaaatcaccacttgaatgtgaaaagtactgagtgccttgtgctatgtgttt

SEQ ID NO: 676992 - DNA, 120 bp, Artificial Sequence
  ENSG00000186298_24 (sequence is synthesized)
acttagttctgccctctagtctaacttccacaaaacttctgttaatgtaccatgacatcatttggccttcagttggcacaaaagcattatttagaatctgcctcagcctttttctcattt

SEQ ID NO: 676993 - DNA, 120 bp, Artificial Sequence
  ENSG00000186298_25 (sequence is synthesized)
gcttattatgatacttgtacaacttcaagccagcctagtcataaacataaatacagccaccaaatcatgtggcactcatcagttaaatgaattaaaatagttttttaccaattatcagag

SEQ ID NO: 676994 - DNA, 120 bp, Artificial Sequence
  ENSG00000186298_26 (sequence is synthesized)
agaacttgcagctttcaaaattccaaagattgtgcaaggatcccctacaggttggagaaacacttttgtaaagaactttttcccctgtatcagaaggagtagctaaagatactaccaggt

SEQ ID NO: 676995 - DNA, 120 bp, Artificial Sequence
  ENSG00000186298_27 (sequence is synthesized)
gtagacttcagaagattgtcattatactcagaggcaaaataatttgtccagataatagattttatctgttcgtcatagcgttaattaccaaatgtttacattcaacatagcttgtgttaa

SEQ ID NO: 676996 - DNA, 120 bp, Artificial Sequence
  ENSG00000186298_28 (sequence is synthesized)
caccacgcccagcctgatatgacaacttttaagaactctccagtgttcacttggactgccaagccccatttgaaatctctgttagacaattcaacgtgaaatttaagagtaattctagat

SEQ ID NO: 676997 - DNA, 120 bp, Artificial Sequence
  ENSG00000186298_29 (sequence is synthesized)
tttcatactttgaaaaatactccagtaaagcctgtgagagggtccaagcctggtaagaatgtccagcttcaggagaatgaaatcagaggactgtgcttaaagtctcgtgaaatctttctc

SEQ ID NO: 676998 - DNA, 120 bp, Artificial Sequence
  ENSG00000186298_30 (sequence is synthesized)
aattttggagcatcttggattaaggatactcatcctgtggtggtagtagtagtagtattgctgttggaaatgggagttggtggtttttggagattgcccttcagcctttcgtaagaagga

SEQ ID NO: 676999 - DNA, 120 bp, Artificial Sequence
  ENSG00000186298_31 (sequence is synthesized)
gcgggagaagtttgttaaactttccgaaccccctagtgaaggacctctaaagaaatatgcaacagggtgaaccatagtcagtgttagacccagtcattgagaaaccagaaattattagga

SEQ ID NO: 677000 - DNA, 120 bp, Artificial Sequence
  ENSG00000186298_32 (sequence is synthesized)
gaaaagataacactcctctgcagagagaaggcaaacatttgttgaatttacatttcatttcaagccctgtggtaaactccctaagctgcttgatttgcattacagggtgggaggtgtggt

SEQ ID NO: 677001 - DNA, 120 bp, Artificial Sequence
  ENSG00000186298_33 (sequence is synthesized)
tcaggtcagttgcttgggctggctctaactctcaaaggagaggtataggtttaaacctttagatgtccctgtattccccaggaaaagagactaaggacaaactcttggtttgttttgttt

SEQ ID NO: 677002 - DNA, 70 bp, Artificial Sequence
  ENSG00000186298_34 (sequence is synthesized)
acaaactcttggtttgttttgcggagtgcaatggcacaatcaaggctcaccgcaacctccgcctcccagg

SEQ ID NO: 677003 - DNA, 120 bp, Artificial Sequence
  ENSG00000186298_35 (sequence is synthesized)
aggtgtgagccaccgcgcctggccaaactcctggtttttaaagattgtgcttagtatagtaagtacaggaaacaaaggcatctggacaattggacaatcctcaaccaatccagagaaatt

SEQ ID NO: 677004 - DNA, 120 bp, Artificial Sequence
  ENSG00000186298_36 (sequence is synthesized)
gacaattggacaatcctcaaccaatccagagaaatttgttcttgcaaggtatgtgactaggttttaaactcagaacatcagtttcctgtagaaacagtgcatagaggcatatttctgtca

SEQ ID NO: 677005 - DNA, 120 bp, Artificial Sequence
  ENSG00000186298_37 (sequence is synthesized)
gaactgcactctgactccagaatgtgtggatgcctgtgctgttgagggaacatgaccatcctgtgacatcaggcctgtgggagcatgtggagtctgtgcagtgttggaaacaaatgccct

SEQ ID NO: 677006 - DNA, 120 bp, Artificial Sequence
  ENSG00000186298_38 (sequence is synthesized)
gtagtgcctgtgagaggcagccactgccgtgtgatcattgtgcctcctgctagagtactgagggctggggatcctctggtgtcagtaggttattgaggggcatatatgggggatgggtgc

SEQ ID NO: 677007 - DNA, 120 bp, Artificial Sequence
  ENSG00000186298_39 (sequence is synthesized)
cacatgtgtaagttcgtaattgaattcagaagtaggggactagctgcggtgagattggacagagcagacaatttcaaacagaattgatgctcccagataattcctgggatttgatggcag

SEQ ID NO: 677008 - DNA, 120 bp, Artificial Sequence
  ENSG00000186298_40 (sequence is synthesized)
tccttaatcattatcaaatctggaattctggtttcatgcttctgtggaatttaaaaagatttcatgtgaaaatgtaagtcattgcttttagatcagatatgtgtctctcctaaacccctt

SEQ ID NO: 677009 - DNA, 88 bp, Artificial Sequence
  ENSG00000186298_41 (sequence is synthesized)
attgcttttagatcagatatgtgtctctcctaaaccccttccctctaggagagtctttcagatggtcttgaactcctgggctcaagcc

SEQ ID NO: 677010 - DNA, 120 bp, Artificial Sequence
  ENSG00000186298_42 (sequence is synthesized)
tctgacccaccacgcccagctcttattttaaaagagccttaaaataagatggttttattaagattcttaataaaaacatagtttcatttgcttaaaaggcacccagaatcttgctttggg

SEQ ID NO: 677011 - DNA, 120 bp, Artificial Sequence
  ENSG00000186298_43 (sequence is synthesized)
tgattttgaattttacatgtacacttaagagcatgtgtgtgagcacagattctccttgttgattttggtgggtaggtattgcttatttatacaaagtgtttctggaacacaagatatcag

SEQ ID NO: 677012 - DNA, 120 bp, Artificial Sequence
  ENSG00000186298_44 (sequence is synthesized)
atcagaacgagacttagttacatattttggggtccaaaagtgaactttataactgtaaaattaaggtacatttagcagttccgtgctactttatctgtatctaatgactatccagtctgt

SEQ ID NO: 677013 - DNA, 120 bp, Artificial Sequence
  ENSG00000186298_45 (sequence is synthesized)
tacaactggaaccaaaacaaaatttctttcccacaactacctacgtgctgacaagtgagttctgttgcaaagtttgtactttgatagaagaaccctaagtgctctggtggtgtggatgcc

SEQ ID NO: 677014 - DNA, 120 bp, Artificial Sequence
  ENSG00000186298_46 (sequence is synthesized)
ccatgctgtgcaatgatttctttctcccattattatcttatctgttcaaattattagggaacgtgctttcttacagtatagcacatgactgacatcctttgccctatatagacatgagca

SEQ ID NO: 677015 - DNA, 120 bp, Artificial Sequence
  ENSG00000186298_47 (sequence is synthesized)
taaacacaaatgcaggcccagaaaatgcatggcaaaataagtacaatgaaccaacattttcttaatgaaatgaaaacaacactaacattttttcataggtaaattaaatcagagatcctc

SEQ ID NO: 677016 - DNA, 120 bp, Artificial Sequence
  ENSG00000186298_48 (sequence is synthesized)
taaatcagagatcctcaggaggagatacccatggtcctctggaaaacactgatgggggagggttctgagtatttccaatcctgtttcttttcttttcttttctttccttttctttttttt

SEQ ID NO: 677017 - DNA, 87 bp, Artificial Sequence
  ENSG00000186298_49 (sequence is synthesized)
ctcactgcaacctccgcctcccgggtgcaggcgatttgttggcgaggatggtctggatctcttgacctcatcatgatctgcccgcct

SEQ ID NO: 677018 - DNA, 82 bp, Artificial Sequence
  ENSG00000186298_50 (sequence is synthesized)
cacatctggcctgcagtcctgtttctaacagcattcgcacagacaggatggctccttttttggaatactataaaagaagtct

SEQ ID NO: 677019 - DNA, 120 bp, Artificial Sequence
  ENSG00000186298_51 (sequence is synthesized)
acaggatggctccttttttggaatactataaaagaagtcttacttggtatcgaagatgcaattaagtcttgtctaagattttaagattctaattagacattaaaaccatgtttattataa

SEQ ID NO: 677020 - DNA, 120 bp, Artificial Sequence
  ENSG00000186300_0 (sequence is synthesized)
gtcctagccgtgagtgccccgcctgcccctagcggtccctggcgtcccggttcctgtcgcgctcacctgcgccggtagcgaagaaatcgccccgggacatggactcagtggtctttgagg

SEQ ID NO: 677021 - DNA, 120 bp, Artificial Sequence
  ENSG00000186300_1 (sequence is synthesized)
atgtggctgtggacttcaccctggaggagtgggctttgctggattctgctcagagggacctctacagagatgtgatgctggagacctttcagaacctggcctcagtagatgatgaaactc

SEQ ID NO: 677022 - DNA, 120 bp, Artificial Sequence
  ENSG00000186300_2 (sequence is synthesized)
aatttaaggccagtgggtcagtttctcagcaggatatttatggagagaaaatacccaaggaatctaaaatagccacgttcaccagaaatgtttcctgggcctctgttttaggaaaaattt

SEQ ID NO: 677023 - DNA, 120 bp, Artificial Sequence
  ENSG00000186300_3 (sequence is synthesized)
gggacagtcttagcatcgaagatcaaaccacaaaccaggggagaaatctcagtagaaatcatgggttggagagactctgtgaaagtaatgatcaatgtggagaagccctcagccagattc

SEQ ID NO: 677024 - DNA, 120 bp, Artificial Sequence
  ENSG00000186300_4 (sequence is synthesized)
cacatcttaatctgtacaagaaaattccacctggagtaaaacagtatgaatacaacacgtacggaaaagtcttcatgcatcgccgcacatccctcaagagtcccatcacagttcacactg

SEQ ID NO: 677025 - DNA, 120 bp, Artificial Sequence
  ENSG00000186300_5 (sequence is synthesized)
gacacaaaccatatcagtgccaggaatgtgggcaggcctacagttgtcgttcacacctaagaatgcatgtgagaacccacaatggagagagaccctatgtgtgtaaattatgtgggaaaa

SEQ ID NO: 677026 - DNA, 120 bp, Artificial Sequence
  ENSG00000186300_6 (sequence is synthesized)
cctttcctcgtacttcctccctcaatcggcatgtaaggattcacactgctgagaaaacctacgaatgtaagcaatgtgggaaagcctttattgacttctcaagtcttactagtcatctca

SEQ ID NO: 677027 - DNA, 120 bp, Artificial Sequence
  ENSG00000186300_7 (sequence is synthesized)
gaagtcacaccggagagaagccatataagtgtaaggaatgtgggaaagctttcagttattcctcaacgtttcgaagacacacaataacacacactggcgagaagccatataaatgtaagg

SEQ ID NO: 677028 - DNA, 120 bp, Artificial Sequence
  ENSG00000186300_8 (sequence is synthesized)
aatgtgcggaagcctttagttattcctcaacttttcgaagacatatgatttcacacactggagagaagccacataaatgtaaagaatgtggggaggccttcagttattcttcggcttttc

SEQ ID NO: 677029 - DNA, 120 bp, Artificial Sequence
  ENSG00000186300_9 (sequence is synthesized)
gaagacacatgataacacacactggagagaaaccctacgaatgcaaacaatgtgggaaaaccttcatttatctccagtcctttcgaagacatgaaaggattcacactggagagaaaccct

SEQ ID NO: 677030 - DNA, 120 bp, Artificial Sequence
  ENSG00000186300_10 (sequence is synthesized)
acgaatgcaaacagtgtgggaagaccttcatttatccccagtcctttcgaagacatgaaaggactcatggtggagagaaaccctatgaatgcaaccagtgcgggaaagcattcagtcacc

SEQ ID NO: 677031 - DNA, 120 bp, Artificial Sequence
  ENSG00000186300_11 (sequence is synthesized)
cctcctcctttcgaggacacatgagggtgcacactggagagaaaccctatgagtgcaagcaatgtgggaaaactttcaattggcccatatctttacgaaaacatatgagaacacatacta

SEQ ID NO: 677032 - DNA, 120 bp, Artificial Sequence
  ENSG00000186300_12 (sequence is synthesized)
gagagaaaccctatgaatgtaagcagtgtgggaaagccttcagcttgtctgcttgctttcgagaacatgtgagaatgcaccctgaagacaaatcctatgaatgcaagctatgtgggaaag

SEQ ID NO: 677033 - DNA, 120 bp, Artificial Sequence
  ENSG00000186300_13 (sequence is synthesized)
ctttctattgccacatatccttacaaaaacatatgagaagacataccgcagagaaactctataaatgcaagcagtgtgggaaagctttcagttggcctgaacttttgcaacaacatgtga

SEQ ID NO: 677034 - DNA, 120 bp, Artificial Sequence
  ENSG00000186300_14 (sequence is synthesized)
gaacgcacactgtagagaagccctatgaatgtaaggaatgtgggaaggtcttcaaatggccatcatctttaccaatacatatgagactgcacactggagagaaaccttatcaatgtaagc

SEQ ID NO: 677035 - DNA, 120 bp, Artificial Sequence
  ENSG00000186300_15 (sequence is synthesized)
attgtgggaaagcattcaattgttcctcatccttaaggcgacatgtgagaatacacactacagaaaaacagtataagtgtaatgtaggacatcctcctgcaaatgaattcatgtgcagtg

SEQ ID NO: 677036 - DNA, 120 bp, Artificial Sequence
  ENSG00000186300_16 (sequence is synthesized)
cttcagaaaagtcacaccaggagagagatctgatcaaagttgtaaatatggtgttgcctttatgagttccttatcctgaaagtggacactcaaggagtgtgtctgtagttcatttgcaaa

SEQ ID NO: 677037 - DNA, 120 bp, Artificial Sequence
  ENSG00000186300_17 (sequence is synthesized)
taaacatttagttgaaaaataattctccaaatactctcagctatcctacatgaatttgaacaggtagtttcttacgattcagtaaataaaactttcatcttagagtgttttggactcatg

SEQ ID NO: 677038 - DNA, 120 bp, Artificial Sequence
  ENSG00000186300_18 (sequence is synthesized)
gatgatttgaagtgtatttttaatatgcaagtaggttcaagttttatttaatttcttaaattgtaactgacttagtgtgacaggtattggatattacgtatctattatattttccacctt

SEQ ID NO: 677039 - DNA, 120 bp, Artificial Sequence
  ENSG00000186300_19 (sequence is synthesized)
ttttactgggagtatttttattgtttggccagaggagccttattccattttttaagaagtagttggcagaattttgtaattatgcaaagttgtttaaggagtatagcctcaaatgaattg

SEQ ID NO: 677040 - DNA, 120 bp, Artificial Sequence
  ENSG00000186300_20 (sequence is synthesized)
taatttttaatgtttgcccattgctgtttgtctttgcttgtgattgtgaattggacagtaggctttgacttgtgatgtgacggagaaatccagagttgcagatagttcttctgcattgtt

SEQ ID NO: 677041 - DNA, 120 bp, Artificial Sequence
  ENSG00000186300_21 (sequence is synthesized)
gtcagtgtgggtagtgttaggaacttcatttgctggaatgcatttcctttatggttccatgtccaaatttaccaatagcaataacttgaatgaaatttagaatgaagaagaagtaagtca

SEQ ID NO: 677042 - DNA, 120 bp, Artificial Sequence
  ENSG00000186300_22 (sequence is synthesized)
tcgctgagcttttggggtcacattaaatggagatggacagatgcataggggctttgtgaacatcaaccttcagcttattttccagattcttattcctgccaatcaagagtaccatcaaaa

SEQ ID NO: 677043 - DNA, 120 bp, Artificial Sequence
  ENSG00000186300_23 (sequence is synthesized)
gaaacacttaagtgcttgatttccactgtgtcagaggtgtagtcttcctcagacatctccattaacttgatattagggatattcctgtgtggtcagtcacctagagtctggatttttctc

SEQ ID NO: 677044 - DNA, 120 bp, Artificial Sequence
  ENSG00000186300_24 (sequence is synthesized)
aaaaccctgcatgacctcttgaccactgattcagactgtcttgtttggcagtctctgagcttctgattctcccgttctgtagatcttaacatatttgcatggggtctaatttatatagtg

SEQ ID NO: 677045 - DNA, 120 bp, Artificial Sequence
  ENSG00000186300_25 (sequence is synthesized)
aacaccttgttatcttaatacttccagtggctctgtgatcctgattccaccacgaaagccacagtgttgcagtcaaagaagaaaaacaacacatgggactttgtaccctattgcattttt

SEQ ID NO: 677046 - DNA, 120 bp, Artificial Sequence
  ENSG00000186300_26 (sequence is synthesized)
aagtgtgcctgccgagtcctatgtgagaacaaataccttcctcatatattagatttagggagatttctgttactcagaactaaatgcagtttcttgatataggttaaattattaggtttg

SEQ ID NO: 677047 - DNA, 120 bp, Artificial Sequence
  ENSG00000186300_27 (sequence is synthesized)
ttattaggtttgattatgtatcattaaaaataatgtggattttgtttcaaggaaaaccttctgtagatatttcttagaaatatcctgtttagctgggcacagtagctcatgcctgtaatc

SEQ ID NO: 677048 - DNA, 75 bp, Artificial Sequence
  ENSG00000186300_28 (sequence is synthesized)
ggggaaagactccatcacacaagcaagaaaagaaaaaaaaatcctatttactgtgctttcaaattagttgtttag

SEQ ID NO: 677049 - DNA, 120 bp, Artificial Sequence
  ENSG00000186300_29 (sequence is synthesized)
aaaaaatcctatttactgtgctttcaaattagttgtttagagactatattaatttcccagggctgccataacaaagtacaaaaactgggtgacataggaaaacaaactttttgtttctca

SEQ ID NO: 677050 - DNA, 120 bp, Artificial Sequence
  ENSG00000186300_30 (sequence is synthesized)
gttctggacccagaaatccagaaacaaggcattggcaggaccatgctttttctgaagatgctagggaaggatctgtttcagaactcacctagcttctggtagttccttagcttgtggcag

SEQ ID NO: 677051 - DNA, 120 bp, Artificial Sequence
  ENSG00000186300_31 (sequence is synthesized)
cataactctaattttcacatggcattctccctgtgtgtgtgtctctccatgtgacaatatttttatacatacacaccactcattgggttaggccccactctacttcagtatgattttacc

SEQ ID NO: 677052 - DNA, 120 bp, Artificial Sequence
  ENSG00000186300_32 (sequence is synthesized)
ttaactaattacattggcaacagctctcttttcgcatactgaggcaccgcgaattaagatttcaacgtaaaaattttaggagacccaattcaacccataacactaagaaatgttattttt

SEQ ID NO: 677053 - DNA, 120 bp, Artificial Sequence
  ENSG00000186300_33 (sequence is synthesized)
tgtttaccgagagaattacagatttcaaatcaactttgtaattttgataatttaagcatgttacattttgaatcagtattaccaagtatatacaaatacaggtattttttcatataaatg

SEQ ID NO: 677054 - DNA, 120 bp, Artificial Sequence
  ENSG00000186300_34 (sequence is synthesized)
atttcttatttgtggttaataacaattaaaaagcggaaataatggttttgtcaaggccctctacccagaaaccaccaggatcacactggtagtcaaagaaaatttgctgtgttgagttga

SEQ ID NO: 677055 - DNA, 120 bp, Artificial Sequence
  ENSG00000186300_35 (sequence is synthesized)
agtttgaacacatgatcaagaaagggctgtggcttgtatcagagggtgtttaaaaggatttactatcagatttggccttgtgttctgtgattttggtgagcgttcaaggaagccaggctt

SEQ ID NO: 677056 - DNA, 120 bp, Artificial Sequence
  ENSG00000186300_36 (sequence is synthesized)
tggtctggattggatgttctcaggtcatgaatataattctctgggaactcccaaagttctcatctacaaagcagaagttaattggagctgaaaactaatcagtaaagccacagcagccag

SEQ ID NO: 677057 - DNA, 120 bp, Artificial Sequence
  ENSG00000186300_37 (sequence is synthesized)
tcatatgggggagaagaggggaatgtttgatggtttttgtggtttagaggtgagttccggaaaaaaagaagacatgtttgacatcctcaaacgagaaaatttttcatgtgttttataggc

SEQ ID NO: 677058 - DNA, 120 bp, Artificial Sequence
  ENSG00000186300_38 (sequence is synthesized)
caaggaggcagaagcttttgttttaatgagccagaaagccccaaaagcctatttaagttttctcaggtatcatttcaacctctgaacttccagaattaactagggaagaggaaaaacatg

SEQ ID NO: 677059 - DNA, 120 bp, Artificial Sequence
  ENSG00000186300_39 (sequence is synthesized)
taacaccttagagttttattaaagagcaaacaatatccagtaatctccattactttccatgttaacataagttttcataacgctctatagatgaatgtgatttggcagtcacttgtattt

SEQ ID NO: 677060 - DNA, 120 bp, Artificial Sequence
  ENSG00000186300_40 (sequence is synthesized)
cttaacacccacttacccatcattccctcttagatgaaaaaagttaagcacggggacaacagagtcttgtatattcatgtagctcatgatgatggaatcaagtttgaaggcttaacctgt

SEQ ID NO: 677061 - DNA, 120 bp, Artificial Sequence
  ENSG00000186300_41 (sequence is synthesized)
gcttaacctatattgggcattgtcaagacttaaatttagaacactggaaagcaagtataattaattttacaaatagggcatcaaattttacaaagactcctaaggctatatggtattcct

SEQ ID NO: 677062 - DNA, 120 bp, Artificial Sequence
  ENSG00000186300_42 (sequence is synthesized)
tttataagacatggaaaaggcaaagataagggaaacgaacaaatcgctggttagaagtaggggatttgagtacatatgggcttaagagtgttctgtcatgattgtagtggtgaaaacaag

SEQ ID NO: 677063 - DNA, 120 bp, Artificial Sequence
  ENSG00000186300_43 (sequence is synthesized)
catttgcaaaaactcataaggctactcttaaaatagcaaattttgttgtatgtatattttaaagttaaacaataaaaatgctttcagtttattaaagaactcaagaccaggtgcagtggc

SEQ ID NO: 677064 - DNA, 87 bp, Artificial Sequence
  ENSG00000186300_44 (sequence is synthesized)
tgcttgtggccaggaggttgaggctgcagtgaactatgatcatgcactgcactctacactgggcgacagagcaagaccctgtctcaa

SEQ ID NO: 677065 - DNA, 120 bp, Artificial Sequence
  ENSG00000186300_45 (sequence is synthesized)
accctgtctcaaaaaaaaaggaatacaaaacattcctgaaacttgacatgtaagttcgcaataagacttttccctagctgggcgcggtgactcatgcctgtaatctcaacattttgggag

SEQ ID NO: 677066 - DNA, 120 bp, Artificial Sequence
  ENSG00000186300_46 (sequence is synthesized)
actgaggcaagaggatcacttgaagtcaggagctagacaccagtctgggcaacatagcgagacctcaactctaccaaaaaattaaaaagtgagccaggcggggtggtgcacgtctgtggt

SEQ ID NO: 677067 - DNA, 120 bp, Artificial Sequence
  ENSG00000186300_47 (sequence is synthesized)
attaaaaagtgagccaggcggggtggtgcacgtctgtggtcccagctacttggcaggctgaagcaggaggatcacttgaggccttgaggagccatgatcgtgccactgcactccagcttg

SEQ ID NO: 677068 - DNA, 120 bp, Artificial Sequence
  ENSG00000186300_48 (sequence is synthesized)
aacaagacttcccccaccatcttggaattctctggaggaaatgtagggctggttgacaaggacttgtgcctcgtcagaccctgtttgaaacccagtctgaagttttgaaacacccacaag

SEQ ID NO: 677069 - DNA, 120 bp, Artificial Sequence
  ENSG00000186300_49 (sequence is synthesized)
ggccatacctgactttatctcacgcacataacaggagagaagaaggaggtcttccagaatctgtctttgagtttacaccaggttcttcccatctgatctttgggaatgctgtggttctga

SEQ ID NO: 677070 - DNA, 120 bp, Artificial Sequence
  ENSG00000186300_50 (sequence is synthesized)
aacataaaacggggaccctacacttcttcccaggaatatcctgcctgggagcatcctgatcctgtcttcagacaaggggcatccgcatcttgttttctagggcctttcctgaggccactt

SEQ ID NO: 677071 - DNA, 120 bp, Artificial Sequence
  ENSG00000186300_51 (sequence is synthesized)
ccagctccaaagttctcatctcaagctcagctctgtgtcttcatgctgggaaacgtctttatggatccccaaactcctcttgctgttgggaacacgtggcagccctgcgttgtgaggtga

SEQ ID NO: 677072 - DNA, 120 bp, Artificial Sequence
  ENSG00000186300_52 (sequence is synthesized)
gagaagaggcagtggcagaacccatgccatggagacacgcccatcagccacagcagctcctgctactgcataaatccataggcacaatcacacgcctcacggtgtcaacatctcccatga

SEQ ID NO: 677073 - DNA, 120 bp, Artificial Sequence
  ENSG00000186300_53 (sequence is synthesized)
catcacaaagatgcccagctgggacccacctacagtgatggggtgatggggtttcacctataagcgggcaaacaggcactcctcctcactgtccagtcacctgacgtgctttttctgcgc

SEQ ID NO: 677074 - DNA, 120 bp, Artificial Sequence
  ENSG00000186300_54 (sequence is synthesized)
actcaggtcgtgacaccccaggaggtgcctatcgcgccccaagctcctcacgtgcctcctccccacagtccaggacgcgtcttactaacgcctcaccagagcgcatgcgccctcctcagg

SEQ ID NO: 677075 - DNA, 120 bp, Artificial Sequence
  ENSG00000186300_55 (sequence is synthesized)
agcagcctcaaagcgcgcagcctcagcccattggcctgcgggaagtggagttcccgaacagaagcccctcagtctccggaagccccgcccggcagactgttcccaggatgcaacacgggc

SEQ ID NO: 677076 - DNA, 120 bp, Artificial Sequence
  ENSG00000186300_56 (sequence is synthesized)
tcgcgtctaaaagagctgtgctttgttggggctatctgggagtttccgccttccatgaagtgcgcaggcgcacttaggcgaggcggggcgactctaggaagtggagacatcaagagtggt

SEQ ID NO: 677077 - DNA, 120 bp, Artificial Sequence
  ENSG00000186300_57 (sequence is synthesized)
actggaagtggcggaagctctcctcttgccctcttcagcttccggtgtggtgggtcccggatatcgcgtggctgtggcaggtagacagcccgtgctccagaggccttcatcttgtgatgg

SEQ ID NO: 677078 - DNA, 120 bp, Artificial Sequence
  ENSG00000186300_58 (sequence is synthesized)
cagatgtacttgagtagacacgacagacggggaaggaccctgatggtccgagggaccttccacagcaagtagaaggcactgctgtgaatatgatggcgtcagaggtgactgcaaaaaagg

SEQ ID NO: 677079 - DNA, 120 bp, Artificial Sequence
  ENSG00000186300_59 (sequence is synthesized)
acagggcagctgggcgaggaagagataccagtgatgtcctaactgagctccctgggtctggtagtgaggagctcagtcttagaatatgagccgtgtcaggggctacagcatcatcactct

SEQ ID NO: 677080 - DNA, 120 bp, Artificial Sequence
  ENSG00000186300_60 (sequence is synthesized)
tgtcctgtcgcagactcaggctccctgttctcaggttcttatgtagacagtgagggctcagggaggctcccaccaccaccaccaccagcaccaccactccatcaaaacggctgaaggacc

SEQ ID NO: 677081 - DNA, 120 bp, Artificial Sequence
  ENSG00000186300_61 (sequence is synthesized)
ttcctttagggttcgggggatctcctccttccacaagggatggatgtgaagacaactcattctttgatgttcagatggttgtggccctctgatgagatgtgtgcacaccttgccaaatgc

SEQ ID NO: 677082 - DNA, 120 bp, Artificial Sequence
  ENSG00000186300_62 (sequence is synthesized)
atatgtctgttgagcctggacattaagtatttcttgatgttcttctgtgtaacaggtgatgtcctaggtgctgcagtgaacagaagagacaaaatatccttgttcccttgaagctaatgt

SEQ ID NO: 677083 - DNA, 120 bp, Artificial Sequence
  ENSG00000186300_63 (sequence is synthesized)
cgtaggggcccaaaacaaagcaaacaaacaaaaaaaaggaatgcaagtcaagtacactttgtatggacagtggtaattcctaagaaggaaaacaaagatggacttaaggggtgcagaggg

SEQ ID NO: 677084 - DNA, 120 bp, Artificial Sequence
  ENSG00000186300_64 (sequence is synthesized)
cctggactatgtgtgtctgtgggatagtctgttactacctctgggactctcatctcttgagtgtgcttgggtgtgtccaaccgtttttcctagtgacaaagtctgggtaattctgtgggg

SEQ ID NO: 677085 - DNA, 120 bp, Artificial Sequence
  ENSG00000186300_65 (sequence is synthesized)
acatatattggtgtatctgggaggtcccatgtgtctcagtggtggtccctgttttcaggaaagagtgtctgtgaatgtccatgtgtctcactgcacagctgtgatttttctgtgtctctg

SEQ ID NO: 677086 - DNA, 120 bp, Artificial Sequence
  ENSG00000186300_66 (sequence is synthesized)
tgttttccagtctttgtgtgatgaaatataaaggcctagcaggctcagagttattaatgaattgtacttaagcgttgagaggcatatatttattgcactattaaattcttccaaaatata

SEQ ID NO: 677087 - DNA, 120 bp, Artificial Sequence
  ENSG00000186306_0 (sequence is synthesized)
atgcgaggtttcaacaaaaccactgtggttacacagttcatcctggtgggtttctccagcctgggggagctccagctgctgctttttgtcatctttcttctcctatacttgacaatcctg

SEQ ID NO: 677088 - DNA, 120 bp, Artificial Sequence
  ENSG00000186306_1 (sequence is synthesized)
gtggccaatgtgaccatcatggccgttattcgcttcagctggactctccacactcccatgtatggctttctattcatcctttcattttctgagtcctgctacacttttgtcatcatccct

SEQ ID NO: 677089 - DNA, 120 bp, Artificial Sequence
  ENSG00000186306_2 (sequence is synthesized)
cagctgctggtccacctgctctcagacaccaagaccatctccttcatggcctgtgccacccagctgttctttttccttggctttgcttgcaccaactgcctcctcattgctgtgatggga

SEQ ID NO: 677090 - DNA, 120 bp, Artificial Sequence
  ENSG00000186306_3 (sequence is synthesized)
attgctttggtggccaccaacctcatttgtgacatgcgtttttgtggccccaacagggttaaccactatttctgtgacatggcacctgttatcaagttagcctgcactgacacccatgtg

SEQ ID NO: 677091 - DNA, 120 bp, Artificial Sequence
  ENSG00000186306_4 (sequence is synthesized)
aaagagctggctttatttagcctcagcatcctggtaattatggtgccttttctgttaattctcatatcctatggcttcatagttaacaccatcctgaagatcccctcagctgagggcaag

SEQ ID NO: 677092 - DNA, 120 bp, Artificial Sequence
  ENSG00000186306_5 (sequence is synthesized)
aaggcctttgtcacctgtgcctcacatctcactgtggtctttgtccactatggctgtgcctctatcatctatctgcggcccaagtccaagtctgcctcagacaaggatcagttggtggca

SEQ ID NO: 677093 - DNA, 120 bp, Artificial Sequence
  ENSG00000186306_6 (sequence is synthesized)
gtgacctacacagtggttactcccttacttaatcctcttgtctacagtctgaggaacaaagaggtaaaaactgcattgaaaagagttcttggaatgcctgtggcaaccaagatgagctaa

SEQ ID NO: 677094 - DNA, 120 bp, Artificial Sequence
  ENSG00000186310_0 (sequence is synthesized)
atactgcgccattcggctgcggtacatctcggcactctagctgcagccgggagaggccttgccgccaccgctgtcgcccaagcctccactgccgctgccacctcagcgccggcctctgca

SEQ ID NO: 677095 - DNA, 120 bp, Artificial Sequence
  ENSG00000186310_1 (sequence is synthesized)
tccccagctccagctccgctctgcgccgctgctgccatcgccgctgccacctccgcagcccgggcctccgccgccgccactcaagcatccgtgagtcattttctgcccatctctggtcgc

SEQ ID NO: 677096 - DNA, 120 bp, Artificial Sequence
  ENSG00000186310_2 (sequence is synthesized)
gcggtctccctggtagagtttgtaggcttgcaagatggcagaagcagattttaaaatggtctcggaacctgtcgcccatggggttgccgaagaggagatggctagctcgactagtgattc

SEQ ID NO: 677097 - DNA, 120 bp, Artificial Sequence
  ENSG00000186310_3 (sequence is synthesized)
tggggaagaatctgacagcagtagctctagcagcagcactagtgacagcagcagcagcagcagcactagtggcagcagcagcggcagcggcagcagcagcagcagcagcggcagcactag

SEQ ID NO: 677098 - DNA, 120 bp, Artificial Sequence
  ENSG00000186310_4 (sequence is synthesized)
cagccgcagccgcttgtatagaaagaagagggtacctgagccttccagaagggcgcggcgggccccgttgggaacaaatttcgtggataggctgcctcaggcagttagaaatcgtgtgca

SEQ ID NO: 677099 - DNA, 120 bp, Artificial Sequence
  ENSG00000186310_5 (sequence is synthesized)
agcgcttagaaacattcaagatgaatgtgacaaggtagataccctgttcttaaaagcaattcatgatcttgaaagaaaatatgctgaactcaacaagcctctgtatgataggcggtttca

SEQ ID NO: 677100 - DNA, 120 bp, Artificial Sequence
  ENSG00000186310_6 (sequence is synthesized)
aatcatcaatgcagaatacgagcctacagaagaagaatgtgaatggaattcagaggatgaggagttcagcagtgatgaggaggtgcaggataacacccctagtgaaatgcctcccttaga

SEQ ID NO: 677101 - DNA, 120 bp, Artificial Sequence
  ENSG00000186310_7 (sequence is synthesized)
gggtgaggaagaagaaaaccctaaagaaaacccagaggtgaaagctgaagagaaggaagttcctaaagaaattcctgaggtgaaggatgaagaaaaggaagttcctaaagaaattcctga

SEQ ID NO: 677102 - DNA, 120 bp, Artificial Sequence
  ENSG00000186310_8 (sequence is synthesized)
ggtaaaggctgaagaaaaagcagattctaaagactgtatggaggcaacccctgaagtaaaagaagatcctaaagaagtcccccaggtaaaggcagatgataaagaacagcctaaagcaac

SEQ ID NO: 677103 - DNA, 120 bp, Artificial Sequence
  ENSG00000186310_9 (sequence is synthesized)
agaggctaaggcaagggctgcagtaagagagactcataaaagagttcctgaggaaaggcttcaggacagtgtagatcttaaaagagctaggaagggaaagcctaaaagagaagaccctaa

SEQ ID NO: 677104 - DNA, 120 bp, Artificial Sequence
  ENSG00000186310_10 (sequence is synthesized)
aggcattcctgactattggctgattgttttaaagaatgttgacaagctcgggcctatgattcagaagtatgatgagcccattctgaagttcttgtcggatgttagcctgaagttctcaaa

SEQ ID NO: 677105 - DNA, 120 bp, Artificial Sequence
  ENSG00000186310_11 (sequence is synthesized)
gcctgtaagttacacctttgaatttcattttctacccaacccatacttcagaaatgaggtgctggtgaagacatatataataaaggcaaaaccagatcacaatgatcccttcttttcttg

SEQ ID NO: 677106 - DNA, 120 bp, Artificial Sequence
  ENSG00000186310_12 (sequence is synthesized)
gggatgggaaattgaagattgcaaaggctgcaagatagactggagaagaggaaaagatgttactgtgacaactacccagagtcgcacaactgctactggagaaattgaaatccagccaag

SEQ ID NO: 677107 - DNA, 120 bp, Artificial Sequence
  ENSG00000186310_13 (sequence is synthesized)
agtggttcctaatgcatcattcttcaacttctttagtcctcctgagattcctatgattgggaagctggaaccacgagaagatgctatcctggatgaggactttgaaattgggcagatttt

SEQ ID NO: 677108 - DNA, 120 bp, Artificial Sequence
  ENSG00000186310_14 (sequence is synthesized)
acatgataatgtcatcctgaaatcaatctattactatactggagaagtcaatggtacctactatcaatttggcaaacattatggaaacaagaaatacagaaaataagtcaatctgaaaga

SEQ ID NO: 677109 - DNA, 120 bp, Artificial Sequence
  ENSG00000186310_15 (sequence is synthesized)
tttttcaagaatcttaaaatctcaagaagtgaagcagattcatacagccttgaaaaaagtaaaaccctgacctgtaacctgaacactattattccttatagtcaagtttttgtggtttct

SEQ ID NO: 677110 - DNA, 120 bp, Artificial Sequence
  ENSG00000186310_16 (sequence is synthesized)
tggtagtctatattttaaaaatagtcctaaaaagtgtctaagtgccagtttattctatctaggctgttgtagtataatattcttcaaaatatgtaagctgttgtcaattatctaaagcat

SEQ ID NO: 677111 - DNA, 120 bp, Artificial Sequence
  ENSG00000186310_17 (sequence is synthesized)
gttagtttggtgctacacagtgttgatttttgtgatgtcctttggtcatgtttctgttagactgtagctgtgaaactgtcagaattgttaactgaaacaaatatttgcttgaaaaaaaaa

SEQ ID NO: 677112 - DNA, 120 bp, Artificial Sequence
  ENSG00000186310_18 (sequence is synthesized)
gttcatgaagtaccaatgcaagtgttttatttttttcttttttccagcccataagactaagggtttaaatctgcttgcactagctgtgccttcattagtttgctatagaaatccagtact

SEQ ID NO: 677113 - DNA, 120 bp, Artificial Sequence
  ENSG00000186310_19 (sequence is synthesized)
tatagtaaataaaacagtgtattttgaagtttgactgcttgaaaaagattagcatacatctaatgtgaaaagaccacatttgattcaactgagaccttgtgtatgtgacatatagtggcc

SEQ ID NO: 677114 - DNA, 120 bp, Artificial Sequence
  ENSG00000186310_20 (sequence is synthesized)
tataaatttaatcataatgatgttattgtttaccactgaggtgttaatataacatagtatttttgaaaaagtttcttcatcttatattgtgtaattgtaaactaaagataccgtgttttc

SEQ ID NO: 677115 - DNA, 120 bp, Artificial Sequence
  ENSG00000186310_21 (sequence is synthesized)
tttgtattgtgttctaccttccctttcactgaaaatgatcacttcatttgatactgtttttcatgttcttgtattgcaacctaaaataaataaatattaaagtgtgttatactataaaaa

SEQ ID NO: 677116 - DNA, 120 bp, Artificial Sequence
  ENSG00000186314_0 (sequence is synthesized)
cgtggccggtgcgcggggcccgcggcgcgcggggatgggggtctcggtggatgtgcaccaggtgtacaagtaccccttcgagcaggtggtcgccagctttctccgaaagtaccccaaccc

SEQ ID NO: 677117 - DNA, 120 bp, Artificial Sequence
  ENSG00000186314_1 (sequence is synthesized)
catggataaaaatgtcatctcagtaaaaatcatggaggaaaaaagagatgaatcaacaggggtcatctacagaaagaggattgcaatctgtcagaacgtggttccagaaattttaaggaa

SEQ ID NO: 677118 - DNA, 120 bp, Artificial Sequence
  ENSG00000186314_2 (sequence is synthesized)
ggtgagcattttgaaagtacctaatatccaattagaagaggagtcatggctcaatcctcgggaaagaaacatggccatacggagtcactgccttacgtggacacagtatgcatccatgaa

SEQ ID NO: 677119 - DNA, 120 bp, Artificial Sequence
  ENSG00000186314_3 (sequence is synthesized)
ggaaagtatggaaaacccaaattggacagagttcattcaaagaggcaggatttcaatcacaggggttggatttctcaactgtgttttagaaacttttgccagcacattcttacgacaggg

SEQ ID NO: 677120 - DNA, 120 bp, Artificial Sequence
  ENSG00000186314_4 (sequence is synthesized)
agcccagaagggaattagaatcatggagatgctgctaaaggaacagtgtggtgcccccttagctgaataaagaatcatcaaatcacttcttggccacagcacatcacagacacagtttct

SEQ ID NO: 677121 - DNA, 120 bp, Artificial Sequence
  ENSG00000186314_5 (sequence is synthesized)
ggaatacaggtttgaggatacagtgttggcagcttcaagaagagaagaccttcttgccaggacataaaatgataccctcctctgggagcctgcttcgaatagtgggactcagggagataa

SEQ ID NO: 677122 - DNA, 120 bp, Artificial Sequence
  ENSG00000186314_6 (sequence is synthesized)
gtggtgcccccttagctgaataaagaatcatcagagagctgtatccatgtctacttatttatttatttattttttttttgagaatcacttcttggccacagcacatcacagacacagttt

SEQ ID NO: 677123 - DNA, 120 bp, Artificial Sequence
  ENSG00000186314_7 (sequence is synthesized)
aaccaataagggagttgaactggtacctgattcacgggtggactggaacaaacaggaatgtaccagacctatgttgaagctaagccgtatttataacaatgtttaagattctcagaaatc

SEQ ID NO: 677124 - DNA, 120 bp, Artificial Sequence
  ENSG00000186314_8 (sequence is synthesized)
aggagatttttatcctatccataagtaatatgtaactgccataagtatagcttttagaatgtaatatgtaaactgtgatttggtcctctggaaaaaaaaaaatgaaatgaagagtgggaa

SEQ ID NO: 677125 - DNA, 120 bp, Artificial Sequence
  ENSG00000186314_9 (sequence is synthesized)
ggcagtttcttttctgctaattcgttctgtgatggtgagcaagcaaatcattaacctctctgttttttattgggcaaatggggataatcaggcacaggtctttccgccaatgcgttatga

SEQ ID NO: 677126 - DNA, 120 bp, Artificial Sequence
  ENSG00000186314_10 (sequence is synthesized)
tgattaaagaaggtaattttgtgcagggttttaagtcaacagacagacctgggtttgaatccaagtgctggcacctacttgctcagtgatcatgaacacaattttaaatctttctgaatc

SEQ ID NO: 677127 - DNA, 120 bp, Artificial Sequence
  ENSG00000186314_11 (sequence is synthesized)
tcatttaaaaaaatttgtgaaacaagatgatagaattaattttgtgagattgttggactgatttgagatcatgcctatgaagtacctagcacactgcctagtacatagtagaagtccagg

SEQ ID NO: 677128 - DNA, 120 bp, Artificial Sequence
  ENSG00000186314_12 (sequence is synthesized)
aaatggaagccattattatgtaaaacattttgcaaaggtactttttaactgtaacgtaaagtggtactactgtttgaaacttagatggcagtagtttgcatttctcgtgatcagaagcca

SEQ ID NO: 677129 - DNA, 120 bp, Artificial Sequence
  ENSG00000186314_13 (sequence is synthesized)
gatcagaagccaaaatataaatacatactacctaaaaaatcttgaagagaggtaataatttgaaattcatcttcttaagataaaaatcagggcagggtgtggtggcttatgcctgtaatc

SEQ ID NO: 677130 - DNA, 120 bp, Artificial Sequence
  ENSG00000186314_14 (sequence is synthesized)
ttatttaaaggatgcagaagaaaaattagcataggatgcacagtggagagatcagcagaaacacataggtttgtggccccaaagctcaccagcaaataatgtctgagtgagagaagggca

SEQ ID NO: 677131 - DNA, 120 bp, Artificial Sequence
  ENSG00000186314_15 (sequence is synthesized)
ggagctggctgcatgagaccacctcatctgagtcaggttgcagctggaagctggatggacagatgcaaattttggaattttctcctggttgactgctgtgcttagagttttgatccatca

SEQ ID NO: 677132 - DNA, 120 bp, Artificial Sequence
  ENSG00000186314_16 (sequence is synthesized)
gtggagggaaattgagtgaaaatgatccacatgccaatctgggctggcatctcatcgcttagcccagcgtttgtctcacatcttgtgtgtaatgccagcaactaaatctccaagctcgat

SEQ ID NO: 677133 - DNA, 120 bp, Artificial Sequence
  ENSG00000186314_17 (sequence is synthesized)
ggaattagaatcatggagatgctgctaaaggaacagtgtggtgcccccttagctgaataaagaatcatcacttataaatggggaaataaagactggaaaatgtatgtgatttgctcaaca

SEQ ID NO: 677134 - DNA, 120 bp, Artificial Sequence
  ENSG00000186314_18 (sequence is synthesized)
tcaaacagtcatcaagagcctgtgttaacatctggcgtggatccaaaacccatgttctttaccgtgtcgtcaaaaatgttctggaggccattgcaagcttctccctccacacccctcctc

SEQ ID NO: 677135 - DNA, 120 bp, Artificial Sequence
  ENSG00000186314_19 (sequence is synthesized)
agatgggctctttcttctggaactgaatcctcagcagaatgacaaagaaagactaaacaatgatgactcaaatgaattgatcctttgattccacatcagctccttcatgagactgggaag

SEQ ID NO: 677136 - DNA, 120 bp, Artificial Sequence
  ENSG00000186314_20 (sequence is synthesized)
cagttcctttaccttctttgttgtcccattgtggagctggctcctccagctctcccagcaattctatgggaatcattctccagtgatttctctttttggatggcctaagttggattatgt

SEQ ID NO: 677137 - DNA, 120 bp, Artificial Sequence
  ENSG00000186314_21 (sequence is synthesized)
gactcatgagcagacataatgagaaaaacatatagttaataaacaaatatatgcaaaaataatcaacctcaaaattattacataaattcaaatcaaagtaaaactaaagtggcatttatg

SEQ ID NO: 677138 - DNA, 120 bp, Artificial Sequence
  ENSG00000186314_22 (sequence is synthesized)
gctcattaaattaaaaatatgccaatgaagagtatgtgaaaatttggagcatacttataatctaattaaaagaaataatcagaatgaataataatgtatagtatgatgacaactatttaa

SEQ ID NO: 677139 - DNA, 120 bp, Artificial Sequence
  ENSG00000186314_23 (sequence is synthesized)
cctttgcaggagctgttattgttgtcctaatattatggatgaggaaaatacagagaccccaattgtccactcttatagttttcaaactctattctcaagggagcttaggcttccatgaaa

SEQ ID NO: 677140 - DNA, 120 bp, Artificial Sequence
  ENSG00000186314_24 (sequence is synthesized)
gtgattcagaagccatgttggagttctaaggtcctgtgtgctctattttaagtagagcttttccattttaatctgtcctctatggtattccatataacatttatatcttctattttcttt

SEQ ID NO: 677141 - DNA, 120 bp, Artificial Sequence
  ENSG00000186314_25 (sequence is synthesized)
ccttaatagcattatttttaaaacttcatgtcaaaacccattgcttatgcatttttatgtgcttattgcagtgctcagtataaagcagttgctcctaagtgttttattattgttattaat

SEQ ID NO: 677142 - DNA, 120 bp, Artificial Sequence
  ENSG00000186314_26 (sequence is synthesized)
tacgatgataattatactcatttatttccagattttactcaggactttttgtataagtttacctcattttgttttgtgggatagaattaaccgctggtgtaaagaaccattgttatgacc

SEQ ID NO: 677143 - DNA, 120 bp, Artificial Sequence
  ENSG00000186314_27 (sequence is synthesized)
ctcagagacttcctggcaatggacccttgttttcatttttgcatgtctaggttcaaggatgaacctgtactaggaggtgttcatctgggaggctgagggcggtgaatgaatattcagtac

SEQ ID NO: 677144 - DNA, 120 bp, Artificial Sequence
  ENSG00000186314_28 (sequence is synthesized)
cgttctgtacaccatagacatactgttgtgattgatgatgtgttcttgctccagttgaggtggttcctggcacatattcagactggtccagcctctttaaacctggacttgaagggagta

SEQ ID NO: 677145 - DNA, 120 bp, Artificial Sequence
  ENSG00000186314_29 (sequence is synthesized)
gttgaacttccggaagatcttatgtcacctttactcactcagacattattgcaaatttttctgctatattgcaatttatgcgtttgtaaaaactcccatgttctgcagcattgcattcta

SEQ ID NO: 677146 - DNA, 120 bp, Artificial Sequence
  ENSG00000186314_30 (sequence is synthesized)
aaaatagtggaactgatgagaaaagtaatttcattgccatgtttcttactgagttgactttttgtgcatcctttaaactctgtatgatgataatagtaataataaattgaatttttttat

SEQ ID NO: 677147 - DNA, 120 bp, Artificial Sequence
  ENSG00000186314_31 (sequence is synthesized)
gctgctcagttaagtctttgatgggtgtgatcctgattcagcttgatcaattctgcagtcatactggattgtgtttgaaaaggtgtccagaaaaacctggccatctgcctcctgtcttcc

SEQ ID NO: 677148 - DNA, 120 bp, Artificial Sequence
  ENSG00000186314_32 (sequence is synthesized)
gtgcaccaggtgtacaagtaccccttcgagcaggtggtcgccagctttctccgaaaggaagagcctccgggaatcccagctcgtgagctccgtggagttgcagatgaccgacgtgtggag

SEQ ID NO: 677149 - DNA, 120 bp, Artificial Sequence
  ENSG00000186314_33 (sequence is synthesized)
tccttattaaacagctgtgggacatcgtgcaggttgcttactctctttgtgccttagtttgctaatctgtaaaatggggaaaataatagtaccgactcatagagttgttgtgaggatcca

SEQ ID NO: 677150 - DNA, 120 bp, Artificial Sequence
  ENSG00000186314_34 (sequence is synthesized)
tgtaatcacagttgtaacattgagtaatttttaatagtcatgaaaaggaacagcattttctgatgtaaaggagcgttagaaacttcctactccttttacctcagaaccttctgaggaaga

SEQ ID NO: 677151 - DNA, 120 bp, Artificial Sequence
  ENSG00000186314_35 (sequence is synthesized)
aagctctttcttatccaacctcacttttagcagatgccactggagatactttgtctctctgtcttgtgaagaactcttaatggacatagagatattgtgcagttactttaaagatacttt

SEQ ID NO: 677152 - DNA, 120 bp, Artificial Sequence
  ENSG00000186314_36 (sequence is synthesized)
actttaaccacaaaacctgcttctgaaccaactgaggaagacacctcaggtactgtgactctaattctggggcagttgttgaataaaatatgccatgactttatggatttattttctctc

SEQ ID NO: 677153 - DNA, 120 bp, Artificial Sequence
  ENSG00000186318_0 (sequence is synthesized)
acaagtctttccgcctccccagcccgcccgggagctgcgagccgcgagctggattatggtggcctgagcagccaacgcagccgcaggagcccggagcccttgcccctgcccgcgccgccg

SEQ ID NO: 677154 - DNA, 80 bp, Artificial Sequence
  ENSG00000186318_1 (sequence is synthesized)
ctcccagccccgccgggagcccgcgcccgctgcccaggctggccgccgccgtgccgatgtagcgggctccggatcccagc

SEQ ID NO: 677155 - DNA, 120 bp, Artificial Sequence
  ENSG00000186318_2 (sequence is synthesized)
atcccagcctctcccctgctcccgtgctctgcggatctcccctgaccgctctccacagcccggacccgggggctggcccagggccctgcaggccctggcgtcctgatgcccccaagctcc

SEQ ID NO: 677156 - DNA, 120 bp, Artificial Sequence
  ENSG00000186318_3 (sequence is synthesized)
ctctcctgagaagccaccagcaccacccagacttgggggcaggcgccagggacggacgtgggccagtgcgagcccagagggcccgaaggccggggcccaccatggcccaagccctgccct

SEQ ID NO: 677157 - DNA, 120 bp, Artificial Sequence
  ENSG00000186318_4 (sequence is synthesized)
gaaggccggggcccaccatggcccaagccctgccctggctcctgctgtggatgggcgcgggagtgctgcctgcccacggcacccagcacggcatccggctgcccctgcgcagcggcctgg

SEQ ID NO: 677158 - DNA, 120 bp, Artificial Sequence
  ENSG00000186318_5 (sequence is synthesized)
ccgacgaagagcccgaggagcccggccggaggggcagctttgtggagatggtggacaacctgaggggcaagtcggggcagggctactacgtggagatgaccgtgggcagccccccgcaga

SEQ ID NO: 677159 - DNA, 120 bp, Artificial Sequence
  ENSG00000186318_6 (sequence is synthesized)
cgctcaacatcctggtggatacaggcagcagtaactttgcagtgggtgctgccccccaccccttcctgcatcgctactaccagaggcagctgtccagcacataccgggacctccggaagg

SEQ ID NO: 677160 - DNA, 120 bp, Artificial Sequence
  ENSG00000186318_7 (sequence is synthesized)
gtgtgtatgtgccctacacccagggcaagtgggaaggggagctgggcaccgacctggtaagcatcccccatggccccaacgtcactgtgcgtgccaacattgctgccatcactgaatcag

SEQ ID NO: 677161 - DNA, 120 bp, Artificial Sequence
  ENSG00000186318_8 (sequence is synthesized)
acaagttcttcatcaacggctccaactgggaaggcatcctggggctggcctatgctgagattgccaggcctgacgactccctggagcctttctttgactctctggtaaagcagacccacg

SEQ ID NO: 677162 - DNA, 120 bp, Artificial Sequence
  ENSG00000186318_9 (sequence is synthesized)
ttcccaacctcttctccctgcagctttgtggtgctggcttccccctcaaccagtctgaagtgctggcctctgtcggagggagcatgatcattggaggtatcgaccactcgctgtacacag

SEQ ID NO: 677163 - DNA, 120 bp, Artificial Sequence
  ENSG00000186318_10 (sequence is synthesized)
gcagtctctggtatacacccatccggcgggagtggtattatgaggtgatcattgtgcgggtggagatcaatggacaggatctgaaaatggactgcaaggagtacaactatgacaagagca

SEQ ID NO: 677164 - DNA, 120 bp, Artificial Sequence
  ENSG00000186318_11 (sequence is synthesized)
ttgtggacagtggcaccaccaaccttcgtttgcccaagaaagtgtttgaagctgcagtcaaatccatcaaggcagcctcctccacggagaagttccctgatggtttctggctaggagagc

SEQ ID NO: 677165 - DNA, 120 bp, Artificial Sequence
  ENSG00000186318_12 (sequence is synthesized)
agctggtgtgctggcaagcaggcaccaccccttggaacattttcccagtcatctcactctacctaatgggtgaggttaccaaccagtccttccgcatcaccatccttccgcagcaatacc

SEQ ID NO: 677166 - DNA, 120 bp, Artificial Sequence
  ENSG00000186318_13 (sequence is synthesized)
tgcggccagtggaagatgtggccacgtcccaagacgactgttacaagtttgccatctcacagtcatccacgggcactgttatgggagctgttatcatggagggcttctacgttgtctttg

SEQ ID NO: 677167 - DNA, 120 bp, Artificial Sequence
  ENSG00000186318_14 (sequence is synthesized)
atcgggcccgaaaacgaattggctttgctgtcagcgcttgccatgtgcacgatgagttcaggacggcagcggtggaaggcccttttgtcaccttggacatggaagactgtggctacaaca

SEQ ID NO: 677168 - DNA, 120 bp, Artificial Sequence
  ENSG00000186318_15 (sequence is synthesized)
ttccacagacagatgagtcaaccctcatgaccatagcctatgtcatggctgccatctgcgccctcttcatgctgccactctgcctcatggtgtgtcagtggcgctgcctccgctgcctgc

SEQ ID NO: 677169 - DNA, 120 bp, Artificial Sequence
  ENSG00000186318_16 (sequence is synthesized)
gccagcagcatgatgactttgctgatgacatctccctgctgaagtgaggaggcccatgggcagaagatagagattcccctggaccacacctccgtggttcactttggtcacaagtaggag

SEQ ID NO: 677170 - DNA, 120 bp, Artificial Sequence
  ENSG00000186318_17 (sequence is synthesized)
acacagatggcacctgtggccagagcacctcaggaccctccccacccaccaaatgcctctgccttgatggagaaggaaaaggctggcaaggtgggttccagggactgtacctgtaggaaa

SEQ ID NO: 677171 - DNA, 120 bp, Artificial Sequence
  ENSG00000186318_18 (sequence is synthesized)
cagaaaagagaagaaagaagcactctgctggcgggaatactcttggtcacctcaaatttaagtcgggaaattctgctgcttgaaacttcagccctgaacctttgtccaccattcctttaa

SEQ ID NO: 677172 - DNA, 120 bp, Artificial Sequence
  ENSG00000186318_19 (sequence is synthesized)
attctccaacccaaagtattcttcttttcttagtttcagaagtactggcatcacacgcaggttaccttggcgtgtgtccctgtggtaccctggcagagaagagaccaagcttgtttccct

SEQ ID NO: 677173 - DNA, 120 bp, Artificial Sequence
  ENSG00000186318_20 (sequence is synthesized)
gctggccaaagtcagtaggagaggatgcacagtttgctatttgctttagagacagggactgtataaacaagcctaacattggtgcaaagattgcctcttgaattaaaaaaaaaaactaga

SEQ ID NO: 677174 - DNA, 120 bp, Artificial Sequence
  ENSG00000186318_21 (sequence is synthesized)
ttgactatttatacaaatgggggcggctggaaagaggagaaggagagggagtacaaagacagggaatagtgggatcaaagctaggaaaggcagaaacacaaccactcaccagtcctagtt

SEQ ID NO: 677175 - DNA, 120 bp, Artificial Sequence
  ENSG00000186318_22 (sequence is synthesized)
ttagacctcatctccaagatagcatcccatctcagaagatgggtgttgttttcaatgttttcttttctgtggttgcagcctgaccaaaagtgagatgggaagggcttatctagccaaaga

SEQ ID NO: 677176 - DNA, 120 bp, Artificial Sequence
  ENSG00000186318_23 (sequence is synthesized)
gctcttttttagctctcttaaatgaagtgcccactaagaagttccacttaacacatgaatttctgccatattaatttcattgtctctatctgaaccaccctttattctacatatgatagg

SEQ ID NO: 677177 - DNA, 120 bp, Artificial Sequence
  ENSG00000186318_24 (sequence is synthesized)
cagcactgaaatatcctaaccccctaagctccaggtgccctgtgggagagcaactggactatagcagggctgggctctgtcttcctggtcataggctcactctttcccccaaatcttcct

SEQ ID NO: 677178 - DNA, 120 bp, Artificial Sequence
  ENSG00000186318_25 (sequence is synthesized)
ctggagctttgcagccaaggtgctaaaaggaataggtaggagacctcttctatctaatccttaaaagcataatgttgaacattcattcaacagctgatgccctataacccctgcctggat

SEQ ID NO: 677179 - DNA, 120 bp, Artificial Sequence
  ENSG00000186318_26 (sequence is synthesized)
tccatttatttgactaaagcatcacacagtggcactagcattataccaagagtatgagaaatacagtgctttatggctctaacattactgccttcagtatcaaggctgcctggagaaagg

SEQ ID NO: 677180 - DNA, 120 bp, Artificial Sequence
  ENSG00000186318_27 (sequence is synthesized)
atggcagcctcagggcttccttatgtcctccaccacaagagctccttgatgaaggtcatctttttcccctatcctgttcttcccctccccgctcctaatggtacgtgggtacccaggctg

SEQ ID NO: 677181 - DNA, 120 bp, Artificial Sequence
  ENSG00000186318_28 (sequence is synthesized)
gttcttgggctaggtagtggggaccaagttcattacctccctatcagttctagcatagtaaactacggtaccagtgttagtgggaagagctgggttttcctagtatacccactgcatcct

SEQ ID NO: 677182 - DNA, 120 bp, Artificial Sequence
  ENSG00000186318_29 (sequence is synthesized)
actcctacctggtcaacccgctgcttccaggtatgggacctgctaagtgtggaattacctgataagggagagggaaatacaaggagggcctctggtgttcctggcctcagccagctgccc

SEQ ID NO: 677183 - DNA, 120 bp, Artificial Sequence
  ENSG00000186318_30 (sequence is synthesized)
acaagccataaaccaataaaacaagaatactgagtcagttttttatctgggttctcttcattcccactgcacttggtgctgctttggctgactgggaacaccccataactacagagtctg

SEQ ID NO: 677184 - DNA, 120 bp, Artificial Sequence
  ENSG00000186318_31 (sequence is synthesized)
acaggaagactggagactgtccacttctagctcggaacttactgtgtaaataaactttcagaactgctaccatgaagtgaaaatgccacattttgctttataatttctacccatgttggg

SEQ ID NO: 677185 - DNA, 120 bp, Artificial Sequence
  ENSG00000186318_32 (sequence is synthesized)
aaaaactggctttttcccagccctttccagggcataaaactcaaccccttcgatagcaagtcccatcagcctattatttttttaaagaaaacttgcacttgtttttctttttacagttac

SEQ ID NO: 677186 - DNA, 120 bp, Artificial Sequence
  ENSG00000186318_33 (sequence is synthesized)
ttccttcctgccccaaaattataaactctaagtgtaaaaaaaagtcttaacaacagcttcttgcttgtaaaaatatgtattatacatctgtatttttaaattctgctcctgaaaaatgac

SEQ ID NO: 677187 - DNA, 120 bp, Artificial Sequence
  ENSG00000186318_34 (sequence is synthesized)
tgtcccattctccactcactgcatttggggcctttcccattggtctgcatgtcttttatcattgcaggccagtggacagagggagaagggagaacaggggtcgccaacacttgtgttgct

SEQ ID NO: 677188 - DNA, 120 bp, Artificial Sequence
  ENSG00000186318_35 (sequence is synthesized)
ttctgactgatcctgaacaagaaagagtaacactgaggcgctcgctcccatgcacaactctccaaaacacttatcctcctgcaagagtgggctttccagggtctttactgggaagcagtt

SEQ ID NO: 677189 - DNA, 120 bp, Artificial Sequence
  ENSG00000186318_36 (sequence is synthesized)
aagccccctcctcaccccttccttttttctttctttactcctttggcttcaaaggattttggaaaagaaacaatatgctttacactcattttcaatttctaaatttgcaggggatactga

SEQ ID NO: 677190 - DNA, 120 bp, Artificial Sequence
  ENSG00000186318_37 (sequence is synthesized)
aaaatacggcaggtggcctaaggctgctgtaaagttgaggggagaggaaatcttaagattacaagataaaaaacgaatcccctaaacaaaaagaacaatagaactggtcttccattttgc

SEQ ID NO: 677191 - DNA, 120 bp, Artificial Sequence
  ENSG00000186318_38 (sequence is synthesized)
cacctttcctgttcatgacagctactaacctggagacagtaacatttcattaaccaaagaaagtgggtcacctgacctctgaagagctgagtactcaggccactccaatcaccctacaag

SEQ ID NO: 677192 - DNA, 120 bp, Artificial Sequence
  ENSG00000186318_39 (sequence is synthesized)
atgccaaggaggtcccaggaagtccagctccttaaactgacgctagtcaataaacctgggcaagtgaggcaagagaaatgaggaagaatccatctgtgaggtgataggcaaggatgaaag

SEQ ID NO: 677193 - DNA, 120 bp, Artificial Sequence
  ENSG00000186318_40 (sequence is synthesized)
acaaagaaggaaaagagtatcaaaggcagaaaggagatcatttagttgggtctgaaaggaaaagtctttgctatccgacatgtactgctagtacctgtaagcattttaggtcccagaatg

SEQ ID NO: 677194 - DNA, 120 bp, Artificial Sequence
  ENSG00000186318_41 (sequence is synthesized)
gaaaaaaaaatcagctattggtaatataataatgtcctttccctggagtcagtttttttaaaaagttaactcttagtttttacttgtttaattctaaaagagaagggagctgaggccatt

SEQ ID NO: 677195 - DNA, 120 bp, Artificial Sequence
  ENSG00000186318_42 (sequence is synthesized)
ccctgtaggagtaaagataaaaggataggaaaagattcaaagctctaatagagtcacagctttcccaggtataaaacctaaaattaagaagtacaataagcagaggtggaaaatgatcta

SEQ ID NO: 677196 - DNA, 120 bp, Artificial Sequence
  ENSG00000186318_43 (sequence is synthesized)
gttcctgatagctacccacagagcaagtgatttataaatttgaaatccaaactactttcttaatatcactttggtctccatttttcccaggacaggaaatatgtccccccctaactttct

SEQ ID NO: 677197 - DNA, 120 bp, Artificial Sequence
  ENSG00000186318_44 (sequence is synthesized)
tgcttcaaaaattaaaatccagcatcccaagatcattctacaagtaattttgcacagacatctcctcaccccagtgcctgtctggagctcacccaaggtcaccaaacaacttggttgtga

SEQ ID NO: 677198 - DNA, 120 bp, Artificial Sequence
  ENSG00000186318_45 (sequence is synthesized)
accaactgccttaaccttctgggggagggggattagctagactaggagaccagaagtgaatgggaaagggtgaggacttcacaatgttggcctgtcagagcttgattagaagccaagaca

SEQ ID NO: 677199 - DNA, 120 bp, Artificial Sequence
  ENSG00000186318_46 (sequence is synthesized)
gtggcagcaaaggaagacttggcccaggaaaaacctgtgggttgtgctaatttctgtccagaaaatagggtggacagaagcttgtggggtacatggaggaattgggacctggttatgttg

SEQ ID NO: 677200 - DNA, 120 bp, Artificial Sequence
  ENSG00000186318_47 (sequence is synthesized)
ttattctcggactgtgaattttggtgatgtaaaacagaatattctgtaaacctaatgtctgtataaataatgagcgttaacacagtaaaatattcaataagaagtcaaactactagggtt

SEQ ID NO: 677201 - DNA, 120 bp, Artificial Sequence
  ENSG00000186318_48 (sequence is synthesized)
acttttttttcctcaatcagagtctcattttatccatttggagtagagtggctaaaacaatactgaggcttctggaggctttcggtaagcaaggcatctggttggacagtgggtgagcac

SEQ ID NO: 677202 - DNA, 120 bp, Artificial Sequence
  ENSG00000186318_49 (sequence is synthesized)
caggctttaaatctgcatacatgagccttaaggaaatggactagaggctgagccaaaccaaagcagaatggccttagagcaacagcaggttcctaggtggtttttatattgtatttgaaa

SEQ ID NO: 677203 - DNA, 120 bp, Artificial Sequence
  ENSG00000186318_50 (sequence is synthesized)
acagccctgggcagggatatcataatttcaaggccaaactaaacatcatcttccctacaatctgcatcccccaaaggaattgcaagatgagggggaacagactgtttctgcataatatac

SEQ ID NO: 677204 - DNA, 120 bp, Artificial Sequence
  ENSG00000186318_51 (sequence is synthesized)
atagtttcatttacgaacattggaatacagactttctatacacacattacctatataataaaaatgtacatggcatgagtatatgtcactgtataaatatagagttttagaaatcttgaa

SEQ ID NO: 677205 - DNA, 67 bp, Artificial Sequence
  ENSG00000186318_52 (sequence is synthesized)
cctgaccaacatggtgaaaccccatctaccccatctctactgaaaacacagaaattagccgggcatg

SEQ ID NO: 677206 - DNA, 61 bp, Artificial Sequence
  ENSG00000186318_53 (sequence is synthesized)
tcgtatctatgaatctgtgaacctatcaatactgtcctgtttgcattgccagggctcctgc

SEQ ID NO: 677207 - DNA, 120 bp, Artificial Sequence
  ENSG00000186318_54 (sequence is synthesized)
cctatcaatactgtcctgtttgcattgccagggctcctgctaacccttcctctgccaaatctcagtgccttaagatggtctttcccaaggagcatcccccaagccttcaaatttgccttc

SEQ ID NO: 677208 - DNA, 120 bp, Artificial Sequence
  ENSG00000186318_55 (sequence is synthesized)
cagtttagacaggaagctggcctctgcctttagggccgtatgaggactcactccttgtctctttctgccaaagcctgacgactccctggagcctttctttgactctctggtaaagcagac

SEQ ID NO: 677209 - DNA, 120 bp, Artificial Sequence
  ENSG00000186318_56 (sequence is synthesized)
ttttatcctcactttagagatgaaggaactgaggcacagaggttaacttgtccaagcaggtacacttaggaggtgccaaagccaagatgccaacccagctggggccccagcagtaacccc

SEQ ID NO: 677210 - DNA, 120 bp, Artificial Sequence
  ENSG00000186318_57 (sequence is synthesized)
acaatgcacaaagcccaggcttgttcttcacagggcctgagctcaagatctaggaatatgagcaatagataggagagcaagcctcaccaatggttcccttcatctatctgcaagcccact

SEQ ID NO: 677211 - DNA, 120 bp, Artificial Sequence
  ENSG00000186326_0 (sequence is synthesized)
ctacccggccgcccttggcagcgcctaaggcggagcgcgcggctctgcagcctgcttgccccggagttggcacccacggaggatggggaccgcaccctcagcttcgcagggagccaccgt

SEQ ID NO: 677212 - DNA, 120 bp, Artificial Sequence
  ENSG00000186326_1 (sequence is synthesized)
ggaggccagggcggtgcagagacacgacgtgtgactcggagtgcgcctggggaggatggacgagggagcgggggaccgctaacggggctccctctgcgcgccccgtccgcagaggcgcac

SEQ ID NO: 677213 - DNA, 120 bp, Artificial Sequence
  ENSG00000186326_2 (sequence is synthesized)
gtcgagggtcccgggcgggctccgtggacgttggcggtagcgccgagcgagtcacggaccatgaagagcgttcgtgccgcgcggcccaaggccgggatgggggttagccacatcctgccg

SEQ ID NO: 677214 - DNA, 120 bp, Artificial Sequence
  ENSG00000186326_3 (sequence is synthesized)
cgctgagggggaggctaacgggcgcgggcggccgggcccagccggagcccaccgcgatggcgagggaggagtgcaaggcgctgctggacgggctcaacaagacgactgcgtgctaccacc

SEQ ID NO: 677215 - DNA, 120 bp, Artificial Sequence
  ENSG00000186326_4 (sequence is synthesized)
acctggtgctgaccgtcggtggctcggcggactcgcagaacctgcggcaggagctgcaaaagacgcgccagaaggcgcaggagctggcggtgtccacctgcgcccggctgactgctgtgc

SEQ ID NO: 677216 - DNA, 120 bp, Artificial Sequence
  ENSG00000186326_5 (sequence is synthesized)
tgcgcgaccggggcctggccgccgacgagcgcgccgagttcgagcggctctgggtggccttctcgggctgcctggacctgctggaagcggacatgcgacgcgcgctggagctgggcgccg

SEQ ID NO: 677217 - DNA, 120 bp, Artificial Sequence
  ENSG00000186326_6 (sequence is synthesized)
ggccgctggtgcgcacaggtgtggctggcgcctcctccggcgtggcggcgcgcgcgctgagcacccgcagcctgcggctcgaggcggagggcgacttcgacgtcgcggacctgcgggagc

SEQ ID NO: 677218 - DNA, 120 bp, Artificial Sequence
  ENSG00000186326_7 (sequence is synthesized)
tcgacgtcgcggacctgcgggagctggagcgcgaggtccttcaggtgggcgagatgatcgacaacatggagatgaaggtcaacgtgccccgctggaccgtgcaagcccggcaggcggcgg

SEQ ID NO: 677219 - DNA, 120 bp, Artificial Sequence
  ENSG00000186326_8 (sequence is synthesized)
gcgccgagctcctgtccacggtcagcgccggcccctcctcggtcgtgtccttgcaggagcgcggggggggttgcgaccccaggaaggccctggccgccatccttttcggcgccgtgctgc

SEQ ID NO: 677220 - DNA, 120 bp, Artificial Sequence
  ENSG00000186326_9 (sequence is synthesized)
tggcggctgtggccctagccgtgtgcgtggcgaagctgagctgacggacacccgacggccgcctgctgctgccgctccctcccctgagaaaagactcgggatgggtgtggggtctggcct

SEQ ID NO: 677221 - DNA, 120 bp, Artificial Sequence
  ENSG00000186326_10 (sequence is synthesized)
ccagtgcacatctgcctgggcaggacacggtttcctcttgctggcccgggaggagttaactttgcgccggccgtcagggcattaccgctaacgtctgcaggagctttattccctattaat

SEQ ID NO: 677222 - DNA, 120 bp, Artificial Sequence
  ENSG00000186326_11 (sequence is synthesized)
agaaaaccgtcacagtgaccctagatccctccgagttaatgagttaacacatgtgctgttggggcgtctttacagggagtccgagttcggtgcccacccctgccagcgtcgccccctttc

SEQ ID NO: 677223 - DNA, 120 bp, Artificial Sequence
  ENSG00000186326_12 (sequence is synthesized)
tgcgtgggacagtttgaaaaggtgggtggggtggagtgaagtttggagagggacgctgtttggttctatgtggttggtctgtttcccggacaagaaaaattgcaatcaaatgtcagcagc

SEQ ID NO: 677224 - DNA, 120 bp, Artificial Sequence
  ENSG00000186326_13 (sequence is synthesized)
ttttattaccttaatctttcagggcctaaatttaggagagtgtcccgagagcagttcatacaaagggctttctctaagacgcgctacagcccttcctagcagagtttatccattcgtccc

SEQ ID NO: 677225 - DNA, 120 bp, Artificial Sequence
  ENSG00000186326_14 (sequence is synthesized)
caagagcagctagaagagatttgaggtcatgacctcccactgccgctcaggggctgaccctatttaggaaaccaaagagggtgggttgaacctactctcacggacttggatccagtgcgc

SEQ ID NO: 677226 - DNA, 120 bp, Artificial Sequence
  ENSG00000186326_15 (sequence is synthesized)
acacttgcctgcggaaaagggctctccccagccacccggagatgggggtaagaggaagagcagaggcttggggtagggccacctggtgtttaaacaggcactttctccttctctggggct

SEQ ID NO: 677227 - DNA, 120 bp, Artificial Sequence
  ENSG00000186326_16 (sequence is synthesized)
tatttttgttcagaactagaccagagtgtttgaacctcctttgcaggagggctgggaatcctctttagagcacttaatcctatttatcccctggaatgtgcgtgctggccagtaggaggg

SEQ ID NO: 677228 - DNA, 120 bp, Artificial Sequence
  ENSG00000186326_17 (sequence is synthesized)
ctggctttggcagctccctgacccccgcgctgcccgcccctccggggtaatgtggcattactggcccacagaggttttgagccaatcagctctgagactgggttagaatgtaacagcttt

SEQ ID NO: 677229 - DNA, 120 bp, Artificial Sequence
  ENSG00000186326_18 (sequence is synthesized)
aacttgggatttaagaagcttttaaaaggtaataatactctgaaagaaaaatgacgtaaccacagcgtgtactatgaaagctgttattttaataaagaacgctgggccatgaactcatac

SEQ ID NO: 677230 - DNA, 120 bp, Artificial Sequence
  ENSG00000186326_19 (sequence is synthesized)
ctgccaatgagtcaaacatagtatctttatgtagatacttagattactaaatatatatttcatctacttctgaagttgatagtcttcccccccccccacttttttcttttttgagacagg

SEQ ID NO: 677231 - DNA, 120 bp, Artificial Sequence
  ENSG00000186329_0 (sequence is synthesized)
atctttgagaccaaggcctcaagccaccaaggaaaatgaagggcctctaccaggctgctggccggattcttgttactctggggatcctcagtgtatgctctggagttattgctttctttc

SEQ ID NO: 677232 - DNA, 120 bp, Artificial Sequence
  ENSG00000186329_1 (sequence is synthesized)
ctgtcttttcttacaagccttggttcacaggatggagtgttcgaattgcttgtcctatctggaatggagctttggccatcacaactggtgtgcttctactgttggcttacagagagtgga

SEQ ID NO: 677233 - DNA, 120 bp, Artificial Sequence
  ENSG00000186329_2 (sequence is synthesized)
cccagaggtacctgggggaagctactttcacctttgtgattctgagcattatgggatgtccacttcattttgcaatagccttggaatctgctctcctgggcccatattgcttctattcat

SEQ ID NO: 677234 - DNA, 120 bp, Artificial Sequence
  ENSG00000186329_3 (sequence is synthesized)
tttcagggattgcagggactaattaccttggctatgcagttacctttccttatccatatgcaaaattcccattagcctgtgtggacccaccacactacgaagagtaccacctgacacttc

SEQ ID NO: 677235 - DNA, 120 bp, Artificial Sequence
  ENSG00000186329_4 (sequence is synthesized)
aagccctagacctgtgcctaagctttaccctactctgtacatccttgacagtgttcatcaaactttctgcaagacttatccagaatggacacataaacatgcaactccctgctgggaacc

SEQ ID NO: 677236 - DNA, 120 bp, Artificial Sequence
  ENSG00000186329_5 (sequence is synthesized)
acatgcaactccctgctgggaacccaaaccctttttcaccataaaagaattggaaaaaactaaagttcatatgggaccaaaaaagagcccgcatacccaagacaatcctaagcaaaaaga

SEQ ID NO: 677237 - DNA, 120 bp, Artificial Sequence
  ENSG00000186329_6 (sequence is synthesized)
aaaaaaacaaacaaccacatcaaaaagtaggcaaaggacatggacacttctcaaaagaagacatttatgaagccaacagacacacataatcccaaatcatgctactataaagacacatgc

SEQ ID NO: 677238 - DNA, 90 bp, Artificial Sequence
  ENSG00000186329_7 (sequence is synthesized)
ggtggggaacatcacacactggggcctttcagtgggtgggatcctaatgtagatgatgagttgatgggtgtggcaaaccaacatggcaca

SEQ ID NO: 677239 - DNA, 84 bp, Artificial Sequence
  ENSG00000186329_8 (sequence is synthesized)
tgggggagggatagcattaggagaaattcctaatgtagatgatgagttgatgggtgtggcaaaccaacatggcacatatatacc

SEQ ID NO: 677240 - DNA, 120 bp, Artificial Sequence
  ENSG00000186329_9 (sequence is synthesized)
ctgggaccagaatataaaagcacacagattaatagaattataaaatttaagatgtttaaacaagctttatataaggtagttgaactcctttacctaaatgtcttattaaaatgggtactg

SEQ ID NO: 677241 - DNA, 120 bp, Artificial Sequence
  ENSG00000186329_10 (sequence is synthesized)
catctgactgggatgtttcccctttctagtactatgaagctgaaggcatgtaaatctgctcttttaggaaatgttaattaaacatgctaaatgggaactagtaaaatcacctaagcccac

SEQ ID NO: 677242 - DNA, 120 bp, Artificial Sequence
  ENSG00000186329_11 (sequence is synthesized)
gagaagaaatggcggcacgaaaagtgttgcggaggctgtggagttcccagtcccgccatgctgtaggcgttgaaaaatgatctcctcgcaccccaaaatagcacagaggaggccctgaaa

SEQ ID NO: 677243 - DNA, 120 bp, Artificial Sequence
  ENSG00000186329_12 (sequence is synthesized)
atcaggatgaaggtctcagccgatgccgctgtggctagatgacgtttggacctgattaaagaaggacaacaaaggccaatttgccatcaccaaaggagcagcttgacctggagggatgag

SEQ ID NO: 677244 - DNA, 120 bp, Artificial Sequence
  ENSG00000186329_13 (sequence is synthesized)
gcctggaggccgacagcaggactccgtcagtgattctttcagctcttgaaaatgatccctgaatccaacggagctgcatctacagaatgaaaaagtccaagaaagacactttctctcacc

SEQ ID NO: 677245 - DNA, 89 bp, Artificial Sequence
  ENSG00000186329_14 (sequence is synthesized)
aagaaagacactttctctcacctttttggagcctctagcctgccctgggaagcctggtggactggtgctgagaagagaccacggcccag

SEQ ID NO: 677246 - DNA, 120 bp, Artificial Sequence
  ENSG00000186334_0 (sequence is synthesized)
gagcctggccccacgtccaggcaccaggacctccaatccaatggtgtcttcttcctcccagtcacactgttcactttgccctacagcagcaagggctaaactaggagaggccaaaagccc

SEQ ID NO: 677247 - DNA, 120 bp, Artificial Sequence
  ENSG00000186334_1 (sequence is synthesized)
aggcaagtcctggttgggcaagcaattgcgagtgaaactgaggaccatcctgactgagatgggtctttcataagtcccccaagagccaggtgaggcatcatcaacatcagcctctcctgc

SEQ ID NO: 677248 - DNA, 120 bp, Artificial Sequence
  ENSG00000186334_2 (sequence is synthesized)
caccaccgcttccctgattcatgcacttcaggcttcagccagcagcacgcatccttggggttaggagccagcatctcaggtcagcagccatggtttctctggagaaagacccatcagagg

SEQ ID NO: 677249 - DNA, 120 bp, Artificial Sequence
  ENSG00000186334_3 (sequence is synthesized)
ctcattcagagccttaaccctgagcctctgccacctacccaccgtgttgaagatgtcattgcttggaagggactacaacagtgagctgaactccttggacaacggacctcagtcaccctc

SEQ ID NO: 677250 - DNA, 120 bp, Artificial Sequence
  ENSG00000186334_4 (sequence is synthesized)
agagagcagcagtagcattacttcagagaatgtccatcctgctggagaagctggactatcgatgatgcaaactttgatccacttgttgaaatgcaacattggcacagggctcctggggct

SEQ ID NO: 677251 - DNA, 120 bp, Artificial Sequence
  ENSG00000186334_5 (sequence is synthesized)
tcccctggccataaagaatgccggcttgttggtcggtcctgtcagccttctggccatcggggtcctcaccgtgcactgcatggtcatcctgttgaactgtgctcaacacctcagccagag

SEQ ID NO: 677252 - DNA, 120 bp, Artificial Sequence
  ENSG00000186334_6 (sequence is synthesized)
actgcagaagacttttgtgaactatggagaggccacgatgtacggccttgaaacctgcccgaacacctggctgagggcccatgcagtgtggggaaggtacactgtcagcttcttattagt

SEQ ID NO: 677253 - DNA, 120 bp, Artificial Sequence
  ENSG00000186334_7 (sequence is synthesized)
catcacccagctgggcttctgcagtgtttattttatgtttatggcagacaatttacaacagatggtggaaaaagcccacgtgacctccaacatctgccagcccagggagattctgacgct

SEQ ID NO: 677254 - DNA, 120 bp, Artificial Sequence
  ENSG00000186334_8 (sequence is synthesized)
gacccccatcctggacattcgtttctacatgctgataatcctgcccttcctgatcctgttggtgtttatccagaacctcaaggtgctgtccgtcttctcgacattggccaacatcaccac

SEQ ID NO: 677255 - DNA, 120 bp, Artificial Sequence
  ENSG00000186334_9 (sequence is synthesized)
ccttgggagcatggctctgatctttgagtatatcatggaggggattccatatcccagcaacctacccttgatggcaaactggaagaccttcttgctgttctttggtacagccatcttcac

SEQ ID NO: 677256 - DNA, 120 bp, Artificial Sequence
  ENSG00000186334_10 (sequence is synthesized)
agttttcttttgttctgtacttggggatgtccattgtcatcatcctctatatcttactggggacactgggctacatgaagtttgggtcagacacccaggccagcatcaccctcaacttgc

SEQ ID NO: 677257 - DNA, 120 bp, Artificial Sequence
  ENSG00000186334_11 (sequence is synthesized)
ccaattgctggttgtaccagtcagtcaagctgatgtactctatcggcatcttcttcacctatgccctccagttccacgtcccagctgagatcatcatcccgtttgccatctcccaagtgt

SEQ ID NO: 677258 - DNA, 120 bp, Artificial Sequence
  ENSG00000186334_12 (sequence is synthesized)
cagagagctgggcactgtttgtagacctgtctgtccgctcagccttggtctgtctaacctgtgtctcagccatcctcatcccccgcctggacttggtcatctccctggtaggctccgtga

SEQ ID NO: 677259 - DNA, 120 bp, Artificial Sequence
  ENSG00000186334_13 (sequence is synthesized)
gcagcagcgccctggctctcatcatcccagccctcctggagatcgtcatcttttactctgaggacatgagctgtgtcaccattgccaaggacatcatgattagcatcgtgggccttttag

SEQ ID NO: 677260 - DNA, 120 bp, Artificial Sequence
  ENSG00000186334_14 (sequence is synthesized)
ggtgtatatttgggacataccaagccctctatgagttgccccaacccatcagccattccatggccaactccacaggtgtccatgcataattatctgtttttattctaatagctctccctt

SEQ ID NO: 677261 - DNA, 120 bp, Artificial Sequence
  ENSG00000186334_15 (sequence is synthesized)
cctcccatccccagtttgacttccatgtggatgttatataccttcatcaaatcccaacatctctatattaattagtggcgtctttatctttccaagagaaatgcagatgagaaaagttag

SEQ ID NO: 677262 - DNA, 120 bp, Artificial Sequence
  ENSG00000186334_16 (sequence is synthesized)
cactgatgtctctcaggctacacctcttttggttttatattttttggatggccttttgtacctctgaaccaaaattagattcaactattcatattatcagcctcattttatggaaaaggg

SEQ ID NO: 677263 - DNA, 120 bp, Artificial Sequence
  ENSG00000186334_17 (sequence is synthesized)
atgccacttaccccaatagcccttgaaacagagaccaagcataaatacaaaagtaactgttttctctacactgcagtagctgcccttaaagcatcagatttagaaaagtgtatgttgggc

SEQ ID NO: 677264 - DNA, 120 bp, Artificial Sequence
  ENSG00000186334_18 (sequence is synthesized)
gaagggagttttctatttagatattctaagtagaagagtcatagacagaacaaaaacagaactcagcagtaattttgtccaaccactggctccgccactgatttcctactggccctcagg

SEQ ID NO: 677265 - DNA, 120 bp, Artificial Sequence
  ENSG00000186334_19 (sequence is synthesized)
caagttcctccccatctctcagtctatgaagtgaacagttggactaactgattattaaggactctgtcaactctgatattctgaaagtgaataaaagaaattaacttatccaccaaccac

SEQ ID NO: 677266 - DNA, 120 bp, Artificial Sequence
  ENSG00000186334_20 (sequence is synthesized)
tgtgactcctgttccaaaccacttgagggcgcatgagaaagtgtcttggacatgaagatagacgcctccatcaatcccaccaatccactctccccacaccagcctacctctttctctttt

SEQ ID NO: 677267 - DNA, 120 bp, Artificial Sequence
  ENSG00000186334_21 (sequence is synthesized)
cctgtgctgttcctgccccctcatttctgtctttttaaagtgcctcctctctaaaactttacactttcttatgatcactaatgccatcctcactttgtatttttctaccatttatatcta

SEQ ID NO: 677268 - DNA, 120 bp, Artificial Sequence
  ENSG00000186334_22 (sequence is synthesized)
atgccatcctcactttgtatttttctaccatttatatctaccttacctgggattcttaaagcacttacgaagataagatatttatttatttattattatttattgagacagagtctcgct

SEQ ID NO: 677269 - DNA, 120 bp, Artificial Sequence
  ENSG00000186334_23 (sequence is synthesized)
caggtctcaaactcctgacctcaggtgactggcccatctcggcctcgcaaggtgctgggatgacaggtgtgagccacctcgtccggtcgacatatttattttctaacagacccaccttcc

SEQ ID NO: 677270 - DNA, 120 bp, Artificial Sequence
  ENSG00000186334_24 (sequence is synthesized)
aacagacccaccttcctcatttaattgaaagctctgtgggcaagaactgtctgatttccctttgcacgtccccacggtagcctctgtagggactggcacacagcaagtttccattaacat

SEQ ID NO: 677271 - DNA, 120 bp, Artificial Sequence
  ENSG00000186334_25 (sequence is synthesized)
ctactgaatggaatagataccaaatatataattccatttccttggagtgaatcttttcttatctccaggcctggtaagtggcttctatgtctaaagaaggcgagacccttgctgcctctg

SEQ ID NO: 677272 - DNA, 120 bp, Artificial Sequence
  ENSG00000186334_26 (sequence is synthesized)
tcatgacttctgatcttcagtggttccaacccagagactggactctcccctttggaatcctctgggttctagagcttctacaaaaaaacatggtcttcagccaaactatctttgccaggg

SEQ ID NO: 677273 - DNA, 120 bp, Artificial Sequence
  ENSG00000186334_27 (sequence is synthesized)
tggtatttgtttttaagacaatgcttttattctttgatatttgcttcctcagagtcattagatgatttctttacctttcatctcccaccagaacctctggccatgattcatttgagaaat

SEQ ID NO: 677274 - DNA, 120 bp, Artificial Sequence
  ENSG00000186334_28 (sequence is synthesized)
atttattgagcacctatctaccctgtgcatttgtagcccctgggaatatagaagcaaacaagacacgagagtctctgctgcatgaagcctgcattccagtggagtctagtggtgctcttg

SEQ ID NO: 677275 - DNA, 120 bp, Artificial Sequence
  ENSG00000186334_29 (sequence is synthesized)
atccctcatttatgtctttgtgataggtcacatctataaagacacaagtgttcagaacaaaggatgtgagagggtccccgtttatacccttctgatcacctctggaagatataattagta

SEQ ID NO: 677276 - DNA, 120 bp, Artificial Sequence
  ENSG00000186334_30 (sequence is synthesized)
atcagccccactttttaaaaggaatttgacaaattagacacactacagtagtgatccccaacttgggatcattttgcaccagctcctgctaccctagccaaagacctttacaatctctac

SEQ ID NO: 677277 - DNA, 120 bp, Artificial Sequence
  ENSG00000186334_31 (sequence is synthesized)
agacatttttggttgccacaatctgggggaagagtctctgacacctagtgggtagaggctcgggaaagctgctaaacatcctataatgcaaaagacagctcctgataacaaataattatc

SEQ ID NO: 677278 - DNA, 120 bp, Artificial Sequence
  ENSG00000186334_32 (sequence is synthesized)
tgccccaaaatgtcaatagggcacctgttgataaactctgtactagaggaagagaactgagtcataagaacaccttggccctcaatcatcttggaggaagtgagggccagggtgtgtcag

SEQ ID NO: 677279 - DNA, 120 bp, Artificial Sequence
  ENSG00000186334_33 (sequence is synthesized)
ggtaatgagctctctgtcactggaagtatcctagcagaagttgggcagccactctacagggatgctaagaagagcattcaaattctagcatctgggagcatgaggacattcaggctgggt

SEQ ID NO: 677280 - DNA, 120 bp, Artificial Sequence
  ENSG00000186334_34 (sequence is synthesized)
ctgtcaccccaaagacagttttattatgcaacaggccccagcacgcagactgtgagagggccagggaatgggagtgatcatttctggctcacttccccctttctcctctcccctccaggt

SEQ ID NO: 677281 - DNA, 120 bp, Artificial Sequence
  ENSG00000186335_0 (sequence is synthesized)
actgtgctggggtgtacatctacactagacaccttcctgcttccctccttccagagcagacctctttgtcaccccgagctccttgtttcttaagcagtcatgtctgtgacaaaaagtact

SEQ ID NO: 677282 - DNA, 120 bp, Artificial Sequence
  ENSG00000186335_1 (sequence is synthesized)
gagggtccccagggagccgttgccatcaaattggaccttatgtcgcctcctgaaagtgccaagaagttggagaacaaggactctacattcttggatgaaagtccttcagagtcagcaggc

SEQ ID NO: 677283 - DNA, 120 bp, Artificial Sequence
  ENSG00000186335_2 (sequence is synthesized)
ttgaagaagaccaagggcataacagtgttccaggccttgattcacctggtgaaaggcaacatgggcacagggatcctgggactacccctcgctgtgaagaacgcgggcatcctgatgggc

SEQ ID NO: 677284 - DNA, 120 bp, Artificial Sequence
  ENSG00000186335_3 (sequence is synthesized)
ccactcagtctgctggtgatgggcttcattgcctgccactgtatgcacatcctggtcaagtgtgcccagcgcttctgtaagaggcttaacaagccctttatggactatggggacacggtg

SEQ ID NO: 677285 - DNA, 120 bp, Artificial Sequence
  ENSG00000186335_4 (sequence is synthesized)
atgcatggactagaagccaaccccaacgcctggctccagaatcacgctcactggggaaggcatatcgtgagcttcttccttattatcacccaacttggcttctgctgtgtgtacattgtg

SEQ ID NO: 677286 - DNA, 120 bp, Artificial Sequence
  ENSG00000186335_5 (sequence is synthesized)
tttttggctgataatttaaaacaggtagtggaagctgttaatagcacaaccaacaactgctattccaatgagacggtgattctgacccccaccatggactcgcgactctacatgctctcc

SEQ ID NO: 677287 - DNA, 120 bp, Artificial Sequence
  ENSG00000186335_6 (sequence is synthesized)
ttcctgcccttcctggtgctgctggtcctcatccggaacctcaggatcttgaccatcttctccatgctggccaacatcagcatgctggtcagcttggtcatcatcatacagtacattacc

SEQ ID NO: 677288 - DNA, 120 bp, Artificial Sequence
  ENSG00000186335_7 (sequence is synthesized)
caggaaatcccagaccccagccggttgccactggtagcaagctggaagacctaccctctcttcttcggaacagccattttttcttttgaaagcattggtgtggttctgcctctggaaaac

SEQ ID NO: 677289 - DNA, 120 bp, Artificial Sequence
  ENSG00000186335_8 (sequence is synthesized)
aagatgaagaatgcccgccacttcccagccatcctgtctttgggaatgtccatcgtcacttccctatacattggcatggcggctctgggctacctgcggtttggagatgacatcaaggcc

SEQ ID NO: 677290 - DNA, 120 bp, Artificial Sequence
  ENSG00000186335_9 (sequence is synthesized)
agcataagccttaacctgcctaactgctggctgtaccagtctgtcaagcttctctacattgccggcatcctgtgcacctatgccctgcagttctacgtccctgcagaaatcatcatcccc

SEQ ID NO: 677291 - DNA, 120 bp, Artificial Sequence
  ENSG00000186335_10 (sequence is synthesized)
tttgccatctcccgggtgtcaacacgctgggcactgcctctggatctgtccattcgcctcgtcatggtctgcctgacatgcctcctggccatcctcatcccccgcctggacctggtcatc

SEQ ID NO: 677292 - DNA, 120 bp, Artificial Sequence
  ENSG00000186335_11 (sequence is synthesized)
tccctggtgggctccgtgagtggcaccgccctggccctcatcatcccaccgctcctggaggtcaccacgttctactcagagggcatgagccccctcaccatcttcaaggacgccctgatc

SEQ ID NO: 677293 - DNA, 120 bp, Artificial Sequence
  ENSG00000186335_12 (sequence is synthesized)
agcatcctgggcttcgtgggctttgtggtggggacctaccaggccctggacgagctgctcaagtcagaagactctcaccccttttccaactccaccacttttgttcggtgagcctggcac

SEQ ID NO: 677294 - DNA, 80 bp, Artificial Sequence
  ENSG00000186335_13 (sequence is synthesized)
tgtcttgttgcccagactggagtacaatgatgcgatctcagctcaccacaacttcggcctcctgggttcaagcgattctc

SEQ ID NO: 677295 - DNA, 120 bp, Artificial Sequence
  ENSG00000186335_14 (sequence is synthesized)
caaaatgctgggatcacaggcgtgagccacctcgcctggccagatctcttttatatgcattatctttatgtcactgctttgccttttctctgggccaagtcatggtgaaacaagaaagct

SEQ ID NO: 677296 - DNA, 120 bp, Artificial Sequence
  ENSG00000186335_15 (sequence is synthesized)
tctgggccaagtcatggtgaaacaagaaagctacaagctctaaatggtaattttttacatttttgttttgtttattacttcttcttttcatacctctggcattccactacattgtgagct

SEQ ID NO: 677297 - DNA, 120 bp, Artificial Sequence
  ENSG00000186335_16 (sequence is synthesized)
ttcccttggaaggctctggactctatccaagcttatgataattcacacaatgaatttcatacctagcgtggagctatgcaagaagcagccaccagagggccccaagtggcagcaactggc

SEQ ID NO: 677298 - DNA, 120 bp, Artificial Sequence
  ENSG00000186335_17 (sequence is synthesized)
caaaggagatgcagccagctaagactgtccacactttggcagacaaccggttttcccttttctgggtctgttcaaaaagcaaacattaagggtgggcacataatccacaagccagaaagt

SEQ ID NO: 677299 - DNA, 120 bp, Artificial Sequence
  ENSG00000186335_18 (sequence is synthesized)
tgtgcacggctccagtgttgagatgggtagggccaagatgaccagtgtgaaaactctcagatagaaaggagccatgcatattaaatgaggggcaacaaacatttcaaacgattagataac

SEQ ID NO: 677300 - DNA, 120 bp, Artificial Sequence
  ENSG00000186335_19 (sequence is synthesized)
attttctcccaactcaaagatcccaacaatgaataggaggcatggaagtagatgtgccaatggggagggatgaggagtgaacatgaatattatttgaatagactttacctcttaattctt

SEQ ID NO: 677301 - DNA, 120 bp, Artificial Sequence
  ENSG00000186335_20 (sequence is synthesized)
gcaacatgcattcttgattacctactgtgtgccaaacaagattttgtagaatattgcaaaaatgaccataaattcctcgtgataatgtgactttgcacctgctcctatgaaaagatgaag

SEQ ID NO: 677302 - DNA, 120 bp, Artificial Sequence
  ENSG00000186335_21 (sequence is synthesized)
atgtgactttgcacctgctcctatgaaaagatgaagtctgtatctgtatcccttaaatttttttgcttgtttgtcggttttgttttgtgttttgtttttttgagatgaagtctcgctctg

SEQ ID NO: 677303 - DNA, 120 bp, Artificial Sequence
  ENSG00000186335_22 (sequence is synthesized)
tgatcttggccttgtaacttgctttggccaatgggacattagtaaatgtgatgcagtcagaggtttggtaataacctatgcatcaggacttacatcacttgctgctctatggagttgaga

SEQ ID NO: 677304 - DNA, 120 bp, Artificial Sequence
  ENSG00000186335_23 (sequence is synthesized)
ccaccaagtaaagcatcctgggctagcctaccggaggatcagagaccatgtggaacataaatgaatcatcccagttgagccctgtccgcagatcaaccagcctaccaacttccagacacg

SEQ ID NO: 677305 - DNA, 120 bp, Artificial Sequence
  ENSG00000186335_24 (sequence is synthesized)
agtaaagccatcctagactatatccaaccccagtcaggctgacacagaccataagaattgtacagataatccacagaactgtgataaataataaagatgtttgtaattttaatacataaa

SEQ ID NO: 677306 - DNA, 85 bp, Artificial Sequence
  ENSG00000186335_25 (sequence is synthesized)
tgagtagaaaggagagtgcagtgttcctgctgatcttttctgagggctataaagaatcagccagatgggccggatgcattggctt

SEQ ID NO: 677307 - DNA, 62 bp, Artificial Sequence
  ENSG00000186335_26 (sequence is synthesized)
tgatgcgatctcagctcaccacaacgaggcatagtccagcacgcctggctaattttgtattt

SEQ ID NO: 677308 - DNA, 120 bp, Artificial Sequence
  ENSG00000186335_27 (sequence is synthesized)
gtcaggtggtggggactcaggaatgggtggaaacgtataggtcacttcctcctcccttccacagctgggaaactgaggtctagagagcctcccacagaagaagcagaattgtcattggaa

SEQ ID NO: 677309 - DNA, 120 bp, Artificial Sequence
  ENSG00000186335_28 (sequence is synthesized)
gtcctcatcaatgtaacaaaggaagttaaactagatgttgtcaaacttgcctcccctagttcacatatctgaagatctctgtgtggttacttttgccacaataccctttatccggtatct

SEQ ID NO: 677310 - DNA, 120 bp, Artificial Sequence
  ENSG00000186335_29 (sequence is synthesized)
tagacctgttctcaaagttgatctctactgaactggaatggaaagacccttggattttgttaatcctcctgccttgaagcttaattatacttaacgcttctaaaattgatatgggtcttc

SEQ ID NO: 677311 - DNA, 120 bp, Artificial Sequence
  ENSG00000186335_30 (sequence is synthesized)
cttctaaaattgatatgggtcttcttttgatgattcctagtcttctttaggtcatctttctttctttttttttttctttttgagacaggatattgctctgtcacccaggctggagcgcag

SEQ ID NO: 677312 - DNA, 120 bp, Artificial Sequence
  ENSG00000186340_0 (sequence is synthesized)
aggaggaggagacggcatccagtacagaggggctggacttggacccctgcagcagccctgcacaggagaagcggcatataaagccgcgctgcccgggagccgctcggccacgtccaccgg

SEQ ID NO: 677313 - DNA, 120 bp, Artificial Sequence
  ENSG00000186340_1 (sequence is synthesized)
agcatcctgcactgcagggccggtctctcgctccagcagagcctgcgcctttctgactcggtccggaacactgaaaccagtcatcactgcatctttttggcaaaccaggagctcagctgc

SEQ ID NO: 677314 - DNA, 120 bp, Artificial Sequence
  ENSG00000186340_2 (sequence is synthesized)
aggaggcaggatggtctggaggctggtcctgctggctctgtgggtgtggcccagcacgcaagctggtcaccaggacaaagacacgaccttcgaccttttcagtatcagcaacatcaaccg

SEQ ID NO: 677315 - DNA, 120 bp, Artificial Sequence
  ENSG00000186340_3 (sequence is synthesized)
caagaccattggcgccaagcagttccgcgggcccgaccccggcgtgccggcttaccgcttcgtgcgctttgactacatcccaccggtgaacgcagatgacctcagcaagatcaccaagat

SEQ ID NO: 677316 - DNA, 120 bp, Artificial Sequence
  ENSG00000186340_4 (sequence is synthesized)
catgcggcagaaggagggcttcttcctcacggcccagctcaagcaggacggcaagtccaggggcacgctgttggctctggagggccccggtctctcccagaggcagttcgagatcgtctc

SEQ ID NO: 677317 - DNA, 120 bp, Artificial Sequence
  ENSG00000186340_5 (sequence is synthesized)
caacggccccgcggacacgctggatctcacctactggattgacggcacccggcatgtggtctccctggaggacgtcggcctggctgactcgcagtggaagaacgtcaccgtgcaggtggc

SEQ ID NO: 677318 - DNA, 120 bp, Artificial Sequence
  ENSG00000186340_6 (sequence is synthesized)
tggcgagacctacagcttgcacgtgggctgcgacctcatagacagcttcgctctggacgagcccttctacgagcacctgcaggcggaaaagagccggatgtacgtggccaaaggctctgc

SEQ ID NO: 677319 - DNA, 120 bp, Artificial Sequence
  ENSG00000186340_7 (sequence is synthesized)
cagagagagtcacttcaggggtttgcttcagaacgtccacctagtgtttgaaaactctgtggaagatattctaagcaagaagggttgccagcaaggccagggagctgagatcaacgccat

SEQ ID NO: 677320 - DNA, 120 bp, Artificial Sequence
  ENSG00000186340_8 (sequence is synthesized)
cagtgagaacacagagacgctgcgcctgggtccgcatgtcaccaccgagtacgtgggccccagctcggagaggaggcccgaggtgtgcgaacgctcgtgcgaggagctgggaaacatggt

SEQ ID NO: 677321 - DNA, 120 bp, Artificial Sequence
  ENSG00000186340_9 (sequence is synthesized)
ccaggagctctcggggctccacgtcctcgtgaaccagctcagcgagaacctcaagagagtgtcgaatgataaccagtttctctgggagctcattggtggccctcctaagacaaggaacat

SEQ ID NO: 677322 - DNA, 120 bp, Artificial Sequence
  ENSG00000186340_10 (sequence is synthesized)
gtcagcttgctggcaggatggccggttctttgcggaaaatgaaacgtgggtggtggacagctgcaccacgtgtacctgcaagaaatttaaaaccatttgccaccaaatcacctgcccgcc

SEQ ID NO: 677323 - DNA, 120 bp, Artificial Sequence
  ENSG00000186340_11 (sequence is synthesized)
tgcaacctgcgccagtccatcctttgtggaaggcgaatgctgcccttcctgcctccactcggtggacggtgaggagggctggtctccgtgggcagagtggacccagtgctccgtgacgtg

SEQ ID NO: 677324 - DNA, 120 bp, Artificial Sequence
  ENSG00000186340_12 (sequence is synthesized)
tggctctgggacccagcagagaggccggtcctgtgacgtcaccagcaacacctgcttggggccctccatccagacacgggcttgcagtctgagcaagtgtgacacccgcatccggcagga

SEQ ID NO: 677325 - DNA, 120 bp, Artificial Sequence
  ENSG00000186340_13 (sequence is synthesized)
cggcggctggagccactggtcaccttggtcttcatgctctgtgacctgtggagttggcaatatcacacgcatccgtctctgcaactccccagtgccccagatggggggcaagaattgcaa

SEQ ID NO: 677326 - DNA, 120 bp, Artificial Sequence
  ENSG00000186340_14 (sequence is synthesized)
agggagtggccgggagaccaaagcctgccagggcgccccatgcccaatcgatggccgctggagcccctggtccccgtggtcggcctgcactgtcacctgtgccggtgggatccgggagcg

SEQ ID NO: 677327 - DNA, 120 bp, Artificial Sequence
  ENSG00000186340_15 (sequence is synthesized)
cacccgggtctgcaacagccctgagcctcagtacggagggaaggcctgcgtgggggatgtgcaggagcgtcagatgtgcaacaagaggagctgccccgtggatggctgtttatccaaccc

SEQ ID NO: 677328 - DNA, 120 bp, Artificial Sequence
  ENSG00000186340_16 (sequence is synthesized)
ctgcttcccgggagcccagtgcagcagcttccccgatgggtcctggtcatgcggctcctgccctgtgggcttcttgggcaatggcacccactgtgaggacctggacgagtgtgccctggt

SEQ ID NO: 677329 - DNA, 120 bp, Artificial Sequence
  ENSG00000186340_17 (sequence is synthesized)
ccccgacatctgcttctccaccagcaaggtgcctcgctgtgtcaacactcagcctggcttccactgcctgccctgcccgccccgatacagagggaaccagcccgtcggggtcggcctgga

SEQ ID NO: 677330 - DNA, 120 bp, Artificial Sequence
  ENSG00000186340_18 (sequence is synthesized)
agcagccaagacggaaaagcaagtgtgtgagcccgaaaacccatgcaaggacaagacacacaactgccacaagcacgcggagtgcatctacctgggccacttcagcgaccccatgtacaa

SEQ ID NO: 677331 - DNA, 120 bp, Artificial Sequence
  ENSG00000186340_19 (sequence is synthesized)
gtgcgagtgccagacaggctacgcgggcgacgggctcatctgcggggaggactcggacctggacggctggcccaacctcaatctggtctgcgccaccaacgccacctaccactgcatcaa

SEQ ID NO: 677332 - DNA, 120 bp, Artificial Sequence
  ENSG00000186340_20 (sequence is synthesized)
ggataactgcccccatctgccaaattctgggcaggaagactttgacaaggacgggattggcgatgcctgtgatgatgacgatgacaatgacggtgtgaccgatgagaaggacaactgcca

SEQ ID NO: 677333 - DNA, 120 bp, Artificial Sequence
  ENSG00000186340_21 (sequence is synthesized)
gctcctcttcaatccccgccaggctgactatgacaaggatgaggttggggaccgctgtgacaactgcccttacgtgcacaaccctgcccagatcgacacagacaacaatggagagggtga

SEQ ID NO: 677334 - DNA, 120 bp, Artificial Sequence
  ENSG00000186340_22 (sequence is synthesized)
cgcctgctccgtggacattgatggggacgatgtcttcaatgaacgagacaattgtccctacgtctacaacactgaccagagggacacggatggtgacggtgtgggggatcactgtgacaa

SEQ ID NO: 677335 - DNA, 120 bp, Artificial Sequence
  ENSG00000186340_23 (sequence is synthesized)
ctgccccctggtgcacaaccctgaccagaccgacgtggacaatgaccttgttggggaccagtgtgacaacaacgaggacatagatgacgacggccaccagaacaaccaggacaactgccc

SEQ ID NO: 677336 - DNA, 120 bp, Artificial Sequence
  ENSG00000186340_24 (sequence is synthesized)
cgcctgtgaccctgatgatgacaacgatggcgtccccgatgacagggacaactgccggcttgtgttcaacccagaccaggaggacttggacggtgatggacggggtgatatttgtaaaga

SEQ ID NO: 677337 - DNA, 120 bp, Artificial Sequence
  ENSG00000186340_25 (sequence is synthesized)
tgattttgacaatgacaacatcccagatattgatgatgtgtgtcctgaaaacaatgccatcagtgagacagacttcaggaacttccagatggtccccttggatcccaaagggaccaccca

SEQ ID NO: 677338 - DNA, 120 bp, Artificial Sequence
  ENSG00000186340_26 (sequence is synthesized)
aattgatcccaactgggtcattcgccatcaaggcaaggagctggttcagacagccaactcggaccccggcatcgctgtaggttttgacgagtttgggtctgtggacttcagtggcacatt

SEQ ID NO: 677339 - DNA, 120 bp, Artificial Sequence
  ENSG00000186340_27 (sequence is synthesized)
ctacgtaaacactgaccgggacgacgactatgccggcttcgtctttggttaccagtcaagcagccgcttctatgtggtgatgtggaagcaggtgacgcagacctactgggaggaccagcc

SEQ ID NO: 677340 - DNA, 120 bp, Artificial Sequence
  ENSG00000186340_28 (sequence is synthesized)
cacgcgggcctatggctactccggcgtgtccctcaaggtggtgaactccaccacggggacgggcgagcacctgaggaacgcgctgtggcacacggggaacacgccggggcaggtgcgaac

SEQ ID NO: 677341 - DNA, 120 bp, Artificial Sequence
  ENSG00000186340_29 (sequence is synthesized)
cttatggcacgaccccaggaacattggctggaaggactacacggcctataggtggcacctgactcacaggcccaagactggctacatcagagtcttagtgcatgaaggaaaacaggtcat

SEQ ID NO: 677342 - DNA, 120 bp, Artificial Sequence
  ENSG00000186340_30 (sequence is synthesized)
ggcagactcaggacctatctatgaccaaacctacgctggcgggcggctgggtctatttgtcttctctcaagaaatggtctatttctcagacctcaagtacgaatgcagagatatttaaac

SEQ ID NO: 677343 - DNA, 120 bp, Artificial Sequence
  ENSG00000186340_31 (sequence is synthesized)
aagatttgctgcatttccggcaatgccctgtgcatgccatggtccctagacacctcagttcattgtggtccttgtggcttctctctctagcagcacctcctgtcccttgaccttaactct

SEQ ID NO: 677344 - DNA, 120 bp, Artificial Sequence
  ENSG00000186340_32 (sequence is synthesized)
gatggttcttcacctcctgccagcaaccccaaacccaagtgccttcagaggataaatatcaatggaactcagagatgaacatctaacccactagaggaaaccagtttggtgatatatgag

SEQ ID NO: 677345 - DNA, 120 bp, Artificial Sequence
  ENSG00000186340_33 (sequence is synthesized)
actttatgtggagtgaaaattgggcatgccattacattgctttttcttgtttgtttaaaaagaatgacgtttacatataaaatgtaattacttattgtatttatgtgtatatggagttga

SEQ ID NO: 677346 - DNA, 120 bp, Artificial Sequence
  ENSG00000186340_34 (sequence is synthesized)
agggaatactgtgcataagccattatgataaattaagcatgaaaaatattgctgaactacttttggtgcttaaagttgtcactattcttgaattagagttgctctacaatgacacacaaa

SEQ ID NO: 677347 - DNA, 120 bp, Artificial Sequence
  ENSG00000186340_35 (sequence is synthesized)
tcccattaaataaattataaacaagggtcaattcaaatttgaagtaatgttttagtaaggagagattagaagacaacaggcatagcaaatgacataagctaccgattaactaatcggaac

SEQ ID NO: 677348 - DNA, 120 bp, Artificial Sequence
  ENSG00000186340_36 (sequence is synthesized)
atgtaaaacagttacaaaaataaacgaactctcctcttgtcctacaatgaaagccctcatgtgcagtagagatgcagtttcatcaaagaacaaacatccttgcaaatgggtgtgacgcgg

SEQ ID NO: 677349 - DNA, 120 bp, Artificial Sequence
  ENSG00000186340_37 (sequence is synthesized)
ttccagatgtggatttggcaaaacctcatttaagtaaaaggttagcagagcaaagtgcggtgctttagctgctgcttgtgccgctgtggcgtcggggaggctcctgcctgagcttccttc

SEQ ID NO: 677350 - DNA, 120 bp, Artificial Sequence
  ENSG00000186340_38 (sequence is synthesized)
cccagctttgctgcctgagaggaaccagagcagacgcacaggccggaaaaggcgcatctaacgcgtatctaggctttggtaactgcggacaagttgcttttacctgatttgatgatacat

SEQ ID NO: 677351 - DNA, 120 bp, Artificial Sequence
  ENSG00000186340_39 (sequence is synthesized)
ttcattaaggttccagttataaatattttgttaatatttattaagtgactatagaatgcaactccatttaccagtaacttattttaaatatgcctagtaacacatatgtagtataatttc

SEQ ID NO: 677352 - DNA, 120 bp, Artificial Sequence
  ENSG00000186340_40 (sequence is synthesized)
tagaaacaaacatctaataagtatataatcctgtgaaaatatgaggcttgataatattaggttgtcacgatgaagcatgctagaagctgtaacagaatacatagagaataatgaggagtt

SEQ ID NO: 677353 - DNA, 120 bp, Artificial Sequence
  ENSG00000186340_41 (sequence is synthesized)
tatgatggaaccttaaatatataatgttgccagcgattttagttcaatatttgttactgttatctatctgctgtatatggaattcttttaattcaaacgctgaaaagaatcagcatttag

SEQ ID NO: 677354 - DNA, 120 bp, Artificial Sequence
  ENSG00000186340_42 (sequence is synthesized)
tcttgccaggcacacccaataatcagtcatgtgtaatatgcacaagtttgtttttgtttttgttttttttgttggttggtttgtttttttgctttaagttgcatgatctttctgcaggaa

SEQ ID NO: 677355 - DNA, 120 bp, Artificial Sequence
  ENSG00000186340_43 (sequence is synthesized)
atagtcactcatcccactccacataaggggtttagtaagagaagtctgtctgtctgatgatggatagggggcaaatctttttcccctttctgttaatagtcatcacatttctatgccaaa

SEQ ID NO: 677356 - DNA, 120 bp, Artificial Sequence
  ENSG00000186340_44 (sequence is synthesized)
caggaacaatccataactttagtcttaatgtacacattgcattttgataaaattaattttgttgtttcctttgaggttgatcgttgtgttgttgttttgctgcactttttacttttttgc

SEQ ID NO: 677357 - DNA, 120 bp, Artificial Sequence
  ENSG00000186340_45 (sequence is synthesized)
gtgtggagctgtattcccgagaccaacgaagcgttgggatacttcattaaatgtagcgactgtcaacagcgtgcaggttttctgtttctgtgttgtggggtcaaccgtacaatggtgtgg

SEQ ID NO: 677358 - DNA, 120 bp, Artificial Sequence
  ENSG00000186340_46 (sequence is synthesized)
gagtgacgatgatgtgagtatttagaatgtaccatattttttgtaaattatttatgtttttctaaacaaatttatcgtataggttgatgaaacgtcatgtgttttgccaaagactgtaaa

SEQ ID NO: 677359 - DNA, 120 bp, Artificial Sequence
  ENSG00000186340_47 (sequence is synthesized)
tatttatttatgtgttcacatggtcaaaatttcaccactgaaaccctgcacttagctagaacctcatttttaaagattaacaacaggaaataaattgtaaaaaaggttttctatacatga

SEQ ID NO: 677360 - DNA, 120 bp, Artificial Sequence
  ENSG00000186340_48 (sequence is synthesized)
aggagctgccccgtgggtgagtgaggggtagaagcgggggcactgaaacccgggcttccattctgatgaaaagcacaaacgctttgggaaactagatgaaaaacacagaaaagaaaaatc

SEQ ID NO: 677361 - DNA, 120 bp, Artificial Sequence
  ENSG00000186340_49 (sequence is synthesized)
aattttagttgcacacgcaaagataactacttttaacatctgtgtttcagtcctcctgtatttctaatgtaaaaacaaaaaagatgccaggtggcgtggcctgtggaatgtgggtagttg

SEQ ID NO: 677362 - DNA, 120 bp, Artificial Sequence
  ENSG00000186340_50 (sequence is synthesized)
tgaaaaatgcattttatatactggcttggatggatttctattgtgacatggtgtatgtgtgtgtgtgtatgtgtgtgcattcatgcttgtaaaaatttaagtaaaaatatttgggtaact

SEQ ID NO: 677363 - DNA, 120 bp, Artificial Sequence
  ENSG00000186340_51 (sequence is synthesized)
acattctgctccggtaacccatgcctgtggctcgctgggctaagtcagcccctggtgaagtttcatttgccgaattcatctctcatgacaacccgatgaggtgggcattttacatgacgc

SEQ ID NO: 677364 - DNA, 80 bp, Artificial Sequence
  ENSG00000186350_0 (sequence is synthesized)
agtttacattgttgggcgacttttgcaacaactcgccgcgccgcggcctccgcgcgccgccgccgccaccgcagccgccg

SEQ ID NO: 677365 - DNA, 120 bp, Artificial Sequence
  ENSG00000186350_1 (sequence is synthesized)
cgccgcgcccgccgcccgctgcctgcgccgccggccgggcatgagttagtcgcagacatggacaccaaacatttcctgccgctcgatttctccacccaggtgaactcctccctcacctcc

SEQ ID NO: 677366 - DNA, 120 bp, Artificial Sequence
  ENSG00000186350_2 (sequence is synthesized)
ccgacggggcgaggctccatggctgccccctcgctgcacccgtccctggggcctggcatcggctccccgggacagctgcattctcccatcagcaccctgagctcccccatcaacggcatg

SEQ ID NO: 677367 - DNA, 120 bp, Artificial Sequence
  ENSG00000186350_3 (sequence is synthesized)
ggcccgcctttctcggtcatcagctcccccatgggcccccactccatgtcggtgcccaccacacccaccctgggcttcagcactggcagcccccagctcagctcacctatgaaccccgtc

SEQ ID NO: 677368 - DNA, 120 bp, Artificial Sequence
  ENSG00000186350_4 (sequence is synthesized)
agcagcagcgaggacatcaagccccccctgggcctcaatggcgtcctcaaggtccccgcccacccctcaggaaacatggcttccttcaccaagcacatctgcgccatctgcggggaccgc

SEQ ID NO: 677369 - DNA, 120 bp, Artificial Sequence
  ENSG00000186350_5 (sequence is synthesized)
tcctcaggcaagcactatggagtgtacagctgcgaggggtgcaagggcttcttcaagcggacggtgcgcaaggacctgacctacacctgccgcgacaacaaggactgcctgattgacaag

SEQ ID NO: 677370 - DNA, 120 bp, Artificial Sequence
  ENSG00000186350_6 (sequence is synthesized)
cggcagcggaaccggtgccagtactgccgctaccagaagtgcctggccatgggcatgaagcgggaagccgtgcaggaggagcggcagcgtggcaaggaccggaacgagaatgaggtggag

SEQ ID NO: 677371 - DNA, 120 bp, Artificial Sequence
  ENSG00000186350_7 (sequence is synthesized)
tcgaccagcagcgccaacgaggacatgccggtggagaggatcctggaggctgagctggccgtggagcccaagaccgagacctacgtggaggcaaacatggggctgaaccccagctcgccg

SEQ ID NO: 677372 - DNA, 120 bp, Artificial Sequence
  ENSG00000186350_8 (sequence is synthesized)
aacgaccctgtcaccaacatttgccaagcagccgacaaacagcttttcaccctggtggagtgggccaagcggatcccacacttctcagagctgcccctggacgaccaggtcatcctgctg

SEQ ID NO: 677373 - DNA, 120 bp, Artificial Sequence
  ENSG00000186350_9 (sequence is synthesized)
cgggcaggctggaatgagctgctcatcgcctccttctcccaccgctccatcgccgtgaaggacgggatcctcctggccaccgggctgcacgtccaccggaacagcgcccacagcgcaggg

SEQ ID NO: 677374 - DNA, 120 bp, Artificial Sequence
  ENSG00000186350_10 (sequence is synthesized)
gtgggcgccatctttgacagggtgctgacggagcttgtgtccaagatgcgggacatgcagatggacaagacggagctgggctgcctgcgcgccatcgtcctctttaaccctgactccaag

SEQ ID NO: 677375 - DNA, 120 bp, Artificial Sequence
  ENSG00000186350_11 (sequence is synthesized)
gggctctcgaacccggccgaggtggaggcgctgagggagaaggtctatgcgtccttggaggcctactgcaagcacaagtacccagagcagccgggaaggttcgctaagctcttgctccgc

SEQ ID NO: 677376 - DNA, 120 bp, Artificial Sequence
  ENSG00000186350_12 (sequence is synthesized)
ctgccggctctgcgctccatcgggctcaaatgcctggaacatctcttcttcttcaagctcatcggggacacacccattgacaccttccttatggagatgctggaggcgccgcaccaaatg

SEQ ID NO: 677377 - DNA, 120 bp, Artificial Sequence
  ENSG00000186350_13 (sequence is synthesized)
acttaggcctgcgggcccatcctttgtgcccacccgttctggccaccctgcctggacgccagctgttcttctcagcctgagccctgtccctgcccttctctgcctggcctgtttggactt

SEQ ID NO: 677378 - DNA, 120 bp, Artificial Sequence
  ENSG00000186350_14 (sequence is synthesized)
tggggcacagcctgtcactgctctgcctaagagatgtgttgtcaccctccttatttctgttactacttgtctgtggcccagggcagtggctttcctgaggcagcagccttcgtggcaaga

SEQ ID NO: 677379 - DNA, 120 bp, Artificial Sequence
  ENSG00000186350_15 (sequence is synthesized)
actagcgtgagcccagccaggcgcctccccaccgggctctcaggacaccctgccacaccccacggggcttgggcgactacagggtcttcgggccccagccctggagctgcaggagttggg

SEQ ID NO: 677380 - DNA, 120 bp, Artificial Sequence
  ENSG00000186350_16 (sequence is synthesized)
aacggggcttttgtttccgttgctgtttatcgatgctggttttcagaattcctgtgtggccctcctgtctggagtgacatcttcatctgctctgaatactggtgcccagccagcccgtga

SEQ ID NO: 677381 - DNA, 120 bp, Artificial Sequence
  ENSG00000186350_17 (sequence is synthesized)
cagcttccccctaatcaggaggggacagctgggggcgcaagctggtgtgtcatcagcaaagacctcagccgcctcggggatgagaggggactcgtggggcaagcaagctgccctgtgctc

SEQ ID NO: 677382 - DNA, 120 bp, Artificial Sequence
  ENSG00000186350_18 (sequence is synthesized)
tgagtgagggggaaggtagcccctttttccaaagataactcacagttttgccctcgagccaatgagaacatgagctgccctctgtgcaaggtttcggggccacctccaggctgcaggggc

SEQ ID NO: 677383 - DNA, 120 bp, Artificial Sequence
  ENSG00000186350_19 (sequence is synthesized)
gggtcactcacccccctgttttctctctgccttggtgttctggtttcagactcccgactccccgttcagaccagagtgccccggcccctccccagcctgagtcttctccttgctctgcgg

SEQ ID NO: 677384 - DNA, 120 bp, Artificial Sequence
  ENSG00000186350_20 (sequence is synthesized)
ggtgggctgaggcttgtccttgtttcctgcagggctggccctggctcgggcagggtggggcatcaccacctcactggccttgctggaggcacagggctctgcggacctgcagccatctgt

SEQ ID NO: 677385 - DNA, 120 bp, Artificial Sequence
  ENSG00000186350_21 (sequence is synthesized)
gaggcccgcggggatgggaggggaggagggtggcctgttggtttccctcagagggggcaggtggcctggagagagaggggctcaggaactgggagcctcgtgggtggggcagatgctccg

SEQ ID NO: 677386 - DNA, 120 bp, Artificial Sequence
  ENSG00000186350_22 (sequence is synthesized)
cggcctggagtggctctgccggggcattggtgggacccctgctcaggccttctctctggctgccagttgtgtctaaaagactcttggaatctgagaacccggagtcgcagcgccctcggg

SEQ ID NO: 677387 - DNA, 120 bp, Artificial Sequence
  ENSG00000186350_23 (sequence is synthesized)
ccctggtgggaccacccagcctggtattgtccacggacagcgttgttcacccagagccttacttgggagcctcactgaacgcctgctctggttgaaggtggggtgggggcggggcttggg

SEQ ID NO: 677388 - DNA, 120 bp, Artificial Sequence
  ENSG00000186350_24 (sequence is synthesized)
gcctccctggctcagcccagtgcggcctggcgctcctcccgcaggctctgcccccgggctccggtggtgcggggccctctcaggttgaactcgcctcttttgcactggaaggccctccct

SEQ ID NO: 677389 - DNA, 120 bp, Artificial Sequence
  ENSG00000186350_25 (sequence is synthesized)
ttggcctgagtacttttcccgttcacgcctcagtcccgtggacccagcctttgtcagtggcaggtgcctgaacagagggtggatgggggggataccggagggggtcttgtcttcccagcc

SEQ ID NO: 677390 - DNA, 120 bp, Artificial Sequence
  ENSG00000186350_26 (sequence is synthesized)
gcagtctaggaatgatgcgggggggtggacgccttctccatagtctttccccacctggagcaggggcttcctcagtggtgaggggagctgcctacaggttggaccgggaggcagtggctt

SEQ ID NO: 677391 - DNA, 120 bp, Artificial Sequence
  ENSG00000186350_27 (sequence is synthesized)
ggagaggcagctttccagccttggtggggaagaaagtgtccattctttgccttcctggagctcccagccagagctgagcttaggcacccgagtggagcctgcagctgagtctgtgcccga

SEQ ID NO: 677392 - DNA, 120 bp, Artificial Sequence
  ENSG00000186350_28 (sequence is synthesized)
gacaggctgtcagagattccagaagcctctcctccccgccgccctccacccctgcctttcagcgttgtggatccctagaggtggccccctgcccgatccaccgtcctgaggcagagtgtt

SEQ ID NO: 677393 - DNA, 120 bp, Artificial Sequence
  ENSG00000186350_29 (sequence is synthesized)
gagcctcatacctgtaccaggtccccggccagctgggcccctcccaggcactgccaggaagccccagctgcccctggcgggtgtggtggaaatggcaggagggtgcaggtactcttgggg

SEQ ID NO: 677394 - DNA, 120 bp, Artificial Sequence
  ENSG00000186350_30 (sequence is synthesized)
ccccagcggtgggagtgcaaaagacccaacgccaacacctggtgccttctgcagccagcgcccacccatccgtgcccggacccttgggaatgcccgcggctccagaggaaaaagcccagg

SEQ ID NO: 677395 - DNA, 120 bp, Artificial Sequence
  ENSG00000186350_31 (sequence is synthesized)
gacggggcctccgttgcggggggtcggctgcttcttgggaactttgtcgtttccggcgctggctggctggctggctggctgtaaagcactgaagccccccggccgccaacccctgaaagc

SEQ ID NO: 677396 - DNA, 120 bp, Artificial Sequence
  ENSG00000186350_32 (sequence is synthesized)
agaacctggcctccctggccacagcagccttacccaccgctctacgtgtcccgggcacttcccgcagccttcccgtccctttctcatcggccttgtagttgtacagtgctgttggtttga

SEQ ID NO: 677397 - DNA, 120 bp, Artificial Sequence
  ENSG00000186350_33 (sequence is synthesized)
aaaggtgatgtgtggggagtgcggctcatcactgagtagagaggtagaatttctatttaaccagacctgtagtagtattaccaatccagttcaattaaggtgattttttgtaattattat

SEQ ID NO: 677398 - DNA, 120 bp, Artificial Sequence
  ENSG00000186350_34 (sequence is synthesized)
tattttggtgggacaatctttaattttctaaagatagcactaacatcagctcattagccacctgtgcctgtccccgccttggcccggctggatgaagcggcttccccgcagggcccccac

SEQ ID NO: 677399 - DNA, 120 bp, Artificial Sequence
  ENSG00000186350_35 (sequence is synthesized)
ttcccagtggctgcttcctggggacccagggcaccccggcaccttcaggcacgctcctcagctggtcacctcccggctttgccgttcagatggggctcctgaggctcaggagtgaagatg

SEQ ID NO: 677400 - DNA, 120 bp, Artificial Sequence
  ENSG00000186350_36 (sequence is synthesized)
ccacagagccgggctcccctaggctgcgtcgggcatgcttggaagctggcctgccaggaccttccaccctggggcctgtgtcagccgccggccctccgcaccctggaagcacacggcctc

SEQ ID NO: 677401 - DNA, 120 bp, Artificial Sequence
  ENSG00000186350_37 (sequence is synthesized)
tgggaaggacagccctgaccttcggttttccgagcacggtgtttcccaagaattctgggctggcggcctggtggcagtgctggagatgaccccgagcccctccccgtggggcacccagga

SEQ ID NO: 677402 - DNA, 120 bp, Artificial Sequence
  ENSG00000186350_38 (sequence is synthesized)
gggccctgccggaatgtgcagcctgtgggtagtcggctggtgtccctgtcgtggagctggggtgcgtgatctggtgctcgtccacgcaggtgtgtggtgtaaacatgtatgtgctgtaca

SEQ ID NO: 677403 - DNA, 120 bp, Artificial Sequence
  ENSG00000186350_39 (sequence is synthesized)
gagagacgcgtgtggagagagccgcacaccagcgccacccaggaaaggcggagcggttaccagtgttttgtgtttatttttaatcaagacgtttcccctgttttcctataaatttgcttc

SEQ ID NO: 677404 - DNA, 120 bp, Artificial Sequence
  ENSG00000186350_40 (sequence is synthesized)
gtgtaagcaagtacataaggaccctcctttggtgaaatccgggttcgaatgaatatctcaaggcaggagatgcatctattttaagatgctttggagcagacagctttagccgttcccaat

SEQ ID NO: 677405 - DNA, 120 bp, Artificial Sequence
  ENSG00000186350_41 (sequence is synthesized)
ccttagcaatgccttagctgggacgcatagctaatactttagagaggatgacagatccataaagagagtaaagataagagaaaatgtctaaagcatctggaaaggtaaaaaaaaaaaatc

SEQ ID NO: 677406 - DNA, 120 bp, Artificial Sequence
  ENSG00000186350_42 (sequence is synthesized)
tatttttgtacaaatgtaattttatccctcatgtatacttggatatggcggggggagggctgggactgtttcgtttctgcttctagagattgaggtgaaagcttcgtccgagaaacgcca

SEQ ID NO: 677407 - DNA, 120 bp, Artificial Sequence
  ENSG00000186350_43 (sequence is synthesized)
ggacagacgatggcagaggagagggctcctgtgacggcggcgaggcttgggaggaaaccgccgcaatgggggtgtcttccctcggggcaggagggtgggcctgaggctttcaagggtttt

SEQ ID NO: 677408 - DNA, 120 bp, Artificial Sequence
  ENSG00000186350_44 (sequence is synthesized)
cttccctttcgagtaatttttaaagccttgctctgttgtgtcctgttgccggctctggccttcctgtgactgactgtgaagtggcttctccgtacgattgtctctgaaacatcgtggcct

SEQ ID NO: 677409 - DNA, 120 bp, Artificial Sequence
  ENSG00000186350_45 (sequence is synthesized)
caggtgccagggtttgatggacagtagcattagaattgtggaaaaggaacacgcaaagggagaagtgtgagaggagaaacaaaatatgagcgtttaaaatacatcgccattcagttcgtt

SEQ ID NO: 677410 - DNA, 120 bp, Artificial Sequence
  ENSG00000186350_46 (sequence is synthesized)
acagatgccctgtgcatggggtggggatgaaggagggctgggggctccgtgacagacagtgggaggggaggctggctgtcctgtggtgagctgcttctggggcaccctgagatggggcct

SEQ ID NO: 677411 - DNA, 120 bp, Artificial Sequence
  ENSG00000186350_47 (sequence is synthesized)
cccttcacttcctggccatccaggcatctgtgtctgtgtccgggaagtggaggagggcccccaggaccgagtcgctgcccatcactgaccgtctgtggcaggcactgccagtggccgtgg

SEQ ID NO: 677412 - DNA, 120 bp, Artificial Sequence
  ENSG00000186350_48 (sequence is synthesized)
cccagggtcttggtggctcggcctcatggggggcttgctccaggccttgggtgatgctcctgtgctccctgacagccgcagggtctcaccctcctgctccagcccctctctgaccccacc

SEQ ID NO: 677413 - DNA, 120 bp, Artificial Sequence
  ENSG00000186350_49 (sequence is synthesized)
ctgcggtcctgggaggtagcaggacagccccagtatgcggatgagaaaacctgaggcccagcctgggcgggttcgtgggtccagctcagcccctctgtgcctgtggtctgtagggacctg

SEQ ID NO: 677414 - DNA, 120 bp, Artificial Sequence
  ENSG00000186350_50 (sequence is synthesized)
ggcccagctgcccctaaggatggagctcagtcttccccagctccaaccctggggccttgtgtgggaggggcagtggccctgggatctggccttggcggctccagccccctctccagtatg

SEQ ID NO: 677415 - DNA, 120 bp, Artificial Sequence
  ENSG00000186350_51 (sequence is synthesized)
gcagagcctggaggcctgctggtctctgggtctgagactctggcctcccagcctgctcccctgggggttggtggaggcctcggggctgtcggagcttcaggattagggactgaagcccag

SEQ ID NO: 677416 - DNA, 120 bp, Artificial Sequence
  ENSG00000186350_52 (sequence is synthesized)
caggggctcccttttctgtgccccctgcctgagcacaatcttcctgccctctcccctgcagcccctctgttgtcgtggtcagtcgtgccgcctgagggccaagtgtggccttggcactgc

SEQ ID NO: 677417 - DNA, 120 bp, Artificial Sequence
  ENSG00000186350_53 (sequence is synthesized)
atgagcaccacttgcttgcgaccagctccaggctgcctggaagagactccagctctgctcaggcacctccctcaggccccttcctgcccgctcagccgccgcgctgcatcacccgaggct

SEQ ID NO: 677418 - DNA, 120 bp, Artificial Sequence
  ENSG00000186350_54 (sequence is synthesized)
gtgggaccctgagcccgccggccagcggccgatggggccgcccctgtggtgggacctctcgcctgccctcgccatgaggctgcacctccttgcctctctgtcgggcggtggactggcctg

SEQ ID NO: 677419 - DNA, 120 bp, Artificial Sequence
  ENSG00000186350_55 (sequence is synthesized)
ctgggtgccaggcccagcctgggcctcccttgtggggtgctcaggccccacttccctccctggggaggggaggagaggccacctcgagggagtgacgtcaaggcagggtgacattagtct

SEQ ID NO: 677420 - DNA, 120 bp, Artificial Sequence
  ENSG00000186350_56 (sequence is synthesized)
gggcccacgggatccttgctacttccccatttatggaggggaaactgagccctgggttcgacgggggaagcagtcgcctgatgggcaagtgctctctgagtggtgcatgaaggtggctgt

SEQ ID NO: 677421 - DNA, 120 bp, Artificial Sequence
  ENSG00000186350_57 (sequence is synthesized)
ccacgtggctgtctgtggtgtcggttaatcgtcacggcttccgggagttaaaggcccagcctaaagccggggtcaggcgcagaacagtaccttggaggggagctctgggcacacctggcc

SEQ ID NO: 677422 - DNA, 120 bp, Artificial Sequence
  ENSG00000186350_58 (sequence is synthesized)
gctggggttggctgcaggctccaggagttaggttccagatggatttcagatgggactttcttgctaaccctactttttttctgattataaaagtaataaagactccttgtagagaaggag

SEQ ID NO: 677423 - DNA, 120 bp, Artificial Sequence
  ENSG00000186350_59 (sequence is synthesized)
gcaaaatacaaagaagagtgtgaagcccccatcactccattaatgttcaccagtcggggggtgggaggtgttttccttcagatttctgtgtatacatttataactggcatccttttgtgt

SEQ ID NO: 677424 - DNA, 120 bp, Artificial Sequence
  ENSG00000186350_60 (sequence is synthesized)
gcaatgttaaccgccttttgttttcactaagcaatgtattatgttgagcacccattttgggggagtagacagcctgcaccatggtcagcccgcagacaggctgcacggatccaggcacct

SEQ ID NO: 677425 - DNA, 120 bp, Artificial Sequence
  ENSG00000186350_61 (sequence is synthesized)
cgctggctccaaaacccacgaagtgaccccacccaggatgtcagagtctctgtcactcccgggcaggaggagacagtgatgacgggaaggagatttctccacccaggtgaactcctccct

SEQ ID NO: 677426 - DNA, 120 bp, Artificial Sequence
  ENSG00000186350_62 (sequence is synthesized)
gcaaggggagggggtggggcctggggtggggctgtggcttcaactgcaggacgaccgcctcatcttgaggcctctgggaggtaggtgctgtggtctccccgcttgacgcagagtatacag

SEQ ID NO: 677427 - DNA, 120 bp, Artificial Sequence
  ENSG00000186350_63 (sequence is synthesized)
agcctcggggagcagagtgccgtgggggtttgagcccaggtggggctgactgctgagcctgggcctttggatcatcagccgaggtgacttgcagctggttatctgcccacgtggcccctt

SEQ ID NO: 677428 - DNA, 120 bp, Artificial Sequence
  ENSG00000186350_64 (sequence is synthesized)
cccatgccggagggctcgggactccctgttcccatgactgggggactcagcagagagaggctgtggcctccctcaggcctaagcctgcttccccaaaagcttgtgcccacacagcctggg

SEQ ID NO: 677429 - DNA, 120 bp, Artificial Sequence
  ENSG00000186350_65 (sequence is synthesized)
tcctcccctgaagtctctgcttacacccaggccaaagggcccccagggaaggcgtgttcgggctcagggcagctgcgtcccctctcagggatgccggccctgggacctgcagtggccagg

SEQ ID NO: 677430 - DNA, 120 bp, Artificial Sequence
  ENSG00000186350_66 (sequence is synthesized)
tgtggcagcggtgctctgtggtctcggctcccccacggctctgtgggcgcctggccgtctgtggggcgtggggaccttttccacagttgaggtttgctcagtcgcttctccagctcagcc

SEQ ID NO: 677431 - DNA, 120 bp, Artificial Sequence
  ENSG00000186350_67 (sequence is synthesized)
tggccctttgggctgtttctggatcaggaagggctggtgcctggcagagcctggcgcagtccaggtcttgtcatggagaacttggggacctggtccgtgctccccttcttccttggagaa

SEQ ID NO: 677432 - DNA, 120 bp, Artificial Sequence
  ENSG00000186350_68 (sequence is synthesized)
gacaccccgagtagtgtctcttgtggagttgttcccagccctggggtgtccggtctgtgagggtggagggcgaggctgggcctcgtcccctggctcccggtggttgcttgtggatttcca

SEQ ID NO: 677433 - DNA, 120 bp, Artificial Sequence
  ENSG00000186350_69 (sequence is synthesized)
cctggccggccggaacctcccagactcccactaggccctccctctccaggggctcctcacatgagcaggggtgctccttccgctctgaatttctgtgtttgggtttcaccctgtgttcct

SEQ ID NO: 677434 - DNA, 120 bp, Artificial Sequence
  ENSG00000186350_70 (sequence is synthesized)
agtagctgaaggctccatggcagagttttggtgccatctcaggacagcccacccgggtgggactcgccctaggagctcctctgcccacacacagctgacagcaccagatgtgtcctgtgg

SEQ ID NO: 677435 - DNA, 120 bp, Artificial Sequence
  ENSG00000186350_71 (sequence is synthesized)
actcccaaaccccctgctgccctgcctcagtttacctagggcaggcactaggcccaagggattgcatgtgagggggccaggaggcagcaggtggacacctagtcccaagcccccatgcca

SEQ ID NO: 677436 - DNA, 120 bp, Artificial Sequence
  ENSG00000186350_72 (sequence is synthesized)
tctcccgggtagtccaggactgctcctgacctaggactgggctgtagttggggtctggagccggcctgctgcccatccacctggccctgtttagagctggccttgacctcccgagctcct

SEQ ID NO: 677437 - DNA, 120 bp, Artificial Sequence
  ENSG00000186350_73 (sequence is synthesized)
tttccctggagaatcttgctggctttctgggccaaccccatcaaagcccctctgctttgggggatgtgtgcagaagaactggggcctctgctccgtgtccccctcatatcacctggcctt

SEQ ID NO: 677438 - DNA, 120 bp, Artificial Sequence
  ENSG00000186350_74 (sequence is synthesized)
ccgaaagcaggcagcaggcccaaggtgctggcacgagggaggcctggtcatgttatttttagcacaccagccctgcccctgctcttgttggcagcatggtgccctgtggcgagagggcga

SEQ ID NO: 677439 - DNA, 120 bp, Artificial Sequence
  ENSG00000186350_75 (sequence is synthesized)
tgaagactcggcttccgcctgtcccttggctgactggctggcacctgctgggtcccagggccccaggatgccccttgctgggtcctcccaggtctgccgcctgtcctggacacccagggg

SEQ ID NO: 677440 - DNA, 120 bp, Artificial Sequence
  ENSG00000186350_76 (sequence is synthesized)
tctagtgcacagtaggttaccccctgcgggtggcagtggtgctcccagaatcctcagggatgcctggtgtcctccgcactgttgagctcttctcggggaggggatgggcagcactagggg

SEQ ID NO: 677441 - DNA, 120 bp, Artificial Sequence
  ENSG00000186350_77 (sequence is synthesized)
ggctcctggcacaaagtagggacttgttgaagccaagttgcttgggagtgagtggtgcaggtccccttgacattggcgaggtccccggggtgggtgtgggtgaggagcagacgcgggttg

SEQ ID NO: 677442 - DNA, 120 bp, Artificial Sequence
  ENSG00000186350_78 (sequence is synthesized)
ccccagacgttccctgcccggccgctgttggcgtcggtctgccgttgggctgtgggtctcacccgcagttagtttgccgtggtctgaggcccatgcttgacttggccctggttccccaga

SEQ ID NO: 677443 - DNA, 120 bp, Artificial Sequence
  ENSG00000186350_79 (sequence is synthesized)
acccatagctccttccctgggggttgagtccagctttgaggcctcagcagtttgtcttggaaccctggggttcctcacattcatgggagtgtgagcagggtttcaggagggatgtgcccc

SEQ ID NO: 677444 - DNA, 120 bp, Artificial Sequence
  ENSG00000186350_80 (sequence is synthesized)
cactcctagccccaaaaccacaaccgcaaagtcagagtcgctggagccagagagattctctgacttctgctgctgttggggagggccaggcactctgccaaatgctgccttctgccttct

SEQ ID NO: 677445 - DNA, 120 bp, Artificial Sequence
  ENSG00000186350_81 (sequence is synthesized)
caagtccatggccaggaagggccttccatgtggcggcgtccaggccactcgcccctcctggtgggggaataggagtctgggggggcttgggtagacccaggccagaccgcagctgcctgg

SEQ ID NO: 677446 - DNA, 120 bp, Artificial Sequence
  ENSG00000186350_82 (sequence is synthesized)
cccctgagctgtcccaaatctcttccctggtctgcaggctgtactcccagagcaggcccgggggacattccccacagtgtcccagagccttcctggctgcagccggctcacctgggcgcg

SEQ ID NO: 677447 - DNA, 120 bp, Artificial Sequence
  ENSG00000186350_83 (sequence is synthesized)
ttgcaggtattggtggagtgagttggtgccagcttccacacagcacttctgagtgcccggcatggagctggacttggtgtcaaggcctctgagctctagcaaagcctcctggtgggaggg

SEQ ID NO: 677448 - DNA, 120 bp, Artificial Sequence
  ENSG00000186350_84 (sequence is synthesized)
cctgcccagggcctgtggggctgtgatgtgtgcacagggagtgtggacgcgaggctgagcgggcttcacggggtcggaagcagggcagcacaggcgcctacccgccagggactgaggtcg

SEQ ID NO: 677449 - DNA, 120 bp, Artificial Sequence
  ENSG00000186350_85 (sequence is synthesized)
gaggggagtgtgcagaggagctggtttgctcctgcctcgatggacagatgaggtccagcaaggtccaggggcctgctcctggcgcagagtgggcctttcccaagtcggggctggtggaga

SEQ ID NO: 677450 - DNA, 120 bp, Artificial Sequence
  ENSG00000186350_86 (sequence is synthesized)
gacccttcaggggctcaggaaggaagggtgtggtgggtgtgaggagagagccaagagacgggcaggagacctgggtggggcatcgaggcggcgggaactgaaataagtgccaaggatctg

SEQ ID NO: 677451 - DNA, 120 bp, Artificial Sequence
  ENSG00000186350_87 (sequence is synthesized)
aaaggggaaatgcgatggcccccaccctggccacgcgtggagtcctgaggctccagcgaagcaacaatggcagcctggctctcctgggagcgggagcagggagtgtgggaggagaccctg

SEQ ID NO: 677452 - DNA, 120 bp, Artificial Sequence
  ENSG00000186350_88 (sequence is synthesized)
gatagctggggggctgtggagcccactgggggagggacagaccaaggcagacccccggggcggccctgtgctgtgctccgggggctgtgagccaacccgaggcccagcagcctggggctg

SEQ ID NO: 677453 - DNA, 120 bp, Artificial Sequence
  ENSG00000186350_89 (sequence is synthesized)
gaagggcggaagaacgcccgcctggcctccccatcctggcacagccttgcttctgtagcctggaccgtcctccaggtgagcccaaagaagcaaggtgggtggccccagggcctgcagcct

SEQ ID NO: 677454 - DNA, 120 bp, Artificial Sequence
  ENSG00000186350_90 (sequence is synthesized)
ggatgggcacctcagcccgggctccactcttctcagatgtgcagaggctcaccgggccctgggctcactgggctagccagaccctctgatatcactgaggtctgggggagccagggatgc

SEQ ID NO: 677455 - DNA, 120 bp, Artificial Sequence
  ENSG00000186350_91 (sequence is synthesized)
aggctaagttcagcgcgggagctggcttggccctgacactgagagggagggggaccgtctgccattctgtcctgcctggagtccctttcccggccagggctgctctggtgctccctcagt

SEQ ID NO: 677456 - DNA, 120 bp, Artificial Sequence
  ENSG00000186350_92 (sequence is synthesized)
ttacccagggcaggtgctaggcccaagggactgcacatggagggccgggaggcagcaggtggatccctacccacccgaggtggtttgggacagcctagaaagaggaagtgcgtgagttcc

SEQ ID NO: 677457 - DNA, 120 bp, Artificial Sequence
  ENSG00000186350_93 (sequence is synthesized)
tttcctttgtgcttccgagcaacctggacctgcagagtcatggcctgtgctcctccagcctctggcccaaggggctcctgctcacacgcctcggtgcctccccagtgctagggcacaaag

SEQ ID NO: 677458 - DNA, 120 bp, Artificial Sequence
  ENSG00000186350_94 (sequence is synthesized)
cgagggtgcccgacacttcctgcttgtggatgcctttgctgcccctgctctgacctgatccccgccctggctgtacctacttctttccttttttcaaacaagccctttgcttccccacct

SEQ ID NO: 677459 - DNA, 120 bp, Artificial Sequence
  ENSG00000186350_95 (sequence is synthesized)
ctgaacactggcttgggggcccctgtgcctgggacacccctttcttcctcccaggccctggcccatctcctccaggaagcttgagtgctcactgcagccaccggcctccctgtaagacag

SEQ ID NO: 677460 - DNA, 120 bp, Artificial Sequence
  ENSG00000186350_96 (sequence is synthesized)
taagacagtgagttgtctgcgagctctgctctgagccctggcacatggagcgactcagttacacttaatcagctcttagaggcactggctgggcatggtggctcaacgcctgtaatccca

SEQ ID NO: 677461 - DNA, 120 bp, Artificial Sequence
  ENSG00000186350_97 (sequence is synthesized)
gccgaggcgggaggattgcttgagcctaggagttggagacaagcctgggcaacatagttgagaccccaccactagaaaaaaaaaaaatagctgagtgcagtggcatggacttgtaatccc

SEQ ID NO: 677462 - DNA, 77 bp, Artificial Sequence
  ENSG00000186350_98 (sequence is synthesized)
attgggcctggaagtttgaggctgcagtgactgtgattgtgccactgtcctccagcctgggcaacagagtgagaccc

SEQ ID NO: 677463 - DNA, 120 bp, Artificial Sequence
  ENSG00000186352_0 (sequence is synthesized)
gcgcattcttacctgtcggggtgcggcgagtgtctcacctctctgcacttccaaggactcttgtcatctgccttaggcgggaaatgctgttgctggattgcaaccccgaggtggatggtc

SEQ ID NO: 677464 - DNA, 120 bp, Artificial Sequence
  ENSG00000186352_1 (sequence is synthesized)
tgaagcatttgctggagacaggggcctcggtcaacgcacccccggatccctgcaagcagtcgcctgtccacttagccgcaggaagcggccttgcttgctttcttctctggcagctgcaaa

SEQ ID NO: 677465 - DNA, 120 bp, Artificial Sequence
  ENSG00000186352_2 (sequence is synthesized)
cgggcgctgacctcaaccagcaggatgttttaggagaagctccactacacaaggcagcaaaagttggaagcctggagtgcctaagcctgcttgtagccagtgatgcccaaattgatttat

SEQ ID NO: 677466 - DNA, 120 bp, Artificial Sequence
  ENSG00000186352_3 (sequence is synthesized)
gtttcttacaacaattaaatgtatgcagacaataaaagcaagtgaacaccctgacaggaatgattgtgttgccgtgctcagacagaaacggagtctcggaagtgtagaaaataccagtgg

SEQ ID NO: 677467 - DNA, 120 bp, Artificial Sequence
  ENSG00000186352_4 (sequence is synthesized)
gaaaaggaagtgctgatgtcacgtgggttatgaagaagtctgaagaacgccttcatttcatgcaaatctataagctcctgcttttggctttaccatatgttgtgtctaatctccttctga

SEQ ID NO: 677468 - DNA, 120 bp, Artificial Sequence
  ENSG00000186352_5 (sequence is synthesized)
gaaggacgaaaaactttcttccaagtgaagatccatttaagaacacatgtatttacatgcctataatatgctggttgtgtatgctttgtcttttaagttattaaaggaacgtctaaaaaa

SEQ ID NO: 677469 - DNA, 120 bp, Artificial Sequence
  ENSG00000186352_6 (sequence is synthesized)
agcggcttcaccagccccgcgggtccgaatcgcacgcggccgggtccgctctcccgggaggagagcccggcgtggaccagcgtgacgaccccagcgtgctgcggcctctccccgagggcc

SEQ ID NO: 677470 - DNA, 120 bp, Artificial Sequence
  ENSG00000186352_7 (sequence is synthesized)
cctccacaagggtccctgcgcgggccgggctcggccgttgccactcgggacagccatcccctcgagttcgcgctcgccgtccccgccttcacctcccgggttgggaggcgggcgactgcg

SEQ ID NO: 677471 - DNA, 120 bp, Artificial Sequence
  ENSG00000186352_8 (sequence is synthesized)
agtgcacagcggcttctgaaggcggcgtcgacggggagctgcgcgtggctcccagtttcctggttacgtgcgcgccggcagagccaaaacctgcagccgaaactcccgcttctccgtgga

SEQ ID NO: 677472 - DNA, 120 bp, Artificial Sequence
  ENSG00000186352_9 (sequence is synthesized)
gacacacacaaacatttctcagacgccaagagttgtttcagctgttaaaaacatgtctatagcagcgatgtccaacagaaatataatgcaagacacagatgtaatttaagagtttttttc

SEQ ID NO: 677473 - DNA, 120 bp, Artificial Sequence
  ENSG00000186352_10 (sequence is synthesized)
cagtcttgatgtgaggacatgagaaatttgaagtttttaagtagccacattaataaacgaaacatgaaattttagtatttgacccaatttgtccaaaatgttatcagttcaatatgtaat

SEQ ID NO: 677474 - DNA, 120 bp, Artificial Sequence
  ENSG00000186352_11 (sequence is synthesized)
caaagcaattgctgattagatattttacactttcttttattctgtcttcacaatctggtgtgacagcgtatctcaaatcagactagccacatttcaaatactctagccttaagtggctgt

SEQ ID NO: 677475 - DNA, 120 bp, Artificial Sequence
  ENSG00000186352_12 (sequence is synthesized)
agagctgctgcttttttcctcccgcagtgatctcttgtttgcatagcatttattattccatttaatactgacactcgtatttctagtagtattgtttcattctcattaacattttagtac

SEQ ID NO: 677476 - DNA, 120 bp, Artificial Sequence
  ENSG00000186352_13 (sequence is synthesized)
tatacttaccagagtctagagaccaaaaatgggactgcatggtggaagtttggggataaaactctttttaaaaaaaagtttttaatgttaacgtgtttttaaaaacagatgtcacgtggg

SEQ ID NO: 677477 - DNA, 120 bp, Artificial Sequence
  ENSG00000186352_14 (sequence is synthesized)
tttgaaaaaggtcataatttaaatcgtcaaactagaaccaggatttaatgtgaaaaattaaactgattctttattcacaaatttataataccactctactgcagtctttgactccaagat

SEQ ID NO: 677478 - DNA, 120 bp, Artificial Sequence
  ENSG00000186352_15 (sequence is synthesized)
attttaaatcatatttggtcgctgaggaagacataagttatagtatgcatccttgttccaaaaatctgggcccttccatccgcaccagccctggatagagaagacgggaaaggaaagcct

SEQ ID NO: 677479 - DNA, 120 bp, Artificial Sequence
  ENSG00000186352_16 (sequence is synthesized)
tttacaaagttacaagattatgtcatggaaatcgtgacatcaggctctgtcagcaggaccttggaataagactctaaatggctttatcattcaaggatttgaattcctactagcatagaa

SEQ ID NO: 677480 - DNA, 120 bp, Artificial Sequence
  ENSG00000186364_0 (sequence is synthesized)
agagtcgcgttatggccgaggtgcgggtgcagctgctcctgtcccggcgtccggagtcggtgagcttcgcacggagtgtgtgtggcctcctgggagccggaccagggctcgggacgtggc

SEQ ID NO: 677481 - DNA, 120 bp, Artificial Sequence
  ENSG00000186364_1 (sequence is synthesized)
ccattcactgcagcttgaagcgaggacggcttgtcctctcgagcaggcccttcccaggcgcctccgctaggcttccgctccagcgaccccctttctgcccttttgcggccctggaggagc

SEQ ID NO: 677482 - DNA, 120 bp, Artificial Sequence
  ENSG00000186364_2 (sequence is synthesized)
ggcccagggtccctggggctgagctgcccacagatcgaggtgtggacctgggtgtggccgtcattctgcagtccagcgacaagactgtcttgctaacccgaagggcacgcaccctgagcg

SEQ ID NO: 677483 - DNA, 120 bp, Artificial Sequence
  ENSG00000186364_3 (sequence is synthesized)
tttcccccaacctctgggtacccccgggtgggcacgtggaacttgaggaggagctgctggacggagggcttcgagaactttgggaggagagtggactacacctgccccagggccagttct

SEQ ID NO: 677484 - DNA, 120 bp, Artificial Sequence
  ENSG00000186364_4 (sequence is synthesized)
cttgggtccctctgggtttatgggagtctgcctaccctcctaggctgagctggggtttacccaaataccatcacattgttctgtatctactcgtgatctcccaggaatcacagcagcagt

SEQ ID NO: 677485 - DNA, 120 bp, Artificial Sequence
  ENSG00000186364_5 (sequence is synthesized)
tgcaggcccggatccaaccaaacccaaatgaggtgagcgcccttatgtggctgacaccagatgtagctgctgcagtggctgccgcagaggatgggacagagacacccggacttctccccc

SEQ ID NO: 677486 - DNA, 120 bp, Artificial Sequence
  ENSG00000186364_6 (sequence is synthesized)
tagaggaggatggaagagcccgacctctggtcctgcacatgtccaccctcctgcggatgatcccaaccatggcagaggacaaagagagagtcagcactggaaccaagtttgccctcaagc

SEQ ID NO: 677487 - DNA, 120 bp, Artificial Sequence
  ENSG00000186364_7 (sequence is synthesized)
tctggctgcaacatctgggcagaacacccccaccgtgtaaaagtgcagcttacctggacccagggccagcaaaggaagaatggaacatggaccctcttcccccaaaccaggggtctggaa

SEQ ID NO: 677488 - DNA, 120 bp, Artificial Sequence
  ENSG00000186364_8 (sequence is synthesized)
agtgaagtgtaaaatcccctccctagcccatctccatgacactcacagaacattcacaacctttattatgggtgagagcttcactacaactttagaaataaaaagtaaaattacaacata

SEQ ID NO: 677489 - DNA, 120 bp, Artificial Sequence
  ENSG00000186364_9 (sequence is synthesized)
ggtcctaggccttggcgagcctgaaaaagaagattgggaaggagggcacagggtccttccacctccctggaaaggtgcagaatgagccaggcctaactacagggccatgagcctctagaa

SEQ ID NO: 677490 - DNA, 120 bp, Artificial Sequence
  ENSG00000186364_10 (sequence is synthesized)
gcttaggggggaataagaaacactgtgaacttagatatataaatagagagagacccaagcaataggccgggcctgactcccagacccctgcagatcatggctaaggccttacatcctcct

SEQ ID NO: 677491 - DNA, 120 bp, Artificial Sequence
  ENSG00000186364_11 (sequence is synthesized)
ctgtcatactggagtaggaggcaggggaagtcatctttggagtattttggtttttcttatttatgtacaaaaaagtccacatccacaatccaaaataaagttctctgtccatctctgaaa

SEQ ID NO: 677492 - DNA, 120 bp, Artificial Sequence
  ENSG00000186364_12 (sequence is synthesized)
ggccgtcattctgcagtccagcgacaagactgtcttgctaacccgaagggcacgcaccctgagcgtttcccccaacctctgggtacccccgggtgggcttcgagaactttgggaggagag

SEQ ID NO: 677493 - DNA, 120 bp, Artificial Sequence
  ENSG00000186364_13 (sequence is synthesized)
cccccaacctctgggtacccccgggtgggcacgtggaacttgaggaggaggtaaccagtcagctgatccaacctgagccaagagacccatgcctgggaccatcttgggtgtgggctgagg

SEQ ID NO: 677494 - DNA, 120 bp, Artificial Sequence
  ENSG00000186367_0 (sequence is synthesized)
agatgcagtcagagcatcctcaggcacattaataatggaggagtctgacaagagcagctttgcctgtctttgttttccactgtaggtgaagggagacatggatctctctgttttgccaaa

SEQ ID NO: 677495 - DNA, 120 bp, Artificial Sequence
  ENSG00000186367_1 (sequence is synthesized)
taacaaccatcctgacaaattcctgcagcttgacgtaaagtctttaacgaggagctcagccctccttcaggccagcctggtgaggtttccgggtggaaattatcctgctgcacaacactg

SEQ ID NO: 677496 - DNA, 120 bp, Artificial Sequence
  ENSG00000186367_2 (sequence is synthesized)
gcaaaaccttgtctactcacagagggaaaagaagaatattgctgctcaacgaattaggggatccagtgcagacagccttgtcactgctgatagccccccaccatccatgtcatcagttat

SEQ ID NO: 677497 - DNA, 120 bp, Artificial Sequence
  ENSG00000186367_3 (sequence is synthesized)
gaagaataacccactctatggtgacctaagtttggaggaagctatggaagaaagaaaaaagaacccctcatggaccattgaggaatatgacaaacattccctgcacacaaacctctctgg

SEQ ID NO: 677498 - DNA, 120 bp, Artificial Sequence
  ENSG00000186367_4 (sequence is synthesized)
acatctgaaggaaaatcctaatgacctgcggttttggttgggagacatgtacactccaggttttgacactttattgaaaaaggaagagaaacaagagaagcattcaaaattctgtcgtat

SEQ ID NO: 677499 - DNA, 120 bp, Artificial Sequence
  ENSG00000186367_5 (sequence is synthesized)
gggtctgattttacttgtcgttatctccatcttggttaccatagtgactatcattacttttttcacctgaggaaactgcaacaatcagagctactttaaatttcctaaaaatttttctga

SEQ ID NO: 677500 - DNA, 120 bp, Artificial Sequence
  ENSG00000186367_6 (sequence is synthesized)
taaacatttgaaaccccccccaccaaaataacaaaaaaacacatgtacatgcagtgtgaatggattgttgattgtattattaaatgtaattgtcctgaagaatgtgaatgtcaggcgtgg

SEQ ID NO: 677501 - DNA, 120 bp, Artificial Sequence
  ENSG00000186367_7 (sequence is synthesized)
tatgctggcttctccactttgttctataaaagctttctaagagtgccaccctgaactttgggaagcaggaattctgaggaccataatcacagaatagtcactatatgcaacccacattaa

SEQ ID NO: 677502 - DNA, 120 bp, Artificial Sequence
  ENSG00000186367_8 (sequence is synthesized)
atatctttatagggagcaaacagtatcaaaaattgtcagcagctttgttttcatgcttaaactatattaaccttgttttaaaaatactgttaactctttaccacctcatcctcctgtgat

SEQ ID NO: 677503 - DNA, 120 bp, Artificial Sequence
  ENSG00000186367_9 (sequence is synthesized)
aaaatcttccagttgtgctgccaactgagttagattcattctctgttttattttcctgtatttctgtttaagtcagaaaaaaggaaaaagggaaatatcttattcaaatctattcttatt

SEQ ID NO: 677504 - DNA, 120 bp, Artificial Sequence
  ENSG00000186367_10 (sequence is synthesized)
tccccagtaatcatctatgatgccccaatttcatgttgcaattttaatagaattaaacttggataggccatagttacataattaattacatttagatccaatttatccaaattggctgtg

SEQ ID NO: 677505 - DNA, 120 bp, Artificial Sequence
  ENSG00000186367_11 (sequence is synthesized)
acccctggtggcagtcagtgtgcatatattaccaaccatggtctaggttgggggtccctaggaaagcagagggaatactgctaagagaacagagtttgaagcctaactgctacttgctaa

SEQ ID NO: 677506 - DNA, 120 bp, Artificial Sequence
  ENSG00000186367_12 (sequence is synthesized)
cagactctggcaagttattctctcagagaaggaatgatattacctgcccaacagggctggccaaaggaccaaatacaaaacaggtatgaacagtatctggctcgaaataagcagttgctt

SEQ ID NO: 677507 - DNA, 120 bp, Artificial Sequence
  ENSG00000186367_13 (sequence is synthesized)
aattaaaggcagttgttattattaatttatgctagctaattgacaacctgagtttaccttccattgtctgcagatacctggggacatggttgtagacacagatggggaatcaagtcacca

SEQ ID NO: 677508 - DNA, 120 bp, Artificial Sequence
  ENSG00000186367_14 (sequence is synthesized)
tcctgcccttccttctagaacatcctttcctaagcccctcattcccactcttttctcatctttaaacaacccagccaaaggctatcttatgcaagaaacaaaagagggactttctcttct

SEQ ID NO: 677509 - DNA, 120 bp, Artificial Sequence
  ENSG00000186367_15 (sequence is synthesized)
tctcatgagcctaaagtcagattttgtcccttgatattgccatatcattttgttgtatttgtcttaaagatgcttgaaataaagtacagtaaaagacagtttgggctgggcgcggtggct

SEQ ID NO: 677510 - DNA, 71 bp, Artificial Sequence
  ENSG00000186367_16 (sequence is synthesized)
ggtgacagagtgagactcccaaaaaaagagacagttttactggacaataaagttgttgtgtagaaaaaaaa

SEQ ID NO: 677511 - DNA, 120 bp, Artificial Sequence
  ENSG00000186376_0 (sequence is synthesized)
agacctgatccaatggccgcttgatacaatggtgtcgttcgggaaacgcagccctaacgttggtcctaagctgacaaattggtctgtggacgccaaacttccgtgctaggactttctgcg

SEQ ID NO: 677512 - DNA, 120 bp, Artificial Sequence
  ENSG00000186376_1 (sequence is synthesized)
tgtggaccgggggcctagtcctgcgtgggtccaacacagacaggagaaagctgcctgcttttgtgcctcccggaggtcctggtagaagcgaaacggggacaggagctgcagcgtcccaag

SEQ ID NO: 677513 - DNA, 120 bp, Artificial Sequence
  ENSG00000186376_2 (sequence is synthesized)
cccagtgaggcgaagctactggagacagctctgccgggtccaaagttgggctcaccggctggaacttgaaaccggagcacgccggactcctgctgaagccatcatctctctctcctggcc

SEQ ID NO: 677514 - DNA, 120 bp, Artificial Sequence
  ENSG00000186376_3 (sequence is synthesized)
ccgggcgccttggccggcgggcacaactggtttcggggccaaggtggtctggaagcctgactgtggcgtctggcctgggctcccgcgagcggaaaaggttcccctcctgtgagagggaaa

SEQ ID NO: 677515 - DNA, 120 bp, Artificial Sequence
  ENSG00000186376_4 (sequence is synthesized)
ctatggaagttcctacgcccggagccagaactcctgctgctcccgcccgacccaaggtctagcttggcggcctcccacctgtgcttctgagggttctgcttccaagaggctgctggtgcc

SEQ ID NO: 677516 - DNA, 120 bp, Artificial Sequence
  ENSG00000186376_5 (sequence is synthesized)
cgggacaccagcagtttcgccatgggtgtttcgccatgggagtttcgccatgggtgactttggcctgagatgcgctccatggagcagattctggagttgctggtgttggaggagttcctg

SEQ ID NO: 677517 - DNA, 120 bp, Artificial Sequence
  ENSG00000186376_6 (sequence is synthesized)
actatcctgtcccaggacatccacagcagggtgcagaagctgcaacgggcgagctgtgaagaagctgtaactcttttaaagtatatgtatgacttttaaaagagagagcttgtgaaactg

SEQ ID NO: 677518 - DNA, 120 bp, Artificial Sequence
  ENSG00000186376_7 (sequence is synthesized)
agggaataggtgagtgagagagaggttttatctgccatcttcctcaaggaggcccagcctcccctttattcatagggttctgggtctggtgggtccagaggactgagacatctcgctgtc

SEQ ID NO: 677519 - DNA, 120 bp, Artificial Sequence
  ENSG00000186376_8 (sequence is synthesized)
ttaattccccattcagattttcttgattgccctgagtagaccttacacgggccagtgattttttgttgttgttgttgttgttgtcttctctggaaccttcatcctccagatttcccccca

SEQ ID NO: 677520 - DNA, 120 bp, Artificial Sequence
  ENSG00000186376_9 (sequence is synthesized)
gtgcagtgaagagtgtgctattgcttttggtttccacggggaggcagtgtcgctgtcatagtgtccgctctggaggtagatcaaagggggctttcaactcctggctctgctccctactag

SEQ ID NO: 677521 - DNA, 120 bp, Artificial Sequence
  ENSG00000186376_10 (sequence is synthesized)
ctgtgcgactttgggcaagtgacttttgcttggctgggcttcactttctgcactggtcaaatgcagaaagggtaatagacccttctggggttgtttggaggattaaagggagagcagtat

SEQ ID NO: 677522 - DNA, 120 bp, Artificial Sequence
  ENSG00000186376_11 (sequence is synthesized)
gtccgtaataatcgcactgctggcacacagctagtgcttgaaactgtgagctgctgttaggttaggggcagcagtctggtctcctctgcagagatgggtctcagttaattgtgaacttaa

SEQ ID NO: 677523 - DNA, 120 bp, Artificial Sequence
  ENSG00000186376_12 (sequence is synthesized)
acagtttggcactgaggctttggggtcattgccccagggccacccaagtaagcttgtctaattgagaggaacaggagcagctggagaatgtgggggaggaaccgaagacctatgggggac

SEQ ID NO: 677524 - DNA, 120 bp, Artificial Sequence
  ENSG00000186376_13 (sequence is synthesized)
atgtgtgtactgaaatgggctttctccccacaccctccacacaagcacatacacacattcactctgggtcatggcatcataaaaaccttgagtttaaaccatccctttctcttgttgggt

SEQ ID NO: 677525 - DNA, 120 bp, Artificial Sequence
  ENSG00000186376_14 (sequence is synthesized)
ccaaatggacagactctggttttctattgaagatttacacgcagattcctgtcataatttttcttttctatcgagccctgtcatgatgataagtgatagcaggttggttcctagatcata

SEQ ID NO: 677526 - DNA, 120 bp, Artificial Sequence
  ENSG00000186376_15 (sequence is synthesized)
caccatggacctagcacagaagtgttttcagaagagccttttccttacaaaacagcatgaaagtcattgagccaatggatactgagatttcaaactggagccaatggatacttagaggag

SEQ ID NO: 677527 - DNA, 120 bp, Artificial Sequence
  ENSG00000186376_16 (sequence is synthesized)
ccctgaagtgtagagtagttgctacttcttgttcactaggtctaattagcatgtcatcagtgtaacagactagtgtgttgtcttgtgaaagagaaaggtgataagatccctgtgaactaa

SEQ ID NO: 677528 - DNA, 120 bp, Artificial Sequence
  ENSG00000186376_17 (sequence is synthesized)
actatgatgtagggcttgaaaattgatatacaatacgcctgaggtaggatggcgaaggtgtattcctggtcttaccagctgaaagtaaattgcttctggtggtctttactaacagttatt

SEQ ID NO: 677529 - DNA, 120 bp, Artificial Sequence
  ENSG00000186376_18 (sequence is synthesized)
gagaaaaaaagcattttcaaggtcaagaggtacatactaggttccaggggatatgttaatttgctcaagaaatgaaaccacatctggaacagcagctgcaattggagtcatcacctggct

SEQ ID NO: 677530 - DNA, 120 bp, Artificial Sequence
  ENSG00000186376_19 (sequence is synthesized)
tagtttacaatgacccactaccatcttccaagatccatctgccttctgcataggccaaacaggtccacagaactcgaccctggaagagagagtcggggtcaggtcttcgggaggtggagg

SEQ ID NO: 677531 - DNA, 120 bp, Artificial Sequence
  ENSG00000186376_20 (sequence is synthesized)
gatcgaatgagggaactgatattccaagactccccacatcttggagcttcactcgccaggcatcccgcgctttcctgacgtcgcttcccctagtggtgcagcagcggagagctttgctac

SEQ ID NO: 677532 - DNA, 120 bp, Artificial Sequence
  ENSG00000186376_21 (sequence is synthesized)
ccagagcagcagggaggcgtggccacagaggcagaggcgtagtcgagccgaggaagaggaaagtggcctccggggaagccagagctgactgaagtgctcttgggaagaacaattcattga

SEQ ID NO: 677533 - DNA, 120 bp, Artificial Sequence
  ENSG00000186376_22 (sequence is synthesized)
tttggtaccaacctgatgcaccctgatttgtcaaaggtggtaccaggtgggtgtcagtgtcacatacaagagtaaaactgttcctagagcaaatggcgatgagagagctgaacgcggatt

SEQ ID NO: 677534 - DNA, 120 bp, Artificial Sequence
  ENSG00000186376_23 (sequence is synthesized)
agagaatcttggtcctgagagcgcttgcaggcacttctggagcttccgttatcatgaagcaaccggaccgcttgagactatcagccaacttcagaaattgtgccatcagtggctgaggcc

SEQ ID NO: 677535 - DNA, 120 bp, Artificial Sequence
  ENSG00000186376_24 (sequence is synthesized)
agagatccactcaaaagagcagatcttggaaatgctggtgttagagcagttcctgagcattctgcccaaggagacccagaactgggtgcagaagcatcatccacagaatgtcaaacaggc

SEQ ID NO: 677536 - DNA, 120 bp, Artificial Sequence
  ENSG00000186376_25 (sequence is synthesized)
tctggtcctggtggaattcttgcagagggagcctgatggaacaaagaatgaggtcacagcccatgagctgggaaaggaggcagtgctcttgggaggaacagcagtggccccaggcttcaa

SEQ ID NO: 677537 - DNA, 120 bp, Artificial Sequence
  ENSG00000186376_26 (sequence is synthesized)
gtggaagccagcagagccccaaccaatgggtgtgttccagaaagaatattggaatacataccgggtactacaagaacagctgggctggaacactcacaaagaaacccagcctgtatatga

SEQ ID NO: 677538 - DNA, 120 bp, Artificial Sequence
  ENSG00000186376_27 (sequence is synthesized)
aagagctgtgcatgatcaacagatgttagccctttctgagcagaaaagaatcaaacactggaagatggcatctaaactcatcctgcctgagtccctgagtttgttgacatttgaagatgt

SEQ ID NO: 677539 - DNA, 120 bp, Artificial Sequence
  ENSG00000186376_28 (sequence is synthesized)
ggctgtgtatttttctgaggaagagtggcaattattgaatcctcttgagaagactctctacaatgatgtaatgcaggatatctatgagactgtcatctctctagggttaaagctaaaaaa

SEQ ID NO: 677540 - DNA, 120 bp, Artificial Sequence
  ENSG00000186376_29 (sequence is synthesized)
tgacactggaaatgatcatcctatatctgtttctacatcagaaatacaaacatcaggatgcgaagtatcaaaaaagaccagaatgaaaattgcccagaaaacaatgggcagggaaaatcc

SEQ ID NO: 677541 - DNA, 120 bp, Artificial Sequence
  ENSG00000186376_30 (sequence is synthesized)
tggtgatacacacagtgtacagaaatggcatcgagcttttccaaggaagaaaagaaagaaacctgcaacttgtaaacaagagcttccaaaacttatggatcttcatgggaaaggccccac

SEQ ID NO: 677542 - DNA, 120 bp, Artificial Sequence
  ENSG00000186376_31 (sequence is synthesized)
aggggagaaaccttttaagtgtcaggaatgtgggaaaagcttcagagttagctctgatcttattaaacaccacagaattcacactggagagaaaccctataaatgtcaacaatgtgacag

SEQ ID NO: 677543 - DNA, 120 bp, Artificial Sequence
  ENSG00000186376_32 (sequence is synthesized)
gaggtttagatggagttcagatcttaataagcacttcatgacccatcaaggaataaaaccatatagatgctcatggtgtgggaaaagctttagtcataacacaaatctacacacacacca

SEQ ID NO: 677544 - DNA, 120 bp, Artificial Sequence
  ENSG00000186376_33 (sequence is synthesized)
aagaattcacacaggagagaagccctttaaatgtgatgaatgtggaaaaagattcattcagaactcccaccttattaaacaccagagaactcacacaggtgagcagccttatacgtgtag

SEQ ID NO: 677545 - DNA, 120 bp, Artificial Sequence
  ENSG00000186376_34 (sequence is synthesized)
cttatgcaagagaaactttagtaggcgatcgagccttcttagacaccagaaactccacagaagaagggaagcatgtctagtgtctccaaactgaggaaagttaccatgtagagcttgact

SEQ ID NO: 677546 - DNA, 120 bp, Artificial Sequence
  ENSG00000186376_35 (sequence is synthesized)
ttagaagtggtgaaagaatacaaaattatgaggcacccaatgataggaatctgtgattaataaaacatttgggaagggtacatgttacacttcacaaaaaggaatctaagctgtctgttt

SEQ ID NO: 677547 - DNA, 120 bp, Artificial Sequence
  ENSG00000186376_36 (sequence is synthesized)
tattcagcattgcatcttctgtgcctagcacaagagttgatacataaggagtactttataaataaaaaaatgaaagtgtagtgatgagattcctttagctatctatctatatgtatatat

SEQ ID NO: 677548 - DNA, 120 bp, Artificial Sequence
  ENSG00000186376_37 (sequence is synthesized)
ctggttattcaaagcttccccacccccagtcatctaaatttttcaggtatcaagtgctcaacagacatatgatagtcaaggctcttagtctcattttttactctttgtcaagagaaatgg

SEQ ID NO: 677549 - DNA, 120 bp, Artificial Sequence
  ENSG00000186376_38 (sequence is synthesized)
aaaataagagtacttgggccctcttaagggagctcagagagaattactaaattagggacagtttcaatagttatcattctgtctacatgaacaatcaagaccaggactcagggaacttta

SEQ ID NO: 677550 - DNA, 120 bp, Artificial Sequence
  ENSG00000186376_39 (sequence is synthesized)
ctctgtaacagaaagagaggattcagtgtttgccctgggagaattgtcccattcttgttgcttctctcctgagtacccactaccacaatgtcttctgtcaaggaattacaagtagcaagg

SEQ ID NO: 677551 - DNA, 120 bp, Artificial Sequence
  ENSG00000186376_40 (sequence is synthesized)
gaaggtctgaatgtaaggacaggcctagggaccttgcaagcacttgatatctctcctcttgctgactttgtcaacatagacatatagtgaaatgatgagggaggcagtcttggccctcat

SEQ ID NO: 677552 - DNA, 120 bp, Artificial Sequence
  ENSG00000186376_41 (sequence is synthesized)
ccaggtatctggtttttttttgtagaaagcacagataagtggtaaatggtctttttctgactttcattatgtggactggatggaggctttcaaactggtgccatactgctgcaggaccta

SEQ ID NO: 677553 - DNA, 120 bp, Artificial Sequence
  ENSG00000186376_42 (sequence is synthesized)
aagggagccccatctttatggctgatcaactacaaccctatatgcctgaatactctgcaagaaggcctggagattttgcaaaactgatttattgagaatggcaaggagagccttgtgaac

SEQ ID NO: 677554 - DNA, 120 bp, Artificial Sequence
  ENSG00000186376_43 (sequence is synthesized)
ttttagctttggtgcacagctgataccaggagggaacatcctgaagtgtcagagaaaagtaaggcatatggctcacagtgatgatgccagtcagagccaggccagatggaaattgttttc

SEQ ID NO: 677555 - DNA, 120 bp, Artificial Sequence
  ENSG00000186376_44 (sequence is synthesized)
tgatgttactggttttcttttccctattagccaaagtgactatctcttaagagaagataatgtgacgtcaagggaagttggaaggcatggatttatatctatgtcagatcctggtttata

SEQ ID NO: 677556 - DNA, 120 bp, Artificial Sequence
  ENSG00000186376_45 (sequence is synthesized)
atgttggccaaggcttatttatatatgtttatttagtattccataaaattgtacttcgtaatgaaaatgacacattttatcttaaatttagacaataaacaaaactttgttaccaaatca

SEQ ID NO: 677557 - DNA, 120 bp, Artificial Sequence
  ENSG00000186376_46 (sequence is synthesized)
ccagaaggctgataccatggaagacatcaccttggcttcctggctgtctggttagtgatttgagcaatgagaggcagcagctagaaatgaaagagtagaagaagagagtgtctcctgaca

SEQ ID NO: 677558 - DNA, 120 bp, Artificial Sequence
  ENSG00000186376_47 (sequence is synthesized)
ctgtgtgcatggtctccagtcagcctctgattcctgtgagtcagctgcatccagattcccacccccttccccgtcccgagaaggttacatttggccgccactaagatctcctgagaaaaa

SEQ ID NO: 677559 - DNA, 120 bp, Artificial Sequence
  ENSG00000186376_48 (sequence is synthesized)
tctcttcagaggaattttggccaaatcttctctccctctcctacagccactttcctcctgaatttcttcctttcccagggcctgattggttcagcaccaagtgaagtcatagtcactatg

SEQ ID NO: 677560 - DNA, 120 bp, Artificial Sequence
  ENSG00000186376_49 (sequence is synthesized)
gtgactcacaattgtcctcagaacctagtgccaacagtctgcaagattcaaacactggccaccatgcctggcttccttctggttcaagcctgaataaggtccctcttctgtgctgtcttc

SEQ ID NO: 677561 - DNA, 120 bp, Artificial Sequence
  ENSG00000186376_50 (sequence is synthesized)
ctgaagccatctgtggagtcaagcagtcatggctcagggacactctgaagtaggtcccagcacatctgcatggagcatcaggaggaaggtggatgaatacttaagacccagcctggcctc

SEQ ID NO: 677562 - DNA, 120 bp, Artificial Sequence
  ENSG00000186376_51 (sequence is synthesized)
taaatcggtgctgagcgttttactcagtagacagcttgggaatcatagaaacgatgcggatctgacagagtggctgtggacactgaagcaagccataccagggtggacctggcctttgcc

SEQ ID NO: 677563 - DNA, 120 bp, Artificial Sequence
  ENSG00000186376_52 (sequence is synthesized)
gacacgccacacaatcaacccacctctgccccctggggaggatggaaaatccaagaaaatggtgtggatcaataaatccttcccctgatgcaaccattacaagtggaagctgtgttctca

SEQ ID NO: 677564 - DNA, 120 bp, Artificial Sequence
  ENSG00000186376_53 (sequence is synthesized)
taggaaacagaaattttccctggctattttctacccacagctgtgcatgatcaacagatgttagccctttctgagcagaaaagaatcaaacactggaagatggcatctaaactcatcctg

SEQ ID NO: 677565 - DNA, 120 bp, Artificial Sequence
  ENSG00000186376_54 (sequence is synthesized)
cctgagtccctggtgagctgttatttctggcttttttcaggtgacttgactgtggccttgcctctgcttgtccctattgcctaggactcatagtgtccagcaggtgctttgaggcatttt

SEQ ID NO: 677566 - DNA, 120 bp, Artificial Sequence
  ENSG00000186376_55 (sequence is synthesized)
agccccagttattctctaggcaactaggcttggcacagtgggaactgggcacctcccaggtgatttactgatcctctttgctccttcctttctgccttctcacttttttcccctaaatct

SEQ ID NO: 677567 - DNA, 120 bp, Artificial Sequence
  ENSG00000186376_56 (sequence is synthesized)
tgtactgttcacatcttcagcacctggcctaccatgtaattcagaaatgggtggtaggacagcttctgaagtggcaagtactaaactatagcccattctcttctttagagtttgttgaca

SEQ ID NO: 677568 - DNA, 120 bp, Artificial Sequence
  ENSG00000186377_0 (sequence is synthesized)
actgcctttccttcttcccgcgagtcagaagcttcgcgagggcccagagaggcggtggggtgggcgaccctacgccagctccgggcgggagaaagcccaccctctcccgcgccccaggaa

SEQ ID NO: 677569 - DNA, 120 bp, Artificial Sequence
  ENSG00000186377_1 (sequence is synthesized)
accgccggcgttcggcgctgcgcagagccatggaattctcctggctggagacgcgctgggcgcggcccttttacctggcgttcgtgttctgcctggccctggggctgctgcaggccatta

SEQ ID NO: 677570 - DNA, 120 bp, Artificial Sequence
  ENSG00000186377_2 (sequence is synthesized)
agctgtacctgcggaggcagcggctgctgcgggacctgcgccccttcccagcgccccccacccactggttccttgggcaccagaagtttattcaggatgataacatggagaagcttgagg

SEQ ID NO: 677571 - DNA, 120 bp, Artificial Sequence
  ENSG00000186377_3 (sequence is synthesized)
aaattattgaaaaataccctcgtgccttccctttctggattgggccctttcaggcatttttctgtatctatgacccagactatgcaaagacacttctgagcagaacagatcccaagtccc

SEQ ID NO: 677572 - DNA, 120 bp, Artificial Sequence
  ENSG00000186377_4 (sequence is synthesized)
agtacctgcagaaattctcacctccacttcttggaaaaggactagcggctctagacggacccaagtggttccagcatcgtcgcctactaactcctggattccattttaacatcctgaaag

SEQ ID NO: 677573 - DNA, 120 bp, Artificial Sequence
  ENSG00000186377_5 (sequence is synthesized)
catacattgaggtgatggctcattctgtgaaaatgatgctggataagtgggagaagatttgcagcactcaggacacaagcgtggaggtctatgagcacatcaactcgatgtctctggata

SEQ ID NO: 677574 - DNA, 120 bp, Artificial Sequence
  ENSG00000186377_6 (sequence is synthesized)
taatcatgaaatgcgctttcagcaaggagaccaactgccagacaaacagcacccatgatccttatgcaaaagccatatttgaactcagcaaaatcatatttcaccgcttgtacagtttgt

SEQ ID NO: 677575 - DNA, 120 bp, Artificial Sequence
  ENSG00000186377_7 (sequence is synthesized)
tgtatcacagtgacataattttcaaactcagccctcagggctaccgcttccagaagttaagccgagtgttgaatcagtacacagatacaataatccaggaaagaaagaaatccctccagg

SEQ ID NO: 677576 - DNA, 120 bp, Artificial Sequence
  ENSG00000186377_8 (sequence is synthesized)
ctggggtaaagcaggataacactccgaagaggaagtaccaggattttctggatattgtcctttctgccaaggatgaaagtggtagcagcttctcagatattgatgtacactctgaagtga

SEQ ID NO: 677577 - DNA, 120 bp, Artificial Sequence
  ENSG00000186377_9 (sequence is synthesized)
gggaggaggtcaggggcatcctgggggatgggtcttctatcacttgggaccagctgggtgagatgtcgtacaccacaatgtgcatcaaggagacgtgccgattgattcctgcagtcccgt

SEQ ID NO: 677578 - DNA, 120 bp, Artificial Sequence
  ENSG00000186377_10 (sequence is synthesized)
ccatttccagagatctcagcaagccacttaccttcccagatggatgcacattgcctgcagggatcaccgtggttcttagtatttggggtcttcaccacaaccctgctgtctggaaaaacc

SEQ ID NO: 677579 - DNA, 120 bp, Artificial Sequence
  ENSG00000186377_11 (sequence is synthesized)
caaaggtctttgaccccttgaggttctctcaggagaattctgatcagagacacccctatgcctacttaccattctcagctggatcaaggaactgcattgggcaggagtttgccatgattg

SEQ ID NO: 677580 - DNA, 120 bp, Artificial Sequence
  ENSG00000186377_12 (sequence is synthesized)
agttaaaggtaaccattgccttgattctgctccacttcagagtgactccagaccccaccaggcctcttactttccccaaccattttatcctcaagcccaagaatgggatgtatttgcacc

SEQ ID NO: 677581 - DNA, 120 bp, Artificial Sequence
  ENSG00000186377_13 (sequence is synthesized)
tgaagaaactctctgaatgttagatctcagggtacaatgattaaacgtactttgtttttcgaagttaaatttacagctaatgatccaagcagatagaaagggatcaatgtatggtgggag

SEQ ID NO: 677582 - DNA, 120 bp, Artificial Sequence
  ENSG00000186377_14 (sequence is synthesized)
gattggaggttggtgggataggggtctctgtgaagagatccaaaatcatttctaggtacacagtgtgtcagctagatctgtttctatataactttgggagattttcagatcttttctgtt

SEQ ID NO: 677583 - DNA, 120 bp, Artificial Sequence
  ENSG00000186377_15 (sequence is synthesized)
aaactttcactactattaatgctgtatacaccaatagactttcatatattttctgttgtttttaaaatagttttcagaattatgcaagtaataagtgcatgtatgctcactgtcaaaaat

SEQ ID NO: 677584 - DNA, 120 bp, Artificial Sequence
  ENSG00000186377_16 (sequence is synthesized)
tcccaacactagaaaatcatgtagaataaaaattttaaatctcacttcacttagccgacattccatgccctgaccaatcctactgcttttcctaaaaacagaataatttggtgtgcattc

SEQ ID NO: 677585 - DNA, 120 bp, Artificial Sequence
  ENSG00000186377_17 (sequence is synthesized)
tttcagactttttcctatacattttatatgtagaaatgtagcaatgtatttgtatagatgtgatcattcctatattgttattgatttttttcacttaataaaaattcaccttattcctta

SEQ ID NO: 677586 - DNA, 120 bp, Artificial Sequence
  ENSG00000186377_18 (sequence is synthesized)
gccgggaggaggtcaggggcatcctgggggatgggtcttctatcacttggtaagatctgcacccctaaattttcctgctagttttccccctgagattttgctttattttttgcgctggta

SEQ ID NO: 677587 - DNA, 120 bp, Artificial Sequence
  ENSG00000186377_19 (sequence is synthesized)
ccttagtgaccctagtgcctcaggatatgtgtaggtgaaacagaagaagtaggctacttttctgttctttctaaagagagctccaaattattctcttgtctttcaggaaaaaaaaaaaaa

SEQ ID NO: 677588 - DNA, 120 bp, Artificial Sequence
  ENSG00000186393_0 (sequence is synthesized)
tggctttgctcctctttctgggaaggggttgcccggctgtgctgccaccatgtcttttcgactttctggtggatccaggaggatctgctcgcgaactgggtctggtaggctgtccggtgg

SEQ ID NO: 677589 - DNA, 120 bp, Artificial Sequence
  ENSG00000186393_1 (sequence is synthesized)
aggaacaggcttcgtggctgggaatgtgtgtgttggatcgggagcaagaagcagcttttcttgtactcttgagggcatctcttctggaggaagcttctgcaatagcggtggagggttggg

SEQ ID NO: 677590 - DNA, 120 bp, Artificial Sequence
  ENSG00000186393_2 (sequence is synthesized)
aagtggtgcctgtgctggttttcttggcaatgagcacagcctcctctctgggaatgaaaaggtgaccatgcagaatctcaacgaccgcctggcatcctacctggaccatgtgcatgctct

SEQ ID NO: 677591 - DNA, 120 bp, Artificial Sequence
  ENSG00000186393_3 (sequence is synthesized)
agaggaggccaacgcagacctggagcagaagatcaagggctggtacgagaaatgtgagcctggctcttcccgggaacacgatcatgactatagcagatacttctcagtcatagaagatct

SEQ ID NO: 677592 - DNA, 120 bp, Artificial Sequence
  ENSG00000186393_4 (sequence is synthesized)
taaaaggcagattatttctgcgaccatctgcaatgccagcattgttctacaaaatgacaatgccagactgaccgctgatgacttcaggctgaagtatgaaaatgagctggctctgcacca

SEQ ID NO: 677593 - DNA, 120 bp, Artificial Sequence
  ENSG00000186393_5 (sequence is synthesized)
cagtgttgaggccgacaccagtggtcttcgcagagtgttggatgaactgaccctttgtacaaccgacctggagatacagtgtgagaccctcagtgaggaattgacctacctcaaaaaaag

SEQ ID NO: 677594 - DNA, 120 bp, Artificial Sequence
  ENSG00000186393_6 (sequence is synthesized)
tcatgaggaggaaatggaagtcttgcaatatacagctggggggaacgtgaacgtggagatgaatgcaaccccaggagtggacctaactgtcctgttgaacaacatgagggctgagtatga

SEQ ID NO: 677595 - DNA, 120 bp, Artificial Sequence
  ENSG00000186393_7 (sequence is synthesized)
gtgcaacgctgcaacaacagatttccgatcatgagggagcagccacagcagccagaaatgagctgaccgaattaaaacgcaatctgcaaaccctggaaatagaacttcagtccctcatgg

SEQ ID NO: 677596 - DNA, 120 bp, Artificial Sequence
  ENSG00000186393_8 (sequence is synthesized)
ctgtgaaacattcctatgaatgctccttggctgagactgaaggaaattactgcaatcaactccagcaaattcaggatcagataggggtgatggaggaacaactgcaacagattcgaacag

SEQ ID NO: 677597 - DNA, 120 bp, Artificial Sequence
  ENSG00000186393_9 (sequence is synthesized)
aaacagaaggccagaagctggagtatgaacagcttcttgatgtaaaaatatttttagaaaaagaaattgacatttattgcaacttactagatggagaagaaagaaaaagcaaatccacat

SEQ ID NO: 677598 - DNA, 120 bp, Artificial Sequence
  ENSG00000186393_10 (sequence is synthesized)
gttacaaatcaaaaggatacaggcctgtgaattctggaaatcaagccaaagactcaacagaagaaactattgttaaaacagtggttgaggaactggatcaaattggcaatctcctttcac

SEQ ID NO: 677599 - DNA, 120 bp, Artificial Sequence
  ENSG00000186393_11 (sequence is synthesized)
tgagagtccactcagttgaagaaaagtcctctaaaataagcaacattacagtagagcaacgagtaccttctaaagcaccataatgaggaaaaagttatttggaaagaaagaaagaaagag

SEQ ID NO: 677600 - DNA, 120 bp, Artificial Sequence
  ENSG00000186393_12 (sequence is synthesized)
agagagagagaaagaaagaaagaaaggctgcctttgcaaaaatcctactggtcaaataacctaaggaaattattcatttctgttcttaaaagggctagaatttgttctccttctcttcct

SEQ ID NO: 677601 - DNA, 120 bp, Artificial Sequence
  ENSG00000186393_13 (sequence is synthesized)
tttctcatgttctatgcatgtaatccttttccagagtagaaaaatcctgctctgtccctaatttttgtttttattttgggggccttttttgacatttcattaaaaattcttctattgcaa

SEQ ID NO: 677602 - DNA, 120 bp, Artificial Sequence
  ENSG00000186395_0 (sequence is synthesized)
aggcactccctgggctaaacagcatcaccatgtctgttcgatacagctcaagcaagcactactcttcctcccgcagtggaggaggaggaggaggaggaggatgtggaggaggaggaggag

SEQ ID NO: 677603 - DNA, 120 bp, Artificial Sequence
  ENSG00000186395_1 (sequence is synthesized)
tgtcatccctaagaatttctagcagcaaaggctcccttggtggaggatttagctcaggggggttcagtggtggctcttttagccgtgggagctctggtgggggctgctttgggggctcat

SEQ ID NO: 677604 - DNA, 120 bp, Artificial Sequence
  ENSG00000186395_2 (sequence is synthesized)
caggtggctatggaggattaggaggttttggtggaggtagctttcgtggaagctatggaagtagcagctttggtgggagttatggaggcatctttggagggggcagtttcggaggtggca

SEQ ID NO: 677605 - DNA, 120 bp, Artificial Sequence
  ENSG00000186395_3 (sequence is synthesized)
gctttggtgggggcagctttggtggaggcggctttggtggaggcggctttggaggaggctttggtggtggatttggaggagatggtggccttctctctggaaatgaaaaagtaaccatgc

SEQ ID NO: 677606 - DNA, 120 bp, Artificial Sequence
  ENSG00000186395_4 (sequence is synthesized)
agaatctgaatgaccgcctggcttcctacttggacaaagttcgggctctggaagaatcaaactatgagctggaaggcaaaatcaaggagtggtatgaaaagcatggcaactcacatcagg

SEQ ID NO: 677607 - DNA, 120 bp, Artificial Sequence
  ENSG00000186395_5 (sequence is synthesized)
gggagcctcgtgactacagcaaatactacaaaaccatcgatgaccttaaaaatcagattctcaacctaacaactgataatgccaacatcctgcttcagatcgacaatgccaggctggcag

SEQ ID NO: 677608 - DNA, 120 bp, Artificial Sequence
  ENSG00000186395_6 (sequence is synthesized)
ctgatgacttcaggctgaagtatgagaatgaggtagctctgcgccagagcgtggaggctgacatcaacggcctgcgtagggtgctggatgagctgaccctgaccaaggctgacctggaga

SEQ ID NO: 677609 - DNA, 120 bp, Artificial Sequence
  ENSG00000186395_7 (sequence is synthesized)
tgcaaattgagagcctgactgaagagctggcctatctgaagaagaaccacgaggaggaaatgaaagaccttcgaaatgtgtccactggtgatgtgaatgtggaaatgaatgctgccccgg

SEQ ID NO: 677610 - DNA, 120 bp, Artificial Sequence
  ENSG00000186395_8 (sequence is synthesized)
ggaactgactacagaaattgataataacattgaacagatatccagctataaatctgagattactgaattgagacgtaatgtacaagctctggagatagaactacagtcccaactggcctt

SEQ ID NO: 677611 - DNA, 120 bp, Artificial Sequence
  ENSG00000186395_9 (sequence is synthesized)
gaaacaatccctggaagcctccttggcagaaacagaaggtcgctactgtgtgcagctctcacagattcaggcccagatatccgctctggaagaacagttgcaacagattcgagctgaaac

SEQ ID NO: 677612 - DNA, 120 bp, Artificial Sequence
  ENSG00000186395_10 (sequence is synthesized)
cgagtgccagaatactgaataccaacaactcctggatattaagatccgactggagaatgaaattcaaacctaccgcagcctgctagaaggagagggaagttccggaggcggcggacgcgg

SEQ ID NO: 677613 - DNA, 120 bp, Artificial Sequence
  ENSG00000186395_11 (sequence is synthesized)
tgctagaaggagagggaagttccggaggcggcggacgcggcggcggaagtttcggcggcggctacggcggcggaagctccggcggcggaagctccggcggcggccacggcggcggccacg

SEQ ID NO: 677614 - DNA, 120 bp, Artificial Sequence
  ENSG00000186395_12 (sequence is synthesized)
tacggaggcggaagctccggcggcggaagctccggcggcggctacgggggcggaagctccagcggcggccacggcggcagttccagcggcggctacggtggtggcagttccggcggcggc

SEQ ID NO: 677615 - DNA, 120 bp, Artificial Sequence
  ENSG00000186395_13 (sequence is synthesized)
cagctccggcggcggcagcagctccggcggcggatacggcggcggcagctccagcggaggccacaagtcctcctcttccgggtccgtgggcgagtcttcatctaagggaccaagatacta

SEQ ID NO: 677616 - DNA, 120 bp, Artificial Sequence
  ENSG00000186395_14 (sequence is synthesized)
acaaaaccagagtaatcaagacaattattgaagaggtggcgcccgacggtagagttctttcatctatggttgaatcagaaaccaagaaacactactattaaactgcatcaagaggaaaga

SEQ ID NO: 677617 - DNA, 120 bp, Artificial Sequence
  ENSG00000186395_15 (sequence is synthesized)
gtctcccttcacacagaccattatttacagatgcatggaaaacaaagtctccaagaaaacacttctgtcttgatggtctatggaaatagaccttgaaaataaggtgtctacaaggtgttt

SEQ ID NO: 677618 - DNA, 120 bp, Artificial Sequence
  ENSG00000186395_16 (sequence is synthesized)
tgtggtttctgtatttcttcttttcactttaccagaaagtgttctttaatggaaagaaaaacaactttctgttctcatttactaatgaatttcaataaactttcttactgatgcaaacta

SEQ ID NO: 677619 - DNA, 120 bp, Artificial Sequence
  ENSG00000186399_0 (sequence is synthesized)
atggcagaagaaactcaacacaacaaattggctgcagccaagaaaaagttaaaagaatattggcagaaaaacagacctagagttccagcaggagtgaacaggaacaggaaaacaaatggc

SEQ ID NO: 677620 - DNA, 120 bp, Artificial Sequence; identical to SEQ ID NO: 622579
  ENSG00000186399_1 (sequence is synthesized)

SEQ ID NO: 677621 - DNA, 120 bp, Artificial Sequence; identical to SEQ ID NO: 622580
  ENSG00000186399_2 (sequence is synthesized)

SEQ ID NO: 677622 - DNA, 120 bp, Artificial Sequence
  ENSG00000186399_3 (sequence is synthesized)
aacaacgagagacagaaagccgaaagggtgctagaggttcaaatccagacattgatcatacagaaagaggaactaaatacggacctgtaccacatggaacgttctctcagatactttgaa

SEQ ID NO: 677623 - DNA, 120 bp, Artificial Sequence; identical to SEQ ID NO: 622582
  ENSG00000186399_4 (sequence is synthesized)

SEQ ID NO: 677624 - DNA, 120 bp, Artificial Sequence; identical to SEQ ID NO: 622583
  ENSG00000186399_5 (sequence is synthesized)

SEQ ID NO: 677625 - DNA, 120 bp, Artificial Sequence
  ENSG00000186399_6 (sequence is synthesized)
tgtgctgaacatatagaaggagagagggcccggtggcatcagaggatgagtaaaatgtcgcaggagatttgcacattaaagaaagagaagcaggatatgcgttgggtagagcagctggag

SEQ ID NO: 677626 - DNA, 120 bp, Artificial Sequence; identical to SEQ ID NO: 622585
  ENSG00000186399_7 (sequence is synthesized)

SEQ ID NO: 677627 - DNA, 120 bp, Artificial Sequence; identical to SEQ ID NO: 622586
  ENSG00000186399_8 (sequence is synthesized)

SEQ ID NO: 677628 - DNA, 120 bp, Artificial Sequence
  ENSG00000186399_9 (sequence is synthesized)
ctacaggagaagcttggcgaggagcacctggaagtggccagccagcagaaccagcagctaacggcccagctgagcctcatggctctccctggggaaggacacggaggagaacatctggac

SEQ ID NO: 677629 - DNA, 120 bp, Artificial Sequence
  ENSG00000186399_10 (sequence is synthesized)
agtgagggggaggaggcacctcagcccatgccgagtgtcccagaggacccggagagcagggaggccatgagcagctttatggaccacctgaaggagaaggcagacctgagtgagctgctg

SEQ ID NO: 677630 - DNA, 120 bp, Artificial Sequence; identical to SEQ ID NO: 622589
  ENSG00000186399_11 (sequence is synthesized)

SEQ ID NO: 677631 - DNA, 120 bp, Artificial Sequence; identical to SEQ ID NO: 622590
  ENSG00000186399_12 (sequence is synthesized)

SEQ ID NO: 677632 - DNA, 80 bp, Artificial Sequence
  ENSG00000186399_13 (sequence is synthesized)
gtgtgtaagtgtattttgtaaaaactgtaaaggaggttgtggctgtaggggctgacggttctcatgaatattactgctct

SEQ ID NO: 677633 - DNA, 120 bp, Artificial Sequence
  ENSG00000186399_14 (sequence is synthesized)
taattcttaagattgtggatggactgctgggtactggttaagaattctggctttagccgggtgtggtggcccacgcctgtaatcctagcacattgggaggccaagacaggcggatcatga

SEQ ID NO: 677634 - DNA, 63 bp, Artificial Sequence
  ENSG00000186399_15 (sequence is synthesized)
aattctgggtttgaatcctgcctctccatctgctctgctagggatatgatttagggcaagttg

SEQ ID NO: 677635 - DNA, 120 bp, Artificial Sequence
  ENSG00000186399_16 (sequence is synthesized)
tcaaaaaaaaaaaaaggaattctgggtttgaatcctgcctctccatctgctctgctagggatatgatttagggcaagttgctagacctcattgggcctctcttttcacatctgtataata

SEQ ID NO: 677636 - DNA, 86 bp, Artificial Sequence
  ENSG00000186399_17 (sequence is synthesized)
ggcctgctgtaaacactcaggacacccaggatatgaccaggacaaagagaacagccacttgccatcaggagtcactgaaggggccc

SEQ ID NO: 677637 - DNA, 84 bp, Artificial Sequence
  ENSG00000186399_18 (sequence is synthesized)
attttcctcatccccagtctcaaggggaaaccaggacaaagagaacagccacttgccatcaggagtcactgaaggggccccagg

SEQ ID NO: 677638 - DNA, 78 bp, Artificial Sequence
  ENSG00000186399_19 (sequence is synthesized)
tggcacaaaggagttatgggacaaaaggtccaagataggcagaaaagaaaatgttgtgggggacagaacatctccatg

SEQ ID NO: 677639 - DNA, 120 bp, Artificial Sequence
  ENSG00000186399_20 (sequence is synthesized)
ggaaggccctacatcatctgctaccctgaaagatctggaggtaagaggctctgggtggaggtgcagtgacccttcgggtcaaccctccaacctcctcctccaggtgggactgggtgcccc

SEQ ID NO: 677640 - DNA, 120 bp, Artificial Sequence
  ENSG00000186399_21 (sequence is synthesized)
ccagctgagacagcccacacaccccagccctaacgatcgttctctctacctctctccccactcctgctccacctcctcctctctgcatgcacctcagagcccgtgccaagaacgagcagt

SEQ ID NO: 677641 - DNA, 61 bp, Artificial Sequence
  ENSG00000186399_22 (sequence is synthesized)
ggggtccctggtgcccgggacaaatagggagcttgggtgcccaggcctcacctggagggac

SEQ ID NO: 677642 - DNA, 120 bp, Artificial Sequence
  ENSG00000186399_23 (sequence is synthesized)
tttccatcctatatctgctgtgaagaaccgtacctggcccatacgtgctcagtaagtgtttattgaatgaacccacttttctaaatcacaagctgccagaaggaggggcctttctgaaac

SEQ ID NO: 677643 - DNA, 70 bp, Artificial Sequence
  ENSG00000186399_24 (sequence is synthesized)
ggggcctttctgaaactccatctctagaggtttatgttgctgtcctctcaagagattccagattcagact

SEQ ID NO: 677644 - DNA, 72 bp, Artificial Sequence
  ENSG00000186399_25 (sequence is synthesized)
gtccttgggagcttgaggagagtttaccggttcgtgttcccattacttcctgatctggggaatagagttgag

SEQ ID NO: 677645 - DNA, 88 bp, Artificial Sequence
  ENSG00000186399_26 (sequence is synthesized)
tttcctcgcgacatgactgctgggtttggggggcactcagacatagaggccccagtctcgtctcacccactcccagcctggggaagaa

SEQ ID NO: 677646 - DNA, 81 bp, Artificial Sequence
  ENSG00000186399_27 (sequence is synthesized)
gcactcagacatagaggccccagtctctcagattccaccccatccccacagggcccctgataacctggtcccatgggtggg

SEQ ID NO: 677647 - DNA, 69 bp, Artificial Sequence
  ENSG00000186399_28 (sequence is synthesized)
agagacagaaagccgaaagggtgctagaggtgagtggagggtgtgcagtttcctcctgtcctccggaga

SEQ ID NO: 677648 - DNA, 62 bp, Artificial Sequence
  ENSG00000186399_29 (sequence is synthesized)
agcaaacaacgagagacagaaagccgaaagggtgctagaggtgagtggagggtgtgcagttt

SEQ ID NO: 677649 - DNA, 72 bp, Artificial Sequence
  ENSG00000186399_30 (sequence is synthesized)
tcccaaaggttcaaatccagacattgatcatacagaaagaggaactaaatacggacctgtaccacatggaac

SEQ ID NO: 677650 - DNA, 89 bp, Artificial Sequence
  ENSG00000186399_31 (sequence is synthesized)
agtccaaggacctggctgtccgcctgcaacattcattgcagtgtaaaggagagttagagagggctctgtctgctgtcatcgccacagag

SEQ ID NO: 677651 - DNA, 120 bp, Artificial Sequence
  ENSG00000186407_0 (sequence is synthesized)
gagaacacaaaggaaacttggacaagtagaaagtggatgacccaggctccgttacatatacttggattccagctgggacctagatttgctgaggacggaagccaaggagacaggaacatg

SEQ ID NO: 677652 - DNA, 120 bp, Artificial Sequence
  ENSG00000186407_1 (sequence is synthesized)
tggctgctcccagctctactccttctctgcctctcaggctgtttgtctctgaagggccccggctctgtgactggcactgcgggggactctctgacagtgtggtgtcagtatgagagcatg

SEQ ID NO: 677653 - DNA, 120 bp, Artificial Sequence
  ENSG00000186407_2 (sequence is synthesized)
tacaagggatataacaagtactggtgccgaggacagtacgacacgtcatgtgagagcattgtggagaccaagggagaagagaaggtggagaggaatggccgcgtgtccatcagagaccac

SEQ ID NO: 677654 - DNA, 120 bp, Artificial Sequence
  ENSG00000186407_3 (sequence is synthesized)
ccggaggctctcgccttcactgtgaccatgcagaacctcaatgaagatgatgctggatcttactggtgcaaaattcagacagtgtgggtcctggattcatggtcacgcgatccctcggac

SEQ ID NO: 677655 - DNA, 120 bp, Artificial Sequence
  ENSG00000186407_4 (sequence is synthesized)
ctggttagggtgtatgtttccccagcaattacaaccccaaggaggaccacacatccagccacacctcccatcttcctggtggtgaaccctgggcgaaacctcagcaccggggaggtgttg

SEQ ID NO: 677656 - DNA, 120 bp, Artificial Sequence
  ENSG00000186407_5 (sequence is synthesized)
acccaaaattcagggttccggctcagcagccctcacttcctgctcgtggtccttctgaagctgcccctgctcctgagcatgctgggtgctgtcttctgggtgaacaggcctcagtgggct

SEQ ID NO: 677657 - DNA, 120 bp, Artificial Sequence
  ENSG00000186407_6 (sequence is synthesized)
cctcctggaagatagagccaggctgacccgaagccctgcagagccccatccccaggagtgccccgtgcagggagtcaacctttcagactggatgcgagagacctgtggactctggaggga

SEQ ID NO: 677658 - DNA, 120 bp, Artificial Sequence
  ENSG00000186407_7 (sequence is synthesized)
tttattgttcctgtgcctcaaaggagggtcctggctcttagaggacactcctctggagtcctcaatgtgcagcttgggggtcctcctttctcctccccagtcccctgcctccctgccctc

SEQ ID NO: 677659 - DNA, 120 bp, Artificial Sequence
  ENSG00000186407_8 (sequence is synthesized)
atgcccacttcccaagggcaagaattccctggaagttggccgggcaccatagcgagtgcctataatcccagctcaggaggctgaggcaggaggatcggctgaacgtaagagttccaggcc

SEQ ID NO: 677660 - DNA, 68 bp, Artificial Sequence
  ENSG00000186407_9 (sequence is synthesized)
ctgaggcaggaggatcggctgaacgtaagagttccaggccagcctgggcaacatagagagccctgtct

SEQ ID NO: 677661 - DNA, 120 bp, Artificial Sequence
  ENSG00000186407_10 (sequence is synthesized)
gggagggaaaaaattttctggaggagcctggcccttcattcttcttggcacaaatgcttctcaggccagtttcccccagggcaataactacctccttcctgcagacaggagtctccctga

SEQ ID NO: 677662 - DNA, 120 bp, Artificial Sequence
  ENSG00000186407_11 (sequence is synthesized)
ggacacacccctcacagccccagcctttaggctcacagagctccatctcttctctgggacaaccccaagggagcttggtcccggcagagcttgctcatgcagttgcccagtgtcccacat

SEQ ID NO: 677663 - DNA, 120 bp, Artificial Sequence
  ENSG00000186407_12 (sequence is synthesized)
gctcagggctcctctcgtcttctgacgccccttgggtctccctggctttaaggccccttctctccctgtaaccaggcagtgtgtggctgggctcagaacatctctgcctgggtgggccgt

SEQ ID NO: 677664 - DNA, 120 bp, Artificial Sequence
  ENSG00000186407_13 (sequence is synthesized)
ggatgagctgctccaggttaaagttctggggcgagttgaaacagtaaagggagaaggagctggtgggtgcccctgatatcactcctggaattcccccacctggaggtgtccaatgcacaa

SEQ ID NO: 677665 - DNA, 120 bp, Artificial Sequence
  ENSG00000186407_14 (sequence is synthesized)
actttagaagtctggctgagaccacctgttagcaattaaccttttccacaggcagagcagatatcgtttttcaaagacaggatggagggcacagaggtgaaggatacttgtccacacttg

SEQ ID NO: 677666 - DNA, 120 bp, Artificial Sequence
  ENSG00000186407_15 (sequence is synthesized)
aagtgcacagtgctatcaccactactggtgacccctggctcgggaatgagctcagttggttttctgaatgtttgtcaattactctgtttccctaaagtttgtggggaggactcccacagt

SEQ ID NO: 677667 - DNA, 120 bp, Artificial Sequence
  ENSG00000186407_16 (sequence is synthesized)
ctgccacaagcaagcatcaccatctccacttgctacctacatctggaccagtgctccccctctgcccccaggcctgagctcatcctgagctagtgatgccagtgtccagagcacatggag

SEQ ID NO: 677668 - DNA, 120 bp, Artificial Sequence
  ENSG00000186407_17 (sequence is synthesized)
tgaccctctgagtgccgagtgcttaggcagagctgccgtgctctgaacttgagctctggtggggctcccagctccatcatgcatggtgactaggggaaagatggggctggcccaggactc

SEQ ID NO: 677669 - DNA, 120 bp, Artificial Sequence
  ENSG00000186407_18 (sequence is synthesized)
atgctgaaagagaaattcaatctaacaaggcccatattaattatattaacccgggaaatatgatgatgagcaagaaaggagcttatgattcattttatgagaaggataagctcccaagtc

SEQ ID NO: 677670 - DNA, 120 bp, Artificial Sequence
  ENSG00000186407_19 (sequence is synthesized)
attacagcataggaagaactctagagccacaagagatgcttcctgatgtcagggggttggtgaggagaatatcatgccaagctggccaggtcagggaaagaaggtgacattcatgttgat

SEQ ID NO: 677671 - DNA, 120 bp, Artificial Sequence
  ENSG00000186407_20 (sequence is synthesized)
gttgaaggaggtataggatttcagcggagcagggatggagcaacagggagagagagaggacagagaaacagcataagtgaaagcagagaggcgggaaataatcttcataacaatagtcac

SEQ ID NO: 677672 - DNA, 120 bp, Artificial Sequence
  ENSG00000186407_21 (sequence is synthesized)
ttatagaagacctatcagcaaatggactgtactgttcacatacagatgctcatggtaggatgtgtctaagattccaatggagtgaaattttcctgtggcaggccagatggaactaatcta

SEQ ID NO: 677673 - DNA, 120 bp, Artificial Sequence
  ENSG00000186407_22 (sequence is synthesized)
gaagaactcaggtggtggcaggttcaggaggcttaggactcaactcttacttaaactttgattagctatggtgggatggatttgagcagaacaagatgggattgcagatgtgctttagga

SEQ ID NO: 677674 - DNA, 120 bp, Artificial Sequence
  ENSG00000186407_23 (sequence is synthesized)
ggacttgcctagcagatgtagcaaagtctgaaaggaagaatctgggagtccggagtcttaagcctggaaaaccagaggaatcgggcatcattgacagaagtaggaaagtcaagagcaggc

SEQ ID NO: 677675 - DNA, 120 bp, Artificial Sequence
  ENSG00000186407_24 (sequence is synthesized)
ttggatgatgcagagcttagttttctgtgtgtttggaatcatcaggcagagaggtctagcagatagctagagatgtgggttagcagagtgttgagggctggagaggaatgtgtgtagaga

SEQ ID NO: 677676 - DNA, 120 bp, Artificial Sequence
  ENSG00000186407_25 (sequence is synthesized)
gattaactggaacccagcaagaagtgaaaacatggagggaagagttcagaaccaaggacagagccctcggggcacctgcatttaaagacaaagggtaggaggaagacattgatcaaggtg

SEQ ID NO: 677677 - DNA, 120 bp, Artificial Sequence
  ENSG00000186407_26 (sequence is synthesized)
ctggagcagaatcaaacaggtggaagatgagaagtcaagagccatgaatgtttcaaggaggagagcagagctagagaggtggaggaggaccgggattgagaggaggctattgaacttatc

SEQ ID NO: 677678 - DNA, 120 bp, Artificial Sequence
  ENSG00000186407_27 (sequence is synthesized)
attcacaaggtcactaatgaagttcagaagagcagatcaacagagcaatgacagcagaagccagaagagaagagttaagaaagagtagacagatggcagacagcaggtgcaggagaaaca

SEQ ID NO: 677679 - DNA, 120 bp, Artificial Sequence
  ENSG00000186407_28 (sequence is synthesized)
aacagtggcttctccatgctttgaattttcccttctcccttactccctttttttcccctattcttcctttcttttttccctttatttactcattcattcaataaacttttattgtgtgtc

SEQ ID NO: 677680 - DNA, 120 bp, Artificial Sequence
  ENSG00000186407_29 (sequence is synthesized)
ctctgaagggactggctctgatcctagcagaagaagaacaaccccaagctctccagcaaggatccctttaggaagcagcacaagcaggccccggctccatcaccagactcttggctgtga

SEQ ID NO: 677681 - DNA, 120 bp, Artificial Sequence
  ENSG00000186407_30 (sequence is synthesized)
caagccctttgtaccctgccaagctcccactgtgggaaatgcagtcctgagctctgtccagaacctagaaggaggtgctgctgggatgtgccacctccaggaggaagctgggggcaggtg

SEQ ID NO: 677682 - DNA, 120 bp, Artificial Sequence
  ENSG00000186409_0 (sequence is synthesized)
attgaggcttccatgttagagcctgaattatcagtaacataggaagatagaagagaaaccagtacaaaagatcaagagacaaagtacaagatttgaatgagatcctgaaaatgagccaag

SEQ ID NO: 677683 - DNA, 120 bp, Artificial Sequence
  ENSG00000186409_1 (sequence is synthesized)
aaaaaaatgaaatgtttgaaagtgagtggtcaaaagagagagagagagagaagcagttggcatctggtcttgacactgcagagaaggccttgaaagttgaaagtgaggaattgcaaaaat

SEQ ID NO: 677684 - DNA, 120 bp, Artificial Sequence
  ENSG00000186409_2 (sequence is synthesized)
caaagtcagagcttatatgcctttataatgaagttcacaatcttccaggggaatcagaaagcaaagaccattttttaatagcatgtgacctgttacaaagagagaattctgaattagaaa

SEQ ID NO: 677685 - DNA, 120 bp, Artificial Sequence
  ENSG00000186409_3 (sequence is synthesized)
caaaggtcttgaagctttcacaagaatttgcacaattaaatcattttactctagggggaaaaactgcaccttctaatttaattacaagtgaaaatacctgtaaagatcctgaatctaatg

SEQ ID NO: 677686 - DNA, 120 bp, Artificial Sequence
  ENSG00000186409_4 (sequence is synthesized)
aaccaattttggaaacagaaattcaaagccgaaaggaagagacagaggaactctgtcccaaattaggagaaagaaagcagaaggaaattccagaggagtcagtaaaggagggcagttttc

SEQ ID NO: 677687 - DNA, 120 bp, Artificial Sequence
  ENSG00000186409_5 (sequence is synthesized)
caagagaggggcagaaggaggagggctcacaacagaatcgagatatgaaagatgaagaaaaagaacagcagttaaccatgaagcctgaggaaattgtgaggcttagagaagagctgagcc

SEQ ID NO: 677688 - DNA, 120 bp, Artificial Sequence
  ENSG00000186409_6 (sequence is synthesized)
atataaatcagagccttcttcagtctcagagctctggggatagttcagatgacagtggtgcccagcatccatcatctggagaaaaactaaaatacaaccagcaaggggaagtacaacaac

SEQ ID NO: 677689 - DNA, 120 bp, Artificial Sequence
  ENSG00000186409_7 (sequence is synthesized)
ttcaccagaatttgcaccggctccagattctatgcaactcagctgaaaatgagcttcgatatgaacgagggcagaacttggacttaaagcaacataatagcttacttcaggaagaaaaca

SEQ ID NO: 677690 - DNA, 120 bp, Artificial Sequence
  ENSG00000186409_8 (sequence is synthesized)
ttaagataaagattgaactaaagcatgcccaacagaagttattagacagcacaaagatgtgctcttcactcacggcagagtacaagcactgtcagcagaaaatcaaggaactggagttgg

SEQ ID NO: 677691 - DNA, 120 bp, Artificial Sequence
  ENSG00000186409_9 (sequence is synthesized)
aagtacttaaacacactcagagcattaaatcacagaacaacctacaggaaaagctggttcaggagaaatctaaagttgctgatgcagaggaaaagattttggacctgcagcggaaattag

SEQ ID NO: 677692 - DNA, 120 bp, Artificial Sequence
  ENSG00000186409_10 (sequence is synthesized)
aacatgctcataaagtctgtctcacagacacttgtatttcagagaagcagcagctagaggaaaagataaaagaagcaacacaaaatgaagctaaagtaaagcaacaatatcaagaagaac

SEQ ID NO: 677693 - DNA, 120 bp, Artificial Sequence
  ENSG00000186409_11 (sequence is synthesized)
aacagaagaggaaacttctatatcagaacgtagatgagttacacaggcaagtgagaaccttacaagataaagaaaatctactggaaatgacctgttctcagcaacaatccagaattcagc

SEQ ID NO: 677694 - DNA, 120 bp, Artificial Sequence
  ENSG00000186409_12 (sequence is synthesized)
cagcaagagaaggaagctctacgtgaagaatatttgcgattattgaagctgcttaatgtccatgtgagaaactataatgagaaacatcaccaacaaaaagtcaagcttcaaaaagtcaag

SEQ ID NO: 677695 - DNA, 120 bp, Artificial Sequence
  ENSG00000186409_13 (sequence is synthesized)
tatcgtttaactaatgaagtagaactacgagataagagaattaaccaatttgaagatgaaattggaatcctgcaacataaaatagaaaaggagaaggcaatacaggaccagatcactgcc

SEQ ID NO: 677696 - DNA, 120 bp, Artificial Sequence
  ENSG00000186409_14 (sequence is synthesized)
caaaatgataccctgcttctagaaaaaaggaaacttcaggagcaagtcatagagcaagaacagttgatccacagcaacaaatggacgatatcttccatccagagcagggtactttacatg

SEQ ID NO: 677697 - DNA, 120 bp, Artificial Sequence
  ENSG00000186409_15 (sequence is synthesized)
gataaagaaaataagcaattacaggaaaatagtcttcgtctcacacagcagattggcttcttagagcgaattataaggagcatccatattcgcagaggagagaatcttaaggagtttcct

SEQ ID NO: 677698 - DNA, 120 bp, Artificial Sequence
  ENSG00000186409_16 (sequence is synthesized)
gttccaaaatggtggcatagaggcaagctggcttctctccctccaacaaagaaacagaaagaaatatacagcactgaggtcttcaccagcaacaatgcagaactccagcatgaggatgag

SEQ ID NO: 677699 - DNA, 120 bp, Artificial Sequence
  ENSG00000186409_17 (sequence is synthesized)
tcagttcctgaggccacagagaagtggaaacactctgagcagatggaaacaacaattagtgacatccttgaatccgaagtagtgaatgaaatattgcctttatcaaactccagtttttca

SEQ ID NO: 677700 - DNA, 120 bp, Artificial Sequence
  ENSG00000186409_18 (sequence is synthesized)
ggaaaaggtttggtagagtcatttgcaagtcttcaagagactgaagagatcaagtcaaaagaagcaatggcaagttcaaagtcccctgaaaagtctcctgagaatcttgtgtgttcacag

SEQ ID NO: 677701 - DNA, 120 bp, Artificial Sequence
  ENSG00000186409_19 (sequence is synthesized)
aattctgaggctggatacataaatgtggcttctctgaaggagacacatggtatacaagaacaagaccaaaagtcagaactataaaatcactggtgcctaaagctatactgaacaaaagtg

SEQ ID NO: 677702 - DNA, 120 bp, Artificial Sequence
  ENSG00000186409_20 (sequence is synthesized)
gtaatttaaagcctggacaaaaggtggaccatgacattgagaagagttaccacagatcccaaatggatatcacccaagagtcttcaaaactgctgataaattcattaaagcagttgtaaa

SEQ ID NO: 677703 - DNA, 120 bp, Artificial Sequence
  ENSG00000186409_21 (sequence is synthesized)
aatggatttctcaagtttgtttgatatcctcagatgccttgtattgaccaaaatattgactttagttcaatgatttatttaggtttctcttcagcagagcacatgtagggttaattcaac

SEQ ID NO: 677704 - DNA, 120 bp, Artificial Sequence
  ENSG00000186409_22 (sequence is synthesized)
attctttcccattatcatgggtatcttttctgatttattttttaacagtaaaaacaatacagtcacattaaagcaaattttgtttttaaaaaaaccctcctatgctgggcgtggtggctc

SEQ ID NO: 677705 - DNA, 120 bp, Artificial Sequence
  ENSG00000186409_23 (sequence is synthesized)
atttcagtatcataatgaagacctggaaaaagacaaaacatcacaaaactgcctaggaagaggaatggaacaagtagcaaagaagttaggggtggctcatgaagagattcaaaggctcac

SEQ ID NO: 677706 - DNA, 120 bp, Artificial Sequence
  ENSG00000186409_24 (sequence is synthesized)
tgatgaactacaagtgaaggagaaggaacaatgtaaattagattctgcacttaagaaggctcaactagaaattgacaaattgaaggaaaatttggtaaagctgaaagaaaatgatgcagc

SEQ ID NO: 677707 - DNA, 120 bp, Artificial Sequence
  ENSG00000186409_25 (sequence is synthesized)
tgacctacagaaagcaaaggaacaaaatcagagactggatgaggaaattctggctttaagaaatagggttcgatcacttgactcagaaaaaaaggtgcttggtgaaatggttgaaagact

SEQ ID NO: 677708 - DNA, 120 bp, Artificial Sequence
  ENSG00000186409_26 (sequence is synthesized)
agaggtgtgtgaatctcaagagaataagcaacttggaaaccactcccctggaaaaactgtgggtggtgaacagagagaacaggaaaagcctcaagatttcttgatggtgtttggcagcca

SEQ ID NO: 677709 - DNA, 89 bp, Artificial Sequence
  ENSG00000186409_27 (sequence is synthesized)
caatgctgttgggagtataaattggtctaatacctgtggaggcagtttggcattatctatcaaacaaacaaatatttggacctgcagcg

SEQ ID NO: 677710 - DNA, 120 bp, Artificial Sequence
  ENSG00000186409_28 (sequence is synthesized)
gcccaggtctccgtaggcacctgcagctagcagctgagcgcgtaggggccgagcgaccccgggacgctcgcggcaccctccgcaggaaaatttccgacttggttcttgaggttcctgcct

SEQ ID NO: 677711 - DNA, 120 bp, Artificial Sequence
  ENSG00000186409_29 (sequence is synthesized)
cagccccaaggaggaaagcacccattctcccctcttttccgcattacgggccttttctgcttctccccagtatggtccgaaactacaggaggggaacccctcctggcccggcctttctat

SEQ ID NO: 677712 - DNA, 120 bp, Artificial Sequence
  ENSG00000186409_30 (sequence is synthesized)
tccctggctggagtgattccgcctgaaggagaattcgcccgttttccccggacccagctgccacaagcatttagtattaggctgccgcttattattagagcgggcttagaacatcctcag

SEQ ID NO: 677713 - DNA, 120 bp, Artificial Sequence
  ENSG00000186409_31 (sequence is synthesized)
cgaggtaggtcggcgttccttttctcacttaaaggtgaggtgtcgagacgcgcccctggacagacaacgcccgaaggtccaggccactacgaagtccacggaggggcagctttcccctac

SEQ ID NO: 677714 - DNA, 120 bp, Artificial Sequence
  ENSG00000186409_32 (sequence is synthesized)
gtgtaggcccgcgaacaaagaactaccgttttctgattttttttggccgatgttcgtcatgcagaaccttgaatcccgatgaagatttggaggccttttgtatcctcaacatcagaggtc

SEQ ID NO: 677715 - DNA, 120 bp, Artificial Sequence
  ENSG00000186409_33 (sequence is synthesized)
tttgtatcctcaacatcagaggtcatgaacttctggaaaatttcttccggcatttctggttggagtgctggagtgcagtagcatgatctccgttcactgcagcctcaacctcctgggctc

SEQ ID NO: 677716 - DNA, 120 bp, Artificial Sequence
  ENSG00000186409_34 (sequence is synthesized)
gttatcatttttaaataaagtataactatgtgtctcagcttgggctgccataaccaaacaccacagactaggtggctcaaagaacagaattttattttctcacagttatggaggagggga

SEQ ID NO: 677717 - DNA, 120 bp, Artificial Sequence
  ENSG00000186409_35 (sequence is synthesized)
agtccaagatcaaggtgccagccaagtcagttcctggtgagggttctcttcctggcttgcagatggccaccttcttgctgtgtcctcacatgacagagtgagcaagctctggtgtctctt

SEQ ID NO: 677718 - DNA, 120 bp, Artificial Sequence
  ENSG00000186409_36 (sequence is synthesized)
cctataaaggcactaaccctattggattaaggccccacccttatatcctcatttgacctttatcacctccttatcaaccctatctatctccaaatacagtccatattgggaattagggtt

SEQ ID NO: 677719 - DNA, 120 bp, Artificial Sequence
  ENSG00000186409_37 (sequence is synthesized)
tcaacaatatgaatagggagggagagcacaattcagtccatagcactgtagaatacgtgtttctataataataatggggtagctctgttgtttctccaagctgagttctagcactaagca

SEQ ID NO: 677720 - DNA, 120 bp, Artificial Sequence
  ENSG00000186409_38 (sequence is synthesized)
aagagtcctttatttagcagacgtttgattgttgtagtgttcatagagtcatgggcttatcgctcgttttaacttcttgtcctgccatcttggaaagatctatcaggagacataatcagc

SEQ ID NO: 677721 - DNA, 120 bp, Artificial Sequence
  ENSG00000186409_39 (sequence is synthesized)
ctatattatgaaaagagacctggaagtgagttcatggaagtctaaatcagtaatttagaggatagtgacactcaatcagtttgtagtttgcagtgcccctaatctcatcctaatgaccta

SEQ ID NO: 677722 - DNA, 120 bp, Artificial Sequence
  ENSG00000186409_40 (sequence is synthesized)
caggaattttcagtgaaataagataggaaatcaattatcatttaccctcttcctgtggttttgggaggccaccctctaccttcttgcctttttgtctaagcctttctaatcagcatttac

SEQ ID NO: 677723 - DNA, 120 bp, Artificial Sequence
  ENSG00000186409_41 (sequence is synthesized)
ctcccactttgacttcaaggctttgggaaaataccaagtagctcctctcctgaagtaaattttatgtaacctattcccttcattgagcaccacagactgactctcaacccaaagtcttcc

SEQ ID NO: 677724 - DNA, 120 bp, Artificial Sequence
  ENSG00000186409_42 (sequence is synthesized)
cagactgactctcaacccaaagtcttccaccagtcaatcagtgcacatcctgtgtcatcaatgtaaaaatctgttaaaaatctgcatttaggttgggcacggtggctcacgcttgtaatc

SEQ ID NO: 677725 - DNA, 120 bp, Artificial Sequence
  ENSG00000186409_43 (sequence is synthesized)
ccttgctactacagaagaacaactctgtttggtgcttattccagccagcacagtgaagacaggctgaggactgctaccacagatgtagaagagcttatagtgaagcacatgggtgaaaca

SEQ ID NO: 677726 - DNA, 120 bp, Artificial Sequence
  ENSG00000186409_44 (sequence is synthesized)
aaagaagtgagaactaatagcatagaattttaaagacacctgtgattttgttcattgcccttcattaaattgacatattaaaaactaatgtttggctatcactgtatagtttgaaaagca

SEQ ID NO: 677727 - DNA, 120 bp, Artificial Sequence
  ENSG00000186409_45 (sequence is synthesized)
gctggcttgagaaggcatagctttctggggtcattttctctacatgaattatttgaatcttcttccaattcctccccttgccactccttcaactctaaaccccacagaatcctgacttaa

SEQ ID NO: 677728 - DNA, 120 bp, Artificial Sequence
  ENSG00000186409_46 (sequence is synthesized)
ggtaggaaataaaatatgaacataggtttaaggtaaattttatttggctttgtgtaacagttgcaaaaaattgaaattctatcaatgcctgtatccctgtaaccccgaactgctaccaac

SEQ ID NO: 677729 - DNA, 120 bp, Artificial Sequence
  ENSG00000186409_47 (sequence is synthesized)
aattaggtaagctgtggtttcagatgaccatttccgatcatgctttaactgtactgatctcatctcagggtggaacatgagaaaaaaaaaaaacactgagaaacaagtctttaagataaa

SEQ ID NO: 677730 - DNA, 120 bp, Artificial Sequence
  ENSG00000186409_48 (sequence is synthesized)
cacataaaagtgatgaacagcctcattttctaccatgctaggaatttttgtcaaagcccaagcatatctaccaaaagtgcacaacttgtaagtgtataccactcaccacaagaaattccc

SEQ ID NO: 677731 - DNA, 120 bp, Artificial Sequence
  ENSG00000186409_49 (sequence is synthesized)
gtgttccttctttctatctctacatccttcctcctccttcagagtaactactgtcctgactgaatgcagtttctgcgtttgactatatgcagtatgccttctatggtttgcttctcctgc

SEQ ID NO: 677732 - DNA, 120 bp, Artificial Sequence
  ENSG00000186409_50 (sequence is synthesized)
tcagtcttataagattcattcattttgttacacgtagcagttgtttgttcactctgctgtttatagtatttcattaataaacatactgcaatttatccattctactgatggacgattgtg

SEQ ID NO: 677733 - DNA, 120 bp, Artificial Sequence
  ENSG00000186409_51 (sequence is synthesized)
ttgtcagtttttgtctattatgaatattgctgctataaacattttggtatatgtctcagtgtgcttattacacatttctgattgtggtaagagcagaattactgaatcaaagggcaggtt

SEQ ID NO: 677734 - DNA, 120 bp, Artificial Sequence
  ENSG00000186409_52 (sequence is synthesized)
ctactttggtcttccaaggtaattatactaatttaagctttcctcagttgtatgtgagattttagttcctccaccttggttttcaatacttggtactgtcagtcttaccaacttcacctt

SEQ ID NO: 677735 - DNA, 120 bp, Artificial Sequence
  ENSG00000186409_53 (sequence is synthesized)
ttatgttgagtgtatagtggtatttaagtgtggctttaactggtattccctgactgctaattaagttgaagatcttttcatatgtttgttgttgttgttactcgtttggatatacaactt

SEQ ID NO: 677736 - DNA, 120 bp, Artificial Sequence
  ENSG00000186409_54 (sequence is synthesized)
tgtgaagttcctgctcgagtctgttgtatatttttctattttatttatttgtgggagttctttatatattgtggatatgagccttttgttggttataaatgttatgttgttgttattgtt

SEQ ID NO: 677737 - DNA, 120 bp, Artificial Sequence
  ENSG00000186409_55 (sequence is synthesized)
tttttaccataaatgctaatattcatcaagttgggtttaagtgaattattctttatgctttctgagttttcatgtttaaagccttttcttcactacaaggttattgaaaatatttacccc

SEQ ID NO: 677738 - DNA, 120 bp, Artificial Sequence
  ENSG00000186409_56 (sequence is synthesized)
gagtgcctagcactttactaaacctaatcctttagtcagggttcagtcaggaaagtagaatctactctaggtatttcaagcaagaagagatttaacacagggaataagagcttacaaaac

SEQ ID NO: 677739 - DNA, 120 bp, Artificial Sequence
  ENSG00000186409_57 (sequence is synthesized)
agttggaagggaccaggggagagtagagtcagaaaggactgctgctagctttcaataaatccagaagttcagaaatcacagagaagccacctcctgcagcgtcaaagtggagaatttgca

SEQ ID NO: 677740 - DNA, 120 bp, Artificial Sequence
  ENSG00000186409_58 (sequence is synthesized)
ggaactgtcctgaagctcctacaaatgtctcatctgttgtctgcccttttatccatctgctagtgctaaagaactgttggggggaaagacaaacaaacctgtttcttctttctatactcg

SEQ ID NO: 677741 - DNA, 120 bp, Artificial Sequence
  ENSG00000186409_59 (sequence is synthesized)
taccactctgaatacttcacttctgatatagtttggatgattctcctctccaaatctcttgctgaaatgtaatccccatcattggaggtggggcttaacaggaggtggttttgtcatggg

SEQ ID NO: 677742 - DNA, 120 bp, Artificial Sequence
  ENSG00000186409_60 (sequence is synthesized)
ggtgggtccctcataaatggcttgatgctgtcctcacgataatgaattattgcgagatctagatgtttaaaagtgtgtggcacctctccgctctctcttgctcccactatcaccgtgtga

SEQ ID NO: 677743 - DNA, 120 bp, Artificial Sequence
  ENSG00000186409_61 (sequence is synthesized)
catgtctgctcccatttcacctaccaccatgattgttagcttcctgagtccctcaccagaagctgaccagatgccgataccatgcttcctgtatagtctgcatatctgtaagccaattaa

SEQ ID NO: 677744 - DNA, 120 bp, Artificial Sequence
  ENSG00000186409_62 (sequence is synthesized)
attcagagactggaatgatacagctacaagccaagaaatagcaagggttgctggcaaccaccagaagctaggagaaaggcatgcaacacaatctctcctggagcccccatgagtaattaa

SEQ ID NO: 677745 - DNA, 120 bp, Artificial Sequence
  ENSG00000186409_63 (sequence is synthesized)
ccctgacaacaatgagaaggcaatacaggaccagatcactgcccaaaatgataccctgcttctagaaaaaaggaaacttcaggagcaagtcatagagcaagaacagttgatccacagcaa

SEQ ID NO: 677746 - DNA, 120 bp, Artificial Sequence
  ENSG00000186409_64 (sequence is synthesized)
ctcatcagctttggattgttatttctgttttattgacattaaacataagaaaggtaaattagtagtttgattaattcagaacaatcaggattctgtagtgtatttttctaatacttgttc

SEQ ID NO: 677747 - DNA, 82 bp, Artificial Sequence
  ENSG00000186409_65 (sequence is synthesized)
tgcattcttggcattcagatagatctatagatcaatggaactctcaatagagagtccagaaataagcccacaagtacaccat

SEQ ID NO: 677748 - DNA, 120 bp, Artificial Sequence
  ENSG00000186409_66 (sequence is synthesized)
ctcaatagagagtccagaaataagcccacaagtacaccatcaacagattttcaacaaaggtgacaaggtaattcaatgagaaaaggataaccttttcaacaaatgatgctggaacaatta

SEQ ID NO: 677749 - DNA, 120 bp, Artificial Sequence
  ENSG00000186409_67 (sequence is synthesized)
gatatagacatatgcttaaaaaaaaaaaaaaaagcctcccaaatcctgatcgaagttctgttccccactggtgaggaatgcctgctctaaataccacaagatggccaaatacatgacacc

SEQ ID NO: 677750 - DNA, 120 bp, Artificial Sequence
  ENSG00000186409_68 (sequence is synthesized)
tgacactggagagagatgagattgatagcagcttattagtcagatacactcagcccatgggaagaggatagatatgctatgctatgcagggccacaaggggttactctcaagaatagaat

SEQ ID NO: 677751 - DNA, 120 bp, Artificial Sequence
  ENSG00000186409_69 (sequence is synthesized)
gaactcatagggagtatgggaggcaggctttgtagtaacaagaagatgaggtgcctcctggttcccatgggaagatgtgattggcttgtctggaaaattccgtgggctggcagggaagtg

SEQ ID NO: 677752 - DNA, 120 bp, Artificial Sequence
  ENSG00000186409_70 (sequence is synthesized)
aaactcattagtttaaggactgtgtggagtacagctgctccggctgatagaggaactggccagatggggactctttctctctggatgggggacatctctggtgcgagccgagtaactgat

SEQ ID NO: 677753 - DNA, 120 bp, Artificial Sequence
  ENSG00000186409_71 (sequence is synthesized)
ggctaggcttttttggggcttctgtgagactgaaagatgtcaaggcaatatatgaaattttagaccttgcaataaatttatctcacaccatatataaaaattaactcaaattgtttgata

SEQ ID NO: 677754 - DNA, 120 bp, Artificial Sequence
  ENSG00000186409_72 (sequence is synthesized)
gatatgatctgtaattatgaaatatctattcattttctaatgtatataggtaaatttttataattttccccacaaagatcttgcacatttttgttagatttattcctaggtgcttcatat

SEQ ID NO: 677755 - DNA, 120 bp, Artificial Sequence
  ENSG00000186409_73 (sequence is synthesized)
gtgactgattcttttacaaatgcaatgtataggttactttagaatcataaacattaaaaatgttaaatgtataaaacaataatgattatgcctgtgtgattaaaaacaaataataataaa

SEQ ID NO: 677756 - DNA, 87 bp, Artificial Sequence
  ENSG00000186409_74 (sequence is synthesized)
gcaacctctgcctcctaggctcaagccattctcctacttcagcctcccattggcaaatttttatatttttttgtagatatggggttt

SEQ ID NO: 677757 - DNA, 120 bp, Artificial Sequence
  ENSG00000186409_75 (sequence is synthesized)
ccacacctggcaaatttttatatttttttgtagatatggggttttaccatattgcccagcctggtctcaaactcctgagctcaagctatatgcctgcctcagcctcccaaagtcctggga

SEQ ID NO: 677758 - DNA, 120 bp, Artificial Sequence
  ENSG00000186409_76 (sequence is synthesized)
gtgagtcatcacacgcggccttggaagatttttaataaagggaattagatgcttacaaaattattgggaaggctggggaagcaaaaggcaaggggaaatagttgctgactttcagaaaat

SEQ ID NO: 677759 - DNA, 120 bp, Artificial Sequence
  ENSG00000186409_77 (sequence is synthesized)
ctggaagtacaggaatcccgtgaagctactatgatctcagaagcaggagtgactataagcttttttttttttttttaccagaaagactttgcatttcttcaacatcatacctttgtcagg

SEQ ID NO: 677760 - DNA, 83 bp, Artificial Sequence
  ENSG00000186409_78 (sequence is synthesized)
gtgaatctcaagagaataagcaacttggaaaccactcccctggaaaaactgtgggtggtgaacagagagaacagatggagtca

SEQ ID NO: 677761 - DNA, 70 bp, Artificial Sequence
  ENSG00000186409_79 (sequence is synthesized)
ttggcctcttaggtgttgaattgtgtcctgtaccctgaaatatattgaagtcctaacccccaggacctgt

SEQ ID NO: 677762 - DNA, 120 bp, Artificial Sequence
  ENSG00000186409_80 (sequence is synthesized)
taccctgaaatatattgaagtcctaacccccaggacctgtaaatgtgacattatttggaaatagtacttttgaagaagtaatcaaattaagatgagttaattagggtgggccttaatcca

SEQ ID NO: 677763 - DNA, 120 bp, Artificial Sequence
  ENSG00000186409_81 (sequence is synthesized)
atatgactggtacaattataacaagaagaaatgccatgtgaagacagtcatacacagagagaatgccatgtgattacagaggcagagactggaatgatgcagctgcaagccaaaaaaaaa

SEQ ID NO: 677764 - DNA, 120 bp, Artificial Sequence
  ENSG00000186409_82 (sequence is synthesized)
ctttggaagaaaactatgtagagtagttatttcttgctgagcaggctctagggctaaatggtgggctgctcactgaagcaacctttcaagagggccatcataaaattcctatgtttccaa

SEQ ID NO: 677765 - DNA, 120 bp, Artificial Sequence
  ENSG00000186409_83 (sequence is synthesized)
aagtgctatccacagggcttttcctagggaaatatggggcctaatttcttctcaagagagggaaggagaagggaattaccattcattgagctttgatggtattgaacttgtttttcccca

SEQ ID NO: 677766 - DNA, 120 bp, Artificial Sequence
  ENSG00000186409_84 (sequence is synthesized)
aatacacccttctcacttgccttcacactttttttcacctcacatactttcctcagcctgaaccaccctctcctcatttaaagagcttttttattttttattttagagaactgacacaaa

SEQ ID NO: 677767 - DNA, 120 bp, Artificial Sequence
  ENSG00000186409_85 (sequence is synthesized)
agatgttatatataatgatatacctattacatatatggtacttatatattctctctttctatacatacatacatacatacatatatgtatatcaggcaaataccattgtccaaaggtaaa

SEQ ID NO: 677768 - DNA, 120 bp, Artificial Sequence
  ENSG00000186409_86 (sequence is synthesized)
caaataccattgtccaaaggtaaaatgacatttggtttttaggcagttaatttttttttcattttacatataatgaaacaacattgcaaaaaaaaattcttttttcagataggatctcac

SEQ ID NO: 677769 - DNA, 62 bp, Artificial Sequence
  ENSG00000186409_87 (sequence is synthesized)
atgggactgcagtcatgtacaggctcacccagctcactttttaatttttttatagagacagg

SEQ ID NO: 677770 - DNA, 120 bp, Artificial Sequence
  ENSG00000186409_88 (sequence is synthesized)
gggactgcagtcatgtacaggctcacccagctcactttttaatttttttatagagacaggggtctcactatgttgcctcaagtgatcctccttccttggcctcccaaaatgctgggatta

SEQ ID NO: 677771 - DNA, 120 bp, Artificial Sequence
  ENSG00000186409_89 (sequence is synthesized)
tgcccagtgcaattttttttttgtaattatttatggcacacctctcagtgtaaaatttttgaatgaaacaaaacttatgcagacattctcccaagttcactcctagtgtcttgtcaataa

SEQ ID NO: 677772 - DNA, 120 bp, Artificial Sequence
  ENSG00000186409_90 (sequence is synthesized)
acataattttatggttttattatagctttcataaaagttttatactgtctttctcttaatatcatatgataagcattgtgctttgttgctatagtcttcaaatttgctatttccataaaa

SEQ ID NO: 677773 - DNA, 120 bp, Artificial Sequence
  ENSG00000186409_91 (sequence is synthesized)
cttaatatttcatgaagttgatatgcccttgcactaacagcagcagttaaacagggtacaactgctaacagacaaacagaacatacaattacagtgctaacaaatgtataccttatttca

SEQ ID NO: 677774 - DNA, 120 bp, Artificial Sequence
  ENSG00000186409_92 (sequence is synthesized)
ggaataggatatcatatagaaacagcattagaggaagaatatgcattagagcccatgtgtgtttcacagcaagggggccagagaagtcaggcagcagctgcaatgttgttcactctgtaa

SEQ ID NO: 677775 - DNA, 120 bp, Artificial Sequence
  ENSG00000186409_93 (sequence is synthesized)
gggtcgtggctggatgcacttcctccctcagatcaggaaccactcatgtgtgcattgaccacctcacaaccagggagcccaaaaccaagtctcagctgagattttattaaatacttttta

SEQ ID NO: 677776 - DNA, 120 bp, Artificial Sequence
  ENSG00000186409_94 (sequence is synthesized)
tattctgttgttcacataagcatattcctgccatgtaacctgtttcaagagcagagacttcttgggggtctcaatgagaccaggtgcaaatcatcattatcactgttatcaataaacaat

SEQ ID NO: 677777 - DNA, 120 bp, Artificial Sequence
  ENSG00000186409_95 (sequence is synthesized)
atgtggacaatgtgagctatctggtaacttcctcctttaacttttccctgctaagtaagaatgtgtgtattatcaacctgtaaatagaaaaaggcattaaattacataatcttctgaaaa

SEQ ID NO: 677778 - DNA, 120 bp, Artificial Sequence
  ENSG00000186409_96 (sequence is synthesized)
gaaagacaattacaagatcagataatcagggatagggctaaatatagggtgcagtaggaactctaagagagaagtctgggaaaattccctgaggagctgacatttaagcagaaactccta

SEQ ID NO: 677779 - DNA, 120 bp, Artificial Sequence
  ENSG00000186409_97 (sequence is synthesized)
ggacagtagccaggtgaaagaaagtgttccagagagagagagtcatttgaaatttgattattatactaatcatttgttccttatacaaatattttatttctttttttagattctgcactt

SEQ ID NO: 677780 - DNA, 73 bp, Artificial Sequence
  ENSG00000186409_98 (sequence is synthesized)
gtgtgaatctcaagagaataagcaacttggaaaccactcccctggaaaaactgtgggtggtgaacagagagaa

SEQ ID NO: 677781 - DNA, 120 bp, Artificial Sequence
  ENSG00000186409_99 (sequence is synthesized)
cccattccatgtacaactgactgaatggggaaaatacagattgatctggagcatagcagagagagattcttatttaatctttcaaacaacagagtgagggaaaagttcagttagaagaca

SEQ ID NO: 677782 - DNA, 120 bp, Artificial Sequence
  ENSG00000186409_100 (sequence is synthesized)
tctttatagcagtgcaagaacagcttgacacagaaaattggtaccaagaagcggagcgttactaaaaaagatacctgaaaatgtggaagcaagtttggaactgggtaacaggcagagatt

SEQ ID NO: 677783 - DNA, 85 bp, Artificial Sequence
  ENSG00000186409_101 (sequence is synthesized)
gcccttttgaggctattttccaaatcctgtaggtgtgcttcattcttttttattccttttgtcttttgtctcctctgcttttgta

SEQ ID NO: 677784 - DNA, 70 bp, Artificial Sequence
  ENSG00000186409_102 (sequence is synthesized)
ggcaacctcgacctcctgagtagctggaattatagaaactataatgagaaacatcaccaacaaaaagtca

SEQ ID NO: 677785 - DNA, 120 bp, Artificial Sequence
  ENSG00000186409_103 (sequence is synthesized)
agttgaaagtgagagtcatgggcttatcgctcgttttaacttcttgtcctgccatcttggaaagatctatcaggagacataatcagcctatattatgaaaagagacctggaagaattgca

SEQ ID NO: 677786 - DNA, 120 bp, Artificial Sequence
  ENSG00000186409_104 (sequence is synthesized)
accacatccagaggaggaattaccataagacaacttgatggagattagcactttcaaaccagtgccacatgatgaggaagaaaacagaaaaagcagtactagaaaacaaattgaccttag

SEQ ID NO: 677787 - DNA, 120 bp, Artificial Sequence
  ENSG00000186409_105 (sequence is synthesized)
acaatctggcagaaggattccaaatattcaagactgcttttgacagattttacaatatggacatttctatgtgatacaggcactgaaactaacacaaacaatgaaagaaggatttgtact

SEQ ID NO: 677788 - DNA, 120 bp, Artificial Sequence
  ENSG00000186409_106 (sequence is synthesized)
gtatagaaatatttttagggaaatgaaaaagcaaaaaagtcaaattacagtgtatttctgtaaagttatactgagtgtccctgcctttcctgccttcccttccaccttctccacctcttc

SEQ ID NO: 677789 - DNA, 120 bp, Artificial Sequence
  ENSG00000186409_107 (sequence is synthesized)
cagctctgccacccctgagataacaagaccaatttctcctcttctcctcctcctcaacctactcaacatgaagacaatgaggatgaaaaattttgtgatgatccacttctacttaatgaa

SEQ ID NO: 677790 - DNA, 120 bp, Artificial Sequence
  ENSG00000186409_108 (sequence is synthesized)
tagtaaatatattttctctaccttatcgttttcttaataaaattttattttctctagtttactttattgcaagagtacaatacatgatacacatacaaaatatgtgttaactgcttatgt

SEQ ID NO: 677791 - DNA, 120 bp, Artificial Sequence
  ENSG00000186409_109 (sequence is synthesized)
tgttgataaggcctctagttaacagtaggctattagtaatttggtggggagtcaaaaaaatcataatgcagattttcaactgtgtggggggtcagtgcccctaactctcatgttgttcag

SEQ ID NO: 677792 - DNA, 120 bp, Artificial Sequence
  ENSG00000186409_110 (sequence is synthesized)
gggttaggggcactgattagtgtaactccctacaaatacattcctgaatatagtcctagagtttttgccaatttaagttggcaaaatcttgccattctttcaatatggcagtcccaaagt

SEQ ID NO: 677793 - DNA, 120 bp, Artificial Sequence
  ENSG00000186409_111 (sequence is synthesized)
cagtccctacacttaaccccaactaaccatggtgtgctgggatccaactgtagttacaggattggagacaatgagaagtggtggtggtatagaggtgggcctcgaggactataggcatcc

SEQ ID NO: 677794 - DNA, 120 bp, Artificial Sequence
  ENSG00000186409_112 (sequence is synthesized)
ccttacaaggtaagtgccttgggtgaaatcaatacagaatcttcaaacttaatctccttagacaggagtggagggagtgcttgtgatggcaagagaggcactgtaattctcaggtttcca

SEQ ID NO: 677795 - DNA, 120 bp, Artificial Sequence
  ENSG00000186409_113 (sequence is synthesized)
cgcattcccaaagcctgtttctcacataagagacctagcaagcctgtgaaatcaattagtgctgtaattctgcagtccacttgatatttgggatttggtttttggatatatcggtcttct

SEQ ID NO: 677796 - DNA, 120 bp, Artificial Sequence
  ENSG00000186409_114 (sequence is synthesized)
gactacaagagagaaattattttaggacactcatagaagatctgtggttctcagacaatgccttgttccagtaattaaatccccaagttggacattttcttctaagctcagtaacatgat

SEQ ID NO: 677797 - DNA, 120 bp, Artificial Sequence
  ENSG00000186409_115 (sequence is synthesized)
cagatgtggctagcccacctcacaatccttgtagtcctcaattccattataacattttttataccactcatgtggtcttccaaagtacttcattaccagcaactataagtgataatcaat

SEQ ID NO: 677798 - DNA, 120 bp, Artificial Sequence
  ENSG00000186409_116 (sequence is synthesized)
tcttttgccatagattgctagaactagtgacaagactatatcaccttcaaagctagccaagtcagataaccaatcccaaattcctaattttgagtttctcatcactgcagtcacttatag

SEQ ID NO: 677799 - DNA, 120 bp, Artificial Sequence
  ENSG00000186409_117 (sequence is synthesized)
tctcatcactgcagtcacttatagaaccaaatattttatcagagttaattaactgaagagaacagctttcactttatatactttaagctgggagattttttgtttttttgttttgttttg

SEQ ID NO: 677800 - DNA, 120 bp, Artificial Sequence
  ENSG00000186409_118 (sequence is synthesized)
gaatccaacttccacatccacaatacccttccccacattctgccaggcacccactgtttggaaaatctctcaacttatggtttctacactggaaaaagtaaaacggaggtagtcaaacag

SEQ ID NO: 677801 - DNA, 120 bp, Artificial Sequence
  ENSG00000186409_119 (sequence is synthesized)
attccccactttcttgggtttcctagccagaaacctgtccttgtcttaacccacaggtagtagtatcacaacttcctgcaggcagaaatatccctgaagacaggcatatccctgaaatat

SEQ ID NO: 677802 - DNA, 120 bp, Artificial Sequence
  ENSG00000186409_120 (sequence is synthesized)
ccctgaaacagaagaggtgggactctgctctgtaactcagccaaagaagacataagagtggctgtaggagctatgtcccccaggtctcctgggcatgagcccctagacagccttccctca

SEQ ID NO: 677803 - DNA, 120 bp, Artificial Sequence
  ENSG00000186409_121 (sequence is synthesized)
ctgccaggataacccctttgggacctcccctatttgggacaggcagtgctctcaccatttactagagccaaggtgaacctgggcttaaggtgccacctagagccaaaaaggaggcaggga

SEQ ID NO: 677804 - DNA, 120 bp, Artificial Sequence
  ENSG00000186409_122 (sequence is synthesized)
ctagagccaaaaaggaggcagggatctagcattaaagatttggctgggtgcggtggttcatgcctgtaatccactttgggaggctgcggtggatgatcacctgaggtcaggagttcgaga

SEQ ID NO: 677805 - DNA, 73 bp, Artificial Sequence
  ENSG00000186409_123 (sequence is synthesized)
ccttgtctcaacaaaaaaataattagccagatatggtggcatggacctgtagtaccagctactcaggaggctg

SEQ ID NO: 677806 - DNA, 82 bp, Artificial Sequence
  ENSG00000186409_124 (sequence is synthesized)
ggaggctgaggtgggaagatcacttgagctgggaggtcggggttgcaatgagccatgatcatgccactacactacagcctag

SEQ ID NO: 677807 - DNA, 120 bp, Artificial Sequence
  ENSG00000186409_125 (sequence is synthesized)
gttatgaccaaaatactgatagaaatatggacagtgaaggccagcctagtgaggtctcagatggaaataaggaagttattgggaactggaataaacgtcactcatgttacaccctagcaa

SEQ ID NO: 677808 - DNA, 120 bp, Artificial Sequence
  ENSG00000186409_126 (sequence is synthesized)
ctcatgttacaccctagcaaagaactcctgcattgtgttcatgtaccaaggatctgtggaagtttgaatttaagagtggtaatttagggtctctggcagaagaaatttctaagcagcaaa

SEQ ID NO: 677809 - DNA, 120 bp, Artificial Sequence
  ENSG00000186409_127 (sequence is synthesized)
ctccttgtaacaacctgtgatcagatatgggagcaaaggaatgacttaaagttggaacttatattcaaaagggaagcagagcataaaaattcagcaaatttgcagcctggccatgtggca

SEQ ID NO: 677810 - DNA, 120 bp, Artificial Sequence
  ENSG00000186409_128 (sequence is synthesized)
gagaaagaatcccagcagggtatggagcaactacttgctagagaaactagcatgactaaatgggagccaagtgctagtatccaagacaatgggaaaaggcctcaaaggcaatctcagaga

SEQ ID NO: 677811 - DNA, 120 bp, Artificial Sequence
  ENSG00000186409_129 (sequence is synthesized)
acttggagacagcccctaccatcacaggtccacagacgtaggaggaaagaatggtttagggggccaagcactgggtaccactgctctgctcagcctcaggacactgctccctgaatccca

SEQ ID NO: 677812 - DNA, 120 bp, Artificial Sequence
  ENSG00000186409_130 (sequence is synthesized)
gctactacagctccagctgtggctcaaaggaccccagatacagctcaggctgcctgtccagaggatgcaagccataagccttggtggcttccatgtggtactaaacctgtgggcacatag

SEQ ID NO: 677813 - DNA, 120 bp, Artificial Sequence
  ENSG00000186409_131 (sequence is synthesized)
aatgcaagagtgaaggaggcttggcagctcccacaaagatttcagatgatgtgagagatagcctgggtgcccaggcagaaccctgccacaggggcagagccctcacagagaagttctaat

SEQ ID NO: 677814 - DNA, 83 bp, Artificial Sequence
  ENSG00000186409_132 (sequence is synthesized)
aagaagtgggccactgccctccagactccagaatggtagatccacaggcagcttgcatcctgtacctgggaaagcctcagaca

SEQ ID NO: 677815 - DNA, 120 bp, Artificial Sequence
  ENSG00000186409_133 (sequence is synthesized)
acaggcagcttgcatcctgtacctgggaaagcctcagacacccagctccaaccagtgagatcagccacaggggctgctgcctgcaaagccacaggagaagagctacccaaggccttggga

SEQ ID NO: 677816 - DNA, 120 bp, Artificial Sequence
  ENSG00000186409_134 (sequence is synthesized)
ctgcaaagccacaggagaagagctacccaaggccttgggagcctacgcattgcaccattgtgccctggatgtgggacatggagtcaagggagagtattttggagctttaagatttaatga

SEQ ID NO: 677817 - DNA, 120 bp, Artificial Sequence
  ENSG00000186409_135 (sequence is synthesized)
tctttcttttggctaatttctcccttttggaattgtgatgtttacctaatgcctgtactaccactgtatcttgggagtaaatgacttattttgatttttacaggctcataagtggaagga

SEQ ID NO: 677818 - DNA, 120 bp, Artificial Sequence
  ENSG00000186409_136 (sequence is synthesized)
atgcaatttgaggggtcatgggtggaatgatacggtttggttctttatcccctccaaatctcatcttgaaatgtaatccccgttgttggaggttgggtctgaggggagtgtgtttgggtc

SEQ ID NO: 677819 - DNA, 120 bp, Artificial Sequence
  ENSG00000186409_137 (sequence is synthesized)
ggtcattggagtgcatccctcattaatggcctggtgctgtcctcataatagtgagtgtgctcttcatgagatctggttgtttgaaagtatgtagccaggcatggtagctcatgcctgtaa

SEQ ID NO: 677820 - DNA, 81 bp, Artificial Sequence
  ENSG00000186409_138 (sequence is synthesized)
agaaatccatctgtacaaaaaaatacaaaaattaattggatgtgttggcatacacctgtagtctcagctattcaggaggct

SEQ ID NO: 677821 - DNA, 120 bp, Artificial Sequence
  ENSG00000186409_139 (sequence is synthesized)
caaaaattaattggatgtgttggcatacacctgtagtctcagctattcaggaggctgaggtggggaagatggcttgaacctgggaggcggaatttgcagtgagctgagatcacgccattg

SEQ ID NO: 677822 - DNA, 120 bp, Artificial Sequence
  ENSG00000186409_140 (sequence is synthesized)
tctcaaaaaataaataaataaataaaacttaaaatataaataaataaagtatatgacacctctccccattctcttgctcctctcaccatatgacatgtctgctcccacttcacctaccat

SEQ ID NO: 677823 - DNA, 120 bp, Artificial Sequence
  ENSG00000186409_141 (sequence is synthesized)
ccacttcacctaccatcatgattgtgagcttcctgaggccctcaccagaagctgagcagatgctggcaccacgctttctgtatagccggcagaaccatgagccaattaaacttcttttct

SEQ ID NO: 677824 - DNA, 120 bp, Artificial Sequence
  ENSG00000186409_142 (sequence is synthesized)
ctcaggtattcctttatagcaatgcaaaaatggccaaatacaacttctgacaccagttatgtgagtttttccccatactaagcaattctccaattctttgtggacaccaactggatgtac

SEQ ID NO: 677825 - DNA, 120 bp, Artificial Sequence
  ENSG00000186409_143 (sequence is synthesized)
caccaactggatgtacaaaaatgtaagtcagtctgacactatctacctgaagatagcatcagatcccatgagttaagctctcagtcccacaatactgcccccattcgagatgccaattgc

SEQ ID NO: 677826 - DNA, 120 bp, Artificial Sequence
  ENSG00000186409_144 (sequence is synthesized)
aagtccaggtttttgcttatgcttctgaccaaccagttataaatcagaggtccccacaaccctctccttgggtttgatctttttgtaggatggctcacagaattcaggaaaacagtttgc

SEQ ID NO: 677827 - DNA, 120 bp, Artificial Sequence
  ENSG00000186409_145 (sequence is synthesized)
ttactggattactggctgattataaaaggacacaactcaggaacagccagatggaagagatgcatagggcaaggcatgtggaaagggatgtggaacttccatgacctctgatcacaccac

SEQ ID NO: 677828 - DNA, 120 bp, Artificial Sequence
  ENSG00000186409_146 (sequence is synthesized)
cctcccaggacctccacatattcagcaacctagaagctccctaaaccctgtccttttggggatttatgaagacttcattatgtaggcatgattggttaaatcattaactgttagtgatta

SEQ ID NO: 677829 - DNA, 120 bp, Artificial Sequence
  ENSG00000186409_147 (sequence is synthesized)
actcaacctttagtccctctcccttcctgggaagtctggatgagcctgaaagttccaaccctctaatcatataatggtacccctggcaacttgcctacatcctgaggctgccccagagtc

SEQ ID NO: 677830 - DNA, 120 bp, Artificial Sequence
  ENSG00000186409_148 (sequence is synthesized)
tccccacccctctgccatcagtcttctcattagtttacaaaaaagacacttaccacttcggagattccaagagttttaggagcagcgtgccaggaaataggacaaagatcaaaatatgta

SEQ ID NO: 677831 - DNA, 120 bp, Artificial Sequence
  ENSG00000186409_149 (sequence is synthesized)
tgtattataccacagtaacacaagaaaaatgacttttccttcccttatgctttccaaattgtgtgcaagttcctctcatctgcagaaactacacttgatccctgctagcagggaagtctg

SEQ ID NO: 677832 - DNA, 120 bp, Artificial Sequence
  ENSG00000186409_150 (sequence is synthesized)
gaaaatgcagttttcaggcttccaagctcatggcccaggggaaagcttagaagagtggggtcatgttgagttctagcacagtccacttgggatactcagcatccatccaaatgcttttac

SEQ ID NO: 677833 - DNA, 120 bp, Artificial Sequence
  ENSG00000186409_151 (sequence is synthesized)
cttgtggcttaacttctaaactacaagaagaatatcatgcttccactgaatatgatgcactataattcatataaataaagacacactgtctccataaaaataaagaatactcaaagtcca

SEQ ID NO: 677834 - DNA, 120 bp, Artificial Sequence
  ENSG00000186409_152 (sequence is synthesized)
atcagtatctatgattattttggggtgatgttcattttacttcagtctcaatccacatgcgtggatatactataacattaaaacttaattataggccaggtgtggtggctcacgactgtg

SEQ ID NO: 677835 - DNA, 89 bp, Artificial Sequence
  ENSG00000186409_153 (sequence is synthesized)
agctcaggagttcgagaccagccttcaaaattttttttaattagctgggcctgatggtgtgcacctgcagctctagctacatgggaggc

SEQ ID NO: 677836 - DNA, 72 bp, Artificial Sequence
  ENSG00000186409_154 (sequence is synthesized)
ccctgtctctacaaaacaaaattttttttaattagctgggcctgatggtgtgcacctgcagctctagctact

SEQ ID NO: 677837 - DNA, 120 bp, Artificial Sequence
  ENSG00000186409_155 (sequence is synthesized)
acagagtgagacctcaagtgaaaaaagaaaaagcttaattagaagccaggaacttataattaagcaagtgcctatagtactagctgcttagaagcctgaggcagaaggattgcttgtggc

SEQ ID NO: 677838 - DNA, 120 bp, Artificial Sequence
  ENSG00000186409_156 (sequence is synthesized)
cagaagttcaaggctcagtatgctatgattgcatatgtgaatagcccctgtattcctgtctgggcaacatagccagacctcatttcttaaattaaaacatcatggtcttctgctctgaat

SEQ ID NO: 677839 - DNA, 120 bp, Artificial Sequence
  ENSG00000186409_157 (sequence is synthesized)
aaaataaaaaagaaatgaaaattttaaaaattaaaacaaaaaattataaagttaactaccagtaatacaatagcatgcattttgctaatgggtattggcctaagaagccactcccaattt

SEQ ID NO: 677840 - DNA, 120 bp, Artificial Sequence
  ENSG00000186409_158 (sequence is synthesized)
catctcttggtcccttttcatgtattctggctaggggagaaataatatcatatatcaatcacagttaaaagtttatacatcatcttgtaagacaacacttcaaacctatgaagtgttgtc

SEQ ID NO: 677841 - DNA, 120 bp, Artificial Sequence
  ENSG00000186409_159 (sequence is synthesized)
acctggccagcatcatagctaagtcttccgtaggtaatttcgctgtttttttttttcagattggtttttctgcatgataggatatacggtagaaccaatgagtcatatgattatatgagc

SEQ ID NO: 677842 - DNA, 120 bp, Artificial Sequence
  ENSG00000186409_160 (sequence is synthesized)
cattgtttcacttttcttgctataaagtgattttcttggtcagaagcaatatttttttttattactacaagtctagatccgagttatatatcatgacgagaaataaggaatttggtaagt

SEQ ID NO: 677843 - DNA, 120 bp, Artificial Sequence
  ENSG00000186409_161 (sequence is synthesized)
ccacaaatggtggtcctggcaaaagcgttatggacagaaaaagtaaatccaggccaggcgtggtggctcacgcctgccatcccagcactttggaagcccaaggcgggcggatcacttgag

SEQ ID NO: 677844 - DNA, 61 bp, Artificial Sequence
  ENSG00000186409_162 (sequence is synthesized)
aggcaggagaatggcgtgaacctgaaaaaacaaaaacaaaaaccctcctataataccataa

SEQ ID NO: 677845 - DNA, 87 bp, Artificial Sequence
  ENSG00000186409_163 (sequence is synthesized)
agagtgagactccgtctcaaaaaaagcaaaaaacaaaaacaaaaaccctcctataataccataaactctgtcacccaggctgaagtg

SEQ ID NO: 677846 - DNA, 80 bp, Artificial Sequence
  ENSG00000186409_164 (sequence is synthesized)
caataccacagtcttaacacaactaattttattttacagttattcccttttggtcctaattcaagtacatatattctaag

SEQ ID NO: 677847 - DNA, 120 bp, Artificial Sequence
  ENSG00000186409_165 (sequence is synthesized)
tattcccttttggtcctaattcaagtacatatattctaagtggttattataatattgtatattcattttcacagtttgatttttaatttactgtatataccatggaaacattttcaatcg

SEQ ID NO: 677848 - DNA, 120 bp, Artificial Sequence
  ENSG00000186409_166 (sequence is synthesized)
ccatatgatattcaatcatgttgatgttctataattatttttatgggaaaagttttaaatgtttaatgaagaagatttagagcaatacattatttaaaagtggataggaggttgggcgtg

SEQ ID NO: 677849 - DNA, 73 bp, Artificial Sequence
  ENSG00000186409_167 (sequence is synthesized)
ttagggaaaccccgtctctaacaaaaatacaaaaacaattagccaggtgtggtagtgcgcgcgcctgtagtcc

SEQ ID NO: 677850 - DNA, 64 bp, Artificial Sequence
  ENSG00000186409_168 (sequence is synthesized)
ggccaacttagggaaaccccgtctctaacaaaaatacaaaaacaattagccaggtgtggtagtg

SEQ ID NO: 677851 - DNA, 120 bp, Artificial Sequence
  ENSG00000186409_169 (sequence is synthesized)
aaataaataaaataaaataaaataaaagtggataggaaaataccaagagcttttcctgggggagggggtatgagaagagagttcacataaaccccattacacagaaactacccctaaata

SEQ ID NO: 677852 - DNA, 120 bp, Artificial Sequence
  ENSG00000186409_170 (sequence is synthesized)
gttcacataaaccccattacacagaaactacccctaaatatttccaaacaggagtacaaagtaggtgaacagtctccagctcatctttagtgtagtgggactgcttcttcagaaaagatc

SEQ ID NO: 677853 - DNA, 120 bp, Artificial Sequence
  ENSG00000186409_171 (sequence is synthesized)
agcaacattcacatccatttcatctatcagggtggaacagtactgctcagtatctctgaggatgtggatgttctataaattaaacgttctcttgtttggcatttaagctgtttttacttt

SEQ ID NO: 677854 - DNA, 120 bp, Artificial Sequence
  ENSG00000186409_172 (sequence is synthesized)
tttttttttgagacagggtctcactttgtaacccaggctggagtgcagtggtttgattactgctcatgcagcctcaacctcccatgcttaagtgatcctctctcctcagcctctcccaag

SEQ ID NO: 677855 - DNA, 120 bp, Artificial Sequence
  ENSG00000186409_173 (sequence is synthesized)
gcctctcccaagtacaggcatgtgctaccatgcctggctcatttttgtactttttgtaaagacgaggtctcactctcactctattgttcaagctggtctcaaatttctgggctcaagtga

SEQ ID NO: 677856 - DNA, 120 bp, Artificial Sequence
  ENSG00000186409_174 (sequence is synthesized)
tcctcccacctaagcctcctaggtgataggattataggatgagcctctatgccaggcctggttttactttgttactatttaagattatgctgtgttgaaggtctttgtgcatgtagttct

SEQ ID NO: 677857 - DNA, 120 bp, Artificial Sequence
  ENSG00000186409_175 (sequence is synthesized)
tttcttcttttgaattactccagaaaacaaattcgcaagattggactgagtcaaaggatataaatgttaatattgctctaggacatcacttcctttgctttaaaaaagggttctgcctga

SEQ ID NO: 677858 - DNA, 120 bp, Artificial Sequence
  ENSG00000186409_176 (sequence is synthesized)
tagccgggtatggtggtgcacacctgtagtccctgctatgcgggaggctgaggctcgagaatcacctgaacccaagaggtagaagtttcagtgagctgagaccactccactgtactccag

SEQ ID NO: 677859 - DNA, 120 bp, Artificial Sequence
  ENSG00000186409_177 (sequence is synthesized)
ctgtctcaaaaaataataataataaatacataaataataaaataaataaaaagtgtgtcaacatactgttttcatagtcaagttactcaacctccttgagcctcaatttcttgattccta

SEQ ID NO: 677860 - DNA, 120 bp, Artificial Sequence
  ENSG00000186409_178 (sequence is synthesized)
aacctccttgagcctcaatttcttgattcctaaaatgggaacaataatagttctctatcccatagggttgtgaggaccaaatgaaatgaagcatgtaaagtatttagcacgtagtaactg

SEQ ID NO: 677861 - DNA, 120 bp, Artificial Sequence
  ENSG00000186409_179 (sequence is synthesized)
cttaataaatgctatcatcatttattttcactagaggtttatcaatgtactatttttttcacaacctcatcaacattggatattatcaattttaaagatttattctaaaacagttggtat

SEQ ID NO: 677862 - DNA, 120 bp, Artificial Sequence
  ENSG00000186409_180 (sequence is synthesized)
aaaattatactgaagcgtgactgctgctgttccttttccccctcctcccctttcttctttttcagttggaggagaccaagaggagaggatcagtaaccagaaataaaaatgaccctttac

SEQ ID NO: 677863 - DNA, 120 bp, Artificial Sequence
  ENSG00000186409_181 (sequence is synthesized)
attgagacacactgtatttttatatgtaatccttgctttctcagacaacagagctagaaagatgatcataggaactaggaaataataactattttattaaatgcatgctgttatattgaa

SEQ ID NO: 677864 - DNA, 120 bp, Artificial Sequence
  ENSG00000186409_182 (sequence is synthesized)
ggcaggaggaccaggagcagtggctcacaactgtaatcccagcgcttgagaggctgaggctcataagtggaaggagataagtctcagaagagacttaggactttggacttgatgctggaa

SEQ ID NO: 677865 - DNA, 120 bp, Artificial Sequence
  ENSG00000186409_183 (sequence is synthesized)
gctacaactttttccacttctctcatcactccaagcaccagctttctcatcctgcttatttcacagccattttaacttttccctgttcacgctgcacattattgaatgtccatttgtctg

SEQ ID NO: 677866 - DNA, 120 bp, Artificial Sequence
  ENSG00000186409_184 (sequence is synthesized)
caccacctctgtcatctatagaccacctccttctgctttcctgctacaatgctttgcgtacctaagtatttcgcattctccagctctgcagtcattgggaagattttctgtttttctttg

SEQ ID NO: 677867 - DNA, 120 bp, Artificial Sequence
  ENSG00000186409_185 (sequence is synthesized)
ttctaatgaaacatggcaacagtctgtgttggtttccattaagactccatgtataggatgttgcccagtgatgactggctgaacatctaaacaggactgctccaggtagctttcattatc

SEQ ID NO: 677868 - DNA, 120 bp, Artificial Sequence
  ENSG00000186409_186 (sequence is synthesized)
gtagataagctaactccaaaaacatttacatgtgaataatcacattctgacaattccggttctgacaacttgaacccatgttttaccaatattctttccaattgtctgtgtttctctttt

SEQ ID NO: 677869 - DNA, 120 bp, Artificial Sequence
  ENSG00000186409_187 (sequence is synthesized)
agtgactgaactggaaaatgtagatgagaagaactactgttctggtttttccatccttcaaaagaagctaaaacttttgggcctttgtcctcttggtaaaactggggtgcatctcttgta

SEQ ID NO: 677870 - DNA, 120 bp, Artificial Sequence
  ENSG00000186416_0 (sequence is synthesized)
gcggcgcaagcgcactggcctcacaaccccggacggcacgcgggtaggtaggctagaacctagaggaggggagcagagcgtgctggggtcttttatcgctctccgcgcagtgcgtgggtc

SEQ ID NO: 677871 - DNA, 120 bp, Artificial Sequence
  ENSG00000186416_1 (sequence is synthesized)
tgcggatccgtggaggtgcggagcctgactcggcctccccggctcgcgcgtgagtgcggcggaagcccttctgctcctccacgagttagaggagtgtaggggacgtgcatcccagtgtcg

SEQ ID NO: 677872 - DNA, 120 bp, Artificial Sequence
  ENSG00000186416_2 (sequence is synthesized)
ggacgcgagctcgtgctcctcttttcctcctaacggtggcccccacgcacacactccagtccccccgagagttgatcttctcccctcagcgcgcccctccttacccggcccctcccaccg

SEQ ID NO: 677873 - DNA, 120 bp, Artificial Sequence
  ENSG00000186416_3 (sequence is synthesized)
gccccccgtttccgcccgcttgctagctgcctagctcgcggtccgtagtcggcttcgtccctggggtccctgcttgggggcggagaagatggctggaggacgtctgctgttggggggcga

SEQ ID NO: 677874 - DNA, 120 bp, Artificial Sequence
  ENSG00000186416_4 (sequence is synthesized)
cttcctgtcgcgccgccgctgccccccctcccgccgccgccgctgccgcccctcccgccgcccccgcccgagccagtgctggagcagtggcgctatagccacgaaagtgactggcagtgg

SEQ ID NO: 677875 - DNA, 120 bp, Artificial Sequence
  ENSG00000186416_5 (sequence is synthesized)
gctctgcggcgcagcttcatctgtcggcacctgcacagctatcccggggctgccctcgaccagctcctcgcgctctccgccgcctggaccaaccacgtcttcctgggctgcaggtacagc

SEQ ID NO: 677876 - DNA, 120 bp, Artificial Sequence
  ENSG00000186416_6 (sequence is synthesized)
ccacgcttgatggaaaaaattctccaaatggctgaaggtattgatattggggagatgccttcatatgatctggtgctgtccaaaccttccaaaggtcaaaaacgccacctctcaacatgt

SEQ ID NO: 677877 - DNA, 120 bp, Artificial Sequence
  ENSG00000186416_7 (sequence is synthesized)
gatggtcaaaatcctcctaaaaagcaagccggttccaaattccatgcgagacctcgttttgagcctgtacattttgtagctagtagttcaaaagatgaaagacaggaagatccttatggc

SEQ ID NO: 677878 - DNA, 120 bp, Artificial Sequence
  ENSG00000186416_8 (sequence is synthesized)
cctcaaacaaaagaggtaaatgaacaaacacattttgccagcatgccaagagacatctaccaagattatactcaagactctttcagtatacaagatgggaattctcagtattgtgattca

SEQ ID NO: 677879 - DNA, 120 bp, Artificial Sequence
  ENSG00000186416_9 (sequence is synthesized)
tcaggattcattctcacaaaagaccagcctgtaacagccaacatgtattttgacagtgggaaccctgccccaagcaccacatcacagcaggcaaactctcagtcaactcctgagccttca

SEQ ID NO: 677880 - DNA, 120 bp, Artificial Sequence
  ENSG00000186416_10 (sequence is synthesized)
ccatcacagacatttcccgagtctgtggtagccgagaagcagtattttattgaaaaattaacggcgacaatctggaagaacctttctaatccagaaatgacttctggatctgataaaatt

SEQ ID NO: 677881 - DNA, 120 bp, Artificial Sequence
  ENSG00000186416_11 (sequence is synthesized)
aattatacatatatgttaactcgttgtattcaggcgtgtaagacaaatcctgagtatatatatgctcctttaaaggaaattcctcctgccgacatccccaaaaataaaaaacttctaact

SEQ ID NO: 677882 - DNA, 120 bp, Artificial Sequence
  ENSG00000186416_12 (sequence is synthesized)
gatggctatgcttgtgaagttagatgccaaaatatctacttaactacaggttatgctggcagcaagaatgggtccagggatcgagctacagagctagctgtaaaactcttgcagaaacgt

SEQ ID NO: 677883 - DNA, 120 bp, Artificial Sequence
  ENSG00000186416_13 (sequence is synthesized)
attgaagttagagttgtccggcggaaattcaagcatacatttggagaggacctcgtggtgtgtcagattggcatgtcctcctatgaatttcctccagctctgaagccaccagaagacctg

SEQ ID NO: 677884 - DNA, 120 bp, Artificial Sequence
  ENSG00000186416_14 (sequence is synthesized)
gtggtgctgggtaaagatgcttccgggcagccaatttttaatgcttctgccaaacactggaccaattttgtcattacagaaaatgcaaatgatgcaattggtatccttaacaattctgcc

SEQ ID NO: 677885 - DNA, 120 bp, Artificial Sequence
  ENSG00000186416_15 (sequence is synthesized)
gttatggaaccaagaaaacaagtaaacatgcagctgccgacgaggctttgaaaattcttcaaaaaacacagcccacttatccatctgtcaaaagttcacaatgccatacaggctcttcac

SEQ ID NO: 677886 - DNA, 120 bp, Artificial Sequence
  ENSG00000186416_16 (sequence is synthesized)
ccagaggatctggaaagaagaaagatataaaggatcttgtagtttatgagaattcttcaaatcccgtgtgcacgctgaacgacacagctcagtttaaccgaatgacagttgagtatgtct

SEQ ID NO: 677887 - DNA, 120 bp, Artificial Sequence
  ENSG00000186416_17 (sequence is synthesized)
atgaaaggatgacaggcctccgctggaaatgcaaagtgattctagagagtgaagtaattgcagaagcagttggggtgaagaaaactgtcaaatatgaagctgctggggaagctgtgaaaa

SEQ ID NO: 677888 - DNA, 120 bp, Artificial Sequence
  ENSG00000186416_18 (sequence is synthesized)
ccctcaaaaagacccagccaactgtcattaacaacttgaagaaaggagctgttgaagatgtgatttcaagaaatgaaattcagggccgctcagcagaggaggcttacaaacagcaaatca

SEQ ID NO: 677889 - DNA, 120 bp, Artificial Sequence
  ENSG00000186416_19 (sequence is synthesized)
aagaagataatattggaaatcagctgctgagaaagatgggttggactggtggtggtttaggtaaatctggtgagggcatacgggagcctatctcagtgaaagagcagcataagcgggaag

SEQ ID NO: 677890 - DNA, 120 bp, Artificial Sequence
  ENSG00000186416_20 (sequence is synthesized)
ggcttggtctggatgtagagagggtgaataaaattgccaagagagatattgaacagatcatcagaaactacgcccgctccgagagccacacagatttgactttctctagagagctgacta

SEQ ID NO: 677891 - DNA, 120 bp, Artificial Sequence
  ENSG00000186416_21 (sequence is synthesized)
atgatgaacggaagcaaatacatcagattgcccagaagtatggtcttaagagtaagtctcatggggtgggccatgataggtacctagtggtaggtagaaaaagacggaaggaagacctac

SEQ ID NO: 677892 - DNA, 120 bp, Artificial Sequence
  ENSG00000186416_22 (sequence is synthesized)
tagatcagctcaaacaggaaggccaagtgggccattacgagcttgttatgcctcaagcaaattgagatcttactaatttattttgtaaatgcctaatgaggcagatttttgaattaaaga

SEQ ID NO: 677893 - DNA, 120 bp, Artificial Sequence
  ENSG00000186416_23 (sequence is synthesized)
aatgctacatgttccggttgcagagtatattcataagatgtctcaccttgttcatttcacatagtggtttattagatattggaacctaaagaattctgtccacttgtattagcttaatcc

SEQ ID NO: 677894 - DNA, 120 bp, Artificial Sequence
  ENSG00000186416_24 (sequence is synthesized)
agcagatgatattgtgcagttactgtttgtgtctttgatattgctgtgtccctcagattttagtagtttgacaagcaagaacacatatccaaatggaattttaccctgagaaattatcat

SEQ ID NO: 677895 - DNA, 120 bp, Artificial Sequence
  ENSG00000186416_25 (sequence is synthesized)
tttaaagggcatagcacagcaatctgcaacaatatgtaaagttgatattgactacaataaaaatccagtcttaattccagatttactgaaaatgtcagatcattttgtattaatctattt

SEQ ID NO: 677896 - DNA, 120 bp, Artificial Sequence
  ENSG00000186416_26 (sequence is synthesized)
tcatctttgtgtgaagccagttatagaatgtttgacaataaattgtgctgtacacgtaaatgtccttaccaactaaatgatgtaaaactttcttaaagtaattttagtgttcatttattt

SEQ ID NO: 677897 - DNA, 120 bp, Artificial Sequence
  ENSG00000186416_27 (sequence is synthesized)
ataacttctaccatgtgatttccagactattggaagtgatttactgtatcttgtgatatatgggttttaacaaattctagtcttcacgctgagagagcactacttgagagagcagttgaa

SEQ ID NO: 677898 - DNA, 120 bp, Artificial Sequence
  ENSG00000186416_28 (sequence is synthesized)
agtttcaaaaactttggttcaatctgaagaaaggaagcttgaactgtttgttcttggtgccttgcagagagactcacagcaactctccattatagctttcacacggtttggatgtgcagc

SEQ ID NO: 677899 - DNA, 120 bp, Artificial Sequence
  ENSG00000186416_29 (sequence is synthesized)
acatccaaggcaaccacagctgtggtagagcttggtaaaagactgaagatacattggtgctttgatgaaaaggtcagttggctggtccctctctcaaaaagcttattaagcctgaaaagc

SEQ ID NO: 677900 - DNA, 120 bp, Artificial Sequence
  ENSG00000186416_30 (sequence is synthesized)
caactttgtaacatatttaaaactgctattttcgcttatttctggaatgtaaaaaaaaaaaatgtataaaaagaattagtgtatgcttcctgaataaaaaggagccaaagttgatcagaa

SEQ ID NO: 677901 - DNA, 120 bp, Artificial Sequence
  ENSG00000186416_31 (sequence is synthesized)
cagaataatgacatggttccttccatcctccaaaggtgaccaataatagtttgtaagtatcattatgaactaatgaattttcaacatatttgatatatttcaatccattgccatcattgt

SEQ ID NO: 677902 - DNA, 120 bp, Artificial Sequence
  ENSG00000186416_32 (sequence is synthesized)
tcttatcgatatttgagttggctcactttgccagtaagagtctattcaaattggcttctgagtccatttgacacaacacctttgatctttgacagtttccttggttttaggtgctagatg

SEQ ID NO: 677903 - DNA, 120 bp, Artificial Sequence
  ENSG00000186416_33 (sequence is synthesized)
atttctcaggctcaccttagacatttcctgccacagacttagaatcagccatttctctaaggaccctgattccatttcatgagaaatgatagagaccacaatcaaaacaagtcatgaatt

SEQ ID NO: 677904 - DNA, 120 bp, Artificial Sequence
  ENSG00000186416_34 (sequence is synthesized)
tatactgatattttcaattcaaattaaagatgaggtttttgctaaatttttttgagtttatatttgtatgtcttatgctgaaaaatcttgtttcctaattagtaacataattattcattt

SEQ ID NO: 677905 - DNA, 120 bp, Artificial Sequence
  ENSG00000186416_35 (sequence is synthesized)
gatgggtaaatattttagggccgattctttggttttatagccaagataccctgttgataaagtcttgtgggagcaattataagactggcttattttgaagctttttaaaaaagacatcct

SEQ ID NO: 677906 - DNA, 120 bp, Artificial Sequence
  ENSG00000186417_0 (sequence is synthesized)
aagccctgccctgcccaaggcgcatagagcatggcccgaggcgctgagggaggccgtggggacgcgggttggggcctgcgtggcgccctggcggccgtggcgctgctctcggcgctcaac

SEQ ID NO: 677907 - DNA, 120 bp, Artificial Sequence
  ENSG00000186417_1 (sequence is synthesized)
gctgcgggcacggtgttcgcgctgtgccagtggcgcgggctgagctcggcgctgcgggctttggaggcgcagcggggccgggagcagcgcgaggacagtgccctgcgctccttcctggcc

SEQ ID NO: 677908 - DNA, 120 bp, Artificial Sequence
  ENSG00000186417_2 (sequence is synthesized)
gagttgagccgcgcgccgcgcggggcgtccgcaccaccccaagacccggccagctcagctcgcaacaagcgcagccacagcggcgagcccgcgccgcatatccgcgccgagagccatgac

SEQ ID NO: 677909 - DNA, 120 bp, Artificial Sequence
  ENSG00000186417_3 (sequence is synthesized)
atgctgatgatgatgacctactccatggtgccgatccgagtgatggtggacctgtgcaacagcaccaagggcatctgcctcacaggaccttctggaccaccaggacctccgggagccggc

SEQ ID NO: 677910 - DNA, 120 bp, Artificial Sequence
  ENSG00000186417_4 (sequence is synthesized)
gggttgccaggacacaacggattggatggacagcctggtcctcagggcccaaaaggagaaaaaggagcaaatggaaaaagaggaaaaatggggatacctggagctgcaggaaatccaggg

SEQ ID NO: 677911 - DNA, 120 bp, Artificial Sequence
  ENSG00000186417_5 (sequence is synthesized)
gaaaggggagaaaagggagaccatggtgaactgggcctgcagggaaatgagggcccaccagggcagaagggagaaaagggtgacaaaggagatgtgtccaacgacgtgctcctggcaggt

SEQ ID NO: 677912 - DNA, 120 bp, Artificial Sequence
  ENSG00000186417_6 (sequence is synthesized)
gccaaaggtgaccaaggcccacccggtccacctgggcccccaggccctccaggtcctccagggccccctggaagcagaagagccaaaggccctcggcagccaagcatgttcaacggccag

SEQ ID NO: 677913 - DNA, 120 bp, Artificial Sequence
  ENSG00000186417_7 (sequence is synthesized)
tgcccaggtgagacttgtgccataccaaatgatgataccttggttggaaaagctgatgagaaagccagtgaacaccattccccacaagcagaatccatgatcacttccattggaaaccca

SEQ ID NO: 677914 - DNA, 120 bp, Artificial Sequence
  ENSG00000186417_8 (sequence is synthesized)
gtgcaagtactgaaagtgacagagacatttgggacttggataagagagtctgctaacaagagtgatgaccggatttgggtgacagagcatttttcaggcatcatggttaaggaattcaag

SEQ ID NO: 677915 - DNA, 120 bp, Artificial Sequence
  ENSG00000186417_9 (sequence is synthesized)
gatcagccctcacttctgaatggcagttacacgttcatccaccttccatactatttccatggctgtgggcacgttgtttacaacaactctctctactaccacaaagggggttctaatacc

SEQ ID NO: 677916 - DNA, 120 bp, Artificial Sequence
  ENSG00000186417_10 (sequence is synthesized)
ctagtgagatttgaatttggccaggaaacatcccaaactctgaagcttgaaaatgccttgtattttgatcgaaaatacctttttgcaaattccaaaacttacttcaatctagctgtagat

SEQ ID NO: 677917 - DNA, 120 bp, Artificial Sequence
  ENSG00000186417_11 (sequence is synthesized)
gaaaagggcctttggattatctatgcgtcaagtgtggacggctcgagcattcttgtagcacaactggatgagaggacattctcagtggtgcaacacgtcaataccacgtaccctaaatcc

SEQ ID NO: 677918 - DNA, 120 bp, Artificial Sequence
  ENSG00000186417_12 (sequence is synthesized)
aaggctggcaacgccttcattgcccgaggaatcctctatgtcacagacaccaaagatatgagggtcacatttgcctttgatttgttaggagggaaacagatcaatgcaaactttgattta

SEQ ID NO: 677919 - DNA, 120 bp, Artificial Sequence
  ENSG00000186417_13 (sequence is synthesized)
agaacttcccagtctgttcttgccatgttagcatacaacatgagagatcagcatttatattcatgggaagatggccatttaatgctttatcctgtgcagtttttgtcaactaccttaaat

SEQ ID NO: 677920 - DNA, 120 bp, Artificial Sequence
  ENSG00000186417_14 (sequence is synthesized)
cagtgatgtgctgcattcggctcccttcagcaaatttcaggggttttctgggaccagttctcccccaacaggaaacttgtttttttaacgtcagccagatatttagaaaataacctcaaa

SEQ ID NO: 677921 - DNA, 120 bp, Artificial Sequence
  ENSG00000186417_15 (sequence is synthesized)
agtgtttatatggtcagtgagccccgcttagtgaaatagcaacagattggaagttgaaatggctgagatttggtgatctccccacagctggctctgcaagttacctctttctccttgggc

SEQ ID NO: 677922 - DNA, 120 bp, Artificial Sequence
  ENSG00000186417_16 (sequence is synthesized)
cttagtttccccattggtaatctgaattggctaagatgattggggagattttctgtacctgtaggtaatttggtgattcttggtggctgctcttctcacaacttttatgtatctgcttct

SEQ ID NO: 677923 - DNA, 120 bp, Artificial Sequence
  ENSG00000186417_17 (sequence is synthesized)
gtcgtttagcttttttagccacatgctgaccaaatttacctttgagttgataagtccagtggcttgagtagtgaatccctcagtgctgacttatatcttgttctttgaaaaaatgcattg

SEQ ID NO: 677924 - DNA, 120 bp, Artificial Sequence
  ENSG00000186417_18 (sequence is synthesized)
actctttaagacatctaaagtatcacattatccataatttattgcttttctttgcatctgcacctgccaccacagaataaccattaccctcagctgctgattgggcagctctgagattag

SEQ ID NO: 677925 - DNA, 120 bp, Artificial Sequence
  ENSG00000186417_19 (sequence is synthesized)
caaaagccagggacagctacatgttcaggtttttttttttttttttttttcaataagctattttttttcttttcttattttaaatagagagagagtcttgctatgtttcccaggctggtc

SEQ ID NO: 677926 - DNA, 120 bp, Artificial Sequence
  ENSG00000186417_20 (sequence is synthesized)
cctcctgccttggcctcccaaaatgctggattacaggcatgtgtgcctggcccaggtttcttaataaaacagaatcatgatcttccaggttccccccagtttctgatcatgttgatttgt

SEQ ID NO: 677927 - DNA, 120 bp, Artificial Sequence
  ENSG00000186417_21 (sequence is synthesized)
atgttgatttgtagctgtggatcatgaacactgaatcctcagatcactctgacttcttatgcttctcctgtggatccactatcaaagtactaaatgctgtgtaagtagacgttaatctgg

SEQ ID NO: 677928 - DNA, 120 bp, Artificial Sequence
  ENSG00000186417_22 (sequence is synthesized)
ctggaaccatgggaagcactttgcagtgttcagaagagaggctccatttgtggctattatgtagaactgggccagagccagtccattgcctgtttttttaaataaggttttactgagcac

SEQ ID NO: 677929 - DNA, 120 bp, Artificial Sequence
  ENSG00000186417_23 (sequence is synthesized)
agccacactcatttgtttatgcagtacggcctgacattgcttttgctctgcaacagcagagtcgagtcattgcaacaaagagcatatggccccacagtgcctaaaatattgaccagctac

SEQ ID NO: 677930 - DNA, 120 bp, Artificial Sequence
  ENSG00000186417_24 (sequence is synthesized)
ccctttatggaaaaagattgctgactcctgataaagaatataaagtgagcctgattcttgaaaaaatcagaaccagagcctgttttgttttgttctaaactaagaagccgcataggatgt

SEQ ID NO: 677931 - DNA, 120 bp, Artificial Sequence
  ENSG00000186417_25 (sequence is synthesized)
gacttgcgttttgagtagaggggaaggctgataacggcgtaagatgaagtggccctccacaaaggctggttaggggacagttctttctctaacatagttttaaaggatgtgatctggtcc

SEQ ID NO: 677932 - DNA, 120 bp, Artificial Sequence
  ENSG00000186417_26 (sequence is synthesized)
ccttggatgccaggagagaatccagttgaacttgctcctaaatgctcttaaatatgcatattttctgccaactcacttctttaaacatctttcagcccagcgctgcggccccgggaaggg

SEQ ID NO: 677933 - DNA, 120 bp, Artificial Sequence
  ENSG00000186417_27 (sequence is synthesized)
ccactgcgaatagagaggaagctggaaaagttcctggggctctgcagccaggaaggggaaccagggcaaatcttatgtaaagatttttcagcaacttgtcccaatttgtgtgtattctga

SEQ ID NO: 677934 - DNA, 120 bp, Artificial Sequence
  ENSG00000186417_28 (sequence is synthesized)
aactttctctttgggaccaaattcattctcaatggccctgagttcaatatattattaacagcagtattttaaaacttagggttgaactgggcatggtggcacataactgcaatcccagct

SEQ ID NO: 677935 - DNA, 120 bp, Artificial Sequence
  ENSG00000186417_29 (sequence is synthesized)
actttggaggcagggatgggaggatcacttgaggccaggatctcaggaccagcctagagagatcccatctctaaaaaataaaatataagaaaataaaacttaggggatatacagatttaa

SEQ ID NO: 677936 - DNA, 120 bp, Artificial Sequence
  ENSG00000186417_30 (sequence is synthesized)
atattcaaatctccctgctcccctgaaagtccccaggcagctgtcaatgacttgtttgttgtgttctcaatatgatggctatttgaaacttcacctacttttcattagattggttgtacc

SEQ ID NO: 677937 - DNA, 120 bp, Artificial Sequence
  ENSG00000186417_31 (sequence is synthesized)
atgtcaccttagcttttaaaaatactcttttcagattcacgttctctaacaaagagtctcatgttcaagatcaatatgtctaataagtgctggtgtccttttaaagtatttaaatatata

SEQ ID NO: 677938 - DNA, 120 bp, Artificial Sequence
  ENSG00000186417_32 (sequence is synthesized)
tgttgctgttgctgaatacaggagaccaggttaggaatatagtttcataataatagtacatacaatactaattgtatataaggtagcaaccaaaagaggttgttaattagcacatattcc

SEQ ID NO: 677939 - DNA, 120 bp, Artificial Sequence
  ENSG00000186417_33 (sequence is synthesized)
ttttagaaaaatgtttcagaaacctcagtcttgatatctgagctatctgggctcccttacttgtgagtaagggatcatgctcaccactggagaagcttacaccgggactttttttctttt

SEQ ID NO: 677940 - DNA, 120 bp, Artificial Sequence
  ENSG00000186417_34 (sequence is synthesized)
ttcttttttttttgctatgacagagtaatgctaacgtaaggacaactgagtttgatcagtgtttaatcgcagtgggtaatcttatctgattgtctttaaaagtgaaaaggattaagattt

SEQ ID NO: 677941 - DNA, 120 bp, Artificial Sequence
  ENSG00000186417_35 (sequence is synthesized)
tattctttcttgtaaacattacttgattttttaaagaagttttgggctcactgctaaaatagagtatacaactgaatgtttttaagtcaagatactgttttaggagtttaccctctcatt

SEQ ID NO: 677942 - DNA, 120 bp, Artificial Sequence
  ENSG00000186417_36 (sequence is synthesized)
tataaccaaagttgctctaaaacactttccaaatatctgcacttctgatgtcagaatcaaaccagataattctctaattcttctttaatctaaagtagatagcttcccactggaaagtaa

SEQ ID NO: 677943 - DNA, 120 bp, Artificial Sequence
  ENSG00000186417_37 (sequence is synthesized)
acaaaaccatccctcccaacctcaaagctaggccacactctatttcaaggcattttctttcagctgataaggtgtcctcctgaagccaagtaggtggttctggtctccaagtatcgttaa

SEQ ID NO: 677944 - DNA, 120 bp, Artificial Sequence
  ENSG00000186417_38 (sequence is synthesized)
gcacaggtgctatgacagaaaaagttctggggtggaagttttaagatgaggagttctgatcttaggcatcttaacagtcacaaggtgaaaagtcaaatgaaacagtacaattcttgatga

SEQ ID NO: 677945 - DNA, 120 bp, Artificial Sequence
  ENSG00000186417_39 (sequence is synthesized)
gtgaggtgtcatcttccaaccacacagaggacgttttggctatgatcatctgatggcaagtgaaggagaaatgagtgatagggctttgcgttttcatccagatgctgtggccctgtgttt

SEQ ID NO: 677946 - DNA, 120 bp, Artificial Sequence
  ENSG00000186417_40 (sequence is synthesized)
cacagcattaagagccataatttccaacctgcacagatcctgaacaacaaatgaataacgatgaatgtctttttggttgtaatttaacaagtcaaataaaataatcattgctgagcacaa

SEQ ID NO: 677947 - DNA, 120 bp, Artificial Sequence
  ENSG00000186417_41 (sequence is synthesized)
acttggtgactttttatgattgctttctgctcgtctgaataaaggatgagcccagggcctgctgcccactgtctgctctgatgaccctctctcccctgcagatccgagtgatggtggacc

SEQ ID NO: 677948 - DNA, 120 bp, Artificial Sequence
  ENSG00000186417_42 (sequence is synthesized)
ggtgtttcatctctgcacagtttaaggccggtttaactcttacctagaagccattgcgttccgggataccaagggtatacttcttggtcccaccttgacagatgtttatttcaaactgga

SEQ ID NO: 677949 - DNA, 120 bp, Artificial Sequence
  ENSG00000186417_43 (sequence is synthesized)
gaagccgtctcctgggaactgactcgcacccttctgctgcagatgggaggtggaaggagcaggagcccacagccctgggaggggcattctgtgggccgtgtgacagctggtgctggtgca

SEQ ID NO: 677950 - DNA, 120 bp, Artificial Sequence
  ENSG00000186417_44 (sequence is synthesized)
agctcagctcgcaacaagcgcagccacagcggcgagcccgcgccgcatatccgcgccgagagccatgacatgctgatgatgatgacctactccatggtgccggtaggcggggtctctgtt

SEQ ID NO: 677951 - DNA, 120 bp, Artificial Sequence
  ENSG00000186417_45 (sequence is synthesized)
cagcgaatctgtgtttggttgaaaatcaatgaactgatgttggcccctggtaaggcatttcttggctagaggaatagctcaaactgcttgagtggaaaggcagcatcctggcctccctgt

SEQ ID NO: 677952 - DNA, 120 bp, Artificial Sequence
  ENSG00000186417_46 (sequence is synthesized)
ggccggcactcaggtcaaagggtctcctcttcaggggctacaggataactatgaagatatggctggcatctcggaggagcttcctttgccctgttatgagcaggccatcaccactggaga

SEQ ID NO: 677953 - DNA, 120 bp, Artificial Sequence
  ENSG00000186417_47 (sequence is synthesized)
aaaggcccagaagcaccaaggcacgagatgtgcccagggagcagtaagaatcaggggctggtgcagggcctggcaggaggctggggcacaaaggggaagattctgaagggctctgagcac

SEQ ID NO: 677954 - DNA, 120 bp, Artificial Sequence
  ENSG00000186417_48 (sequence is synthesized)
tcaaacttcggtggttctgaaagaaagaaaggctgggcaggcaacccgcctaacagagcttattatcagtgtggcttacaggaccacttcaaaaaggactgcccaaacaataagctgccc

SEQ ID NO: 677955 - DNA, 120 bp, Artificial Sequence
  ENSG00000186417_49 (sequence is synthesized)
cctcgtccatgtcccttgtgccagggggatcactggaaggcacactgcccccgagggcgaaggttcactgggccagaggccactaaccagatggtaccacaacaggactgagggtgcccg

SEQ ID NO: 677956 - DNA, 120 bp, Artificial Sequence
  ENSG00000186417_50 (sequence is synthesized)
ggtaagaaactactcaggaggctcctacgaaggcctggctctcagccacccgtcaaagccactgctgagggcagagggaggttgttttcagccggagactccactgcaccatcttatttt

SEQ ID NO: 677957 - DNA, 120 bp, Artificial Sequence
  ENSG00000186417_51 (sequence is synthesized)
caacctcttggctctgctacccaaactcacttggactggccctggacgagaagaaatggtagaaaattcttccagacagcaattactcctttggtcacctccactcttattctcattagc

SEQ ID NO: 677958 - DNA, 120 bp, Artificial Sequence
  ENSG00000186417_52 (sequence is synthesized)
aattgaagtaagggccagtggagagggaaaaattgtcgagcacctctgacacttggcagtgcctacctgcttgtgttccagagggcagcttcagagaaaacgggcacacaccgtccaagc

SEQ ID NO: 677959 - DNA, 120 bp, Artificial Sequence
  ENSG00000186417_53 (sequence is synthesized)
cagctcaatcctcagaaggccagtaattaccattggaattacacagcagcaatggatcgttcatataggataataattataattatacatgagcatcgctgtagaataatgatgcctatt

SEQ ID NO: 677960 - DNA, 120 bp, Artificial Sequence
  ENSG00000186417_54 (sequence is synthesized)
ggcttatcctgggaagactccaaaaatgtgattcagtcctgaggcctcggcaatgggcatgatgagggcaggctcaggggcaggagggcaccctgctagagctgggtgtggggcacgtag

SEQ ID NO: 677961 - DNA, 120 bp, Artificial Sequence
  ENSG00000186417_55 (sequence is synthesized)
gaaaggggtggttttcaaaaaggcttgagacagatccctggccttgaggatgtgcttcgcatgcagcctgcaacccagggagtgcagaaaagaaaaagtgcatttgtttatggagcacat

SEQ ID NO: 677962 - DNA, 120 bp, Artificial Sequence
  ENSG00000186417_56 (sequence is synthesized)
atttgtgtggcaggtaccattctagatgctggagattcagaaataagcccccctcctccaccttcacgaggcttacatcctagctgggagagacggataataaataagataaataaatag

SEQ ID NO: 677963 - DNA, 120 bp, Artificial Sequence
  ENSG00000186431_0 (sequence is synthesized)
atcctgctaatgtgcattgaaaggagagcaacggggctgaggccgtgtcagcacgatggaccccaaacagaccaccctcctgtgtcttgtgctctgtctgggccagaggattcaggcaca

SEQ ID NO: 677964 - DNA, 120 bp, Artificial Sequence
  ENSG00000186431_1 (sequence is synthesized)
ggaaggggactttcccatgcctttcatatctgccaaatcgagtcctgtgattcccttggatggatctgtgaaaatccagtgccaggccattcgtgaagcttacctgacccagctgatgat

SEQ ID NO: 677965 - DNA, 120 bp, Artificial Sequence
  ENSG00000186431_2 (sequence is synthesized)
cataaaaaactccacgtaccgagagataggcagaagactgaagttttggaatgagactgatcctgagttcgtcattgaccacatggacgcaaacaaggcagggcgctatcagtgccaata

SEQ ID NO: 677966 - DNA, 120 bp, Artificial Sequence
  ENSG00000186431_3 (sequence is synthesized)
taggatagggcactacaggttccggtacagtgacaccctggagctggtagtgacaggcttgtatggcaaacccttcctctctgcagatcggggtctggtgttgatgccaggagagaatat

SEQ ID NO: 677967 - DNA, 120 bp, Artificial Sequence
  ENSG00000186431_4 (sequence is synthesized)
ttccctcacgtgcagctcagcacacatcccatttgatagattttcactggccaaggagggagaactttctctgccacagcaccaaagtggggaacacccggccaacttctctttgggtcc

SEQ ID NO: 677968 - DNA, 120 bp, Artificial Sequence
  ENSG00000186431_5 (sequence is synthesized)
tgtggacctcaatgtctcagggatctacaggtgctacggttggtacaacaggagcccctacctgtggtccttccccagtaatgccttggagcttgtggtcacagactccatccaccaaga

SEQ ID NO: 677969 - DNA, 120 bp, Artificial Sequence
  ENSG00000186431_6 (sequence is synthesized)
ttacacgacgcagaacttgatccgcatggccgtggcaggactggtcctcgtggctctcttggccatactggttgaaaattggcacagccatacggcactgaacaaggaagcctcggcaga

SEQ ID NO: 677970 - DNA, 120 bp, Artificial Sequence
  ENSG00000186431_7 (sequence is synthesized)
tgtggctgaaccgagctggagccaacagatgtgtcagccaggattgacctttgcacgaacaccaagtgtctgcaagtaaacacctggaggtgaaggcagagaggagccaggactgtggag

SEQ ID NO: 677971 - DNA, 120 bp, Artificial Sequence
  ENSG00000186431_8 (sequence is synthesized)
ggtgaaggcagagaggagccaggactgtggagtccgacaaagctacttgaaggacacaagagagaaaagctcactaagaagcttgaatctacttttttttttttttgagacagagtctgg

SEQ ID NO: 677972 - DNA, 63 bp, Artificial Sequence
  ENSG00000186431_9 (sequence is synthesized)
ggagtgcagtggagcaatctcggctcattgaacctctaccactgcacccagctaatttttgta

SEQ ID NO: 677973 - DNA, 120 bp, Artificial Sequence
  ENSG00000186431_10 (sequence is synthesized)
attataggcatgagccaccacgcctggccagatgcatgttcaaaccaatcaaatggtgttttcttatgcaggactgatcgatttgcacccacctttctgcacataagttatggttttcca

SEQ ID NO: 677974 - DNA, 120 bp, Artificial Sequence
  ENSG00000186431_11 (sequence is synthesized)
ccacctttctgcacataagttatggttttccatcttatctgtcttctgattttttatatcctgtttaatttcttccttcattgttcttctctttttttatttattttatttatttttatt

SEQ ID NO: 677975 - DNA, 120 bp, Artificial Sequence
  ENSG00000186431_12 (sequence is synthesized)
tcccaagtagctgggattgcaggctcccaccatcacgcccagctacttttacagtatttttagtagagacggggtttcatcacattggccaagctggtctcaaacttctgacctcgtgat

SEQ ID NO: 677976 - DNA, 120 bp, Artificial Sequence
  ENSG00000186431_13 (sequence is synthesized)
tacagatgtgagccactgcgcccagccttctttttatatttttaaatgtgtcttccccaaatataaatggttggtaagcatgccaaatatattcaataacccccctcctttatttttttt

SEQ ID NO: 677977 - DNA, 90 bp, Artificial Sequence
  ENSG00000186431_14 (sequence is synthesized)
tgaactcctggtctgtgttcatctacaaattgataagagtgaaagtcataatcctacaggaggattaccctatttatttcacaaacccta

SEQ ID NO: 677978 - DNA, 120 bp, Artificial Sequence
  ENSG00000186431_15 (sequence is synthesized)
atcctacaggaggattaccctatttatttcacaaaccctatttctaccggattttcatacaaggaatacaggcatgtgtttcacctcattaatttattttttcacttagttttgatgata

SEQ ID NO: 677979 - DNA, 120 bp, Artificial Sequence
  ENSG00000186431_16 (sequence is synthesized)
ttcacatatattatcaagtgtgcaaacattaaattcttgtgtacaaaactcaaatggtcttccaaataattccccattcttttttcttataaactttcacagctttacccttgacagact

SEQ ID NO: 677980 - DNA, 120 bp, Artificial Sequence
  ENSG00000186431_17 (sequence is synthesized)
ttactcaaggaaatctaagttggtcatatgtggctctttcactgattgctatttacttcattgtccagtagcttatgtatgaaaatataattataaaatgtaagggtcctacttccagtg

SEQ ID NO: 677981 - DNA, 120 bp, Artificial Sequence
  ENSG00000186431_18 (sequence is synthesized)
aaactgaagggacttaggcccacttttatcctttactgagagcttatctctacttgataaaatttctactgtattcttggcttaactcaggtcctgtgattaaaaaaaaaatgcaaagta

SEQ ID NO: 677982 - DNA, 120 bp, Artificial Sequence
  ENSG00000186431_19 (sequence is synthesized)
atggaccccaaacagaccaccctcctgtgtcttgtgctctgtctgggccagaggattcaggcacaggaagggaggtatattagcgagcatttttggtgttgaagtttgggctgcaatccg

SEQ ID NO: 677983 - DNA, 120 bp, Artificial Sequence
  ENSG00000186431_20 (sequence is synthesized)
caccgggcaggaatatgaagacgtgcactgagagtgaagtgaagagaggcaaaggctctcactccaggacagtggagagagaaaggcttccccaccacactttccgctttcacttcctcg

SEQ ID NO: 677984 - DNA, 120 bp, Artificial Sequence
  ENSG00000186431_21 (sequence is synthesized)
ctagagttctccagacagggttcattgaaaacttagtctgtggagaacagaagggctaactcagtttgtttcattttatttatttcattttattttccgggatagagtcttgctctttcg

SEQ ID NO: 677985 - DNA, 120 bp, Artificial Sequence
  ENSG00000186431_22 (sequence is synthesized)
gattccaccttgttctggtgttgtagagatgtgattaggtatttagtgaattcaccaagtgaggagagaatgaaaagaaaacacaacctgcctggccgggcgtggtggcgtgagcctgtc

SEQ ID NO: 677986 - DNA, 120 bp, Artificial Sequence
  ENSG00000186432_0 (sequence is synthesized)
agatcgaggctgcctccccctctcagccggcagcacattccgtcgccttgccgccgcccggccccacagttgtctttgccggagctgcagtcgcgctggggttagggcgggggggcgggc

SEQ ID NO: 677987 - DNA, 120 bp, Artificial Sequence
  ENSG00000186432_1 (sequence is synthesized)
ggggagaggagaaggccgcggcggaggcaggtgagaggaggaaggaagcggcggcgcggcgggcacagcagctcaggcggcggcccggttcctgggagtgtcggtgcggcgcgttggttg

SEQ ID NO: 677988 - DNA, 120 bp, Artificial Sequence
  ENSG00000186432_2 (sequence is synthesized)
gggcggatcccgcggggcccgggcgggggaaggagtcaccggcccggccatggcggacaacgagaaactggacaaccaacggctcaagaatttcaagaacaaaggccgcgacttggagac

SEQ ID NO: 677989 - DNA, 120 bp, Artificial Sequence
  ENSG00000186432_3 (sequence is synthesized)
tatgagaagacaacgaaatgaagttgtagttgaattaaggaagaataaaagagatgaacatctcttaaagagaaggaatgtaccacatgaagatatctgtgaagactctgatatagatgg

SEQ ID NO: 677990 - DNA, 120 bp, Artificial Sequence
  ENSG00000186432_4 (sequence is synthesized)
tgattatagagtgcaaaatacctctctagaagctattgttcaaaatgcttcaagtgataaccaaggaattcaattaagtgcagttcaagctgctaggaagcttttgtccagtgatcgaaa

SEQ ID NO: 677991 - DNA, 120 bp, Artificial Sequence
  ENSG00000186432_5 (sequence is synthesized)
tccaccaattgatgacttaataaaatctggaatattgcccattttagtccattgtcttgaaagagatgacaatccttctttacagtttgaagctgcatgggctttgacaaacattgcatc

SEQ ID NO: 677992 - DNA, 120 bp, Artificial Sequence
  ENSG00000186432_6 (sequence is synthesized)
tggaacttctgaacaaactcaagcagtagttcagtccaatgctgtgccacttttcctgaggcttctccattcaccccatcagaatgtctgtgagcaagcagtgtgggcattgggaaatat

SEQ ID NO: 677993 - DNA, 120 bp, Artificial Sequence
  ENSG00000186432_7 (sequence is synthesized)
cataggtgatgggccccagtgtagagattatgtcataagtcttggagttgtgaaacctttactttccttcataagtccatctattcctataacattcttaagaaatgttacttgggttat

SEQ ID NO: 677994 - DNA, 120 bp, Artificial Sequence
  ENSG00000186432_8 (sequence is synthesized)
ggtcaacttatgtcgccacaaagacccaccaccaccaatggaaaccattcaggagattcttccagccctttgtgttttaattcatcacacagatgtaaatatactggtagacacagtctg

SEQ ID NO: 677995 - DNA, 120 bp, Artificial Sequence
  ENSG00000186432_9 (sequence is synthesized)
ggccctctcttaccttactgatgctggcaatgaacaaatacagatggtaatagactctggaatagttcctcatttggttcctctgctcagccaccaggaagttaaagttcagactgctgc

SEQ ID NO: 677996 - DNA, 120 bp, Artificial Sequence
  ENSG00000186432_10 (sequence is synthesized)
acttagagctgtgggcaacattgttactggaactgatgagcaaacacaagtagttttgaactgtgatgctctttcacacttcccagcactcctgacacatcccaaagagaaaattaataa

SEQ ID NO: 677997 - DNA, 120 bp, Artificial Sequence
  ENSG00000186432_11 (sequence is synthesized)
agaagcagtgtggttcctctccaacatcactgcaggaaatcagcagcaggtacaggcagtaattgatgccaatcttgtaccaatgataatacaccttttggataagggggattttggcac

SEQ ID NO: 677998 - DNA, 120 bp, Artificial Sequence
  ENSG00000186432_12 (sequence is synthesized)
tcaaaaagaagctgcttgggccataagtaacttaacaattagtggaaggaaagatcaagtggcttaccttatccaacaaaatgttatcccacctttttgcaacttgctgactgtaaaaga

SEQ ID NO: 677999 - DNA, 120 bp, Artificial Sequence
  ENSG00000186432_13 (sequence is synthesized)
tgcacaagttgtgcaagtagtactcgatggactaagtaatatattaaaaatggctgaagatgaggcagaaaccataggcaatcttatagaagaatgtggagggctggagaaaattgaaca

SEQ ID NO: 678000 - DNA, 120 bp, Artificial Sequence
  ENSG00000186432_14 (sequence is synthesized)
acttcaaaatcatgaaaatgaagacatctacaaattggcctatgagatcattgatcagttcttctcttcagatgatattgatgaagaccctagccttgttccagaggcaattcaaggcgg

SEQ ID NO: 678001 - DNA, 120 bp, Artificial Sequence
  ENSG00000186432_15 (sequence is synthesized)
aacatttggtttcaattcatctgccaatgtaccaacagaagggttccagttttagaaagatgttgtggaagttaggtacaatgcagcactgagatatatatatatatatgtgtgtgtgta

SEQ ID NO: 678002 - DNA, 120 bp, Artificial Sequence
  ENSG00000186432_16 (sequence is synthesized)
tatatatatatatatacatatatataaaaaggtttgatccatcaagcttggctcatgggatctgctgctgcattaaatcgggaaagaaaatgtgaagatttcatttggaatcacagaaaa

SEQ ID NO: 678003 - DNA, 120 bp, Artificial Sequence
  ENSG00000186432_17 (sequence is synthesized)
tgcccaaatgaggtcaagatggcgagtgggtgcgagtgagaatgagtggcaaaatgtaatgaaaactttacatgaatgcttatttaggttgttcaaagtaaaaagggctacaggtcacag

SEQ ID NO: 678004 - DNA, 120 bp, Artificial Sequence
  ENSG00000186432_18 (sequence is synthesized)
atcgtcagtgcctgagaaagaacattgacttactctatatcaattgaggggaaagtgcagtaccgtcatcttcaagccttgtaagcataaaagagaataggctgcccatataagtcaaag

SEQ ID NO: 678005 - DNA, 120 bp, Artificial Sequence
  ENSG00000186432_19 (sequence is synthesized)
gaaaatgagcccaggccttgctatgaagcagtgtgtgaatggacaatgttgaatgaatgtctggctcagtgatggagagccaggttcatctttgaaatctagggctcttcactcatgaag

SEQ ID NO: 678006 - DNA, 120 bp, Artificial Sequence
  ENSG00000186432_20 (sequence is synthesized)
cagactcctagtcctggagtgactgtgtacgagagcgtggttgtggtgctgtatgtgaacgcatgcaagcttgattcaccttcagggggctgataacctagtaaatcatcaaaatgagat

SEQ ID NO: 678007 - DNA, 120 bp, Artificial Sequence
  ENSG00000186432_21 (sequence is synthesized)
cataagtgttaatgtacactggacatgaaaacaaagactggtttagcagcagacattggtttactctgcagcctgtgttttctgtttccccctttcccacctccttccccccacccaatc

SEQ ID NO: 678008 - DNA, 120 bp, Artificial Sequence
  ENSG00000186432_22 (sequence is synthesized)
cttttctttttttttagtttttatttactttacctagtatgcctttttttagttgcttctcaagtcagaaaacttttcaggaaggtttccctgtgcatttgcaccagatgaatgtttgat

SEQ ID NO: 678009 - DNA, 120 bp, Artificial Sequence
  ENSG00000186432_23 (sequence is synthesized)
atttgcaccagatgaatgtttgatgctatgaaaagctttccatatcatcaaaactaatttgtgtagatttttgcatgaaaaaaatcataaatttccctcaaaatagactgtgttgcagta

SEQ ID NO: 678010 - DNA, 120 bp, Artificial Sequence
  ENSG00000186432_24 (sequence is synthesized)
cacaagttgccataatagtataaaacagtaaaatgtgcttaaaaggccatccttttcattttcagagataacataaagatctttgcatgaggtaaatctacagcatagttcatttttaga

SEQ ID NO: 678011 - DNA, 120 bp, Artificial Sequence
  ENSG00000186432_25 (sequence is synthesized)
ttttgttgagtcctgtaaagaagaagaagaaaaaagtttcagttgtggtagaataccgtgctgtgtttaaatgttacttgttttcaaactttgttttctatgaaaatgatatggaaactt

SEQ ID NO: 678012 - DNA, 120 bp, Artificial Sequence
  ENSG00000186432_26 (sequence is synthesized)
ctaaaatggaatttggtgcatatgtactgctgaataaagaccgatgaagaggtttgagtagatgtacaaatcaagtaatggtttgaacacctttaataatatgcctaatctgttcaattg

SEQ ID NO: 678013 - DNA, 120 bp, Artificial Sequence
  ENSG00000186432_27 (sequence is synthesized)
ttttagaatctttttatcttagatgtaggcagccatgaacaatctattttgagccactttagggagaaaactttgtatttttaaaacttgcataaaagttatgcaagtggtttttataaa

SEQ ID NO: 678014 - DNA, 120 bp, Artificial Sequence
  ENSG00000186432_28 (sequence is synthesized)
ttggaataatacctcagttttgaggttatgcacactaaattaaatgtgacataaattaatttgtacaaaaagaactctttataaggtggctcattgtaggaaatcctgtgccttcccctt

SEQ ID NO: 678015 - DNA, 120 bp, Artificial Sequence
  ENSG00000186432_29 (sequence is synthesized)
tgagcacaagtgttgcatgaacaacagtttgctataagaaacataccagattagccaccattagcatctatatctactttgtgtttaaaaatcaactggtaattctgaaacactgtagaa

SEQ ID NO: 678016 - DNA, 120 bp, Artificial Sequence
  ENSG00000186432_30 (sequence is synthesized)
tggataaaaattattttgtgatcataactctttgttgaactagagtatttttgcagcattccttgtcatcagaaacatggttaaagtttaaaactagaagcagcagaaaactagcttgta

SEQ ID NO: 678017 - DNA, 120 bp, Artificial Sequence
  ENSG00000186432_31 (sequence is synthesized)
aaatttatccaagtagagtgcaggctaggctgtcttggggaaataaacattaaaacttaaagcaatgttttacatggggtgtgtgtgtgtggtgtgtggatttttttttttttataaagt

SEQ ID NO: 678018 - DNA, 120 bp, Artificial Sequence
  ENSG00000186432_32 (sequence is synthesized)
tagagtataattcaatggcttacattagcttcctgtctttttacctagaaccagcataataagaaatttctttggttctgtcatttcagtatggacatattaatattttagcccactgag

SEQ ID NO: 678019 - DNA, 120 bp, Artificial Sequence
  ENSG00000186432_33 (sequence is synthesized)
tttgtccagttgacaccatcagtgcttcagttttctctctatccaaagcaaggttttaactttccttcattctccagtaaaacagaccgagacaacttgaactatattttgagtattgct

SEQ ID NO: 678020 - DNA, 120 bp, Artificial Sequence
  ENSG00000186432_34 (sequence is synthesized)
atatcttcaacatatagctccaaatgatggattgtatacaaagcatagtacagaaggtttcagtaattggaaggtgaacacagcaatgctttacataatttgtgttttttagtaaaaaat

SEQ ID NO: 678021 - DNA, 120 bp, Artificial Sequence
  ENSG00000186432_35 (sequence is synthesized)
attggattcaaagtaagccaatgagcttgtatacaaattttatatacaaattattgtatagaacagtgatatggaaaataggtaagggtgatattaatatctctgggtataaggactacc

SEQ ID NO: 678022 - DNA, 120 bp, Artificial Sequence
  ENSG00000186432_36 (sequence is synthesized)
ttatcgtttaaatattttatttccatctatagcctaatatagaacattgattttctagtagaaattctgggaagggcttttctgtctctgaaattgattcagtacagttgacagttcatc

SEQ ID NO: 678023 - DNA, 120 bp, Artificial Sequence
  ENSG00000186432_37 (sequence is synthesized)
cacaggcttatttctgatggggatgggggcatagaataatatgcctaataagctaaacgttcttaacgtttcatgtcttaaactgtctttttgaacattgagaccacctcaagtgctgta

SEQ ID NO: 678024 - DNA, 120 bp, Artificial Sequence
  ENSG00000186432_38 (sequence is synthesized)
aaaataagaatgttatattaggggtgtgtgagacgccctagtctaaaatctatctttaaatatatttcctttgtaattttcaaagacttcagtaattgtgtgttatggtggaaataatac

SEQ ID NO: 678025 - DNA, 120 bp, Artificial Sequence
  ENSG00000186432_39 (sequence is synthesized)
tttccattggtccacattgctctggaccaaacctggagcatttctataattagagctatctatgaatcattaaaaatggatctagaataattttggggagagggagtgtatcatttagtt

SEQ ID NO: 678026 - DNA, 120 bp, Artificial Sequence
  ENSG00000186432_40 (sequence is synthesized)
taggcttacctcagcagcacttcatagggtgaggagttgtttgtttctttaaaggtataactgcattgtaaaatgactgggtttattgtaacagtaatttatgggggcaccctttttgga

SEQ ID NO: 678027 - DNA, 120 bp, Artificial Sequence
  ENSG00000186432_41 (sequence is synthesized)
ttctccattgcctcagtttcctcaaggaaaaagttacagagattaagctaaattttgaatttagagaataactgctgtgtaattttggtataattaccataaatttagtgtcttaaaaca

SEQ ID NO: 678028 - DNA, 120 bp, Artificial Sequence
  ENSG00000186432_42 (sequence is synthesized)
caacatacattatttcacaatttctgtaggtcaagagtgtagttaggttttctgctcagggtctcacaaggctgcaataaaggtgtcagccagagctgcagtcttatctgaagctagggg

SEQ ID NO: 678029 - DNA, 120 bp, Artificial Sequence
  ENSG00000186432_43 (sequence is synthesized)
gtcctcttttatgcacatatggcaaaatccattgcctagcaactgaagaaatcatgggaacttcttcaaggccagcaagagaatctctgatctcagggaaggccttaagcgcttttttaa

SEQ ID NO: 678030 - DNA, 120 bp, Artificial Sequence
  ENSG00000186432_44 (sequence is synthesized)
aggtctcacctgattagatcaggccacctacccaccagggtgatctcccttttgattaacccaaagccaaactgatgaggtaccttcattacccctgcaaaatcccttcacctttgccct

SEQ ID NO: 678031 - DNA, 120 bp, Artificial Sequence
  ENSG00000186432_45 (sequence is synthesized)
gcattgtagtccaatcacaggggtgatacgcatcatattcaaagatcctgttcacagtcaagggagggggttatatggagtatgtataccagggaatcttgggagccatcttaagagttc

SEQ ID NO: 678032 - DNA, 120 bp, Artificial Sequence
  ENSG00000186432_46 (sequence is synthesized)
ttcctatgacaaggactcaactatttagaactggaacaatttacaagtgatagccttatatagttatcatagcaagcttatttggggatcaaggttgcctctgagaacctaatgaaaact

SEQ ID NO: 678033 - DNA, 120 bp, Artificial Sequence
  ENSG00000186432_47 (sequence is synthesized)
ggaccagcttccccaaaaagtgtatatacatggtagtttttcatacagttttaggggattcataagagtccatgaattacagtctgtcccaacccttccctttagatgatgagttgttga

SEQ ID NO: 678034 - DNA, 120 bp, Artificial Sequence
  ENSG00000186432_48 (sequence is synthesized)
ggtgacttgcccaaggtcacacagctactaagggccaaataaagcccacatctcaactcccatactgcccagggcttctaattactattctaaaggtaatctaaattcatttaaatttgt

SEQ ID NO: 678035 - DNA, 120 bp, Artificial Sequence
  ENSG00000186432_49 (sequence is synthesized)
gaaccaatgcaaaaaaatgtgaatgtagctttttggatattttttttgtttactaaggaatgggtaacattgttatagaagcttgcctaagagttttgaaattagttgacctttttgagt

SEQ ID NO: 678036 - DNA, 120 bp, Artificial Sequence
  ENSG00000186432_50 (sequence is synthesized)
ttccaaaattgaatcttccattgtagctattaaagtgaactataaataggccaactttaattgttaactcctcgggtttggtggattatctaccatttatatataaaatttcagttagaa

SEQ ID NO: 678037 - DNA, 120 bp, Artificial Sequence
  ENSG00000186432_51 (sequence is synthesized)
tccaccattggcgttttgaaggccaagatagctgagtatcttatcctttttgtaacttcttgattattttacttattggcaaaattcattaactgtcagccaataatttaatattatggg

SEQ ID NO: 678038 - DNA, 120 bp, Artificial Sequence
  ENSG00000186432_52 (sequence is synthesized)
aggaaaaaattttgcccagatatctgaggcaatactcccaaacactaacaaactgatgcctaacaaacttgacattttgaacacttaaagttttccctaaactttttaataagcacatta

SEQ ID NO: 678039 - DNA, 120 bp, Artificial Sequence
  ENSG00000186432_53 (sequence is synthesized)
ataaagtatgcttttaaatatatatgtacaataatttttaaaagttgctgcaagatgccttcaaatcaatatgcacgttggtggcattagtgcagtcttctatttttatttttttgagac

SEQ ID NO: 678040 - DNA, 120 bp, Artificial Sequence
  ENSG00000186432_54 (sequence is synthesized)
acaggcgtgagccactgcgcccaaccagccttaattcttaataaaggaagttgaaaaataatgaacattggtaaaactattctagtgtgatcagaagcaaatttggactgtagtgtcaaa

SEQ ID NO: 678041 - DNA, 120 bp, Artificial Sequence
  ENSG00000186432_55 (sequence is synthesized)
gtgtcaaattgataaaaaactaagcacaccaatcatgtataagaaaagtagatttaacatttttttccctaaacacttaacccagaagttaacaataatcttgaaaattccttttaaatc

SEQ ID NO: 678042 - DNA, 120 bp, Artificial Sequence
  ENSG00000186432_56 (sequence is synthesized)
caggccctttaggtgatggcagtttgactcaggatgtccaagtccagtgtattttcaataaaattgacttgacagctactgctctgggtgtaagagcagttgactgtgaggaaaagtaaa

SEQ ID NO: 678043 - DNA, 120 bp, Artificial Sequence
  ENSG00000186432_57 (sequence is synthesized)
tggttctacagattctttatgatctacctcccaccagaggactgcagtactcccttgttatttatattttctgccccaatttttgccttctccacaaattttataccttttgtagctgcc

SEQ ID NO: 678044 - DNA, 120 bp, Artificial Sequence
  ENSG00000186432_58 (sequence is synthesized)
tactccagattacttcacctttccagactatcagttcttccacttttattcttcataaagaaaattccaataacctgtttcacttaggtttttctattactcttcaagcatgaatcctaa

SEQ ID NO: 678045 - DNA, 120 bp, Artificial Sequence
  ENSG00000186432_59 (sequence is synthesized)
tttccctgactatatcttacctctgatctccataactgatggattcctatcctagactatgttactctaatattacccaagattttctccagcctgtttttactcttactttgaaacagc

SEQ ID NO: 678046 - DNA, 120 bp, Artificial Sequence
  ENSG00000186432_60 (sequence is synthesized)
tgtttaaaatgactcgtaatctgcttaaatctacatgctttttgtggttctcaatccagttacctaccttccagataattccctcactgtcctgtcctctccattcctctgatgtttaag

SEQ ID NO: 678047 - DNA, 120 bp, Artificial Sequence
  ENSG00000186432_61 (sequence is synthesized)
ctctccattcctctgatgtttaagccctgtgagccacctttcccccatcctttgtgcatagttaccattttactctttcttgttgcccaggcaggaatgcagtggtgccatcttggctca

SEQ ID NO: 678048 - DNA, 87 bp, Artificial Sequence
  ENSG00000186432_62 (sequence is synthesized)
ctggccaccattttactctttttaggtacagtaatctaatatccaaagtcttggactcagctaaagagggtatttaccttaaaaaaa

SEQ ID NO: 678049 - DNA, 120 bp, Artificial Sequence
  ENSG00000186432_63 (sequence is synthesized)
gtcttggactcagctaaagagggtatttaccttaaaaaaaaaaaaaaaaagactccatcttttgattcataattgtggtgggggcggggaatcaagacaaccttagtcactttggtatta

SEQ ID NO: 678050 - DNA, 120 bp, Artificial Sequence
  ENSG00000186432_64 (sequence is synthesized)
ccataattcttgtcttttcagggttgtcctgttcagctgcataaaacatcatgtattctaggtatttcctaccttcacttacatttttacttgccgatgtgctgccttcataaatgggta

SEQ ID NO: 678051 - DNA, 120 bp, Artificial Sequence
  ENSG00000186432_65 (sequence is synthesized)
tattccgccacacatctagtaagcccccaatgcagtacacaatgtgtatcactgataaaactcgcacttctgccatgtcagtattatattcagttgagtggtctttagcatagtggcagt

SEQ ID NO: 678052 - DNA, 120 bp, Artificial Sequence
  ENSG00000186432_66 (sequence is synthesized)
cctagtcatcctaaccttttagttaaggtaaaattacatatgtttatagaactcatatagacaagctagtttttaaaatcttccttttaaccagtttaggatgatctaggatagctaagt

SEQ ID NO: 678053 - DNA, 120 bp, Artificial Sequence
  ENSG00000186432_67 (sequence is synthesized)
tacctacatggtgactgttcggtctaattcagaaacagaagtactaaaagaatactaaaaagtttttacccattatctctatccctgttttctttttgcaattctcagctgcagggagca

SEQ ID NO: 678054 - DNA, 120 bp, Artificial Sequence
  ENSG00000186432_68 (sequence is synthesized)
agaaaatacacagcagataggaaatgtttgtttgcatcctggctttctcaaccgcactttacgtccttgaatattctagatatttactccttcaagaagtcaggagtatatccaggccta

SEQ ID NO: 678055 - DNA, 120 bp, Artificial Sequence
  ENSG00000186432_69 (sequence is synthesized)
cctatcatccttgccatccccattaaccctcatttttcagtatgtgttttacatttatggttatttttcagtctatagtatctgttcactcattgctctatcacatctgagtttctccgt

SEQ ID NO: 678056 - DNA, 120 bp, Artificial Sequence
  ENSG00000186432_70 (sequence is synthesized)
ctttctttccactagattgtaagctccttaagggcaaggtcggcatataagcaaagttctgtaaacaccgtgaaggtaccatgagttctatgggtactcaataaatgcttgtgataatga

SEQ ID NO: 678057 - DNA, 120 bp, Artificial Sequence
  ENSG00000186432_71 (sequence is synthesized)
cggcctgtgttttactctggatatagctgattcaagatgtggctcacggtgtgccctcttccaggcaaaggataccccttatttcagcttgtccacaaatctctttaccccctcctgaga

SEQ ID NO: 678058 - DNA, 120 bp, Artificial Sequence
  ENSG00000186432_72 (sequence is synthesized)
ggagaccaccagctgcattcttacatataaagtctaaagggttatacaaagctgtcatcctctagtctacagtatcctttccctccacctgctggtggtggtagtgggggatggggtggg

SEQ ID NO: 678059 - DNA, 120 bp, Artificial Sequence
  ENSG00000186432_73 (sequence is synthesized)
ctagggaatggcaccatcacgtttgattatttaaaaaggaaaaaaaaagcttcattgtcttagatacagctgctcccgagattgtctacataaggtgtatgggttaaatacacacatgca

SEQ ID NO: 678060 - DNA, 120 bp, Artificial Sequence
  ENSG00000186439_0 (sequence is synthesized)
agaggagaggcaaagttcaacaggacaacaaagaagcagcagaaacagccaggaaaacgaagagcccccaggttttgacacagaaccctccaccagagttctcaaatccccaaatactct

SEQ ID NO: 678061 - DNA, 120 bp, Artificial Sequence
  ENSG00000186439_1 (sequence is synthesized)
gcaaagtgcaacttgacgggaacttttcaactgacttttacttttgacgaccaccatgactgagatcactgctgaaggaaatgcatctacaaccacaactgtgatagacagcaaaaatgg

SEQ ID NO: 678062 - DNA, 120 bp, Artificial Sequence
  ENSG00000186439_2 (sequence is synthesized)
atctgtgcccaaatcccccggaaaagtgctgaagaggacagtcacagaagacatagtgacgacgttcagctcccctgcagcctggcttctggtcattgccctgataatcacgtggtcagc

SEQ ID NO: 678063 - DNA, 120 bp, Artificial Sequence
  ENSG00000186439_3 (sequence is synthesized)
tgttgccatcgttatgtttgatttagtggattacaaaaacttttcagcaagctctattgccaagattggctcagatcctttaaaactggtacgtgatgctatggaggaaaccacggactg

SEQ ID NO: 678064 - DNA, 120 bp, Artificial Sequence
  ENSG00000186439_4 (sequence is synthesized)
gatctatggcttcttttctttgttatctgacatcatctcatctgaagatgaagaagatgatgatggtgacgaagatactgataaaggagaaatagatgagcctcccttgagaaaaaaaga

SEQ ID NO: 678065 - DNA, 120 bp, Artificial Sequence
  ENSG00000186439_5 (sequence is synthesized)
aatacacaaagataagactgaaaaacaagagaaacctgaaaggaaaatacaaactaaagttacacacaaagaaaaagaaaaaggaaaagaaaaagtaagagaaaaagaaaaacctgaaaa

SEQ ID NO: 678066 - DNA, 120 bp, Artificial Sequence
  ENSG00000186439_6 (sequence is synthesized)
gaaagcaactcacaaggaaaaaattgagaaaaaagaaaaaccagaaacaaagacactggcgaaagaacagaagaaagctaagactgcagaaaagagtgaagaaaagactaaaaaggaagt

SEQ ID NO: 678067 - DNA, 120 bp, Artificial Sequence
  ENSG00000186439_7 (sequence is synthesized)
gaaaggtggaaaacaggagaaagtgaagcaaacagctgcaaaagtaaaagaagtacagaaaacaccatcaaaacccaaagaaaaggaggacaaagagaaagcagctgtgtcaaagcatga

SEQ ID NO: 678068 - DNA, 120 bp, Artificial Sequence
  ENSG00000186439_8 (sequence is synthesized)
acagaaagatcagtatgcattctgtcgatatatgattgacatatttgtccatggggatttaaaaccaggacaaagcccagccattccacctcccttaccgacagaacaagcttccagacc

SEQ ID NO: 678069 - DNA, 120 bp, Artificial Sequence
  ENSG00000186439_9 (sequence is synthesized)
cactccggcatcacctgcccttgaagaaaaagaaggggaaaagaagaaggctgagaagaaagttacttctgaaacaaaaaagaaagaaaaagaagatatcaaaaagaaaagtgagaagga

SEQ ID NO: 678070 - DNA, 120 bp, Artificial Sequence
  ENSG00000186439_10 (sequence is synthesized)
aactgccattgatgtggaaaaaaaagagccgggaaaagcttctgaaaccaaacaagggactgtaaaaattgcagcacaagcagcagctaagaaggatgaaaagaaggaagattccaagaa

SEQ ID NO: 678071 - DNA, 120 bp, Artificial Sequence
  ENSG00000186439_11 (sequence is synthesized)
aacaaaaaaacctgcagaagtagaacaacccaagggaaaaaaacaggaaaagaaagaaaaacatgtggaaccagcaaagtcaccaaagaaagaacactcagttccaagtgacaaacaagt

SEQ ID NO: 678072 - DNA, 120 bp, Artificial Sequence
  ENSG00000186439_12 (sequence is synthesized)
aaaagcaaaaactgaacgagccaaagaggagattggtgcggtttcaattaaaaaagctgtacctggaaagaaggaagagaaaacaaccaagacagtggagcaagaaattagaaaagaaaa

SEQ ID NO: 678073 - DNA, 120 bp, Artificial Sequence
  ENSG00000186439_13 (sequence is synthesized)
atctgggaagacttcttcaattctgaaagataaagaacctattaaagggaaagaagagaaagttccagcttccctaaaggaaaaagaacctgaaactaaaaaagatgaaaagatgtccaa

SEQ ID NO: 678074 - DNA, 120 bp, Artificial Sequence
  ENSG00000186439_14 (sequence is synthesized)
agcaggcaaagaagtcaagcctaaacctccacaactacaaggaaaaaaggaagagaagccagagccccaaattaaaaaagaagcaaaaccagctatatctgaaaaagtgcaaatacacaa

SEQ ID NO: 678075 - DNA, 120 bp, Artificial Sequence
  ENSG00000186439_15 (sequence is synthesized)
acaagacatagtgaaaccagaaaagactgtttctcatggtaaaccagaagaaaaagttctcaagcaggtaaaagctgtcacaatagaaaaaacagccaagcccaaaccaacaaaaaaagc

SEQ ID NO: 678076 - DNA, 120 bp, Artificial Sequence
  ENSG00000186439_16 (sequence is synthesized)
tgaacatcgagaaagagaacctccatctataaaaacagacaaaccaaaaccaactccaaaaggaacatcagaagtcacagaatcaggaaagaagaaaactgaaatatctgaaaaagaaag

SEQ ID NO: 678077 - DNA, 120 bp, Artificial Sequence
  ENSG00000186439_17 (sequence is synthesized)
taaagaaaaagcagacatgaagcatcttagagaagaaaaagtctcaacaagaaaagaaagtcttcaattacacaatgtgacaaaagcagaaaaacctgcaagagtatcaaaagatgttga

SEQ ID NO: 678078 - DNA, 120 bp, Artificial Sequence
  ENSG00000186439_18 (sequence is synthesized)
agatgtaccagcttcaaagaaagctaaagaaggaactgaagatgtgtctcccacaaagcagaaaagtcccatcagtttcttccagtgtgtctacttggatgggtacaatggctatggatt

SEQ ID NO: 678079 - DNA, 120 bp, Artificial Sequence
  ENSG00000186439_19 (sequence is synthesized)
aagcaacaaggacagtaaacacacatgtatgacccttacaagtgctttaagattttaaaaatgtgatgttttgtccacagtagttcaggcaattaagaatatgcaacccagagaatttct

SEQ ID NO: 678080 - DNA, 120 bp, Artificial Sequence
  ENSG00000186439_20 (sequence is synthesized)
gtgaaaacattttgctctttggcctggtgtggacggaaagggtggccaaatggattgagtgatgagcagacatgtttaagggtctaagtctcaagaatctgttatgtgtgtttgctgcgg

SEQ ID NO: 678081 - DNA, 120 bp, Artificial Sequence
  ENSG00000186439_21 (sequence is synthesized)
tgggagggggtgcttgtatttatcttatttccagtcactataaggttgtacacaaactaatttaaagtttacttaataatggtatctttaaaataattgacacaattgcaaaatgaattc

SEQ ID NO: 678082 - DNA, 120 bp, Artificial Sequence
  ENSG00000186439_22 (sequence is synthesized)
ctggcttcagttagctattatttttttaatgacaacatagactgtgctctaagtttaaaagatggggaagcttatataaaagtgacccttttgcatcatatgggtatctaaacttaattt

SEQ ID NO: 678083 - DNA, 120 bp, Artificial Sequence
  ENSG00000186439_23 (sequence is synthesized)
acccaataagttgatgcttaatgattttattttatttttgtctatttctattttagttgtggctttgctctaagaatgggtaatagttgtactacagactgctataaatttcttgtgata

SEQ ID NO: 678084 - DNA, 120 bp, Artificial Sequence
  ENSG00000186439_24 (sequence is synthesized)
ctcttttagagctcaaaatatctctgagctttagacatggtaaggtggagagtaaatgcttgataaatctttaagatatgtcttgaatgataattaggacattcagtccagtggaaatac

SEQ ID NO: 678085 - DNA, 120 bp, Artificial Sequence
  ENSG00000186439_25 (sequence is synthesized)
accattcaattagtcaggtctggtgaatcgtttgtttaaaatattagcaaatgagatgtggaattctgaaatttctccagactgtgtcttaataaaaatgtcacctgggtgaaattttag

SEQ ID NO: 678086 - DNA, 120 bp, Artificial Sequence
  ENSG00000186439_26 (sequence is synthesized)
atcaatcactaaatttgggtgacaaatataaaaatattttcatttcactttaatacattctttctgtgaagtaaaatgtttttctttctcataatggcaaaatatgaatgccatcaaagt

SEQ ID NO: 678087 - DNA, 120 bp, Artificial Sequence
  ENSG00000186439_27 (sequence is synthesized)
ttaaggaattcattttagccttaaatgccttcgtgagatgtcttacttgtattttaggtaactggtcatcagtgccaatgacatggataacaatttttaatctactcgacagtgcatccc

SEQ ID NO: 678088 - DNA, 120 bp, Artificial Sequence
  ENSG00000186439_28 (sequence is synthesized)
tgggaatgactgttatgtttttgtcatattcctggtaatataaatactcgtgttctttactacattgtttttatcaactctaaaagtcatgcctctgtgacctttatcatgtttacaatt

SEQ ID NO: 678089 - DNA, 120 bp, Artificial Sequence
  ENSG00000186439_29 (sequence is synthesized)
gcaactgaacttatgacaaattaactcaggaaataaattgagttatcctttctagcattgtaattaccatcagcaaggcctgagatagccagagccaatactagccaagtgatttatttt

SEQ ID NO: 678090 - DNA, 120 bp, Artificial Sequence
  ENSG00000186439_30 (sequence is synthesized)
caaggattgccactaactacggttctttaggaccaagatataaaacagtcactaaaaatcattaggctaggtatcagtaatacattcattactaataatgcatttttggagacttttgtg

SEQ ID NO: 678091 - DNA, 120 bp, Artificial Sequence
  ENSG00000186439_31 (sequence is synthesized)
aaagaagttggtctctgccaaaagctggtggaccacattcacaccacgaaagccagtgtcacatgaaccagattaatgactctctttatggggtatgtgggacatcctggaagtgtataa

SEQ ID NO: 678092 - DNA, 120 bp, Artificial Sequence
  ENSG00000186439_32 (sequence is synthesized)
tttcaggaatgaccagacaataccatcttgcaaagccccttcaggtgacaatctaaacttgtgggtaggagagtgcataaagtttattgctcaactgctcctccagcctgctgaatttac

SEQ ID NO: 678093 - DNA, 120 bp, Artificial Sequence
  ENSG00000186439_33 (sequence is synthesized)
tgagtaaagaaatagcaaatatgatagatgttttagatttcatagaacagaatggtttgtccattaattctttcattcaatgactgtttattgaatacctactcttttagggcgctgtgt

SEQ ID NO: 678094 - DNA, 120 bp, Artificial Sequence
  ENSG00000186439_34 (sequence is synthesized)
taggtgctgtattgtacaagaaaaatataataaattagattcccagcgctattctgacatagtgaatgaccttgaaaaatttactaaacatactatgtttgtttctccatgagtaaaata

SEQ ID NO: 678095 - DNA, 120 bp, Artificial Sequence
  ENSG00000186439_35 (sequence is synthesized)
gggatatagggacaaacagtctaatatctcatagaaataccatggagacaaataaaatattttaatataaatatgatattaaagtaaatttctgaagtaatacttttgggtatggcacta

SEQ ID NO: 678096 - DNA, 120 bp, Artificial Sequence
  ENSG00000186439_36 (sequence is synthesized)
actagtttttcctctgactattttactgtttctttcactctcaatataaaaactatttgataagataaaacgatatattttattgtaattagaatttagacaaatcagctataatgtaaa

SEQ ID NO: 678097 - DNA, 120 bp, Artificial Sequence
  ENSG00000186439_37 (sequence is synthesized)
ctctagagtgccaaaaaagaaaaaaaaaagtgctgaagagtcctagggagatgaggctatttttgtttgaagctgatacttctagctgagccacaagtgctgcttggaaagggcttaggt

SEQ ID NO: 678098 - DNA, 120 bp, Artificial Sequence
  ENSG00000186439_38 (sequence is synthesized)
attccacctcccttaccgacagaacaagcttccagacccactccggcatcacctgcccttgaaggcaagtacttttttttttcttaaagatctctattgtagataaaatagaatgtagag

SEQ ID NO: 678099 - DNA, 120 bp, Artificial Sequence
  ENSG00000186439_39 (sequence is synthesized)
gaacagcaacaacaaaaatagtcacaaagaaacagcaaaatccaatattttcttaaatacttttagtatgtctaaactatacttttcctaaaattgcaatttgcttcttttagaaaacca

SEQ ID NO: 678100 - DNA, 120 bp, Artificial Sequence
  ENSG00000186439_40 (sequence is synthesized)
aaaatgtccccttaagattctatattggtgaccctcagcttccagaaggatgcccactctagcactttgggaatcaagcaaaaaaatatagggacaaatagataaggctatgccttgcaa

SEQ ID NO: 678101 - DNA, 120 bp, Artificial Sequence
  ENSG00000186439_41 (sequence is synthesized)
ctctgggagttttaccacaacttgatcaatttagtctctgaagaggctggtgccagatttgctgggtttgaatctgagctccaccttttcctagctttgtaaatttggaaagttatttaa

SEQ ID NO: 678102 - DNA, 120 bp, Artificial Sequence
  ENSG00000186439_42 (sequence is synthesized)
attaactcttcatgagttttgccatctctaagatgatataagcagagcactgatctcctagcgttattgtgaggattgaaatatatatatacacacacactcacacacacacaaatactg

SEQ ID NO: 678103 - DNA, 120 bp, Artificial Sequence
  ENSG00000186439_43 (sequence is synthesized)
ttttatgtatatgtatagtttataagtactatatacaactggtggttaatactactaataattcttgaaaatatgatgtctcaagatcagctttgtaataaattttgctggaacgttaaa

SEQ ID NO: 678104 - DNA, 120 bp, Artificial Sequence
  ENSG00000186439_44 (sequence is synthesized)
ctcttgagtacggattgactaagcgaaccatgactgaactggctctgtgtttctatctgctgaaggttaaacagaaactcaactggttccacaccatttgggtccctgctgtttttttct

SEQ ID NO: 678105 - DNA, 120 bp, Artificial Sequence
  ENSG00000186439_45 (sequence is synthesized)
tgcagactgtgctattaatttaataacagtgctgctggagtggcggtagtaatgtagatggcaccatttgcattttggacctggctatattagaattctgatgtcaaagaccgagcagtg

SEQ ID NO: 678106 - DNA, 120 bp, Artificial Sequence
  ENSG00000186439_46 (sequence is synthesized)
ggctgtagagtaggtttattaaactagcaagtcttccataattaagacagtgaatttggctgaagtctaaaataaatttctcaaagactgagctggagattatcaacctgaatatatttc

SEQ ID NO: 678107 - DNA, 120 bp, Artificial Sequence
  ENSG00000186439_47 (sequence is synthesized)
ttgagtagaccaaatatgttttgtaaaagtaactatttcttaagaaagtgaaagtagagcttcagttgctccacactgagctggaaatcagagagagcttatgttttccacagtttttct

SEQ ID NO: 678108 - DNA, 120 bp, Artificial Sequence
  ENSG00000186439_48 (sequence is synthesized)
gtgtgaatatgaacaaaagatttcactttattgcttagtttcccgtctgtaaatggggtagactaatgcctgctctttattctcaaatagttcagtgaaaataaatgttttgctttacaa

SEQ ID NO: 678109 - DNA, 120 bp, Artificial Sequence
  ENSG00000186439_49 (sequence is synthesized)
aaatacacaaagataagactgaaaaacaagagaaacctgaaaggaaaatacaaactaaagattggtcagccaattcttcaacaatcagaacattgaagctcactcagttgaaacctattt

SEQ ID NO: 678110 - DNA, 120 bp, Artificial Sequence
  ENSG00000186439_50 (sequence is synthesized)
ctttaagtctattactctttatcactgtccttgcatgtttttctgtgccagggagaatgtgagacagcaatctgggttggtctttcttttgtgtaactgaactttgaatatcagttccga

SEQ ID NO: 678111 - DNA, 120 bp, Artificial Sequence
  ENSG00000186439_51 (sequence is synthesized)
acagggaaactccccaaactgtttaattacatcaggggacatgctgaagattgctgggaataagacaatgatccagggtaactggtagacatattcctatttgatttgtggttttaacac

SEQ ID NO: 678112 - DNA, 120 bp, Artificial Sequence
  ENSG00000186439_52 (sequence is synthesized)
caccttactgattataatttgaaaaataaagatggcccaatcctatacatgcaaaaactatttctgttgcttgaaaaaaaatatgtaaaagttaaaatgaagaaaataacagcaaaaata

SEQ ID NO: 678113 - DNA, 120 bp, Artificial Sequence
  ENSG00000186439_53 (sequence is synthesized)
gagtatattatgatatatactatattatgacttcaaccattctcccaagaggtctgaaatttcagtgttataaatcataatggtataaaatagttaatgcattttatttgtatttatgta

SEQ ID NO: 678114 - DNA, 120 bp, Artificial Sequence
  ENSG00000186439_54 (sequence is synthesized)
gttatatcataaatagatcactccagactctgcttgagaaaaatgctacagtacactaaacttaaaacatttaaagtgatgtggcttctcttagagctcaagtgtgctaataattttaat

SEQ ID NO: 678115 - DNA, 120 bp, Artificial Sequence
  ENSG00000186439_55 (sequence is synthesized)
caaagtctaaatgatttctccttcaaatttgagatgcaattaaatgtatgaaatcctaatatcagaagttaagatcttttgacataaatatatcaagaaaatccttcaatccctcacatg

SEQ ID NO: 678116 - DNA, 120 bp, Artificial Sequence
  ENSG00000186439_56 (sequence is synthesized)
tcaaataagtaaactaaggttaagaattcagttaagtaaaaagattggttaagaatttatttccttgggcttttcaaaataaaatccctttataattgcatggaaaatgttttccaattt

SEQ ID NO: 678117 - DNA, 120 bp, Artificial Sequence
  ENSG00000186439_57 (sequence is synthesized)
attctggcttctggggactctgaaattttacagttcagtagatgtttctgttggtttctttttgaagaagagtggaattttagtttctgaaatataaagtgggagcactggatcctaatt

SEQ ID NO: 678118 - DNA, 120 bp, Artificial Sequence
  ENSG00000186439_58 (sequence is synthesized)
tcagtgtgttcatttatgcgtgttcctgagtctaaatttatttttttaaaaaataaaggtaattatccctgatctgcccatctgagaagatgttgtatagggcaaacatgaaaacatatg

SEQ ID NO: 678119 - DNA, 120 bp, Artificial Sequence
  ENSG00000186439_59 (sequence is synthesized)
tgaaaggatatgaaaatgtgtaaacttctagataagcatgtaacagatacttaggcattttttcttataaaatcaatttcaacacagatgacataaattatcaaattactttgatttcat

SEQ ID NO: 678120 - DNA, 120 bp, Artificial Sequence
  ENSG00000186439_60 (sequence is synthesized)
tgagttttatagctttccccctctagtataaaagtgctgattactcatgatattcataggttgttttcatagccacagtatatcaaaagaagattgactagatataaaacacccacacta

SEQ ID NO: 678121 - DNA, 120 bp, Artificial Sequence
  ENSG00000186439_61 (sequence is synthesized)
ataatagtaccaaacagacaattgatttgaaaacattgtttctttcttctgatcatcacattggtgtcagtttcattaattttataatgtctcctctagtggacaagagactggaaatgg

SEQ ID NO: 678122 - DNA, 120 bp, Artificial Sequence
  ENSG00000186439_62 (sequence is synthesized)
ttcttagagataggatcttactccttcagatgattttataattttgtttactaaaatcttcttttatcttattaaagcttaggctcttggattgtgtgaaaaaaatgaggttctttcaat

SEQ ID NO: 678123 - DNA, 120 bp, Artificial Sequence
  ENSG00000186439_63 (sequence is synthesized)
ggctatttttatattgacttggtaaatcatttcaattttaaatattgtatgacaatggcctcatatttttcaatcataacaatcataggaaataatatatttggatattttgcatatttt

SEQ ID NO: 678124 - DNA, 120 bp, Artificial Sequence
  ENSG00000186439_64 (sequence is synthesized)
taataactgatacaaaaaatagatattttgtgcttttaataaagtaatatgagaagtaataatgacattctataaattgtcccatattctaatagttatgcataatgctttaagacttgt

SEQ ID NO: 678125 - DNA, 120 bp, Artificial Sequence
  ENSG00000186439_65 (sequence is synthesized)
ttgtcccatattctaatagttatgcataatgctttaagacttgtatactttgctttcttacatagtttttagttatcttcagaagtataaataatctattagtttataattcattgaaat

SEQ ID NO: 678126 - DNA, 120 bp, Artificial Sequence
  ENSG00000186439_66 (sequence is synthesized)
tattttatttatttgtttaaacatgtggactttatttagaaaaattatatgatttttgttactcttaatagagtttaagtacactttgtgatctgagtataattgtgcatattgaatctc

SEQ ID NO: 678127 - DNA, 120 bp, Artificial Sequence
  ENSG00000186439_67 (sequence is synthesized)
tggacttaaatactatggatattccagtatctcaaaattaagttgaaagttttattacagaataatgtagtattcagttctcttaagaattaaaaatcacttcgacagtcagttaagaag

SEQ ID NO: 678128 - DNA, 120 bp, Artificial Sequence
  ENSG00000186439_68 (sequence is synthesized)
aaacacgacaaaaatatttttaggtaattaaataagatttgtctactaaccatcaagaataaattttaacacagttagtaaacattttattaagtataaagttggagcctgttgatcata

SEQ ID NO: 678129 - DNA, 120 bp, Artificial Sequence
  ENSG00000186439_69 (sequence is synthesized)
aatgtatcagagttcactataataaaatattcaactttgccttaaattaaggaatgtttcaaaattcataaatgggctaatttgtgtccacttgaagagtttctttctttgcttttgatg

SEQ ID NO: 678130 - DNA, 120 bp, Artificial Sequence
  ENSG00000186439_70 (sequence is synthesized)
ctattctgtaaacaatggttccctacataattgtaatagtgttttacgttgtcacaacaccaggcaaaacccaagtgctattgcaagctttgtaaatctatcactgtcctcatccacctt

SEQ ID NO: 678131 - DNA, 120 bp, Artificial Sequence
  ENSG00000186439_71 (sequence is synthesized)
atcagattcttctcttctttgtgtatgcactggtctttttaaaatctgtgatgtgtactgattgtagatttattccatactttcaagtgaatgctaataatatctaagagtaatgatttc

SEQ ID NO: 678132 - DNA, 120 bp, Artificial Sequence
  ENSG00000186439_72 (sequence is synthesized)
cctgagaaaactttatccatttgaatataatgaatgttcatatttcttggtgtaccaaagttataaaaaaagacagaaacaattttacatttaaaatcaatgaagtaaaacagaagattt

SEQ ID NO: 678133 - DNA, 120 bp, Artificial Sequence
  ENSG00000186439_73 (sequence is synthesized)
atttagttaacacaattgtatttaattatttgcttaatatgtatttttaaaataacttatttgcatatgttgactaagtcatgctgttgaccctcaataaatgttaaattatgataatat

SEQ ID NO: 678134 - DNA, 120 bp, Artificial Sequence
  ENSG00000186439_74 (sequence is synthesized)
cattccctacctctcctgtgggaaaatgtgctccaatttcaacaactaaaatacatctaaatttttggaactttatgagttttggcctgcccttatttaggtattaatgaaaaagattat

SEQ ID NO: 678135 - DNA, 120 bp, Artificial Sequence
  ENSG00000186439_75 (sequence is synthesized)
atttttatatcttcttcaataactatatttattttttaaagacctaacagaatttcataataaaatggattcctctaaaaatgctgttactactctaaaaagaacgagatttacaaaaat

SEQ ID NO: 678136 - DNA, 120 bp, Artificial Sequence
  ENSG00000186439_76 (sequence is synthesized)
ccttagaggtgtatctgtttagtaacaagctttgttatttcatatgtttgatatgcataatttggagcaattaagaatgtaacatgttgcttaaattcaataaactctcttggtcctaaa

SEQ ID NO: 678137 - DNA, 120 bp, Artificial Sequence
  ENSG00000186440_0 (sequence is synthesized)
atgagaaatttgagtggaggccatgtcgaggagtttgtcttggtgggtttccctaccacgcctcccctccagctgctcctctttgtccttttttttgcaatttaccttctgacattgttg

SEQ ID NO: 678138 - DNA, 120 bp, Artificial Sequence
  ENSG00000186440_1 (sequence is synthesized)
gagaatgcacttattgtcttcacaatatggcttgctccaagccttcatcgtcccatgtactttttccttggccatctctctttcctggagctatggtacatcaatgtcaccattcctcgg

SEQ ID NO: 678139 - DNA, 120 bp, Artificial Sequence
  ENSG00000186440_2 (sequence is synthesized)
ctcttggcagcctttcttacccaggatggtagagtctcctacgtaggttgcatgacccaactgtacttctttattgccttagcctgtactgaatgtgtgctgttggcagttatggcctat

SEQ ID NO: 678140 - DNA, 120 bp, Artificial Sequence
  ENSG00000186440_3 (sequence is synthesized)
aagcttctttttatttcccaattgtcctactgtggacccaacattatcaaccactttttctgtgatatttccccactactcaacctcacctgctctgacaaggagcaagcagagctagta

SEQ ID NO: 678141 - DNA, 120 bp, Artificial Sequence
  ENSG00000186440_4 (sequence is synthesized)
gacttccttctggccctggtgatgattctactccctctattggctgtggtttcatcatacactgccatcattgcagccatcctgaggatccctacgtccaggggacgccacaaagccttt

SEQ ID NO: 678142 - DNA, 120 bp, Artificial Sequence
  ENSG00000186440_5 (sequence is synthesized)
tccacttgtgccgctcatctggcagtggttgttatctactactcctccactctcttcacctatgcacggccccgggccatgtacaccttcaaccacaacaagattatctctgtgctctac

SEQ ID NO: 678143 - DNA, 120 bp, Artificial Sequence
  ENSG00000186440_6 (sequence is synthesized)
actatcattgtaccattcttcaacccagccatctactgcctgaggaacaaggaggtgaaggaggccttcaggaagacagtgatgggcagatgtcactatcctagggatgttcaggactga

SEQ ID NO: 678144 - DNA, 120 bp, Artificial Sequence
  ENSG00000186440_7 (sequence is synthesized)
gggcaaaccatacctgcccagaggcaaaagttaatcagcctattgacaaatatcaaaaggcagggtatatgtgtgaatgtggaagacaggcaagcaaagaagtaggtgaacttctgtgac

SEQ ID NO: 678145 - DNA, 120 bp, Artificial Sequence
  ENSG00000186440_8 (sequence is synthesized)
aaattttgttcttattcaggttgcctgttgacgctgatggtggtttcttttgctgcttcccacccttcactccgttttccaacaactttcccacatccctcaggactgaccctggcactc

SEQ ID NO: 678146 - DNA, 120 bp, Artificial Sequence
  ENSG00000186440_9 (sequence is synthesized)
taaatattgtctgggaccttctgatacaaatgaaactttatgaatcatttattttttacaggggttttcaaactaaggttggactagctacagaagaatcacctgggaatttgttaaaat

SEQ ID NO: 678147 - DNA, 120 bp, Artificial Sequence
  ENSG00000186440_10 (sequence is synthesized)
acagattcccccaaaaaaatatgtggagagtcttactgagtatgtgtggaatgtaaccctgccgtgaataatattcaaaacttcctgggaattcctatttcatagacagtttgggattcc

SEQ ID NO: 678148 - DNA, 120 bp, Artificial Sequence
  ENSG00000186440_11 (sequence is synthesized)
cccattatttcgtaagtgagaaaatataatatgagaaaacaagggaacttactggtggacatgccaagaaaaaaatttggtagacttcagtgtaacaatttcaaagatccagattctcaa

SEQ ID NO: 678149 - DNA, 120 bp, Artificial Sequence
  ENSG00000186440_12 (sequence is synthesized)
atcccactttcataagaaactacacaagtaggttataccccaagacctaatttcatatcatcttatctacaaaactcatattcactgaaagtcaaagcagagagagatgcagtgctgata

SEQ ID NO: 678150 - DNA, 120 bp, Artificial Sequence
  ENSG00000186440_13 (sequence is synthesized)
ttcagccatatattcttgactcaatatggctaactatcctctccatctcccttctttgaatctcaggggcatgtaaagctggttgacctaacaaatattgaccaggtagtaggtaaaatg

SEQ ID NO: 678151 - DNA, 120 bp, Artificial Sequence
  ENSG00000186440_14 (sequence is synthesized)
ttctagaaagcttatatacagatcttctccttcgctatggccagcacctgttttaagtaattagtgccagggctataccgatagtgaaatattttaaattgtgttcctagtcaaaggatt

SEQ ID NO: 678152 - DNA, 120 bp, Artificial Sequence
  ENSG00000186440_15 (sequence is synthesized)
gtaagaacagaaaatgccttcataagaaagaagattgaagagccatagataggatgcagatatctctatggcaattgggatgtctcaggttcatagcctgaatcataggtattctagcaa

SEQ ID NO: 678153 - DNA, 120 bp, Artificial Sequence
  ENSG00000186440_16 (sequence is synthesized)
gttcctttgatttttggaaagttacttgaattgttcagagaaatttttcttatcttgaatctaggctcatttacacaaatttctgcatattgaaccaaattcaatgattatttagatgtg

SEQ ID NO: 678154 - DNA, 120 bp, Artificial Sequence
  ENSG00000186440_17 (sequence is synthesized)
ggatatgtgaaacaaaataaatatgcaataacaataaatatgcatattggaacaaattccagtaaacacggattgttggtcagtgcacatttgcctattccgagacagattttgagggag

SEQ ID NO: 678155 - DNA, 120 bp, Artificial Sequence
  ENSG00000186440_18 (sequence is synthesized)
aaaaagacatgtgtccatcaatgcaagctactttatcaacaatcattttagattttccagtattaaaaacaaaataacaataaaagatctgatacttaaaacagtttaagttgttttgtt

SEQ ID NO: 678156 - DNA, 120 bp, Artificial Sequence
  ENSG00000186440_19 (sequence is synthesized)
ttcataaaatttctaaatagccttagaaacagctctgaacatagctcaatttacattacattctcctctcctttcatagaattatgagagacatggagttcagaattcagaccctagaac

SEQ ID NO: 678157 - DNA, 120 bp, Artificial Sequence
  ENSG00000186440_20 (sequence is synthesized)
gagcaaatttcaatttgatcctggctttactaataacaagttatgtgatcataggcaagaaactttacatctctgctcttagtttctctttgataataaaaataataccctttccatcat

SEQ ID NO: 678158 - DNA, 120 bp, Artificial Sequence
  ENSG00000186440_21 (sequence is synthesized)
atgggcttgttgtgaatattaaataaataacacatatgcgggcaaagggttagcattttttttctctttccttttggataaatttgatcttggattaatttctagttctggttctctaga

SEQ ID NO: 678159 - DNA, 120 bp, Artificial Sequence
  ENSG00000186440_22 (sequence is synthesized)
aacctaataaacattactacacaaaattacttatggcacaaattatctctgagcagcaaatgacctctggactgggaggatgatgaatgtattaaggatatctagtgggaaataatagct

SEQ ID NO: 678160 - DNA, 120 bp, Artificial Sequence
  ENSG00000186440_23 (sequence is synthesized)
tcaagctacttttgtaacttggcatgtcttttgagggaattctagaagctatggatgcccatgaaattgttacaagtgatataggctcttacagggcttgaaaattccaagttaaggtgg

SEQ ID NO: 678161 - DNA, 120 bp, Artificial Sequence
  ENSG00000186440_24 (sequence is synthesized)
actctgcaccccttgatgaaaatcttatgtccacctacctgagctaagactttaaatgacagagtctattccttcaactgctttcaggacttcctttctgtaagagaaactcctaaaact

SEQ ID NO: 678162 - DNA, 120 bp, Artificial Sequence
  ENSG00000186442_0 (sequence is synthesized)
atttcccatccctcttcctctgactctcagtgtccctgcttaacttacactcttctcttcgccaagctccttaccatgagcagacaagccagcaagacatctggtggcgggagccagggt

SEQ ID NO: 678163 - DNA, 120 bp, Artificial Sequence
  ENSG00000186442_1 (sequence is synthesized)
ttctccggccgctctgctgtggtctccggcagcagcaggatgagctgtgtggcccactctgggggagctggcggaggggcctatggcttccggagcggagcaggtggctttggcagtcgc

SEQ ID NO: 678164 - DNA, 120 bp, Artificial Sequence
  ENSG00000186442_2 (sequence is synthesized)
agcctctacaacctgggcggcaacaagagcatctccatcagcgtggcagctggcggctcccgggctggaggctttgggggagggcggagcagctgtgcctttgcaggtggctatggaggt

SEQ ID NO: 678165 - DNA, 120 bp, Artificial Sequence
  ENSG00000186442_3 (sequence is synthesized)
ggctttgggagcggctatggaggtggctttggtggtggctttggtggtggcagaggaatgggaggtggctttggtggagctggtggctttggaggggctggtggctttggaggggctggt

SEQ ID NO: 678166 - DNA, 120 bp, Artificial Sequence
  ENSG00000186442_4 (sequence is synthesized)
ggctttggtggtcctggtggctttggtgggtctggtggctttggtgggcctggcagcttgggcagtcctggtggctttggccctgggggctttcctgggggaattcaggaagtgactatc

SEQ ID NO: 678167 - DNA, 120 bp, Artificial Sequence
  ENSG00000186442_5 (sequence is synthesized)
tcaggaagtgactatcaaccagagtctcctgcagcccctcaatgtggagatcgacccccagattgggcaagtaaaggcccaggagcgggaacagatcaagaccctcaacaacaagtttgc

SEQ ID NO: 678168 - DNA, 120 bp, Artificial Sequence
  ENSG00000186442_6 (sequence is synthesized)
gtgcggttcctggagcaacagaacaaagtcctggagaccaagtggaacctgctccagcagcagggcacaagttccatctcaggcacaaacaaccttgagcctctttttgagaatcacatc

SEQ ID NO: 678169 - DNA, 120 bp, Artificial Sequence
  ENSG00000186442_7 (sequence is synthesized)
aactacctgcggagctacctggacaacatcctcggggagagagggcgcctggactctgagctgaagaacatggaggacctggtggaagacttcaagaagaaatatgaggatgaaatcaat

SEQ ID NO: 678170 - DNA, 120 bp, Artificial Sequence
  ENSG00000186442_8 (sequence is synthesized)
aaacgtacagctgctgagaatgaatttgtgactctgaagaaggatgtggacagtgcctatatgaacaaggtggagcttcaggccaaagtggatgccttgatagatgagatcgacttctta

SEQ ID NO: 678171 - DNA, 120 bp, Artificial Sequence
  ENSG00000186442_9 (sequence is synthesized)
cacatcagtgacacatctgtggtgctgtccatggacaataatcgctccctggacctggacagcatcattgctgaagttcgtgcacagtatgaggatatcgctcagagaagcaaggccgaa

SEQ ID NO: 678172 - DNA, 120 bp, Artificial Sequence
  ENSG00000186442_10 (sequence is synthesized)
gctgaggccctgtaccagaccaagttgggggagctgcagaccacggctggcaggcatggggatgacctaagaaataccaagagcgagatcatagagctcaacagaatgatccagaggctg

SEQ ID NO: 678173 - DNA, 120 bp, Artificial Sequence
  ENSG00000186442_11 (sequence is synthesized)
cgggcagagatcgagggtgtcaagaagcagaatgccaacctgcagacggccattgccgaggccgagcagcatggagagatggccctcaaggatgccaatgccaagctccaagagctgcag

SEQ ID NO: 678174 - DNA, 120 bp, Artificial Sequence
  ENSG00000186442_12 (sequence is synthesized)
gctgctctacagcaggcgaaggatgacctggcgcggctgctacgtgactaccaggagctgatgaatgtcaagctggccctggacgtggagatcgccacctaccgcaagctgctggagggc

SEQ ID NO: 678175 - DNA, 120 bp, Artificial Sequence
  ENSG00000186442_13 (sequence is synthesized)
gaggagtacaggatgtctggagagtgtccgagtgctgtcagcatctccgtggtcagcagcagcacgacttccgcctccgcaggtggctatggaggaggttacggcggaggcatgggcggt

SEQ ID NO: 678176 - DNA, 120 bp, Artificial Sequence
  ENSG00000186442_14 (sequence is synthesized)
ggtttaggaggtggcttcagtgcgggcggcggctcaggcagtggctttggccggggaggcggcggtggaatcggcggtggatttggcggcggcagcagcggtttcagcggtggcagcggc

SEQ ID NO: 678177 - DNA, 120 bp, Artificial Sequence
  ENSG00000186442_15 (sequence is synthesized)
tttggctccatctctggcgcccgctatggagtcagtggcgggggcttcagctcggccagcaaccggggcggcagcatcaagttctcccagtcctcccagtcctcccagcgctactccaga

SEQ ID NO: 678178 - DNA, 120 bp, Artificial Sequence
  ENSG00000186442_16 (sequence is synthesized)
taaagagcacgcatcagcatcgcagccactccagcgcctcccctccgctccccacgcccccatattggcaacacccccagcgccaccccatgctccccaagaacgcggctctgcgctgga

SEQ ID NO: 678179 - DNA, 120 bp, Artificial Sequence
  ENSG00000186442_17 (sequence is synthesized)
aggcttgtggcctcttgctcctccttccagatccccggccaagcccagtcacgagaatttcaggctcttctctccggctccagcctgtgcctgtgattgtccaggtgtggcctaggccgc

SEQ ID NO: 678180 - DNA, 120 bp, Artificial Sequence
  ENSG00000186442_18 (sequence is synthesized)
caccttctgctgccccggagtcccctccctgggtgggatgctcactacagctctgatgtatatagcacacagccccctccgcccctccggtctgtcgccaataaagtgcactgtgtttca

SEQ ID NO: 678181 - DNA, 120 bp, Artificial Sequence
  ENSG00000186446_0 (sequence is synthesized)
gactgctgacgtcacgccggctgggcgcgtccgggacttactcctttccgcagggcagcacccagggacctgagtgttgcaaggtgcgagaggggagcgccgcggggagcgccgcgggaa

SEQ ID NO: 678182 - DNA, 120 bp, Artificial Sequence
  ENSG00000186446_1 (sequence is synthesized)
gcgcatgtgcctcaaattcctgcctttcctcaagagaagagcccccaggagaaaagccagtattgcttgtgctcctaacaacctgtctcttgagaggctgatcatcaggggttcactttc

SEQ ID NO: 678183 - DNA, 120 bp, Artificial Sequence
  ENSG00000186446_2 (sequence is synthesized)
agagaagttgagaatgcaggctgaacaaggaagaggaaggggaatcctgcagggatgaatgagaggacagcaatgcatgtgtgatgtgtgtgagcacacacacacagtaacctttcctag

SEQ ID NO: 678184 - DNA, 120 bp, Artificial Sequence
  ENSG00000186446_3 (sequence is synthesized)
gagaactgtattactctaatgataatcacctttgaggaaaaaaaacttgtaagtatgaatttggtgttacaagcagcatgaattccagccaaatatcactcagaatgaaacatgggagag

SEQ ID NO: 678185 - DNA, 120 bp, Artificial Sequence
  ENSG00000186446_4 (sequence is synthesized)
ttaacatgcagaagaaaccttcaaagtgtagtgaatgtgggaagttctttactcagagatcatctcttacccagcaccagaggattcacagaggagagaagccctatgtgtgcagtgaat

SEQ ID NO: 678186 - DNA, 120 bp, Artificial Sequence
  ENSG00000186446_5 (sequence is synthesized)
gtggaagttgtttccgtaaacagtcaaatcttactcaacatctgagaattcataccggagagaaaccttataaatgtaatgaatgtgagaaagcctttcaaacaaaagcaattcttgttc

SEQ ID NO: 678187 - DNA, 120 bp, Artificial Sequence
  ENSG00000186446_6 (sequence is synthesized)
agcatctgagaattcatactggagagaaaccctataaatgcaatgaatgtggaaaagccttttgtcagagcccatcccttattaaacaccagcgaattcatactggagagaaaccatata

SEQ ID NO: 678188 - DNA, 120 bp, Artificial Sequence
  ENSG00000186446_7 (sequence is synthesized)
aatgtacagaatgtggcaaagccttcagtcagagcatatgccttactcgtcatcagagaagtcattctggagataaaccttttaagtgtaatgaatgtgggaaagcctttaatcagagtg

SEQ ID NO: 678189 - DNA, 120 bp, Artificial Sequence
  ENSG00000186446_8 (sequence is synthesized)
catgtctcatgcagcatcagagaattcattcaggagagaagccctacacatgcactgaatgtggtaaagccttcactcagaactcttcccttgttgaacatgaaaggactcacactggag

SEQ ID NO: 678190 - DNA, 120 bp, Artificial Sequence
  ENSG00000186446_9 (sequence is synthesized)
agaaactttataagtgtagtgagtgtgaaaaaactttccgcaaacaagcacaccttagtgagcattacagaattcatactggagaaaaaccttatgagtgtgttggatgtgggaaatcct

SEQ ID NO: 678191 - DNA, 120 bp, Artificial Sequence
  ENSG00000186446_10 (sequence is synthesized)
ttaggcacagttcagcacttcttcgacatcagaggcttcatgctggagagtaaaatttggaatataatgagtatgggaagatttgtatggaagcaccttttttttctcctaaattcctag

SEQ ID NO: 678192 - DNA, 120 bp, Artificial Sequence
  ENSG00000186446_11 (sequence is synthesized)
gaatgtaagactcaatctgtagctagtatgaatattttgtattttgaacaagaaatgttgtgtcctaatgtgtcctagtctggagtttgatgccttatctgctgctcagtgggtgtaacc

SEQ ID NO: 678193 - DNA, 120 bp, Artificial Sequence
  ENSG00000186446_12 (sequence is synthesized)
taactgccattaattaattagccgttctaaaagtttatttacaatatcaaaatctgacaagtaaatcagcattgttgtttggttctcataatgtattgtttcttaagaacattttgtaat

SEQ ID NO: 678194 - DNA, 120 bp, Artificial Sequence
  ENSG00000186446_13 (sequence is synthesized)
tgggctatgattttatgatctacagacgtctatttaaactataatgtcttggtttaaataggataatacaatctaagactggtttgtccttgagaaatttcagatttaatcagagaaaaa

SEQ ID NO: 678195 - DNA, 120 bp, Artificial Sequence
  ENSG00000186446_14 (sequence is synthesized)
tgtactgattgggatttgagtggacattgtggggtgtatttctggataccctcaagatcttcatttaaattttgatactttctattactagatctaatttgattttaagctctaagtttc

SEQ ID NO: 678196 - DNA, 120 bp, Artificial Sequence
  ENSG00000186446_15 (sequence is synthesized)
acttttccattaaacggaaagcctccctgacattaactgaataaaacctcatgttgtgggacttctgtgtgtgtttagggttggcagcaggtgattaggagaaggcatatgacagtagag

SEQ ID NO: 678197 - DNA, 120 bp, Artificial Sequence
  ENSG00000186446_16 (sequence is synthesized)
aggactggaatatagaggagaatataagcatgtagatgaggatgtggctgtatttgttttgagttctaggagcacagcaccaaatgtggtctcttaagggaagatgagggtagaagatgt

SEQ ID NO: 678198 - DNA, 120 bp, Artificial Sequence
  ENSG00000186446_17 (sequence is synthesized)
taagatcccaggttccagcaactgatgccactgactaacaactagccacttgtcagaggaaggagagaacagtgtcttggggatgctgatgggttggagtgcctaatggctcattaaaag

SEQ ID NO: 678199 - DNA, 120 bp, Artificial Sequence
  ENSG00000186446_18 (sequence is synthesized)
ccatgaaaaagcaaagaaatcaaagaatacttttgatggagctttaggctatgctaagccttttaatgtaaacaagcacctctaacgctaaaagcacccttgcaagaaaggtaggagtta

SEQ ID NO: 678200 - DNA, 120 bp, Artificial Sequence
  ENSG00000186446_19 (sequence is synthesized)
ctattcacatcctagagtcaaggaaaaagagaagatgtttgacttgctcaaagtcaagcaggtaatgtcagaattgaatctcaaatctatatctttatagatttgcagttctggtttata

SEQ ID NO: 678201 - DNA, 120 bp, Artificial Sequence
  ENSG00000186446_20 (sequence is synthesized)
taataccaaagtcacatacaggtaatttcccaccattgaaccttcctgttggtgtgagatgccaaatctgtgaaaaccagacacaggtggccaggtgggtgtcgaactcctgacctcaag

SEQ ID NO: 678202 - DNA, 120 bp, Artificial Sequence
  ENSG00000186446_21 (sequence is synthesized)
ggattacaggtgtgagtcaccacatctggtcggattttaactattctaataggtatgtagtggtattaattgttttaatctgcagttcaccaataatatatgaatttagcatcttttcat

SEQ ID NO: 678203 - DNA, 120 bp, Artificial Sequence
  ENSG00000186446_22 (sequence is synthesized)
accaataatatatgaatttagcatcttttcatatgtttgccatctgtatagctttggtgaggtatctgttagaggttttgcccatttttaattggattgctcattttcttattgttgaat

SEQ ID NO: 678204 - DNA, 120 bp, Artificial Sequence
  ENSG00000186446_23 (sequence is synthesized)
tttaagtgttccttgtatattttgtataacagacctttatcagataggtcttttgcaaatattttcctcccaggctgtggcttattttctcaatccttgattccttctctttactttttt

SEQ ID NO: 678205 - DNA, 120 bp, Artificial Sequence
  ENSG00000186446_24 (sequence is synthesized)
tttcttttttctttttttaaagaaatggtagcataatatacacagttgtccattttttaaagactaaaccatctcacagattgttctgtatcagtaaataaagatctttcccccaccctt

SEQ ID NO: 678206 - DNA, 120 bp, Artificial Sequence
  ENSG00000186446_25 (sequence is synthesized)
actcctttccgcagggcagcacccagggacctgagtgttgcaaggtgcgagaggggagcgccgcggggagcgccgcgggaagcgcatggtgagcggtttctgctgtgcccggctgccgcg

SEQ ID NO: 678207 - DNA, 120 bp, Artificial Sequence
  ENSG00000186446_26 (sequence is synthesized)
ggtcgattccagctcctccctcgggaagcagggcgtttttcttcctggagggcctgtggagcggaggcccgaggcctagggcaaacttgccatgaagaaaggagaggctgttcgagagcc

SEQ ID NO: 678208 - DNA, 120 bp, Artificial Sequence
  ENSG00000186446_27 (sequence is synthesized)
ctaggctgggagtcggaggacctgggttcgatttatacatacttaagcatgtcagtgaacttctgggcactttagttttctgatttccagaagtaaatactgtttcctgccttgccgttt

SEQ ID NO: 678209 - DNA, 120 bp, Artificial Sequence
  ENSG00000186446_28 (sequence is synthesized)
tgcaggaccacacagaaatggataccattttactcaaatcagtgagggtggcccactgtgaaaacggctatggaataattggttatgggacaggtcctagagtgcactaagttcttatca

SEQ ID NO: 678210 - DNA, 120 bp, Artificial Sequence
  ENSG00000186446_29 (sequence is synthesized)
gagtacctgaactgaagactctacagtcatctggtagcacatctttaaaccacttattgaactgctcagtatgatgccttaatggtgtagtggttggatcaaggaatatgggtagtaaat

SEQ ID NO: 678211 - DNA, 120 bp, Artificial Sequence
  ENSG00000186446_30 (sequence is synthesized)
aagaatttggattagtttaatatgtatgcataatatatgtacacttatgtacgtatttatgtttatatgcatcaagagatacctagaagaaggtccattaaaatactattattttctgtg

SEQ ID NO: 678212 - DNA, 120 bp, Artificial Sequence
  ENSG00000186448_0 (sequence is synthesized)
cattattctgtgcctcggctgccggaagggctcgttcctgtgtcatctcctagcggcctggcgccgaggcggcggtacgcaaggctggagccgcagcgggagcccccgatgatactctcc

SEQ ID NO: 678213 - DNA, 120 bp, Artificial Sequence
  ENSG00000186448_1 (sequence is synthesized)
aagctgtaaggaagaagtcaaggattaaggagacctggactggagaggagcctttttcaaaaaacaacaatgacaagagaaaatgtagcccacaatgctctgagacaagagggccttgtg

SEQ ID NO: 678214 - DNA, 120 bp, Artificial Sequence
  ENSG00000186448_2 (sequence is synthesized)
aaggggaaggatgatacctggaaatggggaaccagcttccaaggaagtagctcctctgtttgggagacctcccacctacactttagacaattacgttaccatgagacatctggaccccag

SEQ ID NO: 678215 - DNA, 120 bp, Artificial Sequence
  ENSG00000186448_3 (sequence is synthesized)
gaagccctgagccggctcagggaactctgtcgccggtggctgagaccagaagcacgcaccaaggcacagatcctggagctgctggtgctggagcagtttctgagcatcctgcctggggag

SEQ ID NO: 678216 - DNA, 120 bp, Artificial Sequence
  ENSG00000186448_4 (sequence is synthesized)
attcggacctgggtacagctccatcaccctggaagtggcgaggaggctgtggccctggtagaggagctgcagaaagaccttgatggaccagcaatacaagttccagtccttgtcaaggat

SEQ ID NO: 678217 - DNA, 120 bp, Artificial Sequence
  ENSG00000186448_5 (sequence is synthesized)
caggacactctccagaaggtggtgagtgccccaggaacaacacttcctcctgtacttcctggcagccacatagcagctgaaatttgcccgcatcctcctactgacctagtggcattcaac

SEQ ID NO: 678218 - DNA, 120 bp, Artificial Sequence
  ENSG00000186448_6 (sequence is synthesized)
ctccaggatcctcagcatgattctcctgcccctgaagcttctgccctttcccaggaagagaacccaagaaatcaattaatggcacttatgctcctaacagcccagccccaggagttggtg

SEQ ID NO: 678219 - DNA, 120 bp, Artificial Sequence
  ENSG00000186448_7 (sequence is synthesized)
atgttcgaggaggtgtcagtatgcttcacttcagaggaatgggcatgtctgggcccaatccagagggccttgtactgggatgtgatgctggagaattatggaaatgtgacctccctagaa

SEQ ID NO: 678220 - DNA, 120 bp, Artificial Sequence
  ENSG00000186448_8 (sequence is synthesized)
tgggagaccatgaccgagaatgaggaggtgacatcaaagccaagtagttctcaaagagcagactctcataaaggaacatcaaaaagacttcaaggaagtgttccccaggtccttgatttt

SEQ ID NO: 678221 - DNA, 120 bp, Artificial Sequence
  ENSG00000186448_9 (sequence is synthesized)
gaagaagagtgtgaatggcaagttttggcaagtcagtggggaaatgaaacagatgaaagggcagatacagtgaagaaagtttccctttgtgaacgagacaagaagaaaaggactccacca

SEQ ID NO: 678222 - DNA, 120 bp, Artificial Sequence
  ENSG00000186448_10 (sequence is synthesized)
gagaaacaaggccaaaagtggaaggaattaggagacagcttgactttcggttcagctatttctgaaagtttaataggtactgaaggaaagaagttttataaatgtgatatgtgttgtaaa

SEQ ID NO: 678223 - DNA, 120 bp, Artificial Sequence
  ENSG00000186448_11 (sequence is synthesized)
cattttaataaaatctcccatcttataaaccatcggagaatccacactggtgagaaacctcataaatgtaaggaatgtggaaaaggctttattcagcgttcgagccttctaatgcattta

SEQ ID NO: 678224 - DNA, 120 bp, Artificial Sequence
  ENSG00000186448_12 (sequence is synthesized)
cggaaccattcaggggagaaaccttataaatgtaatgaatgtgggaaagcattttctcaaagtgcttaccttctaaaccatcagaggatccacactggggagaaaccttataagtgtaag

SEQ ID NO: 678225 - DNA, 120 bp, Artificial Sequence
  ENSG00000186448_13 (sequence is synthesized)
gagtgtggaaagggcttctataggcactcaggcctaattatacatctaaggcgccattcaggggagagaccttataagtgtaatgaatgtgggaaagtcttctctcagaatgcttacctc

SEQ ID NO: 678226 - DNA, 120 bp, Artificial Sequence
  ENSG00000186448_14 (sequence is synthesized)
attgaccatcagaggctccacaaaggggaagaaccttataaatgtaataagtgtcagaaagctttcattctgaagaagagcctcattctgcaccagagaatccactctggggaaaaaccc

SEQ ID NO: 678227 - DNA, 120 bp, Artificial Sequence
  ENSG00000186448_15 (sequence is synthesized)
tataaatgtgatgaatgtggaaagacctttgctcagaccacttatcttattgaccatcagcgactccacagtgcagagaacccttacaagtgtaaagaatgtggaaaagttttcattcga

SEQ ID NO: 678228 - DNA, 120 bp, Artificial Sequence
  ENSG00000186448_16 (sequence is synthesized)
agcaaaagcctcctcttacatcagagagtccacacagaaaagaaaacctttggttgtaaaaagtgtgggaagattttcagttctaagtcaaacttcattgaccataagaggatgcacagc

SEQ ID NO: 678229 - DNA, 120 bp, Artificial Sequence
  ENSG00000186448_17 (sequence is synthesized)
agagagaaaccttacaaatgcactgaatgtgggaaagcctttactcaaagtgcttacctttttgaccaccagagactccacaatggggagaagccctatgaatgtaatgaatgtgggaaa

SEQ ID NO: 678230 - DNA, 120 bp, Artificial Sequence
  ENSG00000186448_18 (sequence is synthesized)
gtttttattctgaagaagagcctcattttacatcaaaggttccacactggagagaatctctatgaatgtaaagattgtggtaaggtcttcggttcaaacagaaacctcattgaccatgag

SEQ ID NO: 678231 - DNA, 120 bp, Artificial Sequence
  ENSG00000186448_19 (sequence is synthesized)
agactccacaatggggagaagccatatgaatgtcgagagtgtgggaaaacctttattatgagcaaaagttttatggtccatcagaaactccatacacaagagaaagcctacaaatgtgag

SEQ ID NO: 678232 - DNA, 120 bp, Artificial Sequence
  ENSG00000186448_20 (sequence is synthesized)
gattgtgggaaggctttcagttacaattcaagcctgcttgtacatcggagaatccacaccggagaaaaaccctttgaatgcagtgagtgtggaagagctttcagttcaaacagaaacctc

SEQ ID NO: 678233 - DNA, 120 bp, Artificial Sequence
  ENSG00000186448_21 (sequence is synthesized)
attgagcataagagaatccacagtggtgagaaaccctatgagtgtgatgagtgtggcaaatgcttcattctgaagaaaagcctcattggacatcagagaattcacacgagggaaaaatct

SEQ ID NO: 678234 - DNA, 120 bp, Artificial Sequence
  ENSG00000186448_22 (sequence is synthesized)
tataaatgcaatgactgtgggaaggtcttcagttaccgctcaaaccttatagcccatcagaggatccatactggtgagaagccctatgcgtgtagtgagtgtggaaaaggttttacgtac

SEQ ID NO: 678235 - DNA, 120 bp, Artificial Sequence
  ENSG00000186448_23 (sequence is synthesized)
aacagaaacctgattgaacatcaaagaattcacagtggagaaaaaacctacgaatgtcatgtatgtaggaaagtccttacctctagtagaaatcttatggtacatcaaagaatccatact

SEQ ID NO: 678236 - DNA, 120 bp, Artificial Sequence
  ENSG00000186448_24 (sequence is synthesized)
ggagagaaaccttataaatgtaatgagtgtggaaaagactttagtcagaataaaaaccttgttgtacatcagagaatgcacactggggaaaaaccttatgagtgtgacaagtgtaggaaa

SEQ ID NO: 678237 - DNA, 120 bp, Artificial Sequence
  ENSG00000186448_25 (sequence is synthesized)
agaattcacacaggggagaaaccctatgggtgtaatgattgtagtaaagtttttaggcaaagaaaaaaccttactgtacatcagaaaatccacacagatgaaaaaccttgtgaatgtgat

SEQ ID NO: 678238 - DNA, 120 bp, Artificial Sequence
  ENSG00000186448_26 (sequence is synthesized)
aaaatccacacagatgaaaaaccttgtgaatgtgatgtgtctgaaaaagaattctctcagacttccaaccttcatcttcaacagaaaatccataccattgaggaattctcttggctacaa

SEQ ID NO: 678239 - DNA, 120 bp, Artificial Sequence
  ENSG00000186448_27 (sequence is synthesized)
aacaccaatgagtccaagattgagattcagaaaatctagtgtcatatgtaaaatggaatagaatccctgcctacttaagtaactgttggacaaatgatatatatttcttctaaggaaaaa

SEQ ID NO: 678240 - DNA, 120 bp, Artificial Sequence
  ENSG00000186448_28 (sequence is synthesized)
aactgttggacaaatgatatatatttcttctaaggaaaaagtttattatttactctttactagacaaatgagtagcatatagaagaaagttaataggccgggcttggtggctcatgcctg

SEQ ID NO: 678241 - DNA, 120 bp, Artificial Sequence
  ENSG00000186448_29 (sequence is synthesized)
gctcactcctgtagtcccaggactttgggaggccgaggtgggaagatcccttgagcccaggagttcgagacaagcctgggtaacacggggagacccgtctttagtaaataaaaataaatt

SEQ ID NO: 678242 - DNA, 120 bp, Artificial Sequence
  ENSG00000186448_30 (sequence is synthesized)
tattaataaaactaaaaatttaataataaaaagtggacattgttttttaaaatgtgtatagtatgcattttaaagatagtgtcactgctgtggaaaacctgaacagacagtatgatccag

SEQ ID NO: 678243 - DNA, 120 bp, Artificial Sequence
  ENSG00000186448_31 (sequence is synthesized)
aatgtcaggtgtggagttgggcggacaagagtctgctgatgaggacaacctaaaagagcactggatttggaatcagaagacctacctttgattcctggctttcccttaatggccatgtga

SEQ ID NO: 678244 - DNA, 120 bp, Artificial Sequence
  ENSG00000186448_32 (sequence is synthesized)
tgttattaagtcagcctctaaagctttagtttcctgtcagtcaaatgttgacatgatacctacctcacagggttgttgtgagggttaagtgaaaggatctttgtgaaagtactttttgaa

SEQ ID NO: 678245 - DNA, 120 bp, Artificial Sequence
  ENSG00000186448_33 (sequence is synthesized)
atcattcagttgtcaataaagttggataaaagaggttatggtaaaagtttagaacatgggatcatgtaagtttgtgtattaagtcaatattagaatgagggggattccaggaacctaaaa

SEQ ID NO: 678246 - DNA, 120 bp, Artificial Sequence
  ENSG00000186448_34 (sequence is synthesized)
gatactcattttcataagaggaagtatggtgaatagctaactggaatttagtgttctaagaataattttgttaaatttacctttaaaaatatctgagggagttactagattatatatcta

SEQ ID NO: 678247 - DNA, 120 bp, Artificial Sequence
  ENSG00000186448_35 (sequence is synthesized)
gtttatgtatatggaaaaaaatgttatggccagccattaacagtgatgccaaggaaaacaatttatttcccagcttttgaatttgaaacttaacagatggagagtgtcaaaatggaaggg

SEQ ID NO: 678248 - DNA, 120 bp, Artificial Sequence
  ENSG00000186448_36 (sequence is synthesized)
cagtggtaccctgctttccctattcagagggaaaaaaatccttgacccgcagttgagctgatgatccctgccacagtcattgtgaattctaatcaatatttcatcattgctgtcaaatga

SEQ ID NO: 678249 - DNA, 120 bp, Artificial Sequence
  ENSG00000186448_37 (sequence is synthesized)
tagcctgttactaatgaaacaacattctgtcccagcactaaatttactgggacataaatttttcacatggagccaagctcttcactgattaagccagtgcagaatccacttgtgggcagt

SEQ ID NO: 678250 - DNA, 120 bp, Artificial Sequence
  ENSG00000186448_38 (sequence is synthesized)
cagtgcccattaccccctgtgaaccattctgtgcccttgagtacatttgtgggtttaactcagtctatattcttaagttggtaatttttatgttgtaattctcaaagttctgtttctgta

SEQ ID NO: 678251 - DNA, 120 bp, Artificial Sequence
  ENSG00000186448_39 (sequence is synthesized)
gctggactatgaataatacctgaatatgaagattgtgttttttaataatgtcaaagtggtgtgttgattatcataaatgttattaattcaaccccacagtttcttgggggctggttcctc

SEQ ID NO: 678252 - DNA, 120 bp, Artificial Sequence
  ENSG00000186448_40 (sequence is synthesized)
attagagtgaaaggtagccaagagtgaaaactggaaggggcctaaggcttaaagtcttaagacctggatgtggttcaggttttgccatctgcctcagaaaaaatctcttcagttcttgga

SEQ ID NO: 678253 - DNA, 120 bp, Artificial Sequence
  ENSG00000186448_41 (sequence is synthesized)
gccttgaattcctcatctgttaaacaggaggaagaatatctacctcacaaagttcttatgagataatgaatataaaaatgtttcatccaggttgttgaatcatcccagcttatataataa

SEQ ID NO: 678254 - DNA, 120 bp, Artificial Sequence
  ENSG00000186448_42 (sequence is synthesized)
ttacaaaggacatatgtactttaacaatggagaatgctgtgatttacctcttcaccgagtaacaaaatgtcacattgcttagattgagacagcccacataatgtgccaccttctgtgatg

SEQ ID NO: 678255 - DNA, 120 bp, Artificial Sequence
  ENSG00000186448_43 (sequence is synthesized)
taataagctgaaaaatgttcaacctgaatttaatcaagcttcttggacctcattgccaggttacaggaaatacaggaggcagaggaacaaataaaagacaccacgagaaacagacacatc

SEQ ID NO: 678256 - DNA, 120 bp, Artificial Sequence
  ENSG00000186448_44 (sequence is synthesized)
cagaacgtggaatattgcataagaaagctgccctggattcttcaaaatattattatgatgaaaaagagaggggagtgaaaattgttcaagctgtcttgagtctgctgtgagtttattata

SEQ ID NO: 678257 - DNA, 120 bp, Artificial Sequence
  ENSG00000186448_45 (sequence is synthesized)
ccattctctgcttttgtgtatgtatgaaaatttcgatatgaaaggtataaaacatggatgaggaggcttgtttttaaaagataatactagagagccgttaggtactaagaaccagaaata

SEQ ID NO: 678258 - DNA, 120 bp, Artificial Sequence
  ENSG00000186448_46 (sequence is synthesized)
gactcacataaatggccaattgatttttgacaggggcaaaagcaattcaatggaggagggatcgccttttcagcaaatactgttggagtaattggatatccataggcagtaaaccaacaa

SEQ ID NO: 678259 - DNA, 120 bp, Artificial Sequence
  ENSG00000186448_47 (sequence is synthesized)
cttcaggacctaggactgagctaagaaggctcagatgactcaaaagcatgctccttagaaggaaaaaaaatgttaaattggacttcatcaaaattaagataatttaccctgtaagagacc

SEQ ID NO: 678260 - DNA, 120 bp, Artificial Sequence
  ENSG00000186448_48 (sequence is synthesized)
tttttacaaagatgatattacaggttgggaaaaaatatttgcaaatcatatccaacaagggatttgtatgtaaactacataaagaactttccaaatttaacagtaataagtaaatacaat

SEQ ID NO: 678261 - DNA, 120 bp, Artificial Sequence
  ENSG00000186448_49 (sequence is synthesized)
tagaaaataagcaaaagacagacatttcactgaagtatagatagcaaataagcaaatgaaaagatgttcaacatcattaggcatgagggaaatgcagagtaaaatcgtgagatatcacct

SEQ ID NO: 678262 - DNA, 120 bp, Artificial Sequence
  ENSG00000186448_50 (sequence is synthesized)
atcagaatagcttaactttttttttttaatggtggtaactgctggcaaggatgaagagaaacaggatctcatacattgctgggaatgtaaaatggtacagccactctggaatataatttg

SEQ ID NO: 678263 - DNA, 120 bp, Artificial Sequence
  ENSG00000186448_51 (sequence is synthesized)
gcagtttcttgtaaaaccacacatgtatatgtcatgcttcaggaattgcacttctgagcatttatcccagagaaatgaaaacttgcgttcacacaaaaacctgtatacgaatgttcatag

SEQ ID NO: 678264 - DNA, 120 bp, Artificial Sequence
  ENSG00000186448_52 (sequence is synthesized)
cagctttatttgtaatggtcgaaacctgtaggcaacccatatatccttccttaggtggttaaaacaaattgtggtttatgtattaccatggaatacttgttactctgcaataaaattgac

SEQ ID NO: 678265 - DNA, 120 bp, Artificial Sequence
  ENSG00000186448_53 (sequence is synthesized)
ttattgatatccataacaactcaaataaatttcaagggaattaatgctgagtgaaaataatcacaaaaggccatattctgtatgaaaatattcatataacattctcaaaatgataaaact

SEQ ID NO: 678266 - DNA, 120 bp, Artificial Sequence
  ENSG00000186448_54 (sequence is synthesized)
atagagatgaaaaatggattaatggttgccaaaggttagggatggtgggaggaaaaatggggagagggttggatggaactattaaaaggtagcaccagaaaggtctttgtggtgatggaa

SEQ ID NO: 678267 - DNA, 120 bp, Artificial Sequence
  ENSG00000186448_55 (sequence is synthesized)
cacttgtgtatcttgattgcagtggtggttacacaaatctataggtgctatacctatacacacatactgtaccaatgttgatttcctttttcattttatgtaagatgtaaccatgagggg

SEQ ID NO: 678268 - DNA, 120 bp, Artificial Sequence
  ENSG00000186448_56 (sequence is synthesized)
aaagtgggtgaagggtgctatctttgcaacttcctgtgattctatcatttcaaaataaaaagtaaaaaccaacaatggcaacgaaaacccaaaactaaagagctgtaaccaactaaagtg

SEQ ID NO: 678269 - DNA, 120 bp, Artificial Sequence
  ENSG00000186448_57 (sequence is synthesized)
tgtgaaactgatttgaaaaaaagttataaaatacatgttttaggacagttgggaaatttgaatatgactggttattagatggtattagggaatttttgttgattttcttacctgtgacgg

SEQ ID NO: 678270 - DNA, 120 bp, Artificial Sequence
  ENSG00000186448_58 (sequence is synthesized)
tggtggtagtttgaagaatattcttaatcttaagggatgcatgttgaagtatttggaatgaagtgttctgatgtttacaactttcaaaaaaatgattttaaatatgtattgagagatcag

SEQ ID NO: 678271 - DNA, 120 bp, Artificial Sequence
  ENSG00000186448_59 (sequence is synthesized)
gcaaacatagcaaaatgttcattgttgagtccacatggaaaatacgggtattcaatgtgccatactttcaactcttctgtactctgatattttcaaaataaaacatttgaggggaaatta

SEQ ID NO: 678272 - DNA, 82 bp, Artificial Sequence
  ENSG00000186448_60 (sequence is synthesized)
accccatctctactaaaatacaaaaattatccgggcatgggggcacacagtcgcttgaacctgggagggcggaggttgcagt

SEQ ID NO: 678273 - DNA, 120 bp, Artificial Sequence
  ENSG00000186448_61 (sequence is synthesized)
acagagatgtggaaacctcacgaagcctagaagggccggagggacaggctgggagttagctgggagttgctgacgcagttccttctgcgctttgttcaagatgtgggtctggcgctttcg

SEQ ID NO: 678274 - DNA, 120 bp, Artificial Sequence
  ENSG00000186448_62 (sequence is synthesized)
tgactcaagaccctcttaggaacttcttcactgaactcaaggaggagatcaggcaagatctgtgctgtgcagatcctttggattgaggctgctgtgcacaggaatatggatgatactctc

SEQ ID NO: 678275 - DNA, 120 bp, Artificial Sequence
  ENSG00000186451_0 (sequence is synthesized)
acagtcactgagaaaattctttgtgcaggctcaccttcccctcatctcccccactcttcctgatcctgcagcgtcagatcccagcctgcagtatcagacctcaaaaggagcctctggtgt

SEQ ID NO: 678276 - DNA, 120 bp, Artificial Sequence
  ENSG00000186451_1 (sequence is synthesized)
cttccaaaagggaaggaaagagagagaaagccactggagttgggcagcgtgggaagctgtgaaagtggacaagcgtgaaagagcttccaagtagtggaaacagcagaagcaaagatgtga

SEQ ID NO: 678277 - DNA, 120 bp, Artificial Sequence
  ENSG00000186451_2 (sequence is synthesized)
acatgggaaaacctctgcagtatctgggtgactgtggggtttggctctgtttgagcaccccgggatgattggtggtggggtgtggctgaaggtgaattggaacagtgcactcagagccag

SEQ ID NO: 678278 - DNA, 120 bp, Artificial Sequence
  ENSG00000186451_3 (sequence is synthesized)
gttgcaagagtgctgcatgctcctcagggattggctccggccaagtgccccagcctccttttctggagaattctgtttttgacttgggccccatgtccagttctgctctgacttgtgggt

SEQ ID NO: 678279 - DNA, 120 bp, Artificial Sequence
  ENSG00000186451_4 (sequence is synthesized)
ccaccttagaaaagtcaggagacacctgggaaatgaaggcactagactcttccagactcgttccatggccacccagaggccttgggtcatccacccaacatcccaacaaaccccactgtg

SEQ ID NO: 678280 - DNA, 120 bp, Artificial Sequence
  ENSG00000186451_5 (sequence is synthesized)
cactggcatcatgccagggtccaggtgtcctgccaggagcagcctctgccctcccagagctgacatttcagggggatgtgtgccaaagtgagacctgtcagagatatttacaagcagcca

SEQ ID NO: 678281 - DNA, 120 bp, Artificial Sequence
  ENSG00000186451_6 (sequence is synthesized)
tctctcttgacatcgctgtatcccaaataaatcttctgggaagaccctcttcacctccagctctcctgatacagcaaggcagttgtgagcaagttattcataactctacacctcaatttc

SEQ ID NO: 678282 - DNA, 120 bp, Artificial Sequence
  ENSG00000186451_7 (sequence is synthesized)
ttggtatggaagatggggataatgagaggaccacaggatggttgtggagactgtgtgaggatatagatgccgagcccagtagcacagggtgcagccgttcaaaccaactgacatttactg

SEQ ID NO: 678283 - DNA, 120 bp, Artificial Sequence
  ENSG00000186451_8 (sequence is synthesized)
agggctgctttgtcaggtccctctctacagtatactccaacacacacatacacacacatctgtaatcaataataatcctgcaacatctgagagtctggcagctgtttgtctgggcctttg

SEQ ID NO: 678284 - DNA, 120 bp, Artificial Sequence
  ENSG00000186451_9 (sequence is synthesized)
cccccaccaggggtgactcgtagccatccctttctgcatcttcttagatatcactttttccaagaagcctccctgtcacacttccccaatatcacagatgaagaaatcaagattcagaaa

SEQ ID NO: 678285 - DNA, 120 bp, Artificial Sequence
  ENSG00000186451_10 (sequence is synthesized)
ggttaagttactggcacaaggtcacacaatccagatctcatactcttagcccccggggaaccttcactgtattaaatgacatcaattgatcaatcaatcgatcaatcaatgaaagagtgg

SEQ ID NO: 678286 - DNA, 120 bp, Artificial Sequence
  ENSG00000186451_11 (sequence is synthesized)
gaggcatgcatctcctgatccccgatcctatacattttcatctctttattgtttctatcaaagcctgctaagtaattactttccctctgggtaagtgccactaggtgatgaggtgaggta

SEQ ID NO: 678287 - DNA, 120 bp, Artificial Sequence
  ENSG00000186451_12 (sequence is synthesized)
atcaaatgacatagaagaggaaggagtccactgccagggtaggtgcagtggagcaagtcttacaatgtgcaggattataactccagcaatgacccctaggctcatgctcattccccaggt

SEQ ID NO: 678288 - DNA, 120 bp, Artificial Sequence
  ENSG00000186451_13 (sequence is synthesized)
ggcagtttcagaacacattgctcaggtctcaccctgtaaatgtaggtaccagccttctagttgaccatcagaacacacaacgccaagatcttactccagccacctgccaggacctggagg

SEQ ID NO: 678289 - DNA, 120 bp, Artificial Sequence
  ENSG00000186451_14 (sequence is synthesized)
gcaggaggagagttctgcctacattgtctcattttccctccccttctgcagtgagatagaccatgtccagtgctcaggagttgactggccacactggggagtttgaccacaacattgggc

SEQ ID NO: 678290 - DNA, 120 bp, Artificial Sequence
  ENSG00000186451_15 (sequence is synthesized)
tccatatgcatggaatgaggttgcatgcaattgtccatgaggctgctccctcatttgtctgggtttctgctccaatgctatctcctcagaaagaccttctctgactgaagccagctctgc

SEQ ID NO: 678291 - DNA, 120 bp, Artificial Sequence
  ENSG00000186451_16 (sequence is synthesized)
ctccatcccatcactctggatctccttccccagcttcatctccattacactggccactctccctcacatcttattactgatctagttgtctactgtccatctccaccactgggatgtaaa

SEQ ID NO: 678292 - DNA, 120 bp, Artificial Sequence
  ENSG00000186451_17 (sequence is synthesized)
ctccacaagggaggaatgctgtcagtttctttgactgctgtgtggtcagtaccagggcaatgcctcgcacagagtagccctctctccctaaatgtttttgaataaatgaaataaatgagc

SEQ ID NO: 678293 - DNA, 120 bp, Artificial Sequence
  ENSG00000186452_0 (sequence is synthesized)
gggaagtacctgccgccatcttgctcaccagcctccaaaatgcggctggggctcctgagcgtggcgctgttgtttgtggggagctctcacttatactcagaccactactcgccctctgga

SEQ ID NO: 678294 - DNA, 120 bp, Artificial Sequence
  ENSG00000186452_1 (sequence is synthesized)
aggcacaggctcggcccctcgccggaaccggcggctagttcccagcaggctgaggccgtccgcaagaggctccggcggcggagggagggaggggcgcatgcagaggattgtggaacagca

SEQ ID NO: 678295 - DNA, 120 bp, Artificial Sequence
  ENSG00000186452_2 (sequence is synthesized)
ccgcttaaggatgtgttgcaagggtctcggattatagggggcaccgaagcacaagctggcgcatggccgtgggtggtgagcctgcagattaaatatggccgtgttcttgttcatgtatgt

SEQ ID NO: 678296 - DNA, 120 bp, Artificial Sequence
  ENSG00000186452_3 (sequence is synthesized)
gggggaaccctagtgagagagaggtgggtcctcacagctgcccactgcactaaagacgctagcgatcctttaatgtggacagctgtgattggaactaataatatacatggacgctatcct

SEQ ID NO: 678297 - DNA, 120 bp, Artificial Sequence
  ENSG00000186452_4 (sequence is synthesized)
cataccaagaagataaaaattaaagcaatcattattcatccaaacttcattttggaatcttatgtaaatgatattgcactttttcacttaaaaaaagcagtgaggtataatgactatatt

SEQ ID NO: 678298 - DNA, 120 bp, Artificial Sequence
  ENSG00000186452_5 (sequence is synthesized)
cagcctatttgcctaccttttgatgttttccaaatcctggacggaaacacaaagtgttttataagtggctggggaagaacaaaagaagaaggtaacgctacaaatattttacaagatgca

SEQ ID NO: 678299 - DNA, 120 bp, Artificial Sequence
  ENSG00000186452_6 (sequence is synthesized)
tcgagagatgtgtaattctgagaggagttatgggggaataattcctaacacttcattttgtgcaggtgatgaagatggagcttttgatacttgcaggggtgacagtgggggaccattaat

SEQ ID NO: 678300 - DNA, 120 bp, Artificial Sequence
  ENSG00000186452_7 (sequence is synthesized)
gtgctacttaccagaatataaaagattttttgtaatgggaattaccagttacggacatggctgtggtcgaagaggttttcctggtgtctatattgggccatccttctaccaaaagtggct

SEQ ID NO: 678301 - DNA, 120 bp, Artificial Sequence
  ENSG00000186452_8 (sequence is synthesized)
gacagagcatttcttccatgcaagcactcaaggcatacttactataaatattttacgtggccagatcctcatagctttatgttttgtcatcttactagcaacaacataaagaaattctga

SEQ ID NO: 678302 - DNA, 120 bp, Artificial Sequence
  ENSG00000186452_9 (sequence is synthesized)
aggctttcatatctttattttgcattgtgtccctttctatgttctatataatgaacatcatttattcttctagcaattaattgcctacattagagatttcatgtgaacattttatgggct

SEQ ID NO: 678303 - DNA, 120 bp, Artificial Sequence
  ENSG00000186452_10 (sequence is synthesized)
ataagtattgtgacagatatacaattgtaattttggcactgaatcacatgtctccttgaaatatcttgattattttataatcataattctgtatctggaatactcatagagtttgtacaa

SEQ ID NO: 678304 - DNA, 120 bp, Artificial Sequence
  ENSG00000186452_11 (sequence is synthesized)
ctgtatctggaatactcatagagtttgtacaaaatattcagttaaacatatattttatgtgtataaatgccaaataatagtttataattaaaatgaaagctgtcatttggttaaattaat

SEQ ID NO: 678305 - DNA, 120 bp, Artificial Sequence
  ENSG00000186452_12 (sequence is synthesized)
gtaagaccaagtaattttcctttaaaatattttctgaagccagaagggaacttgtcaaacaaggcctttgataactttctggtggtcttaattatcaggcctaaaaataataaatcattt

SEQ ID NO: 678306 - DNA, 120 bp, Artificial Sequence
  ENSG00000186452_13 (sequence is synthesized)
tttctcctttttaactatttcaacaatccaaatcttcttggttcctgattccatggtttctgctgtcatcagtaggcagaatttaccttgaattcttttttttaatcattacctttgaga

SEQ ID NO: 678307 - DNA, 120 bp, Artificial Sequence
  ENSG00000186452_14 (sequence is synthesized)
gagatataattcacctagttaaaagtgtacagctcaattttttttttatttgagatagtctcgctttgtcacccatgctggagtgcagtgacacaatctctgttcactgcaacctctgcc

SEQ ID NO: 678308 - DNA, 85 bp, Artificial Sequence
  ENSG00000186452_15 (sequence is synthesized)
ccctcagcctcctaggtagctggaattacaggcacacatcactatgcccggccattctttttttttttttttgtattttcagtag

SEQ ID NO: 678309 - DNA, 60 bp, Artificial Sequence
  ENSG00000186452_16 (sequence is synthesized)
gttactgtcttttttattataaccatccttgtgggtgcgcagtggtatctcatagtggtt

SEQ ID NO: 678310 - DNA, 120 bp, Artificial Sequence
  ENSG00000186452_17 (sequence is synthesized)
aaccatccttgtgggtgcgcagtggtatctcatagtggttttaatttgcatttccttaatgactaatgatgttgagcatttttgcatgtatttattagccatttatatatcttctttaca

SEQ ID NO: 678311 - DNA, 120 bp, Artificial Sequence
  ENSG00000186452_18 (sequence is synthesized)
taccagatacataatgtacaaaatttttctcccattctgtagactgttttttcacttttctgaggttatcatttgcagcacaaatgttaatttttttaatgaagtacaattgatccattt

SEQ ID NO: 678312 - DNA, 120 bp, Artificial Sequence
  ENSG00000186452_19 (sequence is synthesized)
tttgttttgtctcatgcttttttactcttcctttattcctcttttcttcactatttccaaagctactagtccttcactcctgagtaacccatgctctcaccttttcctactcattctcat

SEQ ID NO: 678313 - DNA, 120 bp, Artificial Sequence
  ENSG00000186452_20 (sequence is synthesized)
ttctgcaatctaaagtttatcttttctgtgtccttttccttaaaaatcttgctgaatgaaatagtaaagaatccaatctaagtgaattgcattcctaggccaaacatcctcatcatcaaa

SEQ ID NO: 678314 - DNA, 120 bp, Artificial Sequence
  ENSG00000186452_21 (sequence is synthesized)
aaataattattcaatgcctgccttatatagagaatcggaaacagttatctcagtgtccttgttgttttcagtgcattaacaggccttagtaacagcatttgggtgcattcctaattttgt

SEQ ID NO: 678315 - DNA, 120 bp, Artificial Sequence
  ENSG00000186452_22 (sequence is synthesized)
atagactatgaaagtgacctgtcatttataatactactgagaggctttgccatttatgctcattttcctgcactagctattgtcaacacttagaaacttgtcttctattgcaagatgcca

SEQ ID NO: 678316 - DNA, 120 bp, Artificial Sequence
  ENSG00000186452_23 (sequence is synthesized)
gtttactcctctccctggcaagcaaaccacacacgtgcctaaaagaatccttcatacatcttaaagttatcctttccacacgcagtattcagcaagagaatattctaataatagacagtt

SEQ ID NO: 678317 - DNA, 120 bp, Artificial Sequence
  ENSG00000186452_24 (sequence is synthesized)
ttgacaatattttgcacacttcctaaattatatttctcctaagtaattatatttaaaaatccaaacaatttgatttatagtattctggctcaaaaccaggcagatgagaaatttatctac

SEQ ID NO: 678318 - DNA, 120 bp, Artificial Sequence
  ENSG00000186452_25 (sequence is synthesized)
cagctatatggttcctccaaatacctgggtaaaattgaattcctcctgtttgagttggaagtttaagctcaaaatctagtgatctttataaattgggggtatattgaaaatgtgtattta

SEQ ID NO: 678319 - DNA, 120 bp, Artificial Sequence
  ENSG00000186452_26 (sequence is synthesized)
tataaatgtatgtttgatgtaaataatttattccagtgttactgttgcttgaagaatactagaagtaacaaacactattttgggacttttttgacagggtgacagtgggggaccattaat

SEQ ID NO: 678320 - DNA, 120 bp, Artificial Sequence
  ENSG00000186453_0 (sequence is synthesized)
cgacgctcgggcccgcgggctcctttctccgtcgccgctccaggacgcggcctcgggggagccctaccgggacggagccgcggggcctgcgacttcccccggagctggcctgagggattc

SEQ ID NO: 678321 - DNA, 120 bp, Artificial Sequence
  ENSG00000186453_1 (sequence is synthesized)
agggattctcctgtccatggctgccaccaaaactgcgagttatgatgaacatttcaggccagaaaagttaagagaatggccggagcccgagtccgtttctttaatggaggtattagctag

SEQ ID NO: 678322 - DNA, 120 bp, Artificial Sequence
  ENSG00000186453_2 (sequence is synthesized)
agaagacattgatgaagcagtatgtgcaatattatttaaagaaaattccattgtgaaggttacagtcccaccatttgttgatcctctgtttcaaagacagcaagaggtggatgaagagag

SEQ ID NO: 678323 - DNA, 120 bp, Artificial Sequence
  ENSG00000186453_3 (sequence is synthesized)
gagaactggtcttcagtgtgagacaggaaaacgacattccataaaagaacttgaagaaatagagaaggccaggctgcatgccagctcgccctacttcactttcacttcacactgtgtgat

SEQ ID NO: 678324 - DNA, 120 bp, Artificial Sequence
  ENSG00000186453_4 (sequence is synthesized)
tccaaaagagtggcataaagcctctgcaagagccaggagtaaaacttacaaatacagtcctgaaaagctcatctatgcagacaagaaacagaaaagaaaagagaaaaagacggccgacct

SEQ ID NO: 678325 - DNA, 120 bp, Artificial Sequence
  ENSG00000186453_5 (sequence is synthesized)
aagtcaggctgcgtttgaaaggcagttcctttcctcaaagctcagccagaagaacaaagtgggtgaaagaaagggtctggtgagcagaggcctggggcggggctggcatgcagggctttg

SEQ ID NO: 678326 - DNA, 120 bp, Artificial Sequence
  ENSG00000186453_6 (sequence is synthesized)
cagcacccacgagcagcacatactggttccagaatgagccaccgccacagccctccctgtcagacaggcacccaagggcggaggaggcatggcccaagaagaagggtgtgaagaggagga

SEQ ID NO: 678327 - DNA, 120 bp, Artificial Sequence
  ENSG00000186453_7 (sequence is synthesized)
ctcagcactgcagctctgacagggcccctcgggcggggaagccttgcatgaagaaactcagacaagtggtaaatgtgggacctggaccccactttccggagacatcctgtccttccgagg

SEQ ID NO: 678328 - DNA, 120 bp, Artificial Sequence
  ENSG00000186453_8 (sequence is synthesized)
tgagggccaacctggccacaggggcttttccccctgagatttcttcagcgccttcgcccgggcctttgcccttctgccactttcctaccattttccacttactccatccaaactgcacca

SEQ ID NO: 678329 - DNA, 120 bp, Artificial Sequence
  ENSG00000186453_9 (sequence is synthesized)
aagatggtgttctccttagtccacacacaactggtgggaagtttttgaaatgaaatttataccaaaaaattagggcaagatgagattttttgatatttaaaaggtatttttatatgtagg

SEQ ID NO: 678330 - DNA, 120 bp, Artificial Sequence
  ENSG00000186453_10 (sequence is synthesized)
aattttctgagtatggatttcttatccagagctcatggttcatttgacacagttttcagctcctggtctatttccccttccattctctccgccacgccctgtgccctgaggcctgaggcg

SEQ ID NO: 678331 - DNA, 120 bp, Artificial Sequence
  ENSG00000186453_11 (sequence is synthesized)
caggaccctcccagggaaggcctagggggcttggtgggccaccgctcagctcaggacctgacagcgtcactcccaccctcaccaccacacacacaggatgggggactgctgctgctttcc

SEQ ID NO: 678332 - DNA, 120 bp, Artificial Sequence
  ENSG00000186453_12 (sequence is synthesized)
agcctgtgagcctggataggtattttgtgacccagctcctgctcagtcccatcgctgtccccggtctctccagggagtaagggattctccgtctgtggtaagttacctgtgactcttcag

SEQ ID NO: 678333 - DNA, 120 bp, Artificial Sequence
  ENSG00000186453_13 (sequence is synthesized)
cagtttcctctgagcataattatatctgagagcacagggagctcctcattccatgtatttttcaaatattcaagatgtacaacgtgatgatttgctataggtattcattgtgaaatgttt

SEQ ID NO: 678334 - DNA, 120 bp, Artificial Sequence
  ENSG00000186453_14 (sequence is synthesized)
gccacagtcaagcttgttgacatacccaccagctcacatttactgttttcgtgtgtgtggtgagaatactcacaatctactctctgagcaaactgcaaatatatgttattagtaactgta

SEQ ID NO: 678335 - DNA, 120 bp, Artificial Sequence
  ENSG00000186453_15 (sequence is synthesized)
tatgtgcaatattatttaaagaaaattccattgtgaagagattggatatgtattttcagcatgtggatacttttaaggaaagaagaaaagagatgttacataaaaaatgggttgaaaatg

SEQ ID NO: 678336 - DNA, 120 bp, Artificial Sequence
  ENSG00000186453_16 (sequence is synthesized)
tcctgggctgctggggacagccaacagcacaggggtccccagcctgtgggaaaaagagtgatgacagctgaggtgctggggcagcacctggcctccctgcagaaggtggccaggcagggc

SEQ ID NO: 678337 - DNA, 120 bp, Artificial Sequence
  ENSG00000186453_17 (sequence is synthesized)
cacccttggtactgaagcttcgtggacttgacttggcagtgtctgtacagcagttaaaatactctaaacatattttcttcctccagaagtggaaataaattgcaagaaatacccaaatca

SEQ ID NO: 678338 - DNA, 120 bp, Artificial Sequence
  ENSG00000186458_0 (sequence is synthesized)
agagggacccaactccattaaaccaccaccagctccccaagccaccccttcagccatgaagttcctgctcctggtcttggcagccctcggattcctgacccaggtgatcccagccagtgc

SEQ ID NO: 678339 - DNA, 120 bp, Artificial Sequence
  ENSG00000186458_1 (sequence is synthesized)
aggtgggtcaaaatgtgtgagtaacaccccaggatactgcaggacatgttgccactggggggagacagcattgttcatgtgcaacgcttccagaaaatgctgcatcagctactccttcct

SEQ ID NO: 678340 - DNA, 120 bp, Artificial Sequence
  ENSG00000186458_2 (sequence is synthesized)
gccgaagcctgacctaccacagctcatcggtaaccactggcaatcaaggagaagaaacacacaaaggaaagacaagaagcaacaaacgaccgtaacatcataataaccactgctatcgcc

SEQ ID NO: 678341 - DNA, 120 bp, Artificial Sequence
  ENSG00000186458_3 (sequence is synthesized)
tccaccaactcagagaaatatcatttccacagttccaattcctcctacattgctgagtactagccaaggctcctctttatggggcagatatctatagccaaccccaaaacttctgtcttc

SEQ ID NO: 678342 - DNA, 120 bp, Artificial Sequence
  ENSG00000186458_4 (sequence is synthesized)
tatcattctgtcattcatctagtaactaatttggagtttgtatctatcttacgagaacaatcatcatgcagattcgtccacaggggatctgtcagtttgggtcctccaaatgaaaaatgt

SEQ ID NO: 678343 - DNA, 120 bp, Artificial Sequence
  ENSG00000186458_5 (sequence is synthesized)
caagacagaattggacatgcaaaagattgactgggagaacacacctctgatggacaaaggtgagacagagcagccacaggcagggagagccttcagactgcaacgctggcctgatacgtg

SEQ ID NO: 678344 - DNA, 120 bp, Artificial Sequence
  ENSG00000186458_6 (sequence is synthesized)
tcaaaggagagagggatagaggaggattgaatagaaggagactaagactgcagctctaagaaagtctcagccaaacagatggggaggcccaaagcaaggcttgcccctcagaggagctca

SEQ ID NO: 678345 - DNA, 120 bp, Artificial Sequence
  ENSG00000186458_7 (sequence is synthesized)
cgcagggcaggaatagccaggttctcatatcccaggggttcagactttggctgagaacagcccctggagaacatggggtgactgctaccataggtctggaagtatgaggctgtccaccaa

SEQ ID NO: 678346 - DNA, 120 bp, Artificial Sequence
  ENSG00000186458_8 (sequence is synthesized)
aagtctaggtttggccagctaggtagactgacttgtgaggtatttatttattcatttgagtaacaaagcagacagaatacatagccaccattggtagtacaccccaaaagcaaggatggc

SEQ ID NO: 678347 - DNA, 120 bp, Artificial Sequence
  ENSG00000186458_9 (sequence is synthesized)
atgatgctggtgactcaaacgtgcctactcatggtgtcaaattggcataatcctcttgggaagctgtgtggaaataagcacagagaagcagaactctaattgcttaatccactaaacatt

SEQ ID NO: 678348 - DNA, 120 bp, Artificial Sequence
  ENSG00000186458_10 (sequence is synthesized)
acttctgggaattggctcatcataaattatccaagagaagcacaaagttatgggcacaaaggttttccatataatattatttaaaatgctgagaaaatgaaaaaatctaaatggtgaaat

SEQ ID NO: 678349 - DNA, 120 bp, Artificial Sequence
  ENSG00000186458_11 (sequence is synthesized)
atatactaatgccatctataaatacaaacaaatagaatgtttatagaataatggaacataataacattattcaaaattgcatttatgctatagttgtcaaaattgtctccttatatgata

SEQ ID NO: 678350 - DNA, 120 bp, Artificial Sequence
  ENSG00000186458_12 (sequence is synthesized)
caaaactcatgaaaattatgacttttttgtttggttggaaagcagaattatgcataaatttcctcttacagttcgatgcccattagttttatataacatttatttgacacgtactgactt

SEQ ID NO: 678351 - DNA, 120 bp, Artificial Sequence
  ENSG00000186458_13 (sequence is synthesized)
ctatctgagaagaacaaaccaaaacactcaggcctaaataattaaaaacggtcctaaaaactagcaaaccagataagaaaagatgttaatgcccattccctaacttatgtcttagaccaa

SEQ ID NO: 678352 - DNA, 120 bp, Artificial Sequence
  ENSG00000186458_14 (sequence is synthesized)
aattaattctagatggttttaaaatgacagtgtaaaagtaaagtattaaaagattgtgtggtcaaatattcaatttaagagcaaggaaattcttataaatataacaatagaggcagaact

SEQ ID NO: 678353 - DNA, 120 bp, Artificial Sequence
  ENSG00000186458_15 (sequence is synthesized)
catgtaagaataaattgattaggtggtattaaatattaagttcttatgtatgtcaaaagatatcattttgaaattcatccatcttattgggtattgcaggagttcattcctttttgttta

SEQ ID NO: 678354 - DNA, 120 bp, Artificial Sequence
  ENSG00000186458_16 (sequence is synthesized)
taaatactcttccgtcatatgaatagtattcatttgtatactggtttgttgatggacatttgggttgttcccagtttatggctattacaaataaagcttctatgaacatttatgtacaaa

SEQ ID NO: 678355 - DNA, 120 bp, Artificial Sequence
  ENSG00000186462_0 (sequence is synthesized)
aagtgatagctgcgtaatcatactgcggcaccgtttttttcttgcagcagtagctgcttgcggaggaggtctgcccactgcagctctctgcagtctccggctctctcctgcaggatcggt

SEQ ID NO: 678356 - DNA, 120 bp, Artificial Sequence
  ENSG00000186462_1 (sequence is synthesized)
caacgcagccgtcgccgccctctgcacccagcccaggtcgccactgcttcagtccggttctcaaagcctcagcaccatcttttatccccgagcagcctggatcgtcgttccctcagtccg

SEQ ID NO: 678357 - DNA, 120 bp, Artificial Sequence
  ENSG00000186462_2 (sequence is synthesized)
gacgccactgctaggtccgaccaccgccgcttctgatatttcggtgagtcttttcctgtggaggtttggtctcccgatctctgtggtagccaccttaggcgtgtacggtcctttgaaaaa

SEQ ID NO: 678358 - DNA, 120 bp, Artificial Sequence
  ENSG00000186462_3 (sequence is synthesized)
tggccgagtcagagaaccgcaaggagctgtcagaatccagtcaagaagaggctggtaatcagataatggtggaagggctcggggaacatctggagcgcggtgaagatgccgctgctgggc

SEQ ID NO: 678359 - DNA, 120 bp, Artificial Sequence
  ENSG00000186462_4 (sequence is synthesized)
ttggagacgatgggaagtgcggtgaagaagctgccgctgggcttggggaagaaggggaaaacggtgaagatactgctgctgggtccggggaagatgggaaaaaaggtggcgatactgatg

SEQ ID NO: 678360 - DNA, 120 bp, Artificial Sequence
  ENSG00000186462_5 (sequence is synthesized)
aggactcagaggcagaccgtccaaaaggacttatcggttatgttttagatacagactttgttgaaagtctacctgtgaaagttaagtaccgtgtgttagcccttaaaaagcttcaaacta

SEQ ID NO: 678361 - DNA, 120 bp, Artificial Sequence
  ENSG00000186462_6 (sequence is synthesized)
gagcggccaatttagaatccaaattcctgagggaatttcatgacattgaaagaaagtttgctgaaatgtaccaacccttactggaaaaaagacgtcagatcatcaatgcaatctatgaac

SEQ ID NO: 678362 - DNA, 120 bp, Artificial Sequence
  ENSG00000186462_7 (sequence is synthesized)
ctacagaagaggaatgtgaatataaatcagactctgaggactgtgatgatgaggaaatgtgtcatgaagagatgtatggtaatgaggagggtatggtacatgaatatgtggatgaggacg

SEQ ID NO: 678363 - DNA, 120 bp, Artificial Sequence
  ENSG00000186462_8 (sequence is synthesized)
aagaggaggaggaggaggaggaggaggacgacattgaggctactggagaagagaataaagaagaggaggatcctaagggaattcctgatttttggctaactgttttaaaaaacgttgata

SEQ ID NO: 678364 - DNA, 120 bp, Artificial Sequence
  ENSG00000186462_9 (sequence is synthesized)
ctgatttttggctaactgttttaaaaaacgttgatacactcactcctttgattaagaaatatgatgagcctattctgaagctcctgacagatattaaagttaagctttcagatcctggcg

SEQ ID NO: 678365 - DNA, 120 bp, Artificial Sequence
  ENSG00000186462_10 (sequence is synthesized)
aacccaatgaatatttcaaaaatgagttgttgacaaagacctatgtgctgaagtcaaagctagcatattatgatccccatccctataggggaactgcgattgagtattccacaggctgtg

SEQ ID NO: 678366 - DNA, 120 bp, Artificial Sequence
  ENSG00000186462_11 (sequence is synthesized)
agatagattggaatgaaggaaagaatgtcactttgaaaaccatcaagaagaaacagaaacatcggatctggggaacaatccgaactgtaactgaagattttcccaaggattcatttttca

SEQ ID NO: 678367 - DNA, 120 bp, Artificial Sequence
  ENSG00000186462_12 (sequence is synthesized)
attttttctctcctcatggaatcacctcaaatggaagggatggaaatgatgattttttacttggtcacaatttacgtacttacataattccaagatcagtattatttttctcaggtgatg

SEQ ID NO: 678368 - DNA, 120 bp, Artificial Sequence
  ENSG00000186462_13 (sequence is synthesized)
cactggaatctcagcaggagggggtagttagagaagttaatgatgcaatttatgacaaaattatttatgataattggatggctgcaattgaggaagttaaagcttgttgcaaaaaccttg

SEQ ID NO: 678369 - DNA, 120 bp, Artificial Sequence
  ENSG00000186462_14 (sequence is synthesized)
aggcattagtagaagacattgatcgttagagcagagtatacatggccctgaaattaactgccctagatatagttactcaaggtataagaagccttgtgttctgtatttttcttgtagtgt

SEQ ID NO: 678370 - DNA, 120 bp, Artificial Sequence
  ENSG00000186462_15 (sequence is synthesized)
tagttaaaacatatgtttcaaaaatataagaaaagttcaaaaactaattaatttgaccttgagttttagtagtagaatgttttcaagaaatgtacactgtggtaaatgatttaaaacact

SEQ ID NO: 678371 - DNA, 120 bp, Artificial Sequence
  ENSG00000186462_16 (sequence is synthesized)
agtatagtgttgtgtagcttaatccttctgaagtctttttgtcatgtagctattaatctgtggctatgaaatgatcagaaatgctaagtgagatcaatatttgtttggaaaaaaaatctt

SEQ ID NO: 678372 - DNA, 120 bp, Artificial Sequence
  ENSG00000186462_17 (sequence is synthesized)
gggaaacaacccaagggttttcgctgttgttgtttttctttttctatttttgtttacttagtcctttagctagtggatttaattttgttgtgcctgcttcattttgcaataacaatgcag

SEQ ID NO: 678373 - DNA, 120 bp, Artificial Sequence
  ENSG00000186462_18 (sequence is synthesized)
tagaatttaaaacttggatgcttaagaggcctgcatatagataagaatttcaggcaaaactacatttattgttaataacagcttgttcataggctcttgtattttatgtaactgtgataa

SEQ ID NO: 678374 - DNA, 120 bp, Artificial Sequence
  ENSG00000186462_19 (sequence is synthesized)
ataatgaaacttagttatattgaggttattgtttgtcggtgaagtgttagtcacagtattttcaaaagtttgcacatattgttctgtgtaattgtgtaagccataattacagtgtttaat

SEQ ID NO: 678375 - DNA, 120 bp, Artificial Sequence
  ENSG00000186462_20 (sequence is synthesized)
tctcttttcctattacatcattcattgaaagtgatcactttaccattttgaaaagatatttcgtgttctttcactgcaaaataaaaagaataaaaatttcagagtgtctcatgtttaaaa

SEQ ID NO: 678376 - DNA, 120 bp, Artificial Sequence
  ENSG00000186468_0 (sequence is synthesized)
ctctttcgctcaggcccgtggcgccgacaggatgggcaagtgtcgtggacttcgtactgctaggaagctccgtagtcaccgacgagaccagaagtggcatgataaacagtataagaaagc

SEQ ID NO: 678377 - DNA, 120 bp, Artificial Sequence
  ENSG00000186468_1 (sequence is synthesized)
tcatttgggcacagccctaaaggccaacccttttggaggtgcttctcatgcaaaaggaatcgtgctggaaaaagtaggagttgaagccaaacagccaaattctgccattaggaagtgtgt

SEQ ID NO: 678378 - DNA, 120 bp, Artificial Sequence
  ENSG00000186468_2 (sequence is synthesized)
aagggtccagctgatcaagaatggcaagaaaatcacagcctttgtacccaatgacggttgcttgaactttattgaggaaaatgatgaagttctggttgctggatttggtcgcaaaggtca

SEQ ID NO: 678379 - DNA, 120 bp, Artificial Sequence
  ENSG00000186468_3 (sequence is synthesized)
tgctgttggtgatattcctggagtccgctttaaggttgtcaaagtagccaatgtttctcttttggccctatacaaaggcaagaaggaaagaccaagatcataaatattaatggtgaaaac

SEQ ID NO: 678380 - DNA, 120 bp, Artificial Sequence
  ENSG00000186468_4 (sequence is synthesized)
actgtagtaataaattttcatatgccaaaaaatgtttgtatcttactgtcccctgttctcaccacgaagatcatgttcattaccaccaccacccccccttattttttttatcctaaacca

SEQ ID NO: 678381 - DNA, 120 bp, Artificial Sequence
  ENSG00000186468_5 (sequence is synthesized)
gcaaacgcaggacctgtaccaattttaggagacaataagacagggttgtttcaggattctctagagttaataacatttgtaacctggcacagtttccctcatcctgtggaataagaaaat

SEQ ID NO: 678382 - DNA, 120 bp, Artificial Sequence
  ENSG00000186468_6 (sequence is synthesized)
gggatagatctggaataaatgtgcagtattgtagtattactttaagaactttaagggaacttcaaaaactcactgaaattctagtgagatactttcttttttattcttggtattttccat

SEQ ID NO: 678383 - DNA, 120 bp, Artificial Sequence
  ENSG00000186468_7 (sequence is synthesized)
atcgggtgcaacacttcagttaccaaatttcattgcacatagattatcttaggtacccttggaaatgcacattcttgtatccatcttacaggggcccaagatgataaatagtaaactcaa

SEQ ID NO: 678384 - DNA, 120 bp, Artificial Sequence
  ENSG00000186468_8 (sequence is synthesized)
aattgctccccactctgtttattatttaaaggtgtcaggatctgtgttgtaatgtgtctacattaatgtgtttaggagaatacaggcattggatcatttagttgatggaagtatatgcca

SEQ ID NO: 678385 - DNA, 120 bp, Artificial Sequence
  ENSG00000186468_9 (sequence is synthesized)
ggcaagggagataaggtatacgacaagactgatgttttcagtatcttctcatgaggttgtcagagaccttcatgtcttcaaagactagtcagcaaatgaagtggtttagtgtagagacaa

SEQ ID NO: 678386 - DNA, 120 bp, Artificial Sequence
  ENSG00000186468_10 (sequence is synthesized)
gattggttgtgttttgataatttaagctaggtattgagtacatgtggattttgctgtccacaaatacttgtttcagagttttcatggatacagtggcatggttgaaatgaagctgtgagc

SEQ ID NO: 678387 - DNA, 120 bp, Artificial Sequence
  ENSG00000186468_11 (sequence is synthesized)
cttctgctttaaatctgatgtaagaaactcctgttaacaaatagtaagtatgggttaattagccctttgatcaaagcctagctttacattgtttaggatctttggaaaacaattggtttg

SEQ ID NO: 678388 - DNA, 120 bp, Artificial Sequence
  ENSG00000186468_12 (sequence is synthesized)
gttgcccactttccgtaggatcaagagcagaacctttcacatggcacagaagaacccaggttgcgcttcatacctgcatattccagccttagcctgccatttctctccttggcactttgt

SEQ ID NO: 678389 - DNA, 120 bp, Artificial Sequence
  ENSG00000186468_13 (sequence is synthesized)
ctggtctcagttggtcatcctcaaacttgggttccatatccagcctcaggacctctgttcctgttactatggttccttgcatgtcgcctgctcttactaaagagctcgtgtgttttccag

SEQ ID NO: 678390 - DNA, 120 bp, Artificial Sequence
  ENSG00000186468_14 (sequence is synthesized)
cacacttcggtttatctcttgatgatgatgctagtctctccctccgcaagggcggaaaggctgcctgttggtttgtaccagtgtttcctaacgtgtagctgcagtcagtatttggctaag

SEQ ID NO: 678391 - DNA, 120 bp, Artificial Sequence
  ENSG00000186468_15 (sequence is synthesized)
ctgttcccaggggctcaacagatgctttcggatgagccttaactgacccaatcctttgtgatgcgggagagattgctaggcctcgctcacctggccagaaccagggaaagaggccgcggt

SEQ ID NO: 678392 - DNA, 120 bp, Artificial Sequence
  ENSG00000186468_16 (sequence is synthesized)
cggttgcagcgcgattccaggccctgggcgtcaggcgcggggtgggcagctctccccgggcggtggggcccttgtgaccgcgaggcggggcgcaccaggaagggagtgggacagcgcggg

SEQ ID NO: 678393 - DNA, 120 bp, Artificial Sequence
  ENSG00000186468_17 (sequence is synthesized)
cagggatgtggcctggttacctgccttctctgatacgtcaagacaccttcaacaatggcttgcagctgtaccctgttggctgcacccaggacgcccttttcactgctaagcagtcctacc

SEQ ID NO: 678394 - DNA, 120 bp, Artificial Sequence
  ENSG00000186468_18 (sequence is synthesized)
tgaggcccaggggctgccagattgacccataaataatctccggcgcctcagatccagaagctgctgagcctgatcttagtgccttctcctttctctgtgtggccccccagcccctttccc

SEQ ID NO: 678395 - DNA, 120 bp, Artificial Sequence
  ENSG00000186468_19 (sequence is synthesized)
cactgccttgtgtccaaggccctttccttcatgtatccatggaggagagacaaaaatacacatcaataaaataagatagggaatccataaatagacattcagaagtatggccaacggatt

SEQ ID NO: 678396 - DNA, 120 bp, Artificial Sequence
  ENSG00000186468_20 (sequence is synthesized)
tatcttaaaaccaatggaggaagaagagtttcaataaatgttgtggacttccatttgtcaaagaccaaaacaaaggaaccccaaccttacatgtaatacaaacttaactcaaaatggatc

SEQ ID NO: 678397 - DNA, 120 bp, Artificial Sequence
  ENSG00000186468_21 (sequence is synthesized)
atatatctaaatgtaaaatggaaagctataaaactgaaaacagactatctttacaacctaggcgtaggtatagtttttagacattacaccaaaagcacatgccgtaaaagaaaaaataga

SEQ ID NO: 678398 - DNA, 120 bp, Artificial Sequence
  ENSG00000186468_22 (sequence is synthesized)
ccaaaagcacatgccgtaaaagaaaaaatagataaattggtggatttcattaaaattaaaaaactttttctctctgaaaaatcctgttaagctgggcgctgtggttcatgcctgtaatcc

SEQ ID NO: 678399 - DNA, 120 bp, Artificial Sequence
  ENSG00000186468_23 (sequence is synthesized)
aggctgagttgggaagaaattaatagcttgaggccaggagttcaagatcatcctgggcagcaaagtcatacactcttgagggaagagagagaccttctcatattgttttatattgtttta

SEQ ID NO: 678400 - DNA, 76 bp, Artificial Sequence
  ENSG00000186468_24 (sequence is synthesized)
accaggcctgaaaccagacgacttagaacctgatgttatccgtagattccaagcattgtataaaaaaattgtgaaa

SEQ ID NO: 678401 - DNA, 120 bp, Artificial Sequence
  ENSG00000186468_25 (sequence is synthesized)
tatccgtagattccaagcattgtataaaaaaattgtgaaactccctgttgtgttctgtaccagtgcatgaaacccctgtcacatatcccctagattgctcaatcaatcacgaccctttca

SEQ ID NO: 678402 - DNA, 120 bp, Artificial Sequence
  ENSG00000186468_26 (sequence is synthesized)
gtggaggccgccgaggtcggggtaccgagggacgcagggaggccagcgcttcctcccgggcattcgagcggggcctcgtccttcgggagaacacattctccggagccctcttcgaacgtt

SEQ ID NO: 678403 - DNA, 120 bp, Artificial Sequence
  ENSG00000186468_27 (sequence is synthesized)
tattagtcggttcagggcaacttgaaggccaaatgtttggcccacaggccaataaatagtacgagagccaatcggcttaagggtttattccaggcaagtgtcgtggacttcgtactgcta

SEQ ID NO: 678404 - DNA, 120 bp, Artificial Sequence
  ENSG00000186468_28 (sequence is synthesized)
tgtagtagtattcatttgggcattgtggggtaaaattgcaaagcgtttgttctatttaaaagttggtaaaattagtttttgggaattaggtagttaaggttttaatttaacgttggcctg

SEQ ID NO: 678405 - DNA, 120 bp, Artificial Sequence
  ENSG00000186468_29 (sequence is synthesized)
gaaggaattggagaagatactagcaatgatgaagtaaaggacacaaacacctttactgtgggagttgttataagtaaatggcacgtgtcagctattgaactttatcgacttgataaaact

SEQ ID NO: 678406 - DNA, 120 bp, Artificial Sequence
  ENSG00000186468_30 (sequence is synthesized)
cggcttaagggtttattccaggtgaggcgagtgtcttagaagatgggaaacacgtagatggcgtgtttttacggaagaactaaaatatttaatttttaggcaagtgtcgtggacttcgta

SEQ ID NO: 678407 - DNA, 120 bp, Artificial Sequence
  ENSG00000186469_0 (sequence is synthesized)
aacaaagggagaagggggattaaagtcaaatcactgtcagcagcccaggagcagacaaaaccaccagagtaagccctgaaatggaaatgagagggaaaagaagcaagccgctaacagcta

SEQ ID NO: 678408 - DNA, 120 bp, Artificial Sequence
  ENSG00000186469_1 (sequence is synthesized)
ccaagaagaggaggaagtgggagatgcgctgcttcctgtagaaagaacgttgattgaagacaaagctgggtggggactagtccctgggctgcagccgctgctacacatactcacaacgct

SEQ ID NO: 678409 - DNA, 120 bp, Artificial Sequence
  ENSG00000186469_2 (sequence is synthesized)
gccgccgcgctccgtgggcaactcctactactgctgggctgggctgggctgggctgggctgcgccggagctcgcctgcacagatcagctccggagaggggaaaaccacgctcctcggacc

SEQ ID NO: 678410 - DNA, 120 bp, Artificial Sequence
  ENSG00000186469_3 (sequence is synthesized)
aagcctcgggagctaagtgtttctgaaagatctatccagcactccgatggccagcaacaacaccgccagcatagcacaagccaggaagctggtagagcagcttaagatggaagccaatat

SEQ ID NO: 678411 - DNA, 120 bp, Artificial Sequence
  ENSG00000186469_4 (sequence is synthesized)
cgacaggataaaggtgtccaaggcagctgcagatttgatggcctactgtgaagcacatgccaaggaagaccccctcctgacccctgttccggcttcagaaaacccgtttagggagaagaa

SEQ ID NO: 678412 - DNA, 120 bp, Artificial Sequence
  ENSG00000186469_5 (sequence is synthesized)
gtttttctgtgccatcctttaagtctttgagaggggcctgaagagcctccgggctcctgggacattgatgtagagtttttagtgaagtgggcacctttctagtccacggcatttgaagag

SEQ ID NO: 678413 - DNA, 120 bp, Artificial Sequence
  ENSG00000186469_6 (sequence is synthesized)
agcgaggagaaccattctggaaactctaggctatgcatgtttaaagatctggtcccctttatgagaatgcaagccgatccacatcctgacttaagagatctgattctgacgaactgcctg

SEQ ID NO: 678414 - DNA, 120 bp, Artificial Sequence
  ENSG00000186469_7 (sequence is synthesized)
gaggaggggaatatataaaaataaaattggtgtcacttcttttctgctatcccccagccccccccccaaaatcctcatgtttctgcttcatattttgaaaaataacaattaaaacagaca

SEQ ID NO: 678415 - DNA, 120 bp, Artificial Sequence
  ENSG00000186469_8 (sequence is synthesized)
gctgtactgaggtaagatatgtgtgaccttcttggaatgaatattgtctttagaataccctttgataagctgagctgtcccgtgtagatgcaattcggtttaatggcattgatgtatagt

SEQ ID NO: 678416 - DNA, 120 bp, Artificial Sequence
  ENSG00000186469_9 (sequence is synthesized)
cactgtgcctttctttttctttcttccttctcctctacccctccttccacccctccccattagagtagtgtggagataaggctggactggtctatcagattgaactccaagaatgatcac

SEQ ID NO: 678417 - DNA, 120 bp, Artificial Sequence
  ENSG00000186469_10 (sequence is synthesized)
acaaaatgtttagggagatgttccccgtggtgtatcctcatggtaacaacgacaaaaaatgccggttgtctgtgttctcttttcactattcctaacatgtgtacatgatagctttgattc

SEQ ID NO: 678418 - DNA, 120 bp, Artificial Sequence
  ENSG00000186469_11 (sequence is synthesized)
tgcaagtaaaagtaaatcctgtgttgtgactggtgctttcatatatttgtgacaatttttgagtaatattgcatgaaaatgtccctatgttacatccattcagaagttttgttgttttac

SEQ ID NO: 678419 - DNA, 120 bp, Artificial Sequence
  ENSG00000186469_12 (sequence is synthesized)
tctaaagctgggaaaggaaatgagagggaaaagaccccggagagggaagaaaatctcagtattttgaaaattgagattacttcagagccttagccacacctaaaatacctcctagttaat

SEQ ID NO: 678420 - DNA, 120 bp, Artificial Sequence
  ENSG00000186469_13 (sequence is synthesized)
agtggtataaatgcctcttcaatacgttttccagaatccaaagcattttggtttatccaggacccagggcagcacagctgtcaccaagcaggagagttaaggattcaccatgagctggga

SEQ ID NO: 678421 - DNA, 120 bp, Artificial Sequence
  ENSG00000186469_14 (sequence is synthesized)
aatgcttttgccatgagtatgagcaaattccctctttccctgaatcatggacattctagattaaaagaacatttttttgtgctcttaacaagaaaaccatggccctcctttgttcaagta

SEQ ID NO: 678422 - DNA, 120 bp, Artificial Sequence
  ENSG00000186469_15 (sequence is synthesized)
ataaacccacagctccagagaaggtgaccattctcagaactccagctattcactctccagggagaaggacctcaaatcgccactctttgggcggcaggtgcggtccccacggccggctct

SEQ ID NO: 678423 - DNA, 120 bp, Artificial Sequence
  ENSG00000186469_16 (sequence is synthesized)
acgaggaagagttctggctcttttgtccactgagatggtcttggtttttcacttaacaaattttttaatggaatctttgtttttgttctccatcttgtttgttagagtctctcggccttt

SEQ ID NO: 678424 - DNA, 120 bp, Artificial Sequence
  ENSG00000186469_17 (sequence is synthesized)
atttacaaattccttgcaactagagcgctccttccccaagatatggtagtgagagtaatttttcattgtagctgtagtctccatcagtaacagcaggccctggaagacttgatcaccttt

SEQ ID NO: 678425 - DNA, 120 bp, Artificial Sequence
  ENSG00000186469_18 (sequence is synthesized)
ttctgtgtcattttcagtcaaagagggcctctcttacatcttgtttgctttcaaatccccaaatatcatctccatctcccaattaattttattgtctctttcctctctattcgctttctc

SEQ ID NO: 678426 - DNA, 120 bp, Artificial Sequence
  ENSG00000186469_19 (sequence is synthesized)
ctgttttttttttaaaaaaaaagcatgaaaaaggaagagaaaaagtttgatatgccaaggacagattttgaaacagacttggtaaatgttttccttagctccttcatgggcatgctggtg

SEQ ID NO: 678427 - DNA, 120 bp, Artificial Sequence
  ENSG00000186469_20 (sequence is synthesized)
aaagaataaatacatccaattaaagctcatgctggggtcggggagaagaggatactgaaacatttgtgaaatgtatgaatgcacttctgtaaccagatacttctgttcttctgttcaaat

SEQ ID NO: 678428 - DNA, 120 bp, Artificial Sequence
  ENSG00000186469_21 (sequence is synthesized)
tgtggggtttttgttacagttaggacgcccatgaagatttaggggtgaaaaaaacagcagagtatttattaaactacagcattgtacaattagcttagtaacactatggaataagctaaa

SEQ ID NO: 678429 - DNA, 120 bp, Artificial Sequence
  ENSG00000186469_22 (sequence is synthesized)
acatatcacagtttttacatgggccaaaacatgaattgagtatgtggtcacatgaaaacacggatgaatgaataaaacactctttggtggtgactgaggcatcattagaaggcccagacg

SEQ ID NO: 678430 - DNA, 120 bp, Artificial Sequence
  ENSG00000186469_23 (sequence is synthesized)
atttccactattcacagcatttccttttctcagaaggactctttatatttccatgtaaatctagatctttggagcaattaagatggaattacaatttctagggagcattttaaggaaaat

SEQ ID NO: 678431 - DNA, 120 bp, Artificial Sequence
  ENSG00000186469_24 (sequence is synthesized)
gttttggctttttcataattttatgtcttacagtatggaattataatacgaaaatctttatatgagttttggcttcttggtatttgtacttattcaggggaaaaagtctttcgattactt

SEQ ID NO: 678432 - DNA, 120 bp, Artificial Sequence
  ENSG00000186469_25 (sequence is synthesized)
atgcctctatagagcttaatttcttgagaaattcaacagtcattttcaccagcataattttatcttaaggaataactaataggaaaagtcagcttaattatttaaggccctagtttctac

SEQ ID NO: 678433 - DNA, 120 bp, Artificial Sequence
  ENSG00000186469_26 (sequence is synthesized)
atataatatattcgatagaaatgaaaatctgccgtggaattaactaataagtagtaacaataaacttcatatttagaatgcaaagtctataaagaataattttacatgatcctcaatatc

SEQ ID NO: 678434 - DNA, 120 bp, Artificial Sequence
  ENSG00000186469_27 (sequence is synthesized)
aactccagtttaaaaagtgttatttttaaaacatttgaaaccaagtactgtttaatttcaatcagaagatgcaaatacatactttgatctatgtttgattttgctaataatatttgaagg

SEQ ID NO: 678435 - DNA, 120 bp, Artificial Sequence
  ENSG00000186469_28 (sequence is synthesized)
agattgcctaccaaggacaaaacaataaatttaaaaatcaaacgatttctccatacgctcatagtcacatatggaattttgagaaaataaagcatgctgtctttaggaatttttatactt

SEQ ID NO: 678436 - DNA, 120 bp, Artificial Sequence
  ENSG00000186469_29 (sequence is synthesized)
ctttgtctttcttccttaatatttgcttctagctgctcttggcaatgatgaattgttatgtatgcattaatgttttgcagcccaaaagttgttcacatttttcctatataagatctgtgg

SEQ ID NO: 678437 - DNA, 120 bp, Artificial Sequence
  ENSG00000186469_30 (sequence is synthesized)
agtgtgtgtttcaaagagagaactacagaaatgttaaagcaggaaaacctgaatgtgatgtgcacattttcatcccacatggacaatgtatgtgttttaataaatggaattttcagattc

SEQ ID NO: 678438 - DNA, 120 bp, Artificial Sequence
  ENSG00000186469_31 (sequence is synthesized)
agtgtcttcctccctcagcttgtgcagctgctttcaggataacctcagacacagctatcatttgccaccagatctgccagtgagcctcaggctttaggaactgaagagtgtttctgaaag

SEQ ID NO: 678439 - DNA, 120 bp, Artificial Sequence
  ENSG00000186469_32 (sequence is synthesized)
ggcgtcgccttctcccctcagcacagaggagaggtgacgaatgccacttggtctctgcagcgtctgtagagggaagtctgtaagcgggagtgtcaaccccaattggcagattctctgaca

SEQ ID NO: 678440 - DNA, 120 bp, Artificial Sequence
  ENSG00000186469_33 (sequence is synthesized)
cttcaagtctgcaaaggaaaagcaggtacgactcctttatcttggacagtcatcttgtaatgcaggcctgtgggatacaaaggagaccagggaggttatgtgagctctgccaaatctatt

SEQ ID NO: 678441 - DNA, 120 bp, Artificial Sequence
  ENSG00000186469_34 (sequence is synthesized)
actactccaggggaaaataaaaccaaattcttgggctagtggaattactgtaggagaaatccagtatgattccatgtgaagaaccaatagcacccttaaattaaagccagatctgccagt

SEQ ID NO: 678442 - DNA, 120 bp, Artificial Sequence
  ENSG00000186469_35 (sequence is synthesized)
gagcctcaggctttaggaactgaagaggtcataaaattgctgttatgtatgtgaaaacggccaaatataccatagaccccagattaggatcagtctggtgcctctgaaaatgtgaattga

SEQ ID NO: 678443 - DNA, 120 bp, Artificial Sequence
  ENSG00000186469_36 (sequence is synthesized)
gaagaactgaaagaaaatctttccctggggagactgcagccgaaacacccttctgacgaatgtgctgacctaatctaagcctcaatttccttcaacaagggatgcatcgctcacttccct

SEQ ID NO: 678444 - DNA, 120 bp, Artificial Sequence
  ENSG00000186469_37 (sequence is synthesized)
atgcagagccagcaagagcggatggctgaagaattacacgcagtggaaaagcagcaccgtggagctgggtgattcctgagcccaacctgtgcctctggtctaggggcatgcaggggaaat

SEQ ID NO: 678445 - DNA, 120 bp, Artificial Sequence
  ENSG00000186469_38 (sequence is synthesized)
tgcaacctccaatggaaagagaagcaagagatggtgtaccttcaggcaaagacaagaatcccagagcatagaaaagtcacacagctaattaagtgttggagcccggatttgaacccagtg

SEQ ID NO: 678446 - DNA, 120 bp, Artificial Sequence
  ENSG00000186469_39 (sequence is synthesized)
ttaactctaggtggttgaagatattgaaattgcaatcatcttgtttttgggggaatggagtcattccatattggctcttgagtatgtctgccaccactctgattctagctggaggctgcc

SEQ ID NO: 678447 - DNA, 120 bp, Artificial Sequence
  ENSG00000186469_40 (sequence is synthesized)
cccctggtctacagcgatggttctcagctcatctgtgcgttcccaacacccagagagctctataaaaggaccaattaccgaaccacacccaaaccaattaaattagaatctcctggggta

SEQ ID NO: 678448 - DNA, 120 bp, Artificial Sequence
  ENSG00000186469_41 (sequence is synthesized)
caaaagtgaccattgttaactctaggtggttggtaagtgggtgttccttgttttattctttcacctgtaatgtatgtttatgttttttaaaagttaataagttggaggatgatagaagca

SEQ ID NO: 678449 - DNA, 75 bp, Artificial Sequence
  ENSG00000186469_42 (sequence is synthesized)
ttaaaaagtaactgaggcagtaagctcccttggggccaggagtttgagaccagcacaggaaacatggcaagacct

SEQ ID NO: 678450 - DNA, 120 bp, Artificial Sequence
  ENSG00000186469_43 (sequence is synthesized)
agatcagctccggagaggggaaaaccacgctcctcggaccaagcctcgggagctaagccagatctgccagtgagcctcaggctttaggaactgaagagcctccgggctcctgggacattg

SEQ ID NO: 678451 - DNA, 120 bp, Artificial Sequence
  ENSG00000186469_44 (sequence is synthesized)
ttcagaatttaaagaaaaaatggctgtctttaatgatagttaaaattgattttcatccagaattttttcattttcttctaaaaacctgagttggagagcctttgaggctgctgtcttaac

SEQ ID NO: 678452 - DNA, 120 bp, Artificial Sequence
  ENSG00000186469_45 (sequence is synthesized)
agaatgtatcctcacggcacaaacatgattaataggtggcagacattgagggcataccctgtgcaagataaagcctcagatgaggctgattaggtcagggaaaggtaaaccctgttctta

SEQ ID NO: 678453 - DNA, 120 bp, Artificial Sequence
  ENSG00000186469_46 (sequence is synthesized)
agttcctggcatgtggcgagctcttggtccataagcaaatcttcgtattagtgtgagttcctggtcctccatgaaagaacaaagcttttggcctgtaaaatctaatttctggaaatgaga

SEQ ID NO: 678454 - DNA, 120 bp, Artificial Sequence
  ENSG00000186469_47 (sequence is synthesized)
agcactaaaaagaagaggagtggggacggagtggggaggcacttggaaggctcctgttttgttttgttttgttgacaaattcattcttcatcttagccagcgccatggagtgagtccagc

SEQ ID NO: 678455 - DNA, 120 bp, Artificial Sequence
  ENSG00000186469_48 (sequence is synthesized)
tctctgtgtctggccccgctgtgaaccccctgaggctatccacagttggatatcttcctgttccttccctgccctaccctcttcaaatgcaaacttgggggggctcaagattattccata

SEQ ID NO: 678456 - DNA, 120 bp, Artificial Sequence
  ENSG00000186470_0 (sequence is synthesized)
atttgctttctctttttcctttcttccggatgagaggctaagccataatagaaagaatggagaattattgattgaccgtctttattctgtgggctctgattctccaatgggaataccaag

SEQ ID NO: 678457 - DNA, 120 bp, Artificial Sequence
  ENSG00000186470_1 (sequence is synthesized)
ggatggttttccatactggaacccaaaggtaaagacactcaaggacagacatttttggcagagcatagatgaaaatggcaagttccctggctttccttctgctcaactttcatgtctccc

SEQ ID NO: 678458 - DNA, 120 bp, Artificial Sequence
  ENSG00000186470_2 (sequence is synthesized)
tcctcttggtccagctgctcactccttgctcagctcagttttctgtgcttggaccctctgggcccatcctggccatggtgggtgaagacgctgatctgccctgtcacctgttcccgacca

SEQ ID NO: 678459 - DNA, 120 bp, Artificial Sequence
  ENSG00000186470_3 (sequence is synthesized)
tgagtgcagagaccatggagctgaagtgggtaagttccagcctaaggcaggtggtgaacgtgtatgcagatggaaaggaagtggaagacaggcagagtgcaccgtatcgagggagaactt

SEQ ID NO: 678460 - DNA, 120 bp, Artificial Sequence
  ENSG00000186470_4 (sequence is synthesized)
cgattctgcgggatggcatcactgcagggaaggctgctctccgaatacacaacgtcacagcctctgacagtggaaagtacttgtgttatttccaagatggtgacttctatgaaaaagccc

SEQ ID NO: 678461 - DNA, 120 bp, Artificial Sequence
  ENSG00000186470_5 (sequence is synthesized)
tggtggagctgaaggttgcagcactgggttctaatcttcacgtcgaagtgaagggttatgaggatggagggatccatctggagtgcaggtccaccggctggtacccccaaccccaaatac

SEQ ID NO: 678462 - DNA, 120 bp, Artificial Sequence
  ENSG00000186470_6 (sequence is synthesized)
agtggagcaacgccaagggagagaacatcccagctgtggaagcacctgtggttgcagatggagtgggcctatatgaagtagcagcatctgtgatcatgagaggcggctccggggagggtg

SEQ ID NO: 678463 - DNA, 120 bp, Artificial Sequence
  ENSG00000186470_7 (sequence is synthesized)
tatcctgcatcatcagaaattccctcctcggcctggaaaagacagccagcatttccatcgcagaccccttcttcaggagcgcccagccctggatcgcagccctggcagggaccctgccta

SEQ ID NO: 678464 - DNA, 120 bp, Artificial Sequence
  ENSG00000186470_8 (sequence is synthesized)
tcttgctgctgcttctcgccggagccagttacttcttgtggagacaacagaaggaaataactgctctgtccagtgagatagaaagtgagcaagagatgaaagaaatgggatatgctgcaa

SEQ ID NO: 678465 - DNA, 120 bp, Artificial Sequence
  ENSG00000186470_9 (sequence is synthesized)
cagagcgggaaataagcctaagagagagcctccaggaggaactcaagaggaaaaaaatccagtacttgactcgtggagaggagtcttcgtccgataccaataagtcagcctgatgctcta

SEQ ID NO: 678466 - DNA, 120 bp, Artificial Sequence
  ENSG00000186470_10 (sequence is synthesized)
atggaaaaatggccctcttcaagcctggaaaaatggctgaccccatggacacctcctcaaactctctgcagcagatgtaattctgtatccagacatggcaaatgccatcctccttgtttc

SEQ ID NO: 678467 - DNA, 120 bp, Artificial Sequence
  ENSG00000186470_11 (sequence is synthesized)
tgaggaccagaggagtgtacagcgtgctgaggagccccatgacctaccagacaaccctgagagatttgaatggcgttactgtgtgcttggctgtgaaagcttcatgtcagagagacacta

SEQ ID NO: 678468 - DNA, 120 bp, Artificial Sequence
  ENSG00000186470_12 (sequence is synthesized)
gggacagaaaagagtggcatattggggtatgtagtaagaacgtggagaggaaaaaagtttgggtcaaaatgacaccggagaacggatactggactatgggcctgactgatgggaataagt

SEQ ID NO: 678469 - DNA, 120 bp, Artificial Sequence
  ENSG00000186470_13 (sequence is synthesized)
atcgggctctcactgagcccagaaccaacctgaaacttcctgagcctcctaggaaagtgggggtcatcctggactatgagactggacatatctcgttctacaatgccacggatggatctc

SEQ ID NO: 678470 - DNA, 120 bp, Artificial Sequence
  ENSG00000186470_14 (sequence is synthesized)
atatctacacatttctgcacgcctcttcctctgagcctctgtatcctgtattcagaattttgaccttggagcccactgccctgaccgtttgcccaataccaaaagtagagagttcccccg

SEQ ID NO: 678471 - DNA, 120 bp, Artificial Sequence
  ENSG00000186470_15 (sequence is synthesized)
atcccgacctagtgcctgatcattccctggagataccactgaccccaggcttagctaatgaaagtggggagcctcaggctgaagtaacatctctgcttctccctgcccagcctggagcta

SEQ ID NO: 678472 - DNA, 120 bp, Artificial Sequence
  ENSG00000186470_16 (sequence is synthesized)
agggtctcaccctccacaacagccagtcagaaccataaagctacaggcacacactgaagcactttactgatattcattcaattattccataggacagttgtttgagtttggtgccacctt

SEQ ID NO: 678473 - DNA, 120 bp, Artificial Sequence
  ENSG00000186470_17 (sequence is synthesized)
attggcccctttatacagataaggaaactggggtgtagaaaagtgtattgactttacaaagcagacaggaatagtgaacaacagagctgggatctgaacaacaatgactaacattaatgg

SEQ ID NO: 678474 - DNA, 120 bp, Artificial Sequence
  ENSG00000186470_18 (sequence is synthesized)
agaatttaaaacgttctgagtgctgtgttatgagctttggtgggtgtcactcctttaatcctcacaacaccctgtcaggtagtctcatttggcaagtatggaagcagaggcagggcaaca

SEQ ID NO: 678475 - DNA, 120 bp, Artificial Sequence
  ENSG00000186470_19 (sequence is synthesized)
ttaagtagcttacataactcacacggtaatttgtgcagttgggagatgttcagcttcagtccctggccaattgcccgttcttttccagcctgatttttcctgcatgggaagagcccacat

SEQ ID NO: 678476 - DNA, 120 bp, Artificial Sequence
  ENSG00000186470_20 (sequence is synthesized)
gtagccctgaggttcccttcccaggacagctccaggatcgagatcactgtgagtggttgtggagttaagacccctatggactccttcccagctgattatcagagccttagacccagcact

SEQ ID NO: 678477 - DNA, 120 bp, Artificial Sequence
  ENSG00000186470_21 (sequence is synthesized)
ccttggattggctctgcagagtgtcttggttgagagaataacgttgcagttcccacagggcatgtgactttgaaagagactagaggccacactcagttaataatggggcacagatgtgtt

SEQ ID NO: 678478 - DNA, 120 bp, Artificial Sequence
  ENSG00000186470_22 (sequence is synthesized)
cccacccaacaaatgtgataagtgatcgtgcagccagagccagccttccttcagtcaaggtttccaggcagagcaaataccctagagattctctgtaatattggtaatttggatgaagga

SEQ ID NO: 678479 - DNA, 120 bp, Artificial Sequence
  ENSG00000186470_23 (sequence is synthesized)
agctagaagaattacagggatgtttttaatcccactatggactcagtctcctggaaaaggatctgtccactcctggtcattggtggatgttaaacccatattcctttcaactgctgcctg

SEQ ID NO: 678480 - DNA, 120 bp, Artificial Sequence
  ENSG00000186470_24 (sequence is synthesized)
ctagggaaaactgctcctcattatcatcactattattgctcaccactgtatcccctctactgggcaagtgcttgtcaagttctagttgttcaataaatttgttaataatgctgactcttc

SEQ ID NO: 678481 - DNA, 120 bp, Artificial Sequence
  ENSG00000186470_25 (sequence is synthesized)
gtatggaaaaatagactgcagaaaaggggaactcatttagctcacgagtggtcgagtgaagattgaaaattaacctctgagggccagcacagcagctcatgcctgtaatcctagcacttt

SEQ ID NO: 678482 - DNA, 120 bp, Artificial Sequence
  ENSG00000186470_26 (sequence is synthesized)
aaaaaaaaaaaagaaaagaaaattaacctctgagtataaagcatcagtgggcagaatcaatgtggggagggaaacaacaaaaatgtagaaagaggatccttgttgcttcttggggccgca

SEQ ID NO: 678483 - DNA, 120 bp, Artificial Sequence
  ENSG00000186470_27 (sequence is synthesized)
tggtcactagacccctggggctttcaccaatgacattgatgagagaatcacattcagggcaggctagggacacggggttctggaaggacctcctcagcatggcccaagccttgcatgctg

SEQ ID NO: 678484 - DNA, 120 bp, Artificial Sequence
  ENSG00000186470_28 (sequence is synthesized)
atagaggacagattcctggggtccagaagagggtggagaaagctgaaggctggagagtgaatctagggcatataaggccccacacagagcccagcacagagacggccttgcagctatcag

SEQ ID NO: 678485 - DNA, 120 bp, Artificial Sequence
  ENSG00000186470_29 (sequence is synthesized)
gaagatgaggagcttccttcatggcctgctgtgggctgagtaaataatatgattgccttctacagcgctagagattcatatgtttatccccatttttcaggtgaggaaatgcttcagatg

SEQ ID NO: 678486 - DNA, 120 bp, Artificial Sequence
  ENSG00000186470_30 (sequence is synthesized)
ggatattatttttacagatggttttccatactggaacccaaaggtaaagacactcaaggacagacatttttggcagagatgaaaatggcaagttccctggctttccttctgctcaacttt

SEQ ID NO: 678487 - DNA, 120 bp, Artificial Sequence
  ENSG00000186470_31 (sequence is synthesized)
ggattgtgttcccctctaggttctctgtatctcgccttccctgtctgagaaggacccttcctctcatgaccccaactccaaaaccctctgatggagcttcccccttgtgctgacagctca

SEQ ID NO: 678488 - DNA, 120 bp, Artificial Sequence
  ENSG00000186470_32 (sequence is synthesized)
ggtaaagacactcaaggacagacatttttggcagaggtaagatcttcttcggtcaccatatttgagttagccctggggaagtggacatttccatgcagaatcctaaagcttcttccaggc

SEQ ID NO: 678489 - DNA, 120 bp, Artificial Sequence
  ENSG00000186470_33 (sequence is synthesized)
attattttccagcccataagtcatagcccagggttgaaaagtggtcttggatccctttacccagaaaaagaaaacaagtgtggctctttggagaaaccacccagtgctttttctctctag

SEQ ID NO: 678490 - DNA, 120 bp, Artificial Sequence
  ENSG00000186470_34 (sequence is synthesized)
tactgtttctcatgatggttttccatactggaacccaaaggtaaagacactcaaggacagacatttttggcagagatggaaaggaagtggaagacaggcagagtgcaccgtatcgaggga

SEQ ID NO: 678491 - DNA, 120 bp, Artificial Sequence
  ENSG00000186470_35 (sequence is synthesized)
aagacagccagcatttccatcgcagagagcctccaggaggaactcaagaggaaaaaaatccagtacttgactcgtggagaggagtcttcgtccgataccaataagtcagcctgatgctct

SEQ ID NO: 678492 - DNA, 120 bp, Artificial Sequence
  ENSG00000186470_36 (sequence is synthesized)
cagcatttccatcgcagagagcctccaggaggaactcagtaagttaccattcccccagagatccagacatgtcttcctatcctcgctttgagcaccttgatgactcttccctgttcattc

SEQ ID NO: 678493 - DNA, 120 bp, Artificial Sequence
  ENSG00000186470_37 (sequence is synthesized)
cattgcagagaggaaaaaaatccagtacttgactcgtggagaggagtcttcgtccgataccaataagtcagcctgatgctctaatggaaaaatggccctcttcaagcctggtgagtaaat

SEQ ID NO: 678494 - DNA, 120 bp, Artificial Sequence
  ENSG00000186470_38 (sequence is synthesized)
tcaaggacagacatttttggcagagctcagttttctgtgcttggaccctctgggcccatcctggccatgatggaaaggaagtggaagacaggcagagtgcaccgtatcgagggagaactt

SEQ ID NO: 678495 - DNA, 120 bp, Artificial Sequence
  ENSG00000186470_39 (sequence is synthesized)
tgctcactccttgctcaggtagggaatgattccatgattccacatttatgtttctgaagcagacaattatctcaattacctaattaagcagacaattacctaaatgccctcttagaacct

SEQ ID NO: 678496 - DNA, 120 bp, Artificial Sequence
  ENSG00000186470_40 (sequence is synthesized)
ataagtaatagtagtagcttgtagtgagggtttaccaaagtcttatctatagtcctctgagactttagggagagaatccttatttaacctcatgagatagattccccacccccgacctga

SEQ ID NO: 678497 - DNA, 120 bp, Artificial Sequence
  ENSG00000186470_41 (sequence is synthesized)
gctgagcagctaaagcttggggtgctgcaggctggggaggctgagcgcaccagcgcccatgacctacagctctccccttcgcagaccccttcttcaggagcgcccagccctggatcgcag

SEQ ID NO: 678498 - DNA, 120 bp, Artificial Sequence
  ENSG00000186470_42 (sequence is synthesized)
tctaaaaagcactgaggaatatccaggggtacacttcaaaaggaagagggaagagaaggatgaggtgcattttctatggcaggaaacttacttgttgtttcccataatctagaggctgtt

SEQ ID NO: 678499 - DNA, 120 bp, Artificial Sequence
  ENSG00000186470_43 (sequence is synthesized)
gaaaggaaaacaagaatggaagatttaagaaataagaaaatcagaaaagagagagggagggagaaaagtgtgtctaataaagaggagtagctacagtggctcagttggtacagatagatc

SEQ ID NO: 678500 - DNA, 120 bp, Artificial Sequence
  ENSG00000186470_44 (sequence is synthesized)
ataactgctttcaaaaactagtccctgaaattgctcattaaatttcccaaattctttttagagcaaggtacgaaatgatacagattgagaaggatgaatcttgtactcctaggcatacac

SEQ ID NO: 678501 - DNA, 120 bp, Artificial Sequence
  ENSG00000186470_45 (sequence is synthesized)
atatagacatggtgacacctatgcccaggtacacattcaaaacagatgagctggaccccattgggaaggaactctcacagtgcctgccctgccactagcgttcaaccgatgttcccagac

SEQ ID NO: 678502 - DNA, 120 bp, Artificial Sequence
  ENSG00000186470_46 (sequence is synthesized)
tgccactagcgttcaaccgatgttcccagacttgatattaagaagaggtgaagaaagaattgtacctgaagatggagaccatggggaagggtgggatggtaaaaaaaaaaaaaaaaaaaa

SEQ ID NO: 678503 - DNA, 120 bp, Artificial Sequence
  ENSG00000186470_47 (sequence is synthesized)
aggggaaggggccaacacagaaaaggcagagttctggtgacacctctacctttctttcattgtaggtggagaggagtcttcgtccgataccaataagtcagcctgatgctctgtaagttt

SEQ ID NO: 678504 - DNA, 120 bp, Artificial Sequence
  ENSG00000186470_48 (sequence is synthesized)
gctgggtcacatgccctgaatatttcaactttttctccactgtgacccgtggatgttctcagctggattaattagatctaatctaaagactcaatttctgtgtggtgggggttcacctcc

SEQ ID NO: 678505 - DNA, 120 bp, Artificial Sequence
  ENSG00000186470_49 (sequence is synthesized)
gcttttctggagcctctgagaaactcctgatcctgcacacccccttgtaaagcctggccatgcatcctgcaccccccatgacacagggagccaagcctgacatttttgagaaggtgccac

SEQ ID NO: 678506 - DNA, 120 bp, Artificial Sequence
  ENSG00000186470_50 (sequence is synthesized)
ctctgatccatcagagctgtagaggagggaagctggaccctggaagagactctaaagaaaaggagagaaaacatgtagtgagaggagaatggagtgggaaaagtacaaaaatactgacct

SEQ ID NO: 678507 - DNA, 120 bp, Artificial Sequence
  ENSG00000186470_51 (sequence is synthesized)
ttttcttatctgtgtctccttcctttcagaatggaaaaatggccctcttcaagcctggtgagtaaatcactgcatgttccctggaccaacaacctgagggactatattcctttttccttt

SEQ ID NO: 678508 - DNA, 120 bp, Artificial Sequence
  ENSG00000186470_52 (sequence is synthesized)
tttcttctccaactcttgtgatttggagcagaaaagttcccttgacttccttcgtgggtaggaagacgcataaagggtggaggtgaagggaaggagacacacactgagtaatactgcagg

SEQ ID NO: 678509 - DNA, 120 bp, Artificial Sequence
  ENSG00000186470_53 (sequence is synthesized)
gagagtgaggatggaaatgccaaggagaggaggtgatgcctgcccaaagaactttgtccttcccaggcttctcatgccacctactgcctgtatctcctcaaaggatttaatgcttccaag

SEQ ID NO: 678510 - DNA, 120 bp, Artificial Sequence
  ENSG00000186470_54 (sequence is synthesized)
ctttggcctccacatttttagatgatgattgcaatctgtttttcatgggggttgaggtgaagactgaaggaataatgaacatgcttggcagaaacctagcaagaaatagatggtgagctc

SEQ ID NO: 678511 - DNA, 120 bp, Artificial Sequence
  ENSG00000186470_55 (sequence is synthesized)
aaactgggtagttggacaaggtttccagaaagaagggttaagggaaagcaacaaggaaaagtgcagtgcccccatggttcccaacagtggggagctgtctccacccctagcctgggaggg

SEQ ID NO: 678512 - DNA, 120 bp, Artificial Sequence
  ENSG00000186470_56 (sequence is synthesized)
ctaaaaaggggaggcaattactggaacccagagaaagaggtagcttaacgagggagcttcctgagaagagtcctcgggccttgttagagcaccaccagctgctgctggcagggaggaagc

SEQ ID NO: 678513 - DNA, 120 bp, Artificial Sequence
  ENSG00000186471_0 (sequence is synthesized)
atagggatgcccaatacataccagctgtgaggcttatcaccactgttcttcctggcatggccctgtaagctcatcttcggctgaagagaagctagcacttgcaaacattccatctggcaa

SEQ ID NO: 678514 - DNA, 120 bp, Artificial Sequence
  ENSG00000186471_1 (sequence is synthesized)
tctgagagaagctactgagagaatcctgagacatccccagccacctaccactgctcctgttccaagcaaagaagatctgctcactccggaaaaagaaaatgagtgagactcaaaattcaa

SEQ ID NO: 678515 - DNA, 120 bp, Artificial Sequence
  ENSG00000186471_2 (sequence is synthesized)
caagccagaaagcaatggatgaggataacaaagccgcaagccaaacaatgccgaatacacaagacaagaactacgaggatgaattgactcaagtagctctagctctggttgaggatgtca

SEQ ID NO: 678516 - DNA, 120 bp, Artificial Sequence
  ENSG00000186471_3 (sequence is synthesized)
tggaaaagggtcttaaacaaattgacgaatatttttcgaagtgtgtttctaaaaaatgctgggcacatggcgtagagtttgtagagaggaaagacttaattcacagcttcctctacatct

SEQ ID NO: 678517 - DNA, 120 bp, Artificial Sequence
  ENSG00000186471_4 (sequence is synthesized)
actatgtacactggagtatctcaactgctgacctacccgtagcacgaatctctgctggtacctacttcaccatgaaggtctccaaaaccaaaccaccggatgcacccattgttgtttctt

SEQ ID NO: 678518 - DNA, 120 bp, Artificial Sequence
  ENSG00000186471_5 (sequence is synthesized)
atgtaggtgaccaccaagcattagttcacagaccaggaatggttcgctttcgagaaaactggcagaagaatcttactgatgccaaatatagtttcatggagtcattccccttcttattca

SEQ ID NO: 678519 - DNA, 120 bp, Artificial Sequence
  ENSG00000186471_6 (sequence is synthesized)
atcgtgtctgatacttacaggatgtcttaggattgtttttctcatcaggatacattaaaaatacaatacagcacgtcaaaccacagaatatttattgagtaataaacttgtggcacacaa

SEQ ID NO: 678520 - DNA, 120 bp, Artificial Sequence
  ENSG00000186471_7 (sequence is synthesized)
gtgagctgagattgcaccactgcacttacacctgggagacagagcaagaagactccatcttgaaaaaaacaaaaagagttggtatgactggtctgggctaacagttgtccttctcttttt

SEQ ID NO: 678521 - DNA, 120 bp, Artificial Sequence
  ENSG00000186471_8 (sequence is synthesized)
cacggtgaattcactgtggaaaagggtcttaaacaaattgacgaatatttttcggtaagttaggccgaccactccagcatggtacaccggtgtgaagaacaataaagagactctcagcag

SEQ ID NO: 678522 - DNA, 120 bp, Artificial Sequence
  ENSG00000186472_0 (sequence is synthesized)
agatctgcttctccccggctcggggcgccgaggcggcgtccgggaggtgtcttctgcaaaggttgcctggcgctgtccaacatggaggaggcaccggcagcgggcgttacctgcgagcgg

SEQ ID NO: 678523 - DNA, 120 bp, Artificial Sequence
  ENSG00000186472_1 (sequence is synthesized)
gactaacccctgcctggcgttccgggcggcagtgcctggtccagagtccagggactcggctgcctgcacgccccgaggcggaccccggctctgactgctcccctggccgcgggcttctcg

SEQ ID NO: 678524 - DNA, 120 bp, Artificial Sequence
  ENSG00000186472_2 (sequence is synthesized)
actgggacgcggcgcgaggagggagcgcggcggccccgagtctccctgagccatgggcaacgaggcgagcttggaaggggaagggctccccgaagggctggcggcggccgcagcggctgg

SEQ ID NO: 678525 - DNA, 120 bp, Artificial Sequence
  ENSG00000186472_3 (sequence is synthesized)
aggaggagctagcggggcggggagcccctctcacaccgcgatcccggccggcatggaggcggatttgagccagctgagcgaagaggagaggagacagatcgccgctgtcatgtcaagggc

SEQ ID NO: 678526 - DNA, 120 bp, Artificial Sequence
  ENSG00000186472_4 (sequence is synthesized)
gcaggggctgcccaagggaagcgtccccccggccgctgcggagtcgccttccatgcacaggaaacaagagttggatagtagtcatcctccaaagcaatcaggaagacccccggaccctgg

SEQ ID NO: 678527 - DNA, 120 bp, Artificial Sequence
  ENSG00000186472_5 (sequence is synthesized)
gcgtccagctcaacctggtctcagtaaaagtagaactacagacactttcaggtcagagcagaaattgcctgggaggagtccttccactattagcttgaaagaatcaaagtccagaactga

SEQ ID NO: 678528 - DNA, 120 bp, Artificial Sequence
  ENSG00000186472_6 (sequence is synthesized)
tttaaaggaagagcacaagtctagtatgatgcctggcttcctctcagaggttaacgctttaagtgctgtttcctctgttgtaaataaattcaacccttttgatttgatatcagactctga

SEQ ID NO: 678529 - DNA, 120 bp, Artificial Sequence
  ENSG00000186472_7 (sequence is synthesized)
ggcatcccaggaagaaaccaccaagaaacaaaaagtggttcagaaggagcaaggaaaacctgaaggaatcataaaacctcctttacaacaacagccacccaagccgattcctaagcagca

SEQ ID NO: 678530 - DNA, 120 bp, Artificial Sequence
  ENSG00000186472_8 (sequence is synthesized)
aggacctggtagggatccgcttcagcaggatggcactcccaaatcaatatcttctcaacaaccagaaaaaattaaatcacaacctccaggtacaggaaagccaattcagggtcctaccca

SEQ ID NO: 678531 - DNA, 120 bp, Artificial Sequence
  ENSG00000186472_9 (sequence is synthesized)
gactcctcagacagaccatgcaaaattgccacttcaacgagatgcatccaggcctcagactaaacaggcagacatagtaaggggagaatcagttaaaccctcactgccaagcccatccaa

SEQ ID NO: 678532 - DNA, 120 bp, Artificial Sequence
  ENSG00000186472_10 (sequence is synthesized)
accacctattcagcaaccaactcctggaaaacctccagcacagcagcctggacatgaaaaatcacagcctgggcctgcaaagcccccagctcagccctcagggctaacaaagccattggc

SEQ ID NO: 678533 - DNA, 120 bp, Artificial Sequence
  ENSG00000186472_11 (sequence is synthesized)
tcaacaaccagggacagtgaaacccccagtccagccaccagggacaacaaagcctccagctcagcctcttggtcctgctaagcctccagctcagcagactgggtcagagaagccttcatc

SEQ ID NO: 678534 - DNA, 120 bp, Artificial Sequence
  ENSG00000186472_12 (sequence is synthesized)
ggagcagcctgggccaaaggctttagctcagcctcctggagttggaaagactccagctcaacagccagggccagcaaagcctccaacccagcaggtggggacaccaaaacccctagctca

SEQ ID NO: 678535 - DNA, 120 bp, Artificial Sequence
  ENSG00000186472_13 (sequence is synthesized)
acaacctgggctacagtctccagctaaggcacctgggcctacaaagactccagttcagcagcctgggccaggaaagattccagctcaacaggcaggacccggaaagacttctgcccagca

SEQ ID NO: 678536 - DNA, 120 bp, Artificial Sequence
  ENSG00000186472_14 (sequence is synthesized)
gactggcccaacaaagcctccttcacaactgcctggcccagcaaagcccccacctcaacagcctggcccagcaaagcccccacctcaacagcctggctcagcaaagcccccatctcaaca

SEQ ID NO: 678537 - DNA, 120 bp, Artificial Sequence
  ENSG00000186472_15 (sequence is synthesized)
gcctggctcaacaaaacccccacctcaacagcctggcccagcaaagccctcacctcaacagcctggctcaacaaaacccccatctcaacagcctggctcagcaaaaccctcagctcaaca

SEQ ID NO: 678538 - DNA, 120 bp, Artificial Sequence
  ENSG00000186472_16 (sequence is synthesized)
gcctagcccagcaaagccctcggctcagcaatctacaaaaccagtaagccaaacaggatctggaaaacctctgcagccaccaacagtgtctccatctgcaaaacagcctccttcacaagg

SEQ ID NO: 678539 - DNA, 120 bp, Artificial Sequence
  ENSG00000186472_17 (sequence is synthesized)
cctccctaaaaccatctgtcctctttgcaataccactgaacttctgttgcatgttccagaaaaggccaattttaacacatgcactgagtgtcaaaccactgtctgtagtctctgtggttt

SEQ ID NO: 678540 - DNA, 120 bp, Artificial Sequence
  ENSG00000186472_18 (sequence is synthesized)
taatcccaatcctcatttaacggaggtaaaagagtggctctgtttgaactgtcaaatgaaaagagctctaggcggggatctggctccagttccgtcatcaccccagcccaaactgaagac

SEQ ID NO: 678541 - DNA, 120 bp, Artificial Sequence
  ENSG00000186472_19 (sequence is synthesized)
tgcacctgttaccactacatcagcagtgagcaaatcatccccacagccacagcagacttccccaaagaaggatgctgcaccaaaacaggatctctccaaggcacctgagcctaaaaagcc

SEQ ID NO: 678542 - DNA, 120 bp, Artificial Sequence
  ENSG00000186472_20 (sequence is synthesized)
accaccactagtgaaacaaccaacccttcatggctctccttcagccaaggccaagcagccccctgaggcagattctttgtccaagccagcccctcccaaagaaccttctgtcccatctga

SEQ ID NO: 678543 - DNA, 120 bp, Artificial Sequence
  ENSG00000186472_21 (sequence is synthesized)
gcaggacaaggcccctgttgctgatgataaaccaaagcagcccaagatggtaaagccaaccactgaccttgtatcttcatcatcagcaacaacaaaacctgatattccaagctccaaagt

SEQ ID NO: 678544 - DNA, 120 bp, Artificial Sequence
  ENSG00000186472_22 (sequence is synthesized)
acagtcacaagctgaagagaaaacaacccctcctctaaaaacagactctgccaaaccctcacagagttttccaccaacaggggaaaaagtcagcccatttgattctaaagccatacctcg

SEQ ID NO: 678545 - DNA, 120 bp, Artificial Sequence
  ENSG00000186472_23 (sequence is synthesized)
acctgcatcagattcaaaaattatttcacatcctggtcccagttcagagagcaaaggtcaaaaacaagttgaccccgtacaaaagaaggaagaacccaagaaagcacaaaccaaaatgag

SEQ ID NO: 678546 - DNA, 120 bp, Artificial Sequence
  ENSG00000186472_24 (sequence is synthesized)
tcctaaaccagatgccaagccaatgccaaaagggtcaccaacaccccctggcccacgacctaccgctggccaaactgtccccacacctcaacagtccccaaagcctcaggagcagtcaag

SEQ ID NO: 678547 - DNA, 120 bp, Artificial Sequence
  ENSG00000186472_25 (sequence is synthesized)
gcgtttcagtctgaatctgggaagtattactgatgcccccaaatcacagcctacaactcctcaagagaccgtgactgggaaactctttgggtttggagcatcaatcttcagccaggcatc

SEQ ID NO: 678548 - DNA, 120 bp, Artificial Sequence
  ENSG00000186472_26 (sequence is synthesized)
aaatttaatttccactgcaggccaacctggacctcattcacaaagtggaccaggggccccaatgaaacaagcccctgccccttcacagccacctacttcacaagggccacccaaatccac

SEQ ID NO: 678549 - DNA, 120 bp, Artificial Sequence
  ENSG00000186472_27 (sequence is synthesized)
aggtcaagcaccaccagcacctgcaaaaagtatacctgtgaaaaaggaaacaaaagccccagcagctgaaaaattagagcccaaagctgaacaagctccaacagtaaaaagaacagaaac

SEQ ID NO: 678550 - DNA, 120 bp, Artificial Sequence
  ENSG00000186472_28 (sequence is synthesized)
agaaaaaaagccaccacctattaaggatagcaaatctttaacagctgagcctcaaaaggctgtccttcccacaaaactggagaaatcgcccaaaccagaatcaacctgtcctctctgcaa

SEQ ID NO: 678551 - DNA, 120 bp, Artificial Sequence
  ENSG00000186472_29 (sequence is synthesized)
aactgaactcaacataggttctaaggatcctcctaacttcaatacttgcactgaatgcaagaatcaagtgtgtaatctctgtggatttaaccctacaccacatttgactgagattcaaga

SEQ ID NO: 678552 - DNA, 120 bp, Artificial Sequence
  ENSG00000186472_30 (sequence is synthesized)
atggctttgtttaaattgccaaacccagagagcaatatcaggacagcttggagacatacgcaaaatgccacctgcaccatcaggacccaaagcatctcctatgcctgttcctacagaatc

SEQ ID NO: 678553 - DNA, 120 bp, Artificial Sequence
  ENSG00000186472_31 (sequence is synthesized)
atcatctcagaaaacagcagtgcctccccaagtaaaattagtgaaaaagcaagaacaagaagtaaaaacggaagctgaaaaagtcattctggaaaaagtaaaggaaacactatcaatgga

SEQ ID NO: 678554 - DNA, 120 bp, Artificial Sequence
  ENSG00000186472_32 (sequence is synthesized)
aaaaattcctcctatggtaaccacagatcaaaaacaagaagagagtaaactagagaaagacaaagcttcagctcttcaagaaaaaaagccactccctgaagaaaaaaaactaatccctga

SEQ ID NO: 678555 - DNA, 120 bp, Artificial Sequence
  ENSG00000186472_33 (sequence is synthesized)
agaagaaaagatacgttctgaagaaaaaaagccactcctagaagaaaaaaagccaacccctgaagacaaaaagctactcccagaggcaaaaacatcagccccagaagaacagaaacatga

SEQ ID NO: 678556 - DNA, 120 bp, Artificial Sequence
  ENSG00000186472_34 (sequence is synthesized)
cttacttaaatctcaagtacaaattgctgaagaaaagcttgaaggcagagtggctccaaagacagtgcaagaagggaaacaaccacagaccaagatggaaggtttaccatctggcacacc

SEQ ID NO: 678557 - DNA, 120 bp, Artificial Sequence
  ENSG00000186472_35 (sequence is synthesized)
tcagagtttacctaaagaagatgataagacaaccaaaacaataaaagaacagccacagccaccatgcacagcaaaacctgatcaggtggaacctgggaaagaaaaaacagaaaaggaaga

SEQ ID NO: 678558 - DNA, 120 bp, Artificial Sequence
  ENSG00000186472_36 (sequence is synthesized)
tgacaaatcagacacctcaagttctcagcagcctaaaagcccccaaggtctgagcgacacgggatattcttccgatggaatatcaagctcacttggtgaaattccaagtcttattccaac

SEQ ID NO: 678559 - DNA, 120 bp, Artificial Sequence
  ENSG00000186472_37 (sequence is synthesized)
tgatgaaaaggatattctcaagggactcaaaaaggactctttttcacaagaaagcagcccttccagcccctcagatttggctaagttagaaagtacagtcctatctattttggaagctca

SEQ ID NO: 678560 - DNA, 120 bp, Artificial Sequence
  ENSG00000186472_38 (sequence is synthesized)
agcaagtacacttgctgatgaaaagtcagaaaagaaaacacaaccccatgaagtttctcctgaacagcctaaagaccaagagaaaactcagagtttatctgaaaccttggaaattactat

SEQ ID NO: 678561 - DNA, 120 bp, Artificial Sequence
  ENSG00000186472_39 (sequence is synthesized)
ttcagaagaggagatcaaagagagtcaagaagaaaggaaagacacttttaaaaaagatagccaacaagatattccttccagcaaggaccataaagagaagtctgagtttgttgatgacat

SEQ ID NO: 678562 - DNA, 120 bp, Artificial Sequence
  ENSG00000186472_40 (sequence is synthesized)
aactactagaagagagccttatgattcagttgaagagagtagtgaaagtgaaaactcacctgttccacaaagaaaacgaagaactagtgttggctcatcaagcagtgatgagtataaaca

SEQ ID NO: 678563 - DNA, 120 bp, Artificial Sequence
  ENSG00000186472_41 (sequence is synthesized)
ggaagacagccaaggatcaggggaagaggaggacttcattcgaaaacaaatcatagaaatgagtgctgatgaagatgcttcaggttctgaagatgatgagttcatcagaaaccagctcaa

SEQ ID NO: 678564 - DNA, 120 bp, Artificial Sequence
  ENSG00000186472_42 (sequence is synthesized)
agagattagtagcagtactgagagccagaagaaggaagaaacaaagggaaaaggcaaaataacagcagggaaacacagacgactgactcgaaaaagtagcacaagcattgatgaagatgc

SEQ ID NO: 678565 - DNA, 120 bp, Artificial Sequence
  ENSG00000186472_43 (sequence is synthesized)
aggaagacgtcactcatggcatgatgaagacgatgaagcatttgatgaaagtcctgaacttaaatacagagaaactaaaagtcaggaaagtgaagaacttgtagttactggaggaggagg

SEQ ID NO: 678566 - DNA, 120 bp, Artificial Sequence
  ENSG00000186472_44 (sequence is synthesized)
gctacgccgatttaaaacaattgagctcaacagtacaatagcagataaatattctgcagagtcatcacagaaaaaaacaagtttgtattttgacgaagagccagaattggaaatggaaag

SEQ ID NO: 678567 - DNA, 120 bp, Artificial Sequence
  ENSG00000186472_45 (sequence is synthesized)
cctgacagactcacctgaagataggtcaaggggagagggatcttcgagtctgcatgcttccagcttcactcctggtacatcccctacatcagtatcatcacttgatgaggacagtgacag

SEQ ID NO: 678568 - DNA, 120 bp, Artificial Sequence
  ENSG00000186472_46 (sequence is synthesized)
tagcccgagtcacaaaaaaggagagagcaaacagcaacgcaaagctcggcacagaccacatggccctcttttgcctactattgaagattcttcagaggaagaagaattgagagaggaaga

SEQ ID NO: 678569 - DNA, 120 bp, Artificial Sequence
  ENSG00000186472_47 (sequence is synthesized)
agaattattaaaggagcaagaaaagcagagggaaatagaacagcaacaaagaaagagttctagtaaaaaatcaaagaaagacaaagatgaacttcgagctcagagaagaagggaaaggcc

SEQ ID NO: 678570 - DNA, 120 bp, Artificial Sequence
  ENSG00000186472_48 (sequence is synthesized)
aaagacaccacctagtaatctctctcccattgaagatgcatctccgacagaagagttacgtcaggctgcagaaatggaggagctccatagatcttcttgttctgaatattcacctagcat

SEQ ID NO: 678571 - DNA, 120 bp, Artificial Sequence
  ENSG00000186472_49 (sequence is synthesized)
agagtcagacccagaaggttttgaaataagcccggaaaaaataatagaagtacaaaaagtttataaattgcccacagctgtttcattatactcaccaacagatgagcaatctattatgca

SEQ ID NO: 678572 - DNA, 120 bp, Artificial Sequence
  ENSG00000186472_50 (sequence is synthesized)
gaaagaaggtagccaaaaggcgttaaaaagtgctgaggagatgtatgaagaaatgatgcataaaacacacaaatacaaagcttttccagctgcaaatgaacgagatgaagtgtttgaaaa

SEQ ID NO: 678573 - DNA, 120 bp, Artificial Sequence
  ENSG00000186472_51 (sequence is synthesized)
agagcctttgtatggtgggatgctaatagaggattatatttatgaatctttagtagaagacacgtacaatggatcggtagatggcagtctgctaacaaggcaagaagaagaaaatggatt

SEQ ID NO: 678574 - DNA, 120 bp, Artificial Sequence
  ENSG00000186472_52 (sequence is synthesized)
tatgcagcagaaaggaagagagcaaaagataagactttcagaacagatttatgaagatcctatgcagaaaattacagacctccagaaagagttttatgagttagaaagcttacattctgt

SEQ ID NO: 678575 - DNA, 120 bp, Artificial Sequence
  ENSG00000186472_53 (sequence is synthesized)
tgtgcctcaggaagatattgtttcaagctcttttatcatcccagaaagccatgagatagtggacctgggtactatggtaacttctacagaagaagaaaggaaactactagatgctgatgc

SEQ ID NO: 678576 - DNA, 120 bp, Artificial Sequence
  ENSG00000186472_54 (sequence is synthesized)
tgcctatgaagaacttatgaagaggcaacagatgcaattaacacctggatctagcccaacccaggcccccattggtgaggatatgacagagtccaccatggactttgacagaatgccaga

SEQ ID NO: 678577 - DNA, 120 bp, Artificial Sequence
  ENSG00000186472_55 (sequence is synthesized)
tgcctctttgacatcaagtgttctctcaggagcgtctcttacagattcgaccagcagtgcaacactctctatcccagatgttaaaataacccaacatttttcaacagaagaaattgagga

SEQ ID NO: 678578 - DNA, 120 bp, Artificial Sequence
  ENSG00000186472_56 (sequence is synthesized)
tgaatatgtaaccgattatacaagagaaattcaagagataattgcccatgaatcgctgattttgacctactcggagccttcagaaagtgctacatctgtcccaccctctgacacaccttc

SEQ ID NO: 678579 - DNA, 120 bp, Artificial Sequence
  ENSG00000186472_57 (sequence is synthesized)
tctcacatcatctgtttcttcggtctgtaccacagatagctcttcacccattactaccctggatagcataaccacagtttatacagagccagtggacatgataactaaatttgaagattc

SEQ ID NO: 678580 - DNA, 120 bp, Artificial Sequence
  ENSG00000186472_58 (sequence is synthesized)
tgaggaaatttcttcatcaacttattttccaggcagcattatagactatccagaagaaataagtgtatctttagatcggactgccccaccagatggtagagctagtgctgatcatattgt

SEQ ID NO: 678581 - DNA, 120 bp, Artificial Sequence
  ENSG00000186472_59 (sequence is synthesized)
tatttccttatctgatatggcatcttctatcatagaatctgtagtacctaaacctgaagggccagttgctgacactgtttctactgacttacttatatctgaaaaggacccagtgaagaa

SEQ ID NO: 678582 - DNA, 120 bp, Artificial Sequence
  ENSG00000186472_60 (sequence is synthesized)
agccaagaaggaaactgggaatggaatcattctggaagttttggaagcttacagagataaaaaggagttggaggccgaacgaacaaaaagtagcttatccgaaaccgtgtttgatcaccc

SEQ ID NO: 678583 - DNA, 120 bp, Artificial Sequence
  ENSG00000186472_61 (sequence is synthesized)
accttcttctgtaatagcccttccaatgaaagagcagctttcaactacatactttacatctggagagacctttggtcaggaaaaacctgcatctcagttaccatctggcagtccttctgt

SEQ ID NO: 678584 - DNA, 120 bp, Artificial Sequence
  ENSG00000186472_62 (sequence is synthesized)
ttcctctcttccagctaaacctcgcccattctttagaagttcttctttggatatatcagctcaacctcctccccctcctccccctccccctcctcctcctcctccaccaccaccccctcc

SEQ ID NO: 678585 - DNA, 120 bp, Artificial Sequence
  ENSG00000186472_63 (sequence is synthesized)
tcccccaccacttcctccaccaacttcacctaaaccaactattcttcctaaaaaaaagttaacagttgcatctccagtgactacagctacacctctgtttgatgctgttactactctaga

SEQ ID NO: 678586 - DNA, 120 bp, Artificial Sequence
  ENSG00000186472_64 (sequence is synthesized)
gaccacagctgttctgagaagtaatggattacctgttacaagaatatgtactactgcacctcctcctgttcctcctaagccatcttcaattccatctggacttgtatttacccacaggcc

SEQ ID NO: 678587 - DNA, 120 bp, Artificial Sequence
  ENSG00000186472_65 (sequence is synthesized)
tgagccaagcaaacctccaatcgcccccaaaccagtgattcctcagcttccaacaactacacaaaaaccaacagatatacaccccaaaccaacaggcctatctttaacttcaagtatgac

SEQ ID NO: 678588 - DNA, 120 bp, Artificial Sequence
  ENSG00000186472_66 (sequence is synthesized)
cttaaatttagtgacttcagcagattataaattgccttcccctacctccccactttccccacactccaacaagtcttcaccaagattttccaaatccctcacagaaacttatgtagttat

SEQ ID NO: 678589 - DNA, 120 bp, Artificial Sequence
  ENSG00000186472_67 (sequence is synthesized)
tacattgccatctgaaccagggactccaacagattcttctgctagtcaagcaattaccagttggcccttgggatcaccctccaaagatctggtttctgttgaacctgtgttttctgtagt

SEQ ID NO: 678590 - DNA, 120 bp, Artificial Sequence
  ENSG00000186472_68 (sequence is synthesized)
tcctcctgtgacagctgtagaaattccaatttcttcagaacagaccttctacatctctggagctttacagacattttctgctacccctgtcacagcaccctcttcatttcaagcagctcc

SEQ ID NO: 678591 - DNA, 120 bp, Artificial Sequence
  ENSG00000186472_69 (sequence is synthesized)
cacatcagttacacagtttctcactactgaagtttccaagactgaggtttcagcaaccagaagtacagctcctagtgttggtctcagcagcatttccataacaattcctccagagcctct

SEQ ID NO: 678592 - DNA, 120 bp, Artificial Sequence
  ENSG00000186472_70 (sequence is synthesized)
tgctctagataacatacatttagagaagcctcagtataaagaagatggaaaattgcaacttgttggtgatgtaattgatttgcgtacagtaccaaaggtagaagttaaaacaactgataa

SEQ ID NO: 678593 - DNA, 120 bp, Artificial Sequence
  ENSG00000186472_71 (sequence is synthesized)
atgtattgatctttctgcttctacaatggatgtgaaaaggcagatcacagcaaatgaagtttatgggaaacaaattagtgctgtccaaccctctattataaatcttagtgtgacatcatc

SEQ ID NO: 678594 - DNA, 120 bp, Artificial Sequence
  ENSG00000186472_72 (sequence is synthesized)
aatagtgactcctgtatctctggccactgagacagtgacctttgtcacatgcacagctagtgcaagttacactacaggcacagaaagcctagtgggtgcagaacatgcaatgacaacacc

SEQ ID NO: 678595 - DNA, 120 bp, Artificial Sequence
  ENSG00000186472_73 (sequence is synthesized)
actccaacttacaacatcaaagcatgctgagcccccatacaggataccaagtgaccaggtctttcctatagctagggaagaagcaccaataaacttatctctaggtactccagcacatgc

SEQ ID NO: 678596 - DNA, 120 bp, Artificial Sequence
  ENSG00000186472_74 (sequence is synthesized)
agtgacattggctattacaaaacctgtcactgtgcctcctgttggtgtcacaaatggatggactgatagcaccgtatcccagggaatcactgatggggaagtagtggatctcagtacaac

SEQ ID NO: 678597 - DNA, 120 bp, Artificial Sequence
  ENSG00000186472_75 (sequence is synthesized)
caagtctcacagaacagtcgtaacaatggatgagtctacttcaagtgtgatgaccaaaataatagaagatgaaaaacccgttgatttaaccgcagggagaagagctgtgtgctgtgatgt

SEQ ID NO: 678598 - DNA, 120 bp, Artificial Sequence
  ENSG00000186472_76 (sequence is synthesized)
ggtttataaattaccatttggaaggagctgcacagcacagcagcctgcaactactcttcctgaggatcgttttggttatagggatgaccactatcagtatgatcgatcagggccatatgg

SEQ ID NO: 678599 - DNA, 120 bp, Artificial Sequence
  ENSG00000186472_77 (sequence is synthesized)
ttatagagggattgggggaatgaagccttccatgtctgacacaaatttagcagaagctggacattttttctataaaagtaagaatgcttttgattattctgaaggaactgacacagcagt

SEQ ID NO: 678600 - DNA, 120 bp, Artificial Sequence
  ENSG00000186472_78 (sequence is synthesized)
agatctgacttcagggagagttactacaggtgaggtaatggattattcaagcaagactacaggtccatatccagaaacacgacaagtcatttcaggagctgggattagtaccccacagta

SEQ ID NO: 678601 - DNA, 120 bp, Artificial Sequence
  ENSG00000186472_79 (sequence is synthesized)
ttccacagcaagaatgacaccaccaccaggaccccagtattgtgtggggagtgttttgaggtcatctaatggtgttgtctattcttcagtagcaactccaacaccctctacatttgctat

SEQ ID NO: 678602 - DNA, 120 bp, Artificial Sequence
  ENSG00000186472_80 (sequence is synthesized)
caccacacaacctggctccattttcagcaccacagtgagggatttgtctggtattcatacggctgatgcagtgacttcattacctgccatgcaccatagccagccaatgcctagatcata

SEQ ID NO: 678603 - DNA, 120 bp, Artificial Sequence
  ENSG00000186472_81 (sequence is synthesized)
ttttataacaacaggtgcatctgaaacggacattgcagtaactggtattgatatcagtgccagtttgcaaactattactatggagtctcttactgctgagacgatagactctgttcccac

SEQ ID NO: 678604 - DNA, 120 bp, Artificial Sequence
  ENSG00000186472_82 (sequence is synthesized)
tttaaccacagcatccgaagtgtttcctgaagtggtgggagatgaaagtgctcttttaattgtccctgaagaagataaacaacagcagcagctagacttggagcgtgagctcctggaact

SEQ ID NO: 678605 - DNA, 120 bp, Artificial Sequence
  ENSG00000186472_83 (sequence is synthesized)
ggagaaaattaagcaacagcgctttgctgaggaattggagtgggaacgtcaggaaattcaaaggttccgagaacaagaaaagatcatggttcagaaaaagttggaggagctgcagtctat

SEQ ID NO: 678606 - DNA, 120 bp, Artificial Sequence
  ENSG00000186472_84 (sequence is synthesized)
caacaccttctctttcagcaagaagaagagcggcaagcccagttcatgatgaggcaggagacgttagctcagcaacagttacagcttgagcagatccaacagctgcaacaacagcttcac

SEQ ID NO: 678607 - DNA, 120 bp, Artificial Sequence
  ENSG00000186472_85 (sequence is synthesized)
cagcagctggaggagcaaaagattcggcagatctaccagtataactatgacccttctggaactgcttctccacaaaccactacagagcaggcaattttggaaggtcagtatgctgctctg

SEQ ID NO: 678608 - DNA, 120 bp, Artificial Sequence
  ENSG00000186472_86 (sequence is synthesized)
gaaggcagtcaattttgggcaactgaagatgcaaccaccacagcttcagctgttgtggcaattgaaataccacaaagccaaggatggtacaccgttcagtctgatggtgttactcagtac

SEQ ID NO: 678609 - DNA, 120 bp, Artificial Sequence
  ENSG00000186472_87 (sequence is synthesized)
attgccccacctggtatcctgagcactgtttcagaaatacctctaacagatgttgttgtgaaagaggaaaaacaacccaaaaagagaagttctggagctaaagtccgaggacagtatgat

SEQ ID NO: 678610 - DNA, 120 bp, Artificial Sequence
  ENSG00000186472_88 (sequence is synthesized)
gacatgggagaaaatatgacagatgatccccgaagttttaaaaagatagtggacagtggtgtacaaacggatgacgaagatgccacagatcggagctatgtgagtaggagaaggagaact

SEQ ID NO: 678611 - DNA, 120 bp, Artificial Sequence
  ENSG00000186472_89 (sequence is synthesized)
aaaaagagtgtggatacaagcgtccaaactgatgatgaagatcaggatgagtgggatatgcctactagatcaaggaggaaagctcgtgtagggaaatatggtgacagcatgacagaggct

SEQ ID NO: 678612 - DNA, 120 bp, Artificial Sequence
  ENSG00000186472_90 (sequence is synthesized)
gacaagaccaaacccctttccaaagtctccagcatagcagttcaaacggtagcagagatatctgtgcaaactgaaccagttggaaccataagaacaccctccatacgggcacgagtggat

SEQ ID NO: 678613 - DNA, 120 bp, Artificial Sequence
  ENSG00000186472_91 (sequence is synthesized)
gccaaggtagaaataattaaacacatttcagcacctgaaaagacttacaaagggggcagtttaggatgtcaaacagaagcagattcagacacacaaagtcctcaatatctgagtgccaca

SEQ ID NO: 678614 - DNA, 120 bp, Artificial Sequence
  ENSG00000186472_92 (sequence is synthesized)
tctccacccaaagacaagaaacgcccaacacctttagagattggttattcatctcacctccgggcagattccacagtacagctggctccttccccacccaaatcccccaaagtcctttac

SEQ ID NO: 678615 - DNA, 120 bp, Artificial Sequence
  ENSG00000186472_93 (sequence is synthesized)
tcacccatctcaccactttcaccaggcaaagccttagaatcagcctttgtaccttatgaaaaacccctccctgatgatataagtccacagaaagtactgcatccagatatggctaaagtt

SEQ ID NO: 678616 - DNA, 120 bp, Artificial Sequence
  ENSG00000186472_94 (sequence is synthesized)
cccccagcaagtcctaagacagccaagatgatgcagcgttctatgtctgaccccaagcctctgagtccaacagcagacgaaagttccagggctccttttcagtataccgagggctatacg

SEQ ID NO: 678617 - DNA, 120 bp, Artificial Sequence
  ENSG00000186472_95 (sequence is synthesized)
actaaaggttctcaaaccatgacatcctctggagcccagaaaaaagttaaaagaactctgccaaatccacctcctgaggagatttccacaggaactcaatccacattcagcacaatgggc

SEQ ID NO: 678618 - DNA, 120 bp, Artificial Sequence
  ENSG00000186472_96 (sequence is synthesized)
acagtttccaggagaaggatctgcagaaccaacacaatggcacgagccaagattctccaggacatagacagagagcttgatcttgtggaaagggagtctgcaaaacttcgaaagaaacaa

SEQ ID NO: 678619 - DNA, 120 bp, Artificial Sequence
  ENSG00000186472_97 (sequence is synthesized)
gcagagcttgatgaagaagaaaaggagattgatgctaagctacgatacctggaaatgggaattaacaggaggaaagaggccctattaaaggagagagaaaagagagaacgagcctacctc

SEQ ID NO: 678620 - DNA, 120 bp, Artificial Sequence
  ENSG00000186472_98 (sequence is synthesized)
cagggagtagctgaggatcgtgattacatgtctgacagtgaagtgagtagcacaagaccaacccgaatagaaagtcagcatggcattgagcgaccaagaactgctccccaaactgaattc

SEQ ID NO: 678621 - DNA, 120 bp, Artificial Sequence
  ENSG00000186472_99 (sequence is synthesized)
agccagtttataccaccacaaacccaaacagaatctcaactagttcctccgacaagtccttacacacaataccagtactcttcccctgctcttcctacccaagcacccacctcatacact

SEQ ID NO: 678622 - DNA, 120 bp, Artificial Sequence
  ENSG00000186472_100 (sequence is synthesized)
caacagtctcattttgagcaacaaactttgtaccatcagcaagtttcaccttatcagactcagccaacattccaagctgtggcaacaatgtccttcacacctcaagttcaacctacacca

SEQ ID NO: 678623 - DNA, 120 bp, Artificial Sequence
  ENSG00000186472_101 (sequence is synthesized)
accccacagccttcttatcagttaccttcacagatgatggtgatacaacagaagccacggcaaactacattatatttggagcccaagataacctcaaactatgaagtgattcgcaaccaa

SEQ ID NO: 678624 - DNA, 120 bp, Artificial Sequence
  ENSG00000186472_102 (sequence is synthesized)
ccccttatgatagcacctgtttctacggataacacatttgctgtttcccatcttggtagtaagtacaatagtttagacttgagaataggtttggaggaaagaagtagcatggcaagcagt

SEQ ID NO: 678625 - DNA, 120 bp, Artificial Sequence
  ENSG00000186472_103 (sequence is synthesized)
ccaatatcaagcatatctgcagattctttctatgcagatattgatcaccatactccacgaaattatgtcctaattgacgacattggagagatcaccaaaggaacagcggcattaagcacc

SEQ ID NO: 678626 - DNA, 120 bp, Artificial Sequence
  ENSG00000186472_104 (sequence is synthesized)
gcatttagccttcatgaaaaggatctgtcaaaaacagaccgtctccttcgaaccactgagacacgccggtctcaagaagtgacagatttcctagcacctttacagtcttcctctagattg

SEQ ID NO: 678627 - DNA, 120 bp, Artificial Sequence
  ENSG00000186472_105 (sequence is synthesized)
catagttatgtgaaggcggaggaagacccaatggaggatccttacgagttaaagcttctgaaacatcagattaaacaggaatttcgtagagggacagagagcttagatcaccttgctggt

SEQ ID NO: 678628 - DNA, 120 bp, Artificial Sequence
  ENSG00000186472_106 (sequence is synthesized)
ctttctcattattaccatgctgatactagctacagacattttccaaaatctgagaagtatagcatcagtagactcacacttgaaaaacaagcagcaaaacaactgccagcagccatactt

SEQ ID NO: 678629 - DNA, 120 bp, Artificial Sequence
  ENSG00000186472_107 (sequence is synthesized)
tatcaaaagcagtcaaagcataagaaatcactaattgaccctaaaatgtcaaaattttcacctattcaagaaagtagagaccttgaacctgattattcaagctatatgacttctagcact

SEQ ID NO: 678630 - DNA, 120 bp, Artificial Sequence
  ENSG00000186472_108 (sequence is synthesized)
tcatctattggtggcatttcctccagggcaaggctccttcaagatgacatcacttttggcctcagaaaaaatattacagaccaacaaaaatttatgggatcttctcttggcacaggactg

SEQ ID NO: 678631 - DNA, 120 bp, Artificial Sequence
  ENSG00000186472_109 (sequence is synthesized)
ggcacattaggaaataccatacgctcagctctgcaggatgaagcggataagccatacagtagtggcagcaggtccagaccttcctccagaccttcctctgtctatgggcttgatttatca

SEQ ID NO: 678632 - DNA, 120 bp, Artificial Sequence
  ENSG00000186472_110 (sequence is synthesized)
attaaaagggattcttctagctcttccctaagactgaaagctcaagaggctgaagctctagatgtttcctttagtcatgcatcatcctctgccagaactaagccgaccagtttgccaatt

SEQ ID NO: 678633 - DNA, 120 bp, Artificial Sequence
  ENSG00000186472_111 (sequence is synthesized)
agtcaaagtagaggaagaataccaattgtggcccagaattctgaagaagaaagcccactcagtcctgttggccagccaatgggaatggccagggctgcagctggacccctgccaccaata

SEQ ID NO: 678634 - DNA, 120 bp, Artificial Sequence
  ENSG00000186472_112 (sequence is synthesized)
tctgcagacaccagggatcagtttggatcaagccactcattgcctgaagttcagcaacacatgagggaagaatcacggactcgaggctatgaccgtgacatagcattcatcatggatgac

SEQ ID NO: 678635 - DNA, 120 bp, Artificial Sequence
  ENSG00000186472_113 (sequence is synthesized)
ttccaacatgccatgtcagacagtgaagcctatcatctgcgtcgtgaggaaacagattggtttgataaacccagggagtctcgtttggaaaatggacatggtctggaccgaaaactgccg

SEQ ID NO: 678636 - DNA, 120 bp, Artificial Sequence
  ENSG00000186472_114 (sequence is synthesized)
gaaagattggtccactctagaccactcagtcaacatcaagagcaaattatacagatgaacgggaaaactatgcactacatctttcctcacgcaaggataaaaataacaagagactcaaag

SEQ ID NO: 678637 - DNA, 120 bp, Artificial Sequence
  ENSG00000186472_115 (sequence is synthesized)
gatcacacagtttcaggtaatggattaggaattagaattgtgggtggtaaagaaatcccgggacatagtggagaaattggagcctatattgccaagattcttcctgggggaagtgcggaa

SEQ ID NO: 678638 - DNA, 120 bp, Artificial Sequence
  ENSG00000186472_116 (sequence is synthesized)
cagacggggaagcttatggaagggatgcaagtattggaatggaatggaattcccttgacttctaaaacatatgaagaagttcagagtatcattagtcagcaaagtggggaagcagaaata

SEQ ID NO: 678639 - DNA, 120 bp, Artificial Sequence
  ENSG00000186472_117 (sequence is synthesized)
tgtgtaagactggacctcaatatgctatcagattctgaaaattcccagcatctggaacttcatgagccaccaaaagctgtggataaggcgaaatccccaggggttgatcctaagcagttg

SEQ ID NO: 678640 - DNA, 120 bp, Artificial Sequence
  ENSG00000186472_118 (sequence is synthesized)
gcagcagaactccagaaggtttcactacagcagtcaccgctggttctgtcatcagttgttgaaaaaggatctcatgttcattcaggtcctacatcagcaggatccagttccgttcccagc

SEQ ID NO: 678641 - DNA, 120 bp, Artificial Sequence
  ENSG00000186472_119 (sequence is synthesized)
cctgggcaaccagggtccccctcagtgagcaaaaagaagcacggcagcagcaagcctaccgatggaacaaaggttgtctctcatccaattacaggagaaattcagcttcaaattaactat

SEQ ID NO: 678642 - DNA, 120 bp, Artificial Sequence
  ENSG00000186472_120 (sequence is synthesized)
gatcttggaaatctcataatacatattctccaagcaagaaatcttgttcctcgagacaacaatggttattctgacccttttgtgaaagtgtaccttcttccagggagaggtcaagtcatg

SEQ ID NO: 678643 - DNA, 120 bp, Artificial Sequence
  ENSG00000186472_121 (sequence is synthesized)
gttgtccagaatgcaagtgctgagtacaagagaaggactaaacatgtccagaaaagtcttaatcctgagtggaatcaaacagtaatttataaaagtatttccatggaacagctcaagaag

SEQ ID NO: 678644 - DNA, 120 bp, Artificial Sequence
  ENSG00000186472_122 (sequence is synthesized)
aaaacactggaggtgacagtttgggattatgatagattttcatccaacgacttccttggggaggtattgattgatttatctagcacatctcacctcgataacactccaaggtggtatcct

SEQ ID NO: 678645 - DNA, 120 bp, Artificial Sequence
  ENSG00000186472_123 (sequence is synthesized)
ctcaaagaacagactgaaagcattgatcatggcaagtctcattccagtcagagcagccagcagtccccaaagccatctgttatcaaaagcagaagccatggtatcttccctgacccatca

SEQ ID NO: 678646 - DNA, 120 bp, Artificial Sequence
  ENSG00000186472_124 (sequence is synthesized)
aaggacatgcaggttcccaccattgagaaatcccatagtagtcctggtagctcaaaatcatcatcagaaggccatctccgttctcatggaccatctcgcagtcaaagcaaaaccagcgtc

SEQ ID NO: 678647 - DNA, 120 bp, Artificial Sequence
  ENSG00000186472_125 (sequence is synthesized)
actcagacccacctggaagatgcaggggctgccatagctgctgccgaagctgccgtgcaacaactccgcattcaaccaacaaagcctcccaatcaccggcctgcagaaagctctgtgtcc

SEQ ID NO: 678648 - DNA, 120 bp, Artificial Sequence
  ENSG00000186472_126 (sequence is synthesized)
accggctcctcgggcagcagctttggcagtgggtatagcgtggacagtgaaggaagcagcagcactgcaggggagactaatctatttcctattccgaggatagggaagatgggacagaat

SEQ ID NO: 678649 - DNA, 120 bp, Artificial Sequence
  ENSG00000186472_127 (sequence is synthesized)
ggacaagagcctgtaaaacagccaggggtaggagtaggactagcagacactgaagctaaaactcaggtaatgggagaaatcaagattgcattgaagaaggaaatgaagacagatggtgaa

SEQ ID NO: 678650 - DNA, 120 bp, Artificial Sequence
  ENSG00000186472_128 (sequence is synthesized)
caactaatagttgaaattctccaatgcagaaatattacatacaaatttaagtctcctgatcatctaccagatttatatgtgaaaatatatgtgatgaatatttctacccaaaaaaaggtg

SEQ ID NO: 678651 - DNA, 120 bp, Artificial Sequence
  ENSG00000186472_129 (sequence is synthesized)
atcaagaaaaaaacaagagtatgcagacatgatcgagagccttcgtttaatgaaacttttcgattcagtctaagtcctgcaggacattctcttcagattttacttttctccaatggaggg

SEQ ID NO: 678652 - DNA, 120 bp, Artificial Sequence
  ENSG00000186472_130 (sequence is synthesized)
aagtttatgaaaaagaccttgattggtgaagcctgtatctggcttgacaaagtggatctcagaaaaagaatagtcaactggcacaaacttttggtcagtcctactcaaacgcattgaaga

SEQ ID NO: 678653 - DNA, 120 bp, Artificial Sequence
  ENSG00000186472_131 (sequence is synthesized)
aacatgtcttctcagggtatagaaactgctctaaatagcctcacatcaagactatagttgaatactattgtacaaagctaagttttgagaggcaaacataagagtgggaacaacaagcaa

SEQ ID NO: 678654 - DNA, 120 bp, Artificial Sequence
  ENSG00000186472_132 (sequence is synthesized)
aaacatacttaagaccttgtacatttattgttgtggatcacacaaagatattcaactgaaaaagttcacatactgaaaacaagaagaatggagttctgagaccttgaatttcccatggct

SEQ ID NO: 678655 - DNA, 120 bp, Artificial Sequence
  ENSG00000186472_133 (sequence is synthesized)
gtgaagagaaactgtgaaacaaattttgattacttaagacaataatctttgagtagagttgagctatagcttaagacaggctcaaagattaatgtggttttcatgcagcacaaaggtaat

SEQ ID NO: 678656 - DNA, 120 bp, Artificial Sequence
  ENSG00000186472_134 (sequence is synthesized)
tctttatgcaaaggagccttggttgaaaggaaaggactgatgtaacaaatctcagttttcaaaacttcaaaaatcttccttcatcgtcttctattcagacaacttgctgctttcagattc

SEQ ID NO: 678657 - DNA, 120 bp, Artificial Sequence
  ENSG00000186472_135 (sequence is synthesized)
tgacataagatatacctacagtatgtgtccagggctggaagtgaggtggctgtgttcttagggaaaatggaagaggagatgtagaaattgtggctttcaggccatattttaccagttttc

SEQ ID NO: 678658 - DNA, 120 bp, Artificial Sequence
  ENSG00000186472_136 (sequence is synthesized)
tctgtgtctaaatgttacaagcatatacaacactgactttggaatccatgtggtaaaagcacatttgtttctgtatcatttgaaacaaggtagagtgaagataatactcagtagaaataa

SEQ ID NO: 678659 - DNA, 120 bp, Artificial Sequence
  ENSG00000186472_137 (sequence is synthesized)
aattgaatttatctagaaataaaactatgactggctaacaaagaagaatgttgccccataaaatattggaattttggttgaaaccatcaaaatcttcataatttaccattaagccaagac

SEQ ID NO: 678660 - DNA, 120 bp, Artificial Sequence
  ENSG00000186472_138 (sequence is synthesized)
atcttcagtctatgtaccaaaggacctagagtaaactgatatgttctaggaagcatgataacttactctttgtgaaactgcaaataaatgtattatcctgcacatttcctttctgttgag

SEQ ID NO: 678661 - DNA, 120 bp, Artificial Sequence
  ENSG00000186472_139 (sequence is synthesized)
cgatgcattgacagagaaagaaaattctttctctggcaaacaaaccatattaatcttgtgacattgattaattaaatggatcctcatttcataatattttatgcttttttccttaatgac

SEQ ID NO: 678662 - DNA, 120 bp, Artificial Sequence
  ENSG00000186472_140 (sequence is synthesized)
ttaattcatttactgattgtatcatgaaaacatgacactaaactcgagttctctctagtgctctattttcttactttagtgacagtatcacagtgatcaagttcatcaatgttgggaaaa

SEQ ID NO: 678663 - DNA, 120 bp, Artificial Sequence
  ENSG00000186472_141 (sequence is synthesized)
tatgtgaaaagtcaacatttacctgagattaaaatatactttgagctattttaataataatgaataaaacaactaatgtccaagtcttaaaatgaagcaccctcttctctatcagcatta

SEQ ID NO: 678664 - DNA, 120 bp, Artificial Sequence
  ENSG00000186472_142 (sequence is synthesized)
ttaattaaggaagtaacgtgaagttgtggaaaaaacactcagcagggaataaaagcctgtcttctggtcttagttctaccactgactgtgtcactttgcacatgtcacttacactcactt

SEQ ID NO: 678665 - DNA, 120 bp, Artificial Sequence
  ENSG00000186472_143 (sequence is synthesized)
taccccagttttcttatctataggataaaaacaattatatattcttaaccttccaaatgagatgttgtgatgataaatcaatgatccatgaaagatgaaagcacatttccaaatatagtt

SEQ ID NO: 678666 - DNA, 120 bp, Artificial Sequence
  ENSG00000186472_144 (sequence is synthesized)
ttatacacagaagtgaggaataattattacatatctttttaattctcaaattttatatgtgaaaaacatcatctaaaccaatggcaaggattgacatggataaaagcagtaaattagcca

SEQ ID NO: 678667 - DNA, 120 bp, Artificial Sequence
  ENSG00000186472_145 (sequence is synthesized)
caaaacttattttttatttaaaatataaactttaacctgactaaaggtgaagaattacatgaaaatgcaaattttgctatcccaaattaaatgaataatgctggtcttaccctagtccta

SEQ ID NO: 678668 - DNA, 120 bp, Artificial Sequence
  ENSG00000186472_146 (sequence is synthesized)
tattccacccaaaagaaataaatcaaattgcttctcagagcattctgagcttaaaacctgctgctttatttaagggtgaagtgttagtggaattagagaaaaccaactctagatattggt

SEQ ID NO: 678669 - DNA, 120 bp, Artificial Sequence
  ENSG00000186472_147 (sequence is synthesized)
tggatattgaattttctcatttttaaagaaaaaatgctctaaatttgagaggactgtaaagcactaaaaataagagaatttctaatatatcccaggatatatatatatatatatgacttc

SEQ ID NO: 678670 - DNA, 120 bp, Artificial Sequence
  ENSG00000186472_148 (sequence is synthesized)
agaatacaaattcgatcttccccaaactgagaaagataaccataacttttcttccctctattttttaatccccctccactgacaatacaatgtcatttaccattgacattgctctcaaat

SEQ ID NO: 678671 - DNA, 120 bp, Artificial Sequence
  ENSG00000186472_149 (sequence is synthesized)
gagcatgggagagtggaatcatcaaagacattatattgctagtattttatttttagaaactattagatctgctgatggttgccatggatatttccagcagaagctagcacttgaagaagc

SEQ ID NO: 678672 - DNA, 120 bp, Artificial Sequence
  ENSG00000186472_150 (sequence is synthesized)
ctataatcatcactcataattggggaagaaaaggtccaaggagatctccttctgacataaaaaggctctggtatttgcccttaaaagaaaaccctgactcatctctgatcctcttttgca

SEQ ID NO: 678673 - DNA, 120 bp, Artificial Sequence
  ENSG00000186472_151 (sequence is synthesized)
gccactcatatccataggtatgcatgagagtttgtatgaccagttagctttcttcattccagttgcaatttcttttagaataatataaatggagggatcaccaaaacaaagattatctct

SEQ ID NO: 678674 - DNA, 120 bp, Artificial Sequence
  ENSG00000186472_152 (sequence is synthesized)
ttggtagctatttaacctgaaagcgtaggagtctttccattatagaagcccctccgttccaaggaactagcgatggggctaggtcaatcagcagagttgacaacagggcttctttttgtg

SEQ ID NO: 678675 - DNA, 120 bp, Artificial Sequence
  ENSG00000186472_153 (sequence is synthesized)
caccagcattccccttcagagagcataagatcctgccagtgtgccaagtttgcagctgaccaaacttctaggttgtactggaattattctatgcaacactgatccttatatgaatgcgtt

SEQ ID NO: 678676 - DNA, 120 bp, Artificial Sequence
  ENSG00000186472_154 (sequence is synthesized)
tcttctgaatgatgttgactacccttcttacaacaaaactgtttcttttttattgcaaatagggctcttggtgttttttacttttttgtacatatcacagtacatggtttttcactcttt

SEQ ID NO: 678677 - DNA, 120 bp, Artificial Sequence
  ENSG00000186472_155 (sequence is synthesized)
agtttatttcattttattggaattaacttttttttattctaatactgacagagtttgtaatctctatataatacgtaattactccaattacagcacttttaccttgaagagcatctcagt

SEQ ID NO: 678678 - DNA, 120 bp, Artificial Sequence
  ENSG00000186472_156 (sequence is synthesized)
ttttcccacaatttcattgagtcatcagagactgatgttgcttcttggtttcaaatttggtcctaaagaaactttcggctgtagaaacaaaagcacagagtgaattttttacaaaagaca

SEQ ID NO: 678679 - DNA, 120 bp, Artificial Sequence
  ENSG00000186472_157 (sequence is synthesized)
gggaatatagaatagtcattacagacacaaataaccctagtagcacgaagttggtgttttctctgtttttacttaagattaagaagatttttggtgactctgaactctttatttatattt

SEQ ID NO: 678680 - DNA, 120 bp, Artificial Sequence
  ENSG00000186472_158 (sequence is synthesized)
cagtttaaaatatcaagactaaggggcatcagttatctttactctttaatattgcccatattttaataaattacactaattaaacgcatattttcagcataccagtggaattaattttgt

SEQ ID NO: 678681 - DNA, 120 bp, Artificial Sequence
  ENSG00000186472_159 (sequence is synthesized)
ggatcacacacatttaaatagtcatattgtgggaatattatagctggtaaccagctgatattgattcttattataggaatgactgtaatgatagtggtggtagcagtagtgatattagcg

SEQ ID NO: 678682 - DNA, 120 bp, Artificial Sequence
  ENSG00000186472_160 (sequence is synthesized)
gtggtggtgatgtgaagtaaaataaaagtatatattatattgtgcccaatttattagaaattatttgatcaatgcttcatttcattaaaatatcataaagatgtttatagtattttttta

SEQ ID NO: 678683 - DNA, 120 bp, Artificial Sequence
  ENSG00000186472_161 (sequence is synthesized)
ctttattatttaaatcataactaacaatatttttaaaaacttattttcattgctacaatgtcaaatattccaaaatcagccaactacagctatatatgtgttatgtgtgacagaagtgat

SEQ ID NO: 678684 - DNA, 120 bp, Artificial Sequence
  ENSG00000186472_162 (sequence is synthesized)
cttccttccctctttttgagcttgacatgaaagtgaaagaagactcaatgaataattatgagctatttatttaataattacttgccttgggtgtaatacagtaatgaatgagtgaaacaa

SEQ ID NO: 678685 - DNA, 120 bp, Artificial Sequence
  ENSG00000186472_163 (sequence is synthesized)
atattctcattgaatatgatacaatgctgttttctgtatgtttcatgttctattattaaaggtatccattaggccaaaattatttaatcaaattctttatctgataggtagattgagagc

SEQ ID NO: 678686 - DNA, 120 bp, Artificial Sequence
  ENSG00000186472_164 (sequence is synthesized)
attttcttaatgcattaccttgtacataagtatacacttggtaaagtagacgaagttgaaatattaatttcatttggcatttagcatgtgaatatgattattgtttgattgtgtctgtat

SEQ ID NO: 678687 - DNA, 120 bp, Artificial Sequence
  ENSG00000186472_165 (sequence is synthesized)
atttgtttggtgacgtgctcaggtgctcccactactgattaatgtgtgtgctaatatcctaaaaacacatatgaggtttaagaaaaaattttcttgtctgaaaacataaacatcttaata

SEQ ID NO: 678688 - DNA, 120 bp, Artificial Sequence
  ENSG00000186472_166 (sequence is synthesized)
aaactgattttgaaataaaaactaaagtacttgaagatatgtcttgtttctaactatatgttgcatgccatgttggtgatttgctaatgtgtttttttgtttgtttgttttacccaaatc

SEQ ID NO: 678689 - DNA, 120 bp, Artificial Sequence
  ENSG00000186472_167 (sequence is synthesized)
cctttggaaaatctaatggacaaatgcaaattcttggactaaggactgtataaattgacctgaaaatacatgagagttgcatttaaaaaaaaatgcttgtaaatccgtcttgagttttac

SEQ ID NO: 678690 - DNA, 120 bp, Artificial Sequence
  ENSG00000186472_168 (sequence is synthesized)
tctatgtaaaaatatgtcttggttttgtgattgtatacaagatgtatcttgataacttatgtaaactgtgccgtataaaggctgttgcctcagccttactaataaatactgaaaatatca

SEQ ID NO: 678691 - DNA, 120 bp, Artificial Sequence
  ENSG00000186472_169 (sequence is synthesized)
caacaactccgcattcaaccaagtaaaagacgcaaataaattcctcagcatggcagcttaatgttcatctgttgcctttctttcctgctgtcctttcctgtttgctttcagttttcaaca

SEQ ID NO: 678692 - DNA, 120 bp, Artificial Sequence
  ENSG00000186472_170 (sequence is synthesized)
tcctctgctcaccctgttctctgtccctttgtctgtgtaagaacgatataaatacattaatatgctctttcttatttagattttttttatttacatagactgaaataaaactggctgttt

SEQ ID NO: 678693 - DNA, 120 bp, Artificial Sequence
  ENSG00000186472_171 (sequence is synthesized)
ctcctttgtttccaccatccatccaacctggctcatagcatttgatacagtgtctgtgatgtttggaagcaaagcaatgttgtgtgtcctttttgtttgcgcttaaatatcttttagaat

SEQ ID NO: 678694 - DNA, 120 bp, Artificial Sequence
  ENSG00000186472_172 (sequence is synthesized)
acagaaattataagcacaagtggctgccagttttccaggacttataccaaaaaaaaaaaagtgcacacatataagtatttagagcagatttgcaattagattcttgtatctgaaaacact

SEQ ID NO: 678695 - DNA, 120 bp, Artificial Sequence
  ENSG00000186472_173 (sequence is synthesized)
caaaaagtctaggcagaagataatgcaaccaacagtcaacttctagaaccttggaggaaaagccatttcaagacagtgctttaaaacactaacaaattttgcttctgaaatatggtagct

SEQ ID NO: 678696 - DNA, 120 bp, Artificial Sequence
  ENSG00000186472_174 (sequence is synthesized)
ttccatgtgcaaaaaattgtagtcttctgaaaaatctgtgaagaaaatcttatttcttacattctcaaaaaactacattaaattaatatatgtataagcatatgtgataaggcaatgcaa

SEQ ID NO: 678697 - DNA, 120 bp, Artificial Sequence
  ENSG00000186472_175 (sequence is synthesized)
cctcactgaggagcacaattgggtccattctgttggatcacactttgtatgtgatgacagattttacagatattttttctaaccattggaaatcaagatatactatgtctggtagctata

SEQ ID NO: 678698 - DNA, 120 bp, Artificial Sequence
  ENSG00000186472_176 (sequence is synthesized)
agtcaatcaaagtataacaattgacctatcttaactgctgtattttcatttcatttgtgaaaatttagtcgattgatataattatataaaaacttaatatgtgcaaatatttcacaaatg

SEQ ID NO: 678699 - DNA, 120 bp, Artificial Sequence
  ENSG00000186472_177 (sequence is synthesized)
taggtaccctgttacttctaaaaggcattagccaggcaatggagatagatcattgttctctccatctccctagtcatcattttcaaagaaacagccagttttaaacccctttagtgctgt

SEQ ID NO: 678700 - DNA, 120 bp, Artificial Sequence
  ENSG00000186472_178 (sequence is synthesized)
gcatgtggtgtcattttggcatttgaaaacacaacctatttaaatagagcaaaagagcacttctgtttgcatgaataacatttaagctggttccatctgaggatacatactctgggtttc

SEQ ID NO: 678701 - DNA, 120 bp, Artificial Sequence
  ENSG00000186472_179 (sequence is synthesized)
catttcacccacactgccacagcagcacataaaagcggtcagtctaatcatgccaggaagcagcacagacacagcatagcaggagtcctccccattcaaagaactcagtctgataatctg

SEQ ID NO: 678702 - DNA, 120 bp, Artificial Sequence
  ENSG00000186472_180 (sequence is synthesized)
cctccaccagccaatggcaaccaagaccaaagccagctagccctcaggaaggtgatgtctgatggaccagtcaagccagaaggaggtgagcagaaaggccctgttcaaagcacacagcaa

SEQ ID NO: 678703 - DNA, 120 bp, Artificial Sequence
  ENSG00000186472_181 (sequence is synthesized)
gaacatccccaaatttaaagctctcatctttaatttttagagattgtctgataaaatatgtttatccactttttaatgtgcttttgtgggcatggcatttcaggacttcatcatcaccat

SEQ ID NO: 678704 - DNA, 120 bp, Artificial Sequence
  ENSG00000186472_182 (sequence is synthesized)
gtaagtcccaagatcagtcccgtaatatattgactacagtgatttgtatttttctatgcactgggcatcttttgacttttgttgggaaatagattaacaatattcatattgcagaatgga

SEQ ID NO: 678705 - DNA, 120 bp, Artificial Sequence
  ENSG00000186472_183 (sequence is synthesized)
atgcatgctactaacctaatctgttcaagcatgactataaatatgtttcattgtgataaaagtttaaattgctcacagttcaagttagcctaccagttggaatgtggatcagtgtttttt

SEQ ID NO: 678706 - DNA, 120 bp, Artificial Sequence
  ENSG00000186472_184 (sequence is synthesized)
gcctattatttcaagtgtaacttttaaaaatttagtggattttgaaaattcttagaggaaagtaaaggaaaaattgttaatgcactcatttacctttacatggtgaaagttctctcttga

SEQ ID NO: 678707 - DNA, 120 bp, Artificial Sequence
  ENSG00000186472_185 (sequence is synthesized)
tcctacaaacagacattttccactcgtgtttccatagttgttaagtgtatcagatgtgttgggcatgtgaatctccaagtgcctgtgtaataaataaagtatctttatttcattcataaa

SEQ ID NO: 678708 - DNA, 120 bp, Artificial Sequence
  ENSG00000186472_186 (sequence is synthesized)
tatcctacttttcttggtgtgtcttttgcatgtttacttcaattttatttcttgtaaatggaaattttatcatgtgtatagattctgtagcatgcttttctttatttagttttactttat

SEQ ID NO: 678709 - DNA, 120 bp, Artificial Sequence
  ENSG00000186472_187 (sequence is synthesized)
tcctttattgttctgtttcttgattgtttgcttgatttgtttggtgtctgcttttctaaaaccattatcaaataattctgtcaataaaatatggtcatcctataaatccatagttgaaaa

SEQ ID NO: 678710 - DNA, 120 bp, Artificial Sequence
  ENSG00000186474_0 (sequence is synthesized)
gcaggtaggtggacggagagatagcagcgacgaggacaggccaaacagtgacagccacgtagaggatctggcagacaaagagacaaggtgagaaggagactttggaagtgacccaccatg

SEQ ID NO: 678711 - DNA, 120 bp, Artificial Sequence
  ENSG00000186474_1 (sequence is synthesized)
gggctcagcatctttttgctcctgtgtgttcttgggctcagccaggcagccacaccgaagattttcaatggcactgagtgtgggcgtaactcacagccgtggcaggtggggctgtttgag

SEQ ID NO: 678712 - DNA, 120 bp, Artificial Sequence
  ENSG00000186474_2 (sequence is synthesized)
ggcaccagcctgcgctgcgggggtgtccttattgaccacaggtgggtcctcacagcggctcactgcagcggcagcaggtactgggtgcgcctgggggaacacagcctcagccagctcgac

SEQ ID NO: 678713 - DNA, 120 bp, Artificial Sequence
  ENSG00000186474_3 (sequence is synthesized)
tggaccgagcagatccggcacagcggcttctctgtgacccatcccggctacctgggagcctcgacgagccacgagcacgacctccggctgctgcggctgcgcctgcccgtccgcgtaacc

SEQ ID NO: 678714 - DNA, 120 bp, Artificial Sequence
  ENSG00000186474_4 (sequence is synthesized)
cagtgcctcaacctctccatcgtctcccatgccacctgccatggtgtgtatcccgggagaatcacgagcaacatggtgtgtgcaggcggcgtcccggggcaggatgcctgccagggtgat

SEQ ID NO: 678715 - DNA, 120 bp, Artificial Sequence
  ENSG00000186474_5 (sequence is synthesized)
tctgggggccccctggtgtgtgggggagtccttcaaggtctggtgtcctgggggtctgtggggccctgtggacaagatggcatccctggagtctacacctatatttgcaagtatgtggac

SEQ ID NO: 678716 - DNA, 120 bp, Artificial Sequence
  ENSG00000186474_6 (sequence is synthesized)
tggatccggatgatcatgaggaacaactgacctgtttcctccacctccacccccaccccttaacttgggtacccctctggccctcagagcaccaatatctcctccatcacttcccctagc

SEQ ID NO: 678717 - DNA, 120 bp, Artificial Sequence
  ENSG00000186474_7 (sequence is synthesized)
tccactcttgttggcctgggaacttcttggaactttaactcctgccagcccttctaagacccacgagcggggtgagagaagtgtgcaatagtctggaataaatataaatgaaggaggggc

SEQ ID NO: 678718 - DNA, 120 bp, Artificial Sequence
  ENSG00000186474_8 (sequence is synthesized)
caagcaggtcatccccttggtgaccttcaaagagaagcagagagggcagaggtggggggcacagggaaagggtgacctctgagattccccttttcccccagactttggaagtgacccacc

SEQ ID NO: 678719 - DNA, 120 bp, Artificial Sequence
  ENSG00000186474_9 (sequence is synthesized)
cgaggacaggccaaacagtgacagccacgtagaggatctggcagacaaagagacaagactttggaagtgacccaccatggggctcagcatctttttgctcctgtgtgttcttggtgagtt

SEQ ID NO: 678720 - DNA, 120 bp, Artificial Sequence
  ENSG00000186474_10 (sequence is synthesized)
ctcccggagcagggagagggcaggactgcgactggatcccttcacccccatgaggaggccccaccaccctccccatctcagctctggcccccagcctggtggtgaggaggagaggggctt

SEQ ID NO: 678721 - DNA, 120 bp, Artificial Sequence
  ENSG00000186474_11 (sequence is synthesized)
ctggcaccgagtgccacgtctcaggctggggcatcaccaaccacccacggagtaaggggcccagggccaggggtcaggggtcaggatgggtacaagtctgggatgcagggcgagaggtcg

SEQ ID NO: 678722 - DNA, 120 bp, Artificial Sequence
  ENSG00000186474_12 (sequence is synthesized)
gggcttgcagaggagagagggagtggggctgggtcttcccaccctgggtcctttcctccttccccactccgtttagctgtaaagctcaattaagtgtgattagctgagaagagtttctgc

SEQ ID NO: 678723 - DNA, 120 bp, Artificial Sequence
  ENSG00000186474_13 (sequence is synthesized)
agaattagagcacgccccacccctgtcttcgtggtccccttcccttaacccggaaactggatgggccaggacaaagagagttaagagctttgtcagtggtctgtctggagcgacagatgg

SEQ ID NO: 678724 - DNA, 120 bp, Artificial Sequence
  ENSG00000186474_14 (sequence is synthesized)
aaggaaagggaccggttgagcaacatgacaggtggctgaggagccaggtgcagagtggtagagttggctggcggagtggccagcacatgagaagacaggcaggtaggtggacggagagat

SEQ ID NO: 678725 - DNA, 120 bp, Artificial Sequence
  ENSG00000186474_15 (sequence is synthesized)
actccactcttgttggcctgggaacttcttggaactttaactcctgccagcccttctaagacccacgagcggggtgagagaagtgtgcaatagtctggaataaatataaatgaaggaggg

SEQ ID NO: 678726 - DNA, 120 bp, Artificial Sequence
  ENSG00000186479_0 (sequence is synthesized)
agtcccgccacagattcatctgggatcttcaaacagacaagcccttagagacgagggatcaaggcagccgattagagccaattgcttgctttggggacggccagtccttccaggcctggc

SEQ ID NO: 678727 - DNA, 120 bp, Artificial Sequence
  ENSG00000186479_1 (sequence is synthesized)
gacagtggagggaggggaaagacgaaccgagtgccgctgcgggaagacactgaagcaagagcgacacccctttccgccccccaccttgcagcgcaggctttgaaagctgctcccccacct

SEQ ID NO: 678728 - DNA, 120 bp, Artificial Sequence
  ENSG00000186479_2 (sequence is synthesized)
gaatggaaactcggaaccgccgggcggcgcgttccttctcgcccagccttgcaatccatgccgagaggaaggcagtgcgagcccgcgccagcgcccagctcccgggacagggtcggcaat

SEQ ID NO: 678729 - DNA, 120 bp, Artificial Sequence
  ENSG00000186479_3 (sequence is synthesized)
gctgctgagcagaacttgatcgcgctccttcctcgctgctagtggaagcgatgctgcacggcacagctagcgcttccccggctctccttcaagctgaaggttaccgacccgcgcagccag

SEQ ID NO: 678730 - DNA, 120 bp, Artificial Sequence
  ENSG00000186479_4 (sequence is synthesized)
agcactgtgagctgcgcgcctcaggtccgggctccggctgcttggcggcggcgcccagggcaacaaccgggccgcccgcgccggggcgcactgcaccagcggcttcggcttggtggatgt

SEQ ID NO: 678731 - DNA, 120 bp, Artificial Sequence
  ENSG00000186479_5 (sequence is synthesized)
atgtgtatgcatgagttctgcaccgaatgggcgcaaaaagcgccccagccggtccacccgctcctcgatcttccagatcagcaagcccccgctgcagagcggagattgggagcgcagggg

SEQ ID NO: 678732 - DNA, 120 bp, Artificial Sequence
  ENSG00000186479_6 (sequence is synthesized)
cagcggctccgagagcgcccacaaaacccaacgagccctggacgactgcaagatgcttgtccaagagttcaacacacaagtggccctgtaccgagagctggtcatttctattggggatgt

SEQ ID NO: 678733 - DNA, 120 bp, Artificial Sequence
  ENSG00000186479_7 (sequence is synthesized)
ctcggtcagctgcccctcactccgggcggaaatgcacaagacaagaaccaaaggctgtgaaatggcccgtcaggcacaccaaaaattggctgccatctcaggcccggaagatggtgagat

SEQ ID NO: 678734 - DNA, 120 bp, Artificial Sequence
  ENSG00000186479_8 (sequence is synthesized)
ccatccagaaatctgtcggctttacatccagctgcagtgctgcttagaaatgtataccacagagatgctaaaatccatatgtctgctggggtctcttcagtttcatcgaaaaggaaagga

SEQ ID NO: 678735 - DNA, 120 bp, Artificial Sequence
  ENSG00000186479_9 (sequence is synthesized)
acctggcgggggaaccaagagtttggattgcaaaattgaggagagtgctgaaacacctgccctagaagactcctcatcatcccccgtagatagtcagcaacattcctggcaggtttccac

SEQ ID NO: 678736 - DNA, 120 bp, Artificial Sequence
  ENSG00000186479_10 (sequence is synthesized)
agacattgagaacactgaaagagacatgagagaaatgaaaaaccttttaagcaaactcagggaaactatgcctttaccattgaaaaatcaagatgacagcagccttctgaatctaactcc

SEQ ID NO: 678737 - DNA, 120 bp, Artificial Sequence
  ENSG00000186479_11 (sequence is synthesized)
ctaccccctggtgagaagacggaagagaaggttctttgggctgtgttgtctcatctcaagctaggtggctcctcctggaaacccactgagaacatctgaaaaaaaatcacaaaacccgag

SEQ ID NO: 678738 - DNA, 120 bp, Artificial Sequence
  ENSG00000186479_12 (sequence is synthesized)
gacctccagacagctgaaccacacagttattggtttttgactatgttttctatgcttccttattacttttatctgcctccccctgcccttttaaatgattttacacttgaaagcagctgc

SEQ ID NO: 678739 - DNA, 120 bp, Artificial Sequence
  ENSG00000186479_13 (sequence is synthesized)
cgtcaagaaaaaaaagaacagattcaaaaaccaggctgtttttaaaagggaattttaaagctgacattgtgcatgtctgctccaaaccacgccatgacagatgcaagaattatgattttt

SEQ ID NO: 678740 - DNA, 120 bp, Artificial Sequence
  ENSG00000186479_14 (sequence is synthesized)
taaaggttttttaaatgtattatacagaggaaaaatatttcacatataatagtatatctatagctcttgctgatctcatgttaaaatttatcgtatatgaaagaagtctttaaacataga

SEQ ID NO: 678741 - DNA, 120 bp, Artificial Sequence
  ENSG00000186479_15 (sequence is synthesized)
aacatagaaatctatttaaaactgaaaaactgtgttcaaaaatccaatctatcaatatcattagaaataatattataagcaaacatataccacctcacctattgctttctctgcactcat

SEQ ID NO: 678742 - DNA, 120 bp, Artificial Sequence
  ENSG00000186479_16 (sequence is synthesized)
ttacatttagtcttccattctgtcagaatctaagagcttcaacataaaagtatcttaatttataaagcaacaaaaaccacatatgaaaagtactaaaattttgtaaatacacaataatcc

SEQ ID NO: 678743 - DNA, 120 bp, Artificial Sequence
  ENSG00000186479_17 (sequence is synthesized)
taataccttcgtacaaatgcatatgggcaactaatttctttttgatccaatgatgtctttttcagcttcttggagaatgaagtaatccagttaggaaatggtgtagtaacatatacaatt

SEQ ID NO: 678744 - DNA, 120 bp, Artificial Sequence
  ENSG00000186479_18 (sequence is synthesized)
taaaatcaaatattattacattttgttctaattgaaatctgaagcatggtgtctgcacatcagcatagtgttaaatcttatagggcatgctggaattagctcagattataaaaatattta

SEQ ID NO: 678745 - DNA, 120 bp, Artificial Sequence
  ENSG00000186479_19 (sequence is synthesized)
acattttacattgttaataaagttttttagttaagctaagcttgtctcattttagatgactatgcagataagatttttccaacgtgtacttggtgtcttgtcttatgcttagactcttga

SEQ ID NO: 678746 - DNA, 120 bp, Artificial Sequence
  ENSG00000186479_20 (sequence is synthesized)
aagcaggacacattaagcaatactatattttagaaaggaggaagccacatgctttgtttttctgctcacagctttgttgtgatcttccttcactaaacttgtaacatggtacaaattttg

SEQ ID NO: 678747 - DNA, 120 bp, Artificial Sequence
  ENSG00000186479_21 (sequence is synthesized)
ttataccgtctcctgttcttcctttggcccatttcccagacagaatttcccatgggttgagagatcaagtctttgcactttttttcttgttttccatagtctgaaaaaccttcaagtcag

SEQ ID NO: 678748 - DNA, 120 bp, Artificial Sequence
  ENSG00000186479_22 (sequence is synthesized)
acaggaggcaccagtgtccagtacaatagaaggatgagctagatgccgataagtggtttatccaagacacatctttagtcccaaccctgttctttaccaatacttatgtgcacaggcatt

SEQ ID NO: 678749 - DNA, 120 bp, Artificial Sequence
  ENSG00000186479_23 (sequence is synthesized)
tgtataccaatatttttacctaaaaactaaatatattaaggccttttgctttagtgaagatgaactactgtaataattattgtattaggttgaattatatgaaatttcctatatgtgact

SEQ ID NO: 678750 - DNA, 120 bp, Artificial Sequence
  ENSG00000186479_24 (sequence is synthesized)
gactgttttgacctacaaaatggcaatttcttatagttcaccctaatatccaatgtggaaattatacttggaattgtcttctagctcttttgattgaaagtgaaagaattaaagggttgg

SEQ ID NO: 678751 - DNA, 120 bp, Artificial Sequence
  ENSG00000186479_25 (sequence is synthesized)
aagagaacgttatacaggtctctatttagatcataccagctggtttttggccttattctttgaatctagagttgtgttccaaggaaccagtaattaatgcatggttataggtatacctgg

SEQ ID NO: 678752 - DNA, 120 bp, Artificial Sequence
  ENSG00000186479_26 (sequence is synthesized)
cttcaaaaaaaagaagtagccgtggaaagctatatgagaaaatcacaattttctgaatcaaatatttgtaaaacaatttggctatttaaagactcttagggtaaatactccctggaaaag

SEQ ID NO: 678753 - DNA, 120 bp, Artificial Sequence
  ENSG00000186479_27 (sequence is synthesized)
caagcaatccagacttatctggtctgcaaaccttgatttcagcttaatatcctttcctgaatctaattcattttcacccactaaggtcatttcatttaagatccattgtttttgaaattt

SEQ ID NO: 678754 - DNA, 120 bp, Artificial Sequence
  ENSG00000186479_28 (sequence is synthesized)
tgaagtagcccagtttggcagctctcagcacctgcctctgccctctcctatacttcaactatattgaactctagcttcaatctagttcctactaatccatgcaaaagttattaactgata

SEQ ID NO: 678755 - DNA, 120 bp, Artificial Sequence
  ENSG00000186479_29 (sequence is synthesized)
agcccaatcttgttcagcacgttcttctaaatgcctgacctaaataacttctgcttggttaacttgtgttcattctcaccttagcctcagtgtgaaagtaacacttaccttctgtgcaat

SEQ ID NO: 678756 - DNA, 120 bp, Artificial Sequence
  ENSG00000186479_30 (sequence is synthesized)
tgtcctttgtacaactgaagactgttaataaattcaggtctcacctccatgtctgaaaaggctatagtagctattcatggagatgggaatttgtctaattacctagccagagtttgcata

SEQ ID NO: 678757 - DNA, 120 bp, Artificial Sequence
  ENSG00000186479_31 (sequence is synthesized)
tttaaggtaatatattcagctaccgtatcttttattcatagtgcctgttttccagcctttgatcagttttgtagttcccgtggataaactccaagatctaaagatcctctttcagtagca

SEQ ID NO: 678758 - DNA, 120 bp, Artificial Sequence
  ENSG00000186479_32 (sequence is synthesized)
tatactaaaattaagtttagtgctcaaaaccctggtaacctacactggcccaaggttacagtaggtaattcaccgtctcacattagacaggccaatgcatcccttaggagctgccccact

SEQ ID NO: 678759 - DNA, 120 bp, Artificial Sequence
  ENSG00000186479_33 (sequence is synthesized)
ctcctctcacctaccaaaggattttctcaggtgtggttccaagcgataaagttctactgtctcggcttcctgctggtaattcgctttcagattagcaataacactgagctgatctctagg

SEQ ID NO: 678760 - DNA, 120 bp, Artificial Sequence
  ENSG00000186479_34 (sequence is synthesized)
gttaagaagagaacattgaactcattttgtcgcatgtacccacaggcttgaaacagaaaatgatgtaaacttttgtggcatacattcacccattttcccaccatatctttactatcctgt

SEQ ID NO: 678761 - DNA, 120 bp, Artificial Sequence
  ENSG00000186479_35 (sequence is synthesized)
gttgatttttttttcaaattacaaagacaatacatgttctttgtgggaaatctgaaaaatactaccaaatagaaaataaaaatcacctgaattccaccacgaccacattgtttaaaacca

SEQ ID NO: 678762 - DNA, 120 bp, Artificial Sequence
  ENSG00000186479_36 (sequence is synthesized)
catttctgggttttaaatcagtcagtggctgggcccaaaggcacttttgggtaagataagtgaagaaatgcccacaaggccaaggtgtcacttaaaaaaacaaacaaaaaaaacaagcca

SEQ ID NO: 678763 - DNA, 120 bp, Artificial Sequence
  ENSG00000186479_37 (sequence is synthesized)
aagtcaaaactcggctccacaatggtttactttaaatcaactttcagtggagaagaaaggaaggtggccaagggcaggaattttaatgatgacagcagccttctgaatctaactccctac

SEQ ID NO: 678764 - DNA, 120 bp, Artificial Sequence
  ENSG00000186480_0 (sequence is synthesized)
gcggccgtcccgggccgtgactcctcctttcccccgccccgcctccgttcggagagccggcgggcgggcgcctctcggccaggaagcgcctcttggacgcgtgtgaccgatgcccagatt

SEQ ID NO: 678765 - DNA, 120 bp, Artificial Sequence
  ENSG00000186480_1 (sequence is synthesized)
gcacgaccacttctggagctgctcctgtgcgcacagcgcgaggcgccgaggccccccgcgagccagcgccgcggggctggcggccaaggttggggagatgatcaacgtttccgtgtccgg

SEQ ID NO: 678766 - DNA, 120 bp, Artificial Sequence
  ENSG00000186480_2 (sequence is synthesized)
tccctgctggcggcccacggtgccccggacgctgaccccgcgcccaggggccgcagtgctgcgatgagcggccccgagcccggcagcccctaccccaacacctggcatcatcgcctgttg

SEQ ID NO: 678767 - DNA, 120 bp, Artificial Sequence
  ENSG00000186480_3 (sequence is synthesized)
gttgcagaggagcctcgtgctcttctcggttggggtggtcctagccctggtgctcaacctgctgcagatccagaggaatgtcactctcttccccgaggaggtgatcgccaccatcttttc

SEQ ID NO: 678768 - DNA, 120 bp, Artificial Sequence
  ENSG00000186480_4 (sequence is synthesized)
ctccgcctggtgggtccctccctgctgcgggacagcagctgctgttgttggcctactgtacccctgtatcgacagtcacctcggagaaccccacaaatttaagagagaatgggccagtgt

SEQ ID NO: 678769 - DNA, 120 bp, Artificial Sequence
  ENSG00000186480_5 (sequence is synthesized)
catgcgctgcatagcagtttttgttggcattaaccacgccagtgctaaattggattttgccaataatgtccagctgtccttgactttagcagccctatctttgggcctttggtggacatt

SEQ ID NO: 678770 - DNA, 120 bp, Artificial Sequence
  ENSG00000186480_6 (sequence is synthesized)
tgatcgttccagaagtggccttgggctggggatcaccatagcttttctagctacgctgatcacgcagtttctcgtgtataatggtgtctatcagtatacatccccagatttcctctatat

SEQ ID NO: 678771 - DNA, 120 bp, Artificial Sequence
  ENSG00000186480_7 (sequence is synthesized)
tcgttcttggctcccttgtatatttttctcaggaggcgtcacggtggggaacataggacgacagttagctatgggtgttcctgaaaagccccatagtgattgagtcttcaaaaccaccga

SEQ ID NO: 678772 - DNA, 120 bp, Artificial Sequence
  ENSG00000186480_8 (sequence is synthesized)
ttctgagagcaaggaagattttggaagaaaatctgactgtggattatgacaaagattatcttttttcttaagtaatctatttagatcgggctgactgtacaaatgactcctggaaaaaac

SEQ ID NO: 678773 - DNA, 120 bp, Artificial Sequence
  ENSG00000186480_9 (sequence is synthesized)
tcttcacctagtctagaatagggaggtggagaatgatgacttaccctgaagtcttcccttgactgcccgcactggcgcctgtctgtgccctggagcattctgcccaggctacgtgggttc

SEQ ID NO: 678774 - DNA, 120 bp, Artificial Sequence
  ENSG00000186480_10 (sequence is synthesized)
aggcaggtggcagcttcccaagtattcgatttcattcatgtgattaaaacaagttgccatatttcaaagccttgaactaagactcaattaccaacccgcagttttgtgtcagtgcccaaa

SEQ ID NO: 678775 - DNA, 120 bp, Artificial Sequence
  ENSG00000186480_11 (sequence is synthesized)
ggaggtaggttgatggtgcttaacaaacatgaagtatggtgtaataggaataatatttatccaaaagatttttaaaaatagggctgtgtttaaaaaaaaaaacaaaacaagaaaagcagc

SEQ ID NO: 678776 - DNA, 120 bp, Artificial Sequence
  ENSG00000186480_12 (sequence is synthesized)
tggggtcgcggcgtggccacgcttcacggtcacgctcgtccgtcctgcagtggcgtgtttacatggtcacacgtgtgtgtatcaccagtgggtcaactgcttgtcattcctcccgtggca

SEQ ID NO: 678777 - DNA, 120 bp, Artificial Sequence
  ENSG00000186480_13 (sequence is synthesized)
gtttgtgtagacaatcttactgagcaaaaggcaatgaaaagtcttggttcccacactgcgatatattggaattttcacctcagtttatgaagtttatttcgaaatccatagtcatctaag

SEQ ID NO: 678778 - DNA, 120 bp, Artificial Sequence
  ENSG00000186480_14 (sequence is synthesized)
aatgaatacctgtctgccatgtatttcaatcttagtgagccaaaattgtttgtttgttactacagaatagagatgactgttttttgccacagccctatggaatttgcaatctgtgattgc

SEQ ID NO: 678779 - DNA, 120 bp, Artificial Sequence
  ENSG00000186480_15 (sequence is synthesized)
cttgtaaaaaggagagtgcatatggcactgcattaaacgtgtggtgtttctagtcaatgatattggtgagcacaatgtattcatttaatggcatagaccataccagacctaatttgcaag

SEQ ID NO: 678780 - DNA, 120 bp, Artificial Sequence
  ENSG00000186480_16 (sequence is synthesized)
tattgggtcttaaacttcaagtgcaatgtatatgaaaaccaatctgagccttgtatctcttaaatatttattttttttaacgtgtgagatgttcgagagaaggttctccattcatttcag

SEQ ID NO: 678781 - DNA, 120 bp, Artificial Sequence
  ENSG00000186480_17 (sequence is synthesized)
tgctgcctggaggaaactcggcaatgatttctttcagttgtgaagttcctttcgtgttacaccctccactgaaccctcaaccttcgaaatactccagttttgtgggtttggtcattttta

SEQ ID NO: 678782 - DNA, 120 bp, Artificial Sequence
  ENSG00000186480_18 (sequence is synthesized)
cttataaatttacctttttgtattttgcaatttacatgtgtttggtttgttttaaattctgtgaaagtggcttgattaaaagactccttttaaatggaagccaccagtcagcagaatgga

SEQ ID NO: 678783 - DNA, 120 bp, Artificial Sequence
  ENSG00000186480_19 (sequence is synthesized)
agcttagaggaacttgcctgtgagcgctggtctttgtgtttggttttgtgatgtaacgatctttgctggggttttttgctttgttttgagggaaatgtcttggagtaaattttaagttcc

SEQ ID NO: 678784 - DNA, 120 bp, Artificial Sequence
  ENSG00000186480_20 (sequence is synthesized)
tggagttaatttgttttacaggaattttgttttttaaaaaaataggatcattctgaactttggaatgacccccttatatattttctgaaaatgaaaacagttacatgaaaaaaatttcca

SEQ ID NO: 678785 - DNA, 120 bp, Artificial Sequence
  ENSG00000186480_21 (sequence is synthesized)
atgaagatgtcagcattttatgaaaaaccagaagttattagatgaaagcagcgagtgaatctttaaaacagacttgatcacgcacacacaataagtctttctctccgaaaccggaagtaa

SEQ ID NO: 678786 - DNA, 120 bp, Artificial Sequence
  ENSG00000186480_22 (sequence is synthesized)
atctatatctgttagaaataatgtagccaaaagaatgtaaatttgaggatttttttgccaatagtttatagaaaatatatgaaccaaagtgatttgagtttgtaaaaatgtaaaatagta

SEQ ID NO: 678787 - DNA, 120 bp, Artificial Sequence
  ENSG00000186480_23 (sequence is synthesized)
tgaacaaaatttgcactctaccagatttgaacatctagtgaggttcacattcatactaagttttcaacattgtgttctttttgcattcattttttacttttattaaaggttcaaaaccaa

SEQ ID NO: 678788 - DNA, 120 bp, Artificial Sequence
  ENSG00000186480_24 (sequence is synthesized)
ggtgtctatcagtaagtgtgtgttttcaaatattggctttggaaagcttacttaactttcattaaaacatccactaagcttagatattttcatattttatttgttttttatatagaatga

SEQ ID NO: 678789 - DNA, 120 bp, Artificial Sequence
  ENSG00000186480_25 (sequence is synthesized)
catgaaattctcaaaaatgctgctatccataacttaatgtaacgcaaaggaaaaccaagtagtagcagttacaaccaaacaaatatgaacattcgtaacattggatggttgatatgcgtt

SEQ ID NO: 678790 - DNA, 120 bp, Artificial Sequence
  ENSG00000186480_26 (sequence is synthesized)
ctgcatatccccactacagagaatctgtgatgtagaattgagccaggtgaaattgactgctaaggtacagtttcttttctcgctccaggtatacatccccagatttcctctatattcgtt

SEQ ID NO: 678791 - DNA, 120 bp, Artificial Sequence
  ENSG00000186480_27 (sequence is synthesized)
cttggctcccttgtatatttttctcaggaggcgtcacggtggggaacataggacgacagttagctatggtaagtgaaatgatcatattatcttctaaaacttgcgtctctttaccttgat

SEQ ID NO: 678792 - DNA, 120 bp, Artificial Sequence
  ENSG00000186480_28 (sequence is synthesized)
agaatgactttacatgatacattcaaatttgcgttcatatattctggttcagacttgagtgacaactactgagaaaagcttatatttaaaaaaataggtaatgatacccaggtaattctt

SEQ ID NO: 678793 - DNA, 120 bp, Artificial Sequence
  ENSG00000186487_0 (sequence is synthesized)
cacactaaacagtgagagagcttttccctgcagtcttgttgaagcaccccgggttttttgctcattgttggtgggtgcattttaattttttcattccctggactatgggttatgatatcc

SEQ ID NO: 678794 - DNA, 120 bp, Artificial Sequence
  ENSG00000186487_1 (sequence is synthesized)
atactcactgaagacaaaaagccaccttttctgcgtcttggtggcatgcatgtgtctcatcatcctttcaaacttgtggtggaacagggttttcttccctgtctgtgtattttgagccag

SEQ ID NO: 678795 - DNA, 120 bp, Artificial Sequence
  ENSG00000186487_2 (sequence is synthesized)
cacagttaccaaaattgaacttgtctttcgcttgtgagcggttgtggtcattgtgagggcgggtcatgaggaggctgtagccaaggacgaggtgtgtgcggctgttgcctggacgtttgt

SEQ ID NO: 678796 - DNA, 120 bp, Artificial Sequence
  ENSG00000186487_3 (sequence is synthesized)
ccaatccacgttgacatttgagggatcacagcgtgtgaaaatgaactcagaggagaattggtgaattcctatccagtgggcatcttcaaaccctggtcgacggcggaagaatatcaggtc

SEQ ID NO: 678797 - DNA, 120 bp, Artificial Sequence
  ENSG00000186487_4 (sequence is synthesized)
ctgagatcacccacccggcgcggcaacagtgcagagtggccacatctggtggaagaagaaaaaaatgtagttattgaattcaatcaagtgtttgcatctttcaagctatcaacaaaattc

SEQ ID NO: 678798 - DNA, 120 bp, Artificial Sequence
  ENSG00000186487_5 (sequence is synthesized)
catcaagaaaggttccagttggtctcacagacgtatggatatccgaggagccacctaaagatggagaaatcaaggcatagagagattaagtgactttgccacagtcacaagctggagagg

SEQ ID NO: 678799 - DNA, 120 bp, Artificial Sequence
  ENSG00000186487_6 (sequence is synthesized)
accaggagtagagcttagagcgagcccctgactctgggcctgcgtcctgccaggagtcacgctgcctccgttcctaggagagaagacttcctgtaagatggaggtggacaccgaggagaa

SEQ ID NO: 678800 - DNA, 120 bp, Artificial Sequence
  ENSG00000186487_7 (sequence is synthesized)
gcggcatcgcacgcggtccaaaggggttcgagttcccgtggaaccagccatacaagagctgttcagctgtcccacccctggctgtgacggcagtggtcatgtcagtggcaaatatgcaag

SEQ ID NO: 678801 - DNA, 120 bp, Artificial Sequence
  ENSG00000186487_8 (sequence is synthesized)
acacagaagtgtatatggttgtcccttggcgaaaaaaagaaaaacacaagataaacagccccaggaacctgctcctaaacgaaagccatttgccgtgaaagcagacagctcctcagtgga

SEQ ID NO: 678802 - DNA, 120 bp, Artificial Sequence
  ENSG00000186487_9 (sequence is synthesized)
tgagtgtgacgacagtgatgggactgaggacatggatgagaaggaggaggatgagggggaggagtactccgaggacaatgatgagccaggggatgaggacgaggaggacgaggaggggga

SEQ ID NO: 678803 - DNA, 120 bp, Artificial Sequence
  ENSG00000186487_10 (sequence is synthesized)
ccgggaggaggaggaggagatcgaggaggaggatgaggacgatgacgaggatggagaagatgtggaggatgaagaagaggaagaggaggaggaggaggaggaggaagaggaagaagaaaa

SEQ ID NO: 678804 - DNA, 120 bp, Artificial Sequence
  ENSG00000186487_11 (sequence is synthesized)
cgaagaccatcaaatgaattgtcacaatactcgaataatgcaagacacagaaaaggatgataacaataatgacgaatatgacaattacgatgaactggtggccaagtcattgttaaacct

SEQ ID NO: 678805 - DNA, 120 bp, Artificial Sequence
  ENSG00000186487_12 (sequence is synthesized)
cggcaaaatcgctgaggatgcagcctaccgggccaggactgagtcagaaatgaacagcaatacctccaatagtctggaagacgatagtgacaaaaacgaaaacctgggtcggaaaagtga

SEQ ID NO: 678806 - DNA, 120 bp, Artificial Sequence
  ENSG00000186487_13 (sequence is synthesized)
gttgagtttagacttagacagtgatgttgttagagaaacagtggactcccttaaactattagcccaaggacacggtgttgtgctctcagaaaacatgaatgacagaaattatgcagacag

SEQ ID NO: 678807 - DNA, 120 bp, Artificial Sequence
  ENSG00000186487_14 (sequence is synthesized)
catgtcgcagcaagacagtagaaatatgaattacgtcatgttggggaagcccatgaacaacggactcatggaaaagatggtggaggagagcgatgaggaggtgtgtctgagcagtctgga

SEQ ID NO: 678808 - DNA, 120 bp, Artificial Sequence
  ENSG00000186487_15 (sequence is synthesized)
gtgtttgaggaatcagtgcttcgacctggccaggaagctcagtgagaccaacccgcaggagaggaatccgcagcagaacatgaacatccgtcagcatgtccggccagaagaggacttccc

SEQ ID NO: 678809 - DNA, 120 bp, Artificial Sequence
  ENSG00000186487_16 (sequence is synthesized)
cggaaggacgccggacagaaactactcggacatgctgaacctcatgcggctggaggagcagttgagcccccggtcgagagtgtttgccagctgtgcgaaggaggatgggtgtcatgagcg

SEQ ID NO: 678810 - DNA, 120 bp, Artificial Sequence
  ENSG00000186487_17 (sequence is synthesized)
ggacgacgataccacctctgtgaactcggacaggtctgaagaggtgttcgacatgaccaaggggaacctgaccctgctggagaaagccatcgctttggaaacggaaagagcaaaggccat

SEQ ID NO: 678811 - DNA, 120 bp, Artificial Sequence
  ENSG00000186487_18 (sequence is synthesized)
gagggagaagatggccatggaagctgggaggagggacaatatgaggtcatatgaggaccagtctccgagacaacttcccggggaggacagaaagcctaaatccagtgacagccatgtcaa

SEQ ID NO: 678812 - DNA, 120 bp, Artificial Sequence
  ENSG00000186487_19 (sequence is synthesized)
aaagccatactatgatccctcaagaacagaaaagaaagagagcaagtgtccaacccccgggtgtgatggaaccggccacgtaactgggctgtacccacatcaccgcagcctgtccggatg

SEQ ID NO: 678813 - DNA, 120 bp, Artificial Sequence
  ENSG00000186487_20 (sequence is synthesized)
cccgcacaaagatagggtccctccagaaatccttgccatgcatgaaagtgtcctcaagtgccccactccgggctgcacggggcgcgggcatgtcaacagcaacaggaactcccaccgaag

SEQ ID NO: 678814 - DNA, 120 bp, Artificial Sequence
  ENSG00000186487_21 (sequence is synthesized)
cctctccggatgcccgatcgctgcagcagagaaactggccaaggcacaggaaaagcaccagagctgcgacgtgtccaagtccagccaggcctcggaccgcgtgctcaggccaatgtgctt

SEQ ID NO: 678815 - DNA, 120 bp, Artificial Sequence
  ENSG00000186487_22 (sequence is synthesized)
tgtgaagcagctggagattcctcagtatggctacagaaacaatgtccccacaactacgccgcgttccaacctggccaaggagctcgagaaatattccaagacctcgtttgaatacaacag

SEQ ID NO: 678816 - DNA, 120 bp, Artificial Sequence
  ENSG00000186487_23 (sequence is synthesized)
ttacgacaaccatacttatggcaagcgagccatagctcccaaggtgcaaaccagggatatatcccccaaaggatatgatgatgcgaagcggtactgcaaggaccccagccccagcagcag

SEQ ID NO: 678817 - DNA, 120 bp, Artificial Sequence
  ENSG00000186487_24 (sequence is synthesized)
cagcaccagcagctacgcgcccagcagcagcagcaacctgagctgcggcgggggcagcagcgccagcagcacgtgcagcaagagcagcttcgactacacgcacgacatggaggcggccca

SEQ ID NO: 678818 - DNA, 120 bp, Artificial Sequence
  ENSG00000186487_25 (sequence is synthesized)
catggcggccaccgccatcctcaacctgtccacgcgctgccgcgagatgccgcagaacctgagcaccaagccgcaggacctgtgcgccacgcggaaccctgacatggaggtggatgagaa

SEQ ID NO: 678819 - DNA, 120 bp, Artificial Sequence
  ENSG00000186487_26 (sequence is synthesized)
cgggaccctggacctcagcatgaacaagcagaggccgcgggacagctgctgccccatcctgacccctctggagcccatgtccccccagcagcaggcagtgatgaacaaccggtgtttcca

SEQ ID NO: 678820 - DNA, 120 bp, Artificial Sequence
  ENSG00000186487_27 (sequence is synthesized)
gctgggcgagggcgactgctgggacttgcccgtagactacaccaaaatgaaaccccggaggatagacgaggacgagtccaaagacattactccagaagacttggacccattccaggaggc

SEQ ID NO: 678821 - DNA, 120 bp, Artificial Sequence
  ENSG00000186487_28 (sequence is synthesized)
tctagaagaaagacggtatcccggggaggtgaccatcccaagtcccaaacccaagtaccctcagtgcaaggagagcaaaaaggacttaataactctgtctggctgccccctggcggacaa

SEQ ID NO: 678822 - DNA, 120 bp, Artificial Sequence
  ENSG00000186487_29 (sequence is synthesized)
ccagctcccaagaactcaagtgccccacgcctggctgtgatggttctggacatatcaccggcaattatgcttctcatcggagcctttcaggttgcccaagagcaaagaaaagtggtatca

SEQ ID NO: 678823 - DNA, 120 bp, Artificial Sequence
  ENSG00000186487_30 (sequence is synthesized)
ggatagcacagagcaaagaagataaagaagatcaagaacccatcaggtgtccggtccccgggtgcgacggccagggccacatcactgggaagtacgcgtcccatcgcagcgcctccgggt

SEQ ID NO: 678824 - DNA, 120 bp, Artificial Sequence
  ENSG00000186487_31 (sequence is synthesized)
gccccttggcggccaagaggcagaaagacgggtacctgaatggctcccagttctcctggaagtcggtcaagacggaaggcatgtcctgccccacgccaggatgcgacggctcaggccacg

SEQ ID NO: 678825 - DNA, 120 bp, Artificial Sequence
  ENSG00000186487_32 (sequence is synthesized)
tcagcggcagcttcctcacacaccgcagcttgtcaggatgcccgagagccacgtcagcgatgaagaaggcaaagctttctggagagcagatgctgaccatcaaacagcgggccagcaacg

SEQ ID NO: 678826 - DNA, 120 bp, Artificial Sequence
  ENSG00000186487_33 (sequence is synthesized)
gtatagaaaatgatgaagaaatcaaacagttagatgaagaaatcaaggagctaaatgaatccaattcccagatggaagccgatatgattaaactcagaactcagattaccacgatggaga

SEQ ID NO: 678827 - DNA, 120 bp, Artificial Sequence
  ENSG00000186487_34 (sequence is synthesized)
gcaacctgaagaccatcgaagaggagaacaaagtgattgagcagcagaacgagtctctcctccacgagctggcgaacctgagccagtctctgatccacagcctggctaacatccagctgc

SEQ ID NO: 678828 - DNA, 120 bp, Artificial Sequence
  ENSG00000186487_35 (sequence is synthesized)
cgcacatggatccaatcaatgaacaaaattttgatgcttacgtgactactttgacggaaatgtatacaaatcaagatcgttatcagagtccagaaaataaagccctactggaaaatataa

SEQ ID NO: 678829 - DNA, 120 bp, Artificial Sequence
  ENSG00000186487_36 (sequence is synthesized)
agcaggctgtgagaggaattcaggtctgaacagctgctgtagtgatgaaactcttgcttaaaaaggatgcctcttgttttttgctgctgtaacttaccagaaagtgttctatatttattt

SEQ ID NO: 678830 - DNA, 120 bp, Artificial Sequence
  ENSG00000186487_37 (sequence is synthesized)
ctgtttgaatttgaaacagtgttatgcttacaagacttcataatgattttatgtcttgctttaaagatagtacctgcagaatagtttttgaatacacccacattttgtacgtttccatgt

SEQ ID NO: 678831 - DNA, 120 bp, Artificial Sequence
  ENSG00000186487_38 (sequence is synthesized)
aagctgacatagtgttctgccatgtaatgtttatagctgctgatgtatgcacatttgggggtatatctatttctgaagaggtaagctgatcaaaataaatagagtgtaaattctttttaa

SEQ ID NO: 678832 - DNA, 120 bp, Artificial Sequence
  ENSG00000186487_39 (sequence is synthesized)
tgctttagtgattaaatgttttagtattttgaactgaaatggacacacaaacacacacacgcacacacagacccacagctttgaatgatcatgttgtggctgagcagccgctttttagac

SEQ ID NO: 678833 - DNA, 120 bp, Artificial Sequence
  ENSG00000186487_40 (sequence is synthesized)
gttatcattttgcctcatgttggaggactttatggaatttaagaaatacattttgtgtgcatattgtttcatagcaagaattcgttgcaaaaatgctttatttttgaacaatgcttggaa

SEQ ID NO: 678834 - DNA, 120 bp, Artificial Sequence
  ENSG00000186487_41 (sequence is synthesized)
atattatgtgacttttttgtttgtttgttttaggaggatggtgtatggtgggggcaataaatgaggttttttgcattccaaggaaatggcatatggattaactgtaagaaatgaaataag

SEQ ID NO: 678835 - DNA, 120 bp, Artificial Sequence
  ENSG00000186487_42 (sequence is synthesized)
taatttattgtaagacaacatcaagccatggaaacttggcagaagattcaaagcagcttaaacagcacttttaaattaactcctaagcgttacatggttgtgactatggaaactccagtt

SEQ ID NO: 678836 - DNA, 120 bp, Artificial Sequence
  ENSG00000186487_43 (sequence is synthesized)
aagacaggatcttatcagaggtggacaacgtgaagatttccttttccattttcaataaactttggaacaaccttctcgtatctcccctagagtttcgtgcccctctgaactgtctgttat

SEQ ID NO: 678837 - DNA, 120 bp, Artificial Sequence
  ENSG00000186487_44 (sequence is synthesized)
tgcaatgtagtttatcaacagaatttgtgtgttttcgatttaagctaaaagataatttaagaacatttatttccccttttcactttaaaaaattatgattattcctattattgttatgaa

SEQ ID NO: 678838 - DNA, 120 bp, Artificial Sequence
  ENSG00000186487_45 (sequence is synthesized)
ccttcttattttacatttgagggataaaggcaaatgatttgtgagtcttctagttactggaccgagttttctgctggatctggtgggaaggcagctcggtaaagtttccctcctgctccc

SEQ ID NO: 678839 - DNA, 120 bp, Artificial Sequence
  ENSG00000186487_46 (sequence is synthesized)
cccgcccgactttgactctgaatcagcatttggtcctattcagaggactcttaccacgacgtttctgttctacacttgggtggagaccagttgaccatagagcatttgcagagcctcatt

SEQ ID NO: 678840 - DNA, 120 bp, Artificial Sequence
  ENSG00000186487_47 (sequence is synthesized)
gtttgatttcttgtgactattctaagaatgaatgcaatcagattttaaaagtaactaaatatacttcagcacttttttgctttaaactagatcatcttagacttgtttataccttccaga

SEQ ID NO: 678841 - DNA, 120 bp, Artificial Sequence
  ENSG00000186487_48 (sequence is synthesized)
tttgattgttttactcccaatgactgcactatatgtatgcataagaccacttttgagcgctgtgttcccccttctgagtagtcctttgacgacgtgttgtgttttctgatgttgacttga

SEQ ID NO: 678842 - DNA, 120 bp, Artificial Sequence
  ENSG00000186487_49 (sequence is synthesized)
gttccatttagtagcatctcttccttccatgtcttgatgttatgcaggaagtacagacgtactttaaatttttgttatgaaataaaaaaaagatgggttttgtaaaaataaaaaaaaaat

SEQ ID NO: 678843 - DNA, 120 bp, Artificial Sequence
  ENSG00000186487_50 (sequence is synthesized)
atttttagcagaacaggacttacagggtcattgtccccacaatgtgccagtcgactatttgcacttaccttgtcctatatatccgtacggaggtgtgcaattcctcgtgtcagtagcctt

SEQ ID NO: 678844 - DNA, 120 bp, Artificial Sequence
  ENSG00000186487_51 (sequence is synthesized)
gtgacactgaacctggatggattatagaggagccctcacggctgatcaataatgttgcaaagggagactacagggatctcacgacgaatattctgatacaatactcaacctcggtatata

SEQ ID NO: 678845 - DNA, 120 bp, Artificial Sequence
  ENSG00000186487_52 (sequence is synthesized)
tatatgtgtataaatatatgtatatcccagcggcactttatactgttcactgtacaaaagcttacagttttccacaaggactttaataactagctgggaaaagacgatgtaattatttcg

SEQ ID NO: 678846 - DNA, 120 bp, Artificial Sequence
  ENSG00000186487_53 (sequence is synthesized)
gggctctgcggaaccttctctgtacagcgccccctttctgttgtgctattggttgcagctgccatgctcagaatgcgttttgagagctgaagcaaggtgcttgcagtcacctgaggccgt

SEQ ID NO: 678847 - DNA, 120 bp, Artificial Sequence
  ENSG00000186487_54 (sequence is synthesized)
ccgtgtggcccagggccccagctgcctttagggcccccattgttcataacagcatatgcatttccccaccgcgttgtgtctgcagcttctttgccaatatagtaatgcttttagtagagt

SEQ ID NO: 678848 - DNA, 120 bp, Artificial Sequence
  ENSG00000186487_55 (sequence is synthesized)
actagatagtatcagttttggattcttattgttatcacctatgtacaatggaaagggattttaagcacaaacctgctgctcatctaacgttggtacataatctcaaatcaaaagttatct

SEQ ID NO: 678849 - DNA, 120 bp, Artificial Sequence
  ENSG00000186487_56 (sequence is synthesized)
gtgactattatatagggatcacaaaagtgtcacatattagaatgctgacctttcatatggattattgtgagtcatcagagtttattataacttattgttcatattcatttctaagttaat

SEQ ID NO: 678850 - DNA, 120 bp, Artificial Sequence
  ENSG00000186487_57 (sequence is synthesized)
ttaagtaatcatttattaagacagaattttgtataaactatttattgtgctctctgtggaactgaagtttgatttatttttgtactacacggcatgggtttgttgacactttaattttgc

SEQ ID NO: 678851 - DNA, 120 bp, Artificial Sequence
  ENSG00000186487_58 (sequence is synthesized)
tataaatgtgtggaatcacaagttgctgtgatacttcatttttaaattgtgaactttgtacaaattttgtcatgctggatgttaacacatcttactctaaataaacaaggtgttgccaca

SEQ ID NO: 678852 - DNA, 120 bp, Artificial Sequence
  ENSG00000186487_59 (sequence is synthesized)
gaaaggttccagttggtctcacagacgtatggatatccgaggagccacctaaaggcaacctggagcacaacagtggcctgacacttaccagtggcatccaatgacagaccaactgaagca

SEQ ID NO: 678853 - DNA, 120 bp, Artificial Sequence
  ENSG00000186487_60 (sequence is synthesized)
tgtggcatacatggaaagcagttttgaaattgaattctacatgaaactgagagatacccaactgtactttacaactgatggagaaatcaaggcatagagagattaagtgactttgccaca

SEQ ID NO: 678854 - DNA, 120 bp, Artificial Sequence
  ENSG00000186487_61 (sequence is synthesized)
ttttagtcttactgtaaggagtattgtgttgtgagaagatggaatggtacaggacattctcttaaagctttccttgctttcagactgcagtggtgtctagcagggctcgatgggaaggga

SEQ ID NO: 678855 - DNA, 120 bp, Artificial Sequence
  ENSG00000186487_62 (sequence is synthesized)
attgcagcctctatagtaaccagtaagtctggtcccaacacatcagggaagagctcggtcttcagaggaattacctctgagagctggaagagggtgttcctggtaacttggggcttctct

SEQ ID NO: 678856 - DNA, 120 bp, Artificial Sequence
  ENSG00000186487_63 (sequence is synthesized)
gtcagtctccccacggaaaccacagtcagagctgtgctctgtggaaagcctgcagtggctgctccctcgtgctgttctgctctcgactctcactcactgtggatagtgggctggtggagt

SEQ ID NO: 678857 - DNA, 120 bp, Artificial Sequence
  ENSG00000186487_64 (sequence is synthesized)
gcgggcgccagagggtaggggtgaatggaatggaaacacagagggaactgtgaccagcacgtgcgatggtctctccacggcagacagagccctgcgtgggtgagaagcagactgcggaac

SEQ ID NO: 678858 - DNA, 120 bp, Artificial Sequence
  ENSG00000186487_65 (sequence is synthesized)
gagcgtgagcctgatgcacgcagcacaggcgggactcgcagcccggcgctgtctgtctgctgccttttgatggaggctgcacttcacccgcccggcagagcgctgtacgcatgcccgtct

SEQ ID NO: 678859 - DNA, 120 bp, Artificial Sequence
  ENSG00000186487_66 (sequence is synthesized)
tccctgtcgtttagtggtgtcaacttattaatttccatcttcgacttcaggcctgttagtttcctgtctgaaagcattattacttttgtccatgtggcaaaataattagcatacagatga

SEQ ID NO: 678860 - DNA, 120 bp, Artificial Sequence
  ENSG00000186487_67 (sequence is synthesized)
gaagtggccccttgcctgggcgccggtagagagagaagatgtgcagtggaaagttgattggatgaatggagaacaaatggtgggcgttcaaaagcattagaagagttttgtagtcgtgga

SEQ ID NO: 678861 - DNA, 120 bp, Artificial Sequence
  ENSG00000186487_68 (sequence is synthesized)
taccaaaattgaacttgtctttcgcttgtgagcggttgtggtcattgtgagacagagccctgcgtgggtgagaagcagactgcggaacaggatttggcttgatggccaccagctcttcca

SEQ ID NO: 678862 - DNA, 120 bp, Artificial Sequence
  ENSG00000186487_69 (sequence is synthesized)
ggagaattttctgggtgagtccctaagatggaaggcaggggtggctgccgtgggaacaactgcttgtcagacgctggcttagccgaaggtgccaagtgcggctgtaggcacagataattc

SEQ ID NO: 678863 - DNA, 120 bp, Artificial Sequence
  ENSG00000186487_70 (sequence is synthesized)
taaagtagatgccgtttttatcgttattttcatggttcttcagcctttggcaaatgtttgtggttaccaccccgaaaccataccattaactgctagaaacatgggcggggctgaccccag

SEQ ID NO: 678864 - DNA, 120 bp, Artificial Sequence
  ENSG00000186487_71 (sequence is synthesized)
aaacttaagtgtgctctgagccggcctttgaaatagtataaaaccaggggcactatgctatgatactattttatgcttttgtaaatatactattaagaaaataaaagttgtatatgaact

SEQ ID NO: 678865 - DNA, 120 bp, Artificial Sequence
  ENSG00000186487_72 (sequence is synthesized)
aaaaggacttaataacatgtccaactccagggtgtgatgggagtggtcatgtgactggtaattacgcctcacacagaagtctgtctggctgccccctggcggacaaaagcattcgaagta

SEQ ID NO: 678866 - DNA, 120 bp, Artificial Sequence
  ENSG00000186487_73 (sequence is synthesized)
aggtgagtggccgcgtctgcgggaccctggctgggatggtgccgccgagagccgactggcacggctggttatgacggcagcaggtgccagcttctcccgtcacctgtgtttagaaagaaa

SEQ ID NO: 678867 - DNA, 120 bp, Artificial Sequence
  ENSG00000186487_74 (sequence is synthesized)
aggctgaaaactatcgtaccaacctaacaaaattcaagggtttggggacagtgttgaaacatcttaaacttacattagggagcccagcctccctcagccccatctatagatgaccacagc

SEQ ID NO: 678868 - DNA, 120 bp, Artificial Sequence
  ENSG00000186487_75 (sequence is synthesized)
agttttccgtttttgaaactagaatccacagtaagatatagattttcatttaagacatgcacatgagggtctttagatgtagttacttatttcacccgaaattcacaggcaggcgtcatt

SEQ ID NO: 678869 - DNA, 120 bp, Artificial Sequence
  ENSG00000186487_76 (sequence is synthesized)
gggggaaagaggatggcatttggcacggtggctcctggtgaatgcctgcaccaaagatgcatgagaacattcccaaaaaaccccatcaacctcattcatttttgtttgcttcatttaaaa

SEQ ID NO: 678870 - DNA, 120 bp, Artificial Sequence
  ENSG00000186487_77 (sequence is synthesized)
agaaatacatgcagttagattatcttaggagaggcccgttctgtgcagtcagattgtgcagtcggtccctctgcggggagtgaagacctgggatgggacccgtctccaaggctgacggca

SEQ ID NO: 678871 - DNA, 120 bp, Artificial Sequence
  ENSG00000186487_78 (sequence is synthesized)
cccattacactcagcgtccctcagcttccttgaggaggtggaggggaagatacacacatcacatgtacgatgtgaaggccataccctttggggagatttacaatggtttcctttctgctg

SEQ ID NO: 678872 - DNA, 120 bp, Artificial Sequence
  ENSG00000186487_79 (sequence is synthesized)
ccctatatgccactttctacgaaaatcacacctgcgcctcaaatccatctcaaacacagaatgaacaaaggggtatgcagattacaggaataatggcatgttcagtaataggtgactctg

SEQ ID NO: 678873 - DNA, 120 bp, Artificial Sequence
  ENSG00000186487_80 (sequence is synthesized)
acccttaaatgttaaggaagattttttttaattattaaagaaattcctgctcaggtagaaaattcaaacaatgtaaatgggtttaaagagaaaaattggccgggcacagtggctcacacc

SEQ ID NO: 678874 - DNA, 120 bp, Artificial Sequence
  ENSG00000186487_81 (sequence is synthesized)
ggggcctgtgggtacaaggcaagcagcatactgcacacatctccactcgtgtctgactgtgttgcaagcttgatacacaggaaggttagaaattactggtttaatccacagctgtagctt

SEQ ID NO: 678875 - DNA, 120 bp, Artificial Sequence
  ENSG00000186487_82 (sequence is synthesized)
gaaaaatatctagatcagcagtgaagttccctcccaccttaggatttggggaagtggatatgttttgtgttgcttcaaggaggcagcctgagacaggggcgggtcatgaggaggctgtag

SEQ ID NO: 678876 - DNA, 120 bp, Artificial Sequence
  ENSG00000186487_83 (sequence is synthesized)
aaaggaggtacctgaaaacaagcagaactcacaaggcaatgactgatttagaattcgggcaactgggttcttttgtaccagttatttcttgctgtttttaatgcttacgtgcttcagttg

SEQ ID NO: 678877 - DNA, 120 bp, Artificial Sequence
  ENSG00000186487_84 (sequence is synthesized)
tatgccttgtctagtcaattacatatacatgttaaattcatacatcaactatgactttttcttatatctttatactgatgaaagcatcacctataatctaaatatttcataaatgaactg

SEQ ID NO: 678878 - DNA, 120 bp, Artificial Sequence
  ENSG00000186487_85 (sequence is synthesized)
aaccaagcagagaacttgatccaaaaacatatagttatgtttaatttcctaattcttcttgttatacttacgtggtgttttctgaatttcaaactcctcccactcctactccttcacttt

SEQ ID NO: 678879 - DNA, 120 bp, Artificial Sequence
  ENSG00000186487_86 (sequence is synthesized)
agcctgagtgcctgctttgggtgaggccacattgcagacatggctggctctcttgaagcccttgagtaccctgtaagaaagttgccaccatcccttttagacatgaggaaactgaggcag

SEQ ID NO: 678880 - DNA, 120 bp, Artificial Sequence
  ENSG00000186487_87 (sequence is synthesized)
agggaggtcggacaggtagccagaggtgcacggacttcagagcttacttccaatcagagccccattttgaggctgtagtttcctttttccatagacgcacatccttgggaatcatttgta

SEQ ID NO: 678881 - DNA, 120 bp, Artificial Sequence
  ENSG00000186487_88 (sequence is synthesized)
tcccttttgaaatctgtcttggacataactgtgtaaattttcagctgcatgaaagagtagcattgcctgaccacgtgtaggtttgaggtctgagcagcccttactgcctggggactttga

SEQ ID NO: 678882 - DNA, 120 bp, Artificial Sequence
  ENSG00000186487_89 (sequence is synthesized)
agcagactctcagcttctgtggccttcactttctcttccaattatgagtgggtggaattgagaagtgctacaaatttaatttccagcaagactgagaaataaaccaatctgttggaccca

SEQ ID NO: 678883 - DNA, 120 bp, Artificial Sequence
  ENSG00000186487_90 (sequence is synthesized)
atgtcctctatttgctacacaactaatttttaatggttcaaaaattatacttttcaaggcatcatctctgtactctcttacttttggtgtcaatatctttagaaacttatcctctcaatg

SEQ ID NO: 678884 - DNA, 120 bp, Artificial Sequence
  ENSG00000186487_91 (sequence is synthesized)
ccagagagaccaagtttttaaacttctattttctttacataattagtgtatgtccattgtagaaacattagaatattaaaataatagataatataatttttaaagcactggaaattcaaa

SEQ ID NO: 678885 - DNA, 120 bp, Artificial Sequence
  ENSG00000186487_92 (sequence is synthesized)
cagtgacaaccaccattagtatgttggtttaaaattcttcaagactgatttctttgacagtcttcaaaaagattttaaattaacatgggtcaaactgtgccgtttgttctttactccttt

SEQ ID NO: 678886 - DNA, 120 bp, Artificial Sequence
  ENSG00000186487_93 (sequence is synthesized)
atgggtcaaactgtgccgtttgttctttactcctttttcccttatgcatcgtatgtatctttctgtatgaagaactactttttgtgttgggggggatggagtctggctctgtcacccagg

SEQ ID NO: 678887 - DNA, 88 bp, Artificial Sequence
  ENSG00000186487_94 (sequence is synthesized)
agtgcagtggcacaatcttggctcaccgtaacctctccctccggggttcaaggtgttactggcacatgccaccacacctggctaattt

SEQ ID NO: 678888 - DNA, 67 bp, Artificial Sequence
  ENSG00000186487_95 (sequence is synthesized)
tgcccagaagaactacttttctgttaccttattttattccgttacctcatctagcattctactttat

SEQ ID NO: 678889 - DNA, 120 bp, Artificial Sequence
  ENSG00000186487_96 (sequence is synthesized)
cttattttattccgttacctcatctagcattctactttatgaatacactgaaatatacttcatcaattctctattgtaatttcataagttggatttttaaaattttgccttataaacatg

SEQ ID NO: 678890 - DNA, 120 bp, Artificial Sequence
  ENSG00000186487_97 (sequence is synthesized)
gttttaataaccattctttacctaaaacctttcacactgttaatgattttcttaagataaattcacagtagaattgcttgactcaagactatatacattttgaagcttttgagaagggca

SEQ ID NO: 678891 - DNA, 120 bp, Artificial Sequence
  ENSG00000186487_98 (sequence is synthesized)
ttatctttacaatcctgcttcattttatgtgtggtcctatcactgcatgttctctgctattgaaaacacagctaaccatccagtgtttgaacggtctgccattacacatagcagtgtcat

SEQ ID NO: 678892 - DNA, 120 bp, Artificial Sequence
  ENSG00000186487_99 (sequence is synthesized)
aaattcataaattcaaccttaagaaaaaactaatctcatagcacaaatttagttttgtaaaggctaaaaatgtatttcaaaatatcttctaaattttcataaactcagttaaaaagctga

SEQ ID NO: 678893 - DNA, 120 bp, Artificial Sequence
  ENSG00000186487_100 (sequence is synthesized)
cacttctgttcttttgttcatatattaaatcaatgtatgaagtgcctactacgtgcaatacactgtgtgaggcagtggtgatatgtaaatgatagaacatgatccagattttgagaagtc

SEQ ID NO: 678894 - DNA, 120 bp, Artificial Sequence
  ENSG00000186487_101 (sequence is synthesized)
caccttttagttgcagaatccacgcttatattgagtctctgatacatggtatgaaaagcattacaatacatttactttaaaaataagatctcagtatgagcaatttaatatagcgaccat

SEQ ID NO: 678895 - DNA, 120 bp, Artificial Sequence
  ENSG00000186487_102 (sequence is synthesized)
tattgtttctgatgtgtaactctgagaatttcgagatccactaccattaaagaaagctaggattgtgttcgttatactaaacgccagagtgcactacagaaacatttctgcccccatgcc

SEQ ID NO: 678896 - DNA, 120 bp, Artificial Sequence
  ENSG00000186487_103 (sequence is synthesized)
ggcccggctgcgtccgcctcacagaaggaacgcgggactcgggaaggcccggaaggcctggctgcgtccccctcacggaaggaacgcgggactcgaggaggcccggctgcgtccgcctca

SEQ ID NO: 678897 - DNA, 120 bp, Artificial Sequence
  ENSG00000186487_104 (sequence is synthesized)
ggaagcgcctggaagcggaagctggacagacgaggagaggccttgggtgtgacatcaacggaacctgagggaagcaaaactcagcaaggacgcacccggtctgctggactggggctttgg

SEQ ID NO: 678898 - DNA, 120 bp, Artificial Sequence
  ENSG00000186487_105 (sequence is synthesized)
gttggtgacgtggacgatgagtctaattttggggcatccgcgcagttgtgcagcggtcagtggggtgcaggggtggacgtgaggtcaacccacgccggcctcagagccccagcgacctgc

SEQ ID NO: 678899 - DNA, 120 bp, Artificial Sequence
  ENSG00000186487_106 (sequence is synthesized)
aggggctgtggaatttggaggatcctgtgagggaggccgcagccagccagcaggcgaggacagagcgagaaggcacactccacagttcccctaggcccagggaagaggctcctgagggaa

SEQ ID NO: 678900 - DNA, 120 bp, Artificial Sequence
  ENSG00000186487_107 (sequence is synthesized)
gtgtttcacacctgtgagccctttggggtgccaagagcaccctttcccacatctccctgtgagcccttccaggtgccgagaataccctttcccccatctccctgtgagcccttccgggtg

SEQ ID NO: 678901 - DNA, 120 bp, Artificial Sequence
  ENSG00000186487_108 (sequence is synthesized)
ccgagaacaccctttcctccatctccctgtgagcccttcggggtgccgagaacaccctttcctccatctccccatctgccatgtgatgcctccttatcttccagacaatgtcagtggagg

SEQ ID NO: 678902 - DNA, 120 bp, Artificial Sequence
  ENSG00000186487_109 (sequence is synthesized)
ctgttcaggacttattatgggccagacagagctctaagcacctccgcataccaaccttcttaatcctcacagcagcctgaagaaatgggctctgtaattatccctgttttaaagatcagg

SEQ ID NO: 678903 - DNA, 120 bp, Artificial Sequence
  ENSG00000186487_110 (sequence is synthesized)
acattgaggcaaagagaagagaacttcctgcctggggtcctgtgagtgacggagccagggctcaggtccaggctgcctgaccccccgtgagtgactcctttccactatctcatctctccc

SEQ ID NO: 678904 - DNA, 120 bp, Artificial Sequence
  ENSG00000186487_111 (sequence is synthesized)
tgactccgatccctgtgatgatcttggtgaaactgccccagcctcctctctgcagacactgtcccttctctttctacccgatactaagtagctgctacatctgtcatgctccattgcaat

SEQ ID NO: 678905 - DNA, 120 bp, Artificial Sequence
  ENSG00000186487_112 (sequence is synthesized)
gtctgtgcgtggggacctttgttccttcctgcacatctggggcacctcgctcggcgctgcacacacagctcctaagaaaagttttcctgcaccattgactcaatacattttataagagga

SEQ ID NO: 678906 - DNA, 120 bp, Artificial Sequence
  ENSG00000186487_113 (sequence is synthesized)
ctgacctcaagtgacctgcctgtcttggcctcccaaaatgctgggattccaggcgtgagccacggcgcccggcccgaagcctttctccttcagcgagaggccccttcttcgcacccagta

SEQ ID NO: 678907 - DNA, 86 bp, Artificial Sequence
  ENSG00000186487_114 (sequence is synthesized)
ccgcctcggcctcctaaagtgcaagttgtcagtcttaaagatgagttatttttctcttgtaataaagacatgtgcttcaaatttgc

SEQ ID NO: 678908 - DNA, 120 bp, Artificial Sequence
  ENSG00000186487_115 (sequence is synthesized)
tatttttctcttgtaataaagacatgtgcttcaaatttgctattagtggatgacagtggctaaaggagtactaacagaatttttttaaaaaaaacgatacatgaagatcatgcttcaaag

SEQ ID NO: 678909 - DNA, 120 bp, Artificial Sequence
  ENSG00000186487_116 (sequence is synthesized)
aaagaattactttaaaaagaaccttgtcctatggaaagaacattttgaaaatggatgtttaaaaacgtggtcattgttatgtgattttcaaaattttggctataagggatgtttaaactc

SEQ ID NO: 678910 - DNA, 120 bp, Artificial Sequence
  ENSG00000186487_117 (sequence is synthesized)
ttaaaaactttcagatttaaaaactttcaaatttctaatcaaacatgcataagcaattatacctatttgcagatgatatgattttatatttggaaaaatctaaagacttcaccaaaaaac

SEQ ID NO: 678911 - DNA, 120 bp, Artificial Sequence
  ENSG00000186487_118 (sequence is synthesized)
tattagaactgataaattcagtaaaattgtgggatacaaaatcaaaatacaaatcagtagcatttccatatgtcaacactgaacaatgtgaaaaagaaatcaaaagagcaatcctattta

SEQ ID NO: 678912 - DNA, 120 bp, Artificial Sequence
  ENSG00000186487_119 (sequence is synthesized)
taatagccacacataaaattaaatacataggaagtaacttaaccaaagaagtaaaatatctttacaacaaaaactataaaacactgattttaaaaaaaattgaagaaacaaaaaaatgga

SEQ ID NO: 678913 - DNA, 120 bp, Artificial Sequence
  ENSG00000186487_120 (sequence is synthesized)
atggattggaagaatcaatattgttaaaacgtccatactacccaaagaaatctacagatttaatgcaattcctatcaagataccaatggcatttttcacataaatagaaaaaatatccta

SEQ ID NO: 678914 - DNA, 120 bp, Artificial Sequence
  ENSG00000186487_121 (sequence is synthesized)
tatcaagataccaatggcatttttcacataaatagaaaaaatatcctaaaattaatatgtaaccacaaaagacctagaatagcctaaattttgtgaagcaaaaagaacaaaactggagga

SEQ ID NO: 678915 - DNA, 120 bp, Artificial Sequence
  ENSG00000186487_122 (sequence is synthesized)
attgaaggtgggctaggctaagctatgatattgagtcagtacaagtattaaatgaatttttgacttaaaatattttcaagatatggtattttcaacttaagatggctttatggggatgct

SEQ ID NO: 678916 - DNA, 120 bp, Artificial Sequence
  ENSG00000186487_123 (sequence is synthesized)
gaccccatggtatgtggaggagtacctgtatccatccccatggtatgtggaggagcacctgtatccatccccgtggtatatggaggagcacctgtatccatccccgtgcttgtcaggatg

SEQ ID NO: 678917 - DNA, 120 bp, Artificial Sequence
  ENSG00000186487_124 (sequence is synthesized)
aggaatcaaagaggactttgaagagcagatcaccccaaaagtggatctttaaagattagtttattagatgaataaatctggaaatggctgacttgagagaagaaaaatacaaaacttaga

SEQ ID NO: 678918 - DNA, 120 bp, Artificial Sequence
  ENSG00000186487_125 (sequence is synthesized)
gatgggaagcatcaagtaatggacgtggaatactattcagttgtcacgtacagctgcatgttaggacaaagggcttagctccccatggcttaggtttggtgtttataaaatgagcatggg

SEQ ID NO: 678919 - DNA, 120 bp, Artificial Sequence
  ENSG00000186487_126 (sequence is synthesized)
tactgtctgtgttctgtggtccatgagagacagaatggggtgtggttctatttcttaccctatcagatggaacgtagaacagaatggtcctctctaagaagttgcatacctcctctcagt

SEQ ID NO: 678920 - DNA, 120 bp, Artificial Sequence
  ENSG00000186487_127 (sequence is synthesized)
ccttgaaattgatgactactttctttcactcatctgcctgccatcctttctacccccaaagttggatgttactgtattcaactttctgaattcaattttagtagctgttgtgcagtttgt

SEQ ID NO: 678921 - DNA, 120 bp, Artificial Sequence
  ENSG00000186487_128 (sequence is synthesized)
ccaactgtagactccaggaattgttctgctagtcctaccctcagattacaactcagaatcagaaacactcagatggaaaggcccttagcaccaccgccacggcaaagcagcagctgttgc

SEQ ID NO: 678922 - DNA, 120 bp, Artificial Sequence
  ENSG00000186487_129 (sequence is synthesized)
acacaaccccaagtcccgctaccttctgccgctctcagctcttccctcccctgcagtgctccccctaccatgtgtcatcttttctgtctgcagcagcttagcttcctttagcatctccac

SEQ ID NO: 678923 - DNA, 120 bp, Artificial Sequence
  ENSG00000186487_130 (sequence is synthesized)
ttaagaaggactttggggcttgatcttatgggagaaataaaaatgccatagaacaagatttagatttagggcatttttctgtcctcgtgtgtcccaattagccactgtgattgctgagcc

SEQ ID NO: 678924 - DNA, 120 bp, Artificial Sequence
  ENSG00000186487_131 (sequence is synthesized)
ggcgcctccgcagctggtgctctaggaaatccaatttcccctgaaccagagcccaaagagaaaatcacactctgcatccaatttccatgctaaagactgtccttaaaataaaatcaatat

SEQ ID NO: 678925 - DNA, 120 bp, Artificial Sequence
  ENSG00000186487_132 (sequence is synthesized)
ctgtttcccgaaaaactacatgaattgtgttctgaatggtgactattttaaagaaaagcatatcgtgtccagaaggagaaatctgctgaaatagctccaactctgtaaatctatattctt

SEQ ID NO: 678926 - DNA, 120 bp, Artificial Sequence
  ENSG00000186487_133 (sequence is synthesized)
tgaccctttgaaagaaatatatttaaaacagtgagcaaatgtcatcaggtagtcctgaaactgccagcgatcacttgtttttgggcaaatctctacaaaaaatttgttcttttttttgta

SEQ ID NO: 678927 - DNA, 120 bp, Artificial Sequence
  ENSG00000186487_134 (sequence is synthesized)
aaacagaagtaaatggtcaagtgagatggatatcatgaacctaatgtaaactacaaaagatgataatagctgctaatcatttattaagcatccactctgtaccaagcttggttctaaaag

SEQ ID NO: 678928 - DNA, 120 bp, Artificial Sequence
  ENSG00000186487_135 (sequence is synthesized)
cactctgtaccaagcttggttctaaaagtgccactcaccatgtctcatttcatcgtcaaaaaaccccctatgaagttagtactatatacatatttatatatatatatatacacacacaca

SEQ ID NO: 678929 - DNA, 69 bp, Artificial Sequence
  ENSG00000186487_136 (sequence is synthesized)
tacacacacacacacgtatataagtttattttcacaatactgataaagacatgcctgggactgggcaac

SEQ ID NO: 678930 - DNA, 84 bp, Artificial Sequence
  ENSG00000186487_137 (sequence is synthesized)
gcctcacaatcatggcagaaggcgaaagccatgtcttaactggcggcaggcaagagagaaatgaggaccaagtgaaaggggaaa

SEQ ID NO: 678931 - DNA, 120 bp, Artificial Sequence
  ENSG00000186487_138 (sequence is synthesized)
atctatattcataatttatgttaggagaaaattaatatacagagaagttaaataatttgtctaacattacacagttaataaatgacacagatgggattcaaatttatgtaggcattttaa

SEQ ID NO: 678932 - DNA, 120 bp, Artificial Sequence
  ENSG00000186487_139 (sequence is synthesized)
cttccaagccaatgttgttaactactgtgaactcactctactatctctacaaagccatatgcaggtattatacattattattcttgtgtctctctgataaccgtgtataatatatatcac

SEQ ID NO: 678933 - DNA, 120 bp, Artificial Sequence
  ENSG00000186487_140 (sequence is synthesized)
ttgtgtgcatagataatgtactatgtgtatatacacacagagaacttgtggaactgctaggttgctaccaaatcaaattgttttgctttaatgactcagtgccgttaatataactttata

SEQ ID NO: 678934 - DNA, 120 bp, Artificial Sequence
  ENSG00000186487_141 (sequence is synthesized)
gtcatcatcctcatacatgtttccccagaaagcaaccaaataattttgagtcttgctttgtcaagatcctccttaactcatggaataatgcttttcaattgttttcagagtgattcattt

SEQ ID NO: 678935 - DNA, 120 bp, Artificial Sequence
  ENSG00000186487_142 (sequence is synthesized)
ccctgagggccgtcccacgcggctgtgtgtggctgaggccggggcgggcaggccctgccgtgtgctgtctgccgtgtgccctgcggccggggcctgagtcatccctgtccctgtctcccc

SEQ ID NO: 678936 - DNA, 120 bp, Artificial Sequence
  ENSG00000186487_143 (sequence is synthesized)
aactcaagtaagatttaatgacaataattctcttttaaaaatccatgcactcagtagttcacaaaaaaaaatgatatgtcatttgcaaagaaaaatgtctgttaaaaaacatggcctgtg

SEQ ID NO: 678937 - DNA, 120 bp, Artificial Sequence
  ENSG00000186487_144 (sequence is synthesized)
caccccagtgccttgatgtagacatgggattgaatcctcggaatttcagccacttttccacacaacccattctgccttttcccctgacatacctccagcttgttcatatcatatccttcc

SEQ ID NO: 678938 - DNA, 120 bp, Artificial Sequence
  ENSG00000186487_145 (sequence is synthesized)
tatctgggatatcctaaagcatgggtgttttctcttcagatatgcatgcatatggaagggaaattttacagttactcaaatttttagaaaatgactgtaaataatcaaaatttaattttt

SEQ ID NO: 678939 - DNA, 120 bp, Artificial Sequence
  ENSG00000186487_146 (sequence is synthesized)
aactagctctttcgccacaagacccttggaactttcttcatggaatgtaaacgcctggagggcttcctcttacctaacggctgtaaagtctgtagcctcatccaaaacagtgcctcatgg

SEQ ID NO: 678940 - DNA, 120 bp, Artificial Sequence
  ENSG00000186487_147 (sequence is synthesized)
aaaagtagatttaggatctcaaaacggacagcattagcaagagcagttcaacccactttgttcaggcgtcttttgtatggctcgaaaccacatttccctcatggtcaaaacatgactaac

SEQ ID NO: 678941 - DNA, 120 bp, Artificial Sequence
  ENSG00000186487_148 (sequence is synthesized)
tccacttggaacttggccaatacatcagaacatggcagcattcctttgaatttcttgatgagggacactttgccaaagattggcacatctccagttccaacaggccagctgtagacagga

SEQ ID NO: 678942 - DNA, 120 bp, Artificial Sequence
  ENSG00000186487_149 (sequence is synthesized)
aaacagcctctgtaaaagttgcttctagtgttgcctctaactggtcagagactgcagggattcgttttctttggcttgcatcccttcacgttgggcttggcggcttatgttgatttgaaa

SEQ ID NO: 678943 - DNA, 120 bp, Artificial Sequence
  ENSG00000186487_150 (sequence is synthesized)
ttccgagccaacttgctgtttctccagcatcggcactttcttcttctcttacttcatcttgcaagatggtgtgacggtccccacctttagcattttccgagggagccggttagctcttca

SEQ ID NO: 678944 - DNA, 120 bp, Artificial Sequence
  ENSG00000186487_151 (sequence is synthesized)
tgccttccagggcagggtgcgcatgggcagcccctccttcctgtcttgtcctggaggggagactgtatcttacaggaggtggatggccttttgctaattttggttgatcgaaaagccaca

SEQ ID NO: 678945 - DNA, 120 bp, Artificial Sequence
  ENSG00000186487_152 (sequence is synthesized)
catgtgtctaaacctatctttgcaaaaagtcaatcctattctgatagagcctttctgggaaatctgaacttgactgaatttcttaaattgtccctttctatgaatggatcttcaaaacta

SEQ ID NO: 678946 - DNA, 120 bp, Artificial Sequence
  ENSG00000186487_153 (sequence is synthesized)
agaatttcaatcaagcatcttctataaaaacactaatgtttcaatgaccaaatgttgcttcatggtataaccacatgttataatttctttgctttaaccttgtaattggtgacccctttt

SEQ ID NO: 678947 - DNA, 120 bp, Artificial Sequence
  ENSG00000186487_154 (sequence is synthesized)
atctgttacttgttggatctgggtcagcaagatctgttgagtgggtctctcaagcccaggagcatggactgagcccctcatgactcgcaacaactttctttagaataattcccgcatgag

SEQ ID NO: 678948 - DNA, 120 bp, Artificial Sequence
  ENSG00000186487_155 (sequence is synthesized)
tccttttttatattctttgtgtatattttcaagggtttggttaatttgtcctgcagcagcatcgtccctgattaacatcgtgatattaagccattcactgtgtcctgtaacagtctctaa

SEQ ID NO: 678949 - DNA, 120 bp, Artificial Sequence
  ENSG00000186487_156 (sequence is synthesized)
tcgttcataaacacatagtagaaagtgggccccaattacccccaaaattattctctacaatacatgtcagctaacaaatggaactttctggaaattttcttcttgtcacttccaacactg

SEQ ID NO: 678950 - DNA, 120 bp, Artificial Sequence
  ENSG00000186487_157 (sequence is synthesized)
aattgtgatatttggcctttaacaggacattcttgatcatggacaaaacaaattttccagataaactctcgctcttggatcctctaagctcttaaacttcctgagataacactttgcctg

SEQ ID NO: 678951 - DNA, 120 bp, Artificial Sequence
  ENSG00000186487_158 (sequence is synthesized)
gtcttacccaaagcagcaaacatgggacgttttgaaaagaaaatccatcacttcattgtctaattatgtataatatgtaaactgaaactggattaaaatttaacgtgcacctgaatctta

SEQ ID NO: 678952 - DNA, 120 bp, Artificial Sequence
  ENSG00000186487_159 (sequence is synthesized)
cctttaagagggcggggagaagaaaggccccagcaggcagcgagctcaggtgccctcgcctcgccgcctctttcctcttcctgtgaagagcgagacaggggaaggagcaggaggattccc

SEQ ID NO: 678953 - DNA, 120 bp, Artificial Sequence
  ENSG00000186487_160 (sequence is synthesized)
cgctggctccaggaggtggggcagcaggggcctgggagtgaaggcgctgtggggccctgacaacctcctttctgcccagacacgaaacccgaaccttcccgaaccttcccacacccgcct

SEQ ID NO: 678954 - DNA, 120 bp, Artificial Sequence
  ENSG00000186487_161 (sequence is synthesized)
gtgctgaggtgctgcccccacctgaacagggaggaggatggccaaggcctgggaggcaggatggagcctccctttaggggagtgagcacttcctcctgggaatctgcgtgtttccaagaa

SEQ ID NO: 678955 - DNA, 120 bp, Artificial Sequence
  ENSG00000186487_162 (sequence is synthesized)
tcagaactgaccaagaaaactatccccgagctcaggaaagccagggagaagagtggcctcccacctggacccacccgtgtgccagcgccgggcccgcgatttccacaagacccaatagca

SEQ ID NO: 678956 - DNA, 120 bp, Artificial Sequence
  ENSG00000186487_163 (sequence is synthesized)
tggcaggagattgcccaatttctggttcttcaattcttttccaaaaatcccatttgttttatgtattattttatgtgatgtgtatgtgtgtgtatgtttctgttccagctgaaaaaattc

SEQ ID NO: 678957 - DNA, 120 bp, Artificial Sequence
  ENSG00000186487_164 (sequence is synthesized)
cctttacaaacatgtccaaagcctctgtacccaagaggttgaaaattaaataaaataggcgtgtccagctcccactctcccgtctgcaggcacaacccgaagcctggaataagtcactag

SEQ ID NO: 678958 - DNA, 120 bp, Artificial Sequence
  ENSG00000186487_165 (sequence is synthesized)
cccatcactgtctcccaagacacgaacctgagatggaagtgcttgggaagctgctgtgagagacagagtacccaagaatggggctgggaggctgcttttttctgccatgttcacccccga

SEQ ID NO: 678959 - DNA, 120 bp, Artificial Sequence
  ENSG00000186487_166 (sequence is synthesized)
catgcacgcatccgtgtgcgctcgctcccgcgctctctgtcaacaaaacctcccccagcgtctttcctggtgactcccgactgcttctgctccctcccggtggaccagtttctctcccgt

SEQ ID NO: 678960 - DNA, 120 bp, Artificial Sequence
  ENSG00000186487_167 (sequence is synthesized)
tcacagcatcctagcccaccccagtctcccaactttcttgaaaggggactgacggtgcctagagccttggagaggacacagggaaagaactctcctcctgaattttgactttgtgcccag

SEQ ID NO: 678961 - DNA, 120 bp, Artificial Sequence
  ENSG00000186487_168 (sequence is synthesized)
aagaactctcctcctgaattttgactttgtgcccagaagcacaggttttggagagaatcaagtcacagcctcgtcggttaagaaagctcactggggcggattacgaggtcaggagatcga

SEQ ID NO: 678962 - DNA, 120 bp, Artificial Sequence
  ENSG00000186487_169 (sequence is synthesized)
gcaggagctgaggcacccatggggagctgaggacaaggtggccgtgtgcagcccctctggagcacggcgtctgcagggacccctgggtgctgccgacaacaggggtccaccctgggacgg

SEQ ID NO: 678963 - DNA, 120 bp, Artificial Sequence
  ENSG00000186487_170 (sequence is synthesized)
aaccaactggcaggaccccggggtcctctcgtctacctctcaccctacaatgcaggccccaggcccccagccgggcagtgaggccctgtgcatacactggggcataggaacgggacaggg

SEQ ID NO: 678964 - DNA, 120 bp, Artificial Sequence
  ENSG00000186487_171 (sequence is synthesized)
ccaccccctggggggccacagctgtcactgtgcgctcactcagtggccttgaaagaagcgcctgaagcgagagaacatgggtgacggggtttccctgaagtcaagtcaaagcagccaacg

SEQ ID NO: 678965 - DNA, 120 bp, Artificial Sequence
  ENSG00000186487_172 (sequence is synthesized)
tgcaccatgtccatcctcattttatgcgccttcgtcttggcgtagcctcagcagctgcttttggctgtggcttttaagctgtgaaagtatttgctgggaatgtccttggctcctcacgca

SEQ ID NO: 678966 - DNA, 120 bp, Artificial Sequence
  ENSG00000186487_173 (sequence is synthesized)
gcacctcctccccgttaggctggtttctctgctggatctaaaacaggagggaggaagcatcgtgagtggcgtgggggggcttgagcggctcctccctctctcctctgggggtgcccaccg

SEQ ID NO: 678967 - DNA, 120 bp, Artificial Sequence
  ENSG00000186487_174 (sequence is synthesized)
gggcccaaagcttctgggaacccggcggagagctctgctcctgagccaggaattgccaggcaccacacaactgctatccgcggggcctgtccggtttccccaagtgcttctgcttcattc

SEQ ID NO: 678968 - DNA, 120 bp, Artificial Sequence
  ENSG00000186487_175 (sequence is synthesized)
gctaatccatacagcgtagctcagaatgatcgcttgccttgggtccccaaacactacctgagctggaaagtgcttgtgtgatgtgttagtaatggataatacaaaatttttaacatggga

SEQ ID NO: 678969 - DNA, 120 bp, Artificial Sequence
  ENSG00000186487_176 (sequence is synthesized)
ggagactttgatttgtaggactgacaaccttattatgcagtgagtttattattgatattattctgctctcggttgccatggccaccttgtgagagacattcaattttctctcttccatca

SEQ ID NO: 678970 - DNA, 120 bp, Artificial Sequence
  ENSG00000186487_177 (sequence is synthesized)
tcattatctatgaggccatctgttgtggaaaatgaattcagcctcatttgcatgactgataagcaatttttttttttatctatttaacagaaggtcatatgccggggatttggagcttgt

SEQ ID NO: 678971 - DNA, 120 bp, Artificial Sequence
  ENSG00000186487_178 (sequence is synthesized)
gaaaaaaaaatgtggaaaaaaaaaaaagcctaggagaggatgagtgggagcgtgtgcatgggggtgtgtggaagtcaaacagatccctgaggcctgcgagcctatcgcgctgcatttgtc

SEQ ID NO: 678972 - DNA, 120 bp, Artificial Sequence
  ENSG00000186487_179 (sequence is synthesized)
caggacacttcgatgtgacgtgttgctcgatgtttttcaatgtgtgcagcagaagtcggggaagattcttccttgaatgtcgcgttacatacgttgtcctctgagaaggaaggtggctat

SEQ ID NO: 678973 - DNA, 120 bp, Artificial Sequence
  ENSG00000186487_180 (sequence is synthesized)
ccttggcaatggtttctattataacacaactatgaactgtggtcattttcagacaagctgcttccctcctcccggcccttggtttgtttggtgttaaacgtctcctcttggtttctgtgg

SEQ ID NO: 678974 - DNA, 120 bp, Artificial Sequence
  ENSG00000186487_181 (sequence is synthesized)
gtaaatgaattgttcttaacacggtgtcctctaagatgtgtgctctatccagtggggcctgctgagaactgcctgaacacagtccgtacgctgcctaagtgcactcctgtggctaaaata

SEQ ID NO: 678975 - DNA, 120 bp, Artificial Sequence
  ENSG00000186487_182 (sequence is synthesized)
aatctcagccctaatgactagatccctcatcctgacccaagcctgattaagagagcagggagactctgtaacagtgacatgtgattttaagatgttttgactacattgtctttgtatatg

SEQ ID NO: 678976 - DNA, 120 bp, Artificial Sequence
  ENSG00000186487_183 (sequence is synthesized)
tttggaaaataagcatcagttggtaggaactggctgactcctggtctgtactgataatggtgctgggtgcccttggggtataaaggaagaagagggcatgacctcagtaagaagtaaagg

SEQ ID NO: 678977 - DNA, 120 bp, Artificial Sequence
  ENSG00000186487_184 (sequence is synthesized)
tgcccccgcggaagacaagagttacagggctcggcccgccaagccgagcatgccgtggaaccacggccactcaaagttgagcgatccgctttttcaacaagtcttttgatactggacatt

SEQ ID NO: 678978 - DNA, 120 bp, Artificial Sequence
  ENSG00000186487_185 (sequence is synthesized)
gcatctccacctgtgatgctgaacattatgttgatgaaggtgatcgccaggatacaagaagataatgtttgtgaaacataaagagtatctgcaaactattactatgatgactactattat

SEQ ID NO: 678979 - DNA, 120 bp, Artificial Sequence
  ENSG00000186487_186 (sequence is synthesized)
tcttgttgttttttttcccatttttaacctagaattaaaaatggagcctgattgactactccctggcaaatagtagatgatgagtaaatgtaagttgaataatttattgaatgactaaaa

SEQ ID NO: 678980 - DNA, 120 bp, Artificial Sequence
  ENSG00000186487_187 (sequence is synthesized)
atgaggacaggggcctcagctgctcaccaggatcacccagggcccagcagacagggcgttccttgttaggtgcacagaagcccagggtgtcacagagccgcctcaccctccccattgagc

SEQ ID NO: 678981 - DNA, 120 bp, Artificial Sequence
  ENSG00000186487_188 (sequence is synthesized)
ctgttcctgcacgtgccacctggtgtcctgtccaggtttgattgttacaaagaactccgcgtgaacgtccttgtgcacacaactccatgtccttgtgcaagcagatcttcaggctctatt

SEQ ID NO: 678982 - DNA, 120 bp, Artificial Sequence
  ENSG00000186487_189 (sequence is synthesized)
cctggaaacaagaatgctagctttaaaattttgacagatcatgccaaaatgccctccaaaaaagtgtctactttcccaaacctttcaccattaataaaatgtttaaaaattttgtaaaaa

SEQ ID NO: 678983 - DNA, 120 bp, Artificial Sequence
  ENSG00000186487_190 (sequence is synthesized)
tagaagtttttcacctcacccatagttaagtgccagatggcccctggcctttagcacagtgaggactccagttgaccagcacgtccaggagcccctggaagggagggaaggcccctcgga

SEQ ID NO: 678984 - DNA, 120 bp, Artificial Sequence
  ENSG00000186487_191 (sequence is synthesized)
gactgaggagttgtgaggaagccgaggcacgggactgcatggaagaggcgctccgcacacaggacacgccatcttcagcaaacacccaacaggacagaaaaggaggcagaggtgccttcc

SEQ ID NO: 678985 - DNA, 120 bp, Artificial Sequence
  ENSG00000186487_192 (sequence is synthesized)
tgccccggaggctgccagccacatctgccacatacactgtgaagagctgagacgcatcctgacgtcgacaaaccagtggctgagaaaagtgaagagacacctggaaagtttgaaaacaga

SEQ ID NO: 678986 - DNA, 120 bp, Artificial Sequence
  ENSG00000186487_193 (sequence is synthesized)
ctgaatagctgctgatactagaaaactggctaaaaattgtaagtgagataaggagattgcagttatgttttcacctttgagactggggaagcaggaggggcacaggtgactagccttgag

SEQ ID NO: 678987 - DNA, 120 bp, Artificial Sequence
  ENSG00000186487_194 (sequence is synthesized)
agataacagctgaatttggggtgagttcattattctgctgtctctacttttgtatatttgaaattaacttttaaacccaacctttctatgagcttgatgctttccataataaagattttt

SEQ ID NO: 678988 - DNA, 120 bp, Artificial Sequence
  ENSG00000186487_195 (sequence is synthesized)
aagcaatattatcactctacaaaagttccaaaaagctctgaaagttatacaatgaagggcagatttcctctgctctcagagccccagctcccaagaccccccgccaagaggcagccccag

SEQ ID NO: 678989 - DNA, 120 bp, Artificial Sequence
  ENSG00000186487_196 (sequence is synthesized)
ccgagcacccatgatcagtgctcaccacatgcatgagtgcacacacatgcaccccatgtgtgcataactgtcatactgtatgcattggtctttttgctttttctcattttcagacagcct

SEQ ID NO: 678990 - DNA, 120 bp, Artificial Sequence
  ENSG00000186487_197 (sequence is synthesized)
tttgctggcaaccaacctaataatgctattctacgccttgcttaccaccacttccctgcagggctgggacattagacagttgactaatggccgtcctgtgtcttgtccacagcttgtcag

SEQ ID NO: 678991 - DNA, 120 bp, Artificial Sequence
  ENSG00000186487_198 (sequence is synthesized)
agttaccaaaattgaacttgtctttcgcttgtgagcggttgtggtcattgtgagggcaaaacctgggatgaggaaaagagtctgggcacaaaattccaggagtcttcacactcgggttca

SEQ ID NO: 678992 - DNA, 120 bp, Artificial Sequence
  ENSG00000186487_199 (sequence is synthesized)
tggcaaagaaagaagcctttgaccttgctcctgttccaggatcagaaatgtcaccattcagattttaaaatgaaggggtcattgacattaagtgggacagatgaacactggctcccgaag

SEQ ID NO: 678993 - DNA, 120 bp, Artificial Sequence
  ENSG00000186487_200 (sequence is synthesized)
acccggcgcggcaacagtgcaggtacctctgcccagcacggggctcctggtgacagagtgcaggtgcccctgcccagcacggggcttctggccacagtgcaggtacccctgcccagcaag

SEQ ID NO: 678994 - DNA, 120 bp, Artificial Sequence
  ENSG00000186487_201 (sequence is synthesized)
gggctcctggcgacagagcacaggtatccctgcccagcaaggggctcctggtgacagtgcaggtacccctgcccagcacggggctcctggcgacagagtacaggtacccctgcccagcac

SEQ ID NO: 678995 - DNA, 120 bp, Artificial Sequence
  ENSG00000186487_202 (sequence is synthesized)
ggggctcctggccacagagtgcaggtactcctgcccagcacggggctcccaggattgctgcaggcagcccctcctctggtgcttgtcccatttgctgctttgagtaaatactttcatctt

SEQ ID NO: 678996 - DNA, 120 bp, Artificial Sequence
  ENSG00000186487_203 (sequence is synthesized)
ggaggcagttaaaagttgcattgcgcatcctctccaaagagacaattcatgccaaaaagagtcctttgcagttaaattagatgaggcatcactgctgaagttctatagggcaggaatgat

SEQ ID NO: 678997 - DNA, 120 bp, Artificial Sequence
  ENSG00000186487_204 (sequence is synthesized)
gtgagcctccttgtgggtgctgagaggatgcctcggggtggccagtggggagggaatggtgcccatgaccctcacgtggaaatggctcatgtagaatcactgcacacagaatctacactt

SEQ ID NO: 678998 - DNA, 120 bp, Artificial Sequence
  ENSG00000186487_205 (sequence is synthesized)
gcagcagaaggaactggttagtaaagcatgtggggtctgatttggaggattggggagggaagagattggcgcatacctagtggctgctgcctggcagcacatatttttagggctggaggt

SEQ ID NO: 678999 - DNA, 120 bp, Artificial Sequence
  ENSG00000186487_206 (sequence is synthesized)
cgacaagactgaaatatggcccaaatctcagatcctgtaaagtcgttggttctgaacgagtgaatggaatgggaactctggtattatcttctcaatactcacatttagaagtacttttat

SEQ ID NO: 679000 - DNA, 120 bp, Artificial Sequence
  ENSG00000186487_207 (sequence is synthesized)
atatgttactctgatgaatagcagaagaaaattctggtaaaaatggcaatttctcagcatgctctataaggaaagctgtggtgtgcattttaaggttcactgtgcaattgtgatttattt

SEQ ID NO: 679001 - DNA, 120 bp, Artificial Sequence
  ENSG00000186487_208 (sequence is synthesized)
gtctgccgaccgccccatttgcctgtctgataatagaactacttaccactgcacagaaattagaggctgggattgtcttccatatgctgcaagcttgtgggtgctgcaggctttgagagc

SEQ ID NO: 679002 - DNA, 120 bp, Artificial Sequence
  ENSG00000186487_209 (sequence is synthesized)
tttatgaactgctgtaataggtcacagttgttctaattattttctcatctataccctattcattttccctgaagaaactcactgcactcattggttccgtttggggaaggcattatgttt

SEQ ID NO: 679003 - DNA, 120 bp, Artificial Sequence
  ENSG00000186487_210 (sequence is synthesized)
gcccagctgctgtctcctccgtctagactaagcctgaactatttggctccacaaaacattttattgcagtcctagaaatcattctgctttcctctccactttcatttccctgcttgtgga

SEQ ID NO: 679004 - DNA, 120 bp, Artificial Sequence
  ENSG00000186487_211 (sequence is synthesized)
cgtggaaccagccatacaagagctgttcagctgtcccacccctggctgtgacggcagtggtcatgtcagtggcaaatatgcaagacacagaaggaaccagtgagaaaggcgaaggacaga

SEQ ID NO: 679005 - DNA, 120 bp, Artificial Sequence
  ENSG00000186487_212 (sequence is synthesized)
gttccaggatctgataaaagcattaagtcagctccttagagacgcagacactcttggcagcgaaggaaaactgtttccatcccacacattgcccagcagggatccaagcttactcaacat

SEQ ID NO: 679006 - DNA, 120 bp, Artificial Sequence
  ENSG00000186487_213 (sequence is synthesized)
ttttgggccctgatacaggtcatcaggccagacctcctaggaagctaacaaatatgacaaatatttatcttcagaaacgtcattattagccagtcacctgaatttgccttttgcttttcc

SEQ ID NO: 679007 - DNA, 120 bp, Artificial Sequence
  ENSG00000186487_214 (sequence is synthesized)
caactgaggtttttgtcttgtgatattagcatataaatgacaaaaacacggtgaattttataagcagggctagaagtaatgcttacatcacgagtgaacgtgctcatgtggtctttcctg

SEQ ID NO: 679008 - DNA, 120 bp, Artificial Sequence
  ENSG00000186487_215 (sequence is synthesized)
cacatggtcacctgtgtttctgcgcccattgttagatggctgcacacgtggctcagcccattcagctgctccgagcacctccatgttccccacaccacactcagaggtggccgggggcac

SEQ ID NO: 679009 - DNA, 120 bp, Artificial Sequence
  ENSG00000186487_216 (sequence is synthesized)
tggtgcctcaaacctggtgtccagccaccaagctcacaaagcaaacctcagtcatcctaagtgagtatcccaagatttagtttcggtccccaatatcaaggaagagtaagtccctgtgtt

SEQ ID NO: 679010 - DNA, 120 bp, Artificial Sequence
  ENSG00000186487_217 (sequence is synthesized)
atagatggaaggaaaacagtggcctactaggaagtcaccaaccttgacattgaggaagctgctgcatattcttctcctcaccctcgtagcagtttgctggctgggaaggccccgtggaga

SEQ ID NO: 679011 - DNA, 120 bp, Artificial Sequence
  ENSG00000186487_218 (sequence is synthesized)
taagtggggtgaatctgcccaaagtgcgtggtttgagcaacgctgcattggtgtgggaggcctggggagctgcatctgctgctactgagctcattgcctaatgcagacacctgagcaggg

SEQ ID NO: 679012 - DNA, 120 bp, Artificial Sequence
  ENSG00000186487_219 (sequence is synthesized)
gaagcatcacggggtgaggcctggaggctcagcatttcctggcagcatcctcacaccaaagcctgctatctcctgaagggcagggatacattgaaagaaaccacaccttcctctctgtct

SEQ ID NO: 679013 - DNA, 120 bp, Artificial Sequence
  ENSG00000186487_220 (sequence is synthesized)
gtgtaggtgattgtttagtggggctcaagtacctgctaaagagacgttgttattcatccagaatatttcatgaactgatgctggcattccagctaaaatatcgcatgtcaacatgtctgc

SEQ ID NO: 679014 - DNA, 120 bp, Artificial Sequence
  ENSG00000186487_221 (sequence is synthesized)
aataatctatttttgaacatttgactaagatgaaaaattctagtgccttatattcaggttttttttggctttgcatgttgatataaaatactgtttgtgttaaaaacaaagtgcaagtta

SEQ ID NO: 679015 - DNA, 120 bp, Artificial Sequence
  ENSG00000186487_222 (sequence is synthesized)
gtggttagaatggaatctatagaaacgaaatttaatcatcaaaataatggtcaacttgctgttctgaaatcctttttcctaaaatttcccaataaaaattagaaataggaataatcaaaa

SEQ ID NO: 679016 - DNA, 120 bp, Artificial Sequence
  ENSG00000186487_223 (sequence is synthesized)
taaacagtgagagagcttttccctgcagtcttgttgaagcaccccgggttttttgctcattgttggggtcttcaagagacacttctaatgagaaatacaaaacagaaatcttgggattgc

SEQ ID NO: 679017 - DNA, 120 bp, Artificial Sequence
  ENSG00000186487_224 (sequence is synthesized)
tcttggacttcatgggcccccacatctgactctgggcagcaagaaggatgagaagccagcactctgtgatgggagagtctagtcagaatgaggaggttatgttgtcctttaattgtacat

SEQ ID NO: 679018 - DNA, 120 bp, Artificial Sequence
  ENSG00000186487_225 (sequence is synthesized)
ctgaggttttaatctagtaaacacttcactaatttatagttccctggagcaaaatgaatgaaattggaaataaagtagatgctccctttgggaaatgattgacaaggatttgggatttcc

SEQ ID NO: 679019 - DNA, 120 bp, Artificial Sequence
  ENSG00000186487_226 (sequence is synthesized)
tggccatttcaggagagactcgttctctcccaggcgctttcttgagtgaaaggctttgaaggaactcaagggccgttgggtgcacaggggccggggaagcaggaaagctcacagccacgt

SEQ ID NO: 679020 - DNA, 120 bp, Artificial Sequence
  ENSG00000186487_227 (sequence is synthesized)
ctgcaatttcaacctattgctgtgctctctcttacatgtgatctgtggccttccaggggtggtgactcagggaaattacttctcttctcttctcttgtattgtttttttgcatttttaca

SEQ ID NO: 679021 - DNA, 120 bp, Artificial Sequence
  ENSG00000186487_228 (sequence is synthesized)
gaaagaggtttgtttctgacactagtcaattccatttaatgacattttaaaagtccctaggttctacaggtgattacatgtttctattcatgaatgagagatggagacatctcgtctacc

SEQ ID NO: 679022 - DNA, 120 bp, Artificial Sequence
  ENSG00000186487_229 (sequence is synthesized)
tccaaagagaaattgagaatattataagaatgtaaagaggttggacatcccacacttacctgatgtttttaagaaaaagctttctaataattaaaataaaatgtgacttggttatggaaa

SEQ ID NO: 679023 - DNA, 120 bp, Artificial Sequence
  ENSG00000186487_230 (sequence is synthesized)
aggatccacgattacacaggctgtaggaagatccaggattacacaggctgcaggcagatctaggattacacaggctgcaggcagagcacagcgtctttaacacccccccaaaccccgatt

SEQ ID NO: 679024 - DNA, 120 bp, Artificial Sequence
  ENSG00000186487_231 (sequence is synthesized)
agaatacaaatcttttccctatgagagaagttaagggctacaaaaaaaaaaaaagattcacaaaccaggcaaacaagaaaaaatagcacaaaaataacacgaatgtaaaggatgaggatc

SEQ ID NO: 679025 - DNA, 120 bp, Artificial Sequence
  ENSG00000186487_232 (sequence is synthesized)
aacatttctgctgaagaggaaaaacatgtacatcccctcctgtctaggtggctctagaaatccttcctttctcctgtcctggaagacctgcctttcctaaggcaagctgaagtctaccag

SEQ ID NO: 679026 - DNA, 120 bp, Artificial Sequence
  ENSG00000186487_233 (sequence is synthesized)
cttttggaaactgatctgcttttgaattctctgaacctcccttatgtaactgaaaaggagtctaaaccctcccggagggagataggaagtggccgtccccatgccccagttcagcagtgg

SEQ ID NO: 679027 - DNA, 120 bp, Artificial Sequence
  ENSG00000186487_234 (sequence is synthesized)
aagaagtcgctgccctcaggacccctccaggcacacacaggagtctgtgtctgaccccacagaatggctctttcagttcctcagggcctcggggtcctcagatttaaaaaacaatatctg

SEQ ID NO: 679028 - DNA, 120 bp, Artificial Sequence
  ENSG00000186487_235 (sequence is synthesized)
agctgtgttgagtttttggccattgtcgccgcttccctctgtgccctctggggctaggagtgagtgtgtgtgcacaagtgtgtgtgtgtgtgaggtgagcagtggtggtgctggccatga

SEQ ID NO: 679029 - DNA, 120 bp, Artificial Sequence
  ENSG00000186487_236 (sequence is synthesized)
gcgtggtcgccgtggtggtgctggatcctccgtcttagtctcacaggcaatccagtgggttcttggtgttggaaaattggtgctgtcgaggcagtagcccttgcaaagaaccgctcccag

SEQ ID NO: 679030 - DNA, 120 bp, Artificial Sequence
  ENSG00000186487_237 (sequence is synthesized)
cccccaccattaaccctccaggatgaatgactcctcatcccacagcgggttccttaccctaagggacaaacagtccttgcctctgagagtgataaggacaaaggactgtttgtgaaagca

SEQ ID NO: 679031 - DNA, 120 bp, Artificial Sequence
  ENSG00000186487_238 (sequence is synthesized)
tctccagaccatctaataatggccgtgttgagagtaaggtagagatgctcagtcttacacatctcatcccggatcccaccgcccgaaaggaattccctgcaacaagctgcataaaatgta

SEQ ID NO: 679032 - DNA, 120 bp, Artificial Sequence
  ENSG00000186487_239 (sequence is synthesized)
ttttaaaacatgtttttactacatgtaaatggcattagctgccttagggctccgtgtaatcaactcaaggtgagtacctctcttgcgaccccaggccccagcatcccagccctgagtgag

SEQ ID NO: 679033 - DNA, 120 bp, Artificial Sequence
  ENSG00000186487_240 (sequence is synthesized)
gtccctttgcatgtggaattgggggccccacctgcatcccgagcgtgtggtttgaatgcgtcaggccctggatgaaactcactcttccacgcgagggcgagaggctggggtggcgtttct

SEQ ID NO: 679034 - DNA, 120 bp, Artificial Sequence
  ENSG00000186487_241 (sequence is synthesized)
gttgccttgcgtcagctgcaccagtcaccttttgtattttttttttgcatgggtcctccgagtccaaccccaatactggctccggcggccccagcctcttgcttagccgctccactgctg

SEQ ID NO: 679035 - DNA, 120 bp, Artificial Sequence
  ENSG00000186487_242 (sequence is synthesized)
tattcatgccttgacagagagcactcactaaaagccctggaacagagccaggtgctggctgagagatgtggagcattgcaacttgcaactgagaggagcatctataatccaaaaataaat

SEQ ID NO: 679036 - DNA, 120 bp, Artificial Sequence
  ENSG00000186487_243 (sequence is synthesized)
aaaaaaagaagaaacagagaggaagacagagagaaaaataggagttcctatatctcccctttaccagtttcacatagatagaaatttcatttgcattaaaataaaatatcctaaaaataa

SEQ ID NO: 679037 - DNA, 120 bp, Artificial Sequence
  ENSG00000186487_244 (sequence is synthesized)
atggtaggaggtgcacactcttatacatgagagacacgttgccattgatgatgttgttgttgtgtatatcaatgtcctacaaattagttgagcggtggtggtcactcaatgggtaccaaa

SEQ ID NO: 679038 - DNA, 120 bp, Artificial Sequence
  ENSG00000186487_245 (sequence is synthesized)
agaacaggactttcatagcacagcccaggagctgaaagcccctcaggtccacacagctgtaggtgagcaaaacttcaggggaaggaaggagatggtttcccctcaataattccgagacag

SEQ ID NO: 679039 - DNA, 120 bp, Artificial Sequence
  ENSG00000186487_246 (sequence is synthesized)
cgcactcggctgctcgtggaatgtggagagggagaagctatggactggcttattgtcttttgtggtactgggaagacagtgcccttatgttatacgcttcctttaaataaatgcctctga

SEQ ID NO: 679040 - DNA, 120 bp, Artificial Sequence
  ENSG00000186487_247 (sequence is synthesized)
gctggagaccagcagaaagcatgcacctggaaacatgactacctccccctctcccagtccacccatcaggactgcctgtgccaggtttgggaaactacccctccctcaccagctccacct

SEQ ID NO: 679041 - DNA, 120 bp, Artificial Sequence
  ENSG00000186487_248 (sequence is synthesized)
tctttaaaatattagcaaagtaacaagtcgtgatttgggtccactgttcaaggtgaattgccggctgttactacgaatgactggcatataaagaaattgttcttcttggtcaatactgag

SEQ ID NO: 679042 - DNA, 120 bp, Artificial Sequence
  ENSG00000186487_249 (sequence is synthesized)
aaaattaacctcttatatgaactgaacacttctgttaaagaattcttcagattctctgttacacttcagattttatgtcagtctaatttttattcagtttggttgtcagtaatttactga

SEQ ID NO: 679043 - DNA, 120 bp, Artificial Sequence
  ENSG00000186487_250 (sequence is synthesized)
gattagcttaacaaaatgtatcaaggaagttaagttagccgacctggtctttaattttacattttcctgaatgctgtatccatgagatacaatgattgggcaaagggcaaaacagtgttg

SEQ ID NO: 679044 - DNA, 120 bp, Artificial Sequence
  ENSG00000186487_251 (sequence is synthesized)
ttggaatggcttagcccaggtacctcctcaggggagttggaagtcctgcctaatgactggtacatcaaccagcaaagtgggttttgtctgtagattgccaaagctttgcttgagtgatgg

SEQ ID NO: 679045 - DNA, 120 bp, Artificial Sequence
  ENSG00000186487_252 (sequence is synthesized)
tcacataattgggatgaaaggaagtagtattgctacaagataatcagccggtcatctgcttccatatgtgagagctgtttctgatctggggtttccggtgctctgagacatgccagggag

SEQ ID NO: 679046 - DNA, 120 bp, Artificial Sequence
  ENSG00000186487_253 (sequence is synthesized)
aaggccgccatgctgtgtgttgggaatgttcccggcagtgcgtttacggtgacatggctttcatgtccagtgttctgttactatccgacgcacaataccacttcagaactaaccctttca

SEQ ID NO: 679047 - DNA, 120 bp, Artificial Sequence
  ENSG00000186487_254 (sequence is synthesized)
tagaagtcatttcttctgaggaaagaggtgggagttttgtggttttgtttgtttgtttgcttgtttgtttttttgcaaagcctagctatcatctttattggcttagggttttcctcatag

SEQ ID NO: 679048 - DNA, 120 bp, Artificial Sequence
  ENSG00000186487_255 (sequence is synthesized)
aaatgcccaaacatgttgtaagtgaagggaattttctttcttgcccctctcccttgggctcaaaagttcttcaagaatctgattaccaggagaactaatttctggacacaaagggtagtt

SEQ ID NO: 679049 - DNA, 120 bp, Artificial Sequence
  ENSG00000186487_256 (sequence is synthesized)
gtttcagccagtgggtagggcctccatacatcagggagatgtgagttgcttgttgctaatctcatgtgcaggcttaaattaccactcctccttcagaagtcagaggagtttgtactagga

SEQ ID NO: 679050 - DNA, 120 bp, Artificial Sequence
  ENSG00000186487_257 (sequence is synthesized)
aacctgaattttatgaaataatcctagattgttacagtggcttaagattcctatgcaaacaatccatcacttacttacatgtacatatatacacaggcacagatagatatacagaacata

SEQ ID NO: 679051 - DNA, 120 bp, Artificial Sequence
  ENSG00000186487_258 (sequence is synthesized)
gatagatatgtatatatacacatagatgcatatgtacacacacatagatagatatgtatatacacatagatgcatatgcacacacacatgcattacataaattaaaattagtctcccaag

SEQ ID NO: 679052 - DNA, 120 bp, Artificial Sequence
  ENSG00000186487_259 (sequence is synthesized)
attttttgtctcgctatggtagaatgctgggtagagaaggcctatcagaacacctatcaacagacttaccatcatcgctattaaatctaccagggacacaaggcaccagtgtcattcatg

SEQ ID NO: 679053 - DNA, 120 bp, Artificial Sequence
  ENSG00000186487_260 (sequence is synthesized)
agatgctaagaattaaaataatagatttgtgtagtaaaatatttggaaagtagatcaacctggcaaattatttctggacactgtattaagtgagtgtcattttgagtgactcattaattg

SEQ ID NO: 679054 - DNA, 120 bp, Artificial Sequence
  ENSG00000186487_261 (sequence is synthesized)
tggaggctgattaatgatttgtaacttgcccagggcttactagaaagatggtatacaatgtggctctttcacgttctcacccgtttggaaagcaggaggcattcatgtttggtgcgacgg

SEQ ID NO: 679055 - DNA, 120 bp, Artificial Sequence
  ENSG00000186487_262 (sequence is synthesized)
attaagataggaaatctgtaaataggtatcgtttacaccaggggccttaaccaggttttaagttttgctcttcattttctagaattaaaaattcaattttagtttatttatggtcaaatg

SEQ ID NO: 679056 - DNA, 120 bp, Artificial Sequence
  ENSG00000186487_263 (sequence is synthesized)
ggactcaatgttgattatgatcaaacatcattcacaaatagtactaaaagccaaaagtgccttggcttcttcattataacaaaaatactactccttaccacagtcaactggcccctctca

SEQ ID NO: 679057 - DNA, 120 bp, Artificial Sequence
  ENSG00000186487_264 (sequence is synthesized)
aggactttgttcacgcatcaaaccattactgcacattaccacgtctacaatctaattaataatttgggtttcagcaaagttttaaatgagacaaaagagcccatttaaattctctaagag

SEQ ID NO: 679058 - DNA, 120 bp, Artificial Sequence
  ENSG00000186487_265 (sequence is synthesized)
ttacaagaatttgatcaggtttccactttttgttcgatcccagccatttgagcgcacaaagctgtctatctttctagggacggaaagaactcattgttcattgtaagcagacatccgcca

SEQ ID NO: 679059 - DNA, 120 bp, Artificial Sequence
  ENSG00000186487_266 (sequence is synthesized)
caggaatgtgcatatatcagcatatttagtggcaggcatagtcattgcaatttgacatctcagtcaagtttttcttgagatctggcaaaaatagaagtatagcaacccctcctcctcacc

SEQ ID NO: 679060 - DNA, 120 bp, Artificial Sequence
  ENSG00000186487_267 (sequence is synthesized)
atttcaaaggaaaagtggccccacattttcaaagctcaccttatatagatgaacaaactcacataaaagaacaaaccaaaatcatacgatcacttctgtgcatttttaaatcgattggtc

SEQ ID NO: 679061 - DNA, 120 bp, Artificial Sequence
  ENSG00000186487_268 (sequence is synthesized)
caaaaatttctgaatatttagacagcattcactgactaataagttaggtaattactcatctatctactaaaattttagtccagaagttgagcacctgtttgcagaatgaatttctatttc

SEQ ID NO: 679062 - DNA, 120 bp, Artificial Sequence
  ENSG00000186487_269 (sequence is synthesized)
aatattctgccatgtttcacatttgaggaaataatggatggataatggatatcagtttattttattctctgtgtgtgcattttctgcaccagtggtgaagtggacttattttaatgtatt

SEQ ID NO: 679063 - DNA, 120 bp, Artificial Sequence
  ENSG00000186487_270 (sequence is synthesized)
ttaaaggtaattgatcatggcaatattagcccattgtggatatcaattttggaatagaaagagggccattgatgagcctgccctcctttatagaggttgaatcatgctttctttatagtt

SEQ ID NO: 679064 - DNA, 120 bp, Artificial Sequence
  ENSG00000186487_271 (sequence is synthesized)
gtatcaacaaactctaacttagtgcctgacacataatatacagctaaaattttaggtttgatcaaattcacatgaacttaatatttgggcccagtagtgaatctctatgatatgaccata

SEQ ID NO: 679065 - DNA, 120 bp, Artificial Sequence
  ENSG00000186493_0 (sequence is synthesized)
cgcggtcaggccaggccgggtccaattaggggactcacagcctgccccgctgtgcaccccgaggaggcccggcccctgtgtccaatccggaagtcgcagggaagtggggaggtcaggatg

SEQ ID NO: 679066 - DNA, 120 bp, Artificial Sequence
  ENSG00000186493_1 (sequence is synthesized)
gtggcgcccgcggctcgggtcttcctccgggcagtgcgcgcggctctcacttccacggtcccggacctgctctgcctcctggcccgaggctccccgcgtggcctcgcgtctggtcgccta

SEQ ID NO: 679067 - DNA, 120 bp, Artificial Sequence
  ENSG00000186493_2 (sequence is synthesized)
cccctcgcggtccactccgcccagcatggacctggatccggggcgccttggttgcgaattgccaggagggccctgagatttgtgttgtcaaaacactggggggatgattgttacctgaca

SEQ ID NO: 679068 - DNA, 120 bp, Artificial Sequence
  ENSG00000186493_3 (sequence is synthesized)
ggagctcaggttggcgccgccggtgcagtgggcattacaggtgcaagggaaccagttgcaaactgcagtgctgtgcttgaggatggctcctcctgagccggcaggctcccgccaaagaat

SEQ ID NO: 679069 - DNA, 120 bp, Artificial Sequence
  ENSG00000186493_4 (sequence is synthesized)
ttagaacgagtctacgtggacacgcaagtttcagcgagcggggatttcctgcgaggccgagcgcgaggaacagccggccccggaggctcgggctcggggtctccccggggacgcggccga

SEQ ID NO: 679070 - DNA, 80 bp, Artificial Sequence
  ENSG00000186493_5 (sequence is synthesized)
ctgagaaggccggggcgctcgccgggcgcggcgccgtcctccgtgtcgcggggacggaaggaggcgacgcaggccaggag

SEQ ID NO: 679071 - DNA, 120 bp, Artificial Sequence
  ENSG00000186493_6 (sequence is synthesized)
tgccggcccgagtcccggcaacggtgggcgcgacccacctcctcccccggcggcttaattcggggaagaagaaaaaacggcatcgaggcatttcaataaaacctaagcgactcctgatcc

SEQ ID NO: 679072 - DNA, 120 bp, Artificial Sequence
  ENSG00000186493_7 (sequence is synthesized)
cgccccctaccagttatcccacccaccccttcgcccacactgctcccccaccactcttcctacaaaccacacccccatcctgcacacatcctcttcaggccatctcaacacacgcacacg

SEQ ID NO: 679073 - DNA, 120 bp, Artificial Sequence
  ENSG00000186493_8 (sequence is synthesized)
cacacacacccacgaccacctctccctccacccacagacaccccgttcccacaggctgggccccctgcaacgacccagcggggggtttcaaccttgttgcgactccacatgggacatcct

SEQ ID NO: 679074 - DNA, 120 bp, Artificial Sequence
  ENSG00000186493_9 (sequence is synthesized)
attcagtccaggacagatatttttaatcaattactatagagctgaaaaacagagagagagagaaagcagccgggttgggcaagccgtcgacagtctgcgacatttttgcgcttcctggga

SEQ ID NO: 679075 - DNA, 120 bp, Artificial Sequence
  ENSG00000186493_10 (sequence is synthesized)
gggaattcctccaagaagaggggtaaatgagaggcccacacgctggatggcaaacacaaacactgtcagatcagatggcaacctttagggttcctttacgatcagatcagtttaaatgaa

SEQ ID NO: 679076 - DNA, 120 bp, Artificial Sequence
  ENSG00000186493_11 (sequence is synthesized)
aaaaaaatcgggtgtaatttttatcaccagggagcactggcctggagtatttccatttctaaagagcggttcccgctgtggtttcattagcatttggggctcatcctccctccccctccc

SEQ ID NO: 679077 - DNA, 120 bp, Artificial Sequence
  ENSG00000186493_12 (sequence is synthesized)
ttgacccacccccctccccccgccggacctctgccaggggcagaagagaaaacagccagttattatacaaacatcctcagtttggagctggagtgtctgctctggatacagtcgattctg

SEQ ID NO: 679078 - DNA, 120 bp, Artificial Sequence
  ENSG00000186493_13 (sequence is synthesized)
acatcaattaaatatataaccagacacgtgcagtggcggggagggtcccctcacccagggtgcatctccagaaacgccgcctgcccttccccctctttagctcagtgttgggagtttgaa

SEQ ID NO: 679079 - DNA, 120 bp, Artificial Sequence
  ENSG00000186493_14 (sequence is synthesized)
gatggcctcttcccgtcctgtgtgtattttccccttagcaattatactcctccactgaaatctatatgttccataccgctgctgcctgttactaataaaaaccgtctaccttgcactatt

SEQ ID NO: 679080 - DNA, 120 bp, Artificial Sequence
  ENSG00000186496_0 (sequence is synthesized)
agaaccggaagttgttgcgcagctggcagttccccggtttctccccgacggcgtcgggaggagtgtccatcaggacagcttcacctccttgaggattaaagcctaacagtactgagctat

SEQ ID NO: 679081 - DNA, 120 bp, Artificial Sequence
  ENSG00000186496_1 (sequence is synthesized)
ttgtctgtcaaaatgtctgcaaaattgggaaagtcatcatcactcctaacacaaacttcagaggagtgtaatgggattctgacagagaagatggaagaggaagagcagacctgtgatcca

SEQ ID NO: 679082 - DNA, 120 bp, Artificial Sequence
  ENSG00000186496_2 (sequence is synthesized)
gactctagcctccactggagcagcagctacagcccagagaccttccgccagcaattcaggcagtttggctaccaggattcacctgggccccatgaggctctgagccggctctgggaactt

SEQ ID NO: 679083 - DNA, 120 bp, Artificial Sequence
  ENSG00000186496_3 (sequence is synthesized)
tgtcatctctggctgaggccggaagtgcacaccaaggagcagatcctggagctgctggtgctggagcagttcctggccatcctcccaaaagagcttcaggcctgggtgcagaagcatcat

SEQ ID NO: 679084 - DNA, 120 bp, Artificial Sequence
  ENSG00000186496_4 (sequence is synthesized)
ccagagaatggagaggaaactgtgactatgctggaggatgtggagagagagcttgatggaccaaagcagatcttttttggacgaaggaaggacatgattgcagagaagctagcaccttca

SEQ ID NO: 679085 - DNA, 120 bp, Artificial Sequence
  ENSG00000186496_5 (sequence is synthesized)
gaaatcactgaggaattgccaagtagccagctcatgcccgtgaagaagcagctccagggagcatcatgggagcttcagtccttaagaccacatgatgaagacatcaaaactacaaatgtg

SEQ ID NO: 679086 - DNA, 120 bp, Artificial Sequence
  ENSG00000186496_6 (sequence is synthesized)
aaatctgcttcaaggcaaaagacttctttaggcatagaactgcattgcaatgtttccaatatccttcatatgaatggctcccagagttccacatatagaggaacctatgaacaagatggt

SEQ ID NO: 679087 - DNA, 120 bp, Artificial Sequence
  ENSG00000186496_7 (sequence is synthesized)
aggtttgaaaagagacaaggaaacccttcttggaaaaaacaacagaaatgtgatgaatgtggcaaaatctttagtcagagctcagcccttattttacatcagagaatccacagtggaaag

SEQ ID NO: 679088 - DNA, 120 bp, Artificial Sequence
  ENSG00000186496_8 (sequence is synthesized)
aaaccttatgcatgtgacgagtgtgcaaaggcattcagccgaagcgcaattctgattcagcatcgacgaacccatactggtgagaagccctacaagtgtcatgactgtggcaaagccttt

SEQ ID NO: 679089 - DNA, 120 bp, Artificial Sequence
  ENSG00000186496_9 (sequence is synthesized)
agtcagagctcaaatctttttagacataggaaaagacacattagaaaaaaagtcccataagtatcatgagggaatcaaagcatttactcagagctatttcagcacaagggaagacaccag

SEQ ID NO: 679090 - DNA, 120 bp, Artificial Sequence
  ENSG00000186496_10 (sequence is synthesized)
atgcaaacgctccttagtacaaatcagtggtcttagtaagcaccagtctcctttcaagactcatgaaagccacaggagagaaggttgaagatctcaggtcagcattatttgcttttctgc

SEQ ID NO: 679091 - DNA, 120 bp, Artificial Sequence
  ENSG00000186496_11 (sequence is synthesized)
ttatcaatgcagtctcaattctgacgtttgcaattccaaagcttaattcagatttccatccctatgcaggccttgaaaaggcattctcagacatgttctactattttcattattaacaca

SEQ ID NO: 679092 - DNA, 120 bp, Artificial Sequence
  ENSG00000186496_12 (sequence is synthesized)
tataatgaattagtatatatctttttagacaagtatgttttttccctcattgagaaggaatgtgtgagttactcagtgtaaaaatagacattctcctccatttcataacttgagcactag

SEQ ID NO: 679093 - DNA, 120 bp, Artificial Sequence
  ENSG00000186496_13 (sequence is synthesized)
tagacattctcctccatttcataacttgagcactagaattctaaagaccaaaaattaaagcactcaaaaagaattcctggctgggtgcggttggctcatgcctgtaatcctagcactttg

SEQ ID NO: 679094 - DNA, 66 bp, Artificial Sequence
  ENSG00000186496_14 (sequence is synthesized)
cacggcgaaaccccgtctctactaaaattcaaaaaattagccaggcatggcaacggctcagacaga

SEQ ID NO: 679095 - DNA, 120 bp, Artificial Sequence
  ENSG00000186496_15 (sequence is synthesized)
aaataaataaaaataaaaataaattcctattttgtcttctgttactagattcaaaatatgaacatgcgattgcagaggcccaaaagaatatgtacttcaagactaggctgaagtgcccca

SEQ ID NO: 679096 - DNA, 120 bp, Artificial Sequence
  ENSG00000186496_16 (sequence is synthesized)
ggtcactttcaggaggcagataaataaaggccttatcttatgaaagcacacaagagcctccatactattaatatcaagttaatttcccgtgttggaaaaaaataatctcctttgcaatgt

SEQ ID NO: 679097 - DNA, 120 bp, Artificial Sequence
  ENSG00000186496_17 (sequence is synthesized)
aatttggaaataagtcaatggaaacatgaaaatgactgcttgtctacaaggagtcagctaaacataaggaatgttttcataacaatattaatctatgggtgcttctgtaagatggatgat

SEQ ID NO: 679098 - DNA, 120 bp, Artificial Sequence
  ENSG00000186496_18 (sequence is synthesized)
catcttaatataaagaaaaaagggagatgaacaaaattgtcaaacaagactgatgtaccacaagtgttgtcaagtacagtgtgtgtcggagagatgtaccacagcttaactggaagagga

SEQ ID NO: 679099 - DNA, 120 bp, Artificial Sequence
  ENSG00000186496_19 (sequence is synthesized)
agcccgtaactgctgatgacaatactttcagtgtccccttttctggcataaatcaactatgaatatgtttcaagcatcacaagacaaccttttcagagtcttctgtattcttagtaagat

SEQ ID NO: 679100 - DNA, 120 bp, Artificial Sequence
  ENSG00000186496_20 (sequence is synthesized)
gagtttctagacacgctgtcatgaaatgagaccctggattttgatgctcttgtacatatggacaaatcactgaagttcaatttaaagggtccactgcagtcccttataaacaattgttga

SEQ ID NO: 679101 - DNA, 120 bp, Artificial Sequence
  ENSG00000186496_21 (sequence is synthesized)
acctaaccattatagtttataagttttaagacatttatgggatatcttatttggcttatctatgggatatgagtaactatgttttacctgcatttaattcagccagattccctgtttaaa

SEQ ID NO: 679102 - DNA, 120 bp, Artificial Sequence
  ENSG00000186496_22 (sequence is synthesized)
attactgaatcgtacattattaaaattattctgacagtatacaaacaacaaaattatctattttccagagattcttgataaaactctgtaatgttactacaataatacatgtattgtgtt

SEQ ID NO: 679103 - DNA, 120 bp, Artificial Sequence
  ENSG00000186496_23 (sequence is synthesized)
ttccatggtgctacagttacacaatatggaggcaaacatcagaaatcaaagtccttggaataagggaagagactcatagtaaacttctttgtctggttgggttcctcataaagtataaaa

SEQ ID NO: 679104 - DNA, 120 bp, Artificial Sequence
  ENSG00000186496_24 (sequence is synthesized)
catttcattctcagaaaatccaaccatatcttagagtatctccagaaactggcttagaggagctccaaatatgtggaattaccacactctgcttagttagtatgctgataaatgtaagat

SEQ ID NO: 679105 - DNA, 120 bp, Artificial Sequence
  ENSG00000186496_25 (sequence is synthesized)
tagtaggaggagaagtgaatgtaaattttattatagaattttctgatagtgattatgatttgtagctctagtgaatatgaattttatattgagttgtgtgtatcttgagtcactaaaaat

SEQ ID NO: 679106 - DNA, 120 bp, Artificial Sequence
  ENSG00000186496_26 (sequence is synthesized)
gtaggatactttttatttggggctcattgtctttgtaattacggagaggaacaaaccatctattgaaacaacaagtgcctcagagatgtatatattgtgaattactgcttaattacggaa

SEQ ID NO: 679107 - DNA, 120 bp, Artificial Sequence
  ENSG00000186496_27 (sequence is synthesized)
agagtttcttaggttctatgtgaataagatggcagaatctaaatcaagtattttgaaggaagcacccatcttcacttggtgctgccatcaactttgtaagattgcattctatttattgtg

SEQ ID NO: 679108 - DNA, 120 bp, Artificial Sequence
  ENSG00000186496_28 (sequence is synthesized)
aataatttgagtgtttccacaggaaagtggtatgaatcatatcgtctaagtatatgatgaatctttaaagggtgtctctgtgtactttgaattattttgcagttatgtaggtatcctaat

SEQ ID NO: 679109 - DNA, 120 bp, Artificial Sequence
  ENSG00000186496_29 (sequence is synthesized)
gagtgaatggtactagtttatataaaaggagaattcattgagctaaccttggttttaaaaattagcattagcacccccattatattaattttcagggatagtaaatactccaaaatgaaa

SEQ ID NO: 679110 - DNA, 120 bp, Artificial Sequence
  ENSG00000186496_30 (sequence is synthesized)
tggaaggtgtgggggccctctgctcaccacacacatctcagctgatttatgcaagaggcctcaaatctccccctctcatctcctccttactgtgggaacttctgttatttgtcctactaa

SEQ ID NO: 679111 - DNA, 120 bp, Artificial Sequence
  ENSG00000186496_31 (sequence is synthesized)
atgaagatcttcagtattttgttcttgcttctttttcagagattcttataaaatcttcagactttaaatccctgacatctgcatcagggttttcatgcctttttaaagtagcccttttat

SEQ ID NO: 679112 - DNA, 120 bp, Artificial Sequence
  ENSG00000186496_32 (sequence is synthesized)
cttcaggcagcccttgaggcctttctgtgggaccccaaggtacacagcccagagaccactgatcctcatcatcatttcctatataactgctcagttactggtgggatctcgtagcagaat

SEQ ID NO: 679113 - DNA, 120 bp, Artificial Sequence
  ENSG00000186496_33 (sequence is synthesized)
cgcctatattgctgctaaggtgactttgctctcatacgtgctttgaatacacttctctactccctcacatcttcaactggcctcaactgctctttgcattgctttctataagtgctccag

SEQ ID NO: 679114 - DNA, 120 bp, Artificial Sequence
  ENSG00000186496_34 (sequence is synthesized)
aatagctgtgtagcaatctattcttccattgcagatactaaacaaataagtgctatggggaaaaaataaaaacaaaacagaataagggggctagagggaaggtgagaagtagaaataagg

SEQ ID NO: 679115 - DNA, 120 bp, Artificial Sequence
  ENSG00000186496_35 (sequence is synthesized)
accaaagcaggtaagaaggatgcctgtggagatgaacccccaggctgagtcaagagcactggcacatcattgggagtagagctctcaaactgtattcccactcagcacaactggatgtat

SEQ ID NO: 679116 - DNA, 120 bp, Artificial Sequence
  ENSG00000186496_36 (sequence is synthesized)
aggggtgaaagtactaatgggtgtcccagcaaatagaaggtggctctactttttccctcccttttcctgtgtccatgatactttttgcatagtttcttctctgttattttatcctcaagt

SEQ ID NO: 679117 - DNA, 120 bp, Artificial Sequence
  ENSG00000186496_37 (sequence is synthesized)
tcgtctgttttatatattggaactcaatgtaaaatttcatttgataaaagggccatgctactttaaacagaatggtggggataggatcttattatatagagtggtagaaaggcctctctg

SEQ ID NO: 679118 - DNA, 120 bp, Artificial Sequence
  ENSG00000186496_38 (sequence is synthesized)
atgaagcgacatttgagcagagaccctccttctagatgatcatcctggataaaataggagccagagattaagagggaaatcctacttgggagcatctccttccttctctccagcactgct

SEQ ID NO: 679119 - DNA, 120 bp, Artificial Sequence
  ENSG00000186496_39 (sequence is synthesized)
tccatagttcaggagtggctgatagctaagcaaggttagagtttttccaagggaatttttataagaaactacacaaaggaaatacagtaatttagaaagagatttagaaaacattgttca

SEQ ID NO: 679120 - DNA, 120 bp, Artificial Sequence
  ENSG00000186496_40 (sequence is synthesized)
ccctaacttggcaagtactggctctctgaaggcttatactgggacacgtaatacctccagtctagaaattgtcttggtatacttagaaaagtgaaagtcttttcacgaaaaagtattttc

SEQ ID NO: 679121 - DNA, 120 bp, Artificial Sequence
  ENSG00000186496_41 (sequence is synthesized)
cgtcaggaaagggagggagaccatcccagcctcagcagcttggtgtggtggtgactacagaagtgatcaacctcaaagccaggtgtggcaagaaccacatcctacctgtgaatgtcctca

SEQ ID NO: 679122 - DNA, 120 bp, Artificial Sequence
  ENSG00000186496_42 (sequence is synthesized)
tggaggcctttcctacatttttttttaagattcgtagaaatttgaaacagaatgcaacaggtccaggatcttgcagtacaaggcagagagaaccagaatcacttgatagaataatagaac

SEQ ID NO: 679123 - DNA, 120 bp, Artificial Sequence
  ENSG00000186496_43 (sequence is synthesized)
catttcttaaggccacaacatgatttctgtggtactgagtcatgtcttatgaaagcttctgggagatgatcttggtctcagtactgtaaagtactaattgatgccaggattttgatagta

SEQ ID NO: 679124 - DNA, 120 bp, Artificial Sequence
  ENSG00000186496_44 (sequence is synthesized)
atgactaatcattgaggtcactttggaatataaactatcaaaaatgaatttgagacagaatccttaccatttataaaatgatttccacttaaactagtaataataaatgagtatgccata

SEQ ID NO: 679125 - DNA, 120 bp, Artificial Sequence
  ENSG00000186496_45 (sequence is synthesized)
agaaccggaagttgttgcgcagctggcagttccccggtttctccccgacggcgtcgggagcacatcattgtgtaaagttgtatcatttatttggtaacaactttatgaactcacaggctt

SEQ ID NO: 679126 - DNA, 120 bp, Artificial Sequence
  ENSG00000186496_46 (sequence is synthesized)
tatacagggcctagaacaatacttggtgaagtgagaaaataagtcaaatggcaggatacataacgatggaagacggaggcgcacgagtgtccatcaggacagcttcacctccttgaggat

SEQ ID NO: 679127 - DNA, 88 bp, Artificial Sequence
  ENSG00000186496_47 (sequence is synthesized)
agttccccggtttctccccgacggcgtcgggagaagtattcttcaaaagcatggtttctgggcctctcaggaggccaaggcgggtgga

SEQ ID NO: 679128 - DNA, 120 bp, Artificial Sequence
  ENSG00000186501_0 (sequence is synthesized)
accagagccggggccagtcggagcggggcgcgcgccgcatggcggaagcggaagggagttctctgctcttgttgccgccgccgccacccccgcccaggatggcggaagtggaggcgccga

SEQ ID NO: 679129 - DNA, 120 bp, Artificial Sequence
  ENSG00000186501_1 (sequence is synthesized)
cggcggccgagacggacatgaagcaatatcaaggctccggcggcgtcgccatggatgtggaacggagtcgcttcccctactgcgtggtgtggacgcccatcccggtgctcacgtggtttt

SEQ ID NO: 679130 - DNA, 120 bp, Artificial Sequence
  ENSG00000186501_2 (sequence is synthesized)
tccccatcatcggccacatgggcatctgcacatccacaggagtcattcgggacttcgcgggcccctactttgtctcagaggacaacatggcctttggaaagcctgccaagtactggaagt

SEQ ID NO: 679131 - DNA, 120 bp, Artificial Sequence
  ENSG00000186501_3 (sequence is synthesized)
tggaccctgctcaggtctatgctagcgggcccaacgcatgggacacggctgtgcacgacgcctctgaggagtacaagcaccgcatgcacaatctctgctgtgacaactgccactcgcacg

SEQ ID NO: 679132 - DNA, 120 bp, Artificial Sequence
  ENSG00000186501_4 (sequence is synthesized)
tggcattggccctgaatctgatgcgctacaacaacagcaccaactggaatatggtgacgctctgcttcttctgcctgctctacgggaagtacgtcagcgttggggccttcgtgaagacct

SEQ ID NO: 679133 - DNA, 120 bp, Artificial Sequence
  ENSG00000186501_5 (sequence is synthesized)
ggctgcccttcatccttctcctgggcatcatcctcaccgtcagcctggtctttaacctccggtgatggctgctcggtggccccacacccaccagggtcccgaggaaacagccgccatccc

SEQ ID NO: 679134 - DNA, 120 bp, Artificial Sequence
  ENSG00000186501_6 (sequence is synthesized)
gggttgggcctgctgttgtggaccgggggtcggggctggcaggatggaaggactgaggaccagcatgaagtgggggtttgttgtctccctgcctctcagaagcaccctgtcccctcctcc

SEQ ID NO: 679135 - DNA, 120 bp, Artificial Sequence
  ENSG00000186501_7 (sequence is synthesized)
ccaggcctgtgactccggccctggaagcccctttgttcttctgttgaaaggctttggcttcccgctgtagagctgctcccgccaccacctgctggggtcctgcctcagcccagtgcccag

SEQ ID NO: 679136 - DNA, 120 bp, Artificial Sequence
  ENSG00000186501_8 (sequence is synthesized)
tatggggagaggaggacatttgggctcacctgtcaaggtggccctgggaccagagctggtcccagcatggggtgcaccgggtacacttaacgtgtctctataagccaagttgcttcagga

SEQ ID NO: 679137 - DNA, 120 bp, Artificial Sequence
  ENSG00000186501_9 (sequence is synthesized)
ccttcaccactggcctctagaatggtccagaggggctggctgggtccctttgtcagactcctgccggcagctgccctgggggacatgtgtgcccatctggcatcctccagcccgtgcagt

SEQ ID NO: 679138 - DNA, 120 bp, Artificial Sequence
  ENSG00000186501_10 (sequence is synthesized)
ccgctcttcactgttccacggcctcccagtgcctcccagcattggacccatctccccctgcagtttgaggccagagaggtgagtggacctgacaagtgccagagtaaccgtgtagacaga

SEQ ID NO: 679139 - DNA, 120 bp, Artificial Sequence
  ENSG00000186501_11 (sequence is synthesized)
gcagtgtagacagcactcagccccagccccaggtgtggacctcatgctggtgatggctcccctgggtggcctgccagcacagccagtgccatcagggagctgaaggggctgtcccccacc

SEQ ID NO: 679140 - DNA, 120 bp, Artificial Sequence
  ENSG00000186501_12 (sequence is synthesized)
taactccagctcccccttcacgttgtcaccaaggccctgtgccgcccgcctcgcccccctgctctgtggattcctttgggaagggctccctgggcaggacaataaagagttttgactcca

SEQ ID NO: 679141 - DNA, 120 bp, Artificial Sequence
  ENSG00000186501_13 (sequence is synthesized)
ctagagtgacgagctgagggcctgatggagagggaggtggctgtgctgaagtccagctccacctgggccccaaatgcagctctggctcttgcctgctgtgagaccatgggcaactgcctt

SEQ ID NO: 679142 - DNA, 120 bp, Artificial Sequence
  ENSG00000186501_14 (sequence is synthesized)
ggtctctcttagccacagctgtctctggtgaaatgcaggcaatgattccggctcctcagggaggcttctacggatccctgtgctccggtaaagtgagcagatagatcctctcataatgac

SEQ ID NO: 679143 - DNA, 120 bp, Artificial Sequence
  ENSG00000186501_15 (sequence is synthesized)
tgccccacaggtcccttcctaggcagagagattgagtgagtcgcccatggtcgccacagcatggacacagcagagcccagactcgtgagccagcataggttagtgctgatctggccgcct

SEQ ID NO: 679144 - DNA, 120 bp, Artificial Sequence
  ENSG00000186501_16 (sequence is synthesized)
ctccaagctttcctcttagccacgttcatcattaagaggttctgaaaagaagacttttagggatatttttaagtactgcatggcttttagaagtcccctgagaataactggtcacacaga

SEQ ID NO: 679145 - DNA, 120 bp, Artificial Sequence
  ENSG00000186501_17 (sequence is synthesized)
tctcacagttccgaagactggacagtcctgggtgcgggtgctggtagagtcagtgtctggtgagggcctgaggtgcctttccactgtgtccccacgtggtggaggggtgaggggtctccc

SEQ ID NO: 679146 - DNA, 120 bp, Artificial Sequence
  ENSG00000186501_18 (sequence is synthesized)
tcagggctcttttataaggacacggatcccattcatgagagctaatcaccccatggcctaatcacctcccaaaggccccacctcctcataccatcaccttgagggttaagatttcaacat

SEQ ID NO: 679147 - DNA, 120 bp, Artificial Sequence
  ENSG00000186501_19 (sequence is synthesized)
atgaacttggggacacagactttcagagcatagcacccccaatttcattccatatccccccaggatcccccatggcaccagccacctcaccctgtgtcacagttgactgccacataacac

SEQ ID NO: 679148 - DNA, 120 bp, Artificial Sequence
  ENSG00000186501_20 (sequence is synthesized)
ttgccccagatctggcttactgtacatctcagcacccagctcaggcccgggcacagggcaggcctcagaggacgtgcgtagagctgagggcacaaaggagccaagcaagtgtccagagcc

SEQ ID NO: 679149 - DNA, 120 bp, Artificial Sequence
  ENSG00000186501_21 (sequence is synthesized)
caggtgagctgccctcctgcctgcccacccacacactgcccagaggctgctctcccaaggatcctagaaagaccattcctagcgtccttcagtcagccaggacagttggaacagatgcca

SEQ ID NO: 679150 - DNA, 120 bp, Artificial Sequence
  ENSG00000186501_22 (sequence is synthesized)
cagccccagagctcccagtagtccccattatgaagtccataggcagagggcacacgtggcttccatacccaaactgcaattcctggtcctcttgctggagaccctagaggtaggtggcta

SEQ ID NO: 679151 - DNA, 120 bp, Artificial Sequence
  ENSG00000186501_23 (sequence is synthesized)
tagatggagccagtgaggcctagaaatggggagcatgtttcctgttcccaaccagcgaggtgtcagtaaatcaccaggagcgcggagcagcccctgcccgggaccatagctggtgatccc

SEQ ID NO: 679152 - DNA, 120 bp, Artificial Sequence
  ENSG00000186501_24 (sequence is synthesized)
ccatagtgggcaaccatgcccagcctgcttccttgattggccaagtttggggtgagggggtggttgggttttccttagggatggcagccctattggggtctgtgggtgctcagggctgcg

SEQ ID NO: 679153 - DNA, 120 bp, Artificial Sequence
  ENSG00000186501_25 (sequence is synthesized)
ctgccaaactcactctcctgccctttgggaacaaatgaggcatggaaggtagaagagaggcattgtttggagctctgctggaaagttctggttggagagaataaaaaccgttcaaccttc

SEQ ID NO: 679154 - DNA, 120 bp, Artificial Sequence
  ENSG00000186501_26 (sequence is synthesized)
gtgtggccagaaggattcttaagtaactgacccagccctttgcccccacccctggggtaccgagacatgggtagggattagaggcaagagtggagagtcagaccatccaggaaccacatc

SEQ ID NO: 679155 - DNA, 120 bp, Artificial Sequence
  ENSG00000186501_27 (sequence is synthesized)
tttcaactccatggcaagggtgaggaaagggaagggacttggtcaaggtcacacaggaagtggcagagctgggacccacacccagatctgtctccctctagactcactctcctgcccttt

SEQ ID NO: 679156 - DNA, 120 bp, Artificial Sequence
  ENSG00000186501_28 (sequence is synthesized)
gggaacaaatgaggcatggaaggtagaagagaggcattgtttggagctctgctggaaagttctggttggagagaataaaaaccgttcaaccttctgggagctattgctggtttggtttgg

SEQ ID NO: 679157 - DNA, 120 bp, Artificial Sequence
  ENSG00000186501_29 (sequence is synthesized)
gacatttggtcttcatctttgcagtctcgggtgcccacctcagctgtgggcctggtgagagtgcctcagtcatcagtgtcctcaggtgacctgttgcccaaggctgcactgggaggagag

SEQ ID NO: 679158 - DNA, 120 bp, Artificial Sequence
  ENSG00000186501_30 (sequence is synthesized)
actgggccgaggaggagttggtgtcccacacagctgagatggcctggagcagggcttcctgctgccctctctggcttcctccggcaggcagcagtgtagtccaggagtctctgggccacc

SEQ ID NO: 679159 - DNA, 120 bp, Artificial Sequence
  ENSG00000186501_31 (sequence is synthesized)
aggtgttcgctgccagactgctcttcaaggacagttttaagggcatcattttccaagcagtagcccctaagcggccccagtccaggccatggtctctagactcctccaccaagccattcc

SEQ ID NO: 679160 - DNA, 120 bp, Artificial Sequence
  ENSG00000186501_32 (sequence is synthesized)
cctacacaacagccagggggcgccctgacctcccagctctccttggcctgagacccaccgggcactctggtgcttggaacagcaattctcacccaccttgaggtttatgggctttagcac

SEQ ID NO: 679161 - DNA, 120 bp, Artificial Sequence
  ENSG00000186501_33 (sequence is synthesized)
catcagcttccctgccactcaccctggcaagctgcctgggagactaggggagagtgcttgctgctgggtaaactccccgcgtgatgtggcctcacctgcatctccagccttagctgccag

SEQ ID NO: 679162 - DNA, 120 bp, Artificial Sequence
  ENSG00000186501_34 (sequence is synthesized)
cattccatcaccgtgtttctctttctgcatcctccaggagggctcagtcacttcagttatgggacatgctgcacagttttatgcctgtcacttagcttaagctgttccctcagcctggaa

SEQ ID NO: 679163 - DNA, 120 bp, Artificial Sequence
  ENSG00000186501_35 (sequence is synthesized)
tgcccacctcttctttctatgcctgcctaaccctcttccttcatactggacccaggtgtcacctccaggaagccttctcacaccccatcttagtccgttctggctgccataacaaaatct

SEQ ID NO: 679164 - DNA, 120 bp, Artificial Sequence
  ENSG00000186509_0 (sequence is synthesized)
ggtggcccttgtgcagggaattgaagaagtgcaggaggatgccacacagagatggtagagggagcgaaaggagcaaaggccctaactttcccttaatgatgtctccttccatctttagtc

SEQ ID NO: 679165 - DNA, 120 bp, Artificial Sequence
  ENSG00000186509_1 (sequence is synthesized)
cagcccagcaatgtacatgttatccttcccgtttgaagatgaagacactgaggctcagaaagatcaaacgcctttcccaaactcacagctacggcctgacggagccatgtaagcaccaag

SEQ ID NO: 679166 - DNA, 120 bp, Artificial Sequence
  ENSG00000186509_2 (sequence is synthesized)
tgccttgatcttggacttcccagcctcctgaactggaccactggtgtcatggcagagatgaacctcaccttggtgaccgagttcctccttattgcattcactgaatatcctgaatgggca

SEQ ID NO: 679167 - DNA, 120 bp, Artificial Sequence
  ENSG00000186509_3 (sequence is synthesized)
tgcattcactgaatatcctgaatgggcactccctctcttcctcttgtttttatttatgtatctcatcaccgtattggggaacttagagatgattattctgatcctcatggatcaccagct

SEQ ID NO: 679168 - DNA, 120 bp, Artificial Sequence
  ENSG00000186509_4 (sequence is synthesized)
ccacgctccaatgtatttccttctgagtcacctcgctttcatggacgtctgctactcatctatcactgtcccccagatgctggcagtgctgctggagcatggggcagctttatcttacac

SEQ ID NO: 679169 - DNA, 120 bp, Artificial Sequence
  ENSG00000186509_5 (sequence is synthesized)
acgctgtgctgctcagttctttctgttcaccttctttggttccatcgactgctacctcttggccctcatggcctatgaccgctacttggctgtgtgccagcccctgctttatgtcaccat

SEQ ID NO: 679170 - DNA, 120 bp, Artificial Sequence
  ENSG00000186509_6 (sequence is synthesized)
cctgacacagcaggcccgcttgagtcttgtggctggggcttacgttgctggtctcatcagtgccttggtgcggacagtctcagccttcactctctccttctgtggaaccagtgagattga

SEQ ID NO: 679171 - DNA, 120 bp, Artificial Sequence
  ENSG00000186509_7 (sequence is synthesized)
ctttattttctgtgacctccctcctctgttaaagttgacctgtggggagagctacactcaagaagtgctgattattatgtttgccatttttgtcatccctgcttccatggtggtgatctt

SEQ ID NO: 679172 - DNA, 120 bp, Artificial Sequence
  ENSG00000186509_8 (sequence is synthesized)
ggtgtcctacctgtttatcatcgtggccatcatggggatccctgctggaagccaggccaagaccttctccacctgcacctcccacctcactgctgtgtcactcttctttggtaccctcat

SEQ ID NO: 679173 - DNA, 120 bp, Artificial Sequence
  ENSG00000186509_9 (sequence is synthesized)
cttcatgtacttgagaggtaactcagatcagtcttcggagaagaatcgggtagtgtctgtgctttacacagaggtcatccccatgttgaatcccctcatctacagcctgaggaacaagga

SEQ ID NO: 679174 - DNA, 120 bp, Artificial Sequence
  ENSG00000186509_10 (sequence is synthesized)
tgtagtgtcagaattctggacgctcattatttatagcatgctcaatgtttaaatgaatatattatggtactaggtataaaaaagaaccagaacttttagctccagggagaggaaggaaga

SEQ ID NO: 679175 - DNA, 120 bp, Artificial Sequence
  ENSG00000186509_11 (sequence is synthesized)
caaggaaaagtcaacctgaaaagagattggagtgggagttttgattcccaggacaagtgacaaaaggatttgaaattaaagcctgtgcaatccaaatatggcacacttcacctgtctgtg

SEQ ID NO: 679176 - DNA, 120 bp, Artificial Sequence
  ENSG00000186509_12 (sequence is synthesized)
attataagagtaattttttttgcaaaatttttaatgaaagattttcatcatatagaaatgttaaaaataatatgtaggaagtttcctatactcagtactgagattgtgtaattgctaata

SEQ ID NO: 679177 - DNA, 120 bp, Artificial Sequence
  ENSG00000186509_13 (sequence is synthesized)
tttgctgtctttacttggttacatagatgtaatctatccgtgagtttattcatcaatcaattcactcatcaaaccacctttttttgattcatttcaaggtgagttccggacatcagcatt

SEQ ID NO: 679178 - DNA, 120 bp, Artificial Sequence
  ENSG00000186509_14 (sequence is synthesized)
agtaccctttacttctatgcacttcagaattatatcatcaattaggattcaatatttagattacatttatttttaatgatcaaactatggtcgtttgatgatccaattagcaaagctgac

SEQ ID NO: 679179 - DNA, 120 bp, Artificial Sequence
  ENSG00000186509_15 (sequence is synthesized)
cctactcaaggtatgccttaatattctggtagtagttctcaagaaggcctcacacaaacttttaacaatgcctacaataacatgtctgtcaattgctatcacctctggatatatgccctg

SEQ ID NO: 679180 - DNA, 120 bp, Artificial Sequence
  ENSG00000186509_16 (sequence is synthesized)
ttctttttcttcctacctattacagttctctctcgtcatatggcatgactaaaaatccacttagcaaagttataccattcccactgcccataatggcgtcttcagtgtctgtatcataga

SEQ ID NO: 679181 - DNA, 120 bp, Artificial Sequence
  ENSG00000186509_17 (sequence is synthesized)
cattgactctctgtgttctgaaagctttttccttcagggaggcagaacattgctgcattccacatggcgataggcaggagggtggtcctcgcctatcctgggtccctgcactctgcagca

SEQ ID NO: 679182 - DNA, 120 bp, Artificial Sequence
  ENSG00000186509_18 (sequence is synthesized)
gctcagcctgcatccaaagcctcacaaaatctgtctgttcttaatctttacttctctaatcacaggggacttgtctcaatcaaacccaaggcactggaagagagcaggccccatctatta

SEQ ID NO: 679183 - DNA, 120 bp, Artificial Sequence
  ENSG00000186509_19 (sequence is synthesized)
aggcactggaagagagcaggccccatctattaattttttttcatttaaacaaatttttatacctggaactcaaacttcttttcctgtctcctggattactaaaaaaaaaaaaaaaaaaaa

SEQ ID NO: 679184 - DNA, 120 bp, Artificial Sequence
  ENSG00000186510_0 (sequence is synthesized)
agttcagccgcagcaggaggactgacaggggcctgatggaggagttggtggggctgcgtgagggcttctcaggggaccctgtgactctgcaggagctgtggggcccctgtccccacatcc

SEQ ID NO: 679185 - DNA, 120 bp, Artificial Sequence
  ENSG00000186510_1 (sequence is synthesized)
gccgagccatccaaggtggcctggagtggctaaagcagaaggtgttccgcctgggagaagactggtacttcctgatgaccctcggggtgctcatggccctggtcagctatgccatgaact

SEQ ID NO: 679186 - DNA, 120 bp, Artificial Sequence
  ENSG00000186510_2 (sequence is synthesized)
ttgccatcgggtgtgtggtccgagcacaccagtggctgtacagggagattggggacagccacctgctccggtatctttcctggactgtgtaccctgtggccctcgtctctttctcctcag

SEQ ID NO: 679187 - DNA, 120 bp, Artificial Sequence
  ENSG00000186510_3 (sequence is synthesized)
gcttctcccagagcatcacgccctcctctggaggttctggaatcccggagctgaagaccatgttggcgggtgtgatcttggaggactacctggatatcaagaactttggggccaaggtgg

SEQ ID NO: 679188 - DNA, 120 bp, Artificial Sequence
  ENSG00000186510_4 (sequence is synthesized)
tgggcctctcctgcaccctggccaccggcagcaccctgttcctgggcaaagtgggccctttcgtgcacctgtctgtaatgatcgctgcctacctgggccgtgtgcgcaccacgaccatcg

SEQ ID NO: 679189 - DNA, 120 bp, Artificial Sequence
  ENSG00000186510_5 (sequence is synthesized)
gggagcctgagaacaagagcaagcaaaacgaaatgctggtggcagcggcggcagtgggcgtggccacagtctttgcagctcccttcagcggcgtcctgttcagcatcgaggtcatgtctt

SEQ ID NO: 679190 - DNA, 120 bp, Artificial Sequence
  ENSG00000186510_6 (sequence is synthesized)
cccacttctctgtccgggattactggaggggcttctttgcggccacctgcggggccttcatattccggctcctggcagtcttcaacagcgagcaggagaccatcacctccctctacaaga

SEQ ID NO: 679191 - DNA, 120 bp, Artificial Sequence
  ENSG00000186510_7 (sequence is synthesized)
ccagtttccgggtggacgttcccttcgacctgcctgagatcttcttttttgtggcgctgggtggcatctgcggcgtcctgagctgtgcttacctcttctgtcagcgaaccttcctcagct

SEQ ID NO: 679192 - DNA, 120 bp, Artificial Sequence
  ENSG00000186510_8 (sequence is synthesized)
tcatcaagaccaatcggtacagctccaaactgctggctactagcaagcctgtgtactccgctctggccaccttgcttctcgcctccatcacctacccgcctggtgtgggccacttcctag

SEQ ID NO: 679193 - DNA, 120 bp, Artificial Sequence
  ENSG00000186510_9 (sequence is synthesized)
cttctcggctgtccatgaagcagcatctggactcgctgttcgacaaccactcctgggcgctgatgacccagaactccagcccaccctggcccgaggagctcgacccccagcacctttggt

SEQ ID NO: 679194 - DNA, 120 bp, Artificial Sequence
  ENSG00000186510_10 (sequence is synthesized)
ccccatgcctgccgggtacttcatgcccatctttatccttggagctgccatcgggcgcctcttgggagaggctcttgccgtcgccttccctgagggcattgtgactggaggggttaccaa

SEQ ID NO: 679195 - DNA, 120 bp, Artificial Sequence
  ENSG00000186510_11 (sequence is synthesized)
tcccatcatgcccggggggtatgctctggcaggggctgcagccttctcaggggctgtgacccacaccatctccacggcgctgctggcctttgagctgaccggccagatagtgcatgcact

SEQ ID NO: 679196 - DNA, 120 bp, Artificial Sequence
  ENSG00000186510_12 (sequence is synthesized)
gcccgtgctgatggcggtgctggcagccaacgccattgcacagagctgccagccctccttctatgatggcaccatcattgtcaagaagctgccatacctgccacggattctgggccgcaa

SEQ ID NO: 679197 - DNA, 120 bp, Artificial Sequence
  ENSG00000186510_13 (sequence is synthesized)
catcggctcccaccatgtgagggtggagcacttcatgaaccacagcatcaccacactggccaaggacacgccgctggaggaggtggtcaaggttgtgacctccacagacgtgaccgagta

SEQ ID NO: 679198 - DNA, 120 bp, Artificial Sequence
  ENSG00000186510_14 (sequence is synthesized)
tcccctggtggagagcacagagtcccagatcctggtaggcatcgtgcagagggcccagctggtgcaggccctccaggctgagcctccttccagggctccaggacaccagcagtgtctcca

SEQ ID NO: 679199 - DNA, 120 bp, Artificial Sequence
  ENSG00000186510_15 (sequence is synthesized)
ggacatcttggccaggggctgccccacggaaccagtgaccctgacgctattctcagagaccaccttgcaccaggcacaaaacctctttaagctgttgaaccttcagtccctcttcgtgac

SEQ ID NO: 679200 - DNA, 120 bp, Artificial Sequence
  ENSG00000186510_16 (sequence is synthesized)
atcgcggggcagagctgtgggctgcgtgtcctgggtggagatgaagaaagcaatttccaacctgacaaatccgccagctccaaagtgagccggcccagcaagatgaaacagggcacccca

SEQ ID NO: 679201 - DNA, 120 bp, Artificial Sequence
  ENSG00000186510_17 (sequence is synthesized)
gctgacctggtactgaggttgggctgagaccctgcttctcttcccccatcaccacctgcccctccctccagcccagctccattctttggcataacaggcaactctaacctagcccagaag

SEQ ID NO: 679202 - DNA, 120 bp, Artificial Sequence
  ENSG00000186510_18 (sequence is synthesized)
aggatggctcatcctgggtgggacgatggctcctgccttgaaagacaaaaatcccaccttgggcagagctgagtgtgagaagatggaaaaccagtatctgccaggtgctcagtgactggc

SEQ ID NO: 679203 - DNA, 120 bp, Artificial Sequence
  ENSG00000186510_19 (sequence is synthesized)
catcacattaatgaatgacgagattggagtacactgtcaccaagggcaggcaaagatgccctctggggttgtctggttcccagtgagaggctcctgagaaaaataaagctggttcccaga

SEQ ID NO: 679204 - DNA, 120 bp, Artificial Sequence
  ENSG00000186510_20 (sequence is synthesized)
gccccgtttgatccccacacagctgggagggtggaggggctcttcccatgttacggacggggaagcgaagcctcttggaaagggcggggctcgcagttgcatcacagagacagaaggagc

SEQ ID NO: 679205 - DNA, 120 bp, Artificial Sequence
  ENSG00000186510_21 (sequence is synthesized)
tacaaagatgatgcagtcctttgaatcccagtcacccaggagagcttttcacaaacacagaccctttccttggaccccaggattttgatttgggatctggggaagggacctcacatctct

SEQ ID NO: 679206 - DNA, 120 bp, Artificial Sequence
  ENSG00000186510_22 (sequence is synthesized)
tcccatcagctccccacacagccagctcataggccagtgatgaagccctcatcactcaggtgtgggaaggaggacttgagctgcagatgtgacgctcctgacacgtcgcaggcacacggc

SEQ ID NO: 679207 - DNA, 120 bp, Artificial Sequence
  ENSG00000186510_23 (sequence is synthesized)
aggtgtcggcctcctcgccagccctggacaagatgggtcatcaggatgggaccgtgtggcacagcctgcgggctttggagccaggcaaacctgggctgggaatcctggctctgcctcggc

SEQ ID NO: 679208 - DNA, 120 bp, Artificial Sequence
  ENSG00000186510_24 (sequence is synthesized)
ctccgtgatcttagacaggcagccccagctccctgagacaccatttctctacaacgggatcacgctgcctgcctcgtgggatttccgtgggcactcagggtgcactggagctgggagcaa

SEQ ID NO: 679209 - DNA, 120 bp, Artificial Sequence
  ENSG00000186510_25 (sequence is synthesized)
tccatggtaaaccccggccggcggggaaggggggtggcagggagagagtgatgattggtagagcatatacctgtccaggtgcactggagctgggagcaaaggaggctctgtgagaggagg

SEQ ID NO: 679210 - DNA, 120 bp, Artificial Sequence
  ENSG00000186510_26 (sequence is synthesized)
cctctcctgcaccctggccaccggcagcaccctgttcctgggcaaagtggtatggtcagggccctttcgtgcacctgtctgtaatgatcgctgcctacctgggccgtgtgcgcaccacga

SEQ ID NO: 679211 - DNA, 120 bp, Artificial Sequence
  ENSG00000186510_27 (sequence is synthesized)
ggcctcctcccctctccctctgtgctttttcaaaccttccatgtccagctctgagacccctggaccctgagtctcagccttggcagatgacccctctctgtcctgctgtgtgcatgagct

SEQ ID NO: 679212 - DNA, 120 bp, Artificial Sequence
  ENSG00000186513_0 (sequence is synthesized)
tgagctgtcccctcatctggctcttgtcttagccgttgcaggtgaaccactggatggatggctgaaaggaattacaccgtagtgacggagttcttccttactgcatttactgaacatctc

SEQ ID NO: 679213 - DNA, 120 bp, Artificial Sequence
  ENSG00000186513_1 (sequence is synthesized)
cagtggagggttcctctcttcctcatatttttgagtttctatcttgccactatgttagggaacacaggcatgatcctcctgatccgtggcgatcgtcggctccacaccccgatgtacttc

SEQ ID NO: 679214 - DNA, 120 bp, Artificial Sequence
  ENSG00000186513_2 (sequence is synthesized)
ttcctcagccacctttccttggtggacatctgctactcgtccgccatcatccctcagatgctggctgtgctgtgggagcacggcacaaccatctcccaggctcgctgtgcagctcagttc

SEQ ID NO: 679215 - DNA, 120 bp, Artificial Sequence
  ENSG00000186513_3 (sequence is synthesized)
ttcctcttcaccttctttgcctccatcgactgctaccttctggccatcatggcctatgaccgctacacggccgtgtgccagcccctgctttatgtcaccatcataaccgagaaggcccgc

SEQ ID NO: 679216 - DNA, 120 bp, Artificial Sequence
  ENSG00000186513_4 (sequence is synthesized)
cctagtcactggggcttacgttgctggttttttcagtgcctttgttcgaacggtcacagccttcactctctccttttgtggaaacaatgagatcaacttcattttctgtgacctccctcc

SEQ ID NO: 679217 - DNA, 120 bp, Artificial Sequence
  ENSG00000186513_5 (sequence is synthesized)
tctattaaaactctcctgtggggacagctacactcaggaagtggtgattattgtgtttgctcttttcgtcatgcctgcctgtatcttggtgatcttggtatcctacctgtttatcattgt

SEQ ID NO: 679218 - DNA, 120 bp, Artificial Sequence
  ENSG00000186513_6 (sequence is synthesized)
ggccatcctgcagatccactctgctggaggccgggccaagaccttctccacctgcgcctcccacctcactgccgtcgctcttttctttggcaccctcatcttcatgtacctgcgagacaa

SEQ ID NO: 679219 - DNA, 120 bp, Artificial Sequence
  ENSG00000186513_7 (sequence is synthesized)
cacaggccagtcctccgagggagaccgagtggtgtctgtgctctacacggtggtgaccccaatgctgaatccccttatctatagcctgagaaacaaggaggtaaaagaggccactaggaa

SEQ ID NO: 679220 - DNA, 120 bp, Artificial Sequence
  ENSG00000186513_8 (sequence is synthesized)
agccctgagcaaatcaaagcctgctagaagaccctaaatggacccttgtgaaatatatcattccttagtttccccatcttttctgtcttttctcaatagcaccttctggagagactttcc

SEQ ID NO: 679221 - DNA, 120 bp, Artificial Sequence
  ENSG00000186513_9 (sequence is synthesized)
cagggagaaaggctggtcccctagtcttgttatctcaaatgagctcaatatctgtctatatctatcttcgactgaaaagtgtgttgaagttgagtgccgacatgtaagacattcaattta

SEQ ID NO: 679222 - DNA, 120 bp, Artificial Sequence
  ENSG00000186513_10 (sequence is synthesized)
ctgacatattagatgttatatgtgtttgacattttctaatgctcacaactagaaagtaagcaacatgagagcaaatacttttttatctgagcttcatttctatatgtccagttcctagca

SEQ ID NO: 679223 - DNA, 120 bp, Artificial Sequence
  ENSG00000186513_11 (sequence is synthesized)
aagcacctagcatgtgaaaggcactcaataaatatttgttgagtgaatgaatctcaggttccattgtctacttttaagttgtaatttcttcagtcatcagttttcttatctgtcaagtag

SEQ ID NO: 679224 - DNA, 120 bp, Artificial Sequence
  ENSG00000186513_12 (sequence is synthesized)
atttatctaccttataggactatggttttgaggatccaatgcataaatggacaaggatcgcctctgtcttattcactagtatctgcagaacacagtgcattgcccaacacaataaatact

SEQ ID NO: 679225 - DNA, 120 bp, Artificial Sequence
  ENSG00000186513_13 (sequence is synthesized)
tgatgagtgaagcaagaatatttggaaaattataaagcagtctacaaatacaactgctgttttgatccaaaggtattttccaaattttgtcatttattcatttattctttctttttttat

SEQ ID NO: 679226 - DNA, 120 bp, Artificial Sequence
  ENSG00000186513_14 (sequence is synthesized)
taataataataatagcaagttacacttattaggcattattatcttccaggacttacaataagtttgctacaggaattatttgatttaatttacaggacatccctatgaggtaggttctat

SEQ ID NO: 679227 - DNA, 120 bp, Artificial Sequence
  ENSG00000186513_15 (sequence is synthesized)
tattatctctgctttataggtaggtgaggcacttgaggcttagagatgttgagtaatattctcaaggtcggcaagcaagtagttgggtggggcttccacccagctaggcctgagctccta

SEQ ID NO: 679228 - DNA, 120 bp, Artificial Sequence
  ENSG00000186513_16 (sequence is synthesized)
tcggacacacacactgttgctagctgtaatctattgcctattctatataatcactcaaccggaatttattgttattgctcttttctttttccttttatctggtgaagaaaaggtaaaagt

SEQ ID NO: 679229 - DNA, 120 bp, Artificial Sequence
  ENSG00000186513_17 (sequence is synthesized)
ccaatctgttggtgtagatggcagtcaacaaaattcattttatagcccctatgttctaggattgtataatgtgactttgtgtatatatgtgtgtgtgtgtgtatagttgtgcatgataaa

SEQ ID NO: 679230 - DNA, 120 bp, Artificial Sequence
  ENSG00000186513_18 (sequence is synthesized)
gtgaagtgtgtaaacagcaacttctgaatttgaggaatgtttgttttaaggagatataataaatattttagaaaggagatggctgggcatatttaggaaaaggtatagggaaaaaatgaa

SEQ ID NO: 679231 - DNA, 120 bp, Artificial Sequence
  ENSG00000186513_19 (sequence is synthesized)
cacctatggccaagaggtttgggatcatatatcagctctggtagaaatcatttaaaaactgcagattggggtgaaggaataccacagaatgcctcttgatgttcattttccaaatattaa

SEQ ID NO: 679232 - DNA, 120 bp, Artificial Sequence
  ENSG00000186513_20 (sequence is synthesized)
ctgtcatgcaaatattttcagagcacaccaacatctgtggtgggtgttagacatatttgtgttgtggaaagaactcagaacttggcaccaaagtgtccagtctgccacttcttagcagtg

SEQ ID NO: 679233 - DNA, 120 bp, Artificial Sequence
  ENSG00000186513_21 (sequence is synthesized)
tggcttcagattaattagtgcctttcagcctgcttctcctctgtgaaataatacttactaagcacttactctgggacatgatttacatgtatctcatttattctcacaataacttggtat

SEQ ID NO: 679234 - DNA, 120 bp, Artificial Sequence
  ENSG00000186513_22 (sequence is synthesized)
atttggataattggaaggcattcggtaatattataaacattatttagtgttattaattactgttattaattcatgttagtatggtgcttgtccaggctccacagcctagtgagtagtgat

SEQ ID NO: 679235 - DNA, 120 bp, Artificial Sequence
  ENSG00000186513_23 (sequence is synthesized)
gggcagagggacccatagctgatctctgggcctctttattgaagaactgtctggaacagtccctcctgggcccagattagctctaaacctggacatttccaggagtcaagttctcaaata

SEQ ID NO: 679236 - DNA, 120 bp, Artificial Sequence
  ENSG00000186513_24 (sequence is synthesized)
attttttaacttaattcttaagctagtgcacacttaccatatcctaggtacaatgctaaaagctttacatgaatcctttattttagccctcctaacaatgttaatgaaaagtaattttta

SEQ ID NO: 679237 - DNA, 120 bp, Artificial Sequence
  ENSG00000186513_25 (sequence is synthesized)
ttgaccccatttagcaaaacaaaaaagaaaatctaagactcagagatattatgtgacttgaccaagttatgtagcaagaaagtggcagatgagggaggttctgttctcaggtctctgact

SEQ ID NO: 679238 - DNA, 120 bp, Artificial Sequence
  ENSG00000186513_26 (sequence is synthesized)
ccaaagtacatactcttatctgataactgcccttctgcactctttcttctccttctcccaggccctagttcctggttatagtttgcttcagaggttatctggatttcagttgcattcttg

SEQ ID NO: 679239 - DNA, 120 bp, Artificial Sequence
  ENSG00000186513_27 (sequence is synthesized)
atctccatgtttggtaggtgtgggctgagatgggtgagtttgatggactcacattattgtgaagttcatggaactcattttggccctcttgtaggccaatgaggagagtctgggggaatc

SEQ ID NO: 679240 - DNA, 120 bp, Artificial Sequence
  ENSG00000186513_28 (sequence is synthesized)
tataactccctcagaaagagcagggtgggctcaggtaaagtattgccttcaaagcccttccagaatatctcttggctcagagtgcttcaataaatagttaatcggcttagtgcctccaag

SEQ ID NO: 679241 - DNA, 120 bp, Artificial Sequence
  ENSG00000186513_29 (sequence is synthesized)
caggcactaaccttcccttcgggtcttctttttcagtcttaagtgattacctaaggaattaaatattcctttccaaacactgattattgttatttattactattagcatttacaaatatg

SEQ ID NO: 679242 - DNA, 120 bp, Artificial Sequence
  ENSG00000186517_0 (sequence is synthesized)
gggggatagaggtgaccgggccagtgccctggggctctggccatgaagtctcggcagaaaggaaagaagaagggcagcgcaaaggagcgggtttttgggtgcgacttgcaggagcacctg

SEQ ID NO: 679243 - DNA, 120 bp, Artificial Sequence
  ENSG00000186517_1 (sequence is synthesized)
cagcactcaggccaggaggtgccccaggtgctaaagagctgtgcagaatttgtggaggagtatggagtggtggatgggatctaccgcctctcaggggtctcctccaacatccagaagctt

SEQ ID NO: 679244 - DNA, 120 bp, Artificial Sequence
  ENSG00000186517_2 (sequence is synthesized)
cggcaggaatttgagtcagagcggaagccagacctgcgtcgggatgtttacctccaagacattcactgcgtctcctccctgtgcaaggcctatttcagagaactgccggatcccctgctc

SEQ ID NO: 679245 - DNA, 120 bp, Artificial Sequence
  ENSG00000186517_3 (sequence is synthesized)
acttaccggctctatgacaagtttgctgaggctgtaggagtgcaattggaacctgagcgcttggtcaagatcctagaggtgcttcgggaactccctgtcccaaactacaggaccctggag

SEQ ID NO: 679246 - DNA, 120 bp, Artificial Sequence
  ENSG00000186517_4 (sequence is synthesized)
ttcctcatgaggcacttggtacacatggcctcattcagtgcccagaccaacatgcatgctcgcaacctggccatcgtgtgggctcccaacctgctgaggtctaaggacatagaggcctca

SEQ ID NO: 679247 - DNA, 120 bp, Artificial Sequence
  ENSG00000186517_5 (sequence is synthesized)
ggcttcaatgggacagcggccttcatggaggtgcgggtacaatccatcgtcgtggagttcatcctcacacacgtggaccagctctttgggggtgctgccctctctggtggtgaggtggag

SEQ ID NO: 679248 - DNA, 120 bp, Artificial Sequence
  ENSG00000186517_6 (sequence is synthesized)
agtgggtggcgatcgcttccagggacccgggcatcaggcagccccgaggaccttatgcccaggccactgccttatcacctgcctagcatactgcaggctggcgatggacccccacagatg

SEQ ID NO: 679249 - DNA, 120 bp, Artificial Sequence
  ENSG00000186517_7 (sequence is synthesized)
cggccctaccatactatcatcgagattgcagagcacaagaggaaggggtctttgaaggtcaggaagtggaggtctatcttcaatttaggtcgctctggccatgagactaagcgtaaactt

SEQ ID NO: 679250 - DNA, 120 bp, Artificial Sequence
  ENSG00000186517_8 (sequence is synthesized)
ccacggggggctgaggacagggaggataaatccaacaaggggacactgcggccagccaaaagcatggactcactgagtgctgcagctggggccagtgatgagccagaggggctggtgggg

SEQ ID NO: 679251 - DNA, 120 bp, Artificial Sequence
  ENSG00000186517_9 (sequence is synthesized)
cccagcagcccccggccaagcccattgctgcctgagagcttggagaacgattctatagaggcagcagagggtgaacaggagcctgaggcagaagcactgggtggcacaaactctgaacca

SEQ ID NO: 679252 - DNA, 120 bp, Artificial Sequence
  ENSG00000186517_10 (sequence is synthesized)
ggcacaccacgagctgggcggtcagccatccgggctgggggcagcagccgtgcagaacgctgtgctggtgtccacatctcagacccctacaatgtcaacctcccgctacacatcacctct

SEQ ID NO: 679253 - DNA, 120 bp, Artificial Sequence
  ENSG00000186517_11 (sequence is synthesized)
atcctcagtgtgcccccgaacatcatctctaacgtttccttggccaggctcacccgtggccttgagtgccctgctctacagcaccggccaagccctgcctctggccctggccctggccct

SEQ ID NO: 679254 - DNA, 120 bp, Artificial Sequence
  ENSG00000186517_12 (sequence is synthesized)
ggccttggccctggccccccagatgaaaagttggaagcaagtccagcctcaagtcccctggcagactcaggcccagacgacttggctcctgccctggaggactcgctgtcccaggaggtg

SEQ ID NO: 679255 - DNA, 120 bp, Artificial Sequence
  ENSG00000186517_13 (sequence is synthesized)
caggactccttctccttcctagaggactcaagcagctcagaacctgagtgggtgggggcagaggatggggaggtggcccaggcagaagcagcaggagcagccttctcccctggggaggac

SEQ ID NO: 679256 - DNA, 120 bp, Artificial Sequence
  ENSG00000186517_14 (sequence is synthesized)
ccctgggatgggctacctggaggagctcctgggagttgggcctcaggtggaggagttctctgtggagccacccctggatgacctgtctctggatgaggcacagtttgtcttggcccccag

SEQ ID NO: 679257 - DNA, 120 bp, Artificial Sequence
  ENSG00000186517_15 (sequence is synthesized)
ctgctgttccctggactccgctggccccaggcctgaagttgaggaggaaaatggggaggaagttttcctgagtgcctatgatgacctaagtccccttctgggacctaaacccccaatctg

SEQ ID NO: 679258 - DNA, 120 bp, Artificial Sequence
  ENSG00000186517_16 (sequence is synthesized)
gaagggttcagggagtctggagggagaggcagcaggatgtggaaggcaggctctgggacagggtggggaagagcaggcatgctgggaagttggggaggacaagcaggctgagcctggagg

SEQ ID NO: 679259 - DNA, 120 bp, Artificial Sequence
  ENSG00000186517_17 (sequence is synthesized)
caggctagacatcagggaagaggcagagggaaccccacagccacctcagccagaggagatggagcctgaggggcagcccagtccagacggctgtctatgcccctgttctcttggcctggg

SEQ ID NO: 679260 - DNA, 120 bp, Artificial Sequence
  ENSG00000186517_18 (sequence is synthesized)
tggcgtgggcatgcgtctagcttccactctggttcaggtccaacaggtccgctctgtgcctgtggtgccccccaagccacagtttgccaagatgcccagtgcaatgtgtagcaagattca

SEQ ID NO: 679261 - DNA, 120 bp, Artificial Sequence
  ENSG00000186517_19 (sequence is synthesized)
tgtggcacctgcaaatccatgcccgaggcctggccggcttgatgggactcctggagaaagggcttgggggtcccgagcttctcgatcctcttggaggaatgggggtagtctttcctttga

SEQ ID NO: 679262 - DNA, 120 bp, Artificial Sequence
  ENSG00000186517_20 (sequence is synthesized)
tgctgctgtggccctagcccgggaccgccaaaggactgaggctcaaggagttcggcgaacccagacctgtactgagggtggggattactgcctcatccccagaacctccccttgtagcat

SEQ ID NO: 679263 - DNA, 120 bp, Artificial Sequence
  ENSG00000186517_21 (sequence is synthesized)
gatctctgcccattctcctcggccccttagctgcctggagctcccatctgaaggtgcagaagggtctggatcccggagtcgtcttagtctgccccccagagaaccccaggttcctgaccc

SEQ ID NO: 679264 - DNA, 120 bp, Artificial Sequence
  ENSG00000186517_22 (sequence is synthesized)
cctgttgtcctctcagcgcaggtcatatgcatttgaaacacaggctaaccctgggaaaggtgaaggactgtgattaggaccacagccctgggcaaaggggaccagcaagttgtcttgaat

SEQ ID NO: 679265 - DNA, 120 bp, Artificial Sequence
  ENSG00000186517_23 (sequence is synthesized)
ctccagggttcctgactagctgtctcctctgcagcatgagcagctgtagtgcccaactctataggctttggccctccagcttctctctttgactgtgggaggcactgccttggttggttt

SEQ ID NO: 679266 - DNA, 120 bp, Artificial Sequence
  ENSG00000186517_24 (sequence is synthesized)
acctgaacttgtctccgacacaaagcacttatctcttaggagattcccaagaaagtcaacaagatcttgttcccagggagtgggtcattggccaaagggaacataaggtaggcagaaaac

SEQ ID NO: 679267 - DNA, 120 bp, Artificial Sequence
  ENSG00000186517_25 (sequence is synthesized)
ttaaaagagtttgttaaagtgaagactggagaaattcctcccttcctctgagctgtgaatctctcttcatgaaagccaaaggtagagacagggaggacagggccaggttagggccttcca

SEQ ID NO: 679268 - DNA, 120 bp, Artificial Sequence
  ENSG00000186517_26 (sequence is synthesized)
cacacaaacacttctagagttgcccattcctgttatgttcttggaccctaagatacctcctgtcccttttaaatccagattaagagaaacgtccaggaagagctctttgaagccctcaat

SEQ ID NO: 679269 - DNA, 120 bp, Artificial Sequence
  ENSG00000186517_27 (sequence is synthesized)
atttgttggagggactggactcctctccagctccccaccctctgcctccagtcaccatgtgcaagagaggtcctgtacagatctctctgggctctcctttctcctttggaataacttgtt

SEQ ID NO: 679270 - DNA, 120 bp, Artificial Sequence
  ENSG00000186517_28 (sequence is synthesized)
cctatttcaggaaagggaaatggtgtcactcaggccctgggactgcttctccagccaggctggggccacaggtcccactctagtgaaggtcaatgtctcagaataaaagctgtattttta

SEQ ID NO: 679271 - DNA, 120 bp, Artificial Sequence
  ENSG00000186517_29 (sequence is synthesized)
gagtgccaggctgggccacgagacacaggacacaatttcttgccagggtcctggtagcttcctcttcaacagccacttccgtgtggccggggccccaggggcaggagctgctgcccgttg

SEQ ID NO: 679272 - DNA, 120 bp, Artificial Sequence
  ENSG00000186517_30 (sequence is synthesized)
cagagaccaaggtggaggctggaaaggccagtgaggatagaggggaggctgggggaagccaagagacaaaagtcagattgagagaagggagtagggaagagacagaggccaaggaagaga

SEQ ID NO: 679273 - DNA, 120 bp, Artificial Sequence
  ENSG00000186517_31 (sequence is synthesized)
agtccaaaggtcagaagaaggctgacagtatggaggctaaaggtgtggaggaaccaggaggagatgagtatacagatgagaaggaaaaagaaattgagagagaagaggatgaacaaagag

SEQ ID NO: 679274 - DNA, 120 bp, Artificial Sequence
  ENSG00000186517_32 (sequence is synthesized)
aggaagcccaggtagaagctggaagggacctagagcaaggggcccaggaagatcaagttgctgaggagaaatgggaagttgtacagaaacaagaggctgagggagtcagagaggatgagg

SEQ ID NO: 679275 - DNA, 120 bp, Artificial Sequence
  ENSG00000186517_33 (sequence is synthesized)
acaaaggacagagggagaaggggtaccatgaagcaagaaaagaccaaggagatggtgaagacagcagaagcccagaagcagcaactgaaggaggagcaggggaggtcagcaaggaacggg

SEQ ID NO: 679276 - DNA, 120 bp, Artificial Sequence
  ENSG00000186517_34 (sequence is synthesized)
agagtggggatggagaggctgagggagaccagagggctggagggtactatttagaagaggacaccctctctgaaggttcaggtgtagcgtccctggaggttgactgtgccaaagagggca

SEQ ID NO: 679277 - DNA, 120 bp, Artificial Sequence
  ENSG00000186517_35 (sequence is synthesized)
agttacagagagccttgaagatcacctacttcagctgagtctcatacagggatgttggtagtggccacatggagagaaccctggggagataattgtgcagtcaggacttgagaagacttc

SEQ ID NO: 679278 - DNA, 120 bp, Artificial Sequence
  ENSG00000186517_36 (sequence is synthesized)
ttctgctgtcagtctagggcatggcttgacctctgagtcaccatcctggctcccaaggctagtgatggctcatatccacccccagcccaccaggccaacgttctcggatctcccagccct

SEQ ID NO: 679279 - DNA, 120 bp, Artificial Sequence
  ENSG00000186517_37 (sequence is synthesized)
ctttgtccatgagggcactcttttgaggtgatggacatggaggcactgtcttcaggggcttctgaatatatccctaacctggtagttggcgaggggtgatgaaggattgggtgcctgagg

SEQ ID NO: 679280 - DNA, 120 bp, Artificial Sequence
  ENSG00000186522_0 (sequence is synthesized)
cccgttgcttctgccctccggccttcccgccgccgtcgccgggaccagccgctcggggccgggctgatacagccgcttcaccgtgcccctgcccgcgaccatggcctcctccgaggtggc

SEQ ID NO: 679281 - DNA, 120 bp, Artificial Sequence
  ENSG00000186522_1 (sequence is synthesized)
gcggcacctgaaaagagaaaacattcgttcgttgactatgtctggccatgttggttttgagagtttgcctgatcagctggtgaacagatccattcagcaaggtttctgctttaatattct

SEQ ID NO: 679282 - DNA, 120 bp, Artificial Sequence
  ENSG00000186522_2 (sequence is synthesized)
ctgtgtgggggaaactggaattggaaaatcaacactgattgacacattgtttaatactaattttgaagactatgaatcctcacatttttgcccaaatgttaaacttaaagctcagacata

SEQ ID NO: 679283 - DNA, 120 bp, Artificial Sequence
  ENSG00000186522_3 (sequence is synthesized)
tgaactccaggaaagtaatgttcaattgaaattgaccattgtgaatacagtgggatttggtgaccaaataaataaagaagagagctaccaaccaatagttgactacatagatgctcagtt

SEQ ID NO: 679284 - DNA, 120 bp, Artificial Sequence
  ENSG00000186522_4 (sequence is synthesized)
tgaggcctatctccaagaagaactgaagattaagcgttctctctttacctaccatgattctcgcatccatgtgtgtctctacttcatttcaccgacaggccactctctgaagacacttga

SEQ ID NO: 679285 - DNA, 120 bp, Artificial Sequence
  ENSG00000186522_5 (sequence is synthesized)
tctcttaaccatgaagaaccttgacagcaaggtaaacattataccagtgattgccaaagcagatacggtttctaaaactgaattacagaagtttaagatcaagctcatgagtgaattggt

SEQ ID NO: 679286 - DNA, 120 bp, Artificial Sequence
  ENSG00000186522_6 (sequence is synthesized)
cagcaatggcgtccagatataccagttcccaacggatgatgacactattgctaaggtcaacgctgcaatgaatggacagttgccgtttgctgttgtgggaagtatggatgaggtaaaagt

SEQ ID NO: 679287 - DNA, 120 bp, Artificial Sequence
  ENSG00000186522_7 (sequence is synthesized)
cggaaacaagatggtcaaagctcgccagtacccttggggtgttgtacaagtggaaaatgaaaaccactgtgactttgtaaagctgcgggaaatgctcatttgtacaaatatggaggacct

SEQ ID NO: 679288 - DNA, 120 bp, Artificial Sequence
  ENSG00000186522_8 (sequence is synthesized)
gcgagagcagacccataccaggcactatgagctttacaggcgctgcaaactggaggaaatgggctttacagatgtgggcccagaaaacaagccagtcagtgttcaagagacctatgaagc

SEQ ID NO: 679289 - DNA, 120 bp, Artificial Sequence
  ENSG00000186522_9 (sequence is synthesized)
caaaagacatgagttccatggtgaacgtcagaggaaggaagaagaaatgaaacagatgtttgtgcagcgagtaaaggagaaagaagccatattgaaagaagctgagagagagctacaggc

SEQ ID NO: 679290 - DNA, 120 bp, Artificial Sequence
  ENSG00000186522_10 (sequence is synthesized)
caaatttgagcaccttaagagacttcaccaagaagagagaatgaagcttgaagaaaagagaagacttttggaagaagaaataattgctttctctaaaaagaaagctacctccgagatatt

SEQ ID NO: 679291 - DNA, 120 bp, Artificial Sequence
  ENSG00000186522_11 (sequence is synthesized)
agaagttccagagcacagaaggtcatcatcacaagcaaactttattaaaaaaaaactagaagtgtgctttgattttgctgttatttgttttatcacttctatatttggtgaacagccaca

SEQ ID NO: 679292 - DNA, 120 bp, Artificial Sequence
  ENSG00000186522_12 (sequence is synthesized)
gttactgatatttatggaaaagtactttcaagtacaaggtcaatacataagccagagtgaatgatactacaagttgagcatctctaattcaaaaatctgaaatccagaagcttcaaaatc

SEQ ID NO: 679293 - DNA, 120 bp, Artificial Sequence
  ENSG00000186522_13 (sequence is synthesized)
tgaatctttttgagcactgacttgaccccacaagtggaaaattccccacccgacacctttgctttctgatggttcagtttaaacagattttgtttcttgcacaaaatttttgtataaatt

SEQ ID NO: 679294 - DNA, 120 bp, Artificial Sequence
  ENSG00000186522_14 (sequence is synthesized)
actttcaggctatatgtataaggtggatgtgaaacatgaattatgtaattagagtcgggtcccgttgtgtatatgcagatattccaaacctgaaatccaaaacacttctggtccctagca

SEQ ID NO: 679295 - DNA, 120 bp, Artificial Sequence
  ENSG00000186522_15 (sequence is synthesized)
ttttggataagggatactcagcttgtacctatatattcatatatattcactgttgttagaaatgtttaagttgctgttctgtgatgaatctaaatcttttctcttgctaccaagctattg

SEQ ID NO: 679296 - DNA, 120 bp, Artificial Sequence
  ENSG00000186522_16 (sequence is synthesized)
tcactgcagtgcattataccaaagagcgaagtcagtgccactgaaaatacagaacccattaatatcgtggctatctgattacatttatattccaagatgaaccttttttatatatgctaa

SEQ ID NO: 679297 - DNA, 120 bp, Artificial Sequence
  ENSG00000186522_17 (sequence is synthesized)
aaattttggggaatatgttttgggatgtattatggagctaaaactctaacctcttaatagttttatagaacttaaaaattttttatacaattacccaattggtgatatgatcttaagctt

SEQ ID NO: 679298 - DNA, 120 bp, Artificial Sequence
  ENSG00000186522_18 (sequence is synthesized)
ttgtgtcagattatttaatatgatgacttcatgctttattatgccttattatggctgacgtattactgtggtgaaacaaaatatctttaaaagttaaaacatccagatatataagctatt

SEQ ID NO: 679299 - DNA, 120 bp, Artificial Sequence
  ENSG00000186522_19 (sequence is synthesized)
ttttcctaaggataaagtacctttgagcatgagtgtatcacagctttcattaggaaaacttttcattacatacttgtttaaactctgtcttccagggtaaaaataataaggttgaatcat

SEQ ID NO: 679300 - DNA, 120 bp, Artificial Sequence
  ENSG00000186522_20 (sequence is synthesized)
tttattaaaaatactttttaagaaaataactatgaacatctgaatattaaagatataaaaatgcacataattcatatttcaggtggtatttgcattcagtgccttactggtattctcaga

SEQ ID NO: 679301 - DNA, 120 bp, Artificial Sequence
  ENSG00000186522_21 (sequence is synthesized)
ttctcagaacattttaatgatttctaacatttcttaacagtcatagatatatacattttcattttttgtacttgaatattctaaataaaactgacatttactcttgacaaataaaacata

SEQ ID NO: 679302 - DNA, 120 bp, Artificial Sequence
  ENSG00000186522_22 (sequence is synthesized)
gtcttcctggagtcccagctctccttcagcccgccccaacgctgacgctcagtcctcaggcgtcgagggtagctcctgtgaggggctcgcttggcgcaggcaaaacgctcagcgcgcacc

SEQ ID NO: 679303 - DNA, 120 bp, Artificial Sequence
  ENSG00000186522_23 (sequence is synthesized)
attattttggagatgaggtattttatgagtattttcagacaatgaaacttattagtctgtgtcagattctgagcaatcatagagtcatctaagttgtaaataaaaccttgcatagcacaa

SEQ ID NO: 679304 - DNA, 120 bp, Artificial Sequence
  ENSG00000186522_24 (sequence is synthesized)
cccagccaccctccctggcagccctgcccacacttgtcacattgccctgtcggatcttcctagcgcttcttacttctgcttccttatgctttgtcttccttctccaactaaatgtcagct

SEQ ID NO: 679305 - DNA, 120 bp, Artificial Sequence
  ENSG00000186522_25 (sequence is synthesized)
cctggagaggagagaccttgtccctcttgttcactgctgtttccccagcatccagaacagcacctggcacatgttatgtgttcagtatttgccaaaatgaatgaatgaacaaaataaaaa

SEQ ID NO: 679306 - DNA, 120 bp, Artificial Sequence
  ENSG00000186522_26 (sequence is synthesized)
gccctccggccttcccgccgccgtcgccgggaccagccgctcggggccgggctgatacagccgcttcaccgtgcccctgcccgcgaccatggcctcctccgaggtggcgcggcacctgtg

SEQ ID NO: 679307 - DNA, 120 bp, Artificial Sequence
  ENSG00000186522_27 (sequence is synthesized)
acgtctctccagtgaccttagtttgagtcacttggactcagaatcatgaagtcagcttcttgcagcctcaccttttctgctgtccttgcatttacatctctttcagtctcacatggcaac

SEQ ID NO: 679308 - DNA, 120 bp, Artificial Sequence
  ENSG00000186522_28 (sequence is synthesized)
aggctgtcgattcgaactcctgtgcattgatgtcagagcttgtgaaaccaatggtggacgtaaagacgcagagaaaggtagagagggccacagtgcaagggggcagccatgagtagcatg

SEQ ID NO: 679309 - DNA, 120 bp, Artificial Sequence
  ENSG00000186522_29 (sequence is synthesized)
tggatgataatcgcaaggcgtgtaggtttgggctccaattttttgtaaaacagaagttccagagcacagaaggtcatcatcacaagcaaactttattaaaaaaaaactagaagtgtgctt

SEQ ID NO: 679310 - DNA, 120 bp, Artificial Sequence
  ENSG00000186522_30 (sequence is synthesized)
agcggtgtttgtgggtctcttacggctataacggagttgaaggcgcagtgcggactgattgaatagcggtcatcttttgcagccctctttcagtctcacatggcaacgaaaacaacttgt

SEQ ID NO: 679311 - DNA, 120 bp, Artificial Sequence
  ENSG00000186522_31 (sequence is synthesized)
atccacagcggtgtttgtgggtctcttacggctataacggagttgaaggcgcagtgcggactgattgaatagcggtcatcttttgcagccgtgagcacttccgagcctccctgccgccgg

SEQ ID NO: 679312 - DNA, 120 bp, Artificial Sequence
  ENSG00000186522_32 (sequence is synthesized)
gagaaagcccggctcccctggcttttcaaaagctctcccgttttatccgatggtgtggtcgtccaagttttcctccattgggattttaaaccgtttttttcccgccttgactcttttgta

SEQ ID NO: 679313 - DNA, 120 bp, Artificial Sequence
  ENSG00000186522_33 (sequence is synthesized)
aactattttcgttaatagtaccaaggtcgtgtacatcgagttttccaaaggctacatgctctttcagtctcacatggcaacgaaaacaacttgtatgtcttcacaaggatcagatgatga

SEQ ID NO: 679314 - DNA, 120 bp, Artificial Sequence
  ENSG00000186522_34 (sequence is synthesized)
gaggaagttagagaggattgcatatttttatatatccaggatgatggggcatgtgttctttagaatctcccaaaaccatgatatagaatcatttggtaatgactaattattgtgcttctt

SEQ ID NO: 679315 - DNA, 120 bp, Artificial Sequence
  ENSG00000186523_0 (sequence is synthesized)
gcccggcttcctccaggtctcccggcaacggctgcggcctcgcccacgttatggcgcccgaggagaacgcggggaccgaactcttgctgcagggttttgagcgccgcttcctggcggtgc

SEQ ID NO: 679316 - DNA, 120 bp, Artificial Sequence
  ENSG00000186523_1 (sequence is synthesized)
gcacactgcgctccttcccctggcagagcttagaggcaaagttaagagactcatcagattctgagctgctgcgggatattttgcagaagactgtgaggcatcctgtgtgtgtgaagcacc

SEQ ID NO: 679317 - DNA, 120 bp, Artificial Sequence
  ENSG00000186523_2 (sequence is synthesized)
cgccgtcagtcaagtatgcctggtgctttctctcagaactcatcaaaaagtcctcaggaggctcagtcacactctccaagagcacagccatcatctcccacggtaccacaggcctggtca

SEQ ID NO: 679318 - DNA, 120 bp, Artificial Sequence
  ENSG00000186523_3 (sequence is synthesized)
catgggatgccgccctctaccttgcagaatgggccatcgagaacccggcagccttcattaacaggactgtcctagagcttggcagtggtgccggcctcacaggccttgccatctgcaaga

SEQ ID NO: 679319 - DNA, 120 bp, Artificial Sequence
  ENSG00000186523_4 (sequence is synthesized)
tgtgccgcccccgggcatacatcttcagcgaccctcacagccgggtcctcgagcagctccgagggaatgtccttctcaatggcctctcattagaggcagacatcactggcaacttagaca

SEQ ID NO: 679320 - DNA, 120 bp, Artificial Sequence
  ENSG00000186523_5 (sequence is synthesized)
gccccagggtgacagtggcccagctggactgggacgtagcaatggtccatcagctctctgccttccagccagatgttgtcattgcagcagacgtgctgtattgcccagaagccatcgtgt

SEQ ID NO: 679321 - DNA, 120 bp, Artificial Sequence
  ENSG00000186523_6 (sequence is synthesized)
cgctggtcggggtcctgcagaggctggctgcctgccgggagcacaagcgggctcctgaggtctacgtggcctttaccgtccgcaacccagagacgtgccagctgttcaccaccgagctag

SEQ ID NO: 679322 - DNA, 120 bp, Artificial Sequence
  ENSG00000186523_7 (sequence is synthesized)
agagacgtgccagctgttcaccaccgagctaggccgggatgggatcagatgggaagcggaagctcatcatgaccagaaactgtttccctatggagagcacttggagatggcaatgctgaa

SEQ ID NO: 679323 - DNA, 120 bp, Artificial Sequence
  ENSG00000186523_8 (sequence is synthesized)
ataaaactttcattggactggaatgtttggagattattaaactccaaatcaggaatcaaaactgccctctaataagacattagctgtctaggcgtgtgggtgccccctttctgccagcag

SEQ ID NO: 679324 - DNA, 120 bp, Artificial Sequence
  ENSG00000186523_9 (sequence is synthesized)
ttctggttctcaagaaaatcatcataaatcagacatgaaaattctagctccaaaaatagcattttctttctgcaaataaaaacgtgtgtatcaaggatgacgttcccccaacgtggacac

SEQ ID NO: 679325 - DNA, 78 bp, Artificial Sequence
  ENSG00000186523_10 (sequence is synthesized)
gggcttatggtgcagcaggcgcttttttcaagacaggaatgaaagtgttaggaacacggcagaaaggtgacacctgga

SEQ ID NO: 679326 - DNA, 120 bp, Artificial Sequence
  ENSG00000186523_11 (sequence is synthesized)
atgaaagtgttaggaacacggcagaaaggtgacacctggagaccaaatgcaggatgaggagtactgcagaggtcacagggaagtcacagaacagtaatacgctagcaggggcatggggca

SEQ ID NO: 679327 - DNA, 120 bp, Artificial Sequence
  ENSG00000186523_12 (sequence is synthesized)
tgaagaacagaagacaggaagcatttcagagactccaaagaagaaatcagggccaaccacagcttcccgggtcattcaccaggtgacaccactgccgtcatttcagcttctggccactgg

SEQ ID NO: 679328 - DNA, 120 bp, Artificial Sequence
  ENSG00000186523_13 (sequence is synthesized)
tgccgtcatttcagcttctggccactgggaggcgctgctcgaaaggctttgccctgagactccaagaagctgcgggaaggacagcaggggccctggggttttagcctctggcccaggagt

SEQ ID NO: 679329 - DNA, 120 bp, Artificial Sequence
  ENSG00000186523_14 (sequence is synthesized)
tctgcacccagctctcatcccatcagagctgctgagactcttgcaggttcttccagaactggcttagcttgcctgcaggatcagaaaagtttgagaaaagcatctgcaaaatgctaaaga

SEQ ID NO: 679330 - DNA, 120 bp, Artificial Sequence
  ENSG00000186523_15 (sequence is synthesized)
gcagagcttaactcattgcctgtccccaccccatcccaggtcaccacttggatgaccccaggtccccgacccaacaacaacccctcccaagtccctaactccctcacttggacttgagac

SEQ ID NO: 679331 - DNA, 120 bp, Artificial Sequence
  ENSG00000186523_16 (sequence is synthesized)
cacgaggctgtccacacggagcctttggacaaactgtacgaggtgctcacggagactctgatggccaaggagtccacccagggccaccggagctatttgctgtcctcaggaggctcagtc

SEQ ID NO: 679332 - DNA, 120 bp, Artificial Sequence
  ENSG00000186523_17 (sequence is synthesized)
cacgcccacccgggcctacatggtgcccgagctgtccctgcaggactccagtggaagtgaaagaactgggcgctggggaaaagctaggatgctccacactcccacactatgcggggaact

SEQ ID NO: 679333 - DNA, 120 bp, Artificial Sequence
  ENSG00000186523_18 (sequence is synthesized)
cttggtgccctggagcaccttccggcctctacatgctgtacgttcccctgtgagcaccctcctctcggcctctggccaacacagtcccacccatctgtgggtaacaagggggtgtgggtg

SEQ ID NO: 679334 - DNA, 89 bp, Artificial Sequence
  ENSG00000186523_19 (sequence is synthesized)
actcctgggctcaagcagtcctcccacgtcagcctttagagtagctggaactattcgacacacaccaccacgcccaacgaagtctgccc

SEQ ID NO: 679335 - DNA, 120 bp, Artificial Sequence
  ENSG00000186523_20 (sequence is synthesized)
ttggggcacagggcagggcaccgaggcaggcttaccctggtgcagtcgaaaacacggtcccctttcctcccgccaggactgtcctagagcttggcagtggtgccggcctcacaggccttg

SEQ ID NO: 679336 - DNA, 120 bp, Artificial Sequence
  ENSG00000186523_21 (sequence is synthesized)
tcccctggcaggtgggcggcggggcgagcggagaggcccgcgggggtcgcgggagtccaggggcagacgggatgggtctccgtgctgaaacccccggcgctccggccacagcttagaggc

SEQ ID NO: 679337 - DNA, 120 bp, Artificial Sequence
  ENSG00000186523_22 (sequence is synthesized)
cagattctgagctgctgcgggatattttgcagaagactgtgaggcatcctgtgtgtgtgaagcacccgccgtcagtcaagtatgcctggtgctttctctcagaactcatcaaaaagtaac

SEQ ID NO: 679338 - DNA, 120 bp, Artificial Sequence
  ENSG00000186523_23 (sequence is synthesized)
gccccgggcatcctgtgcaggcggtgtccttgcagctctacccagctcttggctctgggaaaagggaacaatggacactgtcgggcatggatgtgatggggcttccagaagagttactct

SEQ ID NO: 679339 - DNA, 120 bp, Artificial Sequence
  ENSG00000186523_24 (sequence is synthesized)
aggtgaccttcaagccacagccctgttgttggagacaggcatactacagttacagtcgtcaccacatggctctgtcccagagccatgccctgtgtccttcagagaccgcaggaggaaaac

SEQ ID NO: 679340 - DNA, 120 bp, Artificial Sequence
  ENSG00000186523_25 (sequence is synthesized)
agtaatcgttctggtcactgggacacagctgcactcgcccattctaaaaagtcagcgccctcaggcccgcgggtaaccacctcctcctgagcgcggtgaccagagcttagaggcaaagtt

SEQ ID NO: 679341 - DNA, 120 bp, Artificial Sequence
  ENSG00000186523_26 (sequence is synthesized)
aaggtgctgtttggctgggccaccgaaaacccctcacccctgtgagcacactcagtcccctctctggtggaacagaactctgcctgtagtcctgggtcccagccctgaaacccacaggtc

SEQ ID NO: 679342 - DNA, 120 bp, Artificial Sequence
  ENSG00000186523_27 (sequence is synthesized)
cagcggtggccagggacacaggcccacccctgcaagccagcagaccaatcggcagacacctgaaacacgaagttcacggcagggtcaggctttctgtcattgaaagccctctagacaggc

SEQ ID NO: 679343 - DNA, 120 bp, Artificial Sequence
  ENSG00000186523_28 (sequence is synthesized)
ttcacccaaataattgcctttccatctaatggcccaaatggtcaaatggcatctaatagtctcatatgaccgctgcctctctggcctcgccctgctgctgaggtcagcatgaactggaac

SEQ ID NO: 679344 - DNA, 120 bp, Artificial Sequence
  ENSG00000186526_0 (sequence is synthesized)
agcaaaaacctcctggcaaaggaggagaggaggttgtgcgggacaaccttctcctgacagaaggatgtcgctgctgagcctgtcttggctgggcctcaggccggtggcagcatccccgtg

SEQ ID NO: 679345 - DNA, 120 bp, Artificial Sequence
  ENSG00000186526_1 (sequence is synthesized)
gctgctcctgctggtggtcggggcctcctggctcctggcccgcatcctggcctggacctatgccttctatcacaacggccgccgcctccggtgtttcccgcagccccggaaacagaactg

SEQ ID NO: 679346 - DNA, 120 bp, Artificial Sequence
  ENSG00000186526_2 (sequence is synthesized)
gttcttgggtcacctgggcctggtcactcccacagaggagggcttgagggtcctgacccagctggtggccacctacccccagggctttgtgaggtggttgggccccatcactcccatcat

SEQ ID NO: 679347 - DNA, 120 bp, Artificial Sequence
  ENSG00000186526_3 (sequence is synthesized)
caacttgtgccaccctgacatcgtccgatctgtcatcaatacctcagatgccattacagacaaggacatagtcttctacaagaccctgaagccctggctgggggatgggctcttgttaag

SEQ ID NO: 679348 - DNA, 120 bp, Artificial Sequence
  ENSG00000186526_4 (sequence is synthesized)
tgttggtgacaagtggagacaccaccgtcgcttgctgacgcctgccttccatttcaacatcctgaagccctatataaagattttcagcaagagtgcaaacatcatgcatgccaagtggca

SEQ ID NO: 679349 - DNA, 120 bp, Artificial Sequence
  ENSG00000186526_5 (sequence is synthesized)
acgcctggccatggagggcagcacctgtctggatgtgtttgagcacatcagccttatgaccctggacagtctgcagaaatgcatcttcagctttgacagcaattgtcaggagaagcccag

SEQ ID NO: 679350 - DNA, 120 bp, Artificial Sequence
  ENSG00000186526_6 (sequence is synthesized)
tgaatatattactgcgatcatggagctcagtgcccttgtagtgaaacggaataaccagttcttccggtacaaggacttcctgtacttcctcactccctgtggacggcgcttccacagggc

SEQ ID NO: 679351 - DNA, 120 bp, Artificial Sequence
  ENSG00000186526_7 (sequence is synthesized)
ctgcagactggtgcacgacttcacagatgccgtcatccaggagcggcgccgcaccctcactagccagggtgttgatgacttcctccaagccaaggccaagtccaagactttggactttat

SEQ ID NO: 679352 - DNA, 120 bp, Artificial Sequence
  ENSG00000186526_8 (sequence is synthesized)
tgatgtgctcctgctgagcgaggataaaaatggtaaagagttgtcagatgaggacataagagcagaagctgacactttcatgtttggaggccatgacaccacggccagtggcctctcctg

SEQ ID NO: 679353 - DNA, 120 bp, Artificial Sequence
  ENSG00000186526_9 (sequence is synthesized)
ggtcttgtacaacctcgcgaggcacccagaataccaagaacgctgccggcaggaggtgcaagagcttctgaaggaccgtgagcctaaagagattgaatgggacgacctggcccagttgcc

SEQ ID NO: 679354 - DNA, 120 bp, Artificial Sequence
  ENSG00000186526_10 (sequence is synthesized)
cttcctgaccatgtgcctgaaggagagcctgcggttgcatcccccaatccctacattcgcccgcggctgcacccaggacgtggtgctcccagacagccgagtcatccccaaagggaatgt

SEQ ID NO: 679355 - DNA, 120 bp, Artificial Sequence
  ENSG00000186526_11 (sequence is synthesized)
ctgtaacatcaacatcttcgcaatccatcacaacccctcagtctggccagaccctgaggtctatgaccccttccgcttcgacccagaaaacgcccagaagaggtcacctatggcttttat

SEQ ID NO: 679356 - DNA, 120 bp, Artificial Sequence
  ENSG00000186526_12 (sequence is synthesized)
atcgggcagaagttcgcgatggcagagatgaaggtggtcctggcgctcacgctgctgcgcttccgcatcctgcccgaccacagggagccacgcaggacgccggagattgttttgcgtgcg

SEQ ID NO: 679357 - DNA, 120 bp, Artificial Sequence
  ENSG00000186526_13 (sequence is synthesized)
gaggacggactttggctgcgagtagaacccctgggctgaggcctgcagtgacccacccacctacctttgcatcacctacctttgcaccaactaccttttcagatttccggtaataaatct

SEQ ID NO: 679358 - DNA, 120 bp, Artificial Sequence
  ENSG00000186526_14 (sequence is synthesized)
gtgttggcccctgtgcctcagtcccgcggatggccagtagggggcgctggaggactgcggggatctagggcctggctgggaagaggcggggagatgtctctgtgcccaagatactcactg

SEQ ID NO: 679359 - DNA, 120 bp, Artificial Sequence
  ENSG00000186526_15 (sequence is synthesized)
cctctctgggtgagcacaggagccccgtgctgagggtgggatctcccagagtctaagtaaagactttttcccccccaaaataattgtgtattctgatataaatttttgccaatttagaat

SEQ ID NO: 679360 - DNA, 120 bp, Artificial Sequence
  ENSG00000186526_16 (sequence is synthesized)
ccctgttttttagctaggtgcatagcagcctgaaatacagatcacatttgaaagcctttcttgaagctcaattggttaagtgactgtggctgtcccatgtgtagaagccaaagattatgt

SEQ ID NO: 679361 - DNA, 120 bp, Artificial Sequence
  ENSG00000186526_17 (sequence is synthesized)
ggtaattctggtaacctttcttaagagaaagctgctacagtctgtctgctcagtcctcccctcttccttcctgctgcttggaagatttttttttttttttgagacatggtgtctctcgtc

SEQ ID NO: 679362 - DNA, 120 bp, Artificial Sequence
  ENSG00000186526_18 (sequence is synthesized)
cctgggttcaagtgattctcctgactcagtcgcctgagtagataggataacaggcgcctaccaccacacccggctaattgtatttttagtacagatggggttttgctatgttggccaggc

SEQ ID NO: 679363 - DNA, 66 bp, Artificial Sequence
  ENSG00000186526_19 (sequence is synthesized)
cagaattgcaggtgtgagaataaaaattcttgagtttcaatgtttattttagaatcaggtgctaac

SEQ ID NO: 679364 - DNA, 120 bp, Artificial Sequence
  ENSG00000186526_20 (sequence is synthesized)
ttcttgagtttcaatgtttattttagaatcaggtgctaacatgcaaatttattacaaaggtatattgcatcatgctgaggtttggagtatgaatgactccatcacccatgtagtgagcat

SEQ ID NO: 679365 - DNA, 120 bp, Artificial Sequence
  ENSG00000186526_21 (sequence is synthesized)
agtatctaataggcagtttttcagcttttccccctccctgcttcccctgtctagtagtccccaggatctgttgttcccatctttattaccatgtgtatccaatgcatacctcccacttat

SEQ ID NO: 679366 - DNA, 120 bp, Artificial Sequence
  ENSG00000186526_22 (sequence is synthesized)
cctgcattagtttgcttaggataatggcccccagctgcatctatgttgctgcaaacgacatgattttgtactttttaatgactgcatagtatttcatggtgtatttctacacattttctt

SEQ ID NO: 679367 - DNA, 120 bp, Artificial Sequence
  ENSG00000186526_23 (sequence is synthesized)
gtatttcatggtgtatttctacacattttctttatccactccaccattgatgggcacctgtgttgattcagcatcttcgctattgtgattagagctgcgataaacatgtggatgcttgtg

SEQ ID NO: 679368 - DNA, 83 bp, Artificial Sequence
  ENSG00000186526_24 (sequence is synthesized)
ttgacctagcccttgatgaactttaaaattccttcaattagaataagatttcaaagttccaaaaagaatccagctagattttt

SEQ ID NO: 679369 - DNA, 120 bp, Artificial Sequence
  ENSG00000186526_25 (sequence is synthesized)
taagatttcaaagttccaaaaagaatccagctagatttttattaattgcatgaagtatattgattagtttagaaataattgacacctttacaacatatggtcatcccaccctacagtgtg

SEQ ID NO: 679370 - DNA, 120 bp, Artificial Sequence
  ENSG00000186526_26 (sequence is synthesized)
gagtggagattatttattcaaataactttataagccctttgtagagatgtttttttcctgcttttgttacctctttatataattttaaatactttttcacacaaacaaatgaacactttt

SEQ ID NO: 679371 - DNA, 82 bp, Artificial Sequence
  ENSG00000186526_27 (sequence is synthesized)
aattttaaatactttttcacacaaacaaatgaacacttttgtttttgagatggagttgctctgcctcccaaactggagtgcg

SEQ ID NO: 679372 - DNA, 120 bp, Artificial Sequence
  ENSG00000186526_28 (sequence is synthesized)
gattacaggagtgagccactgcaccccgccggaatgaatacttttaagagacaccctctgaatattgttttgctcagaaatacctctaaaaacaccaggtcaacttttcttctagtagtt

SEQ ID NO: 679373 - DNA, 120 bp, Artificial Sequence
  ENSG00000186526_29 (sequence is synthesized)
ttttcttctagtagttttgtgactttggttttctaatgcttacatctttgttgcttctggaattaattttgttataggactgagggtcagagggaggtggtgagagggtctccaggggca

SEQ ID NO: 679374 - DNA, 120 bp, Artificial Sequence
  ENSG00000186526_30 (sequence is synthesized)
ctcggaccttgttcttactgtcctctcctgcacgacagggaatgtctgtaacatcaacatcttcgcaatccatcacaacccctcagtctggccagaccctgaggtgctgcccctccctgt

SEQ ID NO: 679375 - DNA, 120 bp, Artificial Sequence
  ENSG00000186526_31 (sequence is synthesized)
agcaaaaacctcctggcaaaggaggagaggaggttgtgcgggacaaccttctcctgacagaaggtgccaggctgggggtggcagggctggatagggaggggcactgcccaagactgggat

SEQ ID NO: 679376 - DNA, 120 bp, Artificial Sequence
  ENSG00000186526_32 (sequence is synthesized)
ggaggtctgagtttggtggagaaaatggggcagatttgggagaaactgagtaataataggcaggagcagatgttttataagacagagagaggagatgcccatgatggccaagctgtgccc

SEQ ID NO: 679377 - DNA, 120 bp, Artificial Sequence
  ENSG00000186526_33 (sequence is synthesized)
tggggacctggggcaggaggcagctcacagagagtgggaggcagagagtgaagtgcgcttgcaggacacccctttctgcatggaatgtggtcctgggattctggctggaaggtgctccca

SEQ ID NO: 679378 - DNA, 120 bp, Artificial Sequence
  ENSG00000186526_34 (sequence is synthesized)
tccagggagctggccctggtgatgggtgcttgcaggtaaccagaggtcaagttggctggtggttctagatgaggctgtctggtttctggtctctagtttccttgatctctaattttgtgt

SEQ ID NO: 679379 - DNA, 120 bp, Artificial Sequence
  ENSG00000186526_35 (sequence is synthesized)
cacttctcctctcccctctcccttggcctcttcccctgagattccctgaatctccctccatgctcttaaccatgtttacccatcattggtcctggagctccccagcccctttcctaggcc

SEQ ID NO: 679380 - DNA, 120 bp, Artificial Sequence
  ENSG00000186526_36 (sequence is synthesized)
tctgtcatcaatacctcaggtactcctgcagagcttgtggtggtgggcacaggagaacattggagggcttctagatctcatccccaaagcttctgtgcagctcttgtagtactcagcccc

SEQ ID NO: 679381 - DNA, 120 bp, Artificial Sequence
  ENSG00000186526_37 (sequence is synthesized)
ttccttcctgcttctctctcagccaccttcctctttccttcctgtagtcaccaaccccaacctcagtgtcttttctctctgctgccatcttccccacctccgtgttgttctgggaaccac

SEQ ID NO: 679382 - DNA, 120 bp, Artificial Sequence
  ENSG00000186526_38 (sequence is synthesized)
tggggccccgagaagccttaatccaaggccctgtcctggaggaatccccaaacttgaagagatggagcagtacagagacatccccaacttcatggggttcagaatgggccaggaggagat

SEQ ID NO: 679383 - DNA, 120 bp, Artificial Sequence
  ENSG00000186526_39 (sequence is synthesized)
aggctgtgacagagcataggagaacaaggtttctactggggcaggctggaaggcttcctggaggaggcgtagcaggagctgggtgtggaacgatgagtgataattttttttttaaagcag

SEQ ID NO: 679384 - DNA, 120 bp, Artificial Sequence
  ENSG00000186526_40 (sequence is synthesized)
gggcagggtgatgcagtgggcattgttagtattcaaggctccgggccaggcttggcattggccttgtccttctgcaggcccagagcaaggacaagaagatgagaaggagttgtggttggt

SEQ ID NO: 679385 - DNA, 120 bp, Artificial Sequence
  ENSG00000186526_41 (sequence is synthesized)
ggaagatctaggctgctatttccatgacattcacctcttgtgggtcgattccttctaatcccatcctgtggcacttccaccatatgttcattgccctcttgctccaggccccaggaatct

SEQ ID NO: 679386 - DNA, 120 bp, Artificial Sequence
  ENSG00000186526_42 (sequence is synthesized)
ccaataggagacaccaccccagcctggagccgtacccttgccctctgcccttcccatctttggacaggccagggagagcagcagaaggggtatcacgccacagagaccatggctcaagcc

SEQ ID NO: 679387 - DNA, 120 bp, Artificial Sequence
  ENSG00000186526_43 (sequence is synthesized)
ccaaaatgctgagtgactctgggcaggtccacggctctctatgggtgctgaggtgtctttccattgtgagtggtagaaactcaaccccacgcagtctaagccattaaagagaagctattg

SEQ ID NO: 679388 - DNA, 120 bp, Artificial Sequence
  ENSG00000186526_44 (sequence is synthesized)
catccagggaggttggccttcaggcacaactggatccaggtctcacctaatatcatcagaattctgtctttaactcttattctgtaaatgtgttttgtagagtgttgacttatgcttggg

SEQ ID NO: 679389 - DNA, 120 bp, Artificial Sequence
  ENSG00000186526_45 (sequence is synthesized)
tgttgcagaacatgttggaccatgtaggagccatgtcaagacatgctgggtgtgctgtaccatgtcagggtgtatcattgctctatagtgttgttgcagcctagtccggtcccctttatg

SEQ ID NO: 679390 - DNA, 120 bp, Artificial Sequence
  ENSG00000186526_46 (sequence is synthesized)
ccccccaccctcctttcttcttctgcccatggcctccttcctgctatgctgggcttggagaaaagacgtccaaacctctggctgggagccaccctccatacccaaagtccctcctctatt

SEQ ID NO: 679391 - DNA, 120 bp, Artificial Sequence
  ENSG00000186526_47 (sequence is synthesized)
atttattgagaactcatcatatgacagaaatgatgtaatatgcctattccatggtgtatgtggtctcatttaatttacaccgccttgtgaagtagaggatattttccaccctctccccca

SEQ ID NO: 679392 - DNA, 120 bp, Artificial Sequence
  ENSG00000186526_48 (sequence is synthesized)
tgccatgacaaatggtgaaactgagggccagagaggttagagagatttcccaagttcacccagcttgtcagtgagtctaagagtgggggaaaaggggttctagcctggctccctggcatc

SEQ ID NO: 679393 - DNA, 120 bp, Artificial Sequence
  ENSG00000186526_49 (sequence is synthesized)
aaagcaggtcatcttgattgctattgaggatttgacaggtgagacctagaggagggctgtgagttgaccaagggtacacacagcttaggaatcacagctggggcttgaacccagccatgg

SEQ ID NO: 679394 - DNA, 120 bp, Artificial Sequence
  ENSG00000186526_50 (sequence is synthesized)
ctccctgaggatgggggtctgggacagaaaaccaggagcatgcctctgggggagtccatcctggtggttggggttgcagggggactcagaggagccaaggcctggccccagccctgctcc

SEQ ID NO: 679395 - DNA, 120 bp, Artificial Sequence
  ENSG00000186526_51 (sequence is synthesized)
aaaggtctatgaccccttccgcttcgacccagaaaacgcccagaagaggtcacctatggcttttattcctttctcggcggggcccaggaactgcatcgggcagaagttcgcgatggcaga

SEQ ID NO: 679396 - DNA, 120 bp, Artificial Sequence
  ENSG00000186526_52 (sequence is synthesized)
acaaacaggaggtcggaaggaagcatgtgggggtagatctggaggtgacaagggagggatccttctgggataatgggtcttcagagactgtttcagtttagactccagtgaccccagaac

SEQ ID NO: 679397 - DNA, 120 bp, Artificial Sequence
  ENSG00000186529_0 (sequence is synthesized)
agaagaaggggagaggaggttgtgtgggacaaggtgctcctgacagaaggatgccacagctgagcctgtcctcgctgggcctttggccaatggcagcatccccgtggctgctcctgctgc

SEQ ID NO: 679398 - DNA, 120 bp, Artificial Sequence
  ENSG00000186529_1 (sequence is synthesized)
tggttggggcctcctggctcctggcccgcatcctggcctggacctataccttctatgacaactgctgccgcctccggtgtttcccgcaacccccgaaacggaattggttcttgggtcacc

SEQ ID NO: 679399 - DNA, 120 bp, Artificial Sequence
  ENSG00000186529_2 (sequence is synthesized)
tgggcctgattcacagctcggaggaaggtctcctatacacacaaagcctggcatgcaccttcggtgatatgtgctgctggtgggtggggccctggcacgcaatcgtccgcatcttccacc

SEQ ID NO: 679400 - DNA, 120 bp, Artificial Sequence
  ENSG00000186529_3 (sequence is synthesized)
ccacctacatcaagcctgtgctctttgctccagctgccattgtaccaaaggacaaggtcttctacagcttcctgaagccctggctgggggatgggctcctgctgagtgctggtgaaaagt

SEQ ID NO: 679401 - DNA, 120 bp, Artificial Sequence
  ENSG00000186529_4 (sequence is synthesized)
ggagccgccaccgtcggatgctgacgcctgccttccatttcaacatcctgaagccctatatgaagattttcaatgagagtgtgaacatcatgcatgccaagtggcagctcctggcctcag

SEQ ID NO: 679402 - DNA, 120 bp, Artificial Sequence
  ENSG00000186529_5 (sequence is synthesized)
agggtagtgcccgtctggacatgtttgagcacatcagcctcatgaccttggacagtctgcagaaatgtgtcttcagctttgacagccattgccaggagaagcccagtgaatatattgccg

SEQ ID NO: 679403 - DNA, 120 bp, Artificial Sequence
  ENSG00000186529_6 (sequence is synthesized)
ccatcttggagctcagtgcccttgtgacaaaaagacaccagcagatcctcctgtacatagacttcctgtattatctcacccctgatgggcagcgtttccgcagggcctgccgcctggtgc

SEQ ID NO: 679404 - DNA, 120 bp, Artificial Sequence
  ENSG00000186529_7 (sequence is synthesized)
acgacttcacagatgccgtcatccaggagcggcgccgcaccctccctagccagggtgttgatgacttcctccaagccaaggccaaatccaagactttggacttcattgatgtactcctgc

SEQ ID NO: 679405 - DNA, 120 bp, Artificial Sequence
  ENSG00000186529_8 (sequence is synthesized)
tgagcaaggatgaagatgggaagaagttgtccgatgaggacataagagcagaagctgacacctttatgtttgagggccatgacaccacagccagtggtctctcctgggtcctgtaccacc

SEQ ID NO: 679406 - DNA, 120 bp, Artificial Sequence
  ENSG00000186529_9 (sequence is synthesized)
ttgcaaagcacccggaataccaggagcgctgtcggcaggaggtgcaagagcttctgaaggaccgtgagcctaaagagattgaatgggacgacctggcccagctgcccttcctgaccatgt

SEQ ID NO: 679407 - DNA, 120 bp, Artificial Sequence
  ENSG00000186529_10 (sequence is synthesized)
gcattaaggagagcctgaggctgcatcccccagtccctgccgtctctcgctgctgcacccaagacattgtgctcccagacggccgggtcatccccaaaggcattatctgcctcatcagtg

SEQ ID NO: 679408 - DNA, 120 bp, Artificial Sequence
  ENSG00000186529_11 (sequence is synthesized)
tttttggaacccatcacaacccagccgtgtggccggaccctgaggtctatgacccctttcgctttgacccaaagaacatcaaggagaggtcacctctggcttttattcccttctcagcag

SEQ ID NO: 679409 - DNA, 120 bp, Artificial Sequence
  ENSG00000186529_12 (sequence is synthesized)
ggcccaggaactgcatcgggcaggcgttcgcgatggcggagatgaaggtggtcctggggctcacgctgctgcgcttccgcgtcctgcctgaccacaccgagccccgcaggaagccggagc

SEQ ID NO: 679410 - DNA, 120 bp, Artificial Sequence
  ENSG00000186529_13 (sequence is synthesized)
tggtcctgcgcgcagagggcggactttggctgcgggtggagcccctgagctgagttctgcagagacccactctgaccccactaaaatgacccctgattcatcaaaagtgaggcctagaat

SEQ ID NO: 679411 - DNA, 120 bp, Artificial Sequence
  ENSG00000186529_14 (sequence is synthesized)
taccctaagaccctgttccacagtcctgtattccatcctagatatctactcaaaataattgagacaagtgttcaaacagaaagacgcttgtgcgtgaatgttcatggcagccctattcac

SEQ ID NO: 679412 - DNA, 120 bp, Artificial Sequence
  ENSG00000186529_15 (sequence is synthesized)
agtagccaaacgatgaaaacaaccccaagctatatattaccagatgaaaggataaacaaaatatggtccatccatacaatggagtattacacagccataaaaaggaatgaagcagtgatc

SEQ ID NO: 679413 - DNA, 120 bp, Artificial Sequence
  ENSG00000186529_16 (sequence is synthesized)
cccactacactgtggatgaaccttgaatgcatgatactgaatgaaagacatcagatgcaaaaggtcacatagtgtactgtccttttatatgaaatttccagaacaggccaatctgaagag

SEQ ID NO: 679414 - DNA, 120 bp, Artificial Sequence
  ENSG00000186529_17 (sequence is synthesized)
atgtatagtggattggtggctttcagcagctgtggggaggtgggactgaggagcgactgctaatcaggatggggtttcctcctgggatggtgaaaatgttccggacctagatagtgatga

SEQ ID NO: 679415 - DNA, 120 bp, Artificial Sequence
  ENSG00000186529_18 (sequence is synthesized)
aggtagcacgacactgtgagtgcactaaatgctattgaattggacactttagaatggttgaaatagtgatttttatgtgaattctacctaaacatgctattacagctcatatatactttt

SEQ ID NO: 679416 - DNA, 120 bp, Artificial Sequence
  ENSG00000186529_19 (sequence is synthesized)
tccatctggattcttcacaaaagaatatgttgtgagcatctttccatgatattaaatcatcttaggaaacattattttgtgttcttcaaaatgtgcatgttaagtattcaaatcagtctt

SEQ ID NO: 679417 - DNA, 120 bp, Artificial Sequence
  ENSG00000186529_20 (sequence is synthesized)
aaatttttaaaaatatgtaattttagaaaataatttaaaaggttttgtttcagtttgtaagatttcttttctggcactttaatggcttgaggtatcattatcagttacaaattgagttat

SEQ ID NO: 679418 - DNA, 120 bp, Artificial Sequence
  ENSG00000186529_21 (sequence is synthesized)
acttttggagtagagattttatttttatagcaatagatgcacagatattcctgtaagatacaggtgtggttagacacttttctagaacaggcatgccctgcaaactccacagacactgac

SEQ ID NO: 679419 - DNA, 120 bp, Artificial Sequence
  ENSG00000186529_22 (sequence is synthesized)
tgtttttgtcctattaagaagtagaccactgagaagggagaaggtgacattttagctttcccaggtaaaagtggttttcatcctcacaccaattttatggactggacgttaactctcttg

SEQ ID NO: 679420 - DNA, 120 bp, Artificial Sequence
  ENSG00000186529_23 (sequence is synthesized)
ctcaaggtcactctgagtggaagagtggggataaatctggttcgtttggcatcagaggccatgacttttcctaccacagaagtaattttcaaagtaagtctctgccctaggcacatcaga

SEQ ID NO: 679421 - DNA, 89 bp, Artificial Sequence
  ENSG00000186529_24 (sequence is synthesized)
agtaattttcaaagtaagtctctgccctaggcacatcagatcacctggggaccactccagagtgagtagacaagactttgacaggggtg

SEQ ID NO: 679422 - DNA, 60 bp, Artificial Sequence
  ENSG00000186529_25 (sequence is synthesized)
gttgtatttttaatagaggcggggtttcgccatgttgcactggctggtgttgaactccta

SEQ ID NO: 679423 - DNA, 68 bp, Artificial Sequence
  ENSG00000186529_26 (sequence is synthesized)
accaccacatccagctaattgttgtatttttaatagaggcggggtttcgccatgttgcactggctggt

SEQ ID NO: 679424 - DNA, 120 bp, Artificial Sequence
  ENSG00000186529_27 (sequence is synthesized)
ttatacgtacacttagaataatgatccagccatctcattctaacagcaatgagaacttaggctcccctctctactaaaatacaaaagttagctggtcatggtggtgcgggcctgtaatcc

SEQ ID NO: 679425 - DNA, 120 bp, Artificial Sequence
  ENSG00000186529_28 (sequence is synthesized)
cagctactcgggaggctgatgcgggagaatcacttgaaacccacaggcggaggttgcagtgagctgaggtggtgccactacgctccagcctgggggagggggacatagcgagactcggtc

SEQ ID NO: 679426 - DNA, 120 bp, Artificial Sequence
  ENSG00000186529_29 (sequence is synthesized)
caaaaacaaaacaaaacaaaacaaaacactgccaaactgtttccaaagcatctgcatcgtgtttaatttccataagtaacgtatgagaattctaggtcctccaaataattagcagtcctt

SEQ ID NO: 679427 - DNA, 120 bp, Artificial Sequence
  ENSG00000186529_30 (sequence is synthesized)
attctaggtcctccaaataattagcagtccttcgtagtgtcagtttttgtttcagccttccttatgggtatgctgtggcatatccctgagattttaattcgcattttccagtgactaagg

SEQ ID NO: 679428 - DNA, 120 bp, Artificial Sequence
  ENSG00000186529_31 (sequence is synthesized)
gtgttgaaccactcgtgccttcctgtgcctatttgacactcctatattttctttggtgaagtgtctgttcaatcatctgctcattaaattttccttcggttgtttgccttcttattgttg

SEQ ID NO: 679429 - DNA, 120 bp, Artificial Sequence
  ENSG00000186529_32 (sequence is synthesized)
gattttgagagttctatgtacaagtcctttgtcagtcgtgtgatttgcaagtcttcttcctagtctctgaagtttctttctttcatagagcaaacgttttaaatttttatgaagtaagac

SEQ ID NO: 679430 - DNA, 120 bp, Artificial Sequence
  ENSG00000186529_33 (sequence is synthesized)
ttctcagttttatttttggtgaattatgtttatactgccatatataggaactctttgcttaactggaggtcatggagattttctcctacattttcttttaaaagttttatagtttcagag

SEQ ID NO: 679431 - DNA, 120 bp, Artificial Sequence
  ENSG00000186529_34 (sequence is synthesized)
tttacatgtaattccataatctccatttagttaaattttgtatggggtgtgaactgtggtttgactgttttcttgtatatggatatccaattgtttcacacaatttttttgaaaagaata

SEQ ID NO: 679432 - DNA, 72 bp, Artificial Sequence
  ENSG00000186529_35 (sequence is synthesized)
ggatatccaattgtttcacacaatttttttgaaaagaatatccttggcatgggcagatcatgaggtcaggag

SEQ ID NO: 679433 - DNA, 77 bp, Artificial Sequence
  ENSG00000186529_36 (sequence is synthesized)
cagcctggccaatatggtgaaaccacgtctctatttcacagctgcttggatggctgaggcaggagaatcgcttgaac

SEQ ID NO: 679434 - DNA, 80 bp, Artificial Sequence
  ENSG00000186529_37 (sequence is synthesized)
ctctcgaaaagaaaatcctttttgctttaacttgccttgcaggtttgtagaaaactcaattgttgaaatttgggtggata

SEQ ID NO: 679435 - DNA, 120 bp, Artificial Sequence
  ENSG00000186529_38 (sequence is synthesized)
aggtttgtagaaaactcaattgttgaaatttgggtggatatatttctggattttctattctattccatgttggaccaataccacactgccctagtcactgttgcattatagtatatcttt

SEQ ID NO: 679436 - DNA, 120 bp, Artificial Sequence
  ENSG00000186529_39 (sequence is synthesized)
aaaggagtaatgggaatccttcaactacattttttccccaataatttttggctattctgcttcctttgtgtttctatgtaaattttatcatcagtgtgtctatttctacaaatagtcctg

SEQ ID NO: 679437 - DNA, 120 bp, Artificial Sequence
  ENSG00000186529_40 (sequence is synthesized)
atagggtttgaattgggatttctgtgaatctatagatcaatctgaggagacttaataatgatattgattctcccaattcatgaatatagtatacccctgtatttatttgttttcttgaat

SEQ ID NO: 679438 - DNA, 120 bp, Artificial Sequence
  ENSG00000186529_41 (sequence is synthesized)
ttcttttatcattgttttgtagttttcaccatgacagtcttgcacatattttgttaaatgtacagctgagaatttaattttttctggtgtacaatgctaataaaatggtgctttaaaaga

SEQ ID NO: 679439 - DNA, 120 bp, Artificial Sequence
  ENSG00000186529_42 (sequence is synthesized)
tctatctccagcactgcccgtctctgcctctctccactgtccctggagctccctgggcccttccctgggcctcaggacctcactcaccaccccatctgccctgcaggatgccacagctga

SEQ ID NO: 679440 - DNA, 120 bp, Artificial Sequence
  ENSG00000186529_43 (sequence is synthesized)
cacggagcagggcatgagggtcctgactcagctggtggccacctacccccagggctttaaggtctggatgggccccatcttccccgtcatccgtttttgccaccccaacatcatccggtc

SEQ ID NO: 679441 - DNA, 120 bp, Artificial Sequence
  ENSG00000186532_0 (sequence is synthesized)
cgccggacgcggtgcggggcggagcggggcgccaaggggcgcgccaggagctgcgcgggcgctgggagggagaccagggcgcagttccgggcgcgtctgagcggttctcgaggcgttctc

SEQ ID NO: 679442 - DNA, 120 bp, Artificial Sequence
  ENSG00000186532_1 (sequence is synthesized)
gggcgcgtctgagcggttctcgaggcgttctcgcctcggtctctggcgagtgcacggatcaaaagcagcatggatctgcctgtggatgaatggaaatcatatctgcttcaaaagtgggct

SEQ ID NO: 679443 - DNA, 120 bp, Artificial Sequence
  ENSG00000186532_2 (sequence is synthesized)
tcactcccgacgtctgttcaggtcacaatttctacagcagagaccttgagggatatctttcttcactcctcttcacttcttcaacctgaggatgagctgtttctaaaaagactttctaaa

SEQ ID NO: 679444 - DNA, 120 bp, Artificial Sequence
  ENSG00000186532_3 (sequence is synthesized)
ggttacttggtgggaaaggactcggacgctcctcttttctacagagaagaaggaaacaaaaaatttcaggagaaagattacacaggagctgcagtgctgtactctaagggagtgtcacat

SEQ ID NO: 679445 - DNA, 120 bp, Artificial Sequence
  ENSG00000186532_4 (sequence is synthesized)
tcaaggcctaacactgaggacatgtcactgtgtcatgctaaccgctcggcagccctcttccacctgggtcagtatgagacgtgtcttaaagacattaacagagcacagacacatgggtat

SEQ ID NO: 679446 - DNA, 120 bp, Artificial Sequence
  ENSG00000186532_5 (sequence is synthesized)
ccagaaaggttgcaacccaagattatgttacgtaaagcagaatgtctggtggccctggggagactgcaggaggcaagccagaccatcagtgatcttgaaaggaacttcacagccacacca

SEQ ID NO: 679447 - DNA, 120 bp, Artificial Sequence
  ENSG00000186532_6 (sequence is synthesized)
gccctagcagatgtcctccctcagactctgcagagaaacctccatcgtctgaaaatgaagatgcaagaaaaggacagtctcacagaaagcttcccagcagctctggccaaaacccttgag

SEQ ID NO: 679448 - DNA, 120 bp, Artificial Sequence
  ENSG00000186532_7 (sequence is synthesized)
gatgcagcgctgagggaggagaatgaacaactttccaatgcctcatcatccatcggcttatgcgtagatcctttaaaaggtcgctgtctcgttgccacaaaagatattctcccaggagag

SEQ ID NO: 679449 - DNA, 120 bp, Artificial Sequence
  ENSG00000186532_8 (sequence is synthesized)
ctcctggtgcaggaggatgcttttgtgagtgttctcaacccaggagaactgccaccaccgcatcacggcctagacagcaaatgggacaccagagtcaccaatggggacctctattgtcac

SEQ ID NO: 679450 - DNA, 120 bp, Artificial Sequence
  ENSG00000186532_9 (sequence is synthesized)
cgatgtttgaagcacactttggccacagttccgtgtgacggatgcagttatgccaagtattgcagccaggagtgtttgcagcaggcctgggagctctaccacaggacagaatgtcctctg

SEQ ID NO: 679451 - DNA, 120 bp, Artificial Sequence
  ENSG00000186532_10 (sequence is synthesized)
ggagggctgcttctcacactgggtgtcttttgccacattgccctgaggttgactcttttggtgggatttgaggatgttcgcaaaatcataacgaagctttgtgataagattagtaacaag

SEQ ID NO: 679452 - DNA, 120 bp, Artificial Sequence
  ENSG00000186532_11 (sequence is synthesized)
gacatctgtttacctgaaagcaacaatcaggtcaagacacttaattatggcctaggggagagtgagaaaaatggcaacatcgttgagaccccaattcctggatgcgatattaatgggaag

SEQ ID NO: 679453 - DNA, 120 bp, Artificial Sequence
  ENSG00000186532_12 (sequence is synthesized)
tatgaaaataattataatgctgtcttcaaccttttgccccacactgaaaaccatagcccagagcacaaattcctctgtgctctctgtgtttctgcactgtgcagacagctagaagcagcc

SEQ ID NO: 679454 - DNA, 120 bp, Artificial Sequence
  ENSG00000186532_13 (sequence is synthesized)
agtttacaggccatcccaactgagaggattgtgaactcctctcagcttaaagcagcagtgacacctgaattgtgtcctgacgtgactatttggggagtggcgatgctgagacacatgtta

SEQ ID NO: 679455 - DNA, 120 bp, Artificial Sequence
  ENSG00000186532_14 (sequence is synthesized)
cagcttcagtgtaacgctcaggcgatgaccaccatacaacacacaggacctaaagggagcatcgttaccgacagcaggcaggtgcgccttgccacaggcatcttccctgttatcagcctc

SEQ ID NO: 679456 - DNA, 120 bp, Artificial Sequence
  ENSG00000186532_15 (sequence is synthesized)
ctgaaccactcctgtagccccaacaccagcgtgtccttcattagcactgtcgccaccatccgggcgtcacagcggattagaaaggggcaagagattctccactgctatgggcctcacaag

SEQ ID NO: 679457 - DNA, 120 bp, Artificial Sequence
  ENSG00000186532_16 (sequence is synthesized)
agccggatgggggttgccgaaaggcagcagaagctgaggtctcagtatttctttgactgcgcctgtccagcttgtcaaactgaggcacacaggatggctgcagggcccaggtgggaagca

SEQ ID NO: 679458 - DNA, 120 bp, Artificial Sequence
  ENSG00000186532_17 (sequence is synthesized)
ttctgttgcaacagttgcggagcgcccatgcagggagatgacgtgctgcgctgtggcagcagatcttgtgcagaatccgccgtcagcagggaccacctggtctctcggttacaggaccta

SEQ ID NO: 679459 - DNA, 120 bp, Artificial Sequence
  ENSG00000186532_18 (sequence is synthesized)
acgccgagagcttcctgtgggcagagcacgccgtggtgggagagatcgcggatggcctggcccgggcctgtgctgccttaggagactggcaaaagtcagccacccatctacagaggagtc

SEQ ID NO: 679460 - DNA, 120 bp, Artificial Sequence
  ENSG00000186532_19 (sequence is synthesized)
tctacgtggtggaggttcgccacgggccgtccagtgttgaaatgggccatgagctcttcaaattggcccagatctttttcaacgggtttgcagtacccgaagccctgagcacaatacaga

SEQ ID NO: 679461 - DNA, 120 bp, Artificial Sequence
  ENSG00000186532_20 (sequence is synthesized)
aagctgaggaggttctgtcgctgcactgtggcccatgggacgatgaaatccaggagctccagaagatgaaatcctgtttgttggacttaccacccacccctgtagggcctgcattgtagg

SEQ ID NO: 679462 - DNA, 120 bp, Artificial Sequence
  ENSG00000186532_21 (sequence is synthesized)
accacccacccctgtagggcctgcattgtagggttccaggaggattttgacccacagaaaaggagcccatggaacacaagttaaagaggttttgctggccaggtatggtggctcacgcct

SEQ ID NO: 679463 - DNA, 120 bp, Artificial Sequence
  ENSG00000186532_22 (sequence is synthesized)
gggtgacagagccagactccatctcaaagaaaaaaaaaaaatattaagaggttctgctgccagatgtgggttctgtgggtcgggtgtgggttctgtgggtcgggtgtgggttctgcagac

SEQ ID NO: 679464 - DNA, 120 bp, Artificial Sequence
  ENSG00000186532_23 (sequence is synthesized)
ggttctgtgggtcgggtgtgggttctgtgggtcgggtgtgggttctgcagaccaggtgcggattctgtgtaggttctgcaggcccagtgtagaggctcacacctgtaatcccagtacttt

SEQ ID NO: 679465 - DNA, 90 bp, Artificial Sequence
  ENSG00000186532_24 (sequence is synthesized)
gttcaaaaccagcctgggcaatatagtgagaccgtatcactacaaaaaagtttttttagttcaccgagcacgagaagctgagatagggtc

SEQ ID NO: 679466 - DNA, 69 bp, Artificial Sequence
  ENSG00000186532_25 (sequence is synthesized)
caaaaaaataacaggttctgttgctgctgagctttcgtcaggaagataagactttcccaacagtccgaa

SEQ ID NO: 679467 - DNA, 120 bp, Artificial Sequence
  ENSG00000186532_26 (sequence is synthesized)
agctttcgtcaggaagataagactttcccaacagtccgaagcctaggatatgagggctgaggaggactcaaaccgttgcagtcagagagacacctattttggtgaatattttttgaaata

SEQ ID NO: 679468 - DNA, 120 bp, Artificial Sequence
  ENSG00000186532_27 (sequence is synthesized)
gttaagtggcctccagtacaaactcccagttcccagaaaagacttaaaactagtatctggagattccaagtcctttaaaaggattttagctgatctgcaggcatctggatgttagcctgg

SEQ ID NO: 679469 - DNA, 120 bp, Artificial Sequence
  ENSG00000186532_28 (sequence is synthesized)
ggttttggctggattccacctcgctcagtgatgatagtctgtttccctggaacattcctgtggttttagtagtaatgagatgtgtgcaccactccagtgggaactgaagctcttagtagt

SEQ ID NO: 679470 - DNA, 120 bp, Artificial Sequence
  ENSG00000186532_29 (sequence is synthesized)
tacattgtaattaaaaaagaattataaaacaagaaatcagcaagcctgcttacctccagagacacaccgttccacttacagtatctagcttcctcgactcctttgttaaaatcgtggagt

SEQ ID NO: 679471 - DNA, 120 bp, Artificial Sequence
  ENSG00000186532_30 (sequence is synthesized)
atgaaccgtgaccagagaagtaaatatggagccgttttattgagcagtttcctccagggatgacggctgtcagtgtgtttcctgccagttttccagtccttactctctgcccttcattct

SEQ ID NO: 679472 - DNA, 120 bp, Artificial Sequence
  ENSG00000186532_31 (sequence is synthesized)
ttctgtactcttggcagagtcagtaaccaaccactaataaaatcaaagttgtagtaaagactttataacacatatgcctccttctgagttgttggttttgttttgttttgttttgttttg

SEQ ID NO: 679473 - DNA, 120 bp, Artificial Sequence
  ENSG00000186532_32 (sequence is synthesized)
agggtgttggaatcacagctgggaaatcagggacgccgtcccggaggaggtgccatttgagccgagtcgaagaacgtgtgggaattttccaggtggactccataagccaggatcaaaagc

SEQ ID NO: 679474 - DNA, 120 bp, Artificial Sequence
  ENSG00000186532_33 (sequence is synthesized)
gggcacacactgttcctttcctaggctcttctgggtattactttttttctatggtgtttttaaaagcatgttgaaacttctttatttcctctttaggagagatctttgccttctgttttg

SEQ ID NO: 679475 - DNA, 74 bp, Artificial Sequence
  ENSG00000186532_34 (sequence is synthesized)
tttatttcctctttaggagagatctttgccttctgttttgctaacaaacataacgctttagaatttcctgtagc

SEQ ID NO: 679476 - DNA, 120 bp, Artificial Sequence
  ENSG00000186532_35 (sequence is synthesized)
aaaagaatttcctcctgggagatatggggaaagcttttagatctcaagtgagtttcccagagagaacttggccaggcagccccacccaccctccagtatagctctccttctggttgttct

SEQ ID NO: 679477 - DNA, 120 bp, Artificial Sequence
  ENSG00000186532_36 (sequence is synthesized)
ctggttcgtcacagcccctttggctgtctcattcccagcactctcagctccaggctctctgccttctccctactctgcatcctcttccttttaaagcgtttgcttgaaccagggctgatt

SEQ ID NO: 679478 - DNA, 120 bp, Artificial Sequence
  ENSG00000186532_37 (sequence is synthesized)
ttacccccagacaacatgtggcattgcctggagacttttttttttttttttttgagaaggggtcttgctgtcttgcccaggctggagtacagtggctcggtcacagctcactgcttcctg

SEQ ID NO: 679479 - DNA, 120 bp, Artificial Sequence
  ENSG00000186532_38 (sequence is synthesized)
caactcctgggctcaagcgatctctggagacattttggattgtcatgacttggaaggggggtgctgctggcatctattcgaaagaggccagaggtgctgctaagcatcctcccgggtaca

SEQ ID NO: 679480 - DNA, 120 bp, Artificial Sequence
  ENSG00000186532_39 (sequence is synthesized)
agacagtgccccccccaccaaccccagcaaagaaggagccagcaacagtgtcaatagtgtcagggtcgagaaaccctgcttttttgctgctgttgtttgttttttgttttaaatcccctg

SEQ ID NO: 679481 - DNA, 120 bp, Artificial Sequence
  ENSG00000186532_40 (sequence is synthesized)
ttctactttgaaggttaaaaggaaagaacagcacgctgatgagctgatgccaaatccacttttgctactgagaccatttagggcccaatttcaggatttccgggtggaacctccaaccct

SEQ ID NO: 679482 - DNA, 120 bp, Artificial Sequence
  ENSG00000186532_41 (sequence is synthesized)
ggtaaagctgcccttggtgtatgtggctatgagaaagtgcttaaagcttcaacctaaggctgtgctgagtgggcctggtacccaagacacagagacattctgtttggtcagagagagaga

SEQ ID NO: 679483 - DNA, 120 bp, Artificial Sequence
  ENSG00000186532_42 (sequence is synthesized)
aaagggctgcagagttaggtcagaggtcagccctaagatggtcaccctaaaatgaaaactgctatgtaaacctgtggtaaataccagatgaaaactttgaggccgggtgtggtagctcac

SEQ ID NO: 679484 - DNA, 120 bp, Artificial Sequence
  ENSG00000186532_43 (sequence is synthesized)
agggcttcttactggaggactagaccttcatctctgcttcttccatagaacactaaaatcatgtcatgctgctattggttgaattggaagcacattaatatctacctaaagtcggactgg

SEQ ID NO: 679485 - DNA, 83 bp, Artificial Sequence
  ENSG00000186532_44 (sequence is synthesized)
gctgagactacaagtgggaggtgggttccactatgttgcccaggctggtcgcaaactcgtggaccaggtgacctgcccacctc

SEQ ID NO: 679486 - DNA, 83 bp, Artificial Sequence
  ENSG00000186532_45 (sequence is synthesized)
ttgtattttttgtggaggtgggttccactatgttgcccaggctggtcgcaaactcgtggaccaggtgacacctgaggatgagc

SEQ ID NO: 679487 - DNA, 120 bp, Artificial Sequence
  ENSG00000186532_46 (sequence is synthesized)
ttgcccttgaaaaccctgccttagagcttgacatcatgggatttttatttaccctgctttatgaaagttgacctttagcttagatttcagggtcaagagaaatcatggccgtacgtgaaa

SEQ ID NO: 679488 - DNA, 120 bp, Artificial Sequence
  ENSG00000186532_47 (sequence is synthesized)
ggtagagttggtcgagttgggaagttaatgttgaaaatacagtgtaaatgtggggaggcctcccctagcgcctttctccactgacagagaaaacagaagaaaacagcagctttattggaa

SEQ ID NO: 679489 - DNA, 120 bp, Artificial Sequence
  ENSG00000186562_0 (sequence is synthesized)
ggtcttctcaaggaaatcccaatctctattccgaagagtcttccctaaaagatggccctgatcaggaagacattttattttctatttgctatgttcttcattttggttcaactgccatca

SEQ ID NO: 679490 - DNA, 120 bp, Artificial Sequence
  ENSG00000186562_1 (sequence is synthesized)
aggaaggagtgcttggagaatgagaagcccgatggaaattgcaggctgaactttctctgctgcagacagaggatctgacaaaccagaccagcacacttctggccttagaagcagacctgg

SEQ ID NO: 679491 - DNA, 120 bp, Artificial Sequence
  ENSG00000186564_0 (sequence is synthesized)
cccttggtcagaggtcccagagggggcccaggcgacttcctctcaaaggacatgagtagtcagacctgccttccatttttttctgcccttaccttggggggatgaagaactctattttga

SEQ ID NO: 679492 - DNA, 120 bp, Artificial Sequence
  ENSG00000186564_1 (sequence is synthesized)
ggattctgtgaaaagggttgcaacccaactctgttctatttctttgcaggagcctgggtgagttctttctccctatcctgggcctctgtagctccatctgtggaatgggagagttggatt

SEQ ID NO: 679493 - DNA, 120 bp, Artificial Sequence
  ENSG00000186564_2 (sequence is synthesized)
aacaccaggctatcccgtagattggaggctgctgttagatgaaactgcaaagtgttctcagtaccctttcctaaatggcctagaatatggctacacttatacatcagttctgaggtaggt

SEQ ID NO: 679494 - DNA, 120 bp, Artificial Sequence
  ENSG00000186564_3 (sequence is synthesized)
gttactagcctcatttttacaaaggcagaaacaaagcgcaaagaaccttgcccaaggtgacagatagggtaagtagtgaaggcaggattggaaccccaggagcctgacttaaggtcgctg

SEQ ID NO: 679495 - DNA, 120 bp, Artificial Sequence
  ENSG00000186564_4 (sequence is synthesized)
ctcttaactactatgcagaccaggaaactgaggctccgaagcggggaagtcacctaatgagggtcacacagccttgctacagcggaggcagctgggattccggcctcgcacgcccgagct

SEQ ID NO: 679496 - DNA, 120 bp, Artificial Sequence
  ENSG00000186564_5 (sequence is synthesized)
ttagccactgtgcggcgctgtcggggcagcagcccaggcatccgctcagttcctgctcacgtccagcgcccatctccccttccgtgccccagaggctgaaatgggcccaatctgtgttga

SEQ ID NO: 679497 - DNA, 120 bp, Artificial Sequence
  ENSG00000186564_6 (sequence is synthesized)
agctgcttgtttctgggtcctggagggaggccgggggagaaagaggtctaataggatgggcaggaacccggctagcgagaaacaaggcacagggccaaccttagttgcacaagacttttg

SEQ ID NO: 679498 - DNA, 120 bp, Artificial Sequence
  ENSG00000186564_7 (sequence is synthesized)
agagatgaaggcaacacttggtggaggtcagggttcactgagggggtgtcgggcagggggcggaggaggtcctgccgcctgtcggtggggcccagaaccctgggagccaggaaggtgggg

SEQ ID NO: 679499 - DNA, 120 bp, Artificial Sequence
  ENSG00000186564_8 (sequence is synthesized)
ggtgtccagtcctcagggcaactggggccagggagaggggagggagaaattaagcggattcccagacccatgaacagacatccagacaaatgccgtttccacagagactcacggagagtg

SEQ ID NO: 679500 - DNA, 120 bp, Artificial Sequence
  ENSG00000186564_9 (sequence is synthesized)
agatagtcacagagactgagacaaacggatgccgagatccagagggtcggagaacaggcaaactcggagcagtagaccggcccgcgccccgggaacgcggccacagcggccggcgctctg

SEQ ID NO: 679501 - DNA, 120 bp, Artificial Sequence
  ENSG00000186564_10 (sequence is synthesized)
cccggcctctccgcgcggagaggggtggcgggcccgacagcggagggaggagagggcgccgccgcaatctcacctctcccaggcccaaggctgcgggcgccaagttcgctcctggtgatc

SEQ ID NO: 679502 - DNA, 120 bp, Artificial Sequence
  ENSG00000186564_11 (sequence is synthesized)
gatcactcgaatgcgtctcccctcgggctggaagccgtgcgggctcgggtgggcgccggcgggccgcgctggggcggcgtgggtcccggcgtctcagcctcgcgctcccactgcgcttcg

SEQ ID NO: 679503 - DNA, 120 bp, Artificial Sequence
  ENSG00000186564_12 (sequence is synthesized)
ggtggcccgggcgccgccttggggagaggacgggtggggaccgccgccacttccctggctgcggctggcgcccgagtgagccttaacatccaggggctgagcgttctgaaggcggcggct

SEQ ID NO: 679504 - DNA, 120 bp, Artificial Sequence
  ENSG00000186564_13 (sequence is synthesized)
tcagggagcacagggtgcaggagcggcggcgaagacaagggcccgcctccggccactcgagcccagctcccgccgcggcggcggtttgttcccgccgggtccctcagcggaggcgctacg

SEQ ID NO: 679505 - DNA, 120 bp, Artificial Sequence
  ENSG00000186564_14 (sequence is synthesized)
cccgcccctgtcgcctcgccccaccccgcccagggagctccgccctagcccgcagctcttccgccttaggcagccgctaggcgggagggacaatcccccaccaccaaccactgccacccc

SEQ ID NO: 679506 - DNA, 120 bp, Artificial Sequence
  ENSG00000186564_15 (sequence is synthesized)
gaggggactaggggctgaggcccgcccaggtaagggaaagcctcagctccttccgttgcgccccagcggcgggtcccagctcggattcccggggtagtggcgggggccgccggcgggtcg

SEQ ID NO: 679507 - DNA, 80 bp, Artificial Sequence
  ENSG00000186564_16 (sequence is synthesized)
tgccctggaaggtgagcgcggccgagctgggccgccagggggcgctgcggagccgggggacacccctccctgcctgcctc

SEQ ID NO: 679508 - DNA, 120 bp, Artificial Sequence
  ENSG00000186564_17 (sequence is synthesized)
gccccagaggcagcgcggccgagcccgagccgctgccggagcggagccggagagtggcggcggcggcggcagcggcaccatgaccctgggcagctgctgctgcgagatcatgtcctccga

SEQ ID NO: 679509 - DNA, 120 bp, Artificial Sequence
  ENSG00000186564_18 (sequence is synthesized)
agatcatgtcctccgagagctccccggccgcgctgtccgaggccgacgcagacatagacgtggtgggcggcggcagcggcgggggggagctcccagctcgctccgggccccgcgcccccc

SEQ ID NO: 679510 - DNA, 120 bp, Artificial Sequence
  ENSG00000186564_19 (sequence is synthesized)
ggcccgcggcgcagcggggcccgggccgggaccgccgtcggggggcgcggcgacgcggagcccgctggtgaagccgccctactcgtacatcgcgctcatcaccatggccatcctgcagag

SEQ ID NO: 679511 - DNA, 120 bp, Artificial Sequence
  ENSG00000186564_20 (sequence is synthesized)
atcgcgctcatcaccatggccatcctgcagagccccaagaagcggctgacgttgagcgagatctgcgagttcatcagcggccgcttcccctactaccgggagaagttccccgcctggcag

SEQ ID NO: 679512 - DNA, 120 bp, Artificial Sequence
  ENSG00000186564_21 (sequence is synthesized)
aacagcatccgccacaacctctctctcaacgactgcttcgtcaagatcccccgcgagccgggcaacccgggcaagggcaactactggacgctggacccggagtcggccgacatgttcgac

SEQ ID NO: 679513 - DNA, 120 bp, Artificial Sequence
  ENSG00000186564_22 (sequence is synthesized)
tgttcgacaacggcagcttcctgcggcgtcgcaagcgcttcaagcggcagcccctgccgccgccgcacccacacccgcaccctcacccggagctgctgctgcgtggcggggccgcggcgg

SEQ ID NO: 679514 - DNA, 120 bp, Artificial Sequence
  ENSG00000186564_23 (sequence is synthesized)
ggatcccggcgctttcctgcccggcttcgctgcctacggcgcctacggctacggctacgggctggctctcccggcctacggcgcacccccgccggggccggccccgcatccgcacccgca

SEQ ID NO: 679515 - DNA, 120 bp, Artificial Sequence
  ENSG00000186564_24 (sequence is synthesized)
cacgccttcgctttcgccgcggcagccgccgccgctccttgccagctgtcggtacccccaggccgcgccgccgcgcctccacccggacctccgacggcctcggtgttcgcaggcgcggga

SEQ ID NO: 679516 - DNA, 120 bp, Artificial Sequence
  ENSG00000186564_25 (sequence is synthesized)
ccccagctcctgcgcctgcctcaggctcgggcccgggcccgggccccgcaggcctgcccgccttcctgggcgcggagctgggctgcgccaaagccttctacgcggcgtccctgagtcctc

SEQ ID NO: 679517 - DNA, 120 bp, Artificial Sequence
  ENSG00000186564_26 (sequence is synthesized)
ccgcagccggcaccgcggcgggtctgcccaccgcacttctgcgccagggcctcaagacggacgcgggcggtggtgcaggcggcgggggcgccggggcagggcagaggccttccttctcta

SEQ ID NO: 679518 - DNA, 120 bp, Artificial Sequence
  ENSG00000186564_27 (sequence is synthesized)
tctatagaccacatcatgggccacggtggcggcggggcagcacccccgggcgccggcgagggctctccgggaccgccattcgcggcagccgcgggtcctgggggccaagcccaggtcttg

SEQ ID NO: 679519 - DNA, 120 bp, Artificial Sequence
  ENSG00000186564_28 (sequence is synthesized)
gccatgctgactgctccggccctggctcccgttgctggccacattcgcctctcgcatcccggggacgcgctgctgtcctcagggtcccggtttgccagcaaagtcgccggccttagtggc

SEQ ID NO: 679520 - DNA, 120 bp, Artificial Sequence
  ENSG00000186564_29 (sequence is synthesized)
tgccacttctgaccgcagcaggcccagggccggttaggtccgcactcctcagcctctcccgggagttcctgcggtcccagcggaactcagggagtctatttatgaagtctccagaccttg

SEQ ID NO: 679521 - DNA, 120 bp, Artificial Sequence
  ENSG00000186564_30 (sequence is synthesized)
ggccggcacgcgtgacacggcacttcaggctccacgcacagaatctcgcagatagttgggactaagcgggctctatcgctcagggcgacaggcccggggctacgcgaagaagtcgcaggc

SEQ ID NO: 679522 - DNA, 120 bp, Artificial Sequence
  ENSG00000186564_31 (sequence is synthesized)
caagattctttacagtttgagaaataaaagcaggggggtgggggcttcgtttttttccctgcctctgcgcctctcggggaacacattccgggagagatgcctggccaggctccacggatc

SEQ ID NO: 679523 - DNA, 120 bp, Artificial Sequence
  ENSG00000186564_32 (sequence is synthesized)
ccgccagaaacaccaacagagggtctccctttctgcctttcccctctcacttcttccccaacgttgagaccctgcttgtccaatattataatttaaagacatctattatctgctttgtgc

SEQ ID NO: 679524 - DNA, 120 bp, Artificial Sequence
  ENSG00000186564_33 (sequence is synthesized)
ttttttttttttttttttgctgttctccaaggaagttcgtttcctctgaagcctaaaccagtgtctacgcaggcggagctgaacggagaggtgaagcagggggtctttatattccctgca

SEQ ID NO: 679525 - DNA, 120 bp, Artificial Sequence
  ENSG00000186564_34 (sequence is synthesized)
cagggggtctttatattccctgcagaaaccctggatcccactccactgaggaaaatcctttctcttttgtgtttgggtgcttttaaaggaatttctttcctttcccttggctggctgggt

SEQ ID NO: 679526 - DNA, 120 bp, Artificial Sequence
  ENSG00000186564_35 (sequence is synthesized)
ccagccatctccggccagcaaccctgtcagtgttccaccctgtcccaggccctgtgatatttattgtggctaaaggcaatgagattgggtggaagagaagggtctgggccagggactgga

SEQ ID NO: 679527 - DNA, 120 bp, Artificial Sequence
  ENSG00000186564_36 (sequence is synthesized)
gaggtgggggtggagtgggcaagggcacaccctgtggcagggggtcctataattttgtgtaaatatctgtacagcgcgctgctctcggcgttctctgtccactgggtgtgcattgattta

SEQ ID NO: 679528 - DNA, 120 bp, Artificial Sequence
  ENSG00000186564_37 (sequence is synthesized)
aacttctccactgtggggaagctctgtgaaatcgtctgatggtctgtgtggaagaaaagaaaaatctgtctgccgcctatttcccattggtgtcgattgaataaatgtatgtgaacttca

SEQ ID NO: 679529 - DNA, 120 bp, Artificial Sequence
  ENSG00000186566_0 (sequence is synthesized)
ggagagcgtcgtcctgagaggagtgaaggcggcaaaatggcggaccgcttctcccgcttcaacgaagaccgagactttcagggtaatcactttgatcagtatgaggaaggacacttggaa

SEQ ID NO: 679530 - DNA, 120 bp, Artificial Sequence
  ENSG00000186566_1 (sequence is synthesized)
attgaacaagcgtcacttgacaagcctatagaatcggataatattggacaccgcttactccagaaacatgggtggaagctgggccagggattgggaaaatctcttcaggggagaacagat

SEQ ID NO: 679531 - DNA, 120 bp, Artificial Sequence
  ENSG00000186566_2 (sequence is synthesized)
cccattccaatcgttgtcaagtatgatgtcatgggcatgggtcgcatggaaatggagcttgattatgctgaagatgctaccgaacggcgccgtgtcctagaagtagaaaaagaagacaca

SEQ ID NO: 679532 - DNA, 120 bp, Artificial Sequence
  ENSG00000186566_3 (sequence is synthesized)
gaagagctgagacaaaagtacaaggattatgttgacaaagagaaggcaattgccaaagccttggaagacctcagagccaacttttattgtgaactgtgtgataagcaatatcagaaacat

SEQ ID NO: 679533 - DNA, 120 bp, Artificial Sequence
  ENSG00000186566_4 (sequence is synthesized)
caggaatttgataaccatatcaactcctatgatcatgcacacaagcagagattaaaagatctgaagcagagagagtttgctcgaaatgtctcttcaagatcccgcaaggatgagaaaaaa

SEQ ID NO: 679534 - DNA, 120 bp, Artificial Sequence
  ENSG00000186566_5 (sequence is synthesized)
caggaaaaagcccttcggcggctccatgagttggcagagcaaagaaaacaagctgaatgtgcacctggaagtggtcccatgttcaaaccaaccacagtggctgtagatgaagaaggtgga

SEQ ID NO: 679535 - DNA, 120 bp, Artificial Sequence
  ENSG00000186566_6 (sequence is synthesized)
gaagatgataaagatgaatcagctacaaatagtggcacaggtgccactgcttcttgtggcctgggatctgaattctccacagataaaggaggccctttcactgcagtacaaatcactaat

SEQ ID NO: 679536 - DNA, 120 bp, Artificial Sequence
  ENSG00000186566_7 (sequence is synthesized)
accactggactggcccaggctcctgggttagcctcccaaggcatcagctttggcattaagaataatctggggaccccattgcaaaaattgggagtgtcattttcttttgccaaaaaggct

SEQ ID NO: 679537 - DNA, 120 bp, Artificial Sequence
  ENSG00000186566_8 (sequence is synthesized)
cctgtcaaactcgaatcaatagcatcagttttcaaggaccatgcggaggaagggacctctgaagatggaacaaaacccgatgagaagagttctgaccaaggactgcagaaggtaggagac

SEQ ID NO: 679538 - DNA, 120 bp, Artificial Sequence
  ENSG00000186566_9 (sequence is synthesized)
tctgatgggagcagtaatcttgatggtaaaaaagaggatgaagaccctcaggatggagggtcccttgcctcaacattatccaaattaaaaaggatgaaacgagaagaaggagctggggct

SEQ ID NO: 679539 - DNA, 120 bp, Artificial Sequence
  ENSG00000186566_10 (sequence is synthesized)
acagagcctgagtattaccactacatccccccagcacactgcaaagtaaaacctaattttccctttctactttttatgagagccagtgaacaaatggatggtgataatactacacaccca

SEQ ID NO: 679540 - DNA, 120 bp, Artificial Sequence
  ENSG00000186566_11 (sequence is synthesized)
aagaatgccccagagagtaaaaaaggcagttctcccaagcctaaaagctgcatcaaggcggcagcaagccaaggagcagaaaagacagttagtgaagtctctgagcagccgaaggaaacc

SEQ ID NO: 679541 - DNA, 120 bp, Artificial Sequence
  ENSG00000186566_12 (sequence is synthesized)
agcatgaccgagccctcagaaccaggaagcaaagctgaggcaaagaaggccttaggaggggatgtaagtgatcagagtttagaaagtcatagtcagaaggtttcagagacccaaatgtgt

SEQ ID NO: 679542 - DNA, 120 bp, Artificial Sequence
  ENSG00000186566_13 (sequence is synthesized)
gagtccaactcttctaaagaaacctctctggccaccccagcagggaaagaaagccaagaaggacccaaacatcctactggtcccttcttcccagttttgagcaaagatgaaagcactgcc

SEQ ID NO: 679543 - DNA, 120 bp, Artificial Sequence
  ENSG00000186566_14 (sequence is synthesized)
ctccagtggccatcagaactattaattttcaccaaggcagaaccctccatttcatacagttgtaaccctttatattttgactttaaactttcaaggaacaaagatgccagaactaaagga

SEQ ID NO: 679544 - DNA, 120 bp, Artificial Sequence
  ENSG00000186566_15 (sequence is synthesized)
acagaaaaaccaaaggatataggaagctcctcaaaggaccatctccaaggcctagatcctggtgagccaaataaaagcaaggaagtgggcggagagaaaatagtacgttcctcaggaggc

SEQ ID NO: 679545 - DNA, 120 bp, Artificial Sequence
  ENSG00000186566_16 (sequence is synthesized)
agaatggacgcacctgcttcagggtctgcctgtagcggcctgaacaagcaggagcctgggggtagccatgggtctgagacagaagacacagggagaagccttcccagcaagaaagaacga

SEQ ID NO: 679546 - DNA, 120 bp, Artificial Sequence
  ENSG00000186566_17 (sequence is synthesized)
tctgggaagtcccaccggcacaaaaagaaaaagaagcacaaaaaatccagcaaacacaaacgtaaacacaaggctgacacagaagagaaaagctctaaggcagagtcaggggagaaatct

SEQ ID NO: 679547 - DNA, 120 bp, Artificial Sequence
  ENSG00000186566_18 (sequence is synthesized)
aagaagcgcaagaaacgaaaacgaaagaagaataagtcatcagccccagcagattctgaacgaggacccaaaccagaaccccctgggagtggcagtcccgcaccaccaagaagaaggcgg

SEQ ID NO: 679548 - DNA, 120 bp, Artificial Sequence
  ENSG00000186566_19 (sequence is synthesized)
agagctcaagatgactcccagcggagatccctcccagctgaagaggggagcagtggcaaaaaggatgaaggtgggggtggtagcagctcccaagaccatggtgggaggaaacacaaaggt

SEQ ID NO: 679549 - DNA, 120 bp, Artificial Sequence
  ENSG00000186566_20 (sequence is synthesized)
gaacttccaccttcatcctgccagcgaagagcaggcaccaaacggagcagccggtctagccatcggagccaacccagtagtggagatgaggatagtgatgatgcttcctcacaccggctg

SEQ ID NO: 679550 - DNA, 120 bp, Artificial Sequence
  ENSG00000186566_21 (sequence is synthesized)
caccagaagtctccatcccagtacagtgaggaagaagaagaggaagattcaggcagtgagcattcccgcagccgctcaaggtctggccggcgccattcctcgcatcgttcctcccggcgt

SEQ ID NO: 679551 - DNA, 120 bp, Artificial Sequence
  ENSG00000186566_22 (sequence is synthesized)
tcttactcaagtagctcagatgcctcttcagaccagagctgctatagtagacagcgcagttactctgatgacagctacagtgactacagtgacagatcacgaaggcactccaagcgctcc

SEQ ID NO: 679552 - DNA, 120 bp, Artificial Sequence
  ENSG00000186566_23 (sequence is synthesized)
catgactcagatgactcagactatgccagctccaaacaccgatcaaaacggcacaaatattcatcttctgatgatgactatagcctcagttgcagccagtcccgaagccgatctcggagt

SEQ ID NO: 679553 - DNA, 120 bp, Artificial Sequence
  ENSG00000186566_24 (sequence is synthesized)
cataccagagagcgctcaagatcccggggccgcagccgcagcagcagttgtagtcgtagtcgaagcaagcggagaagccgtagcaccacagcccacagctggcaacggagccggagctat

SEQ ID NO: 679554 - DNA, 120 bp, Artificial Sequence
  ENSG00000186566_25 (sequence is synthesized)
agccgggaccgcagccgcagcaccaggagcccttcccagagatcaggctccaggaagagatcatggggtcacgagagccctgaggagaggcattctgggcgtcgggacttcattcgttct

SEQ ID NO: 679555 - DNA, 120 bp, Artificial Sequence
  ENSG00000186566_26 (sequence is synthesized)
aagatctaccgctcccagtccccccactatttccgatcaggccggggagaaggtcctgggaagaaagatgatggcagaggagatgacagtaaagcaacaggtccaccttcccagaacagc

SEQ ID NO: 679556 - DNA, 120 bp, Artificial Sequence
  ENSG00000186566_27 (sequence is synthesized)
aacattggcacaggaagagggtcagaaggtgactgcagtcctgaagacaagaactctgtcactgccaaactgctactggagaagatccagtcaaggaaagtggagaggaaacctagtgtg

SEQ ID NO: 679557 - DNA, 120 bp, Artificial Sequence
  ENSG00000186566_28 (sequence is synthesized)
cactgatagggaagctcccagctacccgaaagcccaataagaagtgtgaagagtctggcttggaaaggggggaagagcaagaacagtcagagacagaagaggggcccccagggagtagtg

SEQ ID NO: 679558 - DNA, 120 bp, Artificial Sequence
  ENSG00000186566_29 (sequence is synthesized)
atgccctatttgggcatcagttcccttcagaggaaacaactggccccttattagacccacccccagaagagtcaaagtctggagaagctactgctgatcaccctgtggctccactaggca

SEQ ID NO: 679559 - DNA, 120 bp, Artificial Sequence
  ENSG00000186566_30 (sequence is synthesized)
ccccagcacattctgactgctaccctggggacccaaccatctcccataactacctccccgaccccagtgatggggacaccctggagtccctggatagcagcagtcagccaggccctgtgg

SEQ ID NO: 679560 - DNA, 120 bp, Artificial Sequence
  ENSG00000186566_31 (sequence is synthesized)
agtccagcttgctgcctatagcaccagaccttgagcatttccccagttatgcacctcccagtggggatcctagtattgagtcaacagatggggctgaggatgcttcactggcccccctgg

SEQ ID NO: 679561 - DNA, 120 bp, Artificial Sequence
  ENSG00000186566_32 (sequence is synthesized)
aaagccagcccatcaccttcacccctgaggagatggagaagtacagcaagctccagcaggctgctcagcaacacatccagcagcagcttctggccaagcaagtaaaggcctttccagcct

SEQ ID NO: 679562 - DNA, 120 bp, Artificial Sequence
  ENSG00000186566_33 (sequence is synthesized)
cagctgccctggccccagccacaccagccctgcaacccatccacattcagcagccagctacagcctctgccacctccatcacaactgttcagcatgccatcctacaacatcatgctgccg

SEQ ID NO: 679563 - DNA, 120 bp, Artificial Sequence
  ENSG00000186566_34 (sequence is synthesized)
cagctgctgccgccatcggcattcaccctcacccccatccccaaccacttgcccaggtgcatcatattccccagccccatctgacccccatttctttgtcccacctcactcactcaatca

SEQ ID NO: 679564 - DNA, 120 bp, Artificial Sequence
  ENSG00000186566_35 (sequence is synthesized)
tccctggccaccctgccacctttctcgctagccatcccatccacatcattcccgcctcagccatccatcctgggcccttcacctttcaccctgtcccacatgctgccctctaccccaccc

SEQ ID NO: 679565 - DNA, 120 bp, Artificial Sequence
  ENSG00000186566_36 (sequence is synthesized)
tacttgctccacggcctgctgcagcagctgccactgcacttcaccttcacccactacttcaccccatcttctcaggtcaggacctgcaacatccccccagccatggcacgtgagttgggg

SEQ ID NO: 679566 - DNA, 120 bp, Artificial Sequence
  ENSG00000186566_37 (sequence is synthesized)
gatgggatcctaggtagggccaggggaggagacccataaatgttcccttgggggtgttgagccattaataccagcaagtagaagctgggatgggcagtgtctgacagccaaagaattgag

SEQ ID NO: 679567 - DNA, 120 bp, Artificial Sequence
  ENSG00000186566_38 (sequence is synthesized)
ttttggcttgcaggggtgggtttagatttgaagtttgctttcagtttactatcagggatttctttttcctgtcctcctctcaatttgtccctccctcttctgtgtttctaagctagggaa

SEQ ID NO: 679568 - DNA, 120 bp, Artificial Sequence
  ENSG00000186566_39 (sequence is synthesized)
caccagtaagtgctacccacccctctgcagcaacatctccaaactgtcaagtttagataatcccctcctccctctgcttttttcctctgctcttcccttctgtaaattttaaaacatttt

SEQ ID NO: 679569 - DNA, 120 bp, Artificial Sequence
  ENSG00000186566_40 (sequence is synthesized)
cctcccctctggccagtgggttgtcaccagagcacttgctgtgggcccatctggtcttgccttctcagcgccacagggaaggccaagctgttctagtggtggaagtgccaccattttggg

SEQ ID NO: 679570 - DNA, 120 bp, Artificial Sequence
  ENSG00000186566_41 (sequence is synthesized)
gtagtatctttgaccatctttggtgacgttacgttatcccaggtgaggtggaaagcgtctcacctggaacctgatataactcaggctgcaattccatccagttcccacatcaacggagcc

SEQ ID NO: 679571 - DNA, 120 bp, Artificial Sequence
  ENSG00000186566_42 (sequence is synthesized)
acacatttggcactgttatcttggtatccctcatcccagaagaggcatctccatatcccagaaaagaagatcctatcatgaataaaagctgtatggcccagagaggagctcatgtgtcta

SEQ ID NO: 679572 - DNA, 120 bp, Artificial Sequence
  ENSG00000186566_43 (sequence is synthesized)
aagtgaagggtatattttcttctgttgtgttgatgtttccttcttaatttataggatttttttaatgtaaaaaattgcactgaactctataaacgtaaatgctgctttttgtagctcata

SEQ ID NO: 679573 - DNA, 120 bp, Artificial Sequence
  ENSG00000186566_44 (sequence is synthesized)
taaaaaaggttccatatttgtagtatactgcaataatattttttacatccagctctttaagtgatcctcgttctggtggctttgtgtaaatatgtttgccctagttgaattaagaaactc

SEQ ID NO: 679574 - DNA, 120 bp, Artificial Sequence
  ENSG00000186566_45 (sequence is synthesized)
taaaggttataaaatgaaaacaaaaaataaaatatttgttttctgctagatgcaaaactgactaagcatgtatattttaccaaacttatgtattttttgaagttatgaactataaaatgt

SEQ ID NO: 679575 - DNA, 120 bp, Artificial Sequence
  ENSG00000186566_46 (sequence is synthesized)
taaaacattttttgctgggacaaaatgttaagtaatttgcagtatgtagtgcccccagtattgggatttttgagctaatgggcagcagtcagctgggggcttctgagggatgctcatctt

SEQ ID NO: 679576 - DNA, 120 bp, Artificial Sequence
  ENSG00000186566_47 (sequence is synthesized)
taacagtctccctcatgtacttttgctgttttacacagagaaacaggtagaccccacagaggagaaggaggggattcaacagctttattgtctggaagcagtgagatttggtgattgtct

SEQ ID NO: 679577 - DNA, 120 bp, Artificial Sequence
  ENSG00000186566_48 (sequence is synthesized)
ggggggattcctgggtttccctgggtaccttgttccaggcagtcagtccatttgccttcctagtacttagccccctctgacaattttttttttaatgtgccttttgggttggtagaaacg

SEQ ID NO: 679578 - DNA, 120 bp, Artificial Sequence
  ENSG00000186566_49 (sequence is synthesized)
gaagtagaagtaggctggaggatgagttgggacagtcttccttttgttgggaggtgagcacatttacagatattttgcttcatagtttccatgccctctgcccagctcagtttagacagt

SEQ ID NO: 679579 - DNA, 120 bp, Artificial Sequence
  ENSG00000186566_50 (sequence is synthesized)
aaacgttccttgtttcttttctcccatgacactgacaagaggaattaccacctcagcctcttttgcccctcttcttgcctttcacccaggctctcagccctaattaacacactgacccaa

SEQ ID NO: 679580 - DNA, 120 bp, Artificial Sequence
  ENSG00000186566_51 (sequence is synthesized)
aggtgcttgtgttgcaggtcccatctcctttgatgaggttaacaattcccactttggcattttcctaactattcgtgtggctagaattggttggttggtcacttgacaagaaaaaccata

SEQ ID NO: 679581 - DNA, 120 bp, Artificial Sequence
  ENSG00000186566_52 (sequence is synthesized)
cttacctgggccaaggctctgttcctgccttcgcaaattctcaaaagagtaaagtttatgaaaagaaagtggcaggcaaacacaactcttgactgccctcccaccctcctacctgttcag

SEQ ID NO: 679582 - DNA, 120 bp, Artificial Sequence
  ENSG00000186566_53 (sequence is synthesized)
tactcatctgattcagaagcatcacttcttggataactagcactggaaaaatgaaatcatctgtgtaagtgaagggactcatttttctttgctttcagcccatgtaaataaataatacag

SEQ ID NO: 679583 - DNA, 120 bp, Artificial Sequence
  ENSG00000186566_54 (sequence is synthesized)
tattaacattttcgtgctgcttcccattagcttgtagattgagccatactctggctgcctctttgccttcctaggggcattttctttaacttccagaatagtgattttaaaagtaaaaat

SEQ ID NO: 679584 - DNA, 120 bp, Artificial Sequence
  ENSG00000186566_55 (sequence is synthesized)
aaaaataaaccttacttacaagcataacagattgtatttaactttatcacatatgatagagatatatatgctgtaaaatgagggaaaggaactttctaataaaccaatgatttgtggaaa

SEQ ID NO: 679585 - DNA, 120 bp, Artificial Sequence
  ENSG00000186566_56 (sequence is synthesized)
tgacaagcctatagaatcgcagttggcccatattagctaagcagccatgatctgtgaattgaaaacaagacaaaaaaaaaaacgaccattagtgattggacagtttcttactttgtgtta

SEQ ID NO: 679586 - DNA, 120 bp, Artificial Sequence
  ENSG00000186566_57 (sequence is synthesized)
attgaacaagcgtcacttgacaagcctatagaatcggtaagataatcagtgcttaatttcgggtcttagctagttagttaggtagtgttcgtgtgacacttgatgtgagtgaagttaaac

SEQ ID NO: 679587 - DNA, 120 bp, Artificial Sequence
  ENSG00000186566_58 (sequence is synthesized)
ttaatatgttgggaaatcagtccaaaaaaatctagaaacacattagaatttcaatggaaaaatatctttttggcccataccgatactttgttgaaggtagcaagttaaagtttagcattt

SEQ ID NO: 679588 - DNA, 120 bp, Artificial Sequence
  ENSG00000186566_59 (sequence is synthesized)
tgtgaattgaataaaggagtaaaatgtattttgatcctttatagcttcacctttcttgggcaatataattatgtatgaaatgttcctacataagtagaatatgtatggaaattttttttt

SEQ ID NO: 679589 - DNA, 120 bp, Artificial Sequence
  ENSG00000186566_60 (sequence is synthesized)
taattttgccatagtaatttgaaattaatcccaactggacgtcagccaaggtggttaattgggtttaaactaggaaaggaaggtcttgagtgtaagctgtgagaatggcttgtgtttggt

SEQ ID NO: 679590 - DNA, 120 bp, Artificial Sequence
  ENSG00000186566_61 (sequence is synthesized)
tcactgtagctttctggtctctgcactccaaggcaagatctctaaccacccaaaacccaatgtgtaaaatgagctgttggtttggctttgcaccttaccttgattatgtgttcctgttac

SEQ ID NO: 679591 - DNA, 120 bp, Artificial Sequence
  ENSG00000186566_62 (sequence is synthesized)
gtccttaaacaaacaaacaaacagagcattcgggaggcttaatcttcttctaacttctagttagggaaggtaacagtaaaaaaatgtttttctttcctctatgagttcaaagaacacttt

SEQ ID NO: 679592 - DNA, 120 bp, Artificial Sequence
  ENSG00000186566_63 (sequence is synthesized)
atcattgaatatggagatgccagacagtttaatgtgcaatatttggttttaatgcagaaatttgtggtttcgtcagctttataaattgatttcaggaaatatgggattttcaaatgattt

SEQ ID NO: 679593 - DNA, 120 bp, Artificial Sequence
  ENSG00000186566_64 (sequence is synthesized)
acctttgttttctgctaacattacttatattgtgacttttaatcttttctggattaatactataaattacattttaatacatatagaatactttgtgtttagaatttttcagtgttgtcc

SEQ ID NO: 679594 - DNA, 120 bp, Artificial Sequence
  ENSG00000186566_65 (sequence is synthesized)
attgggtgaatatgatcattttttctgatacagttagtgcttattttagccttgtcttggtacttcacaataactgtaaaaagcaaagaattggacaaagaaagggctgcagatgtttcc

SEQ ID NO: 679595 - DNA, 120 bp, Artificial Sequence
  ENSG00000186566_66 (sequence is synthesized)
aataccttgaccccttaaacgaaagctgacatttaattgttgtttgtagcatttttttcatgcagtttacattgaaataccttttcgaatgtgctcctgggaagatgagacattatgtat

SEQ ID NO: 679596 - DNA, 120 bp, Artificial Sequence
  ENSG00000186566_67 (sequence is synthesized)
gttggtttctacccctacatgcactaatggttctttactgttaacttattgctaggcctgtttcattctaacatcttagcatttttgttagactacatgttgaaatgcatcactcagtct

SEQ ID NO: 679597 - DNA, 120 bp, Artificial Sequence
  ENSG00000186566_68 (sequence is synthesized)
gtgcttgagctcattttatttttctgtttaatcaacttaatttcttgttttactaacctcactgttttttcagtttaatattggctgcatgctagttaaatatttatattatatatatta

SEQ ID NO: 679598 - DNA, 120 bp, Artificial Sequence
  ENSG00000186566_69 (sequence is synthesized)
tttttttaaaccaatcaagtctagcctggattttgctctgattgttttttcatttctagtggtggggcagtcttacacttataacttactttgtatcatgaaagcctgacacataaacaa

SEQ ID NO: 679599 - DNA, 120 bp, Artificial Sequence
  ENSG00000186566_70 (sequence is synthesized)
aacaactaaacacagtgtagattttctttaaaaaaaaaaaaatcttaaagtggtgctgtttaggtggtggatatgactgtataagtaccttgattttatgctttttagtgttattttaaa

SEQ ID NO: 679600 - DNA, 120 bp, Artificial Sequence
  ENSG00000186566_71 (sequence is synthesized)
acttcataaatgtattcttccccttttccctttccccttttactccatttaaaaatgttatatacaaaagttgcccaacacaccatcagaaaggacccttaccccatatgttcttcccat

SEQ ID NO: 679601 - DNA, 120 bp, Artificial Sequence
  ENSG00000186566_72 (sequence is synthesized)
gtaaaatactagccagcttttctttttacattaatgtccctcttattgggcacatttaccctattattagcacctttttgcatgcatatatgtagaagtatctcttgctcatcatctgtt

SEQ ID NO: 679602 - DNA, 120 bp, Artificial Sequence
  ENSG00000186566_73 (sequence is synthesized)
taaatgtctctaggaagggaagaatatattattggaatatttttggtttgtctctctgttctgtctgtcaggataatattggacaccgcttactccagaaacatgggtggaagctgggcc

SEQ ID NO: 679603 - DNA, 120 bp, Artificial Sequence
  ENSG00000186566_74 (sequence is synthesized)
gggtcacatgccccattagtgacagaactgtaattcagatcccctgagtttcatgttgccactctttacaagtatattttttcttttggaattcattaatcaagaaatactcatgtaggc

SEQ ID NO: 679604 - DNA, 120 bp, Artificial Sequence
  ENSG00000186566_75 (sequence is synthesized)
tgtctttctggtccagtgaacactgcatatagtaccttctgtcttaatgtgctggcatgatgctagacttaggcatggcagtaattgatgacgcatgtgataatgctgcagagggagaat

SEQ ID NO: 679605 - DNA, 120 bp, Artificial Sequence
  ENSG00000186566_76 (sequence is synthesized)
tctcatctgatatttcactgaaagcctagtcttgtgttttgacataaggataaaatgccaagcccactttgctaagttaaaaatcactgattttaggccgggcacagtggctcaacgcct

SEQ ID NO: 679606 - DNA, 120 bp, Artificial Sequence
  ENSG00000186567_0 (sequence is synthesized)
cctctgtctgtgctcccatcccagggagtataggtggagcctccagagcccatggacagggcatgctggggctgggccagccccagcggtgtctctaaggcacccctgggatccccactg

SEQ ID NO: 679607 - DNA, 120 bp, Artificial Sequence
  ENSG00000186567_1 (sequence is synthesized)
agctggcctacttcagacagccagggcccacccctctggcccccttagtgtccagctcgtggccccttggcatttccacaagacgccaagatggagattcccatggggacccagggctgc

SEQ ID NO: 679608 - DNA, 120 bp, Artificial Sequence
  ENSG00000186567_2 (sequence is synthesized)
ttctcaaagagcctcctgctctcagcctcaatcctggtcctctggatgctccaaggctcccaggcagctctctacatccagaagattccagagcagcctcaaaagaaccaggaccttctc

SEQ ID NO: 679609 - DNA, 120 bp, Artificial Sequence
  ENSG00000186567_3 (sequence is synthesized)
ctgtcagtccagggtgtcccagacaccttccaggacttcaactggtacctgggggaggagacgtacggaggcacgaggctatttacctacatccctgggatacaacggcctcagagggat

SEQ ID NO: 679610 - DNA, 120 bp, Artificial Sequence
  ENSG00000186567_4 (sequence is synthesized)
ggcagtgccatgggacagcgagacatcgtgggcttccccaatggttccatgctgctgcgccgcgcccagcctacagacagtggcacctaccaagtagccattaccatcaactctgaatgg

SEQ ID NO: 679611 - DNA, 120 bp, Artificial Sequence
  ENSG00000186567_5 (sequence is synthesized)
actatgaaggccaagactgaggtccaggtagctgaaaagaataaggagctgcccagtacacacctgcccaccaacgctgggatcctggcggccaccatcattggatctcttgctgccggg

SEQ ID NO: 679612 - DNA, 120 bp, Artificial Sequence
  ENSG00000186567_6 (sequence is synthesized)
gcccttctcatcagctgcattgcctatctcctggtgacaaggaactggaggggccagagccacagactgcctgctccgaggggccagggatctctgtccatcttgtgctcggctgtatcc

SEQ ID NO: 679613 - DNA, 120 bp, Artificial Sequence
  ENSG00000186567_7 (sequence is synthesized)
ccagtgccttcagtgacgcccagcacatggatggcgaccacagagaagccagaattgggccctgctcatgatgctggtgacaacaacatctatgaagtgatgccctctccagtcctcctg

SEQ ID NO: 679614 - DNA, 120 bp, Artificial Sequence
  ENSG00000186567_8 (sequence is synthesized)
cctgcaggcggagccagagaaccaccagtaccagcaggacctgctaaaccccgaccctgccccctactgccagctggtgccaacttcctgatgggtcctgggccaggccagccagggaga

SEQ ID NO: 679615 - DNA, 120 bp, Artificial Sequence
  ENSG00000186567_9 (sequence is synthesized)
agacaaggccccagccctcctctgggagcctcacacctgagaccagcaggacaaggccattgggggctgtggggccgatgaggtggactcagccaaagactcagcagcacatggggcagg

SEQ ID NO: 679616 - DNA, 120 bp, Artificial Sequence
  ENSG00000186567_10 (sequence is synthesized)
tgtcctggcagggggacaggagactgtaacaggcccaggtccttgtgcagcccgtgaatgcacgcccgccttcggtctgttccttcaagcaagctggcctgggccatgtgcctgtgaaag

SEQ ID NO: 679617 - DNA, 120 bp, Artificial Sequence
  ENSG00000186567_11 (sequence is synthesized)
gcaggctctggcccctttccatgccaaagtcccccaagatctggatatctggggacaagatggtggcctcaggcctgcctcccaggcagttggctgggctcccaactgtctgtcctcaat

SEQ ID NO: 679618 - DNA, 120 bp, Artificial Sequence
  ENSG00000186567_12 (sequence is synthesized)
gccctaccccaactccactagtgaccctcagagtcttctccccttaggacaaggcagacaccccaccatgcgggcctcaggtggcagagaggcccagcctcacaggcctgtggccccaca

SEQ ID NO: 679619 - DNA, 120 bp, Artificial Sequence
  ENSG00000186567_13 (sequence is synthesized)
caccagtcccagcaaggtgaccacggctgctggaccccttccctgttcaggcaggcccagcccctctcagaacctgctgccagctgctggtcttggcccccaccctgaatcttactgagt

SEQ ID NO: 679620 - DNA, 120 bp, Artificial Sequence
  ENSG00000186567_14 (sequence is synthesized)
ccctctgggcagcagctcccttctccaccccaccccagcacccgtcccaaatgtggcctcagcttgtcctccccttccccaaactatgcattcattcagcaataaatgagcctttgctgt

SEQ ID NO: 679621 - DNA, 120 bp, Artificial Sequence
  ENSG00000186567_15 (sequence is synthesized)
atgccagacccagttctaggctcttgcagccctggtagaaagcaaaacaaaaactcccgctttcccagagggtcacttggcaggggaaagaatcaggaaataaaataaataatgaacatg

SEQ ID NO: 679622 - DNA, 120 bp, Artificial Sequence
  ENSG00000186567_16 (sequence is synthesized)
gtgaaatcccacctctgtctattggcagacttgcctcttttcctgggcctctgtttccacatctgtgcaatgggaacagttatttatggtggctgctgaatgaggcagtgtgtgtttgaa

SEQ ID NO: 679623 - DNA, 120 bp, Artificial Sequence
  ENSG00000186567_17 (sequence is synthesized)
caaacccaggggaattgttcaaacagaggctgttatgactattgctacagtgactgctgttgtagtcacgctgagtgagaaaaagaggttgaagagggtcaggggaggagtcctgggaag

SEQ ID NO: 679624 - DNA, 84 bp, Artificial Sequence
  ENSG00000186567_18 (sequence is synthesized)
acagggtctggctctgttggcagactagagtacagtggtgagatcacagttcattgcagccttgacttctcaacgctgactaca

SEQ ID NO: 679625 - DNA, 120 bp, Artificial Sequence
  ENSG00000186567_19 (sequence is synthesized)
ggggaggaggctgaggcccagagaggtgaagtcgtgtgccacaaaataccccagccatatggtggtagaaccaagttttcagccagactcaccagctcacagcagagctgccctggactc

SEQ ID NO: 679626 - DNA, 120 bp, Artificial Sequence
  ENSG00000186567_20 (sequence is synthesized)
tacagccattcagtgtatagctgggccactccatcattcaaggcagttcaacgtcaagattcctgatttgcctcaacctggggcctctagaagataccatcacccccaacaagctgaaga

SEQ ID NO: 679627 - DNA, 120 bp, Artificial Sequence
  ENSG00000186567_21 (sequence is synthesized)
cgtgtgtccggaacactcagacacacacaaagtgctatggatacaccacaccccgacctagctgtctcttcctgatggacctcactgggtagaaatgcctggcaccgcctgcctcagatc

SEQ ID NO: 679628 - DNA, 120 bp, Artificial Sequence
  ENSG00000186567_22 (sequence is synthesized)
ttccaatgagcagcactcagagtccttgctccccgctgaagatctgtatctagagaggagcatgccatggtccctggcaacacccctgatctcagcccttccctgtaacttcccacagcc

SEQ ID NO: 679629 - DNA, 120 bp, Artificial Sequence
  ENSG00000186567_23 (sequence is synthesized)
gtagctgattgaaaaatggaggcacgcagtggttatgacttgctgagtaaagaatacgaaccagaatgatgtgacatgggaaaggaggtcatcagggagacctcactcaagaagtgacct

SEQ ID NO: 679630 - DNA, 120 bp, Artificial Sequence
  ENSG00000186567_24 (sequence is synthesized)
aagatgtctaatttttctgccactcaccagttcccagaatatgaaagcagcaattttgtctcctttctcaactcttccttatgtgccatggattctgttttcttcttcttcttttttttt

SEQ ID NO: 679631 - DNA, 82 bp, Artificial Sequence
  ENSG00000186567_25 (sequence is synthesized)
ggcatgagccactgcgcctggcctatttctttttcttttttaaagagacagggtcttgctttactgcagcctcagactcctg

SEQ ID NO: 679632 - DNA, 76 bp, Artificial Sequence
  ENSG00000186567_26 (sequence is synthesized)
actgggaccacaggcctgtgctaccacacctggctaattatctgtattattattttttgtagagatggggtcttgc

SEQ ID NO: 679633 - DNA, 120 bp, Artificial Sequence
  ENSG00000186567_27 (sequence is synthesized)
tatgttgcccaagctgacctcaaactcctggccttaagcggtccttctgcctcagcctcccaaagtgctcgaattacaggcatgcatcaccatgcctagcttattttttactttttgtaa

SEQ ID NO: 679634 - DNA, 120 bp, Artificial Sequence
  ENSG00000186567_28 (sequence is synthesized)
tgcctagcttattttttactttttgtaaaaataagatctccctgtgttgccctggctgtcttgaattgctgggctcaagccatcctcccatctcagccccccaagtagctgggactacag

SEQ ID NO: 679635 - DNA, 83 bp, Artificial Sequence
  ENSG00000186567_29 (sequence is synthesized)
ctgggactacaggagtgcaccatttccaagcttttttttcttcttcttcttgttttgctcttgtcgcccaggctggaatcagg

SEQ ID NO: 679636 - DNA, 120 bp, Artificial Sequence
  ENSG00000186567_30 (sequence is synthesized)
gattacaggcatgagccactgagcccaattactatttttttactcaaaaccgcacacacaccttccaccccctcccccctctccattttccttcatagggaaggatgttgctctctgata

SEQ ID NO: 679637 - DNA, 120 bp, Artificial Sequence
  ENSG00000186567_31 (sequence is synthesized)
atgttgctctctgatattctactgtcaatgctttattccaattttcttcccctctctttccaccctagactgcctgctccgaggggccagggatctctgtccatcttgtgctcggctgta

SEQ ID NO: 679638 - DNA, 120 bp, Artificial Sequence
  ENSG00000186567_32 (sequence is synthesized)
ccggggtggggaggggtcaagacaactgaaactgggggctttcctcccctcgtccccccaagcctcacggtctctgctctcgaagaagcccaaaccgcctccctgagagaccctggcaag

SEQ ID NO: 679639 - DNA, 120 bp, Artificial Sequence
  ENSG00000186567_33 (sequence is synthesized)
tcccttttcctcccaaggctgcaatttccttctttgcaaaagggatccaaaaccttgaacttgcacaggaggaacaaggcccagagagggacaggggattgcctggggccacacagccag

SEQ ID NO: 679640 - DNA, 120 bp, Artificial Sequence
  ENSG00000186567_34 (sequence is synthesized)
tcaggtccccagtgaaaccccaccgcagagctcagtccctctccatcccctcctgtcagctgtctgtccctgtagttctgtctctctctctcagtggcctacatatgtctgtatgtctgt

SEQ ID NO: 679641 - DNA, 120 bp, Artificial Sequence
  ENSG00000186567_35 (sequence is synthesized)
ctctctctctctctctctctctctcagtttctcttgctgtgtcctttttaatctgtctttctgtttccagtttgttcatgctgccttgtctaagatgcatctctttacatgtcttcgttt

SEQ ID NO: 679642 - DNA, 120 bp, Artificial Sequence
  ENSG00000186567_36 (sequence is synthesized)
ctctttacatgtcttcgtttctctgcatctctgtctctctctctctccattctctgtctctcctgcctctttgtctctgtcactgtgtccacctcatttcttggctcttccaggacctct

SEQ ID NO: 679643 - DNA, 120 bp, Artificial Sequence
  ENSG00000186567_37 (sequence is synthesized)
tgtctctgcatctcactctctttccaccttgctcttccattctctctgcgggtttctctccatctcacgctgtctctcatcctctgtccctctctgtctccccaagactctccccctcca

SEQ ID NO: 679644 - DNA, 120 bp, Artificial Sequence
  ENSG00000186572_0 (sequence is synthesized)
tcagggcagtagaacatattttaatcaatgccccttgataaaagagcttgattccagctactgcacttccttcatcagctctccactgatgcctggagccatgaaaatatttgtctttat

SEQ ID NO: 679645 - DNA, 120 bp, Artificial Sequence
  ENSG00000186572_1 (sequence is synthesized)
ttttccaagccaggacagcaattcatagagcactaattagtaagagaatggaaggtcactgtgaagccgaatgtcttacctttgaagtaaagattgggggctgtagagctgaattagcac

SEQ ID NO: 679646 - DNA, 120 bp, Artificial Sequence
  ENSG00000186572_2 (sequence is synthesized)
cattttgctgcaaaaacagaaagaaacattaaaaactaagcaccagctgcaagaaacaaagaggtgaagattctctggctgcgatatcagtgggataaatctctctggaccatctctctt

SEQ ID NO: 679647 - DNA, 120 bp, Artificial Sequence
  ENSG00000186575_0 (sequence is synthesized)
gtgaccctagtcggccgctgagaggcgcgcggagtctgggccgctgccgtctaggggtcccgtcccgaggcgtccccggcatctccggcccgaatcccggagtgccgggtcgcgcctgca

SEQ ID NO: 679648 - DNA, 120 bp, Artificial Sequence
  ENSG00000186575_1 (sequence is synthesized)
ccgaaggtcccggctcctgtgccctccctgcagccgtcagggcccgtcccccaactcccctttccgctcaggcagggtcctcgcggcccatgctggccgctggggacccgcgcagcccag

SEQ ID NO: 679649 - DNA, 120 bp, Artificial Sequence
  ENSG00000186575_2 (sequence is synthesized)
accgttcccgggccgggcagccggccaccatggtggccctgaggcctgtgcagcaactccaggggggctaaagggctcagagtgcaggccgtggggcgcgagggtcccgggcctgagccc

SEQ ID NO: 679650 - DNA, 120 bp, Artificial Sequence
  ENSG00000186575_3 (sequence is synthesized)
cgcgccatggccggggccatcgcttcccgcatgagcttcagctctctcaagaggaagcaacccaagacgttcaccgtgaggatcgtcaccatggacgccgagatggagttcaattgcgag

SEQ ID NO: 679651 - DNA, 120 bp, Artificial Sequence
  ENSG00000186575_4 (sequence is synthesized)
atgaagtggaaagggaaggacctctttgatttggtgtgccggactctggggctccgagaaacctggttctttggactgcagtacacaatcaaggacacagtggcctggctcaaaatggac

SEQ ID NO: 679652 - DNA, 120 bp, Artificial Sequence
  ENSG00000186575_5 (sequence is synthesized)
aagaaggtactggatcatgatgtttcaaaggaagaaccagtcacctttcacttcttggccaaattttatcctgagaatgctgaagaggagctggttcaggagatcacacaacatttattc

SEQ ID NO: 679653 - DNA, 120 bp, Artificial Sequence
  ENSG00000186575_6 (sequence is synthesized)
ttcttacaggtaaagaagcagattttagatgaaaagatctactgccctcctgaggcttctgtgctcctggcttcttacgccgtccaggccaagtatggtgactacgaccccagtgttcac

SEQ ID NO: 679654 - DNA, 120 bp, Artificial Sequence
  ENSG00000186575_7 (sequence is synthesized)
aagcggggatttttggcccaagaggaattgcttccaaaaagggtaataaatctgtatcagatgactccggaaatgtgggaggagagaattactgcttggtacgcagagcaccgaggccga

SEQ ID NO: 679655 - DNA, 120 bp, Artificial Sequence
  ENSG00000186575_8 (sequence is synthesized)
gccagggatgaagctgaaatggaatatctgaagatagctcaggacctggagatgtacggtgtgaactactttgcaatccggaataaaaagggcacagagctgctgcttggagtggatgcc

SEQ ID NO: 679656 - DNA, 120 bp, Artificial Sequence
  ENSG00000186575_9 (sequence is synthesized)
ctggggcttcacatttatgaccctgagaacagactgacccccaagatctccttcccgtggaatgaaatccgaaacatctcgtacagtgacaaggagtttactattaaaccactggataag

SEQ ID NO: 679657 - DNA, 120 bp, Artificial Sequence
  ENSG00000186575_10 (sequence is synthesized)
aaaattgatgtcttcaagtttaactcctcaaagcttcgtgttaataagctgattctccagctatgtatcgggaaccatgatctatttatgaggagaaggaaagccgattctttggaagtt

SEQ ID NO: 679658 - DNA, 120 bp, Artificial Sequence
  ENSG00000186575_11 (sequence is synthesized)
cagcagatgaaagcccaggccagggaggagaaggctagaaagcagatggagcggcagcgcctcgctcgagagaagcagatgagggaggaggctgaacgcacgagggatgagttggagagg

SEQ ID NO: 679659 - DNA, 120 bp, Artificial Sequence
  ENSG00000186575_12 (sequence is synthesized)
aggctgctgcagatgaaagaagaagcaacaatggccaacgaagcactgatgcggtctgaggagacagctgacctgttggctgaaaaggcccagatcaccgaggaggaggcaaaacttctg

SEQ ID NO: 679660 - DNA, 120 bp, Artificial Sequence
  ENSG00000186575_13 (sequence is synthesized)
gcccagaaggccgcagaggctgagcaggaaatgcagcgcatcaaggccacagcgattcgcacggaggaggagaagcgcctgatggagcagaaggtgctggaagccgaggtgctggcactg

SEQ ID NO: 679661 - DNA, 120 bp, Artificial Sequence
  ENSG00000186575_14 (sequence is synthesized)
aagatggctgaggagtcagagaggagggccaaagaggcagatcagctgaagcaggacctgcaggaagcacgcgaggcggagcgaagagccaagcagaagctcctggagattgccaccaag

SEQ ID NO: 679662 - DNA, 120 bp, Artificial Sequence
  ENSG00000186575_15 (sequence is synthesized)
cccacgtacccgcccatgaacccaattccagcaccgttgcctcctgacataccaagcttcaacctcattggtgacagcctgtctttcgacttcaaagatactgacatgaagcggctttcc

SEQ ID NO: 679663 - DNA, 120 bp, Artificial Sequence
  ENSG00000186575_16 (sequence is synthesized)
atggagatagagaaagaaaaagtggaatacatggaaaagagcaagcatctgcaggagcagctcaatgaactcaagacagaaatcgaggccttgaaactgaaagagagggagacagctctg

SEQ ID NO: 679664 - DNA, 120 bp, Artificial Sequence
  ENSG00000186575_17 (sequence is synthesized)
gatattctgcacaatgagaactccgacaggggtggcagcagcaagcacaataccattaaaaagctcaccttgcagagcgccaagtcccgagtggccttctttgaagagctctagcaggtg

SEQ ID NO: 679665 - DNA, 120 bp, Artificial Sequence
  ENSG00000186575_18 (sequence is synthesized)
acccagccaccccaggacctgccacttctcctgctaccgggaccgcgggatggaccagatatcaagagagccatccatagggagctggctgggggtttccgtgggagctccagaactttc

SEQ ID NO: 679666 - DNA, 120 bp, Artificial Sequence
  ENSG00000186575_19 (sequence is synthesized)
cccagctgagtgaagagcccagcccctcttatgtgcaattgccttgaactacgaccctgtagagatttctctcatggcgttctagttctctgacctgagtctttgttttaagaagtattt

SEQ ID NO: 679667 - DNA, 120 bp, Artificial Sequence
  ENSG00000186575_20 (sequence is synthesized)
gtcttcctttgtctaatgtgggattcctgactcccttcgtccaaggcaccggtgtgtgtgtgtcttgcactccagagctgacctccaccgcccagcctgggaagtcattgtagggagtga

SEQ ID NO: 679668 - DNA, 120 bp, Artificial Sequence
  ENSG00000186575_21 (sequence is synthesized)
gacactgaagccctgagaagccagtgccatcatccccaccccgcccagggttccggaacattcattcccccaccggtgaggacctggcatgcagcgaagcagcccagcccggcggatccc

SEQ ID NO: 679669 - DNA, 120 bp, Artificial Sequence
  ENSG00000186575_22 (sequence is synthesized)
aggccagcacgcctgccggcttctcatcgtcagggagcccgcccagagctcgtgacgagcaagtgctgggtccccgccaggcaccccgaggcggcgctctggctggcagctggtggggaa

SEQ ID NO: 679670 - DNA, 120 bp, Artificial Sequence
  ENSG00000186575_23 (sequence is synthesized)
taggcagggcagctgtggctggggagagactttaggcagaagctgtgatgcaggctgactgccagccgaggggctgggtagtgccgtgcgggagctgatggtacagggcactcgctgtcc

SEQ ID NO: 679671 - DNA, 120 bp, Artificial Sequence
  ENSG00000186575_24 (sequence is synthesized)
gcccatagacgctccttcctgtgtggggctggggtactccctggtcgtactgcagtcagcacccgtaacccggctatgaccagggatctgtaagccctgtggctccacaggtgctgcttc

SEQ ID NO: 679672 - DNA, 120 bp, Artificial Sequence
  ENSG00000186575_25 (sequence is synthesized)
tcactggcccagactctgagctccaccggcccagtctgcacggcccatctgcttcaccttccctcccagccacgtgccagtggccacagcccacttcccaacccactgttgtacccaggc

SEQ ID NO: 679673 - DNA, 120 bp, Artificial Sequence
  ENSG00000186575_26 (sequence is synthesized)
ctcactttgctgttgcccttgtccctcttcgggccctgaattttctgttccctgggggccagccagggccctttgtgcccctcccagcacaggcctgatgcaggtgtccactcacaggtg

SEQ ID NO: 679674 - DNA, 120 bp, Artificial Sequence
  ENSG00000186575_27 (sequence is synthesized)
gcgctcacctaggctgtcacaggacccacctccatgccaggcaacagagggccacagaaccacccccacggctcactccttggtctggggccaccttcttgccctttctttttttttttt

SEQ ID NO: 679675 - DNA, 120 bp, Artificial Sequence
  ENSG00000186575_28 (sequence is synthesized)
ctacaggcatgcaccaccacacttggccaatgttctgtatttttaatagggacggggttttgccatgttagctaggctggtctcaaactcacacctgggattacaggcatgagccactgc

SEQ ID NO: 679676 - DNA, 120 bp, Artificial Sequence
  ENSG00000186575_29 (sequence is synthesized)
atgagccactgcacccagccccttcttgccctttcttttctccatggctgatgctgctgtggccagccagggcccttgagatccttccagtttggctgttatgcaaagcaggtgatttgt

SEQ ID NO: 679677 - DNA, 120 bp, Artificial Sequence
  ENSG00000186575_30 (sequence is synthesized)
cttaatcagataaaagatagaggctatgggggcctcaagatttttggagagcagaggtggtctctggcaattccatctggttttgagaaacttagcagctcacagagcacagagatcctg

SEQ ID NO: 679678 - DNA, 120 bp, Artificial Sequence
  ENSG00000186575_31 (sequence is synthesized)
ccttcttcctactatcaggctgacctaatggggttgggctgctcggcaactgcttgggtcaccttgccccaaggaaaccagccctgggtgccacccagccacttagggtctacagggtgg

SEQ ID NO: 679679 - DNA, 120 bp, Artificial Sequence
  ENSG00000186575_32 (sequence is synthesized)
gactccagacctagagcgtaagtatggatgttgtggccctgtgtcttcctagtgtgacccagccaggagcggaagcttcaggcgtttgtaaagtgaggtctggctctgcctcctccgttt

SEQ ID NO: 679680 - DNA, 63 bp, Artificial Sequence
  ENSG00000186575_33 (sequence is synthesized)
ggcgtttgtaaagtgaggtctggctctgcctcctccgttttttttttttttctgtttctgttt

SEQ ID NO: 679681 - DNA, 88 bp, Artificial Sequence
  ENSG00000186575_34 (sequence is synthesized)
agtttctcttctcagtcttgaagcccatccctggatttccaccaggagttactttcctcctgacctgtaaatttgttctttaacaatg

SEQ ID NO: 679682 - DNA, 120 bp, Artificial Sequence
  ENSG00000186575_35 (sequence is synthesized)
ttactttcctcctgacctgtaaatttgttctttaacaatggctgcaggtgggagcatatggtggtttataaaaacgctgtcgggctttgtttccttctttagctgccgtgtctacttctg

SEQ ID NO: 679683 - DNA, 120 bp, Artificial Sequence
  ENSG00000186575_36 (sequence is synthesized)
aagtctgggaagtgccaagccacgcggcctcaagggagctggctggtgtttgagctgtggcagaagcacctggggctccagggagcaggctgggaactgcaggaccttgctcagccagga

SEQ ID NO: 679684 - DNA, 120 bp, Artificial Sequence
  ENSG00000186575_37 (sequence is synthesized)
gcacttccccctccttgaggcaggaatactgaggtgcctccccacagatggagaaggtggagaggaggatgggcctcaggagcatctcaagccccagtagcaggagaaagaaagaaagag

SEQ ID NO: 679685 - DNA, 88 bp, Artificial Sequence
  ENSG00000186575_38 (sequence is synthesized)
agcatctcaagccccagtagcaggagaaagaaagaaagagatgcctggttttcacagactggttcctgtggctgggatgactgcatgc

SEQ ID NO: 679686 - DNA, 120 bp, Artificial Sequence
  ENSG00000186575_39 (sequence is synthesized)
tttaagcgaacattttagggcctgggagtttgtcaagtaaggaagtctcaagcccaaagagcagcgtcctgaccatggtggtttcattacgagcccttctgctggctctcaggcagaagc

SEQ ID NO: 679687 - DNA, 120 bp, Artificial Sequence
  ENSG00000186575_40 (sequence is synthesized)
cccacagcaccgggaccattcatgaggtcactgcccagctcatgatgtccgtgaggctgtccttttggccagtagccgtgtgcagctgtgtggcacagatggcttcgttcatcctgatca

SEQ ID NO: 679688 - DNA, 120 bp, Artificial Sequence
  ENSG00000186575_41 (sequence is synthesized)
aggccccacctcagccacagcagtccccccaacctgtgttgtccaccctattattcatgtacctgccaggccctgctagatagcaccccgtggcattacataacacttcatgagtggctg

SEQ ID NO: 679689 - DNA, 120 bp, Artificial Sequence
  ENSG00000186575_42 (sequence is synthesized)
tgtcttgtaattttggggacaggtttctctctttccctctcttttttttgtcaaaagcccagagactgacaaccagctgcagtgtctaagtgttcctcactgacagggtggggcctcacc

SEQ ID NO: 679690 - DNA, 120 bp, Artificial Sequence
  ENSG00000186575_43 (sequence is synthesized)
acccctggagggagcagcgttggcagggagacagcctggcccagtgaccctgggcccaagccagcccctccagggctttcagggaagcgccatccattttcaaagatgtcaaacgtcact

SEQ ID NO: 679691 - DNA, 120 bp, Artificial Sequence
  ENSG00000186575_44 (sequence is synthesized)
tcttcctgtagggcccgagtcctgcctcctatcagggccagatcatagaaggctattttctattctggggaacgattataacttaaatgattgttttaataaaaattctaagctggaaaa

SEQ ID NO: 679692 - DNA, 120 bp, Artificial Sequence
  ENSG00000186575_45 (sequence is synthesized)
cctcaagcccaaggcagaagacctatctgcatttgagccctcaaagtaggttgttcccagctcaccttgcagagcgccaagtcccgagtggccttctttgaagagctctagcaggtgacc

SEQ ID NO: 679693 - DNA, 120 bp, Artificial Sequence
  ENSG00000186575_46 (sequence is synthesized)
ccaggtactctctatgtggtgatggtgctgccctctgtgatactaacccgtgcatgagcttgcctgtctctgtcctcgggccacactgagcccttacgagggcaggtggtgcctgggtac

SEQ ID NO: 679694 - DNA, 120 bp, Artificial Sequence
  ENSG00000186575_47 (sequence is synthesized)
tggccgcagcatgctttgagtctaaaagtaggcacccaccctgtgaagccagaccagcctccagggccccagaagactgcctcgttccgaagagcatgtcatggggctgtaggaccagcc

SEQ ID NO: 679695 - DNA, 120 bp, Artificial Sequence
  ENSG00000186575_48 (sequence is synthesized)
attcttcccatctcgggtcattgttgggctggggaaggttatggcttcttgtccagtcaggtgtgtctaaaagtcctttgtcttggtggcatactcctagcatggaaatggggtcaatct

SEQ ID NO: 679696 - DNA, 120 bp, Artificial Sequence
  ENSG00000186575_49 (sequence is synthesized)
gggcactttggagactggtgtgtttaactcaagatcaagaccttttatgcgttgacagcctctcaagacccatggtcacacctggcagcttctggtagtggggcaaaagggttgcttgtg

SEQ ID NO: 679697 - DNA, 120 bp, Artificial Sequence
  ENSG00000186575_50 (sequence is synthesized)
ctggctcattttcctttagagctttccctttctgcacacatcccttttcttttcaaataaagcaaacccagagcacagggtctgatatgtgagtccacggggagtggactgtctgttcat

SEQ ID NO: 679698 - DNA, 120 bp, Artificial Sequence
  ENSG00000186575_51 (sequence is synthesized)
ctgtgctcagccacctctgcttcagcttcctctccataggctgagcagagatgtggtcagagtgaactcacattggaacagtacactcacggcaccctggagaggagcggtcactggttg

SEQ ID NO: 679699 - DNA, 120 bp, Artificial Sequence
  ENSG00000186575_52 (sequence is synthesized)
ctgagtgaattaaccgaatgtttgctgcttttctcctgcaacagttcattattcctccagcatgcctaggcagtggagagaatgtattttgcccaataataaaatgacatcctgcctcta

SEQ ID NO: 679700 - DNA, 120 bp, Artificial Sequence
  ENSG00000186575_53 (sequence is synthesized)
cctaatccccagtagtacccatgccaacaagccccacaccacctgacagcagcataggatgtgtcctttggagtcttccctgcagtttctgctcatagagtggaataagctcattggaac

SEQ ID NO: 679701 - DNA, 120 bp, Artificial Sequence
  ENSG00000186575_54 (sequence is synthesized)
ctttctaacaaaaagagatctggcataagatagatcctacttgtggtcgttatcccatcaagagaggtcagctgttaaagtccctgatagatcttattaaaaggtacacttgagctgtca

SEQ ID NO: 679702 - DNA, 120 bp, Artificial Sequence
  ENSG00000186577_0 (sequence is synthesized)
gttcctgtcggggctgcagcggcgggagggagcccagtggaggcgccctcccgaagcgccactgcccatgctgaccacccagccctccggctgctgatgtcatgagtaacaccactgtgc

SEQ ID NO: 679703 - DNA, 120 bp, Artificial Sequence
  ENSG00000186577_1 (sequence is synthesized)
ccaatgccccccaggccaacagcgactccatggtgggctatgtgttggggcccttcttcctcatcaccctggtcggggtggtggtggctgtggtaatgtatgtacagaagaaaaagcggg

SEQ ID NO: 679704 - DNA, 120 bp, Artificial Sequence
  ENSG00000186577_2 (sequence is synthesized)
tggaccggctgcgccatcacctgctccccatgtacagctatgacccagctgaggaactgcatgaggctgagcaggagctgctctctgacatgggagaccccaaggtggtacatggctggc

SEQ ID NO: 679705 - DNA, 120 bp, Artificial Sequence
  ENSG00000186577_3 (sequence is synthesized)
ggggccctgccatctgcttcccctgctgtcacctggctccccctgctgggtgctgggtctccatttctccctccacccaccctcagcagcatctgcttcccatgccctcaccatcacctc

SEQ ID NO: 679706 - DNA, 120 bp, Artificial Sequence
  ENSG00000186577_4 (sequence is synthesized)
actgcccccaggccttctgccctttgtgggtgttgagctcaccgcccacccacaggcactcatgggaagaggctttccttctgggatgggggcggctggtagacacctttgctttctcta

SEQ ID NO: 679707 - DNA, 120 bp, Artificial Sequence
  ENSG00000186577_5 (sequence is synthesized)
gccctcctgggctgggcttgggcacaaatccccaggcaggctttggagttgtttccatggtgatggggccagatgtatagtattcagtatatattttgtaaataaaatgttttgtggcta

SEQ ID NO: 679708 - DNA, 120 bp, Artificial Sequence
  ENSG00000186577_6 (sequence is synthesized)
agcggcgggaggtaaggcatggccaggccggctgggctgcagagcgccggcacgggtccacgcctcgggtgacgggcttccaggatgttcgggcgcggggcggcccatccgcatccccca

SEQ ID NO: 679709 - DNA, 120 bp, Artificial Sequence
  ENSG00000186577_7 (sequence is synthesized)
acacccccacctccggcctgagcctcccagcgccgtgggaaccacctcctgtccgctgttgctggcccgcatcctagcagcggcctgacgccctccccaccctggcatgcccccttgacc

SEQ ID NO: 679710 - DNA, 120 bp, Artificial Sequence
  ENSG00000186577_8 (sequence is synthesized)
tcggggtggtggtggctgtggtaaggagccctcatatacacacagacacccacagctttgctaaggcaggggctgggtgggcctggtccagtctgcacagagtccccactgtcctgttaa

SEQ ID NO: 679711 - DNA, 120 bp, Artificial Sequence
  ENSG00000186577_9 (sequence is synthesized)
taagatgtccctcagccatcctgatacaagcctgaaatttgttttccctgccccagcctcaggttactcactggggaaagcccctttgtagaatcagggttgtattcttggaggtatagt

SEQ ID NO: 679712 - DNA, 120 bp, Artificial Sequence
  ENSG00000186577_10 (sequence is synthesized)
gtgtcccaaaaggcacccactggaattgcccctgcctgggaaagggaggagacgaggcagccaggtgtttgatgagggttggggggacctcctagctgagtcccctcccctgctccccag

SEQ ID NO: 679713 - DNA, 120 bp, Artificial Sequence
  ENSG00000186577_11 (sequence is synthesized)
ggtggaccggctgcgccatcacctgctccccatgtacagctatgacccagctgaggaactgcatgaggctgagcaggagctgctctctgacatgggagaccccaaggtgagcacttgggg

SEQ ID NO: 679714 - DNA, 120 bp, Artificial Sequence
  ENSG00000186577_12 (sequence is synthesized)
ggtgctgcagactcccagggaacacagcccagccttgtggtgtggtctcctccccgacaggtggtacatggctggcagagtggctaccagcacaagcggatgccactgctggatgtcaag

SEQ ID NO: 679715 - DNA, 120 bp, Artificial Sequence
  ENSG00000186579_0 (sequence is synthesized)
catggacacggtgctgatctctcaagacccacccagtcatgaggactttcctctttctctttgccgtgctcttctttctgaccccagccaagaatgcattttttgatgagaaatgcaaca

SEQ ID NO: 679716 - DNA, 120 bp, Artificial Sequence
  ENSG00000186579_1 (sequence is synthesized)
gtgggagcattatagattaatgcagaagatttaggtttccagagaagcatacataacctagcttctttttactcttgcctctgctgtaggcagacactttaataaaaataaatgactgtc

SEQ ID NO: 679717 - DNA, 120 bp, Artificial Sequence
  ENSG00000186583_0 (sequence is synthesized)
acattccaggccgaggcaaggcctgtgtacaggcctggtggcatggagagctgagggtgttagagcagagagggcaaggaagagggcacagcctctgacctcacaatacccagggcccac

SEQ ID NO: 679718 - DNA, 120 bp, Artificial Sequence
  ENSG00000186583_1 (sequence is synthesized)
tgggccagccttgcagactctgcaccctccttcagcccaggcaaggcctggggccctgggcagcctccaggtgcagtgccctcccgtgggccgcacccttgccactgccccagggcatgt

SEQ ID NO: 679719 - DNA, 120 bp, Artificial Sequence
  ENSG00000186583_2 (sequence is synthesized)
ctctactcaccaattatgaagggcttcggcatcagatagagaggctggtgcgggaaaatgaggaactgaagaagttggtgcggctcattcgggagaatcacgagctcaagtcagcgatca

SEQ ID NO: 679720 - DNA, 120 bp, Artificial Sequence
  ENSG00000186583_3 (sequence is synthesized)
agactcaggcaggcgggctcggcatcagcgggttcacgagtgggcttggtgaggcaacagcaggcctttcctcacgccagaacaatggtgtcttcctgcccccgtccccagcagtggcaa

SEQ ID NO: 679721 - DNA, 120 bp, Artificial Sequence
  ENSG00000186583_4 (sequence is synthesized)
acgaacgagtcctcgaagaagtggggatcatggccttggcacccctggccgagatgctaaccagcttgcagcccagcgccacaccgggctcactcatgagccccctgacaggcaccctca

SEQ ID NO: 679722 - DNA, 120 bp, Artificial Sequence
  ENSG00000186583_5 (sequence is synthesized)
gcacgctgctgtctggcccagcacccacgtcacagagcagccccctcaccagcttcctgaccagtcccattgcgggacccctaacaggcacactggccagttccctgggcctgccctcca

SEQ ID NO: 679723 - DNA, 120 bp, Artificial Sequence
  ENSG00000186583_6 (sequence is synthesized)
ctggcaccctgactcccagcagcctcgtggcaggccctgtggccatgtcccagagcagccccctgatagcccctgtgatgggcacggtggctgtctctctgagcagccccctcctcagct

SEQ ID NO: 679724 - DNA, 120 bp, Artificial Sequence
  ENSG00000186583_7 (sequence is synthesized)
ccactgccaccccaccaggggtctctcagaacctgctggccaaccccatgagcaacctggtcctgccagaggccccaaggctgcggctggctgagccactccgcggaggccccactgggc

SEQ ID NO: 679725 - DNA, 120 bp, Artificial Sequence
  ENSG00000186583_8 (sequence is synthesized)
cccagtccccagcttgcgtggtacccactgccaccaccaaagtcccactctccactgagcccccccagtcgacccaggacccagagcctctcagcatggcgtttgcaggagcacccctcc

SEQ ID NO: 679726 - DNA, 120 bp, Artificial Sequence
  ENSG00000186583_9 (sequence is synthesized)
ccctatcggagccatgggcacacctgctcccaagacggccttctccttcaacacttcggacacacaggcccagcccagtgccgcccaggaacaagtggtccctgcatctgtccccacctc

SEQ ID NO: 679727 - DNA, 120 bp, Artificial Sequence
  ENSG00000186583_10 (sequence is synthesized)
ccccaccacctcccccacggtcaccgtccttgcctctgcccccgcccttgccccccaggttgccaccagctacacaccctcaagcaccacccacatcgcccagggtgccccccatccccc

SEQ ID NO: 679728 - DNA, 120 bp, Artificial Sequence
  ENSG00000186583_11 (sequence is synthesized)
ttcccgaatgcataattccccaacccagaacctgcctgtcccccactgtcctccacacaacgcccactccccacctcgtacctcatcctccccggcttcagtcaatgactctcgaggtcc

SEQ ID NO: 679729 - DNA, 120 bp, Artificial Sequence
  ENSG00000186583_12 (sequence is synthesized)
acgcaccacagaaccgtcgacgaagagcatgatggaggtggaacggaagctggcccaccgcaagaccagcaagttccccgagaacccccgagagtcgaagcagctggcctgggagaggct

SEQ ID NO: 679730 - DNA, 120 bp, Artificial Sequence
  ENSG00000186583_13 (sequence is synthesized)
ggtgggtgagattgccttccagctggaccgcaggatcctgtccagcatcttcccagagcgcgtacggctctacggcttcactgtctccaacatcccagagaagatcatccaggcttccct

SEQ ID NO: 679731 - DNA, 120 bp, Artificial Sequence
  ENSG00000186583_14 (sequence is synthesized)
gaaccccagtgaccacaagctggatgagaagctgtgccagaggctcacacagcgctatgtgagcgtcatgaacaggctgcagagtctgggctacaacgggcgggtgcaccctgcgctgac

SEQ ID NO: 679732 - DNA, 120 bp, Artificial Sequence
  ENSG00000186583_15 (sequence is synthesized)
cgagcagctggtgaacgcttatggcatcctgcgagagcgcccggagctggcggcgtctgagggcggcccctacaccgtggacttcctgcagcgtgtggtggtggagaccgtgcaccccgg

SEQ ID NO: 679733 - DNA, 120 bp, Artificial Sequence
  ENSG00000186583_16 (sequence is synthesized)
catgctcgccgacgcgctgctgctgctctcctgcctcagccagctggcgcacgatgacggcaagcccatgttcatctggtgacgctggagctgggaggtccaggctcgctcagccccaca

SEQ ID NO: 679734 - DNA, 120 bp, Artificial Sequence
  ENSG00000186583_17 (sequence is synthesized)
gccctgtgcacggccattaaagcttcccacagacactggtcgctgggcctgtgccagcgctcctgggtggtgctgcctcctctggggtggctcaccgggccccggcaccgtgccccttca

SEQ ID NO: 679735 - DNA, 120 bp, Artificial Sequence
  ENSG00000186591_0 (sequence is synthesized)
agagcgaggctggggtagggaggccgactgagcaggagtcgtccgcttatagtggaggctgctaggagccggtcagagggtgagtggggagcaggcgagcgagccacagcaggcaggagg

SEQ ID NO: 679736 - DNA, 80 bp, Artificial Sequence
  ENSG00000186591_1 (sequence is synthesized)
ggcggaaccacagccggagaggggcagcccgagccgggcgccgcagggtccccacccccacccggccggacagtgcccgg

SEQ ID NO: 679737 - DNA, 80 bp, Artificial Sequence
  ENSG00000186591_2 (sequence is synthesized)
tgttcccccgtgcggggggcggcggcggcggctgacgggaccgccgggaccgcgggggtgttgccacctccaccgaggag

SEQ ID NO: 679738 - DNA, 120 bp, Artificial Sequence
  ENSG00000186591_3 (sequence is synthesized)
ccgtgacagacgggccgaggaagggagagaggcggcggcgacaccatgtcatctcccagtccgggcaagaggcggatggacacggacgtggtcaagctcatcgagagtaaacatgaggtt

SEQ ID NO: 679739 - DNA, 120 bp, Artificial Sequence
  ENSG00000186591_4 (sequence is synthesized)
acgatcctgggaggacttaatgaatttgtagtgaagttttatggaccacaaggaacaccatatgaaggcggagtatggaaagttagagtggacctacctgataaataccctttcaaatct

SEQ ID NO: 679740 - DNA, 120 bp, Artificial Sequence
  ENSG00000186591_5 (sequence is synthesized)
ccatctataggattcatgaataaaattttccatcccaacattgatgaagcgtcaggaactgtgtgtctagatgtaattaatcaaacttggacagctctctatgatcttaccaatatattt

SEQ ID NO: 679741 - DNA, 120 bp, Artificial Sequence
  ENSG00000186591_6 (sequence is synthesized)
gagtccttcctgcctcagttattggcctatcctaaccccatagatcctctcaatggtgacgctgcagccatgtacctccaccgaccagaagaatacaagcagaaaattaaagagtacatc

SEQ ID NO: 679742 - DNA, 120 bp, Artificial Sequence
  ENSG00000186591_7 (sequence is synthesized)
cagaaatacgccacggaggaggcgctgaaagaacaggaagagggtaccggggacagctcatcggagagctctatgtctgacttttccgaagatgaggcccaggatatggagttgtagtag

SEQ ID NO: 679743 - DNA, 120 bp, Artificial Sequence
  ENSG00000186591_8 (sequence is synthesized)
aaaaagcacctgcttttcagaaagactattatttcctaaccatgagaagcagactataatattcatatttaaacaaagcaattttttttattactaaacaaggtttttatgaataatagc

SEQ ID NO: 679744 - DNA, 120 bp, Artificial Sequence
  ENSG00000186591_9 (sequence is synthesized)
attgatatatatatattatatatcaccctttagatcttgatttcttggtcatttctcaacctgaggtgcatagcatattcccacattccatttggtagcaatatgcggtctgaatgcatg

SEQ ID NO: 679745 - DNA, 120 bp, Artificial Sequence
  ENSG00000186591_10 (sequence is synthesized)
cattcatgagtccatgtggccaagtcagcctgtgtgctactgaactgtcgaaggaaatagccgctctgataggtagatgtgagtaaaaagaacaggaaaaaattgcttcttttattggtt

SEQ ID NO: 679746 - DNA, 120 bp, Artificial Sequence
  ENSG00000186591_11 (sequence is synthesized)
tccaaagaaacaaaccaaaccaaccagctcttggatgtgaagataaaatagtgcttttttgaaatggagaggaaaaacttggggaggaagaggcctgctgtgggggcatcggagccagcc

SEQ ID NO: 679747 - DNA, 120 bp, Artificial Sequence
  ENSG00000186591_12 (sequence is synthesized)
atgtaagaatcagagctgctccttcctgtgaatcctaggtggccctatgtcttctgtggagttacagtataaagcagggagctaattaagagtattaaaacttaaaaccattttttgact

SEQ ID NO: 679748 - DNA, 120 bp, Artificial Sequence
  ENSG00000186591_13 (sequence is synthesized)
ctgattttaagtacatttttatatgtcagttgctgcccttcacactaccaggccctgcagccacagtgttctgttggagaaacttggggaagtgttttctgaaccagttctttttcttgg

SEQ ID NO: 679749 - DNA, 120 bp, Artificial Sequence
  ENSG00000186591_14 (sequence is synthesized)
ggtagagcgtgaaatccagacctgtttttgaaaggacagcacaggaggagaaaagtgactgggacgatgcttcctctcatccaaaacacatgcagagtcacatcctcatcctagtgtttg

SEQ ID NO: 679750 - DNA, 120 bp, Artificial Sequence
  ENSG00000186591_15 (sequence is synthesized)
gcagtttgagaccgctaccctgaacttaagagctttaaatatgagggttgtgtttctgggggggttatttttttggtgtgtgtgtgtgtgtattgtgcttagaaaggttgcagatttcat

SEQ ID NO: 679751 - DNA, 120 bp, Artificial Sequence
  ENSG00000186591_16 (sequence is synthesized)
cttcacctaccaagaggcggccgcctccttggacaagccgctcatggaccattagacttgagaagacgacccacgtggtgactgcaaagccctgggtacttgccttcatgttctggtttg

SEQ ID NO: 679752 - DNA, 120 bp, Artificial Sequence
  ENSG00000186591_17 (sequence is synthesized)
gttttccctttttctgctgctcttggcagcagcctggtcatcatctgcttgtgggagtgggaaatgggtattttagacccaacacaggttctaaatttaaaacaaataataattggaaca

SEQ ID NO: 679753 - DNA, 120 bp, Artificial Sequence
  ENSG00000186591_18 (sequence is synthesized)
aataaaggttcttgtacccagagtgattctacatgggaaaaacaaaccagcttttttcagagagtgaccgaataggaagaagggattcagaaatatgatgtagtagaacatgccctgcag

SEQ ID NO: 679754 - DNA, 120 bp, Artificial Sequence
  ENSG00000186591_19 (sequence is synthesized)
gaagaaaatgttttctctcctgcgtatgttaagaggaaatcagtttaaaatgcctgctaatcaaatgtcgactcagctaaccatatgtccaggttgctgcagagtttctttcaaatctga

SEQ ID NO: 679755 - DNA, 120 bp, Artificial Sequence
  ENSG00000186591_20 (sequence is synthesized)
gtgttgcctgctgaactcggaggggagtttggagaaattttagacagcagctctgtgttctttttttgccgcagccaataagataatagcagaattagccaatcctaaaaccttctaaag

SEQ ID NO: 679756 - DNA, 120 bp, Artificial Sequence
  ENSG00000186591_21 (sequence is synthesized)
gatttttgagcatcccactgggattatttaatttttctttttgacgtgtgtttttagtttagaagtgctgtattccacaaggtttaagtcagtgaggttggaagataccctatctttttt

SEQ ID NO: 679757 - DNA, 120 bp, Artificial Sequence
  ENSG00000186591_22 (sequence is synthesized)
attcaaaaagcacaatcaatcttttgtttgaaaatctatataaagtacaacttgcttttagcatgattattttcctaaataaaaagacaaagaatttacttactttatgttaattacggg

SEQ ID NO: 679758 - DNA, 120 bp, Artificial Sequence
  ENSG00000186591_23 (sequence is synthesized)
catgaagcaaaaggttttctttaaaaaaaaaaaaaagtgcagtgatgtagggctgtggttagttaaccgtactgagttatccatctagcatctgtggcttgctggaagggtagtattaac

SEQ ID NO: 679759 - DNA, 120 bp, Artificial Sequence
  ENSG00000186591_24 (sequence is synthesized)
tatttaacatgtaatggtgtacttcactcttacctagcacgctgtcttctcattgctttgggggagggagggtctctctgctggcactgtctaacttgcttacctgctgactttgcagtt

SEQ ID NO: 679760 - DNA, 120 bp, Artificial Sequence
  ENSG00000186591_25 (sequence is synthesized)
tgcttgtgctatgacatttattgtaggtgctatttagggtaggcttaaagtgctgggtggtgatttgagttcaaacaataaaaaattgtattttttcaatattgtataaacaatagtgtt

SEQ ID NO: 679761 - DNA, 120 bp, Artificial Sequence
  ENSG00000186591_26 (sequence is synthesized)
ctaattaccttaaaaaaaaataatgaccagttaagaattgcttttgatcttgtcaaaaaactgaatagaccccagtttcgggaaggtgtgtgagcagtgccatgactctgccccttacct

SEQ ID NO: 679762 - DNA, 120 bp, Artificial Sequence
  ENSG00000186591_27 (sequence is synthesized)
aatcccacatctctctaatgataagacattggctcgcctctgaccagagccccagcaccagagagcggaagatgcagaattgtcaaatgacctgctgggggaggttgtaggagtttagca

SEQ ID NO: 679763 - DNA, 120 bp, Artificial Sequence
  ENSG00000186591_28 (sequence is synthesized)
gatttgagtgtggctgcagagagagagagtgtgtgtatgtgtgcacatgtgtgagagtgtgagcgagagtgtgtgtgtgtccatctaagtgtgtgtgatgaaggtgggataaggctcctc

SEQ ID NO: 679764 - DNA, 120 bp, Artificial Sequence
  ENSG00000186591_29 (sequence is synthesized)
tgttagtgctggaagctcctgtaattgccgcatggatcccactgtgccctcttgttctgtgcaagtctgtcctgtctgggcactaaccttggtcccatgcatgtttatgttctgggtggg

SEQ ID NO: 679765 - DNA, 120 bp, Artificial Sequence
  ENSG00000186591_30 (sequence is synthesized)
gctttgcctctccactgggaaactgacttttgctgggttgaacagagtcccttatgctttttgtcctctccctgcgcctgggagaggtgggagtaggagcccaaacacacaggtacagaa

SEQ ID NO: 679766 - DNA, 120 bp, Artificial Sequence
  ENSG00000186591_31 (sequence is synthesized)
agatctggaagaaggcctggcagtgaatccaaggactctgggcccccaacaatagatggtagcgtaagtctggagcagcggtgtttcaccaccaaatgcctttccaggctgcccttccaa

SEQ ID NO: 679767 - DNA, 120 bp, Artificial Sequence
  ENSG00000186591_32 (sequence is synthesized)
cactcaggagagcatccagatccctgggcagaggctctacattcttggctttagaggtggtggcagcggcagcaggtcagagccacttctggcggtttccctcccctttttagtgcccat

SEQ ID NO: 679768 - DNA, 120 bp, Artificial Sequence
  ENSG00000186591_33 (sequence is synthesized)
agtttttggatcctcccttgagttttaccagcacaagccattctttgcccctgttcacataactgagctcaagctcttgccaaacaccaacaagcaagatggttgcaacctggcaacatt

SEQ ID NO: 679769 - DNA, 120 bp, Artificial Sequence
  ENSG00000186591_34 (sequence is synthesized)
gaatccaccacccttgggctccctctggaagccccagcaccggggggcttttgggcacagggtcagtggtagccatcttagacactgacatttggctttgtcgtcaatttcatcaccctc

SEQ ID NO: 679770 - DNA, 120 bp, Artificial Sequence
  ENSG00000186591_35 (sequence is synthesized)
cttgaggttactgtgcagtttcaaccagcattttatcctagtgaggtcattatcaggagttgccatatcatctctccagtacctaacatttctcatccacttcaaaagctgttctgactg

SEQ ID NO: 679771 - DNA, 120 bp, Artificial Sequence
  ENSG00000186591_36 (sequence is synthesized)
ccagctggctgatctaagctcctgaggaatgtctcctctcaaaggaatttttccctccaaaggccccctgaagtcctagttggcattggcctggcacatgctttatgttaggcctcccgt

SEQ ID NO: 679772 - DNA, 120 bp, Artificial Sequence
  ENSG00000186591_37 (sequence is synthesized)
tgggatggctgagaatcatgaaagacagatcctccgctagcctctgtgggtcaagtttctggacaccaagtctctgggaactagtgtttgattttaaatggcatgtggcccttccttgtt

SEQ ID NO: 679773 - DNA, 120 bp, Artificial Sequence
  ENSG00000186591_38 (sequence is synthesized)
tcagtgacttagaaaagtaaaagccatttaaaaaagttagcaagattttttatcgacttcccaactgggcttccagccttgttgaatgaaatcatctatctctgattgggcgcaacgaac

SEQ ID NO: 679774 - DNA, 120 bp, Artificial Sequence
  ENSG00000186591_39 (sequence is synthesized)
tgcatttctttggacttctgaatccatgtttgtgctttctctggcccgtgaacacctcggcgattctgttagggatgggatgagtgggaggaagccctttgagaagggggagccggccct

SEQ ID NO: 679775 - DNA, 120 bp, Artificial Sequence
  ENSG00000186591_40 (sequence is synthesized)
gtcatgcgcaggttttccactcatctgaggaagagccagggctctgaatttagcctaacactcatcttggctgtgggcttgggaagaaatggccattatttacagattgtatttggtaca

SEQ ID NO: 679776 - DNA, 120 bp, Artificial Sequence
  ENSG00000186591_41 (sequence is synthesized)
tattgtgtgatacttgaaaagataaaagggactgccagcccctaactgaaatctgaagctttttatcgcttatttttcctcgccctgtctcctcccttccacctttctccttgcattgtg

SEQ ID NO: 679777 - DNA, 120 bp, Artificial Sequence
  ENSG00000186591_42 (sequence is synthesized)
atgatctagtaggcacgtctgtcaacaggacacatgcctcctctgactataacctcttaatagttgtgtataatgaaaactgtaaacttttttaaataaacgtgtatataccttggcaaa

SEQ ID NO: 679778 - DNA, 120 bp, Artificial Sequence
  ENSG00000186591_43 (sequence is synthesized)
ggtgagtttggccatggaatattttttggagatgttgagacattgcctaaaaaaatgttgtttggcttttcttttctggtttaagatgttttgttggtaatgggaagggatttttgaggg

SEQ ID NO: 679779 - DNA, 120 bp, Artificial Sequence
  ENSG00000186591_44 (sequence is synthesized)
gtttaaaatgattttttgagattccaaacttaaggtatagtgatacatgtgcacacacatgagtacatgcgcacacacatgaatacatgtgcaaacattttatatgtatgtattagcaca

SEQ ID NO: 679780 - DNA, 120 bp, Artificial Sequence
  ENSG00000186591_45 (sequence is synthesized)
taatatatacatattttggttttggaaaaaactaaaactacttaggaatgtccctctgaaatgagagagcaatgatatagtaagaggttttaggggatcatcttttcaaagaccaaaacc

SEQ ID NO: 679781 - DNA, 120 bp, Artificial Sequence
  ENSG00000186591_46 (sequence is synthesized)
aagactctgtctcaaaaaaaaaaacaaacaaaaaaaccccacaaaaactgtcttcaattcttttaagacccagcatctgaatacctttcagagtggggggttttgtaagctgtagaaaat

SEQ ID NO: 679782 - DNA, 120 bp, Artificial Sequence
  ENSG00000186591_47 (sequence is synthesized)
ggctgtgtgaaatagccatataaatagagtgaaatagaattgggaaaattgtccttcaaagtgaatgtcaggtatatctttatctcgttcttcaaattaaaattaaaatgtttaaattgg

SEQ ID NO: 679783 - DNA, 120 bp, Artificial Sequence
  ENSG00000186591_48 (sequence is synthesized)
tacaagtcacatgtaatagagcacactcgtatggagaatcatccccgtgtgaatatctaagaaggtaagcagcttgactactgaatgcaagtgaattttaggtgaacttgcatttcccat

SEQ ID NO: 679784 - DNA, 120 bp, Artificial Sequence
  ENSG00000186591_49 (sequence is synthesized)
tttatggttggaagaaggaaaggagaatggatactgggttggatcactttagcttgtaccctcaacctttaactcagaggacctgatttgggagttcagcggtggttgaagcatcgagag

SEQ ID NO: 679785 - DNA, 120 bp, Artificial Sequence
  ENSG00000186591_50 (sequence is synthesized)
gttgcagggttttgtttatataactcaagttgtttggctaaattcttcagcatcgagagtaaacatgaggttacgatcctgggaggacttaatgaatttgtagtgaagttttatggacca

SEQ ID NO: 679786 - DNA, 120 bp, Artificial Sequence
  ENSG00000186599_0 (sequence is synthesized)
aaggaaatcccaatctctattccgaagagtcttccctaaaagatggccctgatcaggaagacattttattttctatttgctatgttcttcattttggttcaactgccatcagggtgccag

SEQ ID NO: 679787 - DNA, 120 bp, Artificial Sequence; identical to SEQ ID NO: 679490
  ENSG00000186599_1 (sequence is synthesized)

SEQ ID NO: 679788 - DNA, 120 bp, Artificial Sequence
  ENSG00000186603_0 (sequence is synthesized)
acaaccagcagctcggctcactgagacccggtggtccagacgctgctcctggctggggtggcgctgcagggagaaccgcgagctctcaggggtcggcgggtgacttctttccggaagaaa

SEQ ID NO: 679789 - DNA, 120 bp, Artificial Sequence
  ENSG00000186603_1 (sequence is synthesized)
gcgaggaacgcgctctgcggggtgagccggactccccaactccggacgatcagcccaggactgagagccccgaagtccccaaccacaagtaagcggccccagaaggacaagtctaggtcg

SEQ ID NO: 679790 - DNA, 120 bp, Artificial Sequence
  ENSG00000186603_2 (sequence is synthesized)
ccgtccagagcgccatggccgcgcccgcccttcgtttgtgccacatcgccttccacgtgcccgccgggcagcccctagcccggaacctgcagcgcctcttcggcttccagcccctggctt

SEQ ID NO: 679791 - DNA, 120 bp, Artificial Sequence
  ENSG00000186603_3 (sequence is synthesized)
cgcgggaggtggacggctggcggcagctagccctgcgcagcggcgacgcggtctttttggtgaacgagggcgcagggtctggagagccgctgtacggcctggatccgcgtcacgccgtgc

SEQ ID NO: 679792 - DNA, 120 bp, Artificial Sequence
  ENSG00000186603_4 (sequence is synthesized)
ccagcgccacaaacctgtgcttcgacgtggcggacgccggcgctgcaacccgggagctggcagcgctgggctgcagcgtgcctgtccctcccgttcgcgtgcgggacgcgcagggtgccg

SEQ ID NO: 679793 - DNA, 120 bp, Artificial Sequence
  ENSG00000186603_5 (sequence is synthesized)
ccacttacgccgtggtcagctcgcctgccggcatcctcagcctgaccttgctggagcgcgctggctaccgcggacccttcctacccggcttcaggcccgtgtcctctgcgcctggccccg

SEQ ID NO: 679794 - DNA, 120 bp, Artificial Sequence
  ENSG00000186603_6 (sequence is synthesized)
ggtgggtcagccgcgtggaccacctgaccttggcctgcacccccggcagctcccccacacttttgcgctggttccacgactgcctgggcttttgccacttgccgctgagcccaggtgagg

SEQ ID NO: 679795 - DNA, 120 bp, Artificial Sequence
  ENSG00000186603_7 (sequence is synthesized)
ctgagtcccttccgggggcgacgacacgacaggaccaggtggagcagttcctggcccggcacaaggggccaggcctgcagcacgtggggctgtatacgcctaacattgtggaggccactg

SEQ ID NO: 679796 - DNA, 120 bp, Artificial Sequence
  ENSG00000186603_8 (sequence is synthesized)
agggggtggcaactgctggaggccagttcctggctccccctggggcatactaccagcagccaggaaaggagaggcagatccgagctgcagggcacgagcctcatctgcttgctcgacagg

SEQ ID NO: 679797 - DNA, 120 bp, Artificial Sequence
  ENSG00000186603_9 (sequence is synthesized)
ggatcctgctagatggtgataaaggcaagtttctgcttcaggtcttcaccaagtccctttttactgaggacactttcttcctggagctgattcagaggcagggggccactggctttggtc

SEQ ID NO: 679798 - DNA, 120 bp, Artificial Sequence
  ENSG00000186603_10 (sequence is synthesized)
agggcaacatcagagctctgtggcagtccgtacaggagcaatctgccaggagccaggaagcctaaggatgcccagggctgggtgcagccagctgtcctgcagctctggggagaccagcac

SEQ ID NO: 679799 - DNA, 120 bp, Artificial Sequence
  ENSG00000186603_11 (sequence is synthesized)
agaactgaggaacatctgcaggaggcccaactagtgaaaggctttgcctccggggggcaggtgtgacttccatttcatcagtgcctgccagaagctgtgtctctcattgggctccaaaga

SEQ ID NO: 679800 - DNA, 120 bp, Artificial Sequence
  ENSG00000186603_12 (sequence is synthesized)
ggtgggattttttaaaactaaaacatttcttatatacagtctataataaatatgtaagatacaaagaacaataaaagaattacacactaggaaatagaacataaccaatactttcgagtc

SEQ ID NO: 679801 - DNA, 120 bp, Artificial Sequence
  ENSG00000186603_13 (sequence is synthesized)
ctccctgtgtcccgctgtgattctatttcctcccacccactcctcaaatcctgtcattattagccctttgcttttctgtattgtttcactccgtatgtaacataaccctaaataaattat

SEQ ID NO: 679802 - DNA, 120 bp, Artificial Sequence
  ENSG00000186625_0 (sequence is synthesized)
taaagtgtttctttttttcttcttctttttagcttacagttgaacatgagtcttcttatgattagtgagaatgtaaaattggctcgtgaatatgcattgctgggaaactatgactctgcg

SEQ ID NO: 679803 - DNA, 120 bp, Artificial Sequence
  ENSG00000186625_1 (sequence is synthesized)
atggtctattatcagggagttcttgaccaaatgaacaagtatctgtactcagtcaaagatacatacctccagcagaaatggcaacaggtttggcaggaaataaatgtggaagctaaacat

SEQ ID NO: 679804 - DNA, 120 bp, Artificial Sequence
  ENSG00000186625_2 (sequence is synthesized)
gttaaagatatcatgaaaacactagagagctttaaactggacagcactcccttgaaagcggcacagcatgaccttccagcttctgagggagaagtctggtccatgcctgtacctgttgaa

SEQ ID NO: 679805 - DNA, 120 bp, Artificial Sequence
  ENSG00000186625_3 (sequence is synthesized)
cgaagaccctcaccaggacctagaaaacgccaatcttctcagtacagtgaccctaaatcacatggtaatcgtccaagtacaactgtcagagttcaccgttcatctgcacagaatgttcac

SEQ ID NO: 679806 - DNA, 120 bp, Artificial Sequence
  ENSG00000186625_4 (sequence is synthesized)
aatgacagagggaaagctgttcgttgtcgtgaaaagaaagaacagaataaaggaagagaggaaaagaacaaatcacctgctgcagtaacagaaccagagacaaataaatttgatagtacc

SEQ ID NO: 679807 - DNA, 120 bp, Artificial Sequence
  ENSG00000186625_5 (sequence is synthesized)
ggatatgataaagacttagtagaagctttggaaagagatataatttcccagaatcccaatgttcgatgggatgatatcgctgatttagtagaagctaaaaagttgcttaaggaagccgta

SEQ ID NO: 679808 - DNA, 120 bp, Artificial Sequence
  ENSG00000186625_6 (sequence is synthesized)
gtgttaccaatgtggatgcccgaattctttaagggcattaggagaccatggaaaggagtactgatggtcggcccacctggcacggggaagacgctccttgctaaagcagtagctacagaa

SEQ ID NO: 679809 - DNA, 120 bp, Artificial Sequence
  ENSG00000186625_7 (sequence is synthesized)
agacaacattcttcaatgtctcttcatcaactttgacttccaaatacagaggagaatctgagaagcttgttcgtcttctgtttgaaatggctcgattttattctccagccaccatattta

SEQ ID NO: 679810 - DNA, 120 bp, Artificial Sequence
  ENSG00000186625_8 (sequence is synthesized)
ttgatgagatagactccatctgtagtcgccgagggacttctgaagaacatgaagcaagcagaagggtgaaagcggagctgctggttcagatggatggtgttggaggtacttctgaaaatg

SEQ ID NO: 679811 - DNA, 120 bp, Artificial Sequence
  ENSG00000186625_9 (sequence is synthesized)
atgacccttccaaaatggttatggttctggcagctactaattttccctgggatatagatgaggctttaagacgacgccttgagaaacgaatctatattcctttgccgtcagcaaaaggca

SEQ ID NO: 679812 - DNA, 120 bp, Artificial Sequence
  ENSG00000186625_10 (sequence is synthesized)
gggaggagctattacgaataagtctacgtgagttggaattggctgatgatgttgaccttgcaagtatagcagaaaacatggaaggttattcaggtgcggacattaccaacgtgtgcaggg

SEQ ID NO: 679813 - DNA, 120 bp, Artificial Sequence
  ENSG00000186625_11 (sequence is synthesized)
atgcgtccttgatggcaatgagaaggcgcattgaaggtttgactccagaggaaatccgaaatctttccaaagaagaaatgcacatgcctacaactatggaggatttcgagatggctttaa

SEQ ID NO: 679814 - DNA, 120 bp, Artificial Sequence
  ENSG00000186625_12 (sequence is synthesized)
aaaaggtttctaagtcagtgtctgctgcagacattgaaagatacgagaaatggatatttgagtttggatcatgctaaattctcacatgtaaactgtgagaaatgtgccttaagtgtttga

SEQ ID NO: 679815 - DNA, 120 bp, Artificial Sequence
  ENSG00000186625_13 (sequence is synthesized)
atattaaatgcagtaattcattgtactgagtgctatattttttttaactttcataatggtaagatttttttaaaaaaacccttatgattctgaataaaggcaatatttttaagctgaaaa

SEQ ID NO: 679816 - DNA, 120 bp, Artificial Sequence
  ENSG00000186625_14 (sequence is synthesized)
agagtcgccgaggtcgtccccggcaccggaagtgaccctggcgggtttgtcttcaaattctcggcgagcaggagccgcgccggcaggtggtgttgacgattgaactgggcagtactgggg

SEQ ID NO: 679817 - DNA, 120 bp, Artificial Sequence
  ENSG00000186625_15 (sequence is synthesized)
ccgtgagcggagagcaaagtgggctggactgggtcaggccctccttcctcgctgccgggatctccactccgccaatcccctgtgcctggcgttgggcggtttcccgaggagcttgggccg

SEQ ID NO: 679818 - DNA, 120 bp, Artificial Sequence
  ENSG00000186625_16 (sequence is synthesized)
tgtctccagttccagtgggtcaaactttactcatagtgctaacccaagcttttaataggtattcttaacttcagatggactagagggggtggcaagaagttcctgatagtgatagtaata

SEQ ID NO: 679819 - DNA, 120 bp, Artificial Sequence
  ENSG00000186628_0 (sequence is synthesized)
atgcagaggtcactaggaaggaaagcctgctgaacacagattcaattttctagcagaactccaggtcctctgagttaaaggaagcatttatggacgcttagcagggcccagatattcact

SEQ ID NO: 679820 - DNA, 120 bp, Artificial Sequence
  ENSG00000186628_1 (sequence is synthesized)
attaagtgtccaggaaggatctttcttatataaaggtgcttctgaggacttccagagttacaatggaggaggaatcgggggaggaactggggctggacaggtctactcccaaggatttcc

SEQ ID NO: 679821 - DNA, 120 bp, Artificial Sequence
  ENSG00000186628_2 (sequence is synthesized)
acttttaccacatggacctgtatgactctgaagacagactgcacctctttccagaagagaacactaggatgaggaaagtagtccaagctgaaatggccaatgagtcaagaggagcagggg

SEQ ID NO: 679822 - DNA, 120 bp, Artificial Sequence
  ENSG00000186628_3 (sequence is synthesized)
atggtaaggctcaaagagaccttcaagaggaagtggatgaacttgtccacttatatggacttgaagatgatcatgaattaggggatgagtttgttgatgaaaacatacccagaacagggg

SEQ ID NO: 679823 - DNA, 120 bp, Artificial Sequence
  ENSG00000186628_4 (sequence is synthesized)
tttcagaatatcctccttatatgatgaagaggagagacccagccagggagcagagagactggagacttagtggagaggcagcggaggccgaggacctgggcttcggagggtggggctcag

SEQ ID NO: 679824 - DNA, 120 bp, Artificial Sequence
  ENSG00000186628_5 (sequence is synthesized)
caggccagtgccaggacttgcgggaagcctataggtacacacacggccgtgccagcgaggagtatgaatgctatgtcatccccgaggaagaggatgaagaagaagctgctgatgtcttct

SEQ ID NO: 679825 - DNA, 120 bp, Artificial Sequence
  ENSG00000186628_6 (sequence is synthesized)
gtgtcacttgtaagactccaataagagcttttcagaaggtttttgatgaacataaggagcatgaagtgatcccactcaatgaagcactggaaagtgccaaggatgaaattcacaaaaaca

SEQ ID NO: 679826 - DNA, 120 bp, Artificial Sequence
  ENSG00000186628_7 (sequence is synthesized)
tgtacaaattggaaaagcagataattgagatggaaaactttgcaaatcatttggaggaggttttcatcactgtggaggagaattttggaaaacaagaacaaaactttgagtcacattaca

SEQ ID NO: 679827 - DNA, 120 bp, Artificial Sequence
  ENSG00000186628_8 (sequence is synthesized)
acgagatcttggaaacacttgctcaaaaatatgaggaaaaaatacaagctctaggggagaaaaagaaagagaagctggaagccttatatggacaactggtcagctgtggagaaaacctag

SEQ ID NO: 679828 - DNA, 120 bp, Artificial Sequence
  ENSG00000186628_9 (sequence is synthesized)
atacttgcaaagaactgatggaaacaatagaggagatgtgtcacgaggagaaggtggatttcataaaggatgcagtggctatggctgacagactcgggaaattcctgaaaacaaaaacag

SEQ ID NO: 679829 - DNA, 120 bp, Artificial Sequence
  ENSG00000186628_10 (sequence is synthesized)
acgtggaaatctctgcacagcctgagtttgaagaccagaccttggatttctctgatgtggagcagctgatgggctccattaacaccattccagctccttctgctccagtcataaatccac

SEQ ID NO: 679830 - DNA, 120 bp, Artificial Sequence
  ENSG00000186628_11 (sequence is synthesized)
aggtccctaactcagccacaggttcctcagtccgagtgtgctggagcttatactccgacgacactgtggagagctatcagctgtcctaccggccagtgcaggacagctcacctgggacgg

SEQ ID NO: 679831 - DNA, 120 bp, Artificial Sequence
  ENSG00000186628_12 (sequence is synthesized)
accaagcagagtttacagtgactgtcaaagaaacatattgctcagtgacaaaccttgtgccaaatacccagtatgaattttgggtcacagctcacaacagggctggccccagcccctcta

SEQ ID NO: 679832 - DNA, 120 bp, Artificial Sequence
  ENSG00000186628_13 (sequence is synthesized)
gcgagcgtgcagtgtacatgacagcaccttctccccccattattaaaaccaaagagataaggagctgtgaagaggctgtgctgatttgctgggagtctgggaacctgaatcctgtggact

SEQ ID NO: 679833 - DNA, 120 bp, Artificial Sequence
  ENSG00000186628_14 (sequence is synthesized)
cgtacactgtggagctgacccaggctgaaagtccagaagcctcgggtgtaactgagtctgttgtgggcatcccgacctgcgagtccgtggtgcagctgcagccggggcggagctacatta

SEQ ID NO: 679834 - DNA, 120 bp, Artificial Sequence
  ENSG00000186628_15 (sequence is synthesized)
tctatgtgcgagccctcaatatggggggccccagcgtgaggagcgagccagctacagtccacaccataggaagctactttcgcctaaacaaggacacttgccatccctggctgaccattt

SEQ ID NO: 679835 - DNA, 120 bp, Artificial Sequence
  ENSG00000186628_16 (sequence is synthesized)
ctgaagacggacttacggctgtacgaagtgaaaggagaacccccgccagggagctgtcacccagcgacactcacttcaccaggtgtgttgctgtcatgggaaatctaattccagtccgag

SEQ ID NO: 679836 - DNA, 120 bp, Artificial Sequence
  ENSG00000186628_17 (sequence is synthesized)
ggcaccattactgggaggtggaggtggatgagcatttggactacagagttggtgtggcctttgcagatgtccgtaaacaggaggatctgggagcaaattgcctctcctggtgcatgaggc

SEQ ID NO: 679837 - DNA, 120 bp, Artificial Sequence
  ENSG00000186628_18 (sequence is synthesized)
acacatttgcatcatcaaggcataagtatgaatttctgcacaacagaacaactccagatataagaataacagttccaccaaagaagattggcattctattagactatgaacattcaaagt

SEQ ID NO: 679838 - DNA, 120 bp, Artificial Sequence
  ENSG00000186628_19 (sequence is synthesized)
tgtcatttttcaatgtggacctttctcagcatctatatacatttagttgtcagcttcacgaatttgtgcatccctgtttttctttggaaaagcctgggtgtctaaaggtacataatggca

SEQ ID NO: 679839 - DNA, 120 bp, Artificial Sequence
  ENSG00000186628_20 (sequence is synthesized)
tttcaatgccaaaacatgtcactttctattagaacattctgatgtccagtttcctgtcttccatgcctacccctctcgcagctgctcacgccttagctggctgaacctggcacttaagca

SEQ ID NO: 679840 - DNA, 120 bp, Artificial Sequence
  ENSG00000186628_21 (sequence is synthesized)
ccatgtgcccagcacaatttatggctcatgctattatctgactggtgtgctagcgctcatttcacccaacctggattctagtcctgtgtgctgctacctgtgtgctgctaggatagtcat

SEQ ID NO: 679841 - DNA, 120 bp, Artificial Sequence
  ENSG00000186628_22 (sequence is synthesized)
taccaggcccagctgtaaaataaaggctcagactaaacgaactcaaaagtctttgaagctgtcaaactatattcgtgtatatgcaaaatatcttgagtttccaagacctagagagcttgg

SEQ ID NO: 679842 - DNA, 120 bp, Artificial Sequence
  ENSG00000186628_23 (sequence is synthesized)
gagaggacgagggtagtcttaatggctccagcagcaccagtacacccatgcatttcatgagtcagccaagaatacacttgagaaggcgagaggctgtctgtagagaaccagggaagctgt

SEQ ID NO: 679843 - DNA, 120 bp, Artificial Sequence
  ENSG00000186628_24 (sequence is synthesized)
gtgcccttctcaatgtcttctaccctcgttttcccaatagtgagcagcactgtggtgaggtcccttccactgtgtactctgcatacagggtattccctgttccactcctacacagtatgc

SEQ ID NO: 679844 - DNA, 120 bp, Artificial Sequence
  ENSG00000186628_25 (sequence is synthesized)
accactctctaattttgaaattacctctataatgcctaattccatgaagggagggacagtgcctgttttgttcattgctagatcaccaagggctaacacataacagctgtcaccaagtat

SEQ ID NO: 679845 - DNA, 120 bp, Artificial Sequence
  ENSG00000186628_26 (sequence is synthesized)
atgtgaaggatggcagggctctttcaaaactacagcaaaggacctatggccaagaaatgggaaaaaacctagaatggaggcagcgtgaaagaacagaagggcatctgtggcatattagca

SEQ ID NO: 679846 - DNA, 120 bp, Artificial Sequence
  ENSG00000186628_27 (sequence is synthesized)
aatgcacaacaattttttaaaagaaattaacagcccaccaaagggcaaagctgagcacgggaaggaagactgatctctagctaggcagctttcaggcatcctgcctcactgcccccaggc

SEQ ID NO: 679847 - DNA, 120 bp, Artificial Sequence
  ENSG00000186628_28 (sequence is synthesized)
cattctgtgagctcaatgcccaactccatcagctacattcctggttctcctgttcaagtttccagttgccacttaagctctgcacacacagcattttcaaagcttgtgagtgaagctgca

SEQ ID NO: 679848 - DNA, 120 bp, Artificial Sequence
  ENSG00000186628_29 (sequence is synthesized)
gaataattccatttgtgaagcaattacaattcagtatcatgtcccacagatgcctctaaacccagatatgccctaatctcatcatttaaggttttgtgtttaaaaaaaaaaagtccactt

SEQ ID NO: 679849 - DNA, 79 bp, Artificial Sequence
  ENSG00000186628_30 (sequence is synthesized)
tccagccttggcaacaagagcgctctgatgttttccagcacctgcaaagtctgacaaactgaaagactctcatctccta

SEQ ID NO: 679850 - DNA, 120 bp, Artificial Sequence
  ENSG00000186628_31 (sequence is synthesized)
acctgcaaagtctgacaaactgaaagactctcatctcctactaaactctgcctactcgtataaatggcagctcagattcctgaattaacaattcacactgacaatttaataactcgttat

SEQ ID NO: 679851 - DNA, 120 bp, Artificial Sequence
  ENSG00000186628_32 (sequence is synthesized)
acacacacacacctatcctgccaagctggactgtctactctgaaacaagggacagcagatgtaagcacagaaatagttccagttataaacaattaaaagatacatatcatgtatatttaa

SEQ ID NO: 679852 - DNA, 120 bp, Artificial Sequence
  ENSG00000186628_33 (sequence is synthesized)
ccatctcaaaaaaaaaaaaaaaaaaagttctcagctactgaaatagaaactaccaagtaagaaacaggatatcacagagaaggcaagtttgaattcagggttctaataggctttatggaa

SEQ ID NO: 679853 - DNA, 120 bp, Artificial Sequence
  ENSG00000186628_34 (sequence is synthesized)
agggttctaataggctttatggaatactacacgttagtatgaacacggataaatggattaaaaactcaacacgtataaagttttaattaaatttttatttgaccaagaaaaaactgtcta

SEQ ID NO: 679854 - DNA, 120 bp, Artificial Sequence
  ENSG00000186628_35 (sequence is synthesized)
gaattgcctgacatttaaaatccacttaaagcagattagcaacttcaagcatcacaattattcagcataaagagcctttgttgaaacatctttctcatttatttagaagaaaacatctag

SEQ ID NO: 679855 - DNA, 120 bp, Artificial Sequence
  ENSG00000186628_36 (sequence is synthesized)
aacagaaccaagcaaaacttttgtatttttgtaaaaaatctcaattcctgaaactactataaacaatctactgaaactgtattcagcaagggacagatttacctcaaggccatgttcacc

SEQ ID NO: 679856 - DNA, 120 bp, Artificial Sequence
  ENSG00000186628_37 (sequence is synthesized)
tgcaacctgctgataagtctgttaaaaaacaaagcaaaaaaaagagtttttaaaaattagaccactgtagccacaatccctaacactggacagttaaaacaaaagttatcaaaatctgtt

SEQ ID NO: 679857 - DNA, 120 bp, Artificial Sequence
  ENSG00000186628_38 (sequence is synthesized)
cttttcttagctttacctgtatcactttataactcctgagaaagtcattcacataagctgtggcctccccaccttaacaaaggggaaaaagaatatgtaaaaccaccacagaatcttggc

SEQ ID NO: 679858 - DNA, 120 bp, Artificial Sequence
  ENSG00000186628_39 (sequence is synthesized)
gtaaactaacatgggtttagtaatacagagtacagtattcaggatttaaggcacccttacaagtcagaattggaaagttggtttgagacttgcaatctaaaatgacactgatttctgata

SEQ ID NO: 679859 - DNA, 120 bp, Artificial Sequence
  ENSG00000186628_40 (sequence is synthesized)
aaattaaatgacttttatttagaaaagtgtgtttaataaattacttcctgctggttcaaatgacacacaatcactttgtatacatccaataagatatttctgaagtgtatacttggtcaa

SEQ ID NO: 679860 - DNA, 120 bp, Artificial Sequence
  ENSG00000186628_41 (sequence is synthesized)
aagtaaaaagcagagcaaatgcatggacagtggggccttcttcttaatacttctcatcctccaaaatctgttaaaatcatcatcttccacaactcacacactggaagctgtccacagcac

SEQ ID NO: 679861 - DNA, 120 bp, Artificial Sequence
  ENSG00000186628_42 (sequence is synthesized)
aattcactgtgatgtggcattctgtaaataagactacattggtcttgatgcaaggcggttcagctaccagactgcactataagaaaagtcctctcctcaacttaccaagaaaacttcgcc

SEQ ID NO: 679862 - DNA, 120 bp, Artificial Sequence
  ENSG00000186628_43 (sequence is synthesized)
aatttctagtcaccttcctatcaattagtagagcaagattctcacatgttcactatgtctttctccagttttctcatctataagtgtactactcctattttctataggaagacaatggaa

SEQ ID NO: 679863 - DNA, 120 bp, Artificial Sequence
  ENSG00000186628_44 (sequence is synthesized)
agcgtgtaattgctgttggtagataagtaggtcttgaatttattttgcaaacaagacctgttctatctaccttttcatttaggaggctaaaagcagagtcagcttgatttcaaggactct

SEQ ID NO: 679864 - DNA, 120 bp, Artificial Sequence
  ENSG00000186628_45 (sequence is synthesized)
attttcttagtctccagaagaacataaccaaatccagcttttaaaacactgtcctttaacaagtcaagatactcaaataaagatcatgtataacttcaagctataggagattaactctgt

SEQ ID NO: 679865 - DNA, 120 bp, Artificial Sequence
  ENSG00000186628_46 (sequence is synthesized)
acatatgcttgtttcactgtaaccaatggttaattaatctaaatgcaagagaaaagttatttggaaagaagaccccagctggtcagcatcttttctgtcatcaggaagtctcctggaagg

SEQ ID NO: 679866 - DNA, 120 bp, Artificial Sequence
  ENSG00000186628_47 (sequence is synthesized)
agtatgactatgacctgggcacaacaactgcccctaagttagtacttattttagagttgctactgaacaggtggtggttcttgtcaagtatatcatgtctgactactttactgcttgttt

SEQ ID NO: 679867 - DNA, 120 bp, Artificial Sequence
  ENSG00000186628_48 (sequence is synthesized)
tctgctatcaccagttccagaaaaaaaaaaaaaaaaaattaagcccaactcactaattgattgctttttcattttcccagactgtgacagaatcatggtttttagctctattttcacctt

SEQ ID NO: 679868 - DNA, 120 bp, Artificial Sequence
  ENSG00000186628_49 (sequence is synthesized)
actcaaatcctggaggaattaaactatcatttatttgaaatgttacaaattagcctgcagttgattcaaacaacatgtagtcactcagacatagcaaataaaaatgttttggtatatgaa

SEQ ID NO: 679869 - DNA, 120 bp, Artificial Sequence
  ENSG00000186628_50 (sequence is synthesized)
catgcagaggtcactaggaaggaaagcctgctgaacacagattcaattttctagcagaactccaggtcctctgagttaaaggaagcatttatggacgcttagcagccactggggaccagc

SEQ ID NO: 679870 - DNA, 120 bp, Artificial Sequence
  ENSG00000186635_0 (sequence is synthesized)
acttttcgctttctcagtgttttcaggaagtgtgtgtgttggccacggctgcaggaggtgggggagacacaaagcaggaagcctccgggagaccagagctgggtgcagacatacacacac

SEQ ID NO: 679871 - DNA, 120 bp, Artificial Sequence
  ENSG00000186635_1 (sequence is synthesized)
acatacacacagacacacagagtcacacacactcacacacactctctctctctctccctctgtctttctctctctctctctctctctgtcctttcctcctggacagatccacagttatac

SEQ ID NO: 679872 - DNA, 120 bp, Artificial Sequence
  ENSG00000186635_2 (sequence is synthesized)
acagaaacaaacacacacgcacgtagagaagtgattcacaaacacttaaagacataaatcacaggtgcaaagccatacctgggctcaaaaacctccaagagaacgcagcctcagacccac

SEQ ID NO: 679873 - DNA, 120 bp, Artificial Sequence
  ENSG00000186635_3 (sequence is synthesized)
ccaggggccaggggccaggctgtttgcgagaccagcccaggcgggacccaggcttgcacgggcaggtacacgacattcttgggcatacgcagcccgcctggccggagctgtgggagtcct

SEQ ID NO: 679874 - DNA, 120 bp, Artificial Sequence
  ENSG00000186635_4 (sequence is synthesized)
cagccccaagacccagcaggcgtctgaggcctgcccactaaggaggaggagtcattgctgccatcattatcatcccctccccagccacagtctgaggagcccctgtccaccctcccccag

SEQ ID NO: 679875 - DNA, 120 bp, Artificial Sequence
  ENSG00000186635_5 (sequence is synthesized)
gggcctccccagcctccctctccacctccctgccccccggagatacctccaaagccggtacgcctgttcccagagttcgatgactctgactacgatgaggtcccagaggaggggccgggg

SEQ ID NO: 679876 - DNA, 120 bp, Artificial Sequence
  ENSG00000186635_6 (sequence is synthesized)
gccccagccagagtgatgaccaagaaggaggagcccccaccgagccgagtcccacgggccgtgcgcgtggccagtctgctgagcgagggagaggaactgtctggggacgaccaaggggat

SEQ ID NO: 679877 - DNA, 120 bp, Artificial Sequence
  ENSG00000186635_7 (sequence is synthesized)
gaggaagaggatgaccacgcctatgagggcgtccccaatggcggatggcataccagcagcctgagcttgtccttgcccagcacaatagctgcgccacaccccatggacgggccgcctggg

SEQ ID NO: 679878 - DNA, 120 bp, Artificial Sequence
  ENSG00000186635_8 (sequence is synthesized)
ggctccacccccgtcacaccagtcatcaaggctggctggctggacaagaacccaccgcagggatcttacatctatcagaaacgatgggtgagactggatactgatcacctgcgatacttt

SEQ ID NO: 679879 - DNA, 120 bp, Artificial Sequence
  ENSG00000186635_9 (sequence is synthesized)
gacagtaacaaggacgcttactctaagcgctttatctctgtggcctgcatctcccacgtggctgccatcggggaccagaagtttgaagtgatcacaaacaaccgaacctttgccttccgg

SEQ ID NO: 679880 - DNA, 120 bp, Artificial Sequence
  ENSG00000186635_10 (sequence is synthesized)
gcagagagtgatgtggagcggaaggagtggatgcaggccctgcagcaggccatggctgagcagcgtgcccgggcccggctctctagcgcttatctgctgggagttccaggctcagagcag

SEQ ID NO: 679881 - DNA, 120 bp, Artificial Sequence
  ENSG00000186635_11 (sequence is synthesized)
cctgaccgcgctggcagcctggagcttcgtggcttcaagaataagctgtacgtggccgtggtcggggacaaagtgcagctctacaagaatctagaggagtaccacctgggcattggcatc

SEQ ID NO: 679882 - DNA, 120 bp, Artificial Sequence
  ENSG00000186635_12 (sequence is synthesized)
accttcatcgacatgagcgtgggcaacgtgaaggaagtggaccggcgcagcttcgacctcaccacgccctaccgcatcttcagcttctctgctgactcagagctagagaaggagcagtgg

SEQ ID NO: 679883 - DNA, 120 bp, Artificial Sequence
  ENSG00000186635_13 (sequence is synthesized)
ttggaggccatgcagggagccatcgctgaggccctgtctacctcggaggtggccgagcgcatctgggctgcagcccccaacaggttctgtgctgactgcggggctcctcagcctgactgg

SEQ ID NO: 679884 - DNA, 120 bp, Artificial Sequence
  ENSG00000186635_14 (sequence is synthesized)
gcctccatcaacctctgtgttgttatctgcaagcgctgtgcaggggagcaccgtggcctgggcgctggcgtctccaaggtgcggagcctgaagatggacaggaaggtgtggacagaaaca

SEQ ID NO: 679885 - DNA, 120 bp, Artificial Sequence
  ENSG00000186635_15 (sequence is synthesized)
cttatcgagctcttcttacagctggggaatggcgctgggaaccgcttctgggcagccaacgtgccccccagtgaggccctgcagcccagcagcagccccagcacccggcggtgccacctg

SEQ ID NO: 679886 - DNA, 120 bp, Artificial Sequence
  ENSG00000186635_16 (sequence is synthesized)
gaggccaagtaccgtgagggcaagtaccgccgctaccacccgctctttggcaaccaggaggagctggacaaggccctgtgtgctgcagtcaccaccacagacctggctgagacccaggcg

SEQ ID NO: 679887 - DNA, 120 bp, Artificial Sequence
  ENSG00000186635_17 (sequence is synthesized)
ctcctgggctgtggggctgggatcaactgcttctcgggggaccctgaggcccccacgcccctggctcttgcagagcaggcggggcagacgctgcagatggaattccttcggaacaaccgg

SEQ ID NO: 679888 - DNA, 120 bp, Artificial Sequence
  ENSG00000186635_18 (sequence is synthesized)
accacagaggtgcctcggctggactcgatgaagcccctggaaaagcactactcagttgtcctgccgaccgtgagccacagtggcttcctctacaagactgcctctgccggcaagctgcta

SEQ ID NO: 679889 - DNA, 120 bp, Artificial Sequence
  ENSG00000186635_19 (sequence is synthesized)
caggaccgccgggcccgggaagagttcagccggcgctggtgtgtccttggtgacggggtcctgagctactttgagaatgagcgggcagtgacccccaatggagagattcgggccagcgag

SEQ ID NO: 679890 - DNA, 120 bp, Artificial Sequence
  ENSG00000186635_20 (sequence is synthesized)
ctcctgacacccatggctttgagcacacctttgaggtgtacacggagggagaacggctgtacctgtttgggctggagagtgcggagcaggctcatgagtgggtcaagtgtattgctaagg

SEQ ID NO: 679891 - DNA, 120 bp, Artificial Sequence
  ENSG00000186635_21 (sequence is synthesized)
cattcgtgcctcccctagccgaggatctgctggcccgggattttgagcggctgggacgcctaccctacaaagctggcctgagcctacagcgggcccaggagggctggttctctctcagtg

SEQ ID NO: 679892 - DNA, 120 bp, Artificial Sequence
  ENSG00000186635_22 (sequence is synthesized)
gctcggagctccgtgctgtcttcccggaggggccctgcgaagagccgctgcaactacggaaactgcaggagctttccatccagggggacagtgagaaccaggtgctggtgctggtggagc

SEQ ID NO: 679893 - DNA, 120 bp, Artificial Sequence
  ENSG00000186635_23 (sequence is synthesized)
gaaggaggacactgtacatacagggcgagcggcggctggacttcatgggttggctgggggccatccagaaagcagccgccagcatgggggacacgctgtcggagcagcagcttggggact

SEQ ID NO: 679894 - DNA, 120 bp, Artificial Sequence
  ENSG00000186635_24 (sequence is synthesized)
cggatatcccggtgatcgtgtaccgctgtgtggactacatcacgcagtgcggcctgacctccgagggcatctaccgcaagtgtgggcagacatcgaagacacagcggctgctggagagcc

SEQ ID NO: 679895 - DNA, 120 bp, Artificial Sequence
  ENSG00000186635_25 (sequence is synthesized)
tgcggcaggatgcgcgctctgtgcacctcaaggagggcgagcagcacgtggatgatgtttcctcggcgctcaagcgcttcctgcgcgacctgcctgatgggctcttcactcgcgcccagc

SEQ ID NO: 679896 - DNA, 120 bp, Artificial Sequence
  ENSG00000186635_26 (sequence is synthesized)
gcctaacctggctggaggcctcagagattgaggacgaggaggagaaggtctccaggtaccgagagctgctggtgcggctgccccctgtcaaccgggccacagtgaaggcccttatcagcc

SEQ ID NO: 679897 - DNA, 120 bp, Artificial Sequence
  ENSG00000186635_27 (sequence is synthesized)
acctgtactgtgttcagtgcttctcagacacgaaccagatgaacgtgcacaacctggcaattgtgtttgggcccacgctcttccagacagatgggcaggactacaaggctggccgtgtgg

SEQ ID NO: 679898 - DNA, 120 bp, Artificial Sequence
  ENSG00000186635_28 (sequence is synthesized)
tggaagacctcattaaccactatgtggtggtgtttagtgtggatgaggaagagctcaggaagcagcgggaggagatcactgccattgtgaagatgcgcgtggctggcactgccagtggga

SEQ ID NO: 679899 - DNA, 120 bp, Artificial Sequence
  ENSG00000186635_29 (sequence is synthesized)
cccagcatgccggtgacttcatctgcacagtgtatctggaagagaagaaggcagagactgagcagcatatcaaggtcccagcatccatgactgctgaggagctcaccctggagatcctgg

SEQ ID NO: 679900 - DNA, 120 bp, Artificial Sequence
  ENSG00000186635_30 (sequence is synthesized)
atcgccggaacgtgggcatcagggagaaggactattggacctgctttgaggtcaacgagagggaggaggcagagcgccccctgcactttgcggagaaggtgctgcccatcctgcacgggc

SEQ ID NO: 679901 - DNA, 120 bp, Artificial Sequence
  ENSG00000186635_31 (sequence is synthesized)
tgggcacggacagccacctggtggtgaagaagcaccaggccatggaggccatgctgctgtacctggccagccgtgtcggtgacaccaagcatggcatgatgaagttccgtgaggaccgca

SEQ ID NO: 679902 - DNA, 120 bp, Artificial Sequence
  ENSG00000186635_32 (sequence is synthesized)
gcctcctgggcctgggcctgccctcaggtggcttccacgatcgctacttcatcctcaacagcagctgcttgcggctctacaaggaggtccggagccagaggccgtggagcggggcccctg

SEQ ID NO: 679903 - DNA, 120 bp, Artificial Sequence
  ENSG00000186635_33 (sequence is synthesized)
agaccagtcaccggcctgagaaggagtggcctattaagagtctcaaagtctacctgggagtgaagaagaaactcaggccacccacctgctggggcttcacagtggtgcatgagacagaga

SEQ ID NO: 679904 - DNA, 120 bp, Artificial Sequence
  ENSG00000186635_34 (sequence is synthesized)
aacatgagaagcagcagtggtacctctgctgtgacacacagatggagctccgggagtggttcgctacctttctgtttgtgcagcatgacggcctggtgtggccctcagagccctcacgcg

SEQ ID NO: 679905 - DNA, 120 bp, Artificial Sequence
  ENSG00000186635_35 (sequence is synthesized)
tgtcccgggcagtgcctgaggtccggctgggtagtgtgtcactgatcccccttcgaggtagtgaaaatgaaatgcgccggagtgtggctgccttcaccgcggaccctctgtctcttctgc

SEQ ID NO: 679906 - DNA, 120 bp, Artificial Sequence
  ENSG00000186635_36 (sequence is synthesized)
gcaacgtctgagcacaggagcccatccttggctctaggattccgccgctggaagccttctgttcagacaccccttatgctccaaggcctgatgtgagccagcggggggtgcatgggaaac

SEQ ID NO: 679907 - DNA, 120 bp, Artificial Sequence
  ENSG00000186635_37 (sequence is synthesized)
tgcaccccacaacccacatcctccatcctgactgcagcatggggttccccggcaggggtgggaggcagcaggggtcagcctgggcaggaacctctcccaactctgtccaggtgttcagac

SEQ ID NO: 679908 - DNA, 120 bp, Artificial Sequence
  ENSG00000186635_38 (sequence is synthesized)
ctcttggcccaacctgctcaccccaccgggttcactgtccttgtggggctggagagatgggcataagtcaggaacttgggaggaccaccaccctttcagaggcgtgaggccctggggccc

SEQ ID NO: 679909 - DNA, 120 bp, Artificial Sequence
  ENSG00000186635_39 (sequence is synthesized)
tgccggaagggagccccctgctcctcccaacaaactccagaacagcagaaagcgggtgctgtagaggagcactcagctcacggggagggagctcttggctgagcttctacagggctgaga

SEQ ID NO: 679910 - DNA, 120 bp, Artificial Sequence
  ENSG00000186635_40 (sequence is synthesized)
gctgcgctttggggacttcagccttccttccagtctgggctgagtggggggtccagactacctgatgccccttccccaatttggggactttttgataatataaatatatctgtatatttt

SEQ ID NO: 679911 - DNA, 120 bp, Artificial Sequence
  ENSG00000186635_41 (sequence is synthesized)
gattcacaaggaatgaccctcttcatcgcctctcctaattcagtcctcacaacagtccttttacaaatgggacaacaggttagaggaagtcaggcagatttccagcatcatagagagtaa

SEQ ID NO: 679912 - DNA, 120 bp, Artificial Sequence
  ENSG00000186635_42 (sequence is synthesized)
aggaccagggaaggatcaggattcaaggactgcacccaggctctgcttccagcttgctgtgtgactttgggtaattttgttcccttagggaactgagctttctcatttgtaaatgcaaac

SEQ ID NO: 679913 - DNA, 120 bp, Artificial Sequence
  ENSG00000186635_43 (sequence is synthesized)
aggctgttgggaggatcaaatgagatccaggggtgaaaacagcttagtttactttcaggaatttacccacgcggtatataaaggcaaaatattattatagtcaggtgattgtagattgag

SEQ ID NO: 679914 - DNA, 120 bp, Artificial Sequence
  ENSG00000186635_44 (sequence is synthesized)
gaacccatttcctcattctgcaaattgcaaacctgagggcccaaagagggacaggggcttgccccaggtctcagcaggctgtgagcaagagctaaagcctaatcctcctgcctttgggcc

SEQ ID NO: 679915 - DNA, 120 bp, Artificial Sequence
  ENSG00000186635_45 (sequence is synthesized)
tggagcccttccttgtaccccaggggtcagtgtctttgttggatacaggcttagattgactgactgtaccctgagaacctaggggagtccctgttcccaattcttctcctacccccacct

SEQ ID NO: 679916 - DNA, 120 bp, Artificial Sequence
  ENSG00000186635_46 (sequence is synthesized)
tggcctgatggaggaagaccctgctgtgttgagatgagcaccagagccaagaagctgaggaggatctggagaattctggaggaagaggagagtgttgctggagctgtacagaccctgctt

SEQ ID NO: 679917 - DNA, 120 bp, Artificial Sequence
  ENSG00000186635_47 (sequence is synthesized)
ctcagctcccgcctcaggccgagatgaggagcccttcagaatagctgctgtctctgggaggacccgggcgtccttggcagcccagctgctctggacaaagccctgccagtcaggcctccg

SEQ ID NO: 679918 - DNA, 120 bp, Artificial Sequence
  ENSG00000186635_48 (sequence is synthesized)
ctggcaggaaccatggcagaggctggggatgctgcgctatcggtggccgagtggctgcgggcattgcacctggagcagtacacggggctctttgagcagcatggcctggtgtgggccact

SEQ ID NO: 679919 - DNA, 120 bp, Artificial Sequence
  ENSG00000186635_49 (sequence is synthesized)
gagtgccaaggcctcagcgacacccgcctgatggacatgggcatgctactccctggtcaccgccgccgcatcctggctggcctgctccgtgcccatacctcaccggcccctgcaccccgc

SEQ ID NO: 679920 - DNA, 120 bp, Artificial Sequence
  ENSG00000186635_50 (sequence is synthesized)
cccaccccacggcctgtgcccatgaagcgccacatcttccgctcaccacctgtgcctgccactccacccgagccgctgcccaccactacagaggatgaggggctccccgctgccccaccc

SEQ ID NO: 679921 - DNA, 120 bp, Artificial Sequence
  ENSG00000186635_51 (sequence is synthesized)
atcccgccccggaggagctgccttccgcccacctgcttcaccaccccatccacagctgccccagaccctgtgctgcccccgctgcctgctaagcggcatttggcagagctgagcgttcca

SEQ ID NO: 679922 - DNA, 120 bp, Artificial Sequence
  ENSG00000186635_52 (sequence is synthesized)
gcctgtcagggtgttgtgggggtgcccagctgcctgtcagaccctgaggactaccagacagagagtgggcagccatttcccgggaggcttccccttcccccacctcactctcttgccata

SEQ ID NO: 679923 - DNA, 120 bp, Artificial Sequence
  ENSG00000186635_53 (sequence is synthesized)
cgggggtcaggagtcacgtgtagccacagcgctctgggccaggggtcggggctctggtgtggctcccccaggccctggctgtatgtgggtgggcatgtggcctccccccaccctgtgtgt

SEQ ID NO: 679924 - DNA, 120 bp, Artificial Sequence
  ENSG00000186635_54 (sequence is synthesized)
taggaactcgtgtcctgtcccggagtgtctgtctctgtttcacttcttgtgttcccgtgtctgtctgtcttgcatccctagcccgcagtctttttctctgtccctttatctttctgtttt

SEQ ID NO: 679925 - DNA, 120 bp, Artificial Sequence
  ENSG00000186635_55 (sequence is synthesized)
tgtctgtgtcctaggtcggtttctgccactggctctcctgtccctgtgatctgggtctctgtgtggtctccgctggcagggggaggggagtgtgaggaaacagaactaaaagtgctgggc

SEQ ID NO: 679926 - DNA, 120 bp, Artificial Sequence
  ENSG00000186635_56 (sequence is synthesized)
tgtgtgggtcggggctgtgtggacagagggggcgtggcagccccgggtgggtgtgatctgtggcttgaagggaaggatgacgctgagtgggtctcgggggcaggaggagcccccaccgag

SEQ ID NO: 679927 - DNA, 120 bp, Artificial Sequence
  ENSG00000186635_57 (sequence is synthesized)
cattggcatcaccttcatcgacatgagcgtgggcaacgtgaaggaagtggaccggcgcagcttcgacctcaccacgccctaccgcatcttcaggtgaccctccatcttcttggctcaccg

SEQ ID NO: 679928 - DNA, 120 bp, Artificial Sequence
  ENSG00000186635_58 (sequence is synthesized)
tgctttcctacggggacaaagccctccaactcccaaagagatttctttggaactccatgctgttcacaacctcattgccccagtccttcagagccattgtagcaggaggcagagtacaga

SEQ ID NO: 679929 - DNA, 120 bp, Artificial Sequence
  ENSG00000186635_59 (sequence is synthesized)
tggggacattggcttctgtgctattcaacccaccccttgcttcaaggagattttgagttgcttttaattcatttgctagtttattcaataaacccttcctagcacctactgttagtccag

SEQ ID NO: 679930 - DNA, 120 bp, Artificial Sequence
  ENSG00000186635_60 (sequence is synthesized)
cggccccctccctccagccttggtgggggccctcataggcctctttggttcacaccattcaaaggagccccttctgcctggccctggaagctgggagtcccctctgcctggccctgggag

SEQ ID NO: 679931 - DNA, 120 bp, Artificial Sequence
  ENSG00000186635_61 (sequence is synthesized)
ctgggagcctggctgattggagtgctccccggctggcagtggagagtggctgcagcagctgcagcagcttcagcggggcgccagcccctctgggccttcacaaaatacctgtgggtctct

SEQ ID NO: 679932 - DNA, 120 bp, Artificial Sequence
  ENSG00000186635_62 (sequence is synthesized)
cccggctcctccacaaggcagaaggagcttgagatcctctggaggctctggctgactgggcagctgtgtccaggcagccagcaggggccctgtgtgctgcagtcaccaccacagacctgg

SEQ ID NO: 679933 - DNA, 120 bp, Artificial Sequence
  ENSG00000186635_63 (sequence is synthesized)
ccgggctctcaggatggcacagcagtgggggagaactgtagactctcaagacccctcctgctgtggccctggacggccactctagtgtgccctgtagccccactaagccctggcacccgg

SEQ ID NO: 679934 - DNA, 120 bp, Artificial Sequence
  ENSG00000186635_64 (sequence is synthesized)
ttgtggcacttgcactaggcttaccctaacccacaggctccagttgcctgcctctgcttctcattcccatcgccgctccatacagagccaggggccctggaagaccgagagttccttacc

SEQ ID NO: 679935 - DNA, 120 bp, Artificial Sequence
  ENSG00000186635_65 (sequence is synthesized)
ctggttgaatgcctggcctgcattgacttggagggcacagggactgctgtcacccaccatgagaggcacagcagcccaggcggggtggggggaagatagttacagggggtttctgacttg

SEQ ID NO: 679936 - DNA, 120 bp, Artificial Sequence
  ENSG00000186635_66 (sequence is synthesized)
gagaagcagcagtggtgagtgagcgcctcatcctgagatcccaggctgaggaaagatggtggcacgtcccccttcattgtgtccctcatcactgcccagatctgtgaccactagcagacc

SEQ ID NO: 679937 - DNA, 120 bp, Artificial Sequence
  ENSG00000186635_67 (sequence is synthesized)
atacaatctgattcagggtgatacttcaagtcctccagtttgcagggcatcagggtggtgctgggattcgctgttacagatgtcccagttgggacggctgcctcggagactgagggttga

SEQ ID NO: 679938 - DNA, 120 bp, Artificial Sequence
  ENSG00000186635_68 (sequence is synthesized)
ctgtctgatactgctgcagggagacaggccttgggggcctagggctgggaggttggttgggctagattgtgaacagggagggctttatcaggaaggcttcttggaggaggcgccctgtgc

SEQ ID NO: 679939 - DNA, 120 bp, Artificial Sequence
  ENSG00000186635_69 (sequence is synthesized)
cccttggtctgcaagtggaaatattcccgttacaggctctcaggatggcacagcagtgggggagaactgtagactctcaagacccctcctgctgtggccctggacggccactctagtgtg

SEQ ID NO: 679940 - DNA, 120 bp, Artificial Sequence
  ENSG00000186638_0 (sequence is synthesized)
agtttatagaaacctattcaccaaaatggcatcctggttatatgaatgtctttgtgaagctgaacttgcacagtattattctcatttcactgcccttggccttcagaaaatagatgaatt

SEQ ID NO: 679941 - DNA, 120 bp, Artificial Sequence
  ENSG00000186638_1 (sequence is synthesized)
agccaagattacaatgaaggactactccaaattaggagtccatgacatgaacgaccgcaaacgtctcttccaacttatcaaaattattaagattatgcaagaagaagataaagcagtcag

SEQ ID NO: 679942 - DNA, 120 bp, Artificial Sequence
  ENSG00000186638_2 (sequence is synthesized)
tatcccagagcgtcatcttcagacaagcagcctgcgcatcaaatctcaggaattaagatctggccctcgcagacagctgaattttgattctcctgctgacaataaagacagaaatgccag

SEQ ID NO: 679943 - DNA, 120 bp, Artificial Sequence
  ENSG00000186638_3 (sequence is synthesized)
caatgatgggtttgaaatgtgcagtttatcagatttctctgcaaatgaacagaagtccacttacctaaaagtgctagaacacatgctaccagatgattcccagtaccatacaaaaacagg

SEQ ID NO: 679944 - DNA, 120 bp, Artificial Sequence
  ENSG00000186638_4 (sequence is synthesized)
aattctgaatgccacagctggtgattcctatgtgcaaacagaaatcagcacttcactcttttcaccaaattacctttctgcaatactgggggattgtgatattcccattattcaaagaat

SEQ ID NO: 679945 - DNA, 120 bp, Artificial Sequence
  ENSG00000186638_5 (sequence is synthesized)
ctctcatgtttcagggtataactatggaatccctcattcttgtatcagacagaacacttcagagaaacagaatccttggactgagatggagaaaatcagagtttgtgttcgaaaacgccc

SEQ ID NO: 679946 - DNA, 120 bp, Artificial Sequence
  ENSG00000186638_6 (sequence is synthesized)
cctgggcatgagggaggtacgtcgtggagaaattaatattattactgtagaagacaaagaaactctacttgtgcatgagaagaaagaagcagttgacctcactcaatatattctgcagca

SEQ ID NO: 679947 - DNA, 120 bp, Artificial Sequence
  ENSG00000186638_7 (sequence is synthesized)
tgttttttattttgatgaagtctttggtgaggcgtgcaccaatcaggatgtatacatgaagactactcacccacttattcagcatattttcaatggaggcaatgccacttgctttgctta

SEQ ID NO: 679948 - DNA, 120 bp, Artificial Sequence
  ENSG00000186638_8 (sequence is synthesized)
tggacagacaggtgctggaaagacctacaccatgataggaactcatgagaacccaggattgtatgctctagctgccaaagatatcttcaggcaactagaagtgtcccagccaagaaagca

SEQ ID NO: 679949 - DNA, 120 bp, Artificial Sequence
  ENSG00000186638_9 (sequence is synthesized)
cctctttgtgtggatcagcttctatgaaatttactgtggacagctttatgacctcctaaatagaagaaaaaggctctttgcaagagaagatagcaagcacatggtgcagatagtgggact

SEQ ID NO: 679950 - DNA, 120 bp, Artificial Sequence
  ENSG00000186638_10 (sequence is synthesized)
gcaagagcttcaggtggacagtgtggagctcctcttagaggtgatcttaaagggcagcaaggagcgcagcactggggccactggagttaatgcagactcctcccgctcccatgccgtcat

SEQ ID NO: 679951 - DNA, 120 bp, Artificial Sequence
  ENSG00000186638_11 (sequence is synthesized)
ccaaattcagatcaaagattcagccaagaggacatttggcaggatctcttttattgacttggctggcagtgaaagagcagcagatgcaagggactcagatagacagacaaagatggaagg

SEQ ID NO: 679952 - DNA, 120 bp, Artificial Sequence
  ENSG00000186638_12 (sequence is synthesized)
tgcagaaataaatcagagtctactggctctgaaggaatgtatccgagcactggatcaggaacacacccatactcccttcaggcaaagcaaactaactcaggtcctgaaggactctttcat

SEQ ID NO: 679953 - DNA, 120 bp, Artificial Sequence
  ENSG00000186638_13 (sequence is synthesized)
cggcaatgccaaaacctgcatgatcgccaacatctcaccaagccacgtggccactgaacacactctcaacaccttgcgctatgctgaccgggtcaaagaactaaagaaaggcattaagtg

SEQ ID NO: 679954 - DNA, 120 bp, Artificial Sequence
  ENSG00000186638_14 (sequence is synthesized)
ttgcacttcagttaccagtcgaaatcggacatctggaaactcctctccaaaacgaattcagagctcccctggggctttgtcagaggacaaatgttctcccaaaaaagtcaagctgggatt

SEQ ID NO: 679955 - DNA, 120 bp, Artificial Sequence
  ENSG00000186638_15 (sequence is synthesized)
tcagcagtcactcacagtggcagcccctggttccacgagagggaaggtccatcctctgaccagccacccacccaacattccttttacttctgcacctaaggtctctggtaaaaggggtgg

SEQ ID NO: 679956 - DNA, 120 bp, Artificial Sequence
  ENSG00000186638_16 (sequence is synthesized)
ctccagagggagtccttcacaagagtgggtcattcatgctagccctgtgaaaggaactgtgcgctctggacatgtggccaaaaaaaagccagaagagtcagcaccattgtgctctgagaa

SEQ ID NO: 679957 - DNA, 120 bp, Artificial Sequence
  ENSG00000186638_17 (sequence is synthesized)
aaatcgaatgggcaacaaaactgtccttgggtgggaaagcagggcctcaggcccaggagaaggcctagtgcgtggtaagctgtccaccaagtgcaagaaagtgcagacagtgcagccagt

SEQ ID NO: 679958 - DNA, 120 bp, Artificial Sequence
  ENSG00000186638_18 (sequence is synthesized)
acagaagcagcttgtgtctcgagttgagctctcctttggcaacgcccaccacagggctgagtacagtcaagacagccagaggggcacgcctgctaggcctgcctctgaagcttggacaaa

SEQ ID NO: 679959 - DNA, 120 bp, Artificial Sequence
  ENSG00000186638_19 (sequence is synthesized)
catcccgccacatcagaaggagagggaggaacatctgcgtttctatcaccagcagttccaacagccacctctcctccaacagaagttaaaataccaaccactgaaaaggtctttacgcca

SEQ ID NO: 679960 - DNA, 120 bp, Artificial Sequence
  ENSG00000186638_20 (sequence is synthesized)
gtacaggcccccagagggtcagctcacgaatgagactccgcctctgttccactcttactctgaaaaccatgatggagcccaagtagaggaacttgatgacagtgatttcagtgaagattc

SEQ ID NO: 679961 - DNA, 120 bp, Artificial Sequence
  ENSG00000186638_21 (sequence is synthesized)
tttttcacacatctctagtcagagggccacaaagcaaaggaacaccctggagaatagcgaagactcattcttcctgcaccagacgtggggacagggtcctgagaagcaggtggcagaaag

SEQ ID NO: 679962 - DNA, 120 bp, Artificial Sequence
  ENSG00000186638_22 (sequence is synthesized)
acagcagagtctgttttctagccccaggacaggtgacaagaaagatctaactaaaagctgggtggactccagggaccccataaaccacagaagagcagcactcgatcacagctgcagccc

SEQ ID NO: 679963 - DNA, 120 bp, Artificial Sequence
  ENSG00000186638_23 (sequence is synthesized)
aagtaaggggcccgtggactggagcagagagaactctacttcctcagggccttctcccagagacagcctggcagagaagccatactgttcacaggtagatttcatatatagacaggaaag

SEQ ID NO: 679964 - DNA, 120 bp, Artificial Sequence
  ENSG00000186638_24 (sequence is synthesized)
aggtggaggctcttcctttgatctcagaaaggatgcctcccaaagtgaggtttctggggagaatgagggcaacttgccatccccagaggaagatggtttcactatctcattgtcccacgt

SEQ ID NO: 679965 - DNA, 120 bp, Artificial Sequence
  ENSG00000186638_25 (sequence is synthesized)
gatccccagaccaaagagacacagtcaccacacctctgagagaagtcagtgcagacggcccaatccaggtgaccagcactgtgaaaaacggtcatgctgtcccaggagaggatcctaggg

SEQ ID NO: 679966 - DNA, 120 bp, Artificial Sequence
  ENSG00000186638_26 (sequence is synthesized)
ggcagttaggcacgcatgctgaatatgcttctggactcatgtctcccctcaccatgtccctcctggagaacccagacaacgaagggtctcctccctcggagcagctggtccaggatgggg

SEQ ID NO: 679967 - DNA, 120 bp, Artificial Sequence
  ENSG00000186638_27 (sequence is synthesized)
ctacgcacagtctagtggcagagagcacagggggcccagttgtgagccacacagtgccatctggtgatcaagaggcagccttgccagtgtcttcagcaactaggcacctgtggctgtcct

SEQ ID NO: 679968 - DNA, 120 bp, Artificial Sequence
  ENSG00000186638_28 (sequence is synthesized)
catctccccctgataataagcctggtggtgatcttccagctctgtccccatcacccatccgtcagcacccagctgacaagctgcccagcagggaggcagacctaggagaggcctgccaga

SEQ ID NO: 679969 - DNA, 120 bp, Artificial Sequence
  ENSG00000186638_29 (sequence is synthesized)
gcagagagactgtacttttctcccacgaacacatgggtagtgagcagtatgatgctgatgcagaggagacggggctggatggctcctggggtttcccaggaaagcccttcaccaccatac

SEQ ID NO: 679970 - DNA, 120 bp, Artificial Sequence
  ENSG00000186638_30 (sequence is synthesized)
atatgggggtaccccattctggacctacactcaccccacgaacaggaagtagtgatgtggctgaccagctctgggcccaggagagaaaacatcctacaaggcttggttggcaggagtttg

SEQ ID NO: 679971 - DNA, 120 bp, Artificial Sequence
  ENSG00000186638_31 (sequence is synthesized)
gtttgtccacagaccccatcaagttgccctgcaacagtgaaaatgtcacatggctcaaacccaggccgatctcaaggtgcttagcaaggccaagttctcccttggttcccagctgctctc

SEQ ID NO: 679972 - DNA, 120 bp, Artificial Sequence
  ENSG00000186638_32 (sequence is synthesized)
ccaagactgcagggacactccgtcagcccaccctggagcaagcgcagcaggtggtcatccgagcacaccaggaacagctggatgaaatggctgagctcggcttcaaggaggagacgctga

SEQ ID NO: 679973 - DNA, 120 bp, Artificial Sequence
  ENSG00000186638_33 (sequence is synthesized)
tgagccagctggcttctaatgattttgaagattttgtgacccagctggatgaaatcatggttctgaaatccaagtgtatccagagtctgaggagccagctgcagctctatctcacctgcc

SEQ ID NO: 679974 - DNA, 120 bp, Artificial Sequence
  ENSG00000186638_34 (sequence is synthesized)
acgggcccaccgcagcccctgagggaacagtgccgtcttagagccagaccctgtgccgagatggtgggggccctgcaggagtctgtgctgggctctcaggctggaggagcctctgccagg

SEQ ID NO: 679975 - DNA, 120 bp, Artificial Sequence
  ENSG00000186638_35 (sequence is synthesized)
tcctccctgcacacaccagaacccacacgctggtcctgcctatgctagcgtcaccccagccccacgtggcttcagataggtcccagcttctccctcagggacaggcccctgtccctcagt

SEQ ID NO: 679976 - DNA, 120 bp, Artificial Sequence
  ENSG00000186638_36 (sequence is synthesized)
tccatgcacaggagtgcctccaagggtgggccaggccgaagaacctaatgcctttcccttgtgcctagagaatatgattaactaaccccttgcctgtgggaatatatttgggtctaataa

SEQ ID NO: 679977 - DNA, 120 bp, Artificial Sequence
  ENSG00000186638_37 (sequence is synthesized)
ccctgaagtttctaagtttggggatcagaggatggggtggtcagtggtagcctagaggtcagaggtcacaagacagagaagacaacatgctgagaccagaggcttcaccagctgaattct

SEQ ID NO: 679978 - DNA, 120 bp, Artificial Sequence
  ENSG00000186638_38 (sequence is synthesized)
gtgcctaacttagaagactaaacactggcccaaacttaaccattggtgctagggggacaggggtggggtgagctctgccccatcagcccttggagattgatttggggatttagaggcgtt

SEQ ID NO: 679979 - DNA, 120 bp, Artificial Sequence
  ENSG00000186638_39 (sequence is synthesized)
tttgaaaatgtaaatagcataaaccttgacttgatgtgtcactgacagcagcagatgtgagacaggccttatatttacagctcccttcccttcctgcaatccagtgttgaggcagaagag

SEQ ID NO: 679980 - DNA, 120 bp, Artificial Sequence
  ENSG00000186638_40 (sequence is synthesized)
ggtgcctgtgtcacacatcaatttttctcctgacttttgctcgggtgaaaggcctctgtacaatgcccgatactctcatgcttccatggcagctcctggctcctatctgggacacctcac

SEQ ID NO: 679981 - DNA, 120 bp, Artificial Sequence
  ENSG00000186638_41 (sequence is synthesized)
tacccagccccctcatggaatagtccatctcctagcctggccttcatccagttcaccctgcccagccaccctgcctctcaggggtctgtgttgggaaccttggcagttgaacagagtgct

SEQ ID NO: 679982 - DNA, 120 bp, Artificial Sequence
  ENSG00000186638_42 (sequence is synthesized)
ctgttcaacagtctgaggcctctgaaacagaattcacacacaaaccttcagccaagttctgcctgctgtgtatctttttagcaggaagcagctcaggacagggaagacaaagtagcctcc

SEQ ID NO: 679983 - DNA, 120 bp, Artificial Sequence
  ENSG00000186638_43 (sequence is synthesized)
aggtgccaattactttaaagccactctgggtcaaatggagattcatgagtcacggccttggcccgaacgcccattactatgtgagcctttatttccttcagataaaggataactttttac

SEQ ID NO: 679984 - DNA, 120 bp, Artificial Sequence
  ENSG00000186638_44 (sequence is synthesized)
ggttttaaaaggagggcttaattaaaaggccaagaagagggttaaatggctctcttgagacactagcagcctggtccagtcaccctttgtcagcctgacagtgcctcatctgaccgccag

SEQ ID NO: 679985 - DNA, 120 bp, Artificial Sequence
  ENSG00000186638_45 (sequence is synthesized)
ggggcatccttattggtgcttcccggctgcagggcactgcggcccctccctcacatgatcactaaaaaccttcaaagacccagtctagccaaaagctcaagtgggacaatggcacagtat

SEQ ID NO: 679986 - DNA, 120 bp, Artificial Sequence
  ENSG00000186638_46 (sequence is synthesized)
taaggtcaaggacaaaaacttacttactttaggaatgaaccctattctatcatcatatacaacagcaccactgagagctggtgaaacagtttaaatcccatcctctgcttgtggcaaatg

SEQ ID NO: 679987 - DNA, 120 bp, Artificial Sequence
  ENSG00000186638_47 (sequence is synthesized)
atgcataaatgcctgctgctcacagtaaaagggcttcttcctcttttactgggtgatccccctgaaggcccagcctatcccaactccacagtcaggaaggcctacgtccttggtccacag

SEQ ID NO: 679988 - DNA, 120 bp, Artificial Sequence
  ENSG00000186638_48 (sequence is synthesized)
acggagctgggccaggtttaaaagactcagtctaggcttgcctttgcaaaccaaaaacgaggacaggtctgaagtgggaagaaagctccgaaatagaaaacggttaggtcctattctatc

SEQ ID NO: 679989 - DNA, 120 bp, Artificial Sequence
  ENSG00000186638_49 (sequence is synthesized)
cccagcaaatctaagcaagaaatctctttatacaccacatggcccccccactcccataaaacagccttggtaataaagaagttatcacaccaagacataccttttagatttttattagta

SEQ ID NO: 679990 - DNA, 120 bp, Artificial Sequence
  ENSG00000186638_50 (sequence is synthesized)
gttctctctgaagaatcaaaatagttagttagcaaattattttagattcaagactgtatatcctttgtatttagatctttaatgatgtacaacataatacaaaacaaaccagagagactg

SEQ ID NO: 679991 - DNA, 120 bp, Artificial Sequence
  ENSG00000186642_0 (sequence is synthesized)
agagccagccgagcagcagaggcagtggcagcgggagaggcgggagcagcggggcagcagagctggattggggtgttgagtccaggctgagtagggggcagcccactgctcttggtccct

SEQ ID NO: 679992 - DNA, 120 bp, Artificial Sequence
  ENSG00000186642_1 (sequence is synthesized)
gtgcctgctgggggtgccctgccctgaactccaggcagcggggacagggcgaggtgccaccttagtctggctggggaggcggacgatgaggagtgatggggcaggcatgcggccactcca

SEQ ID NO: 679993 - DNA, 120 bp, Artificial Sequence
  ENSG00000186642_2 (sequence is synthesized)
tcctctgcaggagccagcagtacccggcagcgcgaccggctgagccgcggggccagcaggtcttcctcaagccggacgagccgccgccgccgccgcagccatgcgccgacagcctgcagg

SEQ ID NO: 679994 - DNA, 120 bp, Artificial Sequence
  ENSG00000186642_3 (sequence is synthesized)
acgccttgctgagtctgggctctgtcatcgacatttcaggcctgcaacgtgctgtcaaggaggccctgtcagctgtgctcccccgagtggaaactgtctacacctacctactggatggtg

SEQ ID NO: 679995 - DNA, 120 bp, Artificial Sequence
  ENSG00000186642_4 (sequence is synthesized)
agtcccagctggtgtgtgaggaccccccacatgagctgccccaggaggggaaagtccgggaggctatcatctcccagaagcggctgggctgcaatgggctgggcttctcagacctgccag

SEQ ID NO: 679996 - DNA, 120 bp, Artificial Sequence
  ENSG00000186642_5 (sequence is synthesized)
ggaagcccttggccaggctggtggctccactggctcctgatacccaagtgctggtcatgccgctagcggacaaggaggctggggccgtggcagctgtcatcttggtgcactgtggccagc

SEQ ID NO: 679997 - DNA, 120 bp, Artificial Sequence
  ENSG00000186642_6 (sequence is synthesized)
tgagtgataatgaggaatggagcctgcaggcggtggagaagcataccctggtcgccctgcggagggtgcaggtcctgcagcagcgcgggcccagggaggctccccgagccgtccagaacc

SEQ ID NO: 679998 - DNA, 120 bp, Artificial Sequence
  ENSG00000186642_7 (sequence is synthesized)
ccccggaggggacggcggaagaccagaagggcggggcggcgtacaccgaccgcgaccgcaagatcctccaactgtgcggggaactctacgacctggatgcctcttccctgcagctcaaag

SEQ ID NO: 679999 - DNA, 120 bp, Artificial Sequence
  ENSG00000186642_8 (sequence is synthesized)
tgctccaatacctgcagcaggagacccgggcatcccgctgctgcctcctgctggtgtcggaggacaatctccagctttcttgcaaggtcatcggagacaaagtgctcggggaagaggtca

SEQ ID NO: 680000 - DNA, 120 bp, Artificial Sequence
  ENSG00000186642_9 (sequence is synthesized)
gctttcccttgacaggatgcctgggccaggtggtggaagacaagaagtccatccagctgaaggacctcacctccgaggatgtacaacagctgcagagcatgttgggctgtgagctgcagg

SEQ ID NO: 680001 - DNA, 120 bp, Artificial Sequence
  ENSG00000186642_10 (sequence is synthesized)
ccatgctctgtgtccctgtcatcagccgggccactgaccaggtggtggccttggcctgcgccttcaacaagctagaaggagacttgttcaccgacgaggacgagcatgtgatccagcact

SEQ ID NO: 680002 - DNA, 120 bp, Artificial Sequence
  ENSG00000186642_11 (sequence is synthesized)
gcttccactacaccagcaccgtgctcaccagcaccctggccttccagaaggaacagaaactcaagtgtgagtgccaggctcttctccaagtggcaaagaacctcttcacccacctggatg

SEQ ID NO: 680003 - DNA, 120 bp, Artificial Sequence
  ENSG00000186642_12 (sequence is synthesized)
acgtctctgtcctgctccaggagatcatcacggaggccagaaacctcagcaacgcagagatctgctctgtgttcctgctggatcagaatgagctggtggccaaggtgttcgacgggggcg

SEQ ID NO: 680004 - DNA, 120 bp, Artificial Sequence
  ENSG00000186642_13 (sequence is synthesized)
tggtggatgatgagagctatgagatccgcatcccggccgatcagggcatcgcgggacacgtggcgaccacgggccagatcctgaacatccctgacgcatatgcccatccgcttttctacc

SEQ ID NO: 680005 - DNA, 120 bp, Artificial Sequence
  ENSG00000186642_14 (sequence is synthesized)
gcggcgtggacgacagcaccggcttccgcacgcgcaacatcctctgcttccccatcaagaacgagaaccaggaggtcatcggtgtggccgagctggtgaacaagatcaatgggccatggt

SEQ ID NO: 680006 - DNA, 120 bp, Artificial Sequence
  ENSG00000186642_15 (sequence is synthesized)
tcagcaagttcgacgaggacctggcgacggccttctccatctactgcggcatcagcatcgcccattctctcctatacaaaaaagtgaatgaggctcagtatcgcagccacctggccaatg

SEQ ID NO: 680007 - DNA, 120 bp, Artificial Sequence
  ENSG00000186642_16 (sequence is synthesized)
agatgatgatgtaccacatgaaggtctccgatgatgagtataccaaacttctccatgatgggatccagcctgtggctgccattgactccaattttgcaagtttcacctatacccctcgtt

SEQ ID NO: 680008 - DNA, 120 bp, Artificial Sequence
  ENSG00000186642_17 (sequence is synthesized)
cgaccctggcccggttctgtttgatggtgaagaagggctaccgggatcccccctaccacaactggatgcacgccttttctgtctcccacttctgctacctgctctacaagaacctggagc

SEQ ID NO: 680009 - DNA, 120 bp, Artificial Sequence
  ENSG00000186642_18 (sequence is synthesized)
tcaccaactacctcgaggacatcgagatctttgccttgtttatttcctgcatgtgtcatgacctggaccacagaggcacaaacaactctttccaggtggcctcgaaatctgtgctggctg

SEQ ID NO: 680010 - DNA, 120 bp, Artificial Sequence
  ENSG00000186642_19 (sequence is synthesized)
cgctctacagctctgagggctccgtcatggagaggcaccactttgctcaggccatcgccatcctcaacacccacggctgcaacatctttgatcatttctcccggaaggactatcagcgca

SEQ ID NO: 680011 - DNA, 120 bp, Artificial Sequence
  ENSG00000186642_20 (sequence is synthesized)
tgctggatctgatgcgggacatcatcttggccacagacctggcccaccatctccgcatcttcaaggacctccagaagatggctgaggtgggctacgaccgaaacaacaagcagcaccaca

SEQ ID NO: 680012 - DNA, 120 bp, Artificial Sequence
  ENSG00000186642_21 (sequence is synthesized)
gacttctcctctgcctcctcatgacctcctgtgacctctctgaccagaccaagggctggaagactacgagaaagatcgcggagctgatctacaaagaattcttctcccagggagacctgg

SEQ ID NO: 680013 - DNA, 120 bp, Artificial Sequence
  ENSG00000186642_22 (sequence is synthesized)
agaaggccatgggcaacaggccgatggagatgatggaccgggagaaggcctatatccctgagctgcaaatcagcttcatggagcacattgcaatgcccatctacaagctgttgcaggacc

SEQ ID NO: 680014 - DNA, 120 bp, Artificial Sequence
  ENSG00000186642_23 (sequence is synthesized)
tgttccccaaagcggcagagctgtacgagcgcgtggcctccaaccgtgagcactggaccaaggtgtcccacaagttcaccatccgcggcctcccaagtaacaactcgctggacttcctgg

SEQ ID NO: 680015 - DNA, 120 bp, Artificial Sequence
  ENSG00000186642_24 (sequence is synthesized)
atgaggagtacgaggtgcctgatctggatggcactagggcccccatcaatggctgctgcagccttgatgctgagtgatcccctccagggacacttccctgcccaggccacctcccacagc

SEQ ID NO: 680016 - DNA, 120 bp, Artificial Sequence
  ENSG00000186642_25 (sequence is synthesized)
cctccactggtctggccagatgcactgggaacagagccacgggtcctgggtcctagaccaggacttcctgtgtgaccctggacaagtactaccttcctgggcctcagctttctcgtctgt

SEQ ID NO: 680017 - DNA, 120 bp, Artificial Sequence
  ENSG00000186642_26 (sequence is synthesized)
ataatggaagcaagacttccaacctcacggagactttgtaatttgttttctgagagcacaggggtgaccaatgagcagtgggccctactctgcacctctgaccacaccttggcaagtctt

SEQ ID NO: 680018 - DNA, 120 bp, Artificial Sequence
  ENSG00000186642_27 (sequence is synthesized)
tcccaagccattctttgtctgagcagcttgatggtttctccttgccccatttctgccccaccagatctttgctcctttccctttgaggactcccaccctttggggtctccaggatcctca

SEQ ID NO: 680019 - DNA, 120 bp, Artificial Sequence
  ENSG00000186642_28 (sequence is synthesized)
tggaaggggaaggtgagacatctgagtgagcagagtgtggcatcttggaaacagtccttagttctgtgggaggactagaaacagccgcggggcgaaggccccctgaggaccactactata

SEQ ID NO: 680020 - DNA, 120 bp, Artificial Sequence
  ENSG00000186642_29 (sequence is synthesized)
ctgatggtgggattgggacctgggggatacaggggccccaggaagaagctgccagaggggcagctcagtgctctgcagagaggggccctggggagaagcaggatgggattgatgggcagg

SEQ ID NO: 680021 - DNA, 120 bp, Artificial Sequence
  ENSG00000186642_30 (sequence is synthesized)
agggatccccgcactgggagacaggcccaggtatgaatgagccagccatgcttcctcctgcctgtgtgacgctgggcgagtctcttcccctgtctgggccaaacagggagcgggtaagac

SEQ ID NO: 680022 - DNA, 120 bp, Artificial Sequence
  ENSG00000186642_31 (sequence is synthesized)
aatccatgctctaagatccattttagatcaatgtctaaaatagctctatcgctctgcggagtcccagcagaggctatggaatgtttctgcaaccctaaggcacagagagcccaaccctga

SEQ ID NO: 680023 - DNA, 120 bp, Artificial Sequence
  ENSG00000186642_32 (sequence is synthesized)
gtgtctcagaggccccctgagtgttccccttggcctgagccccttacccattcctgcagccagtgagagacctggcctcagccctggcagggctctctcttcaaggccatatccacctgt

SEQ ID NO: 680024 - DNA, 120 bp, Artificial Sequence
  ENSG00000186642_33 (sequence is synthesized)
gccctggggcttgggagaccccatagggccgggactcttgggtcagcccggccactggcttctctctttttctctgtttcattctgtgtgcgttgtggggtgggggagggggtccacctg

SEQ ID NO: 680025 - DNA, 120 bp, Artificial Sequence
  ENSG00000186642_34 (sequence is synthesized)
ccttacctttctgagttgcctttagagagatgcgtttttctaggactctgtgcaactgtcgtatatggtcccgtgggctgaccgctttgtacatgagaataaatctatttctttctacca

SEQ ID NO: 680026 - DNA, 120 bp, Artificial Sequence
  ENSG00000186642_35 (sequence is synthesized)
actcgggcggaccaggcgaagctgtcgcggacgcgctgaccgagcgcagcggccgggccggcgggcgggcgggcggctgcgagcatggtcctggtgctgcaccacatcctcatcgctgtt

SEQ ID NO: 680027 - DNA, 120 bp, Artificial Sequence
  ENSG00000186642_36 (sequence is synthesized)
ttccccaccgcctccagcgtcccggagcataagggagtcgggttccatgcctgggacgtacgtaacctgcggaaactgcgagggcaggtcccggccggatccctccctccaaccgatccc

SEQ ID NO: 680028 - DNA, 120 bp, Artificial Sequence
  ENSG00000186642_37 (sequence is synthesized)
ggacaggtcacgagggcggggccgggcagaacttggaggggaggtgggcgggttaggcgatcccgggagccggcggcgggcccggcgcggagctgagcggcgcctgagggacccggacac

SEQ ID NO: 680029 - DNA, 120 bp, Artificial Sequence
  ENSG00000186642_38 (sequence is synthesized)
gaagacatccggcatccgtaaaatggagtaatgattctgaccctgcaggttttctgggaggattaaatgagttacattttaaagatgcctggtacatgcctgccaggagaaggcacaaca

SEQ ID NO: 680030 - DNA, 120 bp, Artificial Sequence
  ENSG00000186642_39 (sequence is synthesized)
ggccttcactgaggctgcctctgcagttggaccaagctggacacacagcggggccagcaggtcttcctcaagccggacgagccgccgccgccgccgcagccatgcgccgacagcctgcag

SEQ ID NO: 680031 - DNA, 120 bp, Artificial Sequence
  ENSG00000186642_40 (sequence is synthesized)
actctggctggtggcttcagggggcaggcattctgcctttcctgtctcccaccctaagggagttggccttgcatgcctcccatccacggttgcctctactgggggctgccactgggagac

SEQ ID NO: 680032 - DNA, 120 bp, Artificial Sequence
  ENSG00000186642_41 (sequence is synthesized)
gaacttcctgggaagacagagtcatcaaggaaggctgtggagggtccctcagagatggaggggcttgtagtctgccatcaggaagccatagggcctgcccaggggctagaggctggactg

SEQ ID NO: 680033 - DNA, 120 bp, Artificial Sequence
  ENSG00000186642_42 (sequence is synthesized)
gatgatcccaagggctgctcttggaccaaccatgcccagggcatgtgacctcagggtttgcatccctcccaaccctgtttttctaacattttgtgtgggcttggtttcaagagttcttag

SEQ ID NO: 680034 - DNA, 120 bp, Artificial Sequence
  ENSG00000186642_43 (sequence is synthesized)
ttcttagatctctaaaaatgcatagctccgagaacggttgcttcaactattttgtggttctctagtttagatgtaagtttctaagactccagattttgagtgtggagcttgaagaaggac

SEQ ID NO: 680035 - DNA, 120 bp, Artificial Sequence
  ENSG00000186642_44 (sequence is synthesized)
ccaggcaagggccccgtcttgatactggcagcccctctgatacctccctctgccctctccaggccatcctgagcatgctgcaggacatgaatttcatcaacaactacaaaattgactgcc

SEQ ID NO: 680036 - DNA, 120 bp, Artificial Sequence
  ENSG00000186642_45 (sequence is synthesized)
caaggaggctggggccgtggcagctgtcatcttggtgcactgtggccagctgagtgataatgaggaatggagcctgcaggcggtggagaagcatgtgagtgggagtggggccatgtgcaa

SEQ ID NO: 680037 - DNA, 120 bp, Artificial Sequence
  ENSG00000186642_46 (sequence is synthesized)
tgtgaccttgagcaagtcactaaacgtctctgggcctcagtttcacacctgaaaatggggataatgatagcaccgactgacctagggcagtggtgaaacaaaactggtcaaatatcttgt

SEQ ID NO: 680038 - DNA, 120 bp, Artificial Sequence
  ENSG00000186642_47 (sequence is synthesized)
aaatacacacggttgccaacttacaattttcgactttttgatggatttatggggaagcaaccctatcctaagtccaggagcatctgtacttagaaagaaccctccacataatgatactga

SEQ ID NO: 680039 - DNA, 120 bp, Artificial Sequence
  ENSG00000186642_48 (sequence is synthesized)
atttcaaaaatgttccagctttcagggaccccagagcttaccttgttgggtccctgcatgtgacagctgaggagtctgaggctcagagtggtctagggactcaccctgggtcacacagag

SEQ ID NO: 680040 - DNA, 120 bp, Artificial Sequence
  ENSG00000186642_49 (sequence is synthesized)
ggttgaaacagagctcagaaagggaactggggcccctgactccccctttctgactgctctgctgacctgggggctggagctggacgaggcccctgcttcctctcttggggtcaatggtaa

SEQ ID NO: 680041 - DNA, 120 bp, Artificial Sequence
  ENSG00000186642_50 (sequence is synthesized)
gtttatctctcagtctctctgtctgtgagtcttttttcctctctcccagtcagactctctctctacccctccctctctccctctctccctctctgtctgggcctctctctgttcctcctc

SEQ ID NO: 680042 - DNA, 120 bp, Artificial Sequence
  ENSG00000186642_51 (sequence is synthesized)
ggagcgcgggtcccaccgcggaactgcggaccgtgtggccctggggcctgcaccctctccggctccggggacggcgacagagacctgcccacccaggcctgggggccccagtcagtggcg

SEQ ID NO: 680043 - DNA, 120 bp, Artificial Sequence
  ENSG00000186642_52 (sequence is synthesized)
cccccacatgagctgccccaggaggggaaagtccggcagttcctacaagcacaattaagtggaggcagcatgagggatgaagaacccaggacaattaatcatcaaggagtgacatttggt

SEQ ID NO: 680044 - DNA, 120 bp, Artificial Sequence
  ENSG00000186642_53 (sequence is synthesized)
gcaaactcagggaggctatcatctcccagaagcggctgggctgcaatgggctgggcttctcagacctgccagggaagcccttggccaggctggtggctccactggctcctgatacccaag

SEQ ID NO: 680045 - DNA, 120 bp, Artificial Sequence
  ENSG00000186642_54 (sequence is synthesized)
gtccaattcctcaggcggggccagcaggtcttcctcaagccggacgagccgccgccgccgccgcagccatgcgccgacagcctgcaggaaactgtctacacctacctactggatgggagg

SEQ ID NO: 680046 - DNA, 120 bp, Artificial Sequence
  ENSG00000186642_55 (sequence is synthesized)
tgagggggagctgggagctggctggaggtgggataaggagccaaggagtggaggctcactgggatgggcaaatgggtgggggtgtccagtaggagggcatgacacccctgccctcgcctc

SEQ ID NO: 680047 - DNA, 120 bp, Artificial Sequence
  ENSG00000186642_56 (sequence is synthesized)
gaagaatctggaagtgcagagcttagcccctggcatgcggcaggtgctcacaaagaagtttacagcttcctgagcactgtttccacacctgtgatctcatttaatcctcaccacaaaccc

SEQ ID NO: 680048 - DNA, 120 bp, Artificial Sequence
  ENSG00000186648_0 (sequence is synthesized)
ctgaccggagcgggctcggccgctgctgcagcgctcagcgcccgggccctgctgaagccgggtctagcatgtgccgcggctccccggcggcggcggcggctcctctgcagcagcctcagc

SEQ ID NO: 680049 - DNA, 120 bp, Artificial Sequence
  ENSG00000186648_1 (sequence is synthesized)
agcagcctcagcagcagcggccgccatggccaagcccagcgtggagctcacccgcgagttgcaagacagcatccggaggtgcctgagccaaggggccgtgctccaacaacatcatgtgaa

SEQ ID NO: 680050 - DNA, 120 bp, Artificial Sequence
  ENSG00000186648_2 (sequence is synthesized)
gttggagacaaagcccaagaagtttgaggaccgagtgctggccctgacctcctggcgcctccacctcttcctccttaaagtcccggccaaggtggagagctccttcaatgtcctggagat

SEQ ID NO: 680051 - DNA, 120 bp, Artificial Sequence
  ENSG00000186648_3 (sequence is synthesized)
ccgtgccttcaacacgctcagtcagaatcagatcctggtggagacggagcgtggcatggtgagcatgcgactgccatcagctgaaagtgtggaccaggtgacacgacatgtgagctctgc

SEQ ID NO: 680052 - DNA, 120 bp, Artificial Sequence
  ENSG00000186648_4 (sequence is synthesized)
cctgtccaaggtctgccctggccctgggtgtttgatccggcgtggaaacgcagacaccccagaggggccccgagatacatcccccaactctgagacttccacatctaccacccacagtgt

SEQ ID NO: 680053 - DNA, 120 bp, Artificial Sequence
  ENSG00000186648_5 (sequence is synthesized)
ctgcggtggcttctctgagacctacgctgctctgtgtgactacaatgggctacactgccgtgaggaggttcaatgggatgtggacaccatctaccatgctgaagataaccgggagttcaa

SEQ ID NO: 680054 - DNA, 120 bp, Artificial Sequence
  ENSG00000186648_6 (sequence is synthesized)
tcttttggatttcagccacttggagagccgagacttggccctaatggtagcagccctggcctacaaccagtggttcaccaaactctactgcaaggacttgcggctgggctctgaagtgct

SEQ ID NO: 680055 - DNA, 120 bp, Artificial Sequence
  ENSG00000186648_7 (sequence is synthesized)
agaacaggtgctacataccctaagcaagtcggggagcctcgaagagctggtgctggacaacgccgggcttaagacggactttgtccagaagctggccggggtgtttggggagaacgggag

SEQ ID NO: 680056 - DNA, 120 bp, Artificial Sequence
  ENSG00000186648_8 (sequence is synthesized)
ctgtgtgctgcatgccctcactctgtcccacaaccccatcgaggacaagggttttctcagtctgagccagcagctcctctgcttcccctctggcctcaccaaactgtgcctggccaagac

SEQ ID NO: 680057 - DNA, 120 bp, Artificial Sequence
  ENSG00000186648_9 (sequence is synthesized)
tgccatttcccctcgagggctccaggcactcggccagaccttcggggcaaacccagcatttgccagctcccttcgatacctggacctgagcaagaatcctgggctcctcgccacggatga

SEQ ID NO: 680058 - DNA, 120 bp, Artificial Sequence
  ENSG00000186648_10 (sequence is synthesized)
ggccaatgccctctacagtttcctggcccaacccaacgccctggtgcacctggacctgtcaggaactgactgcgtcatcgacttgcttctcggtgccctgctccacggctgctgctccca

SEQ ID NO: 680059 - DNA, 120 bp, Artificial Sequence
  ENSG00000186648_11 (sequence is synthesized)
cctcacctacctcaacctggctcgcaacagctgctcccacaggaagggtcgagaggccccgccggccttcaagcagttcttcagcagcgcctacacactgagccacgtcaatctgtcggc

SEQ ID NO: 680060 - DNA, 120 bp, Artificial Sequence
  ENSG00000186648_12 (sequence is synthesized)
cacaaagctgcccctggaggccctcagggcgctgcttcagggcctctccctcaacagtcacctcagtgacctgcacctggatctcagcagctgcgagctccgttcagcgggagcccaagc

SEQ ID NO: 680061 - DNA, 120 bp, Artificial Sequence
  ENSG00000186648_13 (sequence is synthesized)
cttgcaggagcagctgggagctgtcacctgtgtaggcagcctggatctgtcagacaatgggttcgactcggacctcctgacactggtgcctgcacttggcaagaacaagtccctcaagca

SEQ ID NO: 680062 - DNA, 120 bp, Artificial Sequence
  ENSG00000186648_14 (sequence is synthesized)
cctgtttttgggcaagaacttcaatgtcaaggccaagaccctggaggagatcctccacaagctggtgcagctgatccaggaagaggactgttccctgcagtcactgtcggtggcagactc

SEQ ID NO: 680063 - DNA, 120 bp, Artificial Sequence
  ENSG00000186648_15 (sequence is synthesized)
ccggctgaagcttcgcaccagcatcctcatcaatgccctgggcagcaacacctgcctggccaaggtggatctgagcggcaatggcatggaggacatcggggccaagatgctgtctaaggc

SEQ ID NO: 680064 - DNA, 120 bp, Artificial Sequence
  ENSG00000186648_16 (sequence is synthesized)
cctgcagataaactcctccctcagaactatcctatgggatcggaacaatacatctgccctgggcttcctggacatcgcaagggccctggagagcaaccacacgctgcgcttcatgtcctt

SEQ ID NO: 680065 - DNA, 120 bp, Artificial Sequence
  ENSG00000186648_17 (sequence is synthesized)
ccccgtgagcgacatctcccaagcctatcgcagcgcgcctgagcgcaccgaggacgtctggcagaagatccaatggtgcttagtgaggaacaaccactcccagacgtgcccccaggagca

SEQ ID NO: 680066 - DNA, 120 bp, Artificial Sequence
  ENSG00000186648_18 (sequence is synthesized)
ggccttcaggttgcagcagggcctggtgaccagcagcgccgagcaaatgctgcagcggctgtgtggacgagtgcaggaggaggtgcgggccctgagactatgccccctggagcctgtgca

SEQ ID NO: 680067 - DNA, 120 bp, Artificial Sequence
  ENSG00000186648_19 (sequence is synthesized)
tcaaagatgccaagaactcccgggcgctgtttcccagcctctatgagctgggccacgtgctggccaatgatgggcctgtgcggcagaggctggaatcagtagcaagtgaggtgtccaaag

SEQ ID NO: 680068 - DNA, 120 bp, Artificial Sequence
  ENSG00000186648_20 (sequence is synthesized)
ctgtggacaaggagctgcaggtgatcctggagtccatggtcagcctgacacaggagttatgccctgtggccatgcgggtggccgagggacacaacaagatgctgagcaatgtggcggagc

SEQ ID NO: 680069 - DNA, 120 bp, Artificial Sequence
  ENSG00000186648_21 (sequence is synthesized)
gtgtcactgtgccccggaacttcatccgaggggcactgctggagcaagcaggacaggacattcagaacaagctggatgaagtgaagctctcagtcgtcacctacctaaccagctccatag

SEQ ID NO: 680070 - DNA, 120 bp, Artificial Sequence
  ENSG00000186648_22 (sequence is synthesized)
tggatgagatcctgcaagagctctaccattcccacaagagcctggcccggcacctgacccagctaaggacgctgtcagatccaccagggtgcccaggccaagggcaggatctgtcctccc

SEQ ID NO: 680071 - DNA, 120 bp, Artificial Sequence
  ENSG00000186648_23 (sequence is synthesized)
ggggccgaggccggaaccatgaccatgaggagaccacagatgatgaacttgggaccaacattgacaccatggccatcaaaaagcagaaacgctgccgcaagattcggccggtgtctgcct

SEQ ID NO: 680072 - DNA, 120 bp, Artificial Sequence
  ENSG00000186648_24 (sequence is synthesized)
tcatcagcgggagccctcaggacatggaaagccaactggggaatctggggatcccccctggctggttctcaggacttgggggcagccagcccacagctagtggctcctgggaaggtctat

SEQ ID NO: 680073 - DNA, 120 bp, Artificial Sequence
  ENSG00000186648_25 (sequence is synthesized)
ctgagctgcccactcatggttacaaactaaggcatcaaacacaagggaggccccgcccccccaggaccacacctccaggacctggtcgacccagtatgccagcacctgggactcgtcagg

SEQ ID NO: 680074 - DNA, 120 bp, Artificial Sequence
  ENSG00000186648_26 (sequence is synthesized)
agaatgggatggccacccgcctggatgaagggctggaggacttcttcagccgaagggtcctggaggaaagttctagctacccccggactctgaggaccgtgcggccaggactctcggagg

SEQ ID NO: 680075 - DNA, 120 bp, Artificial Sequence
  ENSG00000186648_27 (sequence is synthesized)
caccgctgcctccactccagaagaagaggcgccggggcctgtttcactttcgccggccccggagcttcaagggggacagggggccggggtcccctaccactggactcctcctccctccac

SEQ ID NO: 680076 - DNA, 120 bp, Artificial Sequence
  ENSG00000186648_28 (sequence is synthesized)
ccccaccccctcccccgactcaggagagcccccctagcccagaccccccaagcctcggcaataactcctctccctgctggagcccagaggaggagagcagcctcctccctggatttggtg

SEQ ID NO: 680077 - DNA, 120 bp, Artificial Sequence
  ENSG00000186648_29 (sequence is synthesized)
ggggccggggaccttccttccgccggaagatgggcactgaggggtcagagccaggggaggggggcccagcccctgggacagcacagcagccaagggttcacggtgttgcccttcccgggt

SEQ ID NO: 680078 - DNA, 120 bp, Artificial Sequence
  ENSG00000186648_30 (sequence is synthesized)
tggaaagagccaagggttggagcttcgatgggaaacgagagggcccaggcccagaccaggagggcagcacccaggcctggcagaaacggcgctcttcagacgacgcagggcctggatcct

SEQ ID NO: 680079 - DNA, 120 bp, Artificial Sequence
  ENSG00000186648_31 (sequence is synthesized)
ggaagcccccaccaccgccccaaagcaccaaaccaagcttcagcgccatgcgcagagcagaggccacatggcacatagctgaagagagtgcccccaaccacagctgccagagtcccagcc

SEQ ID NO: 680080 - DNA, 120 bp, Artificial Sequence
  ENSG00000186648_32 (sequence is synthesized)
cagcctcccaagatggggaagaggagaaggaggggaccctcttcccagagaggacacttccagctaggaatgccaagctacaggaccccgctctagctccatggcctcccaagccagtgg

SEQ ID NO: 680081 - DNA, 120 bp, Artificial Sequence
  ENSG00000186648_33 (sequence is synthesized)
ctgtgcccaggggccgccagcctccccaggagccaggggtcagggaggaggctgaggctggagatgcagctccaggagtcaacaaaccccggctgaggctgagctcacagcaagaccaag

SEQ ID NO: 680082 - DNA, 120 bp, Artificial Sequence
  ENSG00000186648_34 (sequence is synthesized)
aggagcccgaagtccaagggccccctgatccaggccggcggactgcccccctgaagcccaagaggacacggcgggcacagtcctgtgacaagctggaacctgatagaagacggcctcctg

SEQ ID NO: 680083 - DNA, 120 bp, Artificial Sequence
  ENSG00000186648_35 (sequence is synthesized)
accccacaggaaccagtgagccaggaacagactgacaactgccacaacaccctcctcagccctcgacatgtgcctcgcaaggactcagacccctatccacccccagtccccagggccccc

SEQ ID NO: 680084 - DNA, 120 bp, Artificial Sequence
  ENSG00000186648_36 (sequence is synthesized)
tgccagcccctgtcctacaggggcaagacggcaggaccaggcatgggggagctggaggcagggactagaacagagggagccacctggagagacggaggctgtcagtgcctgcctcgatac

SEQ ID NO: 680085 - DNA, 120 bp, Artificial Sequence
  ENSG00000186648_37 (sequence is synthesized)
ctctctctgcagagagcttctgggtgggggcttatctcctcccccaggagggtggatctctgtccctctatccccagggactctctcccctcttgtatagaataaaaaaacaaaatcatc

SEQ ID NO: 680086 - DNA, 120 bp, Artificial Sequence
  ENSG00000186648_38 (sequence is synthesized)
ggctggggctgagctggatttggcccagatcacttagggacttaggactggagagctatcagcaatgaataatgaatggcacaatctccattacaaggatcaatctttaaccaagtgcaa

SEQ ID NO: 680087 - DNA, 120 bp, Artificial Sequence
  ENSG00000186648_39 (sequence is synthesized)
ccttgctatttagggtctggctggtctttgccctagaaatctaagtgctgagctggggtttaggagccaagtttgtgcccacacaggtgtacacacacatacccacacaaatacaccagg

SEQ ID NO: 680088 - DNA, 120 bp, Artificial Sequence
  ENSG00000186648_40 (sequence is synthesized)
aaatacaccaggaatgggatagcagggcctcctcggaggcatggacaaagaaaagtacctgagttgggtgcatggaagcactgtcttcctcccagttttcattgcccctagagttctttc

SEQ ID NO: 680089 - DNA, 120 bp, Artificial Sequence
  ENSG00000186648_41 (sequence is synthesized)
attctgggtctgggtgccaccactcaccaaaccaaaggaaaactagtacacatacctatgaaacagctaggcccaaggaagggtctttcctaccctcacagtagcaactagcagggttta

SEQ ID NO: 680090 - DNA, 120 bp, Artificial Sequence
  ENSG00000186648_42 (sequence is synthesized)
gttactcagcaccccaattacctagctctgttccactggggctccaggggcctgacctagggcccccttgctccttctcctcgaattcctctttccccacacatagttgggctgggggct

SEQ ID NO: 680091 - DNA, 120 bp, Artificial Sequence
  ENSG00000186648_43 (sequence is synthesized)
ctggggtgggactagacgtgtatttgtggagaaatgagtgtcaagggctaggctgcctccttcagcagccacatgcgctccatgggcagacagaccaggccagctggccgttctctcagg

SEQ ID NO: 680092 - DNA, 120 bp, Artificial Sequence
  ENSG00000186648_44 (sequence is synthesized)
cttctgggagagggagtgcctcaggggccatgcgggggactgaggtgctaatgttctgagtagccccacctgtgcccacagtgaagtgaagctctcagtcgtcacctacctaaccagctc

SEQ ID NO: 680093 - DNA, 120 bp, Artificial Sequence
  ENSG00000186648_45 (sequence is synthesized)
ctgcacaacactgtccccttccactgatctgtactcccctggccacctcactgtgcctggccttctgcctccaatctcaatccagcccaacctcttccctcatcccagtgcctcagcccc

SEQ ID NO: 680094 - DNA, 120 bp, Artificial Sequence
  ENSG00000186648_46 (sequence is synthesized)
ctgaggagcgaggggcaggatgggctcaaataaggtttcatgaggaatggatggctctgggtgaggtgcctggccctgccactcgtcttcatttctgcaggacaccatggccatcaaaaa

SEQ ID NO: 680095 - DNA, 120 bp, Artificial Sequence
  ENSG00000186648_47 (sequence is synthesized)
ctgtcaggaactgactgcgtcatcgacttgcttctcggtgccctgctccacggctgctgctcccacctcacctacctcaacctggctcgcaacagctgctcccacaggggtctctccaca

SEQ ID NO: 680096 - DNA, 120 bp, Artificial Sequence
  ENSG00000186648_48 (sequence is synthesized)
agaactcccgggcggtgagccctccacaggctacccttcccctgaagtctggagaacccaagaaggccgaccatgctaagccatgacagccctgccctgtgcatctgccttcctagccca

SEQ ID NO: 680097 - DNA, 120 bp, Artificial Sequence
  ENSG00000186648_49 (sequence is synthesized)
gggaccccagagacctagcaagtcctggttctggcctgctaatcataaccccttccttctccagctgtttcccagcctctatgagctgggccacgtgctggccaatgatgggcctgtgcg

SEQ ID NO: 680098 - DNA, 120 bp, Artificial Sequence
  ENSG00000186648_50 (sequence is synthesized)
gcagaggctggaatcagtagcaagtgaggtgtccaaagctgtggacaaggagctgcaggcaagtcctggaggagggaggaatccatggtgggaacctagtgttgactgaggccctaagcc

SEQ ID NO: 680099 - DNA, 120 bp, Artificial Sequence
  ENSG00000186648_51 (sequence is synthesized)
cagagctaaagtcagagctgggagacttctggagggccaggaggacatgcagagttgagaccacccacgctcccactgtaccaaggcattgctgcaatatcaggcttggatttttttctg

SEQ ID NO: 680100 - DNA, 120 bp, Artificial Sequence
  ENSG00000186648_52 (sequence is synthesized)
ctagctttgatgttggtccctgaactctgacctccctgctctggatttggatccttggactgactgcccctgtctgtatggtagggtggaaggagcactgaccagaaagtggggaagcct

SEQ ID NO: 680101 - DNA, 120 bp, Artificial Sequence
  ENSG00000186648_53 (sequence is synthesized)
tagtgtccaaggctctgccactaacagttttgtgacttaggcaggtccctcagtctcagcaggaggggctggaatagataaagtctcttctgctgtggtgccagccctgatcctgtcccc

SEQ ID NO: 680102 - DNA, 120 bp, Artificial Sequence
  ENSG00000186648_54 (sequence is synthesized)
aagcttaatgggagaatgctaggacccagggttcttgggaacattggtcatttcaattctcctctccttgagagtggactaagacccagtggccaagagcatgctgggagtgctatatgc

SEQ ID NO: 680103 - DNA, 120 bp, Artificial Sequence
  ENSG00000186648_55 (sequence is synthesized)
gaatgcaggcgttggaaggactcttcagagggtctctgcagggcttccccgtggctagggactcagtgaggcaggggtcctcctgacaactccctcacagcctggggagcccccttcgac

SEQ ID NO: 680104 - DNA, 120 bp, Artificial Sequence
  ENSG00000186652_0 (sequence is synthesized)
aaagaaggacctgggctttgggaagatctaaagacccaggaaggtctctgggtgggataaagccaagatgaaactccccttacttctggctcttctatttggggcagtttctgctcttca

SEQ ID NO: 680105 - DNA, 120 bp, Artificial Sequence
  ENSG00000186652_1 (sequence is synthesized)
tctaaggtctgagacttccacctttgagacccctttgggtgctaagacgctgcctgaggatgaggagacaccagagcaggagatggaggagaccccttgcagggagctggaggaagagga

SEQ ID NO: 680106 - DNA, 120 bp, Artificial Sequence
  ENSG00000186652_2 (sequence is synthesized)
ggagtggggctctggaagtgaagatgcctccaagaaagatggggctgttgagtctatctcagtgccagatatggtggacaaaaaccttacgtgtcctgaggaagaggacacagtaaaagt

SEQ ID NO: 680107 - DNA, 120 bp, Artificial Sequence
  ENSG00000186652_3 (sequence is synthesized)
ggtgggcatccctgggtgccagacctgccgctacctcctggtgagaagtcttcagacgtttagtcaagcttggtttacttgccggaggtgctacaggggcaacctggtttccatccacaa

SEQ ID NO: 680108 - DNA, 120 bp, Artificial Sequence
  ENSG00000186652_4 (sequence is synthesized)
cttcaatattaattatcgaatccagtgttctgtcagcgcgctcaaccagggtcaagtctggattggaggcaggatcacaggctcgggtcgctgcagacgctttcagtgggttgacggcag

SEQ ID NO: 680109 - DNA, 120 bp, Artificial Sequence
  ENSG00000186652_5 (sequence is synthesized)
acttcctttcatctgttcctactgagctggtcccagccagcagttcagagctgccctctcctgggcagctgcctcccctcctctgcttgccatccctccctccacctccctgcaataaaa

SEQ ID NO: 680110 - DNA, 120 bp, Artificial Sequence
  ENSG00000186652_6 (sequence is synthesized)
tgggttttactgaaatggatttattttctcctctgatcgcggatccactctgcttagccctcattgaaacttcttccttatcatctctccccacaccacaactttcatagaagtgtcaga

SEQ ID NO: 680111 - DNA, 120 bp, Artificial Sequence
  ENSG00000186652_7 (sequence is synthesized)
agctactactccttgaggaggaggatggagggtggagttgggtctatggagccttttggagatggaggaatgggctcagctagttctcttcatagaacacctgattactgggcacctgca

SEQ ID NO: 680112 - DNA, 120 bp, Artificial Sequence
  ENSG00000186652_8 (sequence is synthesized)
tagtgctgccaggacctttcaaggttgtaggtagactcccaatggcccagtttgcatctctgtaaccaaaggccttttctctctctctctccaaccccagaactgtggttggttttatat

SEQ ID NO: 680113 - DNA, 120 bp, Artificial Sequence
  ENSG00000186652_9 (sequence is synthesized)
gtaaggaagttaacatgtccctgggaacagtccacaacattcaggaatgaatgtataagtaccgcaatccccggcccctcaagtggaataaatctaacatgtattgggcaccatttccca

SEQ ID NO: 680114 - DNA, 120 bp, Artificial Sequence
  ENSG00000186652_10 (sequence is synthesized)
gtggcctgctgtggtagttggccttattccatgcatttttatgggctgccttcccttcctcaactgcattctctgctccttcctactctctgcaactcccaaataaacacttgtacgcaa

SEQ ID NO: 680115 - DNA, 120 bp, Artificial Sequence
  ENSG00000186652_11 (sequence is synthesized)
gctttgggaagatctaaagacccaggaaggtctctgggtgggtgagtgctttctctgctgtggtggagctggtgacagtttattctcccaggaggtccctggctgtggctgacagtttct

SEQ ID NO: 680116 - DNA, 120 bp, Artificial Sequence
  ENSG00000186652_12 (sequence is synthesized)
acctacaaacagaagttgcattttggtctccaaccttcaaatggttgtggcaggggagggagggaatgaattgtggggactcaagacccatgtgaattcatgtaggaaggatgctccatt

SEQ ID NO: 680117 - DNA, 120 bp, Artificial Sequence
  ENSG00000186654_0 (sequence is synthesized)
ggcctccgtttgcgccgggtctgtgctggccgcgcgcctggcgctccacgctgagcctctccgtgcaatgattaacccggcggggcggccggcgcgggacccgagacggaggcgcggggc

SEQ ID NO: 680118 - DNA, 120 bp, Artificial Sequence
  ENSG00000186654_1 (sequence is synthesized)
ggacccgagacggaggcgcggggccggggcgggaccccgcaggaccgctcggcttcctgctctcgccggagtttccgcgtagagggcgcatcgccggcccggggcccttggtgcggcgtg

SEQ ID NO: 680119 - DNA, 120 bp, Artificial Sequence
  ENSG00000186654_2 (sequence is synthesized)
cgtgggcgcggcgcaggcggcccgggtcaccatgaggactctccgcaggttgaagttcatgagttcgcccagcctcagtgacctgggcaagagagagccggccgccgccgcggacgagcg

SEQ ID NO: 680120 - DNA, 120 bp, Artificial Sequence
  ENSG00000186654_3 (sequence is synthesized)
gggcacgcagcagcgccgggcctgcgccaacgccacctggaacagcatccacaacggggtgatcgccgtcttccagcgcaaggggctgcccgaccaggagctcttcagcctcaacgaggg

SEQ ID NO: 680121 - DNA, 120 bp, Artificial Sequence
  ENSG00000186654_4 (sequence is synthesized)
cgtccggcagctgttgaagacagagctggggtccttcttcacggagtacctgcagaaccagctgctgacaaaaggcatggtgatccttcgggacaagattcgcttctatgagggacagaa

SEQ ID NO: 680122 - DNA, 120 bp, Artificial Sequence
  ENSG00000186654_5 (sequence is synthesized)
gctgctggactcactggcagagacctgggacttcttcttcagtgacgtgctgcccatgctgcaggccatcttctacccggtgcagggcaaggagccatcggtgcgccagctggccctgct

SEQ ID NO: 680123 - DNA, 120 bp, Artificial Sequence
  ENSG00000186654_6 (sequence is synthesized)
gcacttccggaatgccatcaccctcagtgtgaagctagaggatgcgctggcccgggcccatgcccgtgtgccccctgccatcgtgcagatgctgctggtgctgcagggggtacatgagtc

SEQ ID NO: 680124 - DNA, 120 bp, Artificial Sequence
  ENSG00000186654_7 (sequence is synthesized)
ctacggcctccactccagcgaggggcccttcacccattcctgcatcctggaaaagcgcctcctccgccgctcccgctcgggggacgtgctggccaagaaccctgtggtgcgctccaagag

SEQ ID NO: 680125 - DNA, 120 bp, Artificial Sequence
  ENSG00000186654_8 (sequence is synthesized)
ctacaacacgcctctgctgaaccccgtgcaggagcacgaggcggagggcgcggcggccggcggtaccagcatccgcaggcactctgtgtcggagatgacgtcctgccccgagcctcaggg

SEQ ID NO: 680126 - DNA, 120 bp, Artificial Sequence
  ENSG00000186654_9 (sequence is synthesized)
cttctccgacccgcccggccagggccccaccgggaccttcaggtcctccccggcgccccactcagggccctgccccagcagactgtaccccacgacccagccccctgagcagggcttgga

SEQ ID NO: 680127 - DNA, 120 bp, Artificial Sequence
  ENSG00000186654_10 (sequence is synthesized)
tcccacccgcagctccctgccccgctccagcccggagaacctggtggaccagatcctggagtccgtggactcggattctgaagggattttcattgactttggccggggccggggctctgg

SEQ ID NO: 680128 - DNA, 120 bp, Artificial Sequence
  ENSG00000186654_11 (sequence is synthesized)
catgtccgacttggagggctctgggggccggcagagtgtcgtgtgaggcctcacagctggccttgagtttttactgacacgtccctgtgtgcgggggtgtccatgtggcgtgtgtgtgag

SEQ ID NO: 680129 - DNA, 120 bp, Artificial Sequence
  ENSG00000186654_12 (sequence is synthesized)
tgagacttttttactgcgtcccgtcccgccagccctatcggcctcgtcactggccttggtcactttgtatttctgtcttggttggaaataccatcagccttccttgctcggcccaggtct

SEQ ID NO: 680130 - DNA, 120 bp, Artificial Sequence
  ENSG00000186654_13 (sequence is synthesized)
gtttcaggcatctgagtcggcgtttacccaggggccgggccagagacgggggtcggccgctcgctcccacgctcctcctgccccagccctctggtgtccacacctgcccacagagaatgt

SEQ ID NO: 680131 - DNA, 120 bp, Artificial Sequence
  ENSG00000186654_14 (sequence is synthesized)
aaacccagtgggctctgcccacgccgggccccaaagtgaccagactccagcacacctgtctcctcctgcctggggtggccatggggatggaagggggtggaataaaacctgtcaacctgg

SEQ ID NO: 680132 - DNA, 120 bp, Artificial Sequence
  ENSG00000186654_15 (sequence is synthesized)
attcggctgcccccaaggccaggcatccagtgtgcttagtgctgagcagggtttcagagctcacccccaggagggtgcagacctcagccaaggtcgcagagcagaggagacccgtgggct

SEQ ID NO: 680133 - DNA, 80 bp, Artificial Sequence
  ENSG00000186654_16 (sequence is synthesized)
agccccccagctccggcggacccgggtgggcgtgcccgcggacccgcttgccgcacttaggcgagtctcccctgcagcgc

SEQ ID NO: 680134 - DNA, 80 bp, Artificial Sequence
  ENSG00000186654_17 (sequence is synthesized)
cccgggctccggctccggctccggctctggctctgcgcggtggcagcggcggcggcggcgcggggaccgaggttgaagtt

SEQ ID NO: 680135 - DNA, 120 bp, Artificial Sequence
  ENSG00000186654_18 (sequence is synthesized)
caggaaggggtgctctgtgggcttggaggatgcaggcgccttcctggggactgctctgtgagcagtgataaaatatttatcagccagcagctgggcttccctgcatagggtgcagtcggg

SEQ ID NO: 680136 - DNA, 120 bp, Artificial Sequence
  ENSG00000186654_19 (sequence is synthesized)
ggcagctcccacccgagcctgcagcctgagttctgctgagtcatgggggagcccagtgagccgcctgccctcaagctcctgggccccctctgccctttggccatgtgaacgcctcctaat

SEQ ID NO: 680137 - DNA, 120 bp, Artificial Sequence
  ENSG00000186654_20 (sequence is synthesized)
gccctgggtcctctgggccactgactgtggtgcaccctttcctcggaggctcagcctctgtctgcttggtggggggtcgatcacccctggctactgcccttatgatcctgctcagtgtcc

SEQ ID NO: 680138 - DNA, 120 bp, Artificial Sequence
  ENSG00000186654_21 (sequence is synthesized)
agtaggtgttctgtgtttgttggaggggcagatagtgtgggggaaggagggaggaggtcggtgggtagaagaaatcaactgcttagccgggttgttaggaggatctgatgagactaggat

SEQ ID NO: 680139 - DNA, 120 bp, Artificial Sequence
  ENSG00000186654_22 (sequence is synthesized)
gtgagttgaaactgctgtgccaggcacacctgtgtgggtctcacttgtgccaggcatacctgcgtgggtctcacctgtgtaggtctcacctgtgccaggtgtacctgtgtgggtcttacc

SEQ ID NO: 680140 - DNA, 120 bp, Artificial Sequence
  ENSG00000186654_23 (sequence is synthesized)
tgtgcaggtctcctgatgcaggtctcacctgtgccgagtgtacctacctgtgcgggtctcacctgtgtcaggcgtacgtgtaggggtctcacctgtgaacgtctcacctgtgccaggtgt

SEQ ID NO: 680141 - DNA, 120 bp, Artificial Sequence
  ENSG00000186654_24 (sequence is synthesized)
atacctgtgtggctctcacttgtgtgggtctggtatgtgacaaaggcctgggaattggcagctgtcatctgccaggagcagaccctgagccaagttccctgtgccttaggctcatttcat

SEQ ID NO: 680142 - DNA, 120 bp, Artificial Sequence
  ENSG00000186654_25 (sequence is synthesized)
gccctcagctctgggaggccaatccctttactgccacattttataaatggaagactgaggttaagcagtgggcccagggccatagaacagctgagctgtggagctggacatcgaccttgg

SEQ ID NO: 680143 - DNA, 120 bp, Artificial Sequence
  ENSG00000186654_26 (sequence is synthesized)
gcaggtgctgccaggggcctgagcccaggccctccactcccgcatcctctgatgacccatcctgggtgagtggaggcatctgcccgcgccagtcaggcccagtggtgatggcccccatgc

SEQ ID NO: 680144 - DNA, 120 bp, Artificial Sequence
  ENSG00000186654_27 (sequence is synthesized)
gcgaaactctgtctcaaaaaaaaaaattctacccccgtgtatcttgtccctgaaccccctgacagccccttgaggcctgctgtcttccattcattcacttatttaatgagtgcaagcact

SEQ ID NO: 680145 - DNA, 120 bp, Artificial Sequence
  ENSG00000186654_28 (sequence is synthesized)
attcacttatttaatgagtgcaagcactcgttataagtcagctttctcccagccctctttgctgggtgctgaggtcccagagcttttgtcccagctcagcgcacagctgggtgagcagcc

SEQ ID NO: 680146 - DNA, 120 bp, Artificial Sequence
  ENSG00000186654_29 (sequence is synthesized)
tcatctcccgggccttggctcaaatacacctggaggtagcggtgagcccttcagagctccggatgaggggagatgatggcgtgagccagtgatgggaagaagagagtggggcttgtgagg

SEQ ID NO: 680147 - DNA, 120 bp, Artificial Sequence
  ENSG00000186654_30 (sequence is synthesized)
tggtccctgatggatgtggactgcacctggccccatggggcagggagccccaggtgagcagcttggccctccctgcgtggggtcagccagtgtctctggagagactgtccaaagcctcta

SEQ ID NO: 680148 - DNA, 120 bp, Artificial Sequence
  ENSG00000186654_31 (sequence is synthesized)
ggactcttgagtacagggcccctccgaggggtggaaggtgcagaacacccatctcatctggccacagggcctttttccagggcacaccatggtctcccagatcccgacgctgctgtgagc

SEQ ID NO: 680149 - DNA, 120 bp, Artificial Sequence
  ENSG00000186654_32 (sequence is synthesized)
agcagagtgactcaggccacatgctctgagaggggctgggaggccaccgtgggccctgccatggggacagagagcctgtgggaatggggaggcgggaggcagaggacaggctgtctggtg

SEQ ID NO: 680150 - DNA, 120 bp, Artificial Sequence
  ENSG00000186654_33 (sequence is synthesized)
ggtgggacatatggttgagagcctggagccaccaagctcgggtgcatgaccccctaccccctgccccactctcctgcagggggtacatgagtccaggggcgtgactgaggactacctgcg

SEQ ID NO: 680151 - DNA, 120 bp, Artificial Sequence
  ENSG00000186654_34 (sequence is synthesized)
cgggacaagattcgcttctatgaggggcctgcacagggccctcagcactcggataaagaaaggaaagacggacaccagcctgcgcccacagcgagaaccccagagtgggagccagcacgg

SEQ ID NO: 680152 - DNA, 120 bp, Artificial Sequence
  ENSG00000186654_35 (sequence is synthesized)
catcccacctcctgagtcctctcggcacccagcaagagtcccttcagtgacttcgagcgtgcattgagagcccagtaacactggggggcaactgccacaaagacacagcctcagccaggc

SEQ ID NO: 680153 - DNA, 78 bp, Artificial Sequence
  ENSG00000186654_36 (sequence is synthesized)
atacaaaaaaattagctaggcatgaggagaagcacttgaacccaggaggcgcggttgcagtgagccgagatcgcccca

SEQ ID NO: 680154 - DNA, 120 bp, Artificial Sequence
  ENSG00000186654_37 (sequence is synthesized)
aaactccatctcaaaataataataataacaataatagtaagactcagcctccccgctctgggacactcagtctgatggggcaggctggtcagaagacatagagccatggtgtgtttggaa

SEQ ID NO: 680155 - DNA, 120 bp, Artificial Sequence
  ENSG00000186654_38 (sequence is synthesized)
catagagccatggtgtgtttggaactttcacagagggaagcctggggctcgggaagcccggaaaagatgccggcgcagcctgagggcttgtacaggttgaagttcatgagttcgcccagc

SEQ ID NO: 680156 - DNA, 120 bp, Artificial Sequence
  ENSG00000186660_0 (sequence is synthesized)
cgcgcgcgcgcgcgccgccagcggtagcggaccttgagtggcagggggtggggggggcgccctcggagccgggcggaggggaggggggaaagaggagcgcagggtgagagtgagccgcag

SEQ ID NO: 680157 - DNA, 120 bp, Artificial Sequence
  ENSG00000186660_1 (sequence is synthesized)
gcaggcttcgggaggcgagggggcggggggagcagcgccgaggccgccgcctccgcctccgccgcctaggactagggggtgggggacggacaagccccgatgccgggggagacggaagag

SEQ ID NO: 680158 - DNA, 120 bp, Artificial Sequence
  ENSG00000186660_2 (sequence is synthesized)
ccgagacccccggagcagcaggaccaggaagggggagaggcggccaaggcggctccggaggagccccaacaacggccccctgaggcggtcgcggcggcgcctgcagggaccactagcagc

SEQ ID NO: 680159 - DNA, 120 bp, Artificial Sequence
  ENSG00000186660_3 (sequence is synthesized)
accactagcagccgcgtgctgaggggaggtcgggaccgaggccgggccgctgcggccgccgccgccgcagctgtgtcccgccggaggaaggccgagtatccccgccggcggaggagcagc

SEQ ID NO: 680160 - DNA, 120 bp, Artificial Sequence
  ENSG00000186660_4 (sequence is synthesized)
cctcccgacgtccccgggcagcagccccaggccgcgaagtccccgtctccagttcagggcaagaagagtccgcgactcctatgcatagaaaaagtaacaactgataaagatcccaaggaa

SEQ ID NO: 680161 - DNA, 120 bp, Artificial Sequence
  ENSG00000186660_5 (sequence is synthesized)
gaaaaagaggaagaagacgattctgccctccctcaggaagtttccattgctgcatctagacctagccggggctggcgtagtagtaggacatctgtttctcgccatcgtgatacagagaac

SEQ ID NO: 680162 - DNA, 120 bp, Artificial Sequence
  ENSG00000186660_6 (sequence is synthesized)
acccgaagctctcggtccaagaccggttcattgcagctcatttgcaagtcagaaccaaatacagaccaacttgattatgatgttggagaagagcatcagtctccaggtggcattagtagt

SEQ ID NO: 680163 - DNA, 120 bp, Artificial Sequence
  ENSG00000186660_7 (sequence is synthesized)
gaagaggaagaggaggaggaagaagagatgttaatcagtgaagaggagataccattcaaagatgatccaagagatgagacctacaaaccccacttagaaagggaaaccccaaagccacgg

SEQ ID NO: 680164 - DNA, 120 bp, Artificial Sequence
  ENSG00000186660_8 (sequence is synthesized)
agaaaatcagggaaggtaaaagaagagaaggagaagaaggaaattaaagtggaagtagaggtggaggtgaaagaagaggagaatgaaattagagaggatgaggaacctccaaggaagaga

SEQ ID NO: 680165 - DNA, 120 bp, Artificial Sequence
  ENSG00000186660_9 (sequence is synthesized)
ggaagaagacgaaaagatgacaaaagtccacgtttacccaaaaggagaaaaaagcctccaatccagtatgtccgttgtgagatggaaggatgtggaactgtccttgcccatcctcgctat

SEQ ID NO: 680166 - DNA, 120 bp, Artificial Sequence
  ENSG00000186660_10 (sequence is synthesized)
ttgcagcaccacattaaataccagcatttgctgaagaagaaatatgtatgtccccatccctcctgtggacgactcttcaggcttcagaagcaacttctgcgacatgccaaacatcataca

SEQ ID NO: 680167 - DNA, 120 bp, Artificial Sequence
  ENSG00000186660_11 (sequence is synthesized)
gatcaaagggattatatctgtgaatattgtgctcgggccttcaagagttcccacaatctggcagtgcaccggatgattcacactggcgagaagccattacaatgtgagatctgtggattt

SEQ ID NO: 680168 - DNA, 120 bp, Artificial Sequence
  ENSG00000186660_12 (sequence is synthesized)
acttgtcgacaaaaggcatctcttaattggcacatgaagaaacatgatgcagactccttctaccagttttcttgcaatatctgtggcaaaaaatttgagaagaaggacagcgtagtggca

SEQ ID NO: 680169 - DNA, 120 bp, Artificial Sequence
  ENSG00000186660_13 (sequence is synthesized)
cacaaggcaaaaagccaccctgaggtgctgattgcagaagctctggctgccaatgcaggcgccctcatcaccagcacagatatcttgggcactaacccagagtccctgacgcagccttca

SEQ ID NO: 680170 - DNA, 120 bp, Artificial Sequence
  ENSG00000186660_14 (sequence is synthesized)
gatggtcagggtcttcctcttcttcctgagcccttgggaaactcaacctctggagagtgcctactgttagaagctgaagggatgtcaaagtcatactgcagtgggacggaacgggtgagc

SEQ ID NO: 680171 - DNA, 120 bp, Artificial Sequence
  ENSG00000186660_15 (sequence is synthesized)
ctgatggctgatgggaagatctttgtgggaagcggcagcagtggaggcactgaagggctggttatgaactcagatatactcggtgctaccacagaggttctgattgaagattcagactct

SEQ ID NO: 680172 - DNA, 120 bp, Artificial Sequence
  ENSG00000186660_16 (sequence is synthesized)
gccggaccttagtggacaggaagacttggggcatgggacagctcagactttgtatttaaaagttaaaaaggacaaaaaaaaaatctaaagcatttaaaatctagtgaaataactgaaggg

SEQ ID NO: 680173 - DNA, 120 bp, Artificial Sequence
  ENSG00000186660_17 (sequence is synthesized)
cctgctctttccattgtggatcacagcacacacatacatacaccctccacctccccatcccctgttctccctctgttgctccccttataaaattgatgttgtctttaccagaaaggtaga

SEQ ID NO: 680174 - DNA, 120 bp, Artificial Sequence
  ENSG00000186660_18 (sequence is synthesized)
caaaaaagaagcagcagcagctcttaaagtgagggttattctcatactcggttccagccatcagcagacttcctgctcatcggcagatccccctttccaacctgtaactctgatgtgctc

SEQ ID NO: 680175 - DNA, 120 bp, Artificial Sequence
  ENSG00000186660_19 (sequence is synthesized)
tggatcagcttttaacttttaatcatatattactgtcttctaaatcccttctcctcctctactgctgccctatggttctggctcctaccccctgcggcacacttatcttcaaataccata

SEQ ID NO: 680176 - DNA, 120 bp, Artificial Sequence
  ENSG00000186660_20 (sequence is synthesized)
gaattctaatctctggaggctggcagcttgacttggcactttagggccccttagcagggtgagctgttaaaacagcacacatctctcatcccctcttcctttattcccccctgggtttca

SEQ ID NO: 680177 - DNA, 120 bp, Artificial Sequence
  ENSG00000186660_21 (sequence is synthesized)
gaaaggaaggatatatggggaccacctcccccttctttgatcccagcatctcagtccccctcccaaccctccatatggctctcaatggtgctcacttgcttggaagcaggctcccaatag

SEQ ID NO: 680178 - DNA, 120 bp, Artificial Sequence
  ENSG00000186660_22 (sequence is synthesized)
ggagggggctgccctctacagtctctttgactgtaagacagggctctgtatcagtgagacgatgagaaaagtcccaggctaatggcagaaatttgcactttgaacatgtgtgtttttgtg

SEQ ID NO: 680179 - DNA, 120 bp, Artificial Sequence
  ENSG00000186660_23 (sequence is synthesized)
ttgtggaacctgagattccttatttattaacaggaagtctgattttttttttttggagtctttgttgctatattttgtggggctgggagagagagattagattattttgacatgggatcc

SEQ ID NO: 680180 - DNA, 120 bp, Artificial Sequence
  ENSG00000186660_24 (sequence is synthesized)
tttgaaggcaagacatagggttgaagaagcacagccagcctctgaaatcatagctctccagtggcttttaaagaaagctggtcctcagcactaacaaaatcactacaatagcctagtgct

SEQ ID NO: 680181 - DNA, 120 bp, Artificial Sequence
  ENSG00000186660_25 (sequence is synthesized)
tttttggaagcctttttagggaagaatgttaggttcatggtaactagtatgctctttgagatttttacagtgttgaaacttaagaattttgagagggtgaggagggttgttcagaatcta

SEQ ID NO: 680182 - DNA, 120 bp, Artificial Sequence
  ENSG00000186660_26 (sequence is synthesized)
aattacagatagatgattgtttcttgtgaatttgtttcttttcctttttttttgtccctaccatttccttacatttcccttggggcccatctctggctccttgctttttgtttcttgctt

SEQ ID NO: 680183 - DNA, 120 bp, Artificial Sequence
  ENSG00000186660_27 (sequence is synthesized)
tgctttatcagttcattccagctccctgttagtgaaggacactgctgttagtgaaggaacaaagtctatgagtcctaaaattttaagtcaaagaaaactgctctgtttcccctttagtaa

SEQ ID NO: 680184 - DNA, 120 bp, Artificial Sequence
  ENSG00000186660_28 (sequence is synthesized)
cacttctgaagaggaaaaacttcaatagccaaagttaataatcctatataataattgctttggctttcacctaaaattctgggcatcacaatttccttgggatagaggttgtgttgggga

SEQ ID NO: 680185 - DNA, 120 bp, Artificial Sequence
  ENSG00000186660_29 (sequence is synthesized)
atagattgcttattgctgttcactggagagaaaaggtagtgtttttgtacaaggtcataccgccagaagccccaaatcctattttggctcatcttcaggtaaagagtaattcctatcctg

SEQ ID NO: 680186 - DNA, 120 bp, Artificial Sequence
  ENSG00000186660_30 (sequence is synthesized)
tgtgcctcagaagctagaatcgaaggcttaccctattcattgtttattgtcagaaatgcatgatggctcttggaaagaatgacgttttgctggaaaaaaaaaaaagaacagtttgtgttt

SEQ ID NO: 680187 - DNA, 120 bp, Artificial Sequence
  ENSG00000186660_31 (sequence is synthesized)
cacaaacatggcttatcaattttttcaaagaattcttttttcccaaaaagaggagtaacaaaatgtcatttctgaaagaggcttactttataccaactagtgtcagcatttgggatgcca

SEQ ID NO: 680188 - DNA, 120 bp, Artificial Sequence
  ENSG00000186660_32 (sequence is synthesized)
gggaacagagagtgagacacctacaatcaccagtctcaaatgcgctattgtttcttttcagagtgttgcagatttgccatttctccataatatggggatagaaaatggaataaagataga

SEQ ID NO: 680189 - DNA, 120 bp, Artificial Sequence
  ENSG00000186660_33 (sequence is synthesized)
agggatgtagaatatgctttcctgccaacatggtttggagtcgactttggtatattgactagatttgaaaatacaagattgattagatgaatctacaaaaaagttgtcctcctctcaggt

SEQ ID NO: 680190 - DNA, 120 bp, Artificial Sequence
  ENSG00000186660_34 (sequence is synthesized)
cccttttacactttttgactaactagcatctatattccacacttagcttttttgtcacacttatcctttgtctccgtaaatttcatttgcagtggttagtcatcagatattttagccacc

SEQ ID NO: 680191 - DNA, 120 bp, Artificial Sequence
  ENSG00000186660_35 (sequence is synthesized)
tacacaaaagcaaactgcatttttaaaaatctttctgagatgggagaaaatgtattctcctttcctataccgctctcccaacaaaaaaacaactagttagttctactaattagaaacttg

SEQ ID NO: 680192 - DNA, 120 bp, Artificial Sequence
  ENSG00000186660_36 (sequence is synthesized)
ctgtactttttcttttcttttaggggtcaaggaccctctttatagctaccatttgcctacaataaattattgcagcagtttgcaatactaaaatattttttatagactttatatttttcc

SEQ ID NO: 680193 - DNA, 120 bp, Artificial Sequence
  ENSG00000186660_37 (sequence is synthesized)
ttttgataaagggatgctgcatagtagagttggtgtaattaaactatctcagccgtttccctgctttcccttctgctccatatgcctcattgtccttccagggagctcttttaatcttaa

SEQ ID NO: 680194 - DNA, 120 bp, Artificial Sequence
  ENSG00000186660_38 (sequence is synthesized)
agttctacatttcatgctcttagtcaaattctgttacctttttaataactcttcccactgcatatttccatcttgaattggtggttctaaattctgaaactgtagttgagatacagctat

SEQ ID NO: 680195 - DNA, 120 bp, Artificial Sequence
  ENSG00000186660_39 (sequence is synthesized)
ttaatatttctgggagatgtgcatccctcttctttgtggttgcccaaggttgttttgcgtaactgagactccttgatatgcttcagagaatttaggcaaacactggccatggccgtggga

SEQ ID NO: 680196 - DNA, 120 bp, Artificial Sequence
  ENSG00000186660_40 (sequence is synthesized)
gtactgggagtaaaataaaaatatcgaggtatagactagcatccacatagagcacttgaacctcctttgtacctgtttggggaaaaagtataatgagtgtactaccaatctaactaagat

SEQ ID NO: 680197 - DNA, 120 bp, Artificial Sequence
  ENSG00000186660_41 (sequence is synthesized)
tattatagtctggttgtttgaaataccatttttttctccttttgtgtttttcccactttccaatgtactcaagaaaattgaacaaatgtaatggatcaatttaaaatattttatttctta

SEQ ID NO: 680198 - DNA, 120 bp, Artificial Sequence
  ENSG00000186660_42 (sequence is synthesized)
aaagccttttttgcctgttgtaatgtgcaggacccttctcctttcatgggagagacaggtagttacctgaatataggttgaaaaggttatgtaaaaagaaattataataaaagggatact

SEQ ID NO: 680199 - DNA, 120 bp, Artificial Sequence
  ENSG00000186660_43 (sequence is synthesized)
ttgcttttcaaatctttgttttctcttattctaggtaaggcatattaaaaataaatatgtaaagaagaaaaataaaagttgtcttcatggaagcaacttgtcttccttggttgtactgag

SEQ ID NO: 680200 - DNA, 120 bp, Artificial Sequence
  ENSG00000186660_44 (sequence is synthesized)
ttacagttatcctaggggtgaaacatgtgatgctgctaagcaaaccaaatgccctcagaacaggtgttatgtggggcatactattgtttgcttttgttgagaatcaggtggttaattttt

SEQ ID NO: 680201 - DNA, 120 bp, Artificial Sequence
  ENSG00000186660_45 (sequence is synthesized)
gactgttcttgatttctaatgctgaaatgacatgattctgttattcagcaaacttggaaatcttgatgttttgacaactgcctcctaggaaaactggccatatgttaattaacctagtag

SEQ ID NO: 680202 - DNA, 120 bp, Artificial Sequence
  ENSG00000186660_46 (sequence is synthesized)
atggaaaattaaggattatgtgaggttaattttaccctgataatgacaaaaccttgatagcatttaatattaatacttcttctcaaaattgaatgtttatatcaagtactgatttttatt

SEQ ID NO: 680203 - DNA, 120 bp, Artificial Sequence
  ENSG00000186660_47 (sequence is synthesized)
ttaaaaaagaaaaaactataatccttctgccttccaaaagccatgctgtgatagctgcccaggctgctctgttacatctcccatttattgtttacttttataaatttgcttctaagatgg

SEQ ID NO: 680204 - DNA, 120 bp, Artificial Sequence
  ENSG00000186665_0 (sequence is synthesized)
cttcagcctcagcttcggcctcagcccgccgcagagggacgcggagcccggcgctgagccctgcgcgcgcgcctgccggtccgatctggacgaacgcgaggcgttctgcgagagcgaatt

SEQ ID NO: 680205 - DNA, 120 bp, Artificial Sequence
  ENSG00000186665_1 (sequence is synthesized)
cgcggtgaacgggatcgtgcacgatgtggacgtgctgggcgcgggcatccggctggtgaccctgctggtggatcgggacgggctgtacaagatgaaccgcctgtacctcacccccgacgg

SEQ ID NO: 680206 - DNA, 120 bp, Artificial Sequence
  ENSG00000186665_2 (sequence is synthesized)
cttcttcttccgagtccacatgttagccctggactcctccagctgcaataagccgtgtccagagtttaaacctggcagcaggtatattgtgatgggccacatctaccataagagacggca

SEQ ID NO: 680207 - DNA, 120 bp, Artificial Sequence
  ENSG00000186665_3 (sequence is synthesized)
gctccctacagctctgctccaggtcctgagaggccgcctccgtccaggggatggactgctaaggagcagcagcagctatgtgaaaaggtttaatcgaaaaagggaagggcagattcaagg

SEQ ID NO: 680208 - DNA, 120 bp, Artificial Sequence
  ENSG00000186665_4 (sequence is synthesized)
caattcatacccaatgcatttgaaacaaccatcctggcatttctggaccgcaagagacttggacgtcggcaacaagacatgaaaggtctaccttcatgtaatgggtcctccttcagaaga

SEQ ID NO: 680209 - DNA, 120 bp, Artificial Sequence
  ENSG00000186665_5 (sequence is synthesized)
gagccctcagctactctgtgaatgacttgcatagctgcaactgtaatctcgaaggtgtcactttgttatttacaagatgcttcttaaatgggctgctcctgagctcagtgtcaaggtgat

SEQ ID NO: 680210 - DNA, 120 bp, Artificial Sequence
  ENSG00000186665_6 (sequence is synthesized)
tcaactgtagtgccagacaatgatttacacagctcagataattgacctgtccagttaacagatcattgcttcataagtttttaaattattttaatttaatattctttagtagaaatagtc

SEQ ID NO: 680211 - DNA, 120 bp, Artificial Sequence
  ENSG00000186665_7 (sequence is synthesized)
cacaaaaacattttcttgaatttaaatatacaacttttatatcatgtatcaaaccagattttatattcaaacgatcacattttaaattctgtacataacagtaagcgcactagtcaaaag

SEQ ID NO: 680212 - DNA, 120 bp, Artificial Sequence
  ENSG00000186665_8 (sequence is synthesized)
acatttatgtttgaaatgtcatttagatcaaacacaagggtcaaagcccaggacaagtattaaagttttatacttaaagagtactaaagggccagtgtgcagatgggtggattaaaaaaa

SEQ ID NO: 680213 - DNA, 120 bp, Artificial Sequence
  ENSG00000186665_9 (sequence is synthesized)
gccacagcccgggctgtaggtcgcccagcctttttttgggagcgatgggaaacaatgacatgaatgggatttagacgacaggcagcaggtatattgtgatgggccacatctaccataaga

SEQ ID NO: 680214 - DNA, 120 bp, Artificial Sequence
  ENSG00000186665_10 (sequence is synthesized)
atgcctccctgctcctagtaatgtatgttttgtgctgaactggcagctatcccaatgtgaaatgtattttggatgtatctggtgtcatttttctattaagaccaagtataatgtttgttt

SEQ ID NO: 680215 - DNA, 120 bp, Artificial Sequence
  ENSG00000186665_11 (sequence is synthesized)
tcccggggacaactttgcaaggccatgtgctcgtcctccttaggaaggaagagggagaaatccctgcggctcggttttgttccaatggtctgctcagcgagtgattcccgtttccccaaa

SEQ ID NO: 680216 - DNA, 120 bp, Artificial Sequence
  ENSG00000186665_12 (sequence is synthesized)
ggctgcccctcattagcatgaacgggggtgggggtgtggagaaggggttgggggagagaaagcaagcaaaagaccaggctcacttttagagcctgggaaccctgtctgcaaaaatgacag

SEQ ID NO: 680217 - DNA, 120 bp, Artificial Sequence
  ENSG00000186665_13 (sequence is synthesized)
ctagagctttctggctcctctgtttgatcgtcggatcatcccccgaagcaccggtggcggagagaaaaacctcgccgccgcacagcagaaagccggactcccgcggctgcccgagcgcgg

SEQ ID NO: 680218 - DNA, 80 bp, Artificial Sequence
  ENSG00000186665_14 (sequence is synthesized)
gagcgcggaggagacaccggggccccgcgcgcagccactccttgaggccccgcagcggccgcgcgcggccgaggtcgctc

SEQ ID NO: 680219 - DNA, 80 bp, Artificial Sequence
  ENSG00000186665_15 (sequence is synthesized)
cgacaaccaggccagcttccgggaggccgcacgcgcgcccgctggcccgccgggcccgcgcctggcgcaagccgagaacc

SEQ ID NO: 680220 - DNA, 120 bp, Artificial Sequence
  ENSG00000186666_0 (sequence is synthesized)
agaggctgtgttgaggctaatggcggtgcccacggaactggatggagggagtgttaaggagaccgcagcggaagaggaatcgcgagttctggcacctggcgccgccccgttcggaaattt

SEQ ID NO: 680221 - DNA, 120 bp, Artificial Sequence
  ENSG00000186666_1 (sequence is synthesized)
tcctcattattctcgcttccaccctccggagcaacggctccgcctcctgcccccggagctgcttcgacagctctttcctgagagtcccgagaacgggccgattctggggctcgacgtggg

SEQ ID NO: 680222 - DNA, 120 bp, Artificial Sequence
  ENSG00000186666_2 (sequence is synthesized)
gtgtaactccggggatctgagtgtggctctatacaaacacttcctctccctacctgacggggaaacctgctcagatgcctcaagagaattccgtctcctctgctgcgacatagatccagt

SEQ ID NO: 680223 - DNA, 120 bp, Artificial Sequence
  ENSG00000186666_3 (sequence is synthesized)
cctggtgaagcgagccgaaaaagaatgtccttttcctgatgccttgacttttatcaccctggacttcatgaatcaaaggacccggaaggttctcttgagctctttcttaagccaatttgg

SEQ ID NO: 680224 - DNA, 120 bp, Artificial Sequence
  ENSG00000186666_4 (sequence is synthesized)
acgttcagtttttgacattggcttctgcatgtcaataaccatgtggattcatctgaatcatggagaccatggcctatgggagttcctggcccatctttcctccctctgccactacctcct

SEQ ID NO: 680225 - DNA, 120 bp, Artificial Sequence
  ENSG00000186666_5 (sequence is synthesized)
tgtggagccccaaccctggaagtgttaccgggcagctgcaaggcgtctccgaaagctgggactccatgattttgaccacttccactcccttgccatccgaggtgacatgcccaatcagat

SEQ ID NO: 680226 - DNA, 120 bp, Artificial Sequence
  ENSG00000186666_6 (sequence is synthesized)
tgtgcagatcttgacccaggatcatggcatggaattaatatgttgctttggcaacaccagttgggacagaagccttctgctcttcagggcaaaacaaaccatagagactcatccaatccc

SEQ ID NO: 680227 - DNA, 120 bp, Artificial Sequence
  ENSG00000186666_7 (sequence is synthesized)
tgaatcactgatagaaaaagggaaagaaaagaacagattaagtttccagaagcagtgagatgggagggcaagaagaccaagaaagatattgaaagggttttatattgagaattatgttca

SEQ ID NO: 680228 - DNA, 120 bp, Artificial Sequence
  ENSG00000186666_8 (sequence is synthesized)
ttctccttaattccttaacaatcaggcagccgcaaaacctggcaggagcttttggtaaaatgtccaaggcacataattgaaagaatcagtatctgttccccattgtttggaacaaatctt

SEQ ID NO: 680229 - DNA, 120 bp, Artificial Sequence
  ENSG00000186666_9 (sequence is synthesized)
gaggagaatgaatctgtggagtgatgagctaggatatctggattgagatggcctaggaaaagtggtcctggttatgggttatggagagggctgcttttggggattatttataaagatcag

SEQ ID NO: 680230 - DNA, 120 bp, Artificial Sequence
  ENSG00000186666_10 (sequence is synthesized)
actaggctagtcttaaaatatgtcagttcctgggctctctgaatcctacctggtttcttcaggcttctggacttgctaggcctgcctttgggcaaaaccttagtaattcaggtctggaat

SEQ ID NO: 680231 - DNA, 120 bp, Artificial Sequence
  ENSG00000186666_11 (sequence is synthesized)
ggggcttaggaatctattttctgtttttttgtttgtttgtttttgcattcttctattgtaatatatacataaaatttaccattttaaccgtttttaagtacagtttttcagaacgtggaa

SEQ ID NO: 680232 - DNA, 120 bp, Artificial Sequence
  ENSG00000186666_12 (sequence is synthesized)
atcccatcaaaaattggattaaaaaattaaaagataaattgataatttttttaaaagtatacaattttgtgatattaagtacatttcacaatgaggcatctatttttaacagctccccca

SEQ ID NO: 680233 - DNA, 64 bp, Artificial Sequence
  ENSG00000186666_13 (sequence is synthesized)
ctacatgcttatggtccccaaatatattggtagcccgacatccacagttccagactagcatttt

SEQ ID NO: 680234 - DNA, 120 bp, Artificial Sequence
  ENSG00000186666_14 (sequence is synthesized)
tattggtagcccgacatccacagttccagactagcatttttcctgttttgtcattatatcccttagttcttaggtacatcagaatcaacagatctcaaaagcaagctcactaccctcatt

SEQ ID NO: 680235 - DNA, 120 bp, Artificial Sequence
  ENSG00000186666_15 (sequence is synthesized)
caaaacctagtcctatctcatttgatagtaatcattgcttatgctagaaacctcagttgattttctcacttacactcccccacattgaaatgctctcaaagtccagcagcaaattctatc

SEQ ID NO: 680236 - DNA, 120 bp, Artificial Sequence
  ENSG00000186666_16 (sequence is synthesized)
aattacatgtaagtttcattccatacatgtgtccggtgcctggtgggaggttcctatattaaagtcatctaccttccatccattgtctgccttacagccacagtttactcatctgtacaa

SEQ ID NO: 680237 - DNA, 120 bp, Artificial Sequence
  ENSG00000186666_17 (sequence is synthesized)
cgaaataacaccactttccttttcctatgcccaaatgagctaaggatgtgaaggtattttgcagaatatagagtgataaagaaaaataaggtgctattacactgtgtgagcatgccgcag

SEQ ID NO: 680238 - DNA, 120 bp, Artificial Sequence
  ENSG00000186666_18 (sequence is synthesized)
accacaactgcacttgttagactggaggcttatgagaaaaacatctcaccttgtagaaaacatgcatcttactatctctgataacttgtttttcaggatgatgaagtaataaggagtcca

SEQ ID NO: 680239 - DNA, 120 bp, Artificial Sequence
  ENSG00000186666_19 (sequence is synthesized)
gcttcagtgctacagagcattttaaaggaagcagtgttgggagggagggatatggaactaatggaaatgaggctagtttatgatggtctcagttatcacagtagatacagagctgagttt

SEQ ID NO: 680240 - DNA, 120 bp, Artificial Sequence
  ENSG00000186666_20 (sequence is synthesized)
acccacaagatcttaatttaggaacactttgaaaccctgtaaccctgctgggtgctctctcctctcactccaccaaggcagcgcacagaaacatacatggggctgtggtaggatgaataa

SEQ ID NO: 680241 - DNA, 120 bp, Artificial Sequence
  ENSG00000186666_21 (sequence is synthesized)
tggtcccccaagatgtccacctcctttagcaaaaggggctttgcaaatgagattgaggatcttcagatagggagattaatctggatgatcagaatataccctaagtgcaatcatcagtgt

SEQ ID NO: 680242 - DNA, 120 bp, Artificial Sequence
  ENSG00000186666_22 (sequence is synthesized)
tcttataatagggaggcagagggagagctgaccacagtaggagatgtaatgacaaaagcaagaggttggagtgatatgaagaagggctgcaagtcaaggaatgcaggtggcttctagaag

SEQ ID NO: 680243 - DNA, 120 bp, Artificial Sequence
  ENSG00000186666_23 (sequence is synthesized)
ttagaaaaagcaagaaaatgtattctcccctgaagcctccagaaggaacagccctgccaacaccttgatttcagatttaatctccagagctgtaagagaataaatcagtattttaaacca

SEQ ID NO: 680244 - DNA, 120 bp, Artificial Sequence
  ENSG00000186666_24 (sequence is synthesized)
ggtgagtgacaggggagggattggagcatccggagccaagtggttggctgcctacacatccactgtggttctggcctgggctaacacccatcgaaactttcccaaaacgagtataaagcg

SEQ ID NO: 680245 - DNA, 120 bp, Artificial Sequence
  ENSG00000186666_25 (sequence is synthesized)
tggctttgactgagccagtgccgctgctgcctgcccgccagggttccaccatctgtcttaggaatctctcttggagaggagtccttgtcgactacgttcccacttttctttcagggccag

SEQ ID NO: 680246 - DNA, 120 bp, Artificial Sequence
  ENSG00000186666_26 (sequence is synthesized)
gcctggcgctttggctggggagagggggcttccagagacacacgtttgggaacatggggttaggtttggtttactgggagagaagagccaagggtgacagaatcatgcctgatattgaga

SEQ ID NO: 680247 - DNA, 120 bp, Artificial Sequence
  ENSG00000186675_0 (sequence is synthesized)
gcggcaaaataacgctctgaggcttgcagtcgttgctggccagcacttgtgtagaaagatcgctcttcacaccagatttcacttttgatccttccagctccagggtctcgggcttcagct

SEQ ID NO: 680248 - DNA, 120 bp, Artificial Sequence
  ENSG00000186675_1 (sequence is synthesized)
ttgtgccgaggcaccaacactgctgcggtcctctctccgactgatcgctgatctcaccgttcccgctcctgtctcctggaaccatgtctctggtaagccagaatgcacgccactgtagcg

SEQ ID NO: 680249 - DNA, 120 bp, Artificial Sequence
  ENSG00000186675_2 (sequence is synthesized)
cagagatcactgcagattacggcgacggcagaggtgaaatacaagctactaacgcctccgggtcccccacctccatgctagtcgttgatgccccccagtgccctcaggcgccaatcaact

SEQ ID NO: 680250 - DNA, 120 bp, Artificial Sequence
  ENSG00000186675_3 (sequence is synthesized)
ctcagtgtgtcaacacttcccaggccgttcaggacccgaatgacctggaggtcctgatcgacgagcagtccagacgtttgggggcgctcagggtccatgaccctctagaagacaggtcga

SEQ ID NO: 680251 - DNA, 120 bp, Artificial Sequence
  ENSG00000186675_4 (sequence is synthesized)
ttgctttggtgaatttcatgagaatgaaaagccagacggaggggtctatccagcagtccgagatgctggagtttctcagagagtactcagatcagttccctgagatcctcagacgagcct

SEQ ID NO: 680252 - DNA, 120 bp, Artificial Sequence
  ENSG00000186675_5 (sequence is synthesized)
cagctcacctggaccaggtctttgggttgaacctgagagttattgatcctcaggctgacacctacaatttagtcagcaaacggggtttccagatcaccgataggatagcggagtccctgg

SEQ ID NO: 680253 - DNA, 120 bp, Artificial Sequence
  ENSG00000186675_6 (sequence is synthesized)
acatgccaaaagcaagtctcctggccctagtcctaggccacatcctcttgaatgggaaccgagcaagagaggcctccatttgggacttgctgctaaaagttgatatgtgggataagcctc

SEQ ID NO: 680254 - DNA, 120 bp, Artificial Sequence
  ENSG00000186675_7 (sequence is synthesized)
agaggatcaacaacctctttgggaacacaaggaacctcctcactactgactttgtgtgcatgcgattcttggagtactggccggtgtatggcactaatccccttgagtttgagttcttgt

SEQ ID NO: 680255 - DNA, 120 bp, Artificial Sequence
  ENSG00000186675_8 (sequence is synthesized)
ggggctctagagcccacagggaaatcacaaagatggaagccctgaagtttgtgtcagatgcccatgatgaagaaccctggagctggccagaagaatataataaggccctggaaggtgaca

SEQ ID NO: 680256 - DNA, 120 bp, Artificial Sequence
  ENSG00000186675_9 (sequence is synthesized)
tgctgcctatacatcaggatgagctattggctcacactggcaaagaatttgaggatgtgttcccaaatatcctcaatagagctactctaattcttgatatgttctatgggttgtctctga

SEQ ID NO: 680257 - DNA, 120 bp, Artificial Sequence
  ENSG00000186675_10 (sequence is synthesized)
ttgaggttgataccagtgagcacatctacctccttgtccagcaaccagaatcagaggaagagcaagtgatgctagagagcctggggagacccactcaagaatatgtaatgccaatcctag

SEQ ID NO: 680258 - DNA, 120 bp, Artificial Sequence
  ENSG00000186675_11 (sequence is synthesized)
gtttgatcttcctgatgggcaaccgtgtcaaagaggccaatgtctggaacttgcttcgaagatttagtgtggatgtagggagaaagcattccatcacccgtaagcttatgagacagcgct

SEQ ID NO: 680259 - DNA, 120 bp, Artificial Sequence
  ENSG00000186675_12 (sequence is synthesized)
atctggaatgcaggccactgtcctactctaatccagttgaatatgagcttctatggggtcctcgagctcaccatgaaaccatcaaaatgaaagtcttggagtacatggccaggctctaca

SEQ ID NO: 680260 - DNA, 120 bp, Artificial Sequence
  ENSG00000186675_13 (sequence is synthesized)
gaaagcgaccacagaactggccagaacaatatagggaggctgtggaagatgaggaggccagagccaaatctgaggcaactatcatgtttttccttgaccccacgtgaagtctagggaata

SEQ ID NO: 680261 - DNA, 120 bp, Artificial Sequence
  ENSG00000186675_14 (sequence is synthesized)
tgtatcacttcagctgagtggcataagttaaagatgccttggtaaaataggcattggggctctaaattagaatccaggtagggcttgtgtgggaagtacaaattgtgcttgctgtctgtg

SEQ ID NO: 680262 - DNA, 120 bp, Artificial Sequence
  ENSG00000186675_15 (sequence is synthesized)
ttccaattctagtagtatttccttccttttaatatactcttggattaggttaatgaccaatatttataaatggaatttttcatttgccatcccggtcttgtttcagcataaaagttcaga

SEQ ID NO: 680263 - DNA, 120 bp, Artificial Sequence
  ENSG00000186675_16 (sequence is synthesized)
cagctctgtaaaatgtattgataatatttacatctttgaaataatcagtaaaatggtctggtacaggagttaaataacaatgacacacacacaacaaaacaaacacaaaaccactgatct

SEQ ID NO: 680264 - DNA, 120 bp, Artificial Sequence
  ENSG00000186675_17 (sequence is synthesized)
gtgattgctctccctttgtgtctactgccgtatacatatatacaactatatatacacaaatatatatatacacaaaactgtcatttacctgtatttgcaataaaagcataatgaattaga

SEQ ID NO: 680265 - DNA, 120 bp, Artificial Sequence
  ENSG00000186684_0 (sequence is synthesized)
agtctccttgtgcgatctcccagacatgagagccctgctgggctttctggctcctcctccgtgcagagttgtcccgtcaggagccaggaggggcgacgctggctccgtgggagggtgaac

SEQ ID NO: 680266 - DNA, 120 bp, Artificial Sequence
  ENSG00000186684_1 (sequence is synthesized)
agtggctcaagatgagaagcgtattgagacaaagaattctgaaaccgaaagatgtggccatttattctggagaagtcaaccaagttattgctgacttaattaaaagaatctacctcctca

SEQ ID NO: 680267 - DNA, 120 bp, Artificial Sequence
  ENSG00000186684_2 (sequence is synthesized)
ggagccaggcagaagatggagaaaccgtgaccaatgtcaatgatcttttcttcaaatattcaatggaaggagtggccaccatcctttatgagagtcgtttgggctgcctggaaaacagca

SEQ ID NO: 680268 - DNA, 120 bp, Artificial Sequence
  ENSG00000186684_3 (sequence is synthesized)
tcccacagctgactgtggaatacatcgaggccctggagctcatgtttagcatgttcaagacctccatgtatgcaggcgccatccccagatggcttcgccccttcatcccaaagccctggc

SEQ ID NO: 680269 - DNA, 120 bp, Artificial Sequence
  ENSG00000186684_4 (sequence is synthesized)
gggaattctgcaggtcctgggatggactcttcaaattcagccaaattcatgttgacaacaagttgagggacatacagtaccaaatggaccgaggccggagggtgagcgggggacttctca

SEQ ID NO: 680270 - DNA, 120 bp, Artificial Sequence
  ENSG00000186684_5 (sequence is synthesized)
catacctcttccttagccaggctctgacgctgcaggagatctacgccaacgtgactgagatgctgctggccggcgtcgacacgacgtccttcaccttgtcttggactgtgtacctcctgg

SEQ ID NO: 680271 - DNA, 120 bp, Artificial Sequence
  ENSG00000186684_6 (sequence is synthesized)
caaggcacccagaagtgcagcagacggtgtaccgggagattgtgaagaatttaggggaaaggcatgttccaactgcagctgatgtccccaaggtcccgctggtcagagctctccttaagg

SEQ ID NO: 680272 - DNA, 120 bp, Artificial Sequence
  ENSG00000186684_7 (sequence is synthesized)
aaaccctgaggctgtttccagtgctgccagggaacggccgggtcacccaggaagacctggttattggcgggtatctgattccgaaaggcacccagctggccctttgccactatgccacat

SEQ ID NO: 680273 - DNA, 120 bp, Artificial Sequence
  ENSG00000186684_8 (sequence is synthesized)
cgtaccaggatgagaacttccctcgggccaaggagttccggcctgagcgctggctgcggaaaggagacttagatagagttgacaattttggatccatcccctttggtcatggggttcgca

SEQ ID NO: 680274 - DNA, 120 bp, Artificial Sequence
  ENSG00000186684_9 (sequence is synthesized)
gctgcatagggcggagaattgcagaactggagattcacctcgtcgtgatccagttgcttcaacattttgagatcaaaacatcttctcagaccaatgctgttcatgcaaaaacccacgggc

SEQ ID NO: 680275 - DNA, 120 bp, Artificial Sequence
  ENSG00000186684_10 (sequence is synthesized)
tcctgacgccaggggggcccatccacgtgcgatttgttaacagaaagtaagcctagattttaaacctgggctgatgtagcagaccagctcgccgacacacagtgggtatttgtgttcgct

SEQ ID NO: 680276 - DNA, 120 bp, Artificial Sequence
  ENSG00000186684_11 (sequence is synthesized)
gatcaccgtggagaaggaaagcgatgtcgctaaaggctgtcttgttatagactggcctcccaggtcctgggacacttgtaaatctttatgcaaagtaatgtaaaaaggttgctattttac

SEQ ID NO: 680277 - DNA, 120 bp, Artificial Sequence
  ENSG00000186684_12 (sequence is synthesized)
tggtgcataccagaagttgccctttctttgggggaaacagctgtttaaaaaccagtggcagtgaatttttatgcttcatacattgtgctagactcaatatttaatgactggcagtatcct

SEQ ID NO: 680278 - DNA, 120 bp, Artificial Sequence
  ENSG00000186684_13 (sequence is synthesized)
gtgcatttacttgtacagggaaatggtggtttacttacaaattcagttcttcaatatatgttctctaatactggcatctgggctcaaattgccatcaacagtaagttgaaggcaatttca

SEQ ID NO: 680279 - DNA, 120 bp, Artificial Sequence
  ENSG00000186684_14 (sequence is synthesized)
acttactgtttctaatttgaagagggaacattaagaatgcctctgtaatactgtaattatgggaagaaagcaccagaggcaacattttatcctgagcaccagatttagatcctgttaaag

SEQ ID NO: 680280 - DNA, 120 bp, Artificial Sequence
  ENSG00000186684_15 (sequence is synthesized)
ttagccgggcgtggtggtgcacacctatggtcctagttactcggaagactgaggcaggaggatcgtttgagctcaggaggttgggtctgcagtgagctatctatgatggcaccactgcac

SEQ ID NO: 680281 - DNA, 69 bp, Artificial Sequence
  ENSG00000186684_16 (sequence is synthesized)
ctgaggcaggaggatcgtttgagctcaggaggttgggtctgcagtgagctatctatgattaaaataaaa

SEQ ID NO: 680282 - DNA, 120 bp, Artificial Sequence
  ENSG00000186684_17 (sequence is synthesized)
agaaataaataataaataaataataaataaataaaaaagaaagctcctggtgaaatcaagaataatcagattttctaaccaaatctaaatacagagtagagcagacgtataagaactgga

SEQ ID NO: 680283 - DNA, 120 bp, Artificial Sequence
  ENSG00000186684_18 (sequence is synthesized)
aatatgatgacgtaaaattttgttgcctaagttgtgagaagtaataaaacaggcagcatggaaaacaatgtaactttagaacatttttatttcaagggaaaataaatacataaatagaga

SEQ ID NO: 680284 - DNA, 120 bp, Artificial Sequence
  ENSG00000186684_19 (sequence is synthesized)
tgctacagatacaacaatatttttatcttgatggtgttgttttaaatatccacacaagaaccctcacccagttgtgtgcctgtgccaggctctctgggaagccgtggctccgggagtgct

SEQ ID NO: 680285 - DNA, 120 bp, Artificial Sequence
  ENSG00000186684_20 (sequence is synthesized)
gggtcctgaggagttctgttgcctttcctgctgctcaccggttgctaagaggaaacaccgtgatttcctgatgctcttgccttgtcatcatgcctgaaacagcttattcccaattctgta

SEQ ID NO: 680286 - DNA, 120 bp, Artificial Sequence
  ENSG00000186684_21 (sequence is synthesized)
attccttttacataatccttctccaaaaattactttcttactaatatagaccatacagttttttttccatttagtaagtcactctgcaaaataacccttaagtaaatagacataatatcc

SEQ ID NO: 680287 - DNA, 120 bp, Artificial Sequence
  ENSG00000186684_22 (sequence is synthesized)
atttcacataccatttttgttaaagtatataataaagttgaaatctctgtgtggtagcagaataactctagtatgaatgctgtaaatgtacaggtaaatgtgaaattaggtcatattaac

SEQ ID NO: 680288 - DNA, 120 bp, Artificial Sequence
  ENSG00000186684_23 (sequence is synthesized)
tggccaagtgttggattgattactttgaggtagcagtatacgtatattaagttttataaactagatgaaattgcattctgtttgagactgaaatttaaaaatattgagaataactaagcg

SEQ ID NO: 680289 - DNA, 120 bp, Artificial Sequence
  ENSG00000186684_24 (sequence is synthesized)
acttgaagtgacctcttattccctgggtatacatacagtgtgaccctctcgtgaagtgtggctctgcctggggatcagcacagggtgaatagcaaagtgcgggctgggggtagcacctgt

SEQ ID NO: 680290 - DNA, 120 bp, Artificial Sequence
  ENSG00000186684_25 (sequence is synthesized)
gcccgctgctgagtctcactgaacaggaagggaagcagccagacacgggggcctcctggtgtgatgtagcaggaagtgcagggcgccacccaggaagcatccacgccaaagaaatggaga

SEQ ID NO: 680291 - DNA, 120 bp, Artificial Sequence
  ENSG00000186684_26 (sequence is synthesized)
aagaaatggagattcagctggacaagtttctaggttcgctactggtttataggaaatatgtggtatacagggagatgtcaaaactccatgggggctgggcgtggtggctcacacctgtaa

SEQ ID NO: 680292 - DNA, 87 bp, Artificial Sequence
  ENSG00000186684_27 (sequence is synthesized)
attgcttgaggccaggagtttgagacaagcttgggcaacacagtgagatcctgtctactaaaaatcaaaaaactagctatttgggag

SEQ ID NO: 680293 - DNA, 87 bp, Artificial Sequence
  ENSG00000186684_28 (sequence is synthesized)
agtgtggtggtgcatgcctgtagtcctagctatttgggaggctgaggctggaggattgcttaagtgccattacactccagcctgggt

SEQ ID NO: 680294 - DNA, 120 bp, Artificial Sequence
  ENSG00000186684_29 (sequence is synthesized)
caaacaaacacacaaacaaactccatggggatgcagtcagcaaaatccagaatagagtgaggtctataggaccaatgtctcgggtttccaacaaaacaaatacgtgacaggcaaaaaaca

SEQ ID NO: 680295 - DNA, 87 bp, Artificial Sequence
  ENSG00000186684_30 (sequence is synthesized)
tccgtatctccaaggggagaggagaactgttacagatgaagcaatataggagacatattaaccaagtacaatgctggacttcgtttg

SEQ ID NO: 680296 - DNA, 120 bp, Artificial Sequence
  ENSG00000186684_31 (sequence is synthesized)
aggagacatattaaccaagtacaatgctggacttcgtttgaatcagattcaaataaaccacttgtaaaaagacatttaagagataatttttaaaaataaaataaaagccaaaaatattaa

SEQ ID NO: 680297 - DNA, 120 bp, Artificial Sequence
  ENSG00000186684_32 (sequence is synthesized)
ttcttccaatgcatgaaaaaaagagagcaactcggggaaatttgaatgctgactgtgtgtatttgatgatatttgggaattactgttaatttttttgttgtgataatggtagttatgttt

SEQ ID NO: 680298 - DNA, 120 bp, Artificial Sequence
  ENSG00000186684_33 (sequence is synthesized)
aaacaaagttgctcagacaaacaagccgatgcagacgagcgccatggccctgctggcgcggatcctgagagccgggctgcggccggcgcccgagcggggtgggctcctgggcggcggggc

SEQ ID NO: 680299 - DNA, 80 bp, Artificial Sequence
  ENSG00000186684_34 (sequence is synthesized)
gtcgccgccgggagggggccgagccgagggtccccggagcctcgccgccatgccggggccgaggaccctcgccaacctgg

SEQ ID NO: 680300 - DNA, 120 bp, Artificial Sequence
  ENSG00000186684_35 (sequence is synthesized)
ggccgaggaccctcgccaacctggcggagttcttctgcagggacggcttcagccgcatccacgagatccagcagaagcacacacgggaatatggaaaaatcttcaagtctcactttggtc

SEQ ID NO: 680301 - DNA, 120 bp, Artificial Sequence
  ENSG00000186684_36 (sequence is synthesized)
ctcagtttgtagtatctattgcagaccgcgatatggtggctcaggtgctccgggcggagggcgctgcgccccagagagccaacatggagtcctggcgggagtaccgagacttgcggggga

SEQ ID NO: 680302 - DNA, 120 bp, Artificial Sequence
  ENSG00000186684_37 (sequence is synthesized)
gtttatggctgaaatgttatggcatcttggatttgctttaaaataacccagcttgctgcaggaggtgggtattgtgtgtgtgggaaggtggggaggctgcgggaggaagagatgacccaa

SEQ ID NO: 680303 - DNA, 120 bp, Artificial Sequence
  ENSG00000186684_38 (sequence is synthesized)
gattaggcagatgttgttaactgtggaagcagggtggtgagtgggggctcatgacattatgctctctactttgtgtacgtgtgaacatttccgtaataaaagatgccttcagaaacaaaa

SEQ ID NO: 680304 - DNA, 120 bp, Artificial Sequence
  ENSG00000186687_0 (sequence is synthesized)
agttcagtctttgattggttgctgagaggcggggctactcgactgctctggaggtagcggccgcggtgaggagagccatgggacgggcagtcaaggttttacagctctttaaaacactgc

SEQ ID NO: 680305 - DNA, 120 bp, Artificial Sequence
  ENSG00000186687_1 (sequence is synthesized)
acaggaccagacaacaagtttttaaaaatgatgccagagcattagaagcagccagaataaagataaatgaagaattcaaaaataataaaagtgaaacttcttctaagaaaatagaagagc

SEQ ID NO: 680306 - DNA, 120 bp, Artificial Sequence
  ENSG00000186687_2 (sequence is synthesized)
taatgaaaataggttctgatgttgaattattactcagaacatctgttatacaaggtattcacacagaccacaatacactgaaactggtccctaggaaagaccttcttgtagaaaatgtgc

SEQ ID NO: 680307 - DNA, 120 bp, Artificial Sequence
  ENSG00000186687_3 (sequence is synthesized)
catattgtgatgcaccaactcagaagcaatgagttttctagaatacaacaagtctttgtactttttaactttaaaatctacaactctggcaaaagtcctggaaatgcagacattttccct

SEQ ID NO: 680308 - DNA, 120 bp, Artificial Sequence
  ENSG00000186687_4 (sequence is synthesized)
gaactggcatattgaaaatgaatgaattacagaatagcttcatatttaaatttcatgttaaaaggtcattactgagaactaaagaacataattaagtatttctaaaggaaattagataag

SEQ ID NO: 680309 - DNA, 120 bp, Artificial Sequence
  ENSG00000186687_5 (sequence is synthesized)
aaaacatttcattttcattgaaaatcaaatttcataaagcaaagtaaatgcttagggagatatattcaatctttgaccttgatgagtatttgatcttaccatagctatttgagaatgtgg

SEQ ID NO: 680310 - DNA, 120 bp, Artificial Sequence
  ENSG00000186687_6 (sequence is synthesized)
tgcttttacaaattggtgagttttcctgccatgtgaaatgcaattattacatttaaattgttagattaaaatgatatttagtcctgaaaaatattaaattggtcaaaaaaatcacagtgt

SEQ ID NO: 680311 - DNA, 120 bp, Artificial Sequence
  ENSG00000186687_7 (sequence is synthesized)
atgccagctctctacagaaagtggcctttgttttctaaagcactgggattatttctgtagctaatatataattgtacagtttctttttagagatagagagtatctctgtgttcttatgaa

SEQ ID NO: 680312 - DNA, 120 bp, Artificial Sequence
  ENSG00000186687_8 (sequence is synthesized)
gacattttttatcagttttctgaaaatagatgaataaaatattatagtcacctagggtcactatggaataaagaaatcctagtttaaagaggaaatagtggcccttgatcaaactattta

SEQ ID NO: 680313 - DNA, 120 bp, Artificial Sequence
  ENSG00000186687_9 (sequence is synthesized)
atatggccttagtagaattagctgtatttagacaaagttagactttagtgtgaaatgtaatcggtggctacattctcatcgttttaattaatgaaacttaaatggcttctcttcttccac

SEQ ID NO: 680314 - DNA, 120 bp, Artificial Sequence
  ENSG00000186687_10 (sequence is synthesized)
atgtcctgtccttgacaagatgggcagtatcacaaaaggtcctggcattctaccatctaacactaggaactgtaaaatactgtttaatattcttcttgtttctcttttatctgtgtatct

SEQ ID NO: 680315 - DNA, 120 bp, Artificial Sequence
  ENSG00000186687_11 (sequence is synthesized)
ttgccattctattttctcagtgaatagtatgttttctcccattcactgataaattctctcatttgatgatgatacagggtttttaatttttgcaagattctcaatgcaagcattgttatg

SEQ ID NO: 680316 - DNA, 120 bp, Artificial Sequence
  ENSG00000186687_12 (sequence is synthesized)
tatctagaaattatacctagagaaaaatgaaagtcgtttcaaatttgaaatttgcccttttaagagaatgctgaatgtcatcgcagtatataatcactatataaatgtgctgacttacag

SEQ ID NO: 680317 - DNA, 120 bp, Artificial Sequence
  ENSG00000186687_13 (sequence is synthesized)
ttattttagtgtctatatgacatattttgaggaaagttggctgacgttatttaaatttaatatatattctatattttagtgttattgaatattttatcactgagcttttttctttaacct

SEQ ID NO: 680318 - DNA, 120 bp, Artificial Sequence
  ENSG00000186687_14 (sequence is synthesized)
gaattccctgttccatttttcattcatattaatttaaataactccagatttctttcttatagtcattattagtagcagatgagattaataattcacatgtttattaaagatagtggctta

SEQ ID NO: 680319 - DNA, 120 bp, Artificial Sequence
  ENSG00000186687_15 (sequence is synthesized)
ttaataattcacatgtttattaaagatagtggcttagaaattttaagatatattgatataggcccgggcgctgtggctcacacctgtaatcccgcactttgggaggctgaggcgggcaga

SEQ ID NO: 680320 - DNA, 120 bp, Artificial Sequence
  ENSG00000186687_16 (sequence is synthesized)
aaaaaggaaaaaaaaaagatatattgatacagataggtagatatgatattgtactttcatgccataagactacacaataaagttcctgaaagttcctggctgggcgcagtggctcacgcc

SEQ ID NO: 680321 - DNA, 120 bp, Artificial Sequence
  ENSG00000186687_17 (sequence is synthesized)
aaataaataaagttcctgtgaagtatataaacatgtcaacaacaggcttgactgtcacaaaattctgaaagatgtcgcactctattcttatatagcatatgctaatttatttatttattt

SEQ ID NO: 680322 - DNA, 120 bp, Artificial Sequence
  ENSG00000186687_18 (sequence is synthesized)
tttgagattgagttctgctgtgtcacccaggttggagtgcagtggcatggtcatggtccactaaagccttgacccctggggctcagcagttatgccaactaagcctcccaaatagctgag

SEQ ID NO: 680323 - DNA, 120 bp, Artificial Sequence
  ENSG00000186687_19 (sequence is synthesized)
tgccaactaagcctcccaaatagctgagactagaggtatgcgccaccacacctagctattttttttatttttagtaaggacaaggtctcattatgttggccaggctggtctcaaattcct

SEQ ID NO: 680324 - DNA, 120 bp, Artificial Sequence
  ENSG00000186687_20 (sequence is synthesized)
gggattacaggtgtaagccactgcaccctgcctattcttataatcatatatttatatttcaaatggattttaactggttatttaatagtttaattagataaagtaattcatggctgggtg

SEQ ID NO: 680325 - DNA, 120 bp, Artificial Sequence
  ENSG00000186687_21 (sequence is synthesized)
ttacctgaggtcggaagttcgagaccagcccaaccaacgtggagaaaccccatctctattaaaaatgcaaaattagcaggacatggtgatacacacctgtaatcccagctagtcaggagg

SEQ ID NO: 680326 - DNA, 120 bp, Artificial Sequence
  ENSG00000186687_22 (sequence is synthesized)
gattgtgccactgcactccagcctgagagaacaagactccgtctcaaaaaaagaaaaaaagaaaacttttttacacatgggtatctcaccatgttgcccaggctggagtgcagtagctat

SEQ ID NO: 680327 - DNA, 120 bp, Artificial Sequence
  ENSG00000186687_23 (sequence is synthesized)
ccatgttgcccaggctggagtgcagtagctattcataggcacagtcatagcacactgcagcctagaatttctgacctcaagcaatcatcctgcctcagcctcctaagtagctaggactac

SEQ ID NO: 680328 - DNA, 120 bp, Artificial Sequence
  ENSG00000186687_24 (sequence is synthesized)
aaccagctttaattaaatgttttttatttggttattttttttaagttttctgtattcacacaaggggttgcccaaatataattttgctttgactattgagatctagtgaaagtggggtat

SEQ ID NO: 680329 - DNA, 120 bp, Artificial Sequence
  ENSG00000186687_25 (sequence is synthesized)
atgaattctaattgcaaatatccaggctcagaggcccagcaggactttctaacacaatcttttagcggaagttagaaatggtatatagcaggagagtcagatttgagaagcatatgtaga

SEQ ID NO: 680330 - DNA, 120 bp, Artificial Sequence
  ENSG00000186687_26 (sequence is synthesized)
ttcgaagctgggggaatatggcaggtagtttgtacaacatctaattcagaacattaaaattaagattttagtcaaactgtgtttaagttagttcttattttcctgtagatgcatctcaca

SEQ ID NO: 680331 - DNA, 120 bp, Artificial Sequence
  ENSG00000186687_27 (sequence is synthesized)
gcatcagtacaataccaaaaaagcacacaagaataagaatatgtggaatttctatacctattgacaaagcacataatttaaccataaacacaaagccataggtcaacaaagaaatgaaga

SEQ ID NO: 680332 - DNA, 120 bp, Artificial Sequence
  ENSG00000186687_28 (sequence is synthesized)
ttccagttctgaaggtgagttttctgaagccaaagtggatacatgcaaaattaatatagttttactgtatatcagttgtcaccaatcagaaatggaaaacagatcctatttataattgca

SEQ ID NO: 680333 - DNA, 120 bp, Artificial Sequence
  ENSG00000186687_29 (sequence is synthesized)
aacaaaactgtaaaatagactttttaaagtctgggaatagacttctaaaataagctataacacttaaaaaggagagatatactatgttcctagataggacaattgaaaattctggagatg

SEQ ID NO: 680334 - DNA, 120 bp, Artificial Sequence
  ENSG00000186687_30 (sequence is synthesized)
tgttcctagataggacaattgaaaattctggagatgacagtttttcaaaaatctattgaggccaggtgcagtggcccatgcctgtagttccagtactttgggaggcctaggtgggtggat

SEQ ID NO: 680335 - DNA, 88 bp, Artificial Sequence
  ENSG00000186687_31 (sequence is synthesized)
gaaaaaacatttatcgaaatcccaacaagttgacaaatatatccacataaaaatataaaacttctgtattctgtgaaagctactataa

SEQ ID NO: 680336 - DNA, 120 bp, Artificial Sequence
  ENSG00000186687_32 (sequence is synthesized)
aaaaatataaaacttctgtattctgtgaaagctactataaataaagtttagagaaagttatttgccacctatgtcatgattgaaatagttaattgatcctgtgaatcagttagcaaaaca

SEQ ID NO: 680337 - DNA, 120 bp, Artificial Sequence
  ENSG00000186687_33 (sequence is synthesized)
taactcaatggaaagataggcaaatgatacaaataagaaattcacaaaagaagaaatactaagtctctagtgatgagagaaatgtaaattaaaatgaaacatgtttgttcatcaagttgt

SEQ ID NO: 680338 - DNA, 120 bp, Artificial Sequence
  ENSG00000186687_34 (sequence is synthesized)
cacaagttagacaatcatatccaatatttttaaaggttgtaagactataaggaaatagccactgtcatatcatttttaaaggaatataaattatagggccttttgtttctttgggttttt

SEQ ID NO: 680339 - DNA, 120 bp, Artificial Sequence
  ENSG00000186687_35 (sequence is synthesized)
tttttttagagacaagatctctccgtgttgtctaggctggactcaaacttctggactcaagcaatcctcgcaacatcattaatagctgagagtagagacttgagccaccacacctgacta

SEQ ID NO: 680340 - DNA, 120 bp, Artificial Sequence
  ENSG00000186687_36 (sequence is synthesized)
tagggcctttttgaaaggaaaattgacatcatcaaaattttaaatatattcagtctatttctcaaaaactcaaagaatactaataaatgtgtactcaggtatatgtacagaaattgctgt

SEQ ID NO: 680341 - DNA, 120 bp, Artificial Sequence
  ENSG00000186687_37 (sequence is synthesized)
aacattataattttaaacaatttaaaacagactgagtttccaaagttagggtacaatgaaagaaaaggtggcttatttatactctggaatattttccaagagttgaaaaggatgaggata

SEQ ID NO: 680342 - DNA, 120 bp, Artificial Sequence
  ENSG00000186687_38 (sequence is synthesized)
cacacacacacacacacacacagtttgggtatccctaatccagaaattcaaatgctccaaagtccaaaactttctgacccaccaacatgactgatgctcaaaggaaatggccactggaag

SEQ ID NO: 680343 - DNA, 120 bp, Artificial Sequence
  ENSG00000186687_39 (sequence is synthesized)
ctcaaaggaaatggccactggaagatttcagattttcagatttggagtgctcaaccagtaagtatataatgcaaataatccaaaatacaaaaaaaaaaaaaaagaaatctgaaacacttc

SEQ ID NO: 680344 - DNA, 120 bp, Artificial Sequence
  ENSG00000186687_40 (sequence is synthesized)
tgatcccaagcatttcagaaaacggatgttcatttgtgtgtgtgtgtgtgtgtaagcaggtgttgctagaaattcacttatatacaagaaaactttttgtgtacatatttgcatatatat

SEQ ID NO: 680345 - DNA, 120 bp, Artificial Sequence
  ENSG00000186687_41 (sequence is synthesized)
gtacaaatgggtagaaacgatacatgattaatcttaatcgggaaggaaaagagatttagggaaggaagcagtaagtgagaacttttattctatttactcctgcacgtttaaatattgttt

SEQ ID NO: 680346 - DNA, 120 bp, Artificial Sequence
  ENSG00000186687_42 (sequence is synthesized)
acagtgagtatatcaacatgtaagtgttaaaagacaataagctactagtgatttttaatataaaattaactataaaatattttaaatattagcaaataatatagcacactcatgaaccta

SEQ ID NO: 680347 - DNA, 120 bp, Artificial Sequence
  ENSG00000186687_43 (sequence is synthesized)
attcccacatttgatagttgttacattttgccatgtttgtttaaaggtctaagtcataaaatcttataaagctaaaccccacccttctctttctcctctctctccaggataattactgtt

SEQ ID NO: 680348 - DNA, 120 bp, Artificial Sequence
  ENSG00000186687_44 (sequence is synthesized)
ttatagtttgtggatatcattcccttacttgtgtttatacttttaccaagtgtgtatgtattcaaaaaacagttgttttgtgattttaaaatgtaaatgaatggcgttatgctccatgta

SEQ ID NO: 680349 - DNA, 120 bp, Artificial Sequence
  ENSG00000186687_45 (sequence is synthesized)
ttctgcaacttttcatcatacattaggttttggcgatttagccataatttggcatgaattcaggtcttttaagttttattccattgtaagaataaacaagtttgttcattcatgtctcca

SEQ ID NO: 680350 - DNA, 87 bp, Artificial Sequence
  ENSG00000186687_46 (sequence is synthesized)
tgagatctagtgaaagtggggtatatgaattctaattgcaaatatccaggctgaggcgtgagaatcgcttgaacccggtaggcagat

SEQ ID NO: 680351 - DNA, 120 bp, Artificial Sequence
  ENSG00000186710_0 (sequence is synthesized)
atggcggtgccctgggaggaatatttccgactggctttgcaagagaaactgtctacaaagctgccagagcaggctgaggatcatgtcccaccagtactgcgtctcctggagaagaggcaa

SEQ ID NO: 680352 - DNA, 120 bp, Artificial Sequence
  ENSG00000186710_1 (sequence is synthesized)
gagctggtagatgcagaccaggccctgcaggcccagaaggaggtgttccgcaccaagacggcagccctgaaacagcgttgggaacagctggaacaaaaggagcgggagctaaagggatcg

SEQ ID NO: 680353 - DNA, 120 bp, Artificial Sequence
  ENSG00000186710_2 (sequence is synthesized)
ttcatccgctttgacaagtttttgcaggactccgaggcccggcgcaatcgcgcgctgcggagggcggcggaggagaggcaccaggcgggccgtcgggaggtggaggcgctgcgtctgtgg

SEQ ID NO: 680354 - DNA, 120 bp, Artificial Sequence
  ENSG00000186710_3 (sequence is synthesized)
acccagctccaggagctacggcgggaacacgcgcggctgcagcgccggcttaagcgcctggagccctgcgcgcgcctgctggagcaagcgctggagctgctgcccgggttccaagaggtt

SEQ ID NO: 680355 - DNA, 120 bp, Artificial Sequence
  ENSG00000186710_4 (sequence is synthesized)
ccggagctggtggcgcgcttcgacggcctggccgagacgcaggcggcgctgaggctcagggagcgcgagcagctcgcggagctggaggcggcgcgagcgcggctgcagcagctgcgggac

SEQ ID NO: 680356 - DNA, 120 bp, Artificial Sequence
  ENSG00000186710_5 (sequence is synthesized)
gcctggccggacgaggtgctcgcacagggccagcggcgggcacagctgcaggagcgcctggaggctgccagggagcgtacgctgcagtgggaatccaagtggattcagattcagaacaca

SEQ ID NO: 680357 - DNA, 120 bp, Artificial Sequence
  ENSG00000186710_6 (sequence is synthesized)
tcaggggcagcctcccaccctggacatcgaggacacggagggacagctagagcacgtgaagctgttcatgcaggacctctctgccatgctggccggcctgggtcaggctgagcctgcagc

SEQ ID NO: 680358 - DNA, 120 bp, Artificial Sequence
  ENSG00000186710_7 (sequence is synthesized)
ccctgcctcctagccctgacacaggctgacgcagctgctgcccttctgtggccatacagtgctccttttcacagatgatggctcctgcagggagtgcccccagtgcccagcacagggcca

SEQ ID NO: 680359 - DNA, 120 bp, Artificial Sequence
  ENSG00000186710_8 (sequence is synthesized)
ggcacacagtggtgcacgggaacgtctgctgatgcccaccctaaggccaatcaaggagccacggggctgggtcctggtcctcacatcctcttccgcatcttgcccttcttggagcgggca

SEQ ID NO: 680360 - DNA, 120 bp, Artificial Sequence
  ENSG00000186710_9 (sequence is synthesized)
ccccggccgaaggcgccctgctgcagctcctggacgcggcggcggttgcgggcagagagctgcttgaggccaccacgctgcaggaagtgcagcttctgggcccggcgccgctgcttcagg

SEQ ID NO: 680361 - DNA, 120 bp, Artificial Sequence
  ENSG00000186710_10 (sequence is synthesized)
atctgctgcttggtcttgagttccgggcggactcggcctgcaggggtgcctggggcgtggggccgggatgcacctgctgggacagggattcagggagctcagctgttgggatcactccca

SEQ ID NO: 680362 - DNA, 120 bp, Artificial Sequence
  ENSG00000186710_11 (sequence is synthesized)
agatcccctcctcccagaagcttgcagactcctcccctgcccctactcctgttctgtgcttattgctgtggcccagtgtctgtacacagtaggtggctaataaagttttaggcagcctca

SEQ ID NO: 680363 - DNA, 120 bp, Artificial Sequence
  ENSG00000186710_12 (sequence is synthesized)
aggaaacggcgggaaacacacacgcactgcctgaagcaaccgattaaaaaaaaaaaaagcgggcgggggagttgggtgaagagccagcttccgagccaggcctgctggccgcccctggtt

SEQ ID NO: 680364 - DNA, 120 bp, Artificial Sequence
  ENSG00000186714_0 (sequence is synthesized)
aacaggagctagaggcgcgcttcgctgaggaaataaatattaatatggaaagcaacttcaatactgagtcatcatctacttttactcttcaaagttcttcagagacattgttttctattc

SEQ ID NO: 680365 - DNA, 120 bp, Artificial Sequence
  ENSG00000186714_1 (sequence is synthesized)
agctattagatttcaaaacaagtttactggaggcattagaagaattgcgtatgagaagggaagcagaaattcattatgaagagcagattggtaaaattattgtggagacacaggaactta

SEQ ID NO: 680366 - DNA, 120 bp, Artificial Sequence
  ENSG00000186714_2 (sequence is synthesized)
aatggcaaaaggaaactcttcagaatcaaaaggaaacattggcagagcaacacaaggaagcaatggcagtttttaaaaagcagttgcagatgaagatgtgtgccctggaagaagaaaagg

SEQ ID NO: 680367 - DNA, 120 bp, Artificial Sequence
  ENSG00000186714_3 (sequence is synthesized)
gaaaatatcaacttgctacagaaataaaggaaaaagaaatagaaggattgaaggaaacattaaaagcactacaggtttctaaatactctttacagaagaaagtgagtgaaatggaacaaa

SEQ ID NO: 680368 - DNA, 120 bp, Artificial Sequence
  ENSG00000186714_4 (sequence is synthesized)
aggtccagttacatcttctggctaaagaagactatcataagcaactgagtgaaattgagaaatattatgccacaataacaggtcaatttggattggtaaaagagaatcatgaaaagttag

SEQ ID NO: 680369 - DNA, 120 bp, Artificial Sequence
  ENSG00000186714_5 (sequence is synthesized)
aacaaaatgtacgggaagcaatacaatcaaacaaaagactttcagctttaaataaaaaacaagaagctgaaatatgcagtttaaagaaggaactaaaaaaagcagcctcagacttgataa

SEQ ID NO: 680370 - DNA, 120 bp, Artificial Sequence
  ENSG00000186714_6 (sequence is synthesized)
agtccaaagtcacatgtcaatataagatgggagaagaaaacatcaatctaacaattaaagaacaaaaatttcaagaacttcaagaaagactcaacatggaattggaattaaatgagaaga

SEQ ID NO: 680371 - DNA, 120 bp, Artificial Sequence
  ENSG00000186714_7 (sequence is synthesized)
ttaatgaagagattacccatattcaagaagaaaaacaggatatcatcatttctttccaacatatgcagcagttacttcggcaacaaattcaagctaatactgaaatggaggcagaattga

SEQ ID NO: 680372 - DNA, 120 bp, Artificial Sequence
  ENSG00000186714_8 (sequence is synthesized)
aggtgctaaaagaaaataatcagacccttgaaagagataatgagctgcaaagggagaaggtaaaagaaaatgaagaaaagtttcttaatcttcaaaatgagcatgaaaaagcactaggaa

SEQ ID NO: 680373 - DNA, 120 bp, Artificial Sequence
  ENSG00000186714_9 (sequence is synthesized)
cttggaaaagacatgctgaagaacttaatggagaaattaataagattaaaaatgaattatcatcccttaaagaaactcatattaagttacaagaacattataacaaattatgcaatcaaa

SEQ ID NO: 680374 - DNA, 120 bp, Artificial Sequence
  ENSG00000186714_10 (sequence is synthesized)
aaacatttgaggaagacaaaaagtttcagaatgttccagaagtaaataatgaaaacagtgaaatgtcaactgaaaaatcagaaaacaccattatacagaaatataatactgagcaagaaa

SEQ ID NO: 680375 - DNA, 120 bp, Artificial Sequence
  ENSG00000186714_11 (sequence is synthesized)
taagggaagaaaatatggagaatttttgttcagatactgaatacagagaaaaagaagaaaaaaaagaaggctcatttatagaggaaataattatagatgatttacagctttttgaaaaaa

SEQ ID NO: 680376 - DNA, 120 bp, Artificial Sequence
  ENSG00000186714_12 (sequence is synthesized)
gcttcaagaatgaaattgatactgttgtttctcaggatgaaaatcaaagtgaaatctccttaagcaaaaccctctccttagataaagaagtaattagtcaaggacaaacctcgaatgtta

SEQ ID NO: 680377 - DNA, 120 bp, Artificial Sequence
  ENSG00000186714_13 (sequence is synthesized)
cggacaacagaaaatcagttactacagaaataaaagacaagatatgcttggaaaaagacaatggatgtacagaatttaaatcaccaaataatcattttgtagtgttagatacagcaatag

SEQ ID NO: 680378 - DNA, 120 bp, Artificial Sequence
  ENSG00000186714_14 (sequence is synthesized)
aaacagaaaaaatacatctagaaagaaccagaggattagatgttcaccatacagatgtaaatctggaggttgaaaataacaaaacatcatttaacagtattttaaatgagacagcacaca

SEQ ID NO: 680379 - DNA, 120 bp, Artificial Sequence
  ENSG00000186714_15 (sequence is synthesized)
atacatatcacaataataataaagatgtttctgaaaatgagccattcaaacaattcagattgcttccagggactcgagaacatgctctagagaaggaaattacaaatagtgaccaaacca

SEQ ID NO: 680380 - DNA, 120 bp, Artificial Sequence
  ENSG00000186714_16 (sequence is synthesized)
tggactcgtctctagatataaaaaaaaatcctgttccatgtcagaaatatagtttacggaattcaagtaatgttatgttagatgataaacaatgtaaaataaaacaaatacaactgttaa

SEQ ID NO: 680381 - DNA, 120 bp, Artificial Sequence
  ENSG00000186714_17 (sequence is synthesized)
ctaaaaaaagtgagtgcagcatattactttctaaacaaacttcagattttctgcaagtctgtaatgatactttagagaaatctgaactaactgttccctgtgatatagtaatcgaccacc

SEQ ID NO: 680382 - DNA, 120 bp, Artificial Sequence
  ENSG00000186714_18 (sequence is synthesized)
atgtttcatatgctgcttttagtgctaattcaaaactacttctgaagaactcagataaaaatgtccatagtatgtctatgttggtgaaacctaactcaagccctgggggaaaaactatgt

SEQ ID NO: 680383 - DNA, 120 bp, Artificial Sequence
  ENSG00000186714_19 (sequence is synthesized)
gtaaaaatatgagtgatatgcaaaacagtcaatttaataactgtttgggatacttagaaaacactaatgtgaacatttcccatcttcatcttaacaatgagaatagtcatgcttcacaag

SEQ ID NO: 680384 - DNA, 120 bp, Artificial Sequence
  ENSG00000186714_20 (sequence is synthesized)
ccaaagatgtgaaaactgctgttcacatgaaaacttgcacagaaacagagttttccaataaaaagaatcagattgatgagaatcaggtaactgaagccacaaaaaatgacctcttccttt

SEQ ID NO: 680385 - DNA, 120 bp, Artificial Sequence
  ENSG00000186714_21 (sequence is synthesized)
ttgtgagcattaatgaaagacagcatacattgttaaataatacagagaaaacagaatcattaaatgacattgtttcaggaaaaatgttcagtgaaggacagctggaggaatcacattcat

SEQ ID NO: 680386 - DNA, 120 bp, Artificial Sequence
  ENSG00000186714_22 (sequence is synthesized)
ttcacatagagccatctggagatttagtaaacagaagcggaaggtcaacctttgatctttcaacttcagataaaaaaactgagaaaactccagtatacatgaatttttcagaccccggtc

SEQ ID NO: 680387 - DNA, 120 bp, Artificial Sequence
  ENSG00000186714_23 (sequence is synthesized)
cttggtcaaaagtaaatcacattgaaagtcaaacagcgagcagttcgaccccttgcatttctttgttgctgaaggagagaccactagatccatcagaaaacaaaaagatcatttcaatgg

SEQ ID NO: 680388 - DNA, 120 bp, Artificial Sequence
  ENSG00000186714_24 (sequence is synthesized)
ctctttgtaaaaatattggtgtggatgatgttggaaaggatattggaccagatactaccagcattaacagagttgctgacactttgaataactggagtatccatccagatcccaagggag

SEQ ID NO: 680389 - DNA, 120 bp, Artificial Sequence
  ENSG00000186714_25 (sequence is synthesized)
aacccagtgaagagaagaatgcaatggcaaagactttttatgattcctcttttcccacagaacatgtgaaaacaaagcctctgatatcaactccactacaaagccatttgcaggcaatca

SEQ ID NO: 680390 - DNA, 120 bp, Artificial Sequence
  ENSG00000186714_26 (sequence is synthesized)
agacgactaaaaatacttctggtgatgatgactggcagagcctcattacgaatcaactaaataaaagtgaaaatttactaagtttagaaaatgacaaccagccaaagaaaagaaaagcag

SEQ ID NO: 680391 - DNA, 120 bp, Artificial Sequence
  ENSG00000186714_27 (sequence is synthesized)
aagagacgttggaaaaaaacaacagattaaaataatgtagataagtgctttcagtagtgaaattatgtaactgaaattctggtatagtttttactagaataaaatgactgttgtatttaa

SEQ ID NO: 680392 - DNA, 120 bp, Artificial Sequence
  ENSG00000186714_28 (sequence is synthesized)
agctctacagtttgtctttgcttttccaagtttttctaatgtgaagaaattgtattactctacttctgtcttctctctgtatattatcctttctttaaagtgctcattgcttcttcaata

SEQ ID NO: 680393 - DNA, 120 bp, Artificial Sequence
  ENSG00000186714_29 (sequence is synthesized)
tccttttttaaagaacagaatttatgtattgtatgacagacattgtgaccccttgtaatttattacttcatatcctctggagtttgtgattttagtataaatttgagacaataactgtcc

SEQ ID NO: 680394 - DNA, 120 bp, Artificial Sequence
  ENSG00000186714_30 (sequence is synthesized)
agactaggcaaatttttttagtttataatgttttactatgatttagggcttttttttcaaagaacaaaaattataagcataaaaactcaggtatcagaaagactcaaaaggctgtttttc

SEQ ID NO: 680395 - DNA, 120 bp, Artificial Sequence
  ENSG00000186714_31 (sequence is synthesized)
actttgttcagattttgtttccaggcattaagtgtgtcatacagttgttgccactgctgttttccaaatgtccgatgtgtgctatgactaaaaattgaaaaattaaacacagtgttagtc

SEQ ID NO: 680396 - DNA, 120 bp, Artificial Sequence
  ENSG00000186714_32 (sequence is synthesized)
aagtcggagcagtcacaagcgtgtagttgggctgtttaggaagcagccctaatcttttcatgcagggtccacttacgggtttgccctgcacctccagctgcgtaacctacccttccttgc

SEQ ID NO: 680397 - DNA, 120 bp, Artificial Sequence
  ENSG00000186714_33 (sequence is synthesized)
tctggttgccaaggggctgctttggcctggagcctcctgactgctgggctgtgtctagaatcttccacgctcccgacccaggagaagcagccacactgaggcatccatctggatctctgc

SEQ ID NO: 680398 - DNA, 120 bp, Artificial Sequence
  ENSG00000186714_34 (sequence is synthesized)
aaacatattttcccccatctggattagtacttagggggattggtgtttttgggaataaaatgtgacatttatagtgaaaaaattaattgttgaaactgaatattactgtctccagtaata

SEQ ID NO: 680399 - DNA, 120 bp, Artificial Sequence
  ENSG00000186714_35 (sequence is synthesized)
tgaaaggggatatttgcaatttcacatgttgcataaatgaattatttcacaaatttatttcgagattacatagtacttatacaggttgagcatcccaaatctgaaaactcaaaatttgaa

SEQ ID NO: 680400 - DNA, 120 bp, Artificial Sequence
  ENSG00000186714_36 (sequence is synthesized)
atgcttcaaaattggaaactttttgagtgtcaacatgatgctctaagaaaatgctcattggagtattttggactttagatttttgcatttgagatgcttaacccgtaggtataatgcaaa

SEQ ID NO: 680401 - DNA, 120 bp, Artificial Sequence
  ENSG00000186714_37 (sequence is synthesized)
tattccaaaatcccaaaatatcccaaatatgaaacacttctggtcccagcatttctgattagagatattcaacctatatgtttaaaataaattttacacagttcccaaattattgttagg

SEQ ID NO: 680402 - DNA, 120 bp, Artificial Sequence
  ENSG00000186714_38 (sequence is synthesized)
gttcccaaattattgttagggtcttatagtaaaaacaaataacaaaactctaaaacctcttattttaatggtatcttttctagatatttatgtaaacatgtaattattaattatagtgtg

SEQ ID NO: 680403 - DNA, 120 bp, Artificial Sequence
  ENSG00000186714_39 (sequence is synthesized)
gtagtatttaggatataatatttatcccttatcagtgtacacttgggatatggtactgatcctatattgttcaacaaatatttatttactgtgcattcctcttttatagtctgttaaaaa

SEQ ID NO: 680404 - DNA, 120 bp, Artificial Sequence
  ENSG00000186714_40 (sequence is synthesized)
ctaatgtttttgctttttacagcataacattttagggaatatttactttgatatttttcccttctagctctattttattcagaaggatttttttttctgtgtttttggttgagcaaaatt

SEQ ID NO: 680405 - DNA, 120 bp, Artificial Sequence
  ENSG00000186714_41 (sequence is synthesized)
ttcctatatccactcaaattgtcaaagggctttttgggtggggctatgctattcagtcttcattctttggagcagactgtaaagcaagtaaaattaatttttgagtaaggcttatatatt

SEQ ID NO: 680406 - DNA, 120 bp, Artificial Sequence
  ENSG00000186714_42 (sequence is synthesized)
atatacatgagaagtaagaaatgaactatcaccccttctgacattacatagaaaaacataaagtattttgcttcttgaaattgtttggtgtgttagaaaataagagtcatagactgctaa

SEQ ID NO: 680407 - DNA, 120 bp, Artificial Sequence
  ENSG00000186714_43 (sequence is synthesized)
gcttgattgaataaaagatgtgaaaattctgttgctattcaactggaaagaataaaaataatattgtcagactattttaaaccatgattttaattaagaagctgaaaaactagattctgg

SEQ ID NO: 680408 - DNA, 120 bp, Artificial Sequence
  ENSG00000186714_44 (sequence is synthesized)
tttagctttaagtaccatgacatttgtactgaaagtcatcttcaacgctacagtggttttacacaaaatatagtgaaattgaataatgtgccctttgacctgggagataaggctacaagt

SEQ ID NO: 680409 - DNA, 120 bp, Artificial Sequence
  ENSG00000186714_45 (sequence is synthesized)
taaagatcaaaggcaacataaaatgtgttttattttattccactttcaaatttcatcaaacagatacttacaatctttaaaaaaaaacatggaaacatgtatatacttattctagttttt

SEQ ID NO: 680410 - DNA, 120 bp, Artificial Sequence
  ENSG00000186714_46 (sequence is synthesized)
ttaaagcattgcatcacttttaatttaaaaagttttatatgttggtatatatatttaatattttatattcattctggcagaacatttatattttggatttaaaagttagaagtacccctt

SEQ ID NO: 680411 - DNA, 120 bp, Artificial Sequence
  ENSG00000186714_47 (sequence is synthesized)
tattttggatttaaaagttagaagtacccctttttctaagcattcttacttatattcattttacattattcctgttacattattattatataattcagatgacttgttctttattcaaag

SEQ ID NO: 680412 - DNA, 120 bp, Artificial Sequence
  ENSG00000186714_48 (sequence is synthesized)
tgcggtatagtattcagtaattcagttaatcttattttattccaagcagtacattattcttttatgttatttggttctatgggcaagacaggaaacaagatagccactagtgtgaaggca

SEQ ID NO: 680413 - DNA, 120 bp, Artificial Sequence
  ENSG00000186714_49 (sequence is synthesized)
cgactttggggagcaataaagttagggtcctaaaagaaataacttgaaaaatactattaagaaaatttcaagtttatgagctcctataggtaagtccttaactactagtaagtttctgtc

SEQ ID NO: 680414 - DNA, 120 bp, Artificial Sequence
  ENSG00000186714_50 (sequence is synthesized)
ttctgtgattcagtaagctgattttcttttagaggtggtgataggttctgagataaattaacataatcacaaatcaaacgatttttccatccctaaaagtacctcccctttgaaaaaatc

SEQ ID NO: 680415 - DNA, 120 bp, Artificial Sequence
  ENSG00000186714_51 (sequence is synthesized)
acgatcattaccaattaaaaggatgcaataaaaacatgtgagagagaaatcttaggacattacattcaccatcattgtgatctggtcattgatacaaatttttcctgctgtgtttagtga

SEQ ID NO: 680416 - DNA, 120 bp, Artificial Sequence
  ENSG00000186714_52 (sequence is synthesized)
ttactacatagatgaccatgttgggtaataattgaatttatcggtgtctgtgttgtaaaactgaatagctaatatagcttaatgaaggaagtaaacttatcaaaccattgtcgtattgtt

SEQ ID NO: 680417 - DNA, 120 bp, Artificial Sequence
  ENSG00000186714_53 (sequence is synthesized)
tttctcttctgtatatcattttcctctaaataaaagatttacaagaaagcctttttctttatgaagttaaagcaatttcaatattgaaagttttgatagattaagaataaccacatactt

SEQ ID NO: 680418 - DNA, 120 bp, Artificial Sequence
  ENSG00000186714_54 (sequence is synthesized)
tctttcccagtagaatatttttaaactgaagacttatctggaagtaacttcataatcataaatattatgtatatatgtacacacatatattagcagcatgactttaggtttttaaagtaa

SEQ ID NO: 680419 - DNA, 120 bp, Artificial Sequence
  ENSG00000186714_55 (sequence is synthesized)
tctatgcctcatatttgcaactgaaaaggtaaggatatcttaagaaagatgccatagatttttgaaaattgagttttataactccattgatttagtttgggttcatattgaagaaattag

SEQ ID NO: 680420 - DNA, 120 bp, Artificial Sequence
  ENSG00000186714_56 (sequence is synthesized)
aagattagttacaaaattgtaaatgagtgtgttaaatttatattttgattgttatcttttcctctaaagtttactcttaacaaactgattgttttaagggaaactaattttatctccaga

SEQ ID NO: 680421 - DNA, 120 bp, Artificial Sequence
  ENSG00000186714_57 (sequence is synthesized)
agttttcaaatcagtctccttaagtaaataggaaaagggagaaatgtgaagctgtgcattttatcagtaaatatatttctaaaaagttgtgtgtaaatatttttacattattcccatttt

SEQ ID NO: 680422 - DNA, 120 bp, Artificial Sequence
  ENSG00000186714_58 (sequence is synthesized)
aaatgcttcaaggctttaaagtaagcttttagactacacacatacatataattatggatatgctatttttccgctaatcttgactttcatagattagatttgtttaaaatgaggtgtaca

SEQ ID NO: 680423 - DNA, 120 bp, Artificial Sequence
  ENSG00000186714_59 (sequence is synthesized)
tgtgtttaggaagcaatgaatgctgacattttttgtagactgtgtttgcatttgatagtaaaactacgtaaaagaaaaaataatttgagtcgattcatgcagatagaaaaaccaaacaat

SEQ ID NO: 680424 - DNA, 120 bp, Artificial Sequence
  ENSG00000186714_60 (sequence is synthesized)
ttgagtcgattcatgcagatagaaaaaccaaacaatatgtacttaactatttcttaatcatctcaataaaatagccttataatacattaaagttttaatagtaaaaatcaatttatttgt

SEQ ID NO: 680425 - DNA, 120 bp, Artificial Sequence
  ENSG00000186714_61 (sequence is synthesized)
taccacttactttttgttgttgcttttcagagaatttaaaccatttgttgatagtcatgaaattagtggcaaactggacaatggacctcttcatctcattttcaaaactaaatcagggta

SEQ ID NO: 680426 - DNA, 120 bp, Artificial Sequence
  ENSG00000186714_62 (sequence is synthesized)
gtaaactacgttcatataggcatatatgggctaatatgctgtaggtgcctatgtgatttagaagtcttaatgttatatatcatggccattgaataggctaatgtgtttgaaaatcagaat

SEQ ID NO: 680427 - DNA, 120 bp, Artificial Sequence
  ENSG00000186714_63 (sequence is synthesized)
tatgtcatgcaaacaaatgcaatgaaactgcattttcattaaattcaatttttgccccaaagaatgttggaagagtgtatcagaaattactctaatgtatataaagctctatgcatgaaa

SEQ ID NO: 680428 - DNA, 80 bp, Artificial Sequence
  ENSG00000186716_0 (sequence is synthesized)
gcagagtgcgggccgggcgggagtgcggcgagagccggctggctgagcttagcgtccgaggaggcggcggcggcggcggc

SEQ ID NO: 680429 - DNA, 120 bp, Artificial Sequence
  ENSG00000186716_1 (sequence is synthesized)
ggaagcgagaggcgaggagcgcgcgggccgtggccagagtctggcggcggcctggcggagcggagagcagcgcccgcgcctcgccgtgcggaggagccccgcacacaatagcggcgcgcg

SEQ ID NO: 680430 - DNA, 80 bp, Artificial Sequence
  ENSG00000186716_2 (sequence is synthesized)
ccgagcgccccgctccgcctcacctgccaccagggagtgggcgggcattgttcgccgccgccgccgccgcgcgggccatg

SEQ ID NO: 680431 - DNA, 120 bp, Artificial Sequence
  ENSG00000186716_3 (sequence is synthesized)
ctgagacgggccccgcgcgcagcccggcggcgcaggtaaggccggccgcgccatggtggacccggtgggcttcgcggaggcgtggaaggcgcagttcccggactcagagcccccgcgcat

SEQ ID NO: 680432 - DNA, 120 bp, Artificial Sequence
  ENSG00000186716_4 (sequence is synthesized)
cgtggaaggcgcagttcccggactcagagcccccgcgcatggagctgcgctcagtgggcgacatcgagcaggagctggagcgctgcaaggcctccattcggcgcctggagcaggaggtga

SEQ ID NO: 680433 - DNA, 120 bp, Artificial Sequence
  ENSG00000186716_5 (sequence is synthesized)
accaggagcgcttccgcatgatctacctgcagacgttgctggccaaggaaaagaagagctatgaccggcagcgatggggcttccggcgcgcggcgcaggcccccgacggcgcctccgagc

SEQ ID NO: 680434 - DNA, 80 bp, Artificial Sequence
  ENSG00000186716_6 (sequence is synthesized)
cggagccgacccgccgcccgccgaggagcccgaggcccggcccgacggcgagggttctccgggtaaggccaggcccggga

SEQ ID NO: 680435 - DNA, 120 bp, Artificial Sequence
  ENSG00000186716_7 (sequence is synthesized)
ccggggcagccgcgtcgggggaacgggacgaccggggaccccccgccagcgtggcggcgctcaggtccaacttcgagcggatccgcaagggccatggccagcccggggcggacgccgaga

SEQ ID NO: 680436 - DNA, 120 bp, Artificial Sequence
  ENSG00000186716_8 (sequence is synthesized)
cggacgccgagaagcccttctacgtgaacgtcgagtttcaccacgagcgcggcctggtgaaggtcaacgacaaagaggtgtcggaccgcatcagctccctgggcagccaggccatgcaga

SEQ ID NO: 680437 - DNA, 120 bp, Artificial Sequence
  ENSG00000186716_9 (sequence is synthesized)
tggagcgcaaaaagtcccagcacggcgcgggctcgagcgtgggggatgcatccaggcccccttaccggggacgctcctcggagagcagctgcggcgtcgacggcgactacgaggacgccg

SEQ ID NO: 680438 - DNA, 120 bp, Artificial Sequence
  ENSG00000186716_10 (sequence is synthesized)
agttgaacccccgcttcctgaaggacaacctgatcgacgccaatggcggtagcaggcccccttggccgcccctggagtaccagccctaccagagcatctacgtcgggggcatgatggaag

SEQ ID NO: 680439 - DNA, 120 bp, Artificial Sequence
  ENSG00000186716_11 (sequence is synthesized)
gggagggcaagggcccgctcctgcgcagccagagcacctctgagcaggagaagcgccttacctggccccgcaggtcctactccccccggagttttgaggattgcggaggcggctataccc

SEQ ID NO: 680440 - DNA, 120 bp, Artificial Sequence
  ENSG00000186716_12 (sequence is synthesized)
cggactgcagctccaatgagaacctcacctccagcgaggaggacttctcctctggccagtccagccgcgtgtccccaagccccaccacctaccgcatgttccgggacaaaagccgctctc

SEQ ID NO: 680441 - DNA, 120 bp, Artificial Sequence
  ENSG00000186716_13 (sequence is synthesized)
cctcgcagaactcgcaacagtccttcgacagcagcagtccccccacgccgcagtgccataagcggcaccggcactgcccggttgtcgtgtccgaggccaccatcgtgggcgtccgcaaga

SEQ ID NO: 680442 - DNA, 120 bp, Artificial Sequence
  ENSG00000186716_14 (sequence is synthesized)
ccgggcagatctggcccaacgatggcgagggcgccttccatggagacgcagatggctcgttcggaacaccacctggatacggctgcgctgcagaccgggcagaggagcagcgccggcacc

SEQ ID NO: 680443 - DNA, 120 bp, Artificial Sequence
  ENSG00000186716_15 (sequence is synthesized)
aagatgggctgccctacattgatgactcgccctcctcatcgccccacctcagcagcaagggcaggggcagccgggatgcgctggtctcgggagccctggagtccactaaagcgagtgagc

SEQ ID NO: 680444 - DNA, 120 bp, Artificial Sequence
  ENSG00000186716_16 (sequence is synthesized)
tggacttggaaaagggcttggagatgagaaaatgggtcctgtcgggaatcctggctagcgaggagacttacctgagccacctggaggcactgctgctgcccatgaagcctttgaaagccg

SEQ ID NO: 680445 - DNA, 120 bp, Artificial Sequence
  ENSG00000186716_17 (sequence is synthesized)
ctgccaccacctctcagccggtgctgacgagtcagcagatcgagaccatcttcttcaaagtgcctgagctctacgagatccacaaggagttctatgatgggctcttcccccgcgtgcagc

SEQ ID NO: 680446 - DNA, 120 bp, Artificial Sequence
  ENSG00000186716_18 (sequence is synthesized)
agtggagccaccagcagcgggtgggcgacctcttccagaagctggccagccagctgggtgtgtaccgggccttcgtggacaactacggagttgccatggaaatggctgagaagtgctgtc

SEQ ID NO: 680447 - DNA, 120 bp, Artificial Sequence
  ENSG00000186716_19 (sequence is synthesized)
aggccaatgctcagtttgcagaaatctccgagaacctgagagccagaagcaacaaagatgccaaggatccaacgaccaagaactctctggaaactctgctctacaagcctgtggaccgtg

SEQ ID NO: 680448 - DNA, 120 bp, Artificial Sequence
  ENSG00000186716_20 (sequence is synthesized)
tgacgaggagcacgctggtcctccatgacttgctgaagcacactcctgccagccaccctgaccaccccttgctgcaggacgccctccgcatctcacagaacttcctgtccagcatcaatg

SEQ ID NO: 680449 - DNA, 120 bp, Artificial Sequence
  ENSG00000186716_21 (sequence is synthesized)
aggagatcacaccccgacggcagtccatgacggtgaagaagggagagcaccggcagctgctgaaggacagcttcatggtggagctggtggagggggcccgcaagctgcgccacgtcttcc

SEQ ID NO: 680450 - DNA, 120 bp, Artificial Sequence
  ENSG00000186716_22 (sequence is synthesized)
tgttcaccgacctgcttctctgcaccaagctcaagaagcagagcggaggcaaaacgcagcagtatgactgcaaatggtacattccgctcacggatctcagcttccagatggtggatgaac

SEQ ID NO: 680451 - DNA, 120 bp, Artificial Sequence
  ENSG00000186716_23 (sequence is synthesized)
tggaggcagtgcccaacatccccctggtgcccgatgaggagctggacgctttgaagatcaagatctcccagatcaagaatgacatccagagagagaagagggcgaacaagggcagcaagg

SEQ ID NO: 680452 - DNA, 120 bp, Artificial Sequence
  ENSG00000186716_24 (sequence is synthesized)
ctacggagaggctgaagaagaagctgtcggagcaggagtcactgctgctgcttatgtctcccagcatggccttcagggtgcacagccgcaacggcaagagttacacgttcctgatctcct

SEQ ID NO: 680453 - DNA, 120 bp, Artificial Sequence
  ENSG00000186716_25 (sequence is synthesized)
ctgactatgagcgtgcagagtggagggagaacatccgggagcagcagaagaagtgtttcagaagcttctccctgacatccgtggagctgcagatgctgaccaactcgtgtgtgaaactcc

SEQ ID NO: 680454 - DNA, 120 bp, Artificial Sequence
  ENSG00000186716_26 (sequence is synthesized)
agactgtccacagcattccgctgaccatcaataaggaagatgatgagtctccggggctctatgggtttctgaatgtcatcgtccactcagccactggatttaagcagagttcaaatctgt

SEQ ID NO: 680455 - DNA, 120 bp, Artificial Sequence
  ENSG00000186716_27 (sequence is synthesized)
actgcaccctggaggtggattcctttgggtattttgtgaataaagcaaagacgcgcgtctacagggacacagctgagccaaactggaacgaggaatttgagatagagctggagggctccc

SEQ ID NO: 680456 - DNA, 120 bp, Artificial Sequence
  ENSG00000186716_28 (sequence is synthesized)
gcgagagcacggacagactcatggggaagggccaggtccagctggacccgcaggccctgcaggacagagactggcagcgcaccgtcatcgccatgaatgggatcgaagtaaagctctcgg

SEQ ID NO: 680457 - DNA, 120 bp, Artificial Sequence
  ENSG00000186716_29 (sequence is synthesized)
tcaagttcaacagcagggagttcagcttgaagaggatgccgtcccgaaaacagacaggggtcttcggagtcaagattgctgtggtcaccaagagagagaggtccaaggtgccctacatcg

SEQ ID NO: 680458 - DNA, 120 bp, Artificial Sequence
  ENSG00000186716_30 (sequence is synthesized)
tgcgccagtgcgtggaggagatcgagcgccgaggcatggaggaggtgggcatctaccgcgtgtccggtgtggccacggacatccaggcactgaaggcagccttcgacgtcaataacaagg

SEQ ID NO: 680459 - DNA, 120 bp, Artificial Sequence
  ENSG00000186716_31 (sequence is synthesized)
acgtgtcggtgatgatgagcgagatggacgtgaacgccatcgcaggcacgctgaagctgtacttccgtgagctgcccgagcccctcttcactgacgagttctaccccaacttcgcagagg

SEQ ID NO: 680460 - DNA, 120 bp, Artificial Sequence
  ENSG00000186716_32 (sequence is synthesized)
gcatcgctctttcagacccggttgcaaaggagagctgcatgctcaacctgctgctgtccctgccggaggccaacctgctcaccttccttttccttctggaccacctgaaaagggtggcag

SEQ ID NO: 680461 - DNA, 120 bp, Artificial Sequence
  ENSG00000186716_33 (sequence is synthesized)
agaaggaggcagtcaataagatgtccctgcacaacctcgccacggtctttggccccacgctgctccggccctccgagaaggagagcaagctccctgccaaccccagccagcctatcacca

SEQ ID NO: 680462 - DNA, 120 bp, Artificial Sequence
  ENSG00000186716_34 (sequence is synthesized)
tgactgacagctggtccttggaggtcatgtcccaggtccaggtgctgctgtacttcctgcagctggaggccatccctgccccggacagcaagagacagagcatcctgttctccaccgaag

SEQ ID NO: 680463 - DNA, 120 bp, Artificial Sequence
  ENSG00000186716_35 (sequence is synthesized)
tctaaaggtcccagtccatctcctggaggcggacagatggcctggaaacctctggctaatcgggccatccgtagagcgggaaccttcctgaggtgtccttgggccacccccaagtgttgg

SEQ ID NO: 680464 - DNA, 120 bp, Artificial Sequence
  ENSG00000186716_36 (sequence is synthesized)
gccatctgccaagagacagcgacccaaagccgaaggacaggtggcctggaaagatcccgcccaggtctgggagccccaggctggcctcagactgtggttttttatgtggccacctgaggg

SEQ ID NO: 680465 - DNA, 120 bp, Artificial Sequence
  ENSG00000186716_37 (sequence is synthesized)
cgccccaagccagttcatctcggagtccaggcctggccctgggagacagggtgaagggagtggtttttatgaacttaacttagagtctaaaagatttctactggatcacttgtcaagatg

SEQ ID NO: 680466 - DNA, 120 bp, Artificial Sequence
  ENSG00000186716_38 (sequence is synthesized)
cgccctctctggggagaagggaacgtgactggattccctcactgttgtatcttgaataaacgctgctgcttcatcctgtgggggccgtggccctgtccctgtgtgggtggggcctcttcc

SEQ ID NO: 680467 - DNA, 120 bp, Artificial Sequence
  ENSG00000186716_39 (sequence is synthesized)
atttccctgacttagaaaccacactccacttctaacagggtttgagaggcttagtcagcactgggtagcgttttgactccattcttggctttctttttctttccagaaggatttttgtgc

SEQ ID NO: 680468 - DNA, 120 bp, Artificial Sequence
  ENSG00000186716_40 (sequence is synthesized)
agaaatgggtcttttgttgccatgttagtcctccttggaaggcagctcagaaggcctgtgaaatgtcaggggacaggacccccagggagggaaccccaggctacgcactttagggttcgt

SEQ ID NO: 680469 - DNA, 120 bp, Artificial Sequence
  ENSG00000186716_41 (sequence is synthesized)
gggttcgttctccagggagagcgacctcgtcccccgatcctgaccgcccttccggcccacgctctcctgtttggcttccacaggcctggacttctctggcttctctgcccacacactccc

SEQ ID NO: 680470 - DNA, 69 bp, Artificial Sequence
  ENSG00000186716_42 (sequence is synthesized)
ttctgtcctctcagctcagtggactcgctcaacttttgtataagtctccacttggtgggatacttgaat

SEQ ID NO: 680471 - DNA, 120 bp, Artificial Sequence
  ENSG00000186716_43 (sequence is synthesized)
aaactttcatcctaaataaccttttgatacttgaatatttgtaagttttatacatagtttctaatttttttccgaacagatccagatacctaataagatgctggaatgtaatccctggac

SEQ ID NO: 680472 - DNA, 62 bp, Artificial Sequence
  ENSG00000186716_44 (sequence is synthesized)
tccagatacctaataagatgctggaatgtaatccctggacaatccgtgtcctggcagcattt

SEQ ID NO: 680473 - DNA, 120 bp, Artificial Sequence
  ENSG00000186716_45 (sequence is synthesized)
caggaccattcgctaccccatctgccgacacctgcgggggagcccaggcattctttgtaaaccctcctgaccacctggctcaaagaaaacagaagcatggagaccgccaagtattttcaa

SEQ ID NO: 680474 - DNA, 120 bp, Artificial Sequence
  ENSG00000186716_46 (sequence is synthesized)
gaaaacagaagcatggagaccgccaagtattttcaagaaataaccccatgaatattccatcacttttttagaaagaggggcttggggcaggcagaggagagaagggagagcaaactgaga

SEQ ID NO: 680475 - DNA, 120 bp, Artificial Sequence
  ENSG00000186716_47 (sequence is synthesized)
gccaagtttccacacggtcctgcaggaggagaggatgcagctgcccagagggaagcaggatcacatttaaggaagtgtgtggggtccctggatgacaccagcacccagtgcggctctgtc

SEQ ID NO: 680476 - DNA, 120 bp, Artificial Sequence
  ENSG00000186716_48 (sequence is synthesized)
tggcacccgctcccaaggtgggaggagtgggtgtcccctgtgtgtcagtgggcagctcctgctgaacccgcagctcactagggagcctgacagtggggccatgcgcctgacactcctctc

SEQ ID NO: 680477 - DNA, 120 bp, Artificial Sequence
  ENSG00000186716_49 (sequence is synthesized)
tgcttgtggacctggcaaggcagggagcagaaaacagccacttgaaggctttctgtctgcgtctgtgtgcagtgtggatttagttgtgcttttttcttgctgggagagcacagccaccat

SEQ ID NO: 680478 - DNA, 86 bp, Artificial Sequence
  ENSG00000186716_50 (sequence is synthesized)
gtgggctcccttgtcctggcttccatctctgtctcagcgaccattcagccctgcgcaggaacacgtgttgcttagaaaagccaaat

SEQ ID NO: 680479 - DNA, 120 bp, Artificial Sequence
  ENSG00000186716_51 (sequence is synthesized)
cagcgaccattcagccctgcgcaggaacacgtgttgcttagaaaagccaaatccagccttgtctctgcctcctctggtctcatgatgtgcatctgttaccttgaaactggaaaccagtct

SEQ ID NO: 680480 - DNA, 68 bp, Artificial Sequence
  ENSG00000186716_52 (sequence is synthesized)
ggaaaccagtctatcaatgtctgtgccaattttttattccctccccaacctccttccccatattttcc

SEQ ID NO: 680481 - DNA, 79 bp, Artificial Sequence
  ENSG00000186716_53 (sequence is synthesized)
acgtcttacccacctcctgcctcaacagcgttctccaggagggggacctggctctccttctgcaatgcaggcgaaggcc

SEQ ID NO: 680482 - DNA, 73 bp, Artificial Sequence
  ENSG00000186716_54 (sequence is synthesized)
caaagccggtgtggggctggggaacgcagcgttctccaggagggggacctggctctccttctgcaatgcaggc

SEQ ID NO: 680483 - DNA, 80 bp, Artificial Sequence
  ENSG00000186716_55 (sequence is synthesized)
ggggggagggtggcggctcgatgggggagccgcctccagggggcccccccgccctgtgcccacggcgcggcccctttaag

SEQ ID NO: 680484 - DNA, 120 bp, Artificial Sequence
  ENSG00000186716_56 (sequence is synthesized)
agagccagtgcctggaggccaacaccctggtcttcagtcactgggagtcacagagaggggcccgataaagagccctcctggcagcatcagtaccagatgctgcttctcagggtggggtcc

SEQ ID NO: 680485 - DNA, 120 bp, Artificial Sequence
  ENSG00000186716_57 (sequence is synthesized)
catggattaaggagaccagattcctccatacagcttgttgagggacttggtgggtgccccttgctcttggggtcttcctactttggctgctatgctcaacccagacccagcctcttcctg

SEQ ID NO: 680486 - DNA, 120 bp, Artificial Sequence
  ENSG00000186716_58 (sequence is synthesized)
gaattctcctttcaacacgcacagagacagaacccggcccggactttgcagccagtagttgtgtgcaatcacctgggacagtgctgcagatggctcgttcggaacaccacctggatacgg

SEQ ID NO: 680487 - DNA, 120 bp, Artificial Sequence
  ENSG00000186716_59 (sequence is synthesized)
agcaagcaagagaagcagcggggattttaggaggtgcttctgcagaaaccagtcgtttacatcatcttcaacaatcctggctcttgctgaagtagactaggggcttccccgaggggcggc

SEQ ID NO: 680488 - DNA, 120 bp, Artificial Sequence
  ENSG00000186716_60 (sequence is synthesized)
tccacctcatgctgagacctctgcatgccttgggggtggaaatatttgatgagactcccaggggtccttgggaccttgggctatgaggaccagaaggattagaggactgtgccccttctc

SEQ ID NO: 680489 - DNA, 120 bp, Artificial Sequence
  ENSG00000186716_61 (sequence is synthesized)
gtttagccccaccagcttcccagagcagcaaggccaagcatgcaagagtcaccatccaccctggccatgatgcagggcctcctttgctggacccgcaggccctgcaggacagagactggc

SEQ ID NO: 680490 - DNA, 120 bp, Artificial Sequence
  ENSG00000186716_62 (sequence is synthesized)
gccacatctttgtccgtgtgccgaggaggggactggtgggctggagtcccagggggagattattccaagtaggggctccagaaagatggctcgttcggaacaccacctggatacggctgc

SEQ ID NO: 680491 - DNA, 120 bp, Artificial Sequence
  ENSG00000186716_63 (sequence is synthesized)
catgaatggggtacgtgtccgtgggactctcctggtgcccacttcccccagaaggatagggtggcctctgttcatttcaaatcagtcagaggtggctgagcctgaggcagcatctgagag

SEQ ID NO: 680492 - DNA, 120 bp, Artificial Sequence
  ENSG00000186716_64 (sequence is synthesized)
ggagcctggttggagaagggagggcccccaagagcagaatcaccatgcacgggaatcgtcattcattggctggaatgcagttgccagccaggccctgagcatccctcctcaaacaaaggt

SEQ ID NO: 680493 - DNA, 120 bp, Artificial Sequence
  ENSG00000186716_65 (sequence is synthesized)
ctcatggcaccaccaggacaggtggggcctccactcagggacctgggggctgcccatagaaatggagacccctgatttgtctttaggtaccccagaaaggtttagaccttaaaagcaatg

SEQ ID NO: 680494 - DNA, 120 bp, Artificial Sequence
  ENSG00000186716_66 (sequence is synthesized)
acacacccaaaaaggcccgggtataaatggtaaaatgttaatatttgagattcttggctttttcttacattattctgtctttcctacttaatttttaattgttactaagaaagagaaagc

SEQ ID NO: 680495 - DNA, 120 bp, Artificial Sequence
  ENSG00000186716_67 (sequence is synthesized)
actctggagtctgaggcaggagaatcactggaacccaagagttcgattacagcctgggcaacattgcaagctcctatatctaaaaaaaagcaagcaagcaagagaagcagcggggatttt

SEQ ID NO: 680496 - DNA, 120 bp, Artificial Sequence
  ENSG00000186716_68 (sequence is synthesized)
aacccgtgtggcagccacccacagcagatccacaacgtgagaggcccgctgaaacaagggtgctggcattggttactcagcctggccctccctgccttgcggggtgacctgcctggtcct

SEQ ID NO: 680497 - DNA, 120 bp, Artificial Sequence
  ENSG00000186716_69 (sequence is synthesized)
ggcctctctttctgaagactgaagtcccacatcaaggtgtccgcagggccaggctgtctctggaggctctaggggaggatccttcctttctgttcccagcatctgatggcccacggcatt

SEQ ID NO: 680498 - DNA, 120 bp, Artificial Sequence
  ENSG00000186716_70 (sequence is synthesized)
gaaggctctagaaaggaatgtctgaggaagcatcggagactgggtcccgccatgcctgtgtcatctcctggcttccccggcccttatggctcgttcggaacaccacctggatacggctgc

SEQ ID NO: 680499 - DNA, 120 bp, Artificial Sequence
  ENSG00000186716_71 (sequence is synthesized)
tgcccagcatccctgggagggccctgtggtagtttcagctccctctgggggcccagaatgaacctggcctgtggtgaggatgtaagcaccaatggccaattgggtccaaaggaagacacc

SEQ ID NO: 680500 - DNA, 120 bp, Artificial Sequence
  ENSG00000186716_72 (sequence is synthesized)
ggttcaaacactgaaaccaatcagattctcccacggccttcctgctatcagacgacactggtgcaggggtggttgctatgtacagggcagagccacccaatccccacgcaggcgctgtgt

SEQ ID NO: 680501 - DNA, 120 bp, Artificial Sequence
  ENSG00000186716_73 (sequence is synthesized)
cctgccacgctggcctcctcctggccatcacatcaggccaagcaggggagaggaatgggaatgcccacgcacccctatcaactctgcagacacagaaccatgcacagctcttgggaggag

SEQ ID NO: 680502 - DNA, 120 bp, Artificial Sequence
  ENSG00000186716_74 (sequence is synthesized)
cagatgcagaccaagatgcagaaaggcacccttctcaggccgcaggtgtccaggcaggtgtcagaggtgcagcccgtgcacaccggggaccctatccatcctgtctagttgggaggacta

SEQ ID NO: 680503 - DNA, 120 bp, Artificial Sequence
  ENSG00000186716_75 (sequence is synthesized)
ggagttccacatgtgggaccctcagttcctgctgccttcagaaccaggcccaacccttgctgtgacctcgagggctgccacttttcagagtgcactgggcctgtctccacccatagacca

SEQ ID NO: 680504 - DNA, 120 bp, Artificial Sequence
  ENSG00000186716_76 (sequence is synthesized)
tactgccacatctgtacctcgggcaccaatctctccccaccacaggggcctgtgcctgagatggtccctctacagaaatacctgctcctggcatggctggcttcttgccaattctggatc

SEQ ID NO: 680505 - DNA, 120 bp, Artificial Sequence
  ENSG00000186716_77 (sequence is synthesized)
tccagctgccaccccagagaggcactggcttccctgtttaaagagggtccccccatcacccatcttcacagcagactgtttgcttggctgtgtgccccttcagacccacacccattacct

SEQ ID NO: 680506 - DNA, 120 bp, Artificial Sequence
  ENSG00000186716_78 (sequence is synthesized)
ccccctctcccccatcctcccaccctcttccaaaggctgaacacacaggagggattgggaaatttgttgaacaaagaagttacacataagccctgatgtgttagcaggacagtgagatga

SEQ ID NO: 680507 - DNA, 120 bp, Artificial Sequence
  ENSG00000186716_79 (sequence is synthesized)
acaaaacgttctggaaagtgggtgtgagggtcagatgtggagggagtgaaatcttcccagggagagaatgtctctgggtcaacctgctcctgctgggctgggagggccgaacacccccca

SEQ ID NO: 680508 - DNA, 120 bp, Artificial Sequence
  ENSG00000186716_80 (sequence is synthesized)
cccttcctgttagcacttttgatgggactagtggactttggttcagaaggaagagctatgcttgttagggcctcttgtctcctcccaggagtggacaaggtgggttaggagcagtttctc

SEQ ID NO: 680509 - DNA, 120 bp, Artificial Sequence
  ENSG00000186716_81 (sequence is synthesized)
cctgagtggctgctgctgggtggttgaggagatgcacggcttctgttcctagtcacaaggctgcagcagacgctcctcagatgctctgtgccttggatctggccccactcccgtcctccc

SEQ ID NO: 680510 - DNA, 120 bp, Artificial Sequence
  ENSG00000186716_82 (sequence is synthesized)
agccctcctctcctccagctacctgccagccggcacttttggtcaagctgttttgcattcactgttgcacatatgctcagtcacacacacagcatacgctatgcacatgtgtccacacac

SEQ ID NO: 680511 - DNA, 120 bp, Artificial Sequence
  ENSG00000186716_83 (sequence is synthesized)
accccacccacatcccacatcaccccgaccccctctgctgtccttggaaccttattacacttcgagtcactggtttgcctgtattgtgaaaccagctggatcctgagatccccaagacag

SEQ ID NO: 680512 - DNA, 120 bp, Artificial Sequence
  ENSG00000186716_84 (sequence is synthesized)
aaatcatgatgagtatgtttttggcccatgacactggcttaccttgtgccaggcagatggcagccacacagtgtccaccggatggttgattttgaagcagagttagcttgtcacctgcct

SEQ ID NO: 680513 - DNA, 120 bp, Artificial Sequence
  ENSG00000186716_85 (sequence is synthesized)
ccctttcccgggacaacagaagctgacctctttgatctcttgcgcagatgatgagtctccggggctctatgggtttctgaatgtcatcgtccactcagccactggatttaagcagagttc

SEQ ID NO: 680514 - DNA, 120 bp, Artificial Sequence
  ENSG00000186716_86 (sequence is synthesized)
aagtaagtactggtttggggaggagggttgcagcggccgagccagggtctccacccaggaaggactcatcgggcagggtgtggggaaacagggaggttgttcagatgaccacgggacacc

SEQ ID NO: 680515 - DNA, 120 bp, Artificial Sequence
  ENSG00000186716_87 (sequence is synthesized)
tttgaccctggccgctgtggagtgtttgtgctggttgatgccttctgggtgtggaattgtttttcccggagtggcctctgccctctcccctagcctgtctcagatcctgggagctggtga

SEQ ID NO: 680516 - DNA, 120 bp, Artificial Sequence
  ENSG00000186716_88 (sequence is synthesized)
gctgccccctgcaggtggatcgagtaattgcaggggtttggcaaggactttgacagacatccccaggggtgcccgggagtgtggggtccaagccaggagggctgtcagcagtgcaccttc

SEQ ID NO: 680517 - DNA, 120 bp, Artificial Sequence
  ENSG00000186716_89 (sequence is synthesized)
accccacagcagagcagatttggctgctctgtcgagctggatggatactactttttttttcctttccctctaagtgggggtctcccccagctactggagctgtcagaacagtgaaggctg

SEQ ID NO: 680518 - DNA, 71 bp, Artificial Sequence
  ENSG00000186716_90 (sequence is synthesized)
tctcccccagctactggagctgtcagaacagtgaaggctggtaacacatgagttgcactgtgtaagtttct

SEQ ID NO: 680519 - DNA, 75 bp, Artificial Sequence
  ENSG00000186716_91 (sequence is synthesized)
gattagccgggctaggcagtgggcacctgtaatcacaactgcttgggaggctgagggaagagaatcgcttgaacc

SEQ ID NO: 680520 - DNA, 120 bp, Artificial Sequence
  ENSG00000186716_92 (sequence is synthesized)
ggagggctcccagaccctgaggatactgtgctatgaaaagtgttacaacaagacgaagatccccaaggaggacggcgagagcacggacagactcatggggaagggccaggtccagacccc

SEQ ID NO: 680521 - DNA, 120 bp, Artificial Sequence
  ENSG00000186716_93 (sequence is synthesized)
tgcccttggggcctgccagggacctctgccctcatggttggatctggacactcccgggatgctgcggcttctctacctgctgcaactgcctcacctcacgggagggtctctctacgcaac

SEQ ID NO: 680522 - DNA, 120 bp, Artificial Sequence
  ENSG00000186716_94 (sequence is synthesized)
gcccctgtagctggctgcagagagccaagcgcctcccacacggtacagcacagaaggctcctggtgtcactgggaaaagcccagattcaaaaaggctgggctccggagtcatgcacatcc

SEQ ID NO: 680523 - DNA, 120 bp, Artificial Sequence
  ENSG00000186716_95 (sequence is synthesized)
tctctcaggtatccctgtgcagaaaacagtgtccacgggggagaaagaggccaggctggtgtcgcagagcgccaatggcatagtcaccaccactcctccgacttacttcctcctgggatc

SEQ ID NO: 680524 - DNA, 120 bp, Artificial Sequence
  ENSG00000186716_96 (sequence is synthesized)
ccacaaacaagccccccagctgggagcctggacctccagggaccagggcagccgccacctacttggcgtgagtcatgaatgcccttcacacagcaatcagattccttcctgtctagccat

SEQ ID NO: 680525 - DNA, 120 bp, Artificial Sequence
  ENSG00000186723_0 (sequence is synthesized)
ggcaaatccaggtatggggaaggctgagaacttttcttcatgcagtaactgacatctccctgtcacatctcaccccaggcacagcctccatgcagagagccaatcactccacagtgaccc

SEQ ID NO: 680526 - DNA, 120 bp, Artificial Sequence
  ENSG00000186723_1 (sequence is synthesized)
aattcatcctcgtcggcttctctgtcttcccccacctccagctgatgctcttcctgctgttcctgctgatgtacctgttcacgctgctgggcaacctgctcatcatggccaccgtctgga

SEQ ID NO: 680527 - DNA, 120 bp, Artificial Sequence
  ENSG00000186723_2 (sequence is synthesized)
gcgagcgcagcctccacacgcccatgtacctcttcctgtgcgccctctccgtctccgagatcctctacaccgtggccatcatcccgcgcatgctggccgacctgctgtccacccagcgct

SEQ ID NO: 680528 - DNA, 120 bp, Artificial Sequence
  ENSG00000186723_3 (sequence is synthesized)
ccatcgccttcctggcctgtgccagtcagatgttcttctccttcagcttcggcttcacccactccttcctgctcaccgtcatgggctacgaccgctacgtggccatctgccaccccctgc

SEQ ID NO: 680529 - DNA, 120 bp, Artificial Sequence
  ENSG00000186723_4 (sequence is synthesized)
ggctgctcctgggctggtggcttggtcatggggatggtggtgacctcggccattttccacctcgccttctgtggacacaaggagatccaccattttgcttgccatgtgccacctctgttg

SEQ ID NO: 680530 - DNA, 120 bp, Artificial Sequence
  ENSG00000186723_5 (sequence is synthesized)
aagttggcctgtggagacgatgtgctggtggtggccaaaggcgtgggcttggtgtgtatcacggccctgctgggctgttttctcctcatcctcctctcctatgccttcatcgtggccgcc

SEQ ID NO: 680531 - DNA, 120 bp, Artificial Sequence
  ENSG00000186723_6 (sequence is synthesized)
atcttgaagatcccttctgctgaaggtcggaacaaggccttctccacctgtgcctctcacctcactgtggtggtcgtgcactatggctttgcctccgtcatttacctgaagcccaaaagt

SEQ ID NO: 680532 - DNA, 120 bp, Artificial Sequence
  ENSG00000186723_7 (sequence is synthesized)
ccccagtctctggaaggagacaccttgatgggcatcacctacacggtcctcacacccttcctcagccccatcatcttcagcctcaggaacaaggagctgaaggtcgccatgaagaagacc

SEQ ID NO: 680533 - DNA, 120 bp, Artificial Sequence
  ENSG00000186723_8 (sequence is synthesized)
ttcttcagtaaactctacccagaaaaaaatgtaatgatgtaggagaaattcactgggaacaactaaattggattaccgaaggctattgttaaaaattacgttccgtggtgactcatgcct

SEQ ID NO: 680534 - DNA, 120 bp, Artificial Sequence
  ENSG00000186723_9 (sequence is synthesized)
tggtgtggctgcttggtgcagcccacacctggtcagctcccacctgtggagaaactccaaactagagcctcctactgggatgaagcagaagcagatgcctggagtcccagaatgactgga

SEQ ID NO: 680535 - DNA, 120 bp, Artificial Sequence
  ENSG00000186723_10 (sequence is synthesized)
ctacccttttagctgcattctgcatcccatcattccagacggtgttacatgcagccctcagctacctcctacagacgtgatcggctcctgtcctctcaaggtttctccctccctcccttc

SEQ ID NO: 680536 - DNA, 120 bp, Artificial Sequence
  ENSG00000186723_11 (sequence is synthesized)
cttcctccctccattcctccctccctcgtttcttcctatctcactctccttctttcctccctcactctccttccttccttcctgcctccctccctccctttcttccttccttcctcactc

SEQ ID NO: 680537 - DNA, 120 bp, Artificial Sequence
  ENSG00000186723_12 (sequence is synthesized)
cctcactctccttctttcctccctcactctccttccttcctgcctccctccctcctttcttccttcctcactctcctcctttcctccctcactctccttccttccttccttcgttccttc

SEQ ID NO: 680538 - DNA, 120 bp, Artificial Sequence
  ENSG00000186723_13 (sequence is synthesized)
ttccctccctccctccttccttcctcctgcagtccccatccttccttccttttatccttctttccttcctccctccctccctctctttcttcctcccttttttctttcttttcctcctcc

SEQ ID NO: 680539 - DNA, 120 bp, Artificial Sequence
  ENSG00000186723_14 (sequence is synthesized)
tcctcctcctccttttctctctctctctctccccccaccttgttcactcactcgctgtcgattcttgtgatctgaattgatatgaacaagagtgtgtagacggtcagtcatggggaagca

SEQ ID NO: 680540 - DNA, 120 bp, Artificial Sequence
  ENSG00000186723_15 (sequence is synthesized)
cagtcatggggaagcagcatctcctagtggcctttgaaacagccaccagcaactgagactcgctctgtcgccagggtggagtccagtggcgccatctcggcttactgcaacctccgcctc

SEQ ID NO: 680541 - DNA, 85 bp, Artificial Sequence
  ENSG00000186723_16 (sequence is synthesized)
caaagaagaaagaaagaaagaaaaaaagaaaattacgttccagccaagcactgtggctcacacttataattccagcaccttggga

SEQ ID NO: 680542 - DNA, 120 bp, Artificial Sequence
  ENSG00000186723_17 (sequence is synthesized)
ggtggtacatgcctgtagtcccagctacctgggagactgaactgggattactgcctaagtccagaagtttgagcttacagtgaactatgactgtgccactgcagtctagcatggatgaca

SEQ ID NO: 680543 - DNA, 120 bp, Artificial Sequence
  ENSG00000186723_18 (sequence is synthesized)
gtgccactgcagtctagcatggatgacagagtgagaccctatcccttcccccctaaaagaaagacaatccatgaacatatagtaacctctatttgtcatgctttaaggtttacaagggac

SEQ ID NO: 680544 - DNA, 120 bp, Artificial Sequence
  ENSG00000186723_19 (sequence is synthesized)
cttgtagacgacatacaattataaacacaaaggttaatcagcatcagggatgtatttggagtggaagtgtgtgtgagatactaacacagagaaaaccaggtttgattatttctatctgct

SEQ ID NO: 680545 - DNA, 120 bp, Artificial Sequence
  ENSG00000186723_20 (sequence is synthesized)
gcaagaaactgtgtcagttagcaccaaacctccatctagactcctcttgccaaaagccagggtcatctaatacccccaataatgcaaaccagcaatgcaaagagagagggaagatttcat

SEQ ID NO: 680546 - DNA, 120 bp, Artificial Sequence
  ENSG00000186723_21 (sequence is synthesized)
gccccactctctatgagtgccgcaccaggtagctacaactcagattttgtaaggctactccagattatagcagaggagagaaaagtaccctaaatttcagcattgcacagatctatgcaa

SEQ ID NO: 680547 - DNA, 120 bp, Artificial Sequence
  ENSG00000186723_22 (sequence is synthesized)
tagaagttagaaatagcaataaacagactctctttaaacatcaaggaaaccttagaatttcaagtgtgagtcttgaatagttgtggagagactgagatgtcttcatggttggatcaagga

SEQ ID NO: 680548 - DNA, 120 bp, Artificial Sequence
  ENSG00000186723_23 (sequence is synthesized)
aaaaagtcacactgtgagataccgaatgctgtgttagaagttgacacggctcatgggccagccaggagctctctgttgaatctggacattgagtgtagaccccaggatgagtttatctca

SEQ ID NO: 680549 - DNA, 84 bp, Artificial Sequence
  ENSG00000186723_24 (sequence is synthesized)
cctcatggtctcttcccaatgggcagggatttaagattgaccctactgtatagtatttatatatttattgacaataggtcttcc

SEQ ID NO: 680550 - DNA, 120 bp, Artificial Sequence
  ENSG00000186723_25 (sequence is synthesized)
actgtatagtatttatatatttattgacaataggtcttcctgtgtttgagctatgcatcatttttttctaaagtgtgaattctccatcattcaagcagtcaaaacaacccacagtcaaaa

SEQ ID NO: 680551 - DNA, 120 bp, Artificial Sequence
  ENSG00000186732_0 (sequence is synthesized)
agcaaggcagggcctctttacactgggtgtcgcgccgtctgagttcctgacttgtttacccatcccgttggggctccggccgctgcaggctacctgctgtgcccgggattggggacctgt

SEQ ID NO: 680552 - DNA, 120 bp, Artificial Sequence
  ENSG00000186732_1 (sequence is synthesized)
gactcccgagtggaagagatggtggcccaggaggaggaccccgacctattcagactgggagctggggtcagagtgtctccgtctccggagggggaccttccagaccccgggcgggagggg

SEQ ID NO: 680553 - DNA, 120 bp, Artificial Sequence
  ENSG00000186732_2 (sequence is synthesized)
cggccccaggagggggtccgggcctcgggcgaaggctgcggcgccccggaaggagccgcgcacgcccctgcacgcggtgcccgctgcggaggccacggatccggagtctgtttccaggtc

SEQ ID NO: 680554 - DNA, 120 bp, Artificial Sequence
  ENSG00000186732_3 (sequence is synthesized)
ccggagtctgtttccaggtctggcggggggccgggctgcggtggcggcagcggtgggagatgccggggcggccggcggaggtccatgtggcgctctaggtgggatgccagcgtcctgaag

SEQ ID NO: 680555 - DNA, 120 bp, Artificial Sequence
  ENSG00000186732_4 (sequence is synthesized)
gcggaggccctggccctcctcccctgcggcctgggcatggcattctcccagtcccacgtgatggccgctcggcggcaccagcacagccggctcatcatcgaggtggacgagtacagctcc

SEQ ID NO: 680556 - DNA, 120 bp, Artificial Sequence
  ENSG00000186732_5 (sequence is synthesized)
aaccccacccaggccttcaccttctacaacatcaaccagggccgcttccagccaccgcatgtgcagatggtggacccggtgcctcacgatgcccccaaacctccaggctacacccgcttc

SEQ ID NO: 680557 - DNA, 120 bp, Artificial Sequence
  ENSG00000186732_6 (sequence is synthesized)
gtctgcgtctctgatacccactcgaggacggaccccatccagatgccgtacggcgacgtgctgatccacgctggggacttcactgagctggggctcccgagcgaggtgaagaagttcaac

SEQ ID NO: 680558 - DNA, 120 bp, Artificial Sequence
  ENSG00000186732_7 (sequence is synthesized)
gagtggctgggcagcctgccctacgagtacaagatcgtgatcgcaggcaaccacgagctgacctttgaccaggagttcatggccgacctcatcaagcaggacttttactacttcccatct

SEQ ID NO: 680559 - DNA, 120 bp, Artificial Sequence
  ENSG00000186732_8 (sequence is synthesized)
gtgtcgaagctgaagccggagaactatgagaatgtgcagtcgctgctgaccaactgcatctaccttcaggactcggaggtcaccgtgcggggcttccggatctatggctccccatggcag

SEQ ID NO: 680560 - DNA, 120 bp, Artificial Sequence
  ENSG00000186732_9 (sequence is synthesized)
ccctggttctacggctggggcttcaacctcccgcgaggccaagccctgctggagaaatggaacctcattcccgaaggcgtagacatcctgataacccatggaccaccactgggcttcctg

SEQ ID NO: 680561 - DNA, 120 bp, Artificial Sequence
  ENSG00000186732_10 (sequence is synthesized)
gactgggtccccaagaagatgcagcgggtgggctgtgtggagctgctcaacacggtgcagaggcgcgtccagccgcggttacatgtctttggccacatccacgaagggtatggtgtcatg

SEQ ID NO: 680562 - DNA, 120 bp, Artificial Sequence
  ENSG00000186732_11 (sequence is synthesized)
gcagatgggacgaccacctatgtgaatgcgtccgtatgcactgtgaactaccagcccgtgaacccgcccatagtcatcgacctccccacaccccggaactcctgactgctccccactgcc

SEQ ID NO: 680563 - DNA, 120 bp, Artificial Sequence
  ENSG00000186732_12 (sequence is synthesized)
cctgccctgcccgcccgtgtcagctccacaggcctggcccggccactgttccttccatgctgagttgcctggacgacccatctggctgcggggactggcctagcaggcaggtcagggcct

SEQ ID NO: 680564 - DNA, 120 bp, Artificial Sequence
  ENSG00000186732_13 (sequence is synthesized)
tggaacgactctttagccttctgtcacctggagttgggaccctgcgcatccccatcaggggttctgtgctcatttactttttctgcgtgtacatcctgcgtgtacctcgttaaaggacct

SEQ ID NO: 680565 - DNA, 120 bp, Artificial Sequence
  ENSG00000186732_14 (sequence is synthesized)
actaagctcatggccctgtcatgtttgggaaatgactaaatcttcattcttctcccttggacgccctcctggtttgggaagctgctgctcttgaatgggttttggaagttacacaaaatc

SEQ ID NO: 680566 - DNA, 120 bp, Artificial Sequence
  ENSG00000186732_15 (sequence is synthesized)
attcgtgagctgcacacagacagtccctttctctcctcccaagtgagggaggagacaggcccaaggcggaggccctccgagggagcatttagggacatctcaggaattcagaccgcacct

SEQ ID NO: 680567 - DNA, 120 bp, Artificial Sequence
  ENSG00000186732_16 (sequence is synthesized)
ggccaggcccacagctgtttgcctggcattgttcccccctttttcttcccataggcatttttgtttacttgaacaatgacctgagtgtcctaggcattcactcggagcctggatgatggg

SEQ ID NO: 680568 - DNA, 120 bp, Artificial Sequence
  ENSG00000186732_17 (sequence is synthesized)
ggctggttctacagaatgagccactggcattcgtgcccaggaccagtgagagcgttcccagtcatggggggatgacccttggtcccacggggaacacactgctctgtagaatgcggtagc

SEQ ID NO: 680569 - DNA, 120 bp, Artificial Sequence
  ENSG00000186732_18 (sequence is synthesized)
ctggatggagggtctgcaggcttaggctgcagcaggcctgccatgggtgtgaacccatgtccaggcacgcaccgacacacatgcacgcacgcacccctcttaattgaaccaagtgggtcc

SEQ ID NO: 680570 - DNA, 120 bp, Artificial Sequence
  ENSG00000186732_19 (sequence is synthesized)
tgtgtttctcttttctgccccgtagtgaggttctgttccttggtgcggcttcccttgcaccgttaggattctgtctggcatgcctgcagccgaggaagcccaggaccagccggccctgtg

SEQ ID NO: 680571 - DNA, 120 bp, Artificial Sequence
  ENSG00000186732_20 (sequence is synthesized)
aattggagggtggcacagggaccgagcgggccccaggctccagcagccccaccttggacagcttctttttcttctttgaattaggactggagggggtggggccagggcggtggtgggaac

SEQ ID NO: 680572 - DNA, 120 bp, Artificial Sequence
  ENSG00000186732_21 (sequence is synthesized)
cggtagggcctagatgaggggcaggcagtcaggcagaaatgggcaagttcagggtcagattctgtcgttatttaatattttgttcatcatggactttttctgcatttattttgattttta

SEQ ID NO: 680573 - DNA, 120 bp, Artificial Sequence
  ENSG00000186732_22 (sequence is synthesized)
acgttgcattaaagtagtattatttgtcctgattggtgactttttttgcacccctttccgttgtacatctgagagaagggtgtcactccctcacccaggtcccagccctgggaaccagcc

SEQ ID NO: 680574 - DNA, 120 bp, Artificial Sequence
  ENSG00000186732_23 (sequence is synthesized)
taccgtgagcccttttgcagatatagactcatttcatcctcagatggtccttcaaggtaggtactttagtcccattttagagatgagacgattgaggccagaggggtgtggtaacttgcc

SEQ ID NO: 680575 - DNA, 120 bp, Artificial Sequence
  ENSG00000186732_24 (sequence is synthesized)
tgggggctcacagcacaaaaggagccgaggcaggatctgacccttgttctctggcctcactgccctcactttgccatgacccgaagttatgtccctacaaagcaatgcatggtccaaggc

SEQ ID NO: 680576 - DNA, 120 bp, Artificial Sequence
  ENSG00000186732_25 (sequence is synthesized)
tctttttattgtatttttatttttaagggtcctgttcaaaactggtgtgagctctgaggagtcctgaaccctgggtgcagcatcctagcatcctgggagtccttttctgcccacactgag

SEQ ID NO: 680577 - DNA, 120 bp, Artificial Sequence
  ENSG00000186732_26 (sequence is synthesized)
ctgggctcctcgaggggtggggctgctgtccctggaagcctggcagcagcactgtatcgggttggctgaagctgagcgccgtggggtgcagggctccaggaatcccgtttggctgaaggg

SEQ ID NO: 680578 - DNA, 120 bp, Artificial Sequence
  ENSG00000186732_27 (sequence is synthesized)
gttcctgtagccagggatgtttatgaggtctctctgatgccccaggcgcaggacatgtgtgcgggtggagaaaagcaggccctttcagtgccagctccactcaatttctatgtggaccaa

SEQ ID NO: 680579 - DNA, 120 bp, Artificial Sequence
  ENSG00000186732_28 (sequence is synthesized)
gaacgataaacttaaaaaaatttttttcctaaggtatcttcagaatatggtgtatttttatgtggaaaagaaaagttatgaaggcagctgttactttaagagaaaattcattaaaagtcc

SEQ ID NO: 680580 - DNA, 120 bp, Artificial Sequence
  ENSG00000186732_29 (sequence is synthesized)
tcgaggtatgaagatgacggcgtgcttctcaatcattttggcataacttgattgtggctgtaatttttttttttttttttgtcaagcatgtcagacaataaagtctttgtaaaaagagaa

SEQ ID NO: 680581 - DNA, 80 bp, Artificial Sequence
  ENSG00000186732_30 (sequence is synthesized)
ccctgcgcgcctccctcccgggagcccctgcctccctcggtgcgcgctgctgctcgcagccgccgcggccgccgaagagg

SEQ ID NO: 680582 - DNA, 120 bp, Artificial Sequence
  ENSG00000186732_31 (sequence is synthesized)
attatttatgtgatcgctgatctgctagatggatatagaaagcaccaagaattataataatttatggagtagagcactggtttacaaacatatttctctgcccgagctttgtgtgtttct

SEQ ID NO: 680583 - DNA, 120 bp, Artificial Sequence
  ENSG00000186732_32 (sequence is synthesized)
ttgcgtctcggggctcgttctgtgcaatgggaatggagaatattcagaatttgaagacaagcccggcgagccgactgcattcatagctaaaattaaaggaataagtgagcagctatttgt

SEQ ID NO: 680584 - DNA, 120 bp, Artificial Sequence
  ENSG00000186732_33 (sequence is synthesized)
aaattgtatttgaatcctgagcaaccacagccctctagcctcttcccctccctagccatatctgaacagcttcccatttcaactccatagatacgtgactctccaagtgctttattttga

SEQ ID NO: 680585 - DNA, 120 bp, Artificial Sequence
  ENSG00000186732_34 (sequence is synthesized)
gctgagccaagccggctttttctctgcatcgccctgagccaccggcctgaagacaggcagctgcacttttggctgtcccatcagagaggctggggctattcagtcgctcctactctcagt

SEQ ID NO: 680586 - DNA, 120 bp, Artificial Sequence
  ENSG00000186732_35 (sequence is synthesized)
taaaggccccaagaggagacggagccaaggtgcgtctaggatcctggtgaaagctttccaaggtggggttcctcagaacgccgcagcggggatggctgttgggggagatgtttctctgga

SEQ ID NO: 680587 - DNA, 120 bp, Artificial Sequence
  ENSG00000186732_36 (sequence is synthesized)
agcttctcatgcttaataagacagtcgtttctgtgtgctcattgactgtcatccgagttttggacccaggacagcaccatattatgctagccccccagtgattgttaaagagctgccgat

SEQ ID NO: 680588 - DNA, 120 bp, Artificial Sequence
  ENSG00000186732_37 (sequence is synthesized)
gaatggaagagaaacacaggtgtgttctggggatggctgccttaccggcctggcactggctttgatcagagtgaccttttccttccaaacgagagcactttcgagagccggagaggatgc

SEQ ID NO: 680589 - DNA, 120 bp, Artificial Sequence
  ENSG00000186732_38 (sequence is synthesized)
cagatgtgaactggggctgtcctgggcctgcgctgagtttgagaggcctgtgttggctggaagtgatgcttcaagtcacacggtgaagcaaaatctatctttggtctgcagggcagcagc

SEQ ID NO: 680590 - DNA, 120 bp, Artificial Sequence
  ENSG00000186732_39 (sequence is synthesized)
tcctctggtagtgcaatcctccaagatcttcctcacacatcttcggacagagaggggccaccagaatgatccaagcatctcttttgcaaacattcatctgctgctgagatgctctgtgtg

SEQ ID NO: 680591 - DNA, 120 bp, Artificial Sequence
  ENSG00000186732_40 (sequence is synthesized)
agccaaggcctctctctctctccttcctgggccttcagcacacactggctggcctcgctgtttggtgggggccttcttaggggcccacagaccccctccactgcaactcctcaaaataga

SEQ ID NO: 680592 - DNA, 120 bp, Artificial Sequence
  ENSG00000186732_41 (sequence is synthesized)
gttctgaggaggtctgttttctgcctggctggttcgccgggtctgagcccttggagggctagtttcgtgtctgggtcctgtggctcccagaacaggatctggcccagagcaggagcagca

SEQ ID NO: 680593 - DNA, 120 bp, Artificial Sequence
  ENSG00000186732_42 (sequence is synthesized)
gtgggtgcgttggggctgaccagtgccctgcagtgtccagatgggggtggtggtgaagaatttgcctagaaaaacgtgtcaagggtgggttgtagtggacgtgtccagccacaactccct

SEQ ID NO: 680594 - DNA, 120 bp, Artificial Sequence
  ENSG00000186732_43 (sequence is synthesized)
gggaagtcaaagcctcagagtcttactcggtggggcgagaaggaaggggccaggcaccatgggctttcaggcaggagaggaggggttgcttgaaaatcccttctgcattcttgaaatttc

SEQ ID NO: 680595 - DNA, 120 bp, Artificial Sequence
  ENSG00000186732_44 (sequence is synthesized)
cctggggagcttctgagttcatcagaactttctaactagaggggaagagacatggagtgagcacctcctgtgtgctaggccctggcaggggcttttgaatctcctgtgtccttcagtgct

SEQ ID NO: 680596 - DNA, 120 bp, Artificial Sequence
  ENSG00000186732_45 (sequence is synthesized)
ccagcagcccaggaaggaaggattgagaatccacatgtttgtaggtgaaaaactaagattaaggggggcaaagctgcttttgagtcctgctgtcagactcaaaggcctgtgtagtttctc

SEQ ID NO: 680597 - DNA, 120 bp, Artificial Sequence
  ENSG00000186765_0 (sequence is synthesized)
cagggggttcgtgacgccggctgggtctgggggctgtgggccagccgagccgacccgggcttctgggggaccgcgggggccgtgagcactcagagggcgcatcccaggcccctccgggga

SEQ ID NO: 680598 - DNA, 120 bp, Artificial Sequence
  ENSG00000186765_1 (sequence is synthesized)
cccggccagcctgaagatgccgacgaacggcctgcaccaggtgctgaagatccagtttggcctcgtcaacgacactgaccgctacctgacagctgagagcttcggcttcaaggtcaatgc

SEQ ID NO: 680599 - DNA, 120 bp, Artificial Sequence
  ENSG00000186765_2 (sequence is synthesized)
ctcggcacccagcctcaagaggaagcagacctgggtgctggaacccgacccaggacaaggcacggctgtgctgctccgcagcagccacctgggccgctacctgtcggcagaagaggacgg

SEQ ID NO: 680600 - DNA, 120 bp, Artificial Sequence
  ENSG00000186765_3 (sequence is synthesized)
gcgcgtggcctgtgaggcagagcagccgggccgtgactgccgcttcctggtcctgccgcagccagatgggcgctgggtgctgcggtccgagccgcacggccgcttcttcggaggcaccga

SEQ ID NO: 680601 - DNA, 120 bp, Artificial Sequence
  ENSG00000186765_4 (sequence is synthesized)
ggaccagctgtcctgcttcgccacagccgtttccccggccgagctgtggaccgtgcacctggccatccacccgcaggcccacctgctgagcgtgagccggcggcgctacgtgcacctgtg

SEQ ID NO: 680602 - DNA, 120 bp, Artificial Sequence
  ENSG00000186765_5 (sequence is synthesized)
cccgcgggaggacgagatggccgcagacggagacaagccctggggcgtggacgccctcctcaccctcatcttccggagccgacggtactgcctcaagtcctgtgacagccgctacctgcg

SEQ ID NO: 680603 - DNA, 120 bp, Artificial Sequence
  ENSG00000186765_6 (sequence is synthesized)
acccgtggggcccgcaggcaccctcaaggccggccgaaacacgcgacctggcaaggatgagctctttgatctggaggagagtcacccacaggtggtgctggtggctgccaaccaccgcta

SEQ ID NO: 680604 - DNA, 120 bp, Artificial Sequence
  ENSG00000186765_7 (sequence is synthesized)
cgtctctgtgcggcaaggggtcaacgtctcagccaatcaggatgatgaactagaccacgagaccttcctgatgcaaattgaccaggagacaaagaagtgcaccttctattccagcactgg

SEQ ID NO: 680605 - DNA, 120 bp, Artificial Sequence
  ENSG00000186765_8 (sequence is synthesized)
gggctactggaccctggtcacccatgggggcattcacgccacagccacacaagtttctgccaacaccatgtttgagatggagtggcgtggccggcgggtagcactcaaagccagcaacgg

SEQ ID NO: 680606 - DNA, 120 bp, Artificial Sequence
  ENSG00000186765_9 (sequence is synthesized)
gcgctacgtgtgcatgaagaagaatgggcagctggcggctatcagcgattttgtcggcaaggacgaagagttcaccctcaagctcatcaaccggcccatcctggtgctgcgcggcctgga

SEQ ID NO: 680607 - DNA, 120 bp, Artificial Sequence
  ENSG00000186765_10 (sequence is synthesized)
cggcttcgtctgccaccaccgcggctccaaccagctggacaccaaccgctccgtctacgacgtcttccacctgagcttcagcgacggcgcctaccggatccgaggccgcgacggagggtt

SEQ ID NO: 680608 - DNA, 120 bp, Artificial Sequence
  ENSG00000186765_11 (sequence is synthesized)
ctggtacacgggcagccacggcagcgtgtgcagcgacggcgaacgcgccgaggacttcgtcttcgagttccgtgagcgcggccgcctggccatccgcgcccggagcggcaagtacctgcg

SEQ ID NO: 680609 - DNA, 120 bp, Artificial Sequence
  ENSG00000186765_12 (sequence is synthesized)
cggcggcgcctcgggcctgctgcgggccgatgccgacgccccggccgggaccgcgctttgggagtactgaggccgcgcccagaccagcctgtcgcgcattaaaaccgtgtctctcccgca

SEQ ID NO: 680610 - DNA, 120 bp, Artificial Sequence
  ENSG00000186765_13 (sequence is synthesized)
aatgggcagctggcggctatcagcgattttgtcgggcccccaccccgcccggcctggacagggaaggtggcgggaggggcagcgcagcagacgctctccccgccaggcaaggacgaagag

SEQ ID NO: 680611 - DNA, 120 bp, Artificial Sequence
  ENSG00000186765_14 (sequence is synthesized)
cggtgagcactctgcctgccaggtactggggcaggggctgtctccacccagggaaaggacctgcccagacaccccatctccaccaagagctggaccctccccagcccacggaacgggtgc

SEQ ID NO: 680612 - DNA, 120 bp, Artificial Sequence
  ENSG00000186765_15 (sequence is synthesized)
tgtcatggagtcatacttgctagtcaagataactcgtcttggcaagggaaacaggtctgaatgtccttatctccgctgctgggaaccccctaggcgccttgccaaggccgcacatgaggc

SEQ ID NO: 680613 - DNA, 120 bp, Artificial Sequence
  ENSG00000186766_0 (sequence is synthesized)
gcacccgggcgctgctggcggccaagctggatgggtcgccagtgagtttcggtgcggcaccgctggcccaggcccgggcgcggctggacatggccacctactgcgacgacctgggcccct

SEQ ID NO: 680614 - DNA, 120 bp, Artificial Sequence
  ENSG00000186766_1 (sequence is synthesized)
ccggccaggcccaggccaccgcgcaccccccgggctatgagccaggggatctgggcgcggtgggcgggggccccctcctgtgggtgaacgcgccagcgctcagccccaagtcctacgctt

SEQ ID NO: 680615 - DNA, 120 bp, Artificial Sequence
  ENSG00000186766_2 (sequence is synthesized)
ccctcctgtgggtgaacgcgccagcgctcagccccaagtcctacgcttcgggtcccgggcctgcgccgccctacgcggccccgagctacggggctcccggcccgctcctcggcgccccgg

SEQ ID NO: 680616 - DNA, 120 bp, Artificial Sequence
  ENSG00000186766_3 (sequence is synthesized)
tctccggccagcaggagctgctgaggctggtgcggccgccctactcctactcggcgctcatcgccatggccatccagagcgcgccgctgcggaagctgacgctcagccagatctaccagt

SEQ ID NO: 680617 - DNA, 120 bp, Artificial Sequence
  ENSG00000186766_4 (sequence is synthesized)
acgtggctggtaacttccctttctacaagcgcagcaaggcgggctggcagaactccatccgccacaacctgtcgctcaacgactgcttcaagaaggtgccccgcgacgaggacgacccag

SEQ ID NO: 680618 - DNA, 120 bp, Artificial Sequence
  ENSG00000186766_5 (sequence is synthesized)
gtaaaggcaattactggaccctggaccccaactgcgagaagatgtttgacaacgggaacttccgaaggaagaggaagaggagagctgaagccagcgcggccgtgcgctcgggagccagga

SEQ ID NO: 680619 - DNA, 120 bp, Artificial Sequence
  ENSG00000186766_6 (sequence is synthesized)
gcgtgggaggggccgaggcgccagcgctggagcccccgagcgcggcttgcctggacctgcaggcctcgccctctccatccgcacccgaggccgccacctgcttctccggtttcgcttctg

SEQ ID NO: 680620 - DNA, 120 bp, Artificial Sequence
  ENSG00000186766_7 (sequence is synthesized)
ctatgagcgctctggctggcggccttggcaccttccccgggggcctggcgggcgacttttctttcgggaggcggccaccgacagtcgccacccacgctccccagacccttaacccctccc

SEQ ID NO: 680621 - DNA, 120 bp, Artificial Sequence
  ENSG00000186766_8 (sequence is synthesized)
ctggcttcgcccctggccaccagaccgcggccgccggcttccgcctcagtcacctcctctacagccgggaagggaccgaagtttgaagggaggctggaggctagccgggtgcgggtccag

SEQ ID NO: 680622 - DNA, 120 bp, Artificial Sequence
  ENSG00000186766_9 (sequence is synthesized)
aggtgctgagctcaggcctccggtttcccctggtgacagccccacgtgttggcgttgaaggccttggtgccctgggaggaagcgcagagccgggggcggctcggccagcagggagctggg

SEQ ID NO: 680623 - DNA, 120 bp, Artificial Sequence
  ENSG00000186766_10 (sequence is synthesized)
ctgagcggctcttgggctttggggtgggtggcccttctgctgtgcacccctcacccaggcgaccttcggaacctccctgctctgcctctaagtccagccgccctgggcgtctagaacctg

SEQ ID NO: 680624 - DNA, 120 bp, Artificial Sequence
  ENSG00000186766_11 (sequence is synthesized)
tgctctcgagggatttgccttgaaggggcggcgggtcggccctcagctccagcgttttccaaggaggctggctgactccaaagagccttagagcagatgggaagaaggtgggctgccaga

SEQ ID NO: 680625 - DNA, 120 bp, Artificial Sequence
  ENSG00000186766_12 (sequence is synthesized)
gcggcccaggtggtgggggccctttccacctccacccagcttggcccacctggctcagggccttcccttctgcttcagggaagctgccgcaggggctgggggacagagctcaggagcagc

SEQ ID NO: 680626 - DNA, 120 bp, Artificial Sequence
  ENSG00000186766_13 (sequence is synthesized)
gagcctgcagtgaggggatctgagacagttggcattgggtcctgtgtaaggaaggtcttgctaatggttggaactgctggtggtgggagggagaagcactgcgtgggcagaaagcgccct

SEQ ID NO: 680627 - DNA, 120 bp, Artificial Sequence
  ENSG00000186766_14 (sequence is synthesized)
tgggataccagctcccttccctgtcactcagccctggtccttgatgacccccctctaggacaaggcaactccccagggccccgccaccactgaccacaggagcggtgcccagcacccagg

SEQ ID NO: 680628 - DNA, 120 bp, Artificial Sequence
  ENSG00000186766_15 (sequence is synthesized)
agttccccaagggtccaggtttgtgccacccacacccacactcacacccacactcacacccacactcacacccacacccacacccacacccacactcacactcacactcacacccacact

SEQ ID NO: 680629 - DNA, 120 bp, Artificial Sequence
  ENSG00000186766_16 (sequence is synthesized)
cacacccacactcacacccacacccacacccacactcacacacactcacacccacacccacactcacacccacacacactcacacccacacacacccacactcatactcacactcacacc

SEQ ID NO: 680630 - DNA, 120 bp, Artificial Sequence
  ENSG00000186766_17 (sequence is synthesized)
cacactcacaccacacccacactcacactgacacccacactcacacccacactcacactgacacccacactcacacccacactcatactcacactcacacccacactcacactcacaccc

SEQ ID NO: 680631 - DNA, 120 bp, Artificial Sequence
  ENSG00000186766_18 (sequence is synthesized)
acactcacaccacactcacacccacacacacccacactcatactcacacccacacccacactcatactcacacacccacacccacacccacacccacacccacacccacacccacactca

SEQ ID NO: 680632 - DNA, 120 bp, Artificial Sequence
  ENSG00000186766_19 (sequence is synthesized)
cacaggctcatggaaggccacacttgttttggtctctttcccctccaaacccacagtttgagccaaagctgtgcgtgtgttcagagctcctgaacagcagcctcctgtgtaaattgaacc

SEQ ID NO: 680633 - DNA, 120 bp, Artificial Sequence
  ENSG00000186766_20 (sequence is synthesized)
ctgccccacccagttccttcttagggatggtatctttgtgaaggacaaggagcccccagtcactgggaagaggaattttttggcctctgtactccttagaggacctaagtgccccagtca

SEQ ID NO: 680634 - DNA, 120 bp, Artificial Sequence
  ENSG00000186766_21 (sequence is synthesized)
gatgccctgagtctttgtggcatctgggactccctggagatggagacgttggtggggggggggtacccaccttgttgttgatgggggtacctatcttccctgcattttgggggagggtgg

SEQ ID NO: 680635 - DNA, 120 bp, Artificial Sequence
  ENSG00000186766_22 (sequence is synthesized)
gaggggtccttcccaggaagagagtggagacaggttactgttactttggagtgggacaggctggtttagcaatcctaagccccagccacgcaggtattcctgatctgcctgcagggcccc

SEQ ID NO: 680636 - DNA, 120 bp, Artificial Sequence
  ENSG00000186766_23 (sequence is synthesized)
tcactgcagctgccaccagtgctggaaatgagagcagggctcctgactgtccctagagctgactcatcatggccctgctgaagagtgaggtgtgtgtgtgtgtgtgcgtgtgtgcgtaag

SEQ ID NO: 680637 - DNA, 120 bp, Artificial Sequence
  ENSG00000186766_24 (sequence is synthesized)
acagagagggagggagaaggaaggaggcgggggaacatggagagaaggagccaggagttgggataaacctggccctggtcatatgtttcatcagcagtggctcctaactccacgtgccat

SEQ ID NO: 680638 - DNA, 120 bp, Artificial Sequence
  ENSG00000186766_25 (sequence is synthesized)
ctctgctgctgccctccacaagcaggtgagcagagtgccagttgtgttgaaggtgatgatgtcgcctaactaaactcacaaccaacccgcaatctctcttggggggacactccccataag

SEQ ID NO: 680639 - DNA, 120 bp, Artificial Sequence
  ENSG00000186766_26 (sequence is synthesized)
caatacaattaaagaagaccaggaaaggaaaataaattccttagcttatacatttaaaaagtatcccttgaacctattttaatagaatgaaatgctaaaaataaagaccaatataacata

SEQ ID NO: 680640 - DNA, 120 bp, Artificial Sequence
  ENSG00000186767_0 (sequence is synthesized)
agagtgaagccaagccagctagcgctgcgaagcccaggccgcgcggactccccagagacttgccgccgcctgcgcctttgccgctgcagccatccctcttactccttgcctttcgtcccc

SEQ ID NO: 680641 - DNA, 120 bp, Artificial Sequence
  ENSG00000186767_1 (sequence is synthesized)
gtcgtctcctctgccgccgtgccgcagccgcaccagcatcgacaacagctaagtggccgattcggggacttggggtcggggttggggcggacgcaaggcacgaacagcactcgcgagccc

SEQ ID NO: 680642 - DNA, 120 bp, Artificial Sequence
  ENSG00000186767_2 (sequence is synthesized)
gccatctctacgtcagccgccactgctgcagtaacccttctagggcgagagaggaaagcactgtggagaggcacacgctgtcccagtgctcacggttagagttcgagcgtttctgccaaa

SEQ ID NO: 680643 - DNA, 120 bp, Artificial Sequence
  ENSG00000186767_3 (sequence is synthesized)
accttggtgagagccttgcacttggagaagggagcacagaccaggtctttgagatcgcaaaaaatatatatatcatattgcatagtgttgactttttgtcagtttaatcgaccagggcag

SEQ ID NO: 680644 - DNA, 120 bp, Artificial Sequence
  ENSG00000186767_4 (sequence is synthesized)
cagctttccccaagccctcttaatccctgagctatgtctcctccaaccgtgcctccgatgggggtagatggcgtgtccgcatacctgatgaagaaaaggcacacccacaggaagcaacgg

SEQ ID NO: 680645 - DNA, 120 bp, Artificial Sequence
  ENSG00000186767_5 (sequence is synthesized)
cgcaagcccactttcctcactcgtaggaacatcgtgggctgccgcattcaacacggctggaaggaaggcaacgagccagtggagcagtggaagggtactgtgctcgagcaggtttccgtg

SEQ ID NO: 680646 - DNA, 120 bp, Artificial Sequence
  ENSG00000186767_6 (sequence is synthesized)
aagcccactctttacatcattaaatatgatggcaaagatagtgtgtatggactagaactgcaccgcgataagagagttttagcgctagagatccttcctgagagagtgccaactcctcgt

SEQ ID NO: 680647 - DNA, 120 bp, Artificial Sequence
  ENSG00000186767_7 (sequence is synthesized)
atcgattcacgactggcagattccctgattggcaaggcagtggagcatgtgtttgaaggtgaacatggtaccaaggatgaatggaagggtatggtcctggcgcgagctcctgtgatggat

SEQ ID NO: 680648 - DNA, 120 bp, Artificial Sequence
  ENSG00000186767_8 (sequence is synthesized)
acttggttttacatcacctacgagaaagatcctgttctctatatgtacacgctgcttgatgactacaaagatggtgacttacgcattattccagattccaactactatttccctacagca

SEQ ID NO: 680649 - DNA, 120 bp, Artificial Sequence
  ENSG00000186767_9 (sequence is synthesized)
gaacaggagcctggagaggtggtcgacagtctcgtgggcaagcaggtggagcatgccaaagatgacgggtccaagagaactggcatttttatacatcaagtggtggcgaagccatctgtt

SEQ ID NO: 680650 - DNA, 120 bp, Artificial Sequence
  ENSG00000186767_10 (sequence is synthesized)
tacttcattaagtttgatgatgatattcacatttatgtctatggtttggtgaaaactccttaaattctttgtgctctttagagaagttgtggatctgttagatgtgaattattttgtgtt

SEQ ID NO: 680651 - DNA, 120 bp, Artificial Sequence
  ENSG00000186767_11 (sequence is synthesized)
ctcgtagttgtgaacgcagagaagagtttaggtgtcagaaattcaggaaagtggataaattttattgtgccaacaaatcttaccttgactagtttcacaattttgcctcaagtgtacttt

SEQ ID NO: 680652 - DNA, 120 bp, Artificial Sequence
  ENSG00000186767_12 (sequence is synthesized)
gctacttttgatattgccttgttctgtaacttaacagttaaattgggtgctaatagaaaattaaaaagtgtttgcaaccattggaacaatgcaaaaatagattaagaaaaattaatggtg

SEQ ID NO: 680653 - DNA, 120 bp, Artificial Sequence
  ENSG00000186767_13 (sequence is synthesized)
taaacccacaccccgtccttaccccttcctttccttaccttgtttcttcccagaaaacaagtgttgaggatgcgaagtacatccttccacctattttccccatcttcatgcagaaagtat

SEQ ID NO: 680654 - DNA, 120 bp, Artificial Sequence
  ENSG00000186767_14 (sequence is synthesized)
gttctagtagtttctgtaaaaatggcaagccacatgcttttctcacttgacatgtagatgatatctcttcttatcagtagcttcagtctttcttgctctctctggctctctctggccctc

SEQ ID NO: 680655 - DNA, 120 bp, Artificial Sequence
  ENSG00000186767_15 (sequence is synthesized)
actcttactctcttgcactcttgctctccccctccctcccttactctaacagctgaatacacagtacttgttgatgtaccaaaaaggcattcaaccatttcgttattgatcgtcttttat

SEQ ID NO: 680656 - DNA, 120 bp, Artificial Sequence
  ENSG00000186767_16 (sequence is synthesized)
ttcctttttttattttttttcaaaataacactgctgtaatacatactggtgcttttatttatataggttggattcccagaaatactatgtaggcatatgtttcagaaatattacaagatt

SEQ ID NO: 680657 - DNA, 120 bp, Artificial Sequence
  ENSG00000186767_17 (sequence is synthesized)
ccagcgtcctctccagcactctttaatgcttgaaaatatgaaaggctaaaaattgcattgtattgcttgttagtttaattgccttttgtctgagttcaaagaggtttgttgttgttgctg

SEQ ID NO: 680658 - DNA, 120 bp, Artificial Sequence
  ENSG00000186767_18 (sequence is synthesized)
tccttgtttctgtttggatttttctctgatttgcctgttcttaccctttgctcatgtatctattgatgtttttcattataaatttgtagaaattcttactacatagtgcatattaatcat

SEQ ID NO: 680659 - DNA, 120 bp, Artificial Sequence
  ENSG00000186767_19 (sequence is synthesized)
ttgtagctctaatgtgttatgacgttttcatcttgactttattgatgatatattttcctttaaaatttttaaactttttaggtagacccttatctcttttatagattttggtttcctttt

SEQ ID NO: 680660 - DNA, 120 bp, Artificial Sequence
  ENSG00000186767_20 (sequence is synthesized)
tttatcacatggatgcccccacccaaagtcatacaaatattcacctacattttcttctaataactttattatttttaatgtttaaatgtttgatccatctgaaatttatttttgtatatg

SEQ ID NO: 680661 - DNA, 120 bp, Artificial Sequence
  ENSG00000186767_21 (sequence is synthesized)
gtgtaagatggggatccagctataacattttgttcacattggatacctgattgtgacatttatttaaaatgttacccattttcaaatttctgagccaatatcatgatttaattatagtgg

SEQ ID NO: 680662 - DNA, 120 bp, Artificial Sequence
  ENSG00000186767_22 (sequence is synthesized)
cttcatcgtaagttttagaatccgataaagcaagtcccacttcattagttttttttttctttatataatatgtcctagacattcattttttcatgtgaaaaaatgaaatgcagaatttta

SEQ ID NO: 680663 - DNA, 120 bp, Artificial Sequence
  ENSG00000186767_23 (sequence is synthesized)
ataaaattctaattatgatggctgacatcacaattaaaatcctgcatttttgtttagagggctctttaataatattaaatcttagcactcaagagtcttcgtacatcattgaaatctttt

SEQ ID NO: 680664 - DNA, 120 bp, Artificial Sequence
  ENSG00000186767_24 (sequence is synthesized)
ggtcttgttattggaatattcttcacgtaagtatatcatagctaactgaatttatttctaagtatttttacagttttatttcatattttgacattgtgaattggtttttttcttctcatt

SEQ ID NO: 680665 - DNA, 120 bp, Artificial Sequence
  ENSG00000186767_25 (sequence is synthesized)
gctatttttgacaatatagacaacctatagatttttgtatttttatcttctgtctaatgagcttatttaatcattgaaattacagtagatttttaagaatataatattttgggttttcta

SEQ ID NO: 680666 - DNA, 120 bp, Artificial Sequence
  ENSG00000186767_26 (sequence is synthesized)
gttttctagatatgaaattatttcacctgaacatatagatcattttatttcctcttaatgtttatactgattactgttacattagctggatttttcaaaacaatgttgaagagtgatgac

SEQ ID NO: 680667 - DNA, 120 bp, Artificial Sequence
  ENSG00000186767_27 (sequence is synthesized)
agacgtgactgtcttgttcttaattttcatggaagtaagaatgcaaaatattaatagggaatagtattccctattagtatgacatttacttttggttattagtaggtagtcattaacatg

SEQ ID NO: 680668 - DNA, 120 bp, Artificial Sequence
  ENSG00000186767_28 (sequence is synthesized)
tttaagagtttccgctattcctgttttatagtgttattgctagaagtggttcctgaattttataaaatgccttttcagcatctattgataaaattgtatgattttttttctctttaattt

SEQ ID NO: 680669 - DNA, 120 bp, Artificial Sequence
  ENSG00000186767_29 (sequence is synthesized)
gttgatgtaatgaattagaatggtaggcatttgatgtggaaccaaacttgtatttctggaacaaatactacttggtcattgtgaaataatgatttgctacatgagtggattttatttacc

SEQ ID NO: 680670 - DNA, 120 bp, Artificial Sequence
  ENSG00000186767_30 (sequence is synthesized)
agtatttaatttagaattattgcattttcattccaaagtaaaattgtattttgtccttctgatgctatctttatcaagttttgttattgaagttgtgctagctttaaaaaaatatgaata

SEQ ID NO: 680671 - DNA, 120 bp, Artificial Sequence
  ENSG00000186767_31 (sequence is synthesized)
tgtgagttttcaatttttttcctgtggtctggaataatttaaatagcattagaattatttgtttgttaaaagttagctaggacaaagtgtaaaacaatctaatcctgatgacacttttaa

SEQ ID NO: 680672 - DNA, 120 bp, Artificial Sequence
  ENSG00000186767_32 (sequence is synthesized)
tagtagatttttaatcagctttgtgatttctttaatagttattggtttattcaggctttttattaaaaaggtatatacattctctgtgacatacaaagttaaaagttctctattattgct

SEQ ID NO: 680673 - DNA, 120 bp, Artificial Sequence
  ENSG00000186767_33 (sequence is synthesized)
gattgtactggttgttgcttgttgactgtactattcagatggctttatgcttttgtgtattttatgtcacctagatctaattctgaaaacattgtaataaaataattagctataatggta

SEQ ID NO: 680674 - DNA, 120 bp, Artificial Sequence
  ENSG00000186777_0 (sequence is synthesized)
gccttttgcgccagcgtgagctcggttagggtctccacggccgtgctttcacccctcagggaggcgtcggtgattcggtcacagcctcagcctccgtcgctctgtgacctgcgggtattg

SEQ ID NO: 680675 - DNA, 120 bp, Artificial Sequence
  ENSG00000186777_1 (sequence is synthesized)
gatgattcgtagctgagactccgctacacccctgaagtggggaaatggaactcttaacattcagggatgtggccatagaattctctccagaagagtggaaatgcctggaccctgcccagc

SEQ ID NO: 680676 - DNA, 120 bp, Artificial Sequence
  ENSG00000186777_2 (sequence is synthesized)
agaatttgtatagagatgtgatgttggagaactacaggaacctgatctccctgggtgttgctatctctaacccagacctggtcatctatctggagcaaagaaaggagccctacaaagtga

SEQ ID NO: 680677 - DNA, 120 bp, Artificial Sequence
  ENSG00000186777_3 (sequence is synthesized)
agatacatgagacagtagccaaacacccagctgtgtgttctcatttcacccaagactttttgccagtgcaggggatagaagattcgttccacaaacttatattaagaagatatgagaaat

SEQ ID NO: 680678 - DNA, 120 bp, Artificial Sequence
  ENSG00000186777_4 (sequence is synthesized)
gtggacatgagaatttagaattaagaaaaagctgtaaaaggaaggtgcagaaaggaggttataatgaatttaatcaatgcttgtcaactatccagagcaaaatatttcagtgtaatgtac

SEQ ID NO: 680679 - DNA, 120 bp, Artificial Sequence
  ENSG00000186777_5 (sequence is synthesized)
atgtcaaagtatttagtacattttcaaattcaaaccaacgtaggataagacatactggagagaaacactttaaagaatgtggcaagtcatttcagaagttctcagacctaactcaacatc

SEQ ID NO: 680680 - DNA, 120 bp, Artificial Sequence
  ENSG00000186777_6 (sequence is synthesized)
cctacacatgtgaagaatgtggcaaagactttaaatggtatttaatctttaatgaatatgagataattcatactggagagaaacccttcacatgtgaagaatgtggcaacatctttacca

SEQ ID NO: 680681 - DNA, 120 bp, Artificial Sequence
  ENSG00000186777_7 (sequence is synthesized)
aagaatgtggcaacatctttaccacatcctcaaactttgctaaacataaagttcatactggagagaaatcttacaaatatgaagaatgtggcaaagcctttaataggtcctcaaccctta

SEQ ID NO: 680682 - DNA, 120 bp, Artificial Sequence
  ENSG00000186777_8 (sequence is synthesized)
ctaagcataagagaattcatgctgaagagaaacccttcacatgtgaagaatgtggcaaaatcattacctcatcctcaaatgttgccaaacataagaaaattcataccggagagaaactct

SEQ ID NO: 680683 - DNA, 86 bp, Artificial Sequence
  ENSG00000186777_9 (sequence is synthesized)
acatgtgaagaatgtggcaaagcctttagtaggtcctcagttctgaatgaacataagagcaatgtggcaaagcctttagacaatcc

SEQ ID NO: 680684 - DNA, 79 bp, Artificial Sequence
  ENSG00000186777_10 (sequence is synthesized)
atactggagagaagccctacaaatgtgaacaatgtggcaaagcctttagacaatccgcaacccttaataaacataagag

SEQ ID NO: 680685 - DNA, 120 bp, Artificial Sequence
  ENSG00000186777_11 (sequence is synthesized)
cccttaatgaacataagagaattcatactggagagaggccccacaaatgtgaagagtgtggcaaagcctttggatggtccacagacctgaataaacataagataattcatactggagaga

SEQ ID NO: 680686 - DNA, 89 bp, Artificial Sequence
  ENSG00000186777_12 (sequence is synthesized)
gagtattatagatgtgaagagtgtggcaaagcctttttatgttccagagccctgaataaacataagacaattcatactggagagaaacc

SEQ ID NO: 680687 - DNA, 120 bp, Artificial Sequence
  ENSG00000186777_13 (sequence is synthesized)
ccctgaataaacataagacaattcatactggagagaaaccttacgaatgtgaagagtgtggcaaagcctttggatggtccacatacctgagtaaacataagaaaattcatactggagaga

SEQ ID NO: 680688 - DNA, 120 bp, Artificial Sequence
  ENSG00000186777_14 (sequence is synthesized)
aaccttatagatgtgaagagtgtggcaaagcatttagacgttccagagtcctgaataaatataagacaattcatactggagataaaacccccaaatgtaaaggatgtggcaaagccttta

SEQ ID NO: 680689 - DNA, 120 bp, Artificial Sequence
  ENSG00000186777_15 (sequence is synthesized)
agtggtcctcataccttaatcaacataataaaatttatactggagagaaactctagaaatatgaagaatgtggcaaagcctttggatgatccacaaacctgaatgaacataagaaaattt

SEQ ID NO: 680690 - DNA, 90 bp, Artificial Sequence
  ENSG00000186777_16 (sequence is synthesized)
gaacataagaaaatttatactggaaataaactaggatggtccacaaccctgaatgaaagtaagaattcatactggagaaaaaccctacaa

SEQ ID NO: 680691 - DNA, 120 bp, Artificial Sequence
  ENSG00000186777_17 (sequence is synthesized)
actggagaaaaaccctacaaatgtaaagaatgtgggaaagccttcaaacagtccgcatacctgaatcaacataagaaaattgatgctggagagcaaccctacaaatgtgaagaatgtggc

SEQ ID NO: 680692 - DNA, 120 bp, Artificial Sequence
  ENSG00000186777_18 (sequence is synthesized)
aagaaaattcatatgggagatgaatcctacaaatgtaaagaatgtgggaaagcctataaacggtcctcacccataaataaacatgagaaaattcataatggagagaacacctacaaatgt

SEQ ID NO: 680693 - DNA, 120 bp, Artificial Sequence
  ENSG00000186787_0 (sequence is synthesized)
gccaccgccagcagggaggcggagggctagcgagccaagcggtggggacgccgctgccttcctctttgcctgtctcgccgccctcctagacacgctcctcatctacggatcctaccctcc

SEQ ID NO: 680694 - DNA, 120 bp, Artificial Sequence
  ENSG00000186787_1 (sequence is synthesized)
ccgctcttgcaagcattcactcggccggtcgcctgctgaccctccttcgccacaggctcgtagcggaggcagcagcgagcaggcatgaagacccccaacgcacaggaagccgaagggcaa

SEQ ID NO: 680695 - DNA, 120 bp, Artificial Sequence
  ENSG00000186787_2 (sequence is synthesized)
caaaccagggcagctgcaggacgggccactgggtctgcaaacatgacaaagaaaaaagtctcccaaaagaagcagagaggccgaccttcatcccagccccgcaggaacatcgtgggctgc

SEQ ID NO: 680696 - DNA, 120 bp, Artificial Sequence
  ENSG00000186787_3 (sequence is synthesized)
agaatttctcatggatggaaggaaggagatgagcccatcacgcagtggaaaggaaccgttctggatcaggtgcctataaatccctctctttatctggtgaaatatgatggaattgactgt

SEQ ID NO: 680697 - DNA, 120 bp, Artificial Sequence
  ENSG00000186787_4 (sequence is synthesized)
tctcacattagtgatgccaaccttgcaaataccataattggcaaagcagtggaacatatgtttgagggagagcatggttctaaggatgaatggagggggatggtcttagctcaagcacct

SEQ ID NO: 680698 - DNA, 120 bp, Artificial Sequence; identical to SEQ ID NO: 403632
  ENSG00000186787_5 (sequence is synthesized)

SEQ ID NO: 680699 - DNA, 120 bp, Artificial Sequence
  ENSG00000186787_6 (sequence is synthesized)
ccaacagagagggagccaggaggagttgtagatggcctaataggtaagcatgtggaatataccaaagaagatggctccaaaaggatcggcatggtcattcaccaagtggaagccaaaccc

SEQ ID NO: 680700 - DNA, 120 bp, Artificial Sequence; identical to SEQ ID NO: 403634
  ENSG00000186787_7 (sequence is synthesized)

SEQ ID NO: 680701 - DNA, 120 bp, Artificial Sequence
  ENSG00000186787_8 (sequence is synthesized)
acatgcaaaaaatgttgcctttcagtgtattgaaagcttatggaatccctgataactaaacatctttgccagcattaactgttgttttgctctaaaaaatacaaacttgtgtgtacatga

SEQ ID NO: 680702 - DNA, 120 bp, Artificial Sequence
  ENSG00000186787_9 (sequence is synthesized)
gtggaaaggaaccgttctggatcagctgcctgaaaccacaggtggttccgacaaataatccactaaaagaggcctgctgtcccaagaatccacattctggttagaccttccccacaaagc

SEQ ID NO: 680703 - DNA, 120 bp, Artificial Sequence
  ENSG00000186787_10 (sequence is synthesized)
tggtgtctgcagacccctcacaggcacctgttggccagtcttgcctaccccagctcacagagacctgtgatggaattctggtcagctctttgtttccaggtgaggcagatgccatggggc

SEQ ID NO: 680704 - DNA, 120 bp, Artificial Sequence
  ENSG00000186788_0 (sequence is synthesized)
atggagaatatcctctgttttctgaacagctatactgagacagggctgagccctgactcacattgtttggatattgacctcaacttcatctgcttgagtgggttggggttgtttatactg

SEQ ID NO: 680705 - DNA, 120 bp, Artificial Sequence
  ENSG00000186788_1 (sequence is synthesized)
tacttgttctacatggtattgaccctgtattcatcacccaccgaaaaaaataatgacacccaaaagcatcagggcagagccaggaggaaaagaaaaagcgtgacatttaaagaccggaaa

SEQ ID NO: 680706 - DNA, 120 bp, Artificial Sequence
  ENSG00000186788_2 (sequence is synthesized)
agtttgcagaaggaagcagaagaggaaagaaagctacattcttttctgaaaagctttggacctcctgtttcctgcagtcccctgggccagcatcatgataccaccctctttcgtcgactg

SEQ ID NO: 680707 - DNA, 120 bp, Artificial Sequence
  ENSG00000186788_3 (sequence is synthesized)
ttatgcccagaccctgtctgtcgggtgtgtaacagagcaactgctgatatccagcgactgctgtcttgggagtccctgaaagatgctgctccctctgtgtcccctttggcttcttcagct

SEQ ID NO: 680708 - DNA, 120 bp, Artificial Sequence
  ENSG00000186788_4 (sequence is synthesized)
tctggggctgagtcatcgttcactctggcttccaccccctcagcaaccactccagaagacctaatattgtcctctcggcctaagccctctccaccaccccccttaattctctcacctgac

SEQ ID NO: 680709 - DNA, 120 bp, Artificial Sequence
  ENSG00000186788_5 (sequence is synthesized)
ctgatcaccaccttagctgacttattttcaccctcaccactgagggaccctctgccaccacagcctgtttctcccttggattccaagttccccatagaccattccccaccccaacagctt

SEQ ID NO: 680710 - DNA, 120 bp, Artificial Sequence
  ENSG00000186788_6 (sequence is synthesized)
ccctttccccttctcccaccacatcacattgagagagtggagcccagcctccaacctgaggccagtttgtctctgaacaccatcttttcatttggctccaccctatgccaagatatttcc

SEQ ID NO: 680711 - DNA, 120 bp, Artificial Sequence
  ENSG00000186788_7 (sequence is synthesized)
caggccgtgaatcgcactgattcatgtgctcgtcatcatggaccaccaaccccatctgctttaccaccggaagattgcactgtgactcagtctaaatcaaatctcaccgtcttgaagact

SEQ ID NO: 680712 - DNA, 120 bp, Artificial Sequence
  ENSG00000186788_8 (sequence is synthesized)
tttccggaaatgttatctctaggtggctctggtgggtcatccacctctgccccaacaacgaaaggcattgaccattcatgccctgcatcttcagaattctcctggtggcagcctcatgcc

SEQ ID NO: 680713 - DNA, 120 bp, Artificial Sequence
  ENSG00000186788_9 (sequence is synthesized)
aaggactctttttcctctaattttgtgccatctgatttcatggaggagcttcttacccttcattcttctgaggcctctttaggggggcactctgtggccaacatcatacagcctgttaac

SEQ ID NO: 680714 - DNA, 120 bp, Artificial Sequence
  ENSG00000186788_10 (sequence is synthesized)
atctcttttctcagccatgacattccggcactcctggagagacaagtcaaaagaaggggtgatttcctgatgtggaaagaaaatggaaagaaaccaggatcattcccaacacaacttagg

SEQ ID NO: 680715 - DNA, 120 bp, Artificial Sequence
  ENSG00000186788_11 (sequence is synthesized)
ccaaactaccaactaaattcctcacggaatatgttaacctcaactgctgttaagcatgacttagcagaatcctttcctttttgggccagtaaaggcaaactagagtggcagcacatccat

SEQ ID NO: 680716 - DNA, 120 bp, Artificial Sequence
  ENSG00000186788_12 (sequence is synthesized)
cagcagcccccatattctaagtgttttgaggaccatttagagcaaaaatatgtccagctcttctggggtctcccatctttgcacagcgagtctctgcatcctactgtttttgtccaacat

SEQ ID NO: 680717 - DNA, 120 bp, Artificial Sequence
  ENSG00000186788_13 (sequence is synthesized)
ggccgttcctccatgtttgtattcttcaatggcattacaaatacatctatgtcccatgaatccccagtacttccccctccccaacctctgttcttgcctagtacccaacctctacccttg

SEQ ID NO: 680718 - DNA, 120 bp, Artificial Sequence
  ENSG00000186788_14 (sequence is synthesized)
cctcaaaccctgccccgaggtcagtccctacatctcactcaggtgaagtccctggctcaacctcaatctccattcccagccctaccacctagtcctctattcctgattagggtgtgtggc

SEQ ID NO: 680719 - DNA, 120 bp, Artificial Sequence
  ENSG00000186788_15 (sequence is synthesized)
gtgtgttttcatagaccccagaatgaggcacggtctcttatgccatctgaaattaatcatctggagtggaacgtgttgcagaaagtgcaggaaagtgtgtggggtttaccctctgtggtt

SEQ ID NO: 680720 - DNA, 120 bp, Artificial Sequence
  ENSG00000186788_16 (sequence is synthesized)
caaaaatcccaggaagacttttgtcctccagctcccaatcctgtattggtcagaaagtccttcaaggtccatgttcccatctccatcattcctggagattttccactcagctctgaggta

SEQ ID NO: 680721 - DNA, 120 bp, Artificial Sequence
  ENSG00000186788_17 (sequence is synthesized)
aggaagaaactagagcaacacattcgaaagaggctcatccagcgcagatggggcctgccccgcagaatccatgagtctctgtcattgctacgtcctcagaacaaaatttcagagctatct

SEQ ID NO: 680722 - DNA, 120 bp, Artificial Sequence
  ENSG00000186788_18 (sequence is synthesized)
gtgtcagagagcattcatggtccattaaatatctctttggttgagggtcagaggtgcaatgttctaaagaagtccgcatcaagcttccctagaagcttccacgagaggagctcaaatatg

SEQ ID NO: 680723 - DNA, 120 bp, Artificial Sequence
  ENSG00000186788_19 (sequence is synthesized)
tctaactctgagagagacctaggaactcatatgatgcatctgtcagggaatgattcaggggtgagactaggtcagaaacaacttgaaaatgccctgacagtacatttgagcaagaaattt

SEQ ID NO: 680724 - DNA, 120 bp, Artificial Sequence
  ENSG00000186788_20 (sequence is synthesized)
gaggaaatcaatgagggtcgaatgcctgggactgtgcatagttcatggcactcagtcaagcagacaatatgtcttcctgagaaatcccacagccaaattaaacatcgaaatttggcagca

SEQ ID NO: 680725 - DNA, 120 bp, Artificial Sequence
  ENSG00000186788_21 (sequence is synthesized)
ttggtgagtgaggaccaccgcgttgatacctcccaggagatgtccttccttagttccaacaaacaaaagatgttggaagcccatattaaatctttccatatgaagcccatattaaatctt

SEQ ID NO: 680726 - DNA, 120 bp, Artificial Sequence
  ENSG00000186788_22 (sequence is synthesized)
tccatatgaggatgctgtggggccttccccgcaagatccgtgaacccacagaaatcttcaaatcagaagaggatatttccaattccttttcccatttctaccttccctcctcagccagct

SEQ ID NO: 680727 - DNA, 120 bp, Artificial Sequence
  ENSG00000186788_23 (sequence is synthesized)
ttatttctcagggagattccaaagatggggtctctaagtcttgtagacgaagcacttttcaaggagaaaagttgggaacaacaagctcagtccctgtccttaatcatcctcagcctgtct

SEQ ID NO: 680728 - DNA, 120 bp, Artificial Sequence
  ENSG00000186788_24 (sequence is synthesized)
cctcacctattggcaaagaagggcaggggaccctgagaagacaattttctgatactgaccatgaccttatagagacagatgccaaagatggtgcctccacgccccttagaagaggcacta

SEQ ID NO: 680729 - DNA, 120 bp, Artificial Sequence
  ENSG00000186788_25 (sequence is synthesized)
catattttcaaggagaaaaattagaaacaacaagctcattctccatcttgggtcatcctcacctcgtcacctcacctgttgatcaagaaaagcaggggaccctcagaagagaattcgctg

SEQ ID NO: 680730 - DNA, 120 bp, Artificial Sequence
  ENSG00000186788_26 (sequence is synthesized)
atactgacgaggatcttacagaaagtgtctggacaactgaggatggcagacagacttttctgccccccacacacagcatcatagacgaagtcagtcagaaacagactgtacttgccagta

SEQ ID NO: 680731 - DNA, 120 bp, Artificial Sequence
  ENSG00000186788_27 (sequence is synthesized)
gatgcagtgcagagctgcccatactgcaagctggagttggccgtgattcaagggataagagagagagtgccagtaataatgttaacaggcttcagggcagtagaaagacctttcctgtca

SEQ ID NO: 680732 - DNA, 120 bp, Artificial Sequence
  ENSG00000186788_28 (sequence is synthesized)
ccaatgggtcgaaggagatgttcaaggaagaggagatctgtactcttcaatcacaaactaggaacaacttgacaaccagcaagtcaggaagctgcttagtgacaaacgtgaaaagaagca

SEQ ID NO: 680733 - DNA, 120 bp, Artificial Sequence
  ENSG00000186788_29 (sequence is synthesized)
cttctcatgaaactgaaattttcccaccaagaatatcagttcctcaaactcctaaatcatcatatcttaaaaatcagatgttgagccagttaaagttggtccagaggaagcatagccaac

SEQ ID NO: 680734 - DNA, 120 bp, Artificial Sequence
  ENSG00000186788_30 (sequence is synthesized)
ctcagagccatttcactggcatgtctcttgccttagataacttgagttccaaggacttactgactcatgcccagggcatctcgaatcaggacttgggaacttcccaggtgctgcatgtcc

SEQ ID NO: 680735 - DNA, 120 bp, Artificial Sequence
  ENSG00000186788_31 (sequence is synthesized)
acttggaggtcagaggaatccgtgtggcacagcagcaggagcccagggtccctacgcatgtcttacagaaatgccaagttaagaatttttcaccagctacaaagagagtgagccctctaa

SEQ ID NO: 680736 - DNA, 120 bp, Artificial Sequence
  ENSG00000186788_32 (sequence is synthesized)
gacctaatggaggagagcttggtggaggggatgcagggctggggacatcccaactcagaagaaagagccatgctattcataacaagacatcaagggagtcgcttgggagcaaatcttccc

SEQ ID NO: 680737 - DNA, 120 bp, Artificial Sequence
  ENSG00000186788_33 (sequence is synthesized)
caaccttgaaaacacagcctcctcctgaaaaccttttcggaacattgatgaagacctttttgcagcagtctaataaacccatcataacatatggaaaacaagaaagttcctaggaaaagg

SEQ ID NO: 680738 - DNA, 120 bp, Artificial Sequence
  ENSG00000186788_34 (sequence is synthesized)
gtagctccttgtcatcatctgtgcagaatagaggtcgagttaaaagtagagctgtctttactgggactattgaagctcagaaaattaggaaagacactggggagttcatagaagagaagc

SEQ ID NO: 680739 - DNA, 120 bp, Artificial Sequence
  ENSG00000186788_35 (sequence is synthesized)
tggggcatagacattgaatagatatcacctgtccccaggagcccctttcctccccagtgcagcttgggaaatctcagaatgtgccagaactgcaggtcagagcagagcctgtccagggct

SEQ ID NO: 680740 - DNA, 120 bp, Artificial Sequence
  ENSG00000186788_36 (sequence is synthesized)
atccctgcaactacatggctccctcctgcaaagtgacatgtaccaaatcttgcagccaacaagctatctttgtcggccagaattatcctgcaatgattagacagatcatagacaaggaca

SEQ ID NO: 680741 - DNA, 120 bp, Artificial Sequence
  ENSG00000186788_37 (sequence is synthesized)
gatagccccaggaagttggacatttaaggggaagatattgtgtcaaaggcatccccaatccatgccccacaggaagcctgtgccacagccaaaccccacttgcagtgtgaagtcaacctg

SEQ ID NO: 680742 - DNA, 120 bp, Artificial Sequence
  ENSG00000186788_38 (sequence is synthesized)
gtgcctccggtcatcctgaccagtgctaaaaacactgtgttcagtgatgtgcctttactaactggacagaaaatacttccaaagcatttgcagggaggaaaatttccccccaaaaaataa

SEQ ID NO: 680743 - DNA, 120 bp, Artificial Sequence
  ENSG00000186790_0 (sequence is synthesized)
cgcagcgacatggatccgcccgccgcgttctctggcttccctgccctgccagcggtcgcgccgtcggggccgccgccgtcgccgctcgcaggagccgagccagggcgggagccagaggag

SEQ ID NO: 680744 - DNA, 80 bp, Artificial Sequence
  ENSG00000186790_1 (sequence is synthesized)
cctgccagcggtcgcgccgtcggggccgccgccgtcgccgctcgcaggagccgagccagggcgggagccagaggaggcgg

SEQ ID NO: 680745 - DNA, 120 bp, Artificial Sequence
  ENSG00000186790_2 (sequence is synthesized)
gaagccgccctactcgtacatcgcgctcatcgccatggctctggcgcacgccccgggccgccgcctcacgctggccgccatctaccgcttcatcaccgaacgctttgccttctaccgcga

SEQ ID NO: 680746 - DNA, 120 bp, Artificial Sequence
  ENSG00000186790_3 (sequence is synthesized)
cagcccgcgcaagtggcagaacagcatccgccacaatctcacgctcaacgactgcttcgtcaaggtgccccgcgagccgggcaacccgggcaagggcaactactggacgctggaccccgc

SEQ ID NO: 680747 - DNA, 120 bp, Artificial Sequence
  ENSG00000186790_4 (sequence is synthesized)
ggccgcagacatgttcgacaacggcagcttcctgcggcgccgcaagcgcttcaagcgcgccgagctgcccgcgcacgcggccgcggcgccagggccgccgctccccttcccctacgcgcc

SEQ ID NO: 680748 - DNA, 120 bp, Artificial Sequence
  ENSG00000186790_5 (sequence is synthesized)
ctacgcgcccgcgcccggccccgcgctgctggtgccgccgccttctgccggaccgggcccctcgccgcccgcgcgtctgttcagcgtcgacagcctggtgaacctgcagccggagctagc

SEQ ID NO: 680749 - DNA, 80 bp, Artificial Sequence
  ENSG00000186790_6 (sequence is synthesized)
gacgccgcagccgcagccttcccgccctgcgctgccgccgcctccccgccactctactcgcaggtccccgaccgcctggt

SEQ ID NO: 680750 - DNA, 120 bp, Artificial Sequence
  ENSG00000186790_7 (sequence is synthesized)
agccctggggaggcctacctgaggcagccgggcttcgcgtcggggctggagcgctacctgtgagcctgcgccgcgcgggcaggcacctgtgcgacctgtgccccggacctgcggcgccgc

SEQ ID NO: 680751 - DNA, 120 bp, Artificial Sequence
  ENSG00000186790_8 (sequence is synthesized)
cctcgagcgccccatctctaccccccaccctggcttggagcacaccctgcgcctctcgtcgtggcctcctggactcaaactcctgctacatccttctccgtcccccatccctggggaggc

SEQ ID NO: 680752 - DNA, 120 bp, Artificial Sequence
  ENSG00000186790_9 (sequence is synthesized)
tcccaccatctcgccactggacagaagcgtcccctttgacctgccagcctctcatttcttctccctccacttgtgagcgcccccagctttgcggcgccccccaccccagcgctgtctgtg

SEQ ID NO: 680753 - DNA, 120 bp, Artificial Sequence
  ENSG00000186790_10 (sequence is synthesized)
ggtcccttgccccggagctgactcgcctccagtgagtccataccccaggtttcctggtgagttccaagcctttggaagccagatctgtgatcccaagccgcctcctccaccgactgtact

SEQ ID NO: 680754 - DNA, 120 bp, Artificial Sequence
  ENSG00000186790_11 (sequence is synthesized)
tcatcaaccttctctcatgtttttccgacactcctgggtcagactcctgggttcatgacttacttgctagcgtcccttcattttcccacaagtttgccccccacctccacttacctgtct

SEQ ID NO: 680755 - DNA, 120 bp, Artificial Sequence
  ENSG00000186790_12 (sequence is synthesized)
gccctcagcttcttcctgggagagagcccccctttcacgtagacacacctggctgccttcttcacgccctgaggacacttcttggagatttcagacaggcagcaccagggctcctgactg

SEQ ID NO: 680756 - DNA, 120 bp, Artificial Sequence
  ENSG00000186790_13 (sequence is synthesized)
aaaggggagttggtgggcctttaggtctgccccatcccctggaaaacttaggacttattgggttattattatttttaattaaagctggtttaattaaaaagaaagaaacttttttctgga

SEQ ID NO: 680757 - DNA, 120 bp, Artificial Sequence
  ENSG00000186792_0 (sequence is synthesized)
ctaagcggcgacgcgcgggtgctgggaggccttagaacgccgtggcgtgccgcaggacgcgacggctgcagaacatccgccgcaccgctgggggccaacgttgtcggaccgaggagtccg

SEQ ID NO: 680758 - DNA, 120 bp, Artificial Sequence
  ENSG00000186792_1 (sequence is synthesized)
aggtggcgactgagtgagatacccagctgtgcggagctaggacgcggaacatcccagaggccagcatcaacatgtttccatccttggggaatgaccacgcaactgggcccagccctggtg

SEQ ID NO: 680759 - DNA, 120 bp, Artificial Sequence
  ENSG00000186792_2 (sequence is synthesized)
ctgggggtggccctgtgcctgggttgtggccagcccctaccacaggtccctgaacgccccttctctgtgctgtggaatgtaccctcagcacactgtgaggcccgctttggtgtgcacctg

SEQ ID NO: 680760 - DNA, 120 bp, Artificial Sequence
  ENSG00000186792_3 (sequence is synthesized)
ccactcaatgctctgggcatcatagccaaccgtggccagcattttcacggtcagaacatgaccattttctacaagaaccaactcggcctctatccctactttggacccaggggcacagct

SEQ ID NO: 680761 - DNA, 120 bp, Artificial Sequence
  ENSG00000186792_4 (sequence is synthesized)
cacaatgggggcatcccccaggctttgccccttgaccgccacctggcactggctgcctaccagatccaccacagcctgagacctggctttgctggcccagcagtgctggattgggaggag

SEQ ID NO: 680762 - DNA, 120 bp, Artificial Sequence
  ENSG00000186792_5 (sequence is synthesized)
tggtgtccactctgggctgggaactggggccgccgccgagcttatcaggcagcctcttgggcttgggcacagcaggtattccctgacctggaccctcaggagcagctctacaaggcctat

SEQ ID NO: 680763 - DNA, 120 bp, Artificial Sequence
  ENSG00000186792_6 (sequence is synthesized)
actggctttgagcaggcggcccgtgcactgatggaggatacgctgcgggtggcccaggcactacggccccatggactctggggcttctatcactacccagcctgtggcaatggctggcat

SEQ ID NO: 680764 - DNA, 120 bp, Artificial Sequence
  ENSG00000186792_7 (sequence is synthesized)
gcctccagtgccctcttccccagcatctacctcccacccaggctgccacctgcccaccaccaggcctttgtccgacatcgcctggaggaggccttccgtgtggcccttgttgggcaccga

SEQ ID NO: 680765 - DNA, 120 bp, Artificial Sequence
  ENSG00000186792_8 (sequence is synthesized)
catcccctgcctgtcctggcctatgtccgcctcacacaccggagatctgggaggttcctgtcccaggatgaccttgtgcagtccattggtgtgagtgcagcactaggggcagccggcgtg

SEQ ID NO: 680766 - DNA, 120 bp, Artificial Sequence
  ENSG00000186792_9 (sequence is synthesized)
gtgctctggggggacctgagcctctccagctctgaggaggagtgctggcatctccatgactacctggtggacaccttgggcccctatgtgatcaatgtgaccagggcagcgatggcctgc

SEQ ID NO: 680767 - DNA, 120 bp, Artificial Sequence
  ENSG00000186792_10 (sequence is synthesized)
agtcaccagcggtgccatggccacgggcgctgtgcccggcgagatccaggacagatggaagcctttctacacctgtggccagacggcagccttggagattggaagtccttcagctgccac

SEQ ID NO: 680768 - DNA, 120 bp, Artificial Sequence
  ENSG00000186792_11 (sequence is synthesized)
tgttactggggctgggctggccccacctgccaggagcccaggcctgggcctaaagaagcagtataaagccagggcccctgccactgcctcttcttttccctgctgccacttttccagtcc

SEQ ID NO: 680769 - DNA, 120 bp, Artificial Sequence
  ENSG00000186792_12 (sequence is synthesized)
tggaactactctgtcccactcttgctctattcagtttacagtcaaccctcccaagcacacaccccgcttcccttggaatccctgaggggtagaaggggccagaaaaaacgcttataaaac

SEQ ID NO: 680770 - DNA, 120 bp, Artificial Sequence
  ENSG00000186792_13 (sequence is synthesized)
cagaggccctctgagatcatgtgagtcctccatggcaaggaagcagttccagggagagtcaggttccagctagttagggctgccagcctagggctttgtgcctacacctcactaagccca

SEQ ID NO: 680771 - DNA, 120 bp, Artificial Sequence
  ENSG00000186792_14 (sequence is synthesized)
tggagaggtcacagatgggccgtgcacgggcagatgggccccaaaaaatcttggcgaaggtcggtaaagtgctaagctgttgtctgcactctttcatcataaagtcacttttttccactg

SEQ ID NO: 680772 - DNA, 120 bp, Artificial Sequence
  ENSG00000186795_0 (sequence is synthesized)
atggaggtctcggggcacccccaggccaggagatgctgcccagaggccctgggaaagctcttccctggcctctgcttcctctgctttctggtgacctacgccctggtgggtgctgtggtc

SEQ ID NO: 680773 - DNA, 120 bp, Artificial Sequence
  ENSG00000186795_1 (sequence is synthesized)
ttctctgccattgaggacggccaggtcctggtggcagcagatgatggagagtttgagaagttcttggaggagctctgcagaatcttgaactgcagtgaaacagtggtggaagacagaaaa

SEQ ID NO: 680774 - DNA, 120 bp, Artificial Sequence
  ENSG00000186795_2 (sequence is synthesized)
caggatctccaggggcatctgcagaaggtgaagcctcagtggtttaacaggaccacacactggtccttcctgagctcgctctttttctgctgcacggtgttcagcaccgtgggctatggc

SEQ ID NO: 680775 - DNA, 120 bp, Artificial Sequence
  ENSG00000186795_3 (sequence is synthesized)
tacatctaccccgtcaccaggcttggcaagtacttgtgcatgctctatgctctctttggtatccccctgatgttcctcgttctcacggacacaggcgacatcctggcaaccatcttatct

SEQ ID NO: 680776 - DNA, 120 bp, Artificial Sequence
  ENSG00000186795_4 (sequence is synthesized)
ttcaagaaaaaaccggaccccaagcccgcagatgaagctgtccctcagatcatcatcagtgctgaagagcttccaggccccaaacttggcacatgtccttcacgcccaagctgcagcatg

SEQ ID NO: 680777 - DNA, 120 bp, Artificial Sequence
  ENSG00000186795_5 (sequence is synthesized)
gagctgtttgagagatctcatgcgctagagaaacagaacacactgcaactgcccccacaagccatggagaggagtaactcgtgtcccgaactggtgttgggaagactctcatactccatc

SEQ ID NO: 680778 - DNA, 120 bp, Artificial Sequence
  ENSG00000186795_6 (sequence is synthesized)
atcagcaacctggatgaagttggacagcaggtggagaggttggacatccccctccccatcattgcccttattgtttttgcctacatttcctgtgcagctgccatcctccccttctgggag

SEQ ID NO: 680779 - DNA, 120 bp, Artificial Sequence
  ENSG00000186795_7 (sequence is synthesized)
acacagttggatttcgagaatgccttctatttctgctttgtcacactcaccaccattgggtttggggatactgttttagaacaccctaacttcttcctgttcttctccatttatatcatc

SEQ ID NO: 680780 - DNA, 120 bp, Artificial Sequence
  ENSG00000186795_8 (sequence is synthesized)
gttggaatggagattgtgttcattgctttcaagttggtgcaaaacaggctgattgacatatacaaaaatgttatgctattctttgcaaaagggaagttttaccaccttgttaaaaagtga

SEQ ID NO: 680781 - DNA, 120 bp, Artificial Sequence
  ENSG00000186803_0 (sequence is synthesized)
caaggttatccatctcaagtagcctagcaatatttgcaacatcccaatggccctgtccttttctttacttatggccgtgctggtgctcagctacaaatccatctgttctctaggctgtga

SEQ ID NO: 680782 - DNA, 120 bp, Artificial Sequence
  ENSG00000186803_1 (sequence is synthesized)
tctgcctcagacccacagcctgggtaataggagggccttgatactcctgggacaaatgggaagaatctctcctttctcctgcctgaaggacagacatgatttccgaatcccccaggagga

SEQ ID NO: 680783 - DNA, 120 bp, Artificial Sequence
  ENSG00000186803_2 (sequence is synthesized)
gtttgatggcaaccagttccagaaggctcaagccatctctgtcctccatgagatgatccagcagaccttcaatctcttcagcacagaggactcatctgctgcttgggaacagagcctcct

SEQ ID NO: 680784 - DNA, 120 bp, Artificial Sequence
  ENSG00000186803_3 (sequence is synthesized)
agaaaaattttccactgaactttaccagcaactgaatgacctggaagcatgtgtgatacaggaggttggggtggaagagactcccctgatgaatgaggactccatcctggctgtgaggaa

SEQ ID NO: 680785 - DNA, 76 bp, Artificial Sequence
  ENSG00000186803_4 (sequence is synthesized)
ccctgatgaatgaggactccatcctggctgtgaggaaatacttccaaagaatcactctttatctaatagagaggaa

SEQ ID NO: 680786 - DNA, 120 bp, Artificial Sequence
  ENSG00000186803_5 (sequence is synthesized)
gaggaaggattgaaaactggttcaacatggcaatgatcctgattgactaatacattatctcacactttcatgagttcttccatttcaaagactcacttctataaccacgacgcgttgaat

SEQ ID NO: 680787 - DNA, 120 bp, Artificial Sequence
  ENSG00000186803_6 (sequence is synthesized)
caaaattttcaaatgttttcagcagtgtaaagaagtgtcgtgtatacctgtgcaggcactagtcctttacagatgaccattctgatgtctctgttcatcttttgtttaaatatttattta

SEQ ID NO: 680788 - DNA, 120 bp, Artificial Sequence
  ENSG00000186803_7 (sequence is synthesized)
atgtctctgttcatcttttgtttaaatatttatttaattatttttaaaatttatgtaatatcatgagtcgctttacattgtggttaatgtaacaatatatgttcttcatatttagccaat

SEQ ID NO: 680789 - DNA, 120 bp, Artificial Sequence
  ENSG00000186806_0 (sequence is synthesized)
atggacaacccacaggctctgccactcttcctactcctggcctccttggtagggatcctcaccctcagagcctcttctggacttcagcaaaccaacttctcctctgccttctcttcagac

SEQ ID NO: 680790 - DNA, 120 bp, Artificial Sequence
  ENSG00000186806_1 (sequence is synthesized)
tcaaagagctcttcccaggggctgggtgtggaagttccctccatcaaacctcccagctggaaagttccagatcagttcctggattcaaaagcctctgctggaatctctgattccagctgg

SEQ ID NO: 680791 - DNA, 120 bp, Artificial Sequence
  ENSG00000186806_2 (sequence is synthesized)
tttcctgaggccctgagttccaacatgtctgggtccttctggtcaaatgtttctgctgagggccaagatttgagcccggtttcccccttctctgaaacccctggttctgaagtatttcct

SEQ ID NO: 680792 - DNA, 120 bp, Artificial Sequence
  ENSG00000186806_3 (sequence is synthesized)
gatatttcggatcctcaagttcctgccaaagaccccaagccttccttcactgttaagaccccagcttcaaacatttctactcaagtctcccataccaaactgtctgttgaggccccagat

SEQ ID NO: 680793 - DNA, 120 bp, Artificial Sequence
  ENSG00000186806_4 (sequence is synthesized)
tcaaaattctccccggatgatatggatcttaaactctctgcccagagccctgaatccaaattttctgcagagacccactcagctgcaagctttccccagcaggtggggggcccactcgct

SEQ ID NO: 680794 - DNA, 120 bp, Artificial Sequence
  ENSG00000186806_5 (sequence is synthesized)
gtgctggtggggaccaccatccggctccccctagtcccaatccccaaccctgggccccccacctctctggtggtctggcgccggggctcaaaggtgctggcagctgggggcctggggcca

SEQ ID NO: 680795 - DNA, 120 bp, Artificial Sequence
  ENSG00000186806_6 (sequence is synthesized)
ggggcacctctgatcagcctggaccctgctcaccgagaccacctgcgatttgaccaggcccggggggttctggagctcgcctctgcccagctggacgatgcaggggtctacacggctgag

SEQ ID NO: 680796 - DNA, 120 bp, Artificial Sequence
  ENSG00000186806_7 (sequence is synthesized)
gtcatccgggcaggggtctcccagcagactcacgagttcacggtgggtgtgtatgagcccctaccccagctgtcggttcagcccaaggctccagagacagaggagggggcggccgagctc

SEQ ID NO: 680797 - DNA, 120 bp, Artificial Sequence
  ENSG00000186806_8 (sequence is synthesized)
cggctgcgctgcctggggtgggggccaggtcgcggggagctgagctggagccgggacggacgcgccctggaggcggcggaatcggagggagccgagacgccccggatgcgctcagagggc

SEQ ID NO: 680798 - DNA, 120 bp, Artificial Sequence
  ENSG00000186806_9 (sequence is synthesized)
gaccagctgctcatcgtgcgccctgtgcgcagcgaccacgcccggtacacttgccgcgtccgcagccccttcggccacagggaggctgccgccgacgtcagcgtcttctacggcccggac

SEQ ID NO: 680799 - DNA, 120 bp, Artificial Sequence
  ENSG00000186806_10 (sequence is synthesized)
ccgccgaccatcacggtctcctcggaccgcgacgccgcgcctgcccgctttgtcaccgcgggcagtaacgtgaccttgcgctgcgccgccgcctcgcggccgcccgccgacatcacgtgg

SEQ ID NO: 680800 - DNA, 120 bp, Artificial Sequence
  ENSG00000186806_11 (sequence is synthesized)
tgcccgcggggtcgcgcctcctgctgcccgcggtcggaccgggccacgcaggcacctacgcctgcctggcggcgaacccgcgtaccggccgccgccgccgctcgctgctcaaccttacag

SEQ ID NO: 680801 - DNA, 120 bp, Artificial Sequence
  ENSG00000186806_12 (sequence is synthesized)
cgccgccgctcgctgctcaaccttacagtggcggacctgccccccggggccccacagtgctcagttgaagggggtcccggggaccgcagcctccgcttccgctgctcgtggcccggcggg

SEQ ID NO: 680802 - DNA, 120 bp, Artificial Sequence
  ENSG00000186806_13 (sequence is synthesized)
gcccctgctgcctccctgcagttccagggtctccccgaaggcatccgcgccgggccagtgtcctctgtgctgctggcggccgtccccgcccacccccggctcagcggcgtccccatcacc

SEQ ID NO: 680803 - DNA, 120 bp, Artificial Sequence
  ENSG00000186806_14 (sequence is synthesized)
cagtcacgccggaggccccccgagaggtgctgctgcatccgctggtggcagagacacggttgggggaggcagaggtggcactggaggcctctggttgtcccccaccctcacgggcatcct

SEQ ID NO: 680804 - DNA, 120 bp, Artificial Sequence
  ENSG00000186806_15 (sequence is synthesized)
gggcccgggaagggaggcccctggctccaggaggcgggagtcgcctgcggctcagtcaagatgggcggaaactccacatcggcaacttcagcctggattgggacctgggaaattactccg

SEQ ID NO: 680805 - DNA, 120 bp, Artificial Sequence
  ENSG00000186806_16 (sequence is synthesized)
tgctgtgcagtggggcgctgggtgctggcggtgaccagatcaccctcattggaccctccatatcctcgtggaggcttcagagagccagagatgcagccgtgctgacttgggatgtggagc

SEQ ID NO: 680806 - DNA, 120 bp, Artificial Sequence
  ENSG00000186806_17 (sequence is synthesized)
gcggggccctgatcagcagttttgagatccaggcatggccagatgggcctgctctgggcaggacttccacctacagggactgggtctccctgctcatcctggggcctcaggagcggtcag

SEQ ID NO: 680807 - DNA, 120 bp, Artificial Sequence
  ENSG00000186806_18 (sequence is synthesized)
ccgtggtgccccttccacctcggaacccagggacctggacctttcggatcctgcccatcctggggggccagccagggactccatcacaaagccgggtctaccgggccggccccacgttga

SEQ ID NO: 680808 - DNA, 120 bp, Artificial Sequence
  ENSG00000186806_19 (sequence is synthesized)
gccatggggccatcgctggcatcgtcctgggctccctgctgggcctggcgctgctagccgtacttctcctcctttgcatctgctgcctgtgccgctttcgtggaaagactcctgagaaaa

SEQ ID NO: 680809 - DNA, 120 bp, Artificial Sequence
  ENSG00000186806_20 (sequence is synthesized)
agaagcatccttctaccttggtccccgtggtcaccccctcagaaaagaagatgcatagtgtgaccccagtggagatttcatggcctctggacctcaaagtccctctggaggaccacagct

SEQ ID NO: 680810 - DNA, 120 bp, Artificial Sequence
  ENSG00000186806_21 (sequence is synthesized)
caactagggcctaccaagcacagaccccagttcagttgtctctgtaggcggaggctcaaagactgttcgcgcagccacacaggtgtgatcagagccagtggtctgccctgcacagggcgt

SEQ ID NO: 680811 - DNA, 120 bp, Artificial Sequence
  ENSG00000186806_22 (sequence is synthesized)
tttgggccagaacttcctatttcactccagcagcagccagggcctgctatgactgagggttggaccctgaaagtgggactttctgtctccctctcttgctgcagaagaagagtcttcctg

SEQ ID NO: 680812 - DNA, 120 bp, Artificial Sequence
  ENSG00000186806_23 (sequence is synthesized)
tatttgtgcaagtaaggagatgtgacttcttggctgggaaactcttgctgatctaactgtgtggtttgcacaacctccaagcctctgcagcagacaggcagggcttgctgtgttgctctg

SEQ ID NO: 680813 - DNA, 120 bp, Artificial Sequence
  ENSG00000186806_24 (sequence is synthesized)
agctagagagggagcttggccatgttctctgaaaaggtccccttacattcactttgccacctgtaggccacaccccatccagctcccagcatcttcatcttaaaacagatcagatcatgt

SEQ ID NO: 680814 - DNA, 120 bp, Artificial Sequence
  ENSG00000186806_25 (sequence is synthesized)
cactcttctctttaaacgcttctacggcctgtgcatttcccttcagatattatccaaactcatcgtcgtgaccttcaaaaccttgtggtctggcctctgttggcctccctgacctcccct

SEQ ID NO: 680815 - DNA, 120 bp, Artificial Sequence
  ENSG00000186806_26 (sequence is synthesized)
cccaattctttctctgcccccggactccagtatcacagtctgtctctcagccacaatttattttgcccctagagtttgctgtgcttataacacttctttttcccatatgtcattcatttc

SEQ ID NO: 680816 - DNA, 120 bp, Artificial Sequence
  ENSG00000186806_27 (sequence is synthesized)
tcaagtctaagagtagcagttaccatcttagacgaccgttcccttacccctcccttagtcttgggttaagtcccagaatccttgaatttgccgttcctgatacataaatatgtaatttct

SEQ ID NO: 680817 - DNA, 120 bp, Artificial Sequence
  ENSG00000186806_28 (sequence is synthesized)
gatgaccaggactgacgggccggcccagcactgagagggcggacattcctgggcatggaacactcgacaaagtcgacaagcggagttaaatgacctgccccccggggccccacagtgctc

SEQ ID NO: 680818 - DNA, 120 bp, Artificial Sequence
  ENSG00000186806_29 (sequence is synthesized)
aagcagagaccacatcattaactcagcacttaacccagagcctcacacacagcaggcaatcaataaatatttgttgactgatcaaatgttttggtgccagtgaagagttgggcttgctgc

SEQ ID NO: 680819 - DNA, 120 bp, Artificial Sequence
  ENSG00000186806_30 (sequence is synthesized)
tgctgtcttcagcgtaagtcttgctttttcagctgggtttctaattgagaatttagagagtgcattggtgaggattcttttgactgcaagtaacaaaataaaatggtggcaagaactatg

SEQ ID NO: 680820 - DNA, 120 bp, Artificial Sequence
  ENSG00000186810_0 (sequence is synthesized)
acaagcaccaaagcagaggggcaggcagcacaccacccagcagccagagcaccagcccagccatggtccttgaggtgagtgaccaccaagtgctaaatgacgccgaggttgccgccctcc

SEQ ID NO: 680821 - DNA, 120 bp, Artificial Sequence
  ENSG00000186810_1 (sequence is synthesized)
tggagaacttcagctcttcctatgactatggagaaaacgagagtgactcgtgctgtacctccccgccctgcccacaggacttcagcctgaacttcgaccgggccttcctgccagccctct

SEQ ID NO: 680822 - DNA, 120 bp, Artificial Sequence
  ENSG00000186810_2 (sequence is synthesized)
acagcctcctctttctgctggggctgctgggcaacggcgcggtggcagccgtgctgctgagccggcggacagccctgagcagcaccgacaccttcctgctccacctagctgtagcagaca

SEQ ID NO: 680823 - DNA, 120 bp, Artificial Sequence
  ENSG00000186810_3 (sequence is synthesized)
cgctgctggtgctgacactgccgctctgggcagtggacgctgccgtccagtgggtctttggctctggcctctgcaaagtggcaggtgccctcttcaacatcaacttctacgcaggagccc

SEQ ID NO: 680824 - DNA, 120 bp, Artificial Sequence
  ENSG00000186810_4 (sequence is synthesized)
tcctgctggcctgcatcagctttgaccgctacctgaacatagttcatgccacccagctctaccgccgggggcccccggcccgcgtgaccctcacctgcctggctgtctgggggctctgcc

SEQ ID NO: 680825 - DNA, 120 bp, Artificial Sequence
  ENSG00000186810_5 (sequence is synthesized)
tgcttttcgccctcccagacttcatcttcctgtcggcccaccacgacgagcgcctcaacgccacccactgccaatacaacttcccacaggtgggccgcacggctctgcgggtgctgcagc

SEQ ID NO: 680826 - DNA, 120 bp, Artificial Sequence
  ENSG00000186810_6 (sequence is synthesized)
cctggccgtgctgctggtttccaggggccagcggcgcctgcgggccatgcggctggtggtggtggtcgtggtggcctttgccctctgctggaccccctatcacctggtggtgctggtgga

SEQ ID NO: 680827 - DNA, 120 bp, Artificial Sequence
  ENSG00000186810_7 (sequence is synthesized)
catcctcatggacctgggcgctttggcccgcaactgtggccgagaaagcagggtagacgtggccaagtcggtcacctcaggcctgggctacatgcactgctgcctcaacccgctgctcta

SEQ ID NO: 680828 - DNA, 120 bp, Artificial Sequence
  ENSG00000186810_8 (sequence is synthesized)
tgcctttgtaggggtcaagttccgggagcggatgtggatgctgctcttgcgcctgggctgccccaaccagagagggctccagaggcagccatcgtcttcccgccgggattcatcctggtc

SEQ ID NO: 680829 - DNA, 120 bp, Artificial Sequence
  ENSG00000186810_9 (sequence is synthesized)
tgagacctcagaggcctcctactcgggcttgtgaggccggaatccgggctcccctttcgcccacagtctgacttccccgcattccaggctcctccctccctctgccggctctggctctcc

SEQ ID NO: 680830 - DNA, 120 bp, Artificial Sequence
  ENSG00000186810_10 (sequence is synthesized)
ccaatatcctcgctcccgggactcactggcagccccagcaccaccaggtctcccgggaagccaccctcccagctctgaggactgcaccattgctgctccttagctgccaagccccatcct

SEQ ID NO: 680831 - DNA, 120 bp, Artificial Sequence
  ENSG00000186810_11 (sequence is synthesized)
gccgcccgaggtggctgcctggagccccactgcccttctcatttggaaactaaaacttcatcttccccaagtgcggggagtacaaggcatggcgtagagggtgctgccccatgaagccac

SEQ ID NO: 680832 - DNA, 120 bp, Artificial Sequence
  ENSG00000186810_12 (sequence is synthesized)
agcccaggcctccagctcagcagtgactgtggccatggtccccaagacctctatatttgctcttttatttttatgtctaaaatcctgcttaaaacttttcaataaacaagatcgtcagga

SEQ ID NO: 680833 - DNA, 120 bp, Artificial Sequence
  ENSG00000186810_13 (sequence is synthesized)
caagcaccaaagcagaggggcaggcagcacaccacccagcagccagagcaccagcccagccatggtccttgaggggtccctgggccgatgggatcacgcagaagaatgcgagagaagcag

SEQ ID NO: 680834 - DNA, 120 bp, Artificial Sequence
  ENSG00000186810_14 (sequence is synthesized)
cctttgagaagggaagtcactatcccagagcccaggctgagcggatggagttgaggaagtacggccctggaagactggcggggacagttataggaggagctgctcagagtaaatcacaga

SEQ ID NO: 680835 - DNA, 120 bp, Artificial Sequence
  ENSG00000186810_15 (sequence is synthesized)
ctaaatcagactcaatcacaaaagagttcctgccaggcctttacacagccccttcctccccgttcccgccctcacaggtgagtgaccaccaagtgctaaatgacgccgaggttgccgccc

SEQ ID NO: 680836 - DNA, 120 bp, Artificial Sequence
  ENSG00000186812_0 (sequence is synthesized)
gtacgcgcacttccggtctttgtggcttgcagctcggggtgggtggctcatttcctggccgctcctgggcttcgcggaaagaagagattactcacactccttcgcaagcacagaaccagt

SEQ ID NO: 680837 - DNA, 120 bp, Artificial Sequence
  ENSG00000186812_1 (sequence is synthesized)
tgtactgagctttttgctaagctgtttcagccaagaatggctgtggaatctggagtgatttcaaccctgatacctcaggatcctccggaacaagaactaatactagtgaaagtagaagat

SEQ ID NO: 680838 - DNA, 120 bp, Artificial Sequence
  ENSG00000186812_2 (sequence is synthesized)
aacttttcctgggatgagaaatttaagcagaatgggagtactcaatcctgccaagaattgtttcgtcagcaattcagaaaattttgctaccaggagacacctgggccccgggaggctctg

SEQ ID NO: 680839 - DNA, 120 bp, Artificial Sequence
  ENSG00000186812_3 (sequence is synthesized)
agccgactccaggaactttgctatcagtggctaatgccagagttgcacacaaaggagcagatcttagaactgctggtactggagcagttcctgagcattctgcctgaggagctgcagatc

SEQ ID NO: 680840 - DNA, 120 bp, Artificial Sequence
  ENSG00000186812_4 (sequence is synthesized)
tgggttcagcaacataatccagaaagcggcgaggaagctgtgaccctgttggaggatttagagagggagtttgatgacccagggcagcaggtcccagctagtccacagggaccagcagtg

SEQ ID NO: 680841 - DNA, 120 bp, Artificial Sequence
  ENSG00000186812_5 (sequence is synthesized)
ccatggaaggatttaacatgtctcagagcatcccaagagtcaacagacatccacctccagcccttaaagacacagctgaaatcctggaaaccatgcctttcccctaaaagtgattgtgag

SEQ ID NO: 680842 - DNA, 120 bp, Artificial Sequence
  ENSG00000186812_6 (sequence is synthesized)
aacagtgaaacagcaacaaaagagggcatctcagaagaaaaatcacagggactccctcaggaaccttcatttcgaggaattagtgagcatgaaagcaatttagtgtggaagcaaggaagt

SEQ ID NO: 680843 - DNA, 120 bp, Artificial Sequence
  ENSG00000186812_7 (sequence is synthesized)
gctacaggggagaaactaagatctccttcccaagggggcagttttagtcaagtgatcttcacaaacaaatctctaggaaagagagacctttatgatgaggctgaaagatgcttgattcta

SEQ ID NO: 680844 - DNA, 120 bp, Artificial Sequence
  ENSG00000186812_8 (sequence is synthesized)
actacagactctataatgtgtcagaaagttcctccagaagagagaccttatagatgtgatgtatgtgggcacagcttcaagcagcattcctctctaacacaacatcagagaatccatact

SEQ ID NO: 680845 - DNA, 120 bp, Artificial Sequence
  ENSG00000186812_9 (sequence is synthesized)
ggagaaaagccctataaatgtaaccagtgtgggaaggcctttagtttgaggtcctatcttattattcatcagagaattcatagtggtgagaaagcatatgaatgtagtgaatgtgggaaa

SEQ ID NO: 680846 - DNA, 120 bp, Artificial Sequence
  ENSG00000186812_10 (sequence is synthesized)
gctttcaatcagagctcagccctcattagacatcggaaaatccatactggtgagaaagcttgtaaatgtaatgagtgtggcaaagcattcagtcaaagttcatatctcattatacatcaa

SEQ ID NO: 680847 - DNA, 120 bp, Artificial Sequence
  ENSG00000186812_11 (sequence is synthesized)
agaattcacactggtgagaaaccttatgagtgtaatgaatgtgggaaaacctttagccagagctcaaaactcattagacatcagcgaattcacacaggagagagaccctatgaatgtaat

SEQ ID NO: 680848 - DNA, 120 bp, Artificial Sequence
  ENSG00000186812_12 (sequence is synthesized)
gaatgtggaaaagctttcaggcagagctcagagctgattactcatcagagaatacatagtggagagaaaccctatgaatgtagtgaatgtggaaaagctttcagtttgagctcaaacctt

SEQ ID NO: 680849 - DNA, 120 bp, Artificial Sequence
  ENSG00000186812_13 (sequence is synthesized)
atcagacatcagagaattcatagtggggaggaaccttatcagtgtaatgaatgtggcaaaactttcaaaaggagctcagcccttgttcagcatcagagaattcattctggggatgaagct

SEQ ID NO: 680850 - DNA, 120 bp, Artificial Sequence
  ENSG00000186812_14 (sequence is synthesized)
tatatatgtaatgaatgtgggaaggctttcaggcacagatcggtccttatgcgccatcaaagagtccacactataaagtaatttgtgaatactgtgaatagtgtaaatacttcagtcaga

SEQ ID NO: 680851 - DNA, 120 bp, Artificial Sequence
  ENSG00000186812_15 (sequence is synthesized)
tttttaagtttgttagtcaaaagagtttactttggagcaaaactccataaaggttataaaatactaggtcttgagtctagcttgctttgtgcagcatttcccagtgctaatgtaaagtgt

SEQ ID NO: 680852 - DNA, 120 bp, Artificial Sequence
  ENSG00000186812_16 (sequence is synthesized)
cccttgaaagcttttcctgtgactaatcagaacagaatacagaagaatcattacttccagctcttctcttattaggaatactcaggaaatacgaaaagtgggaatgtaacattgaaacct

SEQ ID NO: 680853 - DNA, 120 bp, Artificial Sequence
  ENSG00000186812_17 (sequence is synthesized)
cattttgtatgaaagtgtcatgaatatagcaacccaggctctgtcactgcatctgattgttagtgtgccaggttatggggctggtgtggactgtgtgaggcacttcgtctcaggaactaa

SEQ ID NO: 680854 - DNA, 120 bp, Artificial Sequence
  ENSG00000186812_18 (sequence is synthesized)
aaaaaaaaaaaaaactgacccaataaagaacagtgacagagcagcaggaaaggtggggaaatggcttcatcaatgatttgttgagcccagggcaggccaggaattagataggcatgagaa

SEQ ID NO: 680855 - DNA, 120 bp, Artificial Sequence
  ENSG00000186812_19 (sequence is synthesized)
gaaagaatataatttacccaaaggttattttttgagtacctactttgtcccaggaactaggaatacagtggaaaacaagactgtagtctctacagtctaatgggcaaggcagccagacag

SEQ ID NO: 680856 - DNA, 120 bp, Artificial Sequence
  ENSG00000186812_20 (sequence is synthesized)
gcagtgaaagtggaatgctcctatgtgaccttaaggagcacctgactcagccttggataaggaaatgggggaaatggcctgaaggatgaggaggagttagccaaggtggtactctaggga

SEQ ID NO: 680857 - DNA, 120 bp, Artificial Sequence
  ENSG00000186812_21 (sequence is synthesized)
ctgggtctggccagactcttaagcagtgccaatggagaagttcctgttaatagacaaaacctggagcccttgggccacagggtagtcaagagctttgtcttggtttatgtgaccccaggg

SEQ ID NO: 680858 - DNA, 120 bp, Artificial Sequence
  ENSG00000186812_22 (sequence is synthesized)
aaagggcaaatatgtggtttccttgcccaacctgtaggctatcctagaacttccatgagggtggtggtgggaatgagggtgagaaagagcccagcctatacctcaagagtctgctagagt

SEQ ID NO: 680859 - DNA, 120 bp, Artificial Sequence
  ENSG00000186812_23 (sequence is synthesized)
gttaagactctattctcctttgattctaaagacaatatcagagctgctgtcaggtttcttaaaattcccaacgctctggatcagaagctgccatatcatttgtttctggggctatacgcc

SEQ ID NO: 680860 - DNA, 120 bp, Artificial Sequence
  ENSG00000186812_24 (sequence is synthesized)
cacaattcctagtacattcccttgggctttggtgctcaaaaaatatttgtcagttgctgggtctgtgacattctttgggcacctcgcacatgttcagttttgtcttatgtcaccagtatt

SEQ ID NO: 680861 - DNA, 74 bp, Artificial Sequence
  ENSG00000186812_25 (sequence is synthesized)
acctcgcacatgttcagttttgtcttatgtcaccagtatttcacaatacgctcttgtccaggctggagtgcaat

SEQ ID NO: 680862 - DNA, 82 bp, Artificial Sequence
  ENSG00000186812_26 (sequence is synthesized)
accatcttttgcaaattttattaaagacaatgctaaaaggaagtgacaactgaaactaatggtcacagtcagtcaagacttc

SEQ ID NO: 680863 - DNA, 120 bp, Artificial Sequence
  ENSG00000186812_27 (sequence is synthesized)
gtgacaactgaaactaatggtcacagtcagtcaagacttcccttttctgaggggcctagcaggaagagaatatttagactgatgcttagtgtaagaaggaatgttgtacaggttaaccag

SEQ ID NO: 680864 - DNA, 120 bp, Artificial Sequence
  ENSG00000186812_28 (sequence is synthesized)
caacacaaagacatattcaaaagacctaataggtcagaagaataacataccacaccaaaaacaaatctgtatggaaatctagaatcatgtgcatagaaaaagaattttcatgaggataaa

SEQ ID NO: 680865 - DNA, 120 bp, Artificial Sequence
  ENSG00000186812_29 (sequence is synthesized)
aagaagcaaagagaagtaatgctcttattggggcgtgcatcagtggacatgtgctaaccagtaagaacagcaggaggcctaaatgcccatgtttagggagagaatatggaaaaaatggat

SEQ ID NO: 680866 - DNA, 120 bp, Artificial Sequence
  ENSG00000186812_30 (sequence is synthesized)
gggattatttggaaaagatgtaagagattaaaatacgtggtaagagctactcaactcttgtttttctccttttccatagataaagacctgaacaaactgaaaaggtaggacgtaaagtag

SEQ ID NO: 680867 - DNA, 120 bp, Artificial Sequence
  ENSG00000186812_31 (sequence is synthesized)
gaattgtaaaacggaaatactctttatataagaaagctctactgtatgtcagaaagcaatgtaatagatagaccaagcacagtggctcacacctataatgccagcactttgggaggccaa

SEQ ID NO: 680868 - DNA, 88 bp, Artificial Sequence
  ENSG00000186812_32 (sequence is synthesized)
tgggcagcagaatttgccagacgtggtagtgcatgcctgtagacccaagtatttgggaggctgaggtgagaggttcgcttgagccctg

SEQ ID NO: 680869 - DNA, 120 bp, Artificial Sequence
  ENSG00000186812_33 (sequence is synthesized)
ccagacgtggtagtgcatgcctgtagacccaagtatttgggaggctgaggtgagaggttcgcttgagccctggaagtcgaggcttcagtgaggcaagatcacaccactgcactccagcct

SEQ ID NO: 680870 - DNA, 120 bp, Artificial Sequence
  ENSG00000186812_34 (sequence is synthesized)
aaaaggaaaaaagtaaatgtaatagatacttgctaagggctttgtatatacttattattgttatttctcagcacgtatgtagcagatgaggaaatgaaggctaaaggtcatatatctaca

SEQ ID NO: 680871 - DNA, 120 bp, Artificial Sequence
  ENSG00000186812_35 (sequence is synthesized)
aagtggggaggtcagactttgaacccacaacctgactgtggagccacttcagtatactctctccccataagaaagttccaatagaaaaaaaatgctacttaagtagggaaatcacaaaat

SEQ ID NO: 680872 - DNA, 120 bp, Artificial Sequence
  ENSG00000186812_36 (sequence is synthesized)
aagtgccaatgaacaataaatgttcaacctcactacagttaaaatgtatattaaagcaagagttgagatgacacttttccttataaaacagacagggattcagggacattgggactctaa

SEQ ID NO: 680873 - DNA, 120 bp, Artificial Sequence
  ENSG00000186812_37 (sequence is synthesized)
tgctgctggtaagacatgaataaatacataccatctctggcaatcaataccagaagctttaagcattgccttttgactttgaaattgtacctggaaatgtatgtttcagtaaccatcatg

SEQ ID NO: 680874 - DNA, 77 bp, Artificial Sequence
  ENSG00000186812_38 (sequence is synthesized)
gaaattgtacctggaaatgtatgtttcagtaaccatcatgaatgtacacaaaatcctgaaactcttaaaactgatgt

SEQ ID NO: 680875 - DNA, 120 bp, Artificial Sequence
  ENSG00000186812_39 (sequence is synthesized)
tgggaatgtgtttctccaggaagttttcccggcgatatcatagctgctgaggctacacattcaacaatttcttgctttgccatcaacactttgccagccaccatcctgccatctaaaaat

SEQ ID NO: 680876 - DNA, 120 bp, Artificial Sequence
  ENSG00000186812_40 (sequence is synthesized)
gtgaatagaaagtatttttcctgaagaacacatcgtcaataaatcacctgcacccaaatctccatctcaggcgctacttctggcaaggcatatcatgaggctagtgaagcacctacaaga

SEQ ID NO: 680877 - DNA, 120 bp, Artificial Sequence
  ENSG00000186812_41 (sequence is synthesized)
aacttataactcaaggttgtaaaaatggcatggtgactcttacaatcatatcacagtgggcctctccaacaatttaaacctcatgacctaggtgaaagctgtgaaaggatccacattaat

SEQ ID NO: 680878 - DNA, 120 bp, Artificial Sequence
  ENSG00000186812_42 (sequence is synthesized)
tcttcagaggcagggctaagactttcaagactgaaaagagactagcataaggagacttaacaggaacccagtcaaggccattcatggccatgggaccacgcataaatggagaacgagtaa

SEQ ID NO: 680879 - DNA, 120 bp, Artificial Sequence
  ENSG00000186812_43 (sequence is synthesized)
attttgctaagtccaaggacattggagagatagagtcactattactgatatggtgactgagtcaacaacatactgccactatgaagtaataagaaaataaaaagttaaaaaatgtaacag

SEQ ID NO: 680880 - DNA, 120 bp, Artificial Sequence
  ENSG00000186812_44 (sequence is synthesized)
ggcttgcagctcggggtgggtggctcatttcctggccgctcctgggcttcgcggtgagggacgtgggcccctaggaagagggaggtggggttgggagcgcgcgccggacagtggaggagc

SEQ ID NO: 680881 - DNA, 120 bp, Artificial Sequence
  ENSG00000186812_45 (sequence is synthesized)
tccgctcctcggcctgcccatccccaggtcgcggccctttggcccgcgcggcgtctccaagcgactggggaactcagaggaggccagcactcaaactcctgctttccaaaggaaaacgca

SEQ ID NO: 680882 - DNA, 120 bp, Artificial Sequence
  ENSG00000186812_46 (sequence is synthesized)
gttccgctgaccccgtgacttcgtaaatgctgcggtttaaccaaggatataaaaatagaagggctagttagttagttagttagtgcggccggactggttaaaccttaaatttgtaggcta

SEQ ID NO: 680883 - DNA, 120 bp, Artificial Sequence
  ENSG00000186812_47 (sequence is synthesized)
aatattttaattcatctcttaacgttaaccgtagtgtgaggaatgaattttactcatctgtcctgacaaactaagggcatacattcctatcgatatctcgccatcctaaaagcaggtcaa

SEQ ID NO: 680884 - DNA, 120 bp, Artificial Sequence
  ENSG00000186812_48 (sequence is synthesized)
gtttggtctgtgtcacaacatttaatacctatttgttaccatattttgcttttgaacatttttagtcttgggatattctaagctttttcagaactgatacggatctctttgctgcttttg

SEQ ID NO: 680885 - DNA, 120 bp, Artificial Sequence
  ENSG00000186812_49 (sequence is synthesized)
atgcagaattaattgcacttgacaaacttgccacatgtgagcatcacctttattattctaaaccagaggtgctcgctttagcggctttgtattcacccctcatgaattgctgtcagccct

SEQ ID NO: 680886 - DNA, 120 bp, Artificial Sequence
  ENSG00000186812_50 (sequence is synthesized)
cctgtgtgagtttccctgttattcattcattcatttcattatgttgtaactttataaagcgtcaatacatgtctggtactgtggtaggccccaggagaggtttcaggtctaggtgggtga

SEQ ID NO: 680887 - DNA, 120 bp, Artificial Sequence
  ENSG00000186812_51 (sequence is synthesized)
tggacaaataaaaaggcagttgcaatgtagtaaattatagaatataagtaggcagtgggtactgttggagcacatctaaaggcacctaacccaatcttagaggatcaaggaacacttcct

SEQ ID NO: 680888 - DNA, 120 bp, Artificial Sequence
  ENSG00000186812_52 (sequence is synthesized)
gaaggaagaaaatctaagctaagacttgaactatgagtaagagaaagccaggtaaataggtgggaggaggagtagcccaagtaaaggccataccatcccgaaggtgtgagaatataaccc

SEQ ID NO: 680889 - DNA, 120 bp, Artificial Sequence
  ENSG00000186812_53 (sequence is synthesized)
attctgaaaattgcaggtagtttaatttgacttgaatggagaattgacaggtggtaagagaagaaccagagaggaaaataggatccaagtcatgaagacctgtatgtcatgttaatttgt

SEQ ID NO: 680890 - DNA, 120 bp, Artificial Sequence
  ENSG00000186812_54 (sequence is synthesized)
ttgtatagtttcttaagtgcagtgggatgcagttgaaggattttggacaaggagtgacatagtttgatttgcagtttagaagttagctgcaaatggagaatcatgtaaggaaggcaagag

SEQ ID NO: 680891 - DNA, 120 bp, Artificial Sequence
  ENSG00000186812_55 (sequence is synthesized)
ttacagcctggagcatgtaatggtatcataacagtcccagctagtccacagggaccagcagtgccatggaaggatttaacatgtctcagagcatcccaagagtcaacagacatccacctc

SEQ ID NO: 680892 - DNA, 120 bp, Artificial Sequence
  ENSG00000186812_56 (sequence is synthesized)
gcaggtgggaacggagaaaagtgatgtgggaaaaggaatttacagcctggagcatgtaatggtatcataacagtaggataaaaatttttatgtctctactgaaccctaacctgaagtgac

SEQ ID NO: 680893 - DNA, 70 bp, Artificial Sequence
  ENSG00000186812_57 (sequence is synthesized)
gggattacaggcatgagccaccgtgcagggccttctcttaattttttagtgtaaaatactagagagcagg

SEQ ID NO: 680894 - DNA, 120 bp, Artificial Sequence
  ENSG00000186812_58 (sequence is synthesized)
aagcatgtccagagaaaagtggcaagatatccaaacagacagaacacagatgggatcagagggagtgagaggcttagttaaaacaaggtcaggaggctgggcacggtggctcatgcctgt

SEQ ID NO: 680895 - DNA, 120 bp, Artificial Sequence
  ENSG00000186812_59 (sequence is synthesized)
aaaaaaaaaaaaaaaaaaggtcaaagtgcagtgtactcactgcattcaagtatagattgtgttttatgaggactctgtaaactaaagaaagtggattatgaataaattaaagttgggagt

SEQ ID NO: 680896 - DNA, 120 bp, Artificial Sequence
  ENSG00000186812_60 (sequence is synthesized)
aattaaagttgggagtatttcatatggacataaggaagaattttaatatagtatgtttactagggtttccacaacaaaataccacagaatgggtggtaaacaacagaaatctcttttctc

SEQ ID NO: 680897 - DNA, 120 bp, Artificial Sequence
  ENSG00000186812_61 (sequence is synthesized)
acaattctagagactagaagtccaagatcaatgtgtcagcaggtttggtttcttctctctccttggcttgcagatgatggccaccttcttttcttgttgttgttgagatagtctcactct

SEQ ID NO: 680898 - DNA, 120 bp, Artificial Sequence
  ENSG00000186814_0 (sequence is synthesized)
aacccccgaaccgccgcgagctgtccctagcagtgccttagccagggacctgcttggccagcgacagatcctttgctgctctgtctgccggttcttgaggtgaatgtcggaatccattat

SEQ ID NO: 680899 - DNA, 120 bp, Artificial Sequence
  ENSG00000186814_1 (sequence is synthesized)
ctttcgggaaagctctctggggcagggagcgtcctggggagttggaattcagaaggaatctctcagacgcaaatctccatctcctccctgcctcacctgggcagccttttcagactgtct

SEQ ID NO: 680900 - DNA, 120 bp, Artificial Sequence
  ENSG00000186814_2 (sequence is synthesized)
ctgcccagaatgtcaggagaggccacagtcttggcctaccatgctccagaagaacaggaaggacttctagttgtcaaggttgaagaagaaaattatgttttggaccaggactttggcctt

SEQ ID NO: 680901 - DNA, 120 bp, Artificial Sequence
  ENSG00000186814_3 (sequence is synthesized)
caggaaaacccctggagccaagaggtattccggcagaagttcaggcagtttagttactctgactccactggccctcgggaggctctgagccggctgcgagagctttgctgtcagtggttg

SEQ ID NO: 680902 - DNA, 120 bp, Artificial Sequence
  ENSG00000186814_4 (sequence is synthesized)
aggccggaggtgcactccaaggagcagatcctggagctgctgatgttggagcagttcctggccatccttcctgaggagctgcaagcttggctgcgagagcatcggccagagaatggagag

SEQ ID NO: 680903 - DNA, 120 bp, Artificial Sequence
  ENSG00000186814_5 (sequence is synthesized)
gaagctgtgactatgctggaggagctggaaaaagaactggaggagccaaggcaacaggacacaactcatggccaagaaatgttctggcaggaaatgacatccacaggagcactgaagtct

SEQ ID NO: 680904 - DNA, 120 bp, Artificial Sequence
  ENSG00000186814_6 (sequence is synthesized)
ctgtctctgaatagcccggtgcagcccttagagaaccagtgcaagactgagactcaggagtcccaggctttccaggagagagatggcaggatggtggctggcaaagtgttgatggcaaag

SEQ ID NO: 680905 - DNA, 120 bp, Artificial Sequence
  ENSG00000186814_7 (sequence is synthesized)
caagaaattgttgaatgtgtagcctcagcagctatgatatcgccgggaaaacttcctggagaaacacattcccaacggatagctgaagaagctttgggaggtctggacaactctaagaag

SEQ ID NO: 680906 - DNA, 120 bp, Artificial Sequence
  ENSG00000186814_8 (sequence is synthesized)
caaaagggaaatgctgcagggaacaaaatcagtcagcttccttcccaggacagacatttcagtctggcaaccttcaacagaagaatccccacagaacacagtgtccttgaatctcatgag

SEQ ID NO: 680907 - DNA, 120 bp, Artificial Sequence
  ENSG00000186814_9 (sequence is synthesized)
agtgaaggaagtttcagtatgaattcaaatgatattacacaacagagcgttgacactagggaaaagctctatgagtgctttgactgtgggaaggccttttgccagagctcaaagctgatt

SEQ ID NO: 680908 - DNA, 120 bp, Artificial Sequence
  ENSG00000186814_10 (sequence is synthesized)
agacatcagagaattcatactggagagagaccttatgcatgtaaagaatgtggcaaagccttcagtttgagctcagaccttgttagacatcagagaattcatagtggtgaaaaaccctat

SEQ ID NO: 680909 - DNA, 120 bp, Artificial Sequence
  ENSG00000186814_11 (sequence is synthesized)
gaatgttgtgaatgtggaaaagccttcaggggcagttcagagctcatcaggcatcggagaatccacactggagagaagccttatgaatgtggagaatgtgggaaggccttcagccggagc

SEQ ID NO: 680910 - DNA, 120 bp, Artificial Sequence
  ENSG00000186814_12 (sequence is synthesized)
tcagcccttattcagcataagaaaattcacactggagataaaagctatgaatgtattgcatgtggtaaggcttttggtaggagttctatccttattgaacatcaaagaattcacactgga

SEQ ID NO: 680911 - DNA, 120 bp, Artificial Sequence
  ENSG00000186814_13 (sequence is synthesized)
gagaaaccttatgaatgtaatgaatgtggaaaatccttcaatcagagctcagccctcacccagcaccagagaattcacactggagagaagccttatgaatgtagtgaatgtagaaaaaca

SEQ ID NO: 680912 - DNA, 120 bp, Artificial Sequence
  ENSG00000186814_14 (sequence is synthesized)
tttaggcataggtcaggccttatgcagcatcagagaacacacaccagagtttaactctgtgggtaagagttgtacaattgtgaaatgcaaggagttcactgtaggggtgagactccacag

SEQ ID NO: 680913 - DNA, 120 bp, Artificial Sequence
  ENSG00000186814_15 (sequence is synthesized)
aaaagaaaagtttcctgagagcagaacttctgtccttccctcccagttcggtactataagaagacatgcacacaaagatgtttgttatgattattgaagtgttaaatggaagaaaaatgt

SEQ ID NO: 680914 - DNA, 120 bp, Artificial Sequence
  ENSG00000186814_16 (sequence is synthesized)
tacccaagtcttctccaaaaagaatggtagatatttccttgaaatgcctaacccatttctggatgagactcatcaatatccccttcactccactctctgccaactcagatataatttcca

SEQ ID NO: 680915 - DNA, 120 bp, Artificial Sequence
  ENSG00000186814_17 (sequence is synthesized)
tgaaagagcttcttataagatggcaaatgtgcctggcaagagcatttgtattttgtcaggtggaggcatgtgctgagagttattcaactatctgaaatgttgaatttggaggttgtgaaa

SEQ ID NO: 680916 - DNA, 120 bp, Artificial Sequence
  ENSG00000186814_18 (sequence is synthesized)
atattgaattatgctattagtttaataatatctgaggcagtaaaatagtacctgaggaatggtgcctcattctgcccccttgccagttgtctcctcaatcctgagcttcctgctgaggtt

SEQ ID NO: 680917 - DNA, 120 bp, Artificial Sequence
  ENSG00000186814_19 (sequence is synthesized)
aattcaagtctactagtttattgagcacctgctatgtgctaggcattgaggtagacctggtcattgccctcccagagttaagggctaataggatatgcatatatactaaacagtaattac

SEQ ID NO: 680918 - DNA, 120 bp, Artificial Sequence
  ENSG00000186814_20 (sequence is synthesized)
agtaaagtgtggtaagtgctttggtaggaaaaatgcgggtttccatcaaagtacatggcagggatacctaaatctggtctatgagtcactaaagacttcctggatatgatggtatctcag

SEQ ID NO: 680919 - DNA, 120 bp, Artificial Sequence
  ENSG00000186814_21 (sequence is synthesized)
acataaaggtgggtagaaggtagcaagggcaggggagaagagaacaggatctggagacactccatgaagactcttctctactgcagaaattgtcatagacctaatttttaaaaaaatgaa

SEQ ID NO: 680920 - DNA, 120 bp, Artificial Sequence
  ENSG00000186814_22 (sequence is synthesized)
tctgaaggagtaattcaacaaatatttattgccctcaagtataatagctcagggcctgcaagcctggtaaggaggggtgtgggcagggaatggggaatagcagagcctgggaaggcagat

SEQ ID NO: 680921 - DNA, 120 bp, Artificial Sequence
  ENSG00000186814_23 (sequence is synthesized)
caccgtgttcctttatacttcccactgcctgagtcccagagtcatgggacacaaacactccagtccccactgtctctctagcctctgatatgcattctttccctgtgtatatacatgcct

SEQ ID NO: 680922 - DNA, 120 bp, Artificial Sequence
  ENSG00000186814_24 (sequence is synthesized)
tttcccataaaatgcaccagtctctcaccacactaattctgagtacttcagagtctcacaggtcattctgggtctagaataggctccccaactcagtgattataagtaggaagaggaaaa

SEQ ID NO: 680923 - DNA, 120 bp, Artificial Sequence
  ENSG00000186814_25 (sequence is synthesized)
gcaacacatggggattctgagccaggctttatgacaactaattcctgctggagagaagagtcctgatgatgggctgtctccagatcctatcttatcttcatgccattgtatgggctataa

SEQ ID NO: 680924 - DNA, 120 bp, Artificial Sequence
  ENSG00000186814_26 (sequence is synthesized)
cctctgcctgtaactctctctgctaatttttattttggcagttttaattaacccacaattgctgagggcaattaatacctaaaagaaagtttgattcctcttctaagatatcctaggtag

SEQ ID NO: 680925 - DNA, 120 bp, Artificial Sequence
  ENSG00000186814_27 (sequence is synthesized)
tgtcatttctaaagaagacttggtgatcactgcttgtattagtccattttcacagtgctatgaagatactacctgatactgggtaatttattaaaaaaaaaaaagaggtttaattgactg

SEQ ID NO: 680926 - DNA, 120 bp, Artificial Sequence
  ENSG00000186814_28 (sequence is synthesized)
gcagggctggggaggcctcaggaaacttaaatcatggtggaaggcgaaggggaagcaagcaccttcttcacaaggtggcaagagagagtgcaggggaaatgctaggcacttatcaatcag

SEQ ID NO: 680927 - DNA, 120 bp, Artificial Sequence
  ENSG00000186814_29 (sequence is synthesized)
tcaatcagccaaatctcatgagaattcactatcatgagaacaagggggaaatctgctcccatgatctaatcacctcccaccacgaccctccctcaacacctggggattactattggagat

SEQ ID NO: 680928 - DNA, 120 bp, Artificial Sequence
  ENSG00000186814_30 (sequence is synthesized)
ttgggtggggacacaagagccaaaccatatcactgctgttgtgggtaataggggaggtgaaattggggggacaattcggcctctttgtgtccagaggttgtgcagttatcgagtgaggtc

SEQ ID NO: 680929 - DNA, 120 bp, Artificial Sequence
  ENSG00000186814_31 (sequence is synthesized)
gatcagaagtctaaagggatctttcaaatggatagtgagttgccttttcctataggtgacaatcagagatttaatgttttaagtatcatataataggtttttctcctgattgtgaattgt

SEQ ID NO: 680930 - DNA, 120 bp, Artificial Sequence
  ENSG00000186814_32 (sequence is synthesized)
aagtgttggtaatacagaaaatgagaaagtataaaccacccccaatcccaatgcccatagaaacgttgttaacattttggagtactttctattagtgtttatttttcccaatcctagtat

SEQ ID NO: 680931 - DNA, 120 bp, Artificial Sequence
  ENSG00000186814_33 (sequence is synthesized)
ttttagtaaaactactgtttagtaaatgatttttggtaactaatttcaaaatttatacttcaaccgtttattattagaatgtaatgcaagatgtattgcaataaaacttgagttttaaaa

SEQ ID NO: 680932 - DNA, 120 bp, Artificial Sequence
  ENSG00000186814_34 (sequence is synthesized)
gctgcggtcctccgggctcctagaggggcactctcccacttccggcgcgcgtgcggccgggcattgttctcgctcccgggggtgggttcccgccgccgccggtagagcgaagggagcgtc

SEQ ID NO: 680933 - DNA, 120 bp, Artificial Sequence
  ENSG00000186814_35 (sequence is synthesized)
agctgtgactatgctggaggagctggaaaaagaactggaggagccaaggcaacaggtaagaaaaataccacttgacccagcaatcccattactggccattatcctcagcaaactaacaca

SEQ ID NO: 680934 - DNA, 120 bp, Artificial Sequence
  ENSG00000186814_36 (sequence is synthesized)
cacaggaacagaaaaccaaacaccacttgtgtcccttcaaaattcatatgttgaagctatggagtctggctctgtcgcccaagctagagtgcagtgcctccaaaagtgctgggattacag

SEQ ID NO: 680935 - DNA, 120 bp, Artificial Sequence
  ENSG00000186814_37 (sequence is synthesized)
attaacccccgaaccgccgcgagctgtccctagcagtgccttagccagggacctgcttggccagcgacagatcctttgctgctctgtctgccggttcttgaggtgatcctgaagctgttg

SEQ ID NO: 680936 - DNA, 120 bp, Artificial Sequence
  ENSG00000186814_38 (sequence is synthesized)
gtcctgggaccacattttgagaaccactgcccaagaaataagtgatgctcagtaattaatccctgaattaacggaaagttggatttttatctactttgcaatctagaaagggtacgaggt

SEQ ID NO: 680937 - DNA, 120 bp, Artificial Sequence
  ENSG00000186814_39 (sequence is synthesized)
gttcatggaaatatcttgggaaatgaggagttgggacctcatttctgttgagaccaatgagacgtgtgacttggtttaagctgtccggtggggaaaggaagaggtttgagaaaatggtgg

SEQ ID NO: 680938 - DNA, 120 bp, Artificial Sequence
  ENSG00000186814_40 (sequence is synthesized)
gtggctaagtggtagttgaggtggaggaagagggcttcctgtcccagcccaagtccctgttgggatatatgaaatttagggatgtatgactaagcccttaatataaccgtaagaggaaag

SEQ ID NO: 680939 - DNA, 120 bp, Artificial Sequence
  ENSG00000186814_41 (sequence is synthesized)
agggctgccgagaattaacccccgaaccgccgcgagctgtccctagcagtgccttagccagggacctgcttggccagcgacagatcctttgctgctctgtctgccggttcttgagatggc

SEQ ID NO: 680940 - DNA, 120 bp, Artificial Sequence
  ENSG00000186814_42 (sequence is synthesized)
ttccttgttcaccatccctcttctccaatactaattcatttctttgtctaccttactctccaagggggccatatttggctaccccaggccacttctctgaattctagattgggaatctag

SEQ ID NO: 680941 - DNA, 120 bp, Artificial Sequence
  ENSG00000186814_43 (sequence is synthesized)
ttttgagaactgtcctcctaataaataaatacctatttcattgagtttgtgttcctgctacaacagtttcttctgtcatgggaagtaaatgatacttacactttctattcacatttttag

SEQ ID NO: 680942 - DNA, 120 bp, Artificial Sequence
  ENSG00000186814_44 (sequence is synthesized)
cagcctccagagtagctaggactacagttgtacaccaccatgcctggctaaatatccataatattcaaagctcagtattctgttatttaattttggcttcattggcaagacagtccctaa

SEQ ID NO: 680943 - DNA, 120 bp, Artificial Sequence
  ENSG00000186814_45 (sequence is synthesized)
ttggcttcattggcaagacagtccctaagatggagatgaatacattttcagtaatagaaaccacataatcatttgaacagggaaagtttaatgttaagaattattaactactaagtgtta

SEQ ID NO: 680944 - DNA, 120 bp, Artificial Sequence
  ENSG00000186814_46 (sequence is synthesized)
taacaaaaagtgaaactcaaaagaatacagcaataacagatatagagtgtctctagggctgaggcagaacatcaaaggtaagaacaaatttgcaggagggtgccacaacttcccctttcc

SEQ ID NO: 680945 - DNA, 120 bp, Artificial Sequence
  ENSG00000186814_47 (sequence is synthesized)
tgccaggtcttagatccaggccttgttggagagggcacagccacagcccactggatggagatgccactgcagtgctgagctggcagaactcactgaggagccacactctggggtgctaga

SEQ ID NO: 680946 - DNA, 120 bp, Artificial Sequence
  ENSG00000186814_48 (sequence is synthesized)
agctccccatggggagctgacctggtacagaacttgctgggaagctacccatagggatggggcctttggaactcattgggatgtgcactgctgggtgtcccatgtgctacagaaacaaac

SEQ ID NO: 680947 - DNA, 120 bp, Artificial Sequence
  ENSG00000186814_49 (sequence is synthesized)
acaaagaacatgccagaaccaggaagaaaagccctttcttccagttcctctgcaaccccctctattgataaagctcacagcatgccagctggcaaatagtccagtatcacagacagggca

SEQ ID NO: 680948 - DNA, 120 bp, Artificial Sequence
  ENSG00000186814_50 (sequence is synthesized)
atgaagcgtagatttgaaactgaggcaataaattgatagctgtcacagatgccagggattagaactgaaaggactttgattatgttattggcaaaatcatccttatgggcagcagatata

SEQ ID NO: 680949 - DNA, 120 bp, Artificial Sequence
  ENSG00000186814_51 (sequence is synthesized)
accagcttgttctcattaatcttttgttaaatctgactacccttctgattttgtcttcaccaagcaatcttattaacttcctatgaagcttagctgtaataagaaaattgcatttgttca

SEQ ID NO: 680950 - DNA, 120 bp, Artificial Sequence
  ENSG00000186814_52 (sequence is synthesized)
gtctggtccatgtgatggttacattactcattaattctcattctgtttttattactgagtttcacgggcttagttattaagagtctaccccaagagataaatctattttttgtatgatga

SEQ ID NO: 680951 - DNA, 120 bp, Artificial Sequence
  ENSG00000186814_53 (sequence is synthesized)
taaaattaggtatatgaggacctaagcccaaaggccagaccctggacctcggcagttcaccaaaggaatccataccatccatccactgaattcttctgggaaactgcttcccaaccttcc

SEQ ID NO: 680952 - DNA, 120 bp, Artificial Sequence
  ENSG00000186814_54 (sequence is synthesized)
ccaggcatcataccctgatactaccattagccaagcaggccctcttaagtatcttctgcaccaagcaggtgctacattaaaacgggttttgaaaattcatctcaaggaaatcaagctgtc

SEQ ID NO: 680953 - DNA, 120 bp, Artificial Sequence
  ENSG00000186814_55 (sequence is synthesized)
aatcaagctgtctctatttgcagataatatgatcccatgtctagaaaaccctatcgtctcagccccaaagcttcttaagccaagaagcaactacagcaaagtctcaggatacaaaattaa

SEQ ID NO: 680954 - DNA, 120 bp, Artificial Sequence
  ENSG00000186814_56 (sequence is synthesized)
aatcataagcattcctatatacagagattcctatatctctgtgtctgtactgcacacctgaacaacaataagacaaccagagagccaaacatgattaactcccattcacaattgctacaa

SEQ ID NO: 680955 - DNA, 62 bp, Artificial Sequence
  ENSG00000186814_57 (sequence is synthesized)
cccaaagtaatttatagattcagtgattcatatggtacaaaaaaaagagcccttatagccaa

SEQ ID NO: 680956 - DNA, 71 bp, Artificial Sequence
  ENSG00000186814_58 (sequence is synthesized)
atagaccaatggaacagaatagagatctgagaaataagactgcacatctacaaccacttgatgataaatgg

SEQ ID NO: 680957 - DNA, 63 bp, Artificial Sequence
  ENSG00000186814_59 (sequence is synthesized)
cctttacaccttgtacaaaaataaactcaacatggactaaagacttaaatgtaaaacccaaaa

SEQ ID NO: 680958 - DNA, 86 bp, Artificial Sequence
  ENSG00000186814_60 (sequence is synthesized)
tcctttacaccttgtacaaaaataaactcaacatggactccctagtaaaaaaatctaggtaataccattcaggacataggcatggg

SEQ ID NO: 680959 - DNA, 120 bp, Artificial Sequence
  ENSG00000186814_61 (sequence is synthesized)
gcaattgcaatagaagcaaaaattgacaaatgggacgtaattaaagagcttttgcacagcaaaagaacctattataagagtgaacagacaatgtacagaatgggagaaaatttttgcaat

SEQ ID NO: 680960 - DNA, 120 bp, Artificial Sequence
  ENSG00000186814_62 (sequence is synthesized)
aacccccgaaccgccgcgagctgtccctagcagtgccttagccagggacctgcttggccagcgacagatcctttgctgctctgtctgccggttcttgagcgcgtcaaccgcttgtactct

SEQ ID NO: 680961 - DNA, 120 bp, Artificial Sequence
  ENSG00000186814_63 (sequence is synthesized)
gcttgtgtatcctcagaatgatagtgctggtacttgattactcctaggacacaactcatggccaagaaatgttctggcaggaaatgacatccacaggagcactgaagtctctgtctctga

SEQ ID NO: 680962 - DNA, 120 bp, Artificial Sequence
  ENSG00000186814_64 (sequence is synthesized)
gcaggacccgtccccgccccagcccttccgcagctcctaggactgtcgtcttcgcagtcagcacgtccgcgcagcgcgtcaaccgcttgtactctgcgatgcccccgccaggtctgagcc

SEQ ID NO: 680963 - DNA, 120 bp, Artificial Sequence
  ENSG00000186814_65 (sequence is synthesized)
gtcccaggctttccaggagagaggtgagaagccccagtccatgtggggttgaggatggaggtgagagctatcaactgtggcacggttcattttcttaacgacagccacttgtggctatca

SEQ ID NO: 680964 - DNA, 120 bp, Artificial Sequence
  ENSG00000186814_66 (sequence is synthesized)
ctaagtattgtggaaaggcttctttgcctagaaatattcttccttaggctctgcctagaatctgaaattccagtatcatttgtaactttgggttaagaattaaagtctttagtaaaattc

SEQ ID NO: 680965 - DNA, 120 bp, Artificial Sequence
  ENSG00000186815_0 (sequence is synthesized)
gagaggacggtaggcggtggataggagagctggcgcagctgccctggtggcagtggctgaagtggcggcggcttcggcggctgcggcggctgcaacagcttcgggctcggggttttggcg

SEQ ID NO: 680966 - DNA, 120 bp, Artificial Sequence
  ENSG00000186815_1 (sequence is synthesized)
gcggcgccggcgggctaggctgcgcggtgcggaccccggcgcgcggtccgggttgctggggcggcgcgtaagatgcctctaatggaggagtttctgagcagcacccctggcccagtggct

SEQ ID NO: 680967 - DNA, 120 bp, Artificial Sequence
  ENSG00000186815_2 (sequence is synthesized)
ttgaaagggagctcaaaccagagactatttcaagccctggatatcatatcctgagggccacaggagaagagaacatggctgtgagtttggatgacgacgtgccgctcatcctgaccttgg

SEQ ID NO: 680968 - DNA, 120 bp, Artificial Sequence
  ENSG00000186815_3 (sequence is synthesized)
atgagggtggcagtgccccactggctccctccaacggcctgggccaagaagagctacctagcaaaaatggcggcagctatgccatccacgactcccaggcccccagtctcagctctgggg

SEQ ID NO: 680969 - DNA, 120 bp, Artificial Sequence
  ENSG00000186815_4 (sequence is synthesized)
gtgagagttccccctccagccccgcacacaactgggagatgaattaccaagaggcagcaatctacctccaggaaggcgagaacaacgacaagttcttcacccaccccaaggatgccaagg

SEQ ID NO: 680970 - DNA, 120 bp, Artificial Sequence
  ENSG00000186815_5 (sequence is synthesized)
cgctggcggcctacctctttgcacacaatcacctcttctacctgatggagctggccacggccctgctgctgctgctgctctccctgtgcgaggcccccgccgtccccgcactccggcttg

SEQ ID NO: 680971 - DNA, 120 bp, Artificial Sequence
  ENSG00000186815_6 (sequence is synthesized)
gcatctatgtccacgccaccctggagctgtttgccctgatggtggtagtgtttgaactctgcatgaagttacgctggctgggcctccacaccttcatccggcacaagcggaccatggtca

SEQ ID NO: 680972 - DNA, 120 bp, Artificial Sequence
  ENSG00000186815_7 (sequence is synthesized)
agacctcggtgctggtggtgcagtttgtcgaggccatcgtggtgttggtacggcagatgtcccatgtgcgggtgacccgagcactgcgctgcattttcctggtggactgtcggtattgcg

SEQ ID NO: 680973 - DNA, 120 bp, Artificial Sequence
  ENSG00000186815_8 (sequence is synthesized)
gtggcgtccggcgcaacctgcggcagatcttccagtccctgccgcccttcatggacatcctcctgctgctgctgttcttcatgatcatctttgccatcctcggtttctacttgttctccc

SEQ ID NO: 680974 - DNA, 120 bp, Artificial Sequence
  ENSG00000186815_9 (sequence is synthesized)
ctaacccttcagacccctacttcagcaccctggagaacagcatcgtcagtctgtttgtccttctgaccacagccaatttcccagatgtgatgatgccctcctactcccggaacccctggt

SEQ ID NO: 680975 - DNA, 120 bp, Artificial Sequence
  ENSG00000186815_10 (sequence is synthesized)
cctgcgtcttcttcatcgtgtacctctccatcgagctgtatttcatcatgaacctgcttctggctgtggtgttcgacaccttcaatgacattgagaaacgcaagttcaagtctttgctac

SEQ ID NO: 680976 - DNA, 120 bp, Artificial Sequence
  ENSG00000186815_11 (sequence is synthesized)
tgcacaagcgaaccgctatccagcatgcctaccgcctgctcatcagccagaggaggcctgccggcatctcctacaggcagtttgaaggcctcatgcgcttctacaagccccggatgagtg

SEQ ID NO: 680977 - DNA, 120 bp, Artificial Sequence
  ENSG00000186815_12 (sequence is synthesized)
ccagggagcgctatcttaccttcaaggccctgaatcagaacaacacacccctgctcagcctaaaggacttttacgatatctacgaagttgctgctttgaagtggaaggccaagaaaaaca

SEQ ID NO: 680978 - DNA, 120 bp, Artificial Sequence
  ENSG00000186815_13 (sequence is synthesized)
gagagcactggtttgatgagcttcccaggacggcgctcctcatcttcaaaggtattaatatccttgtgaagtccaaggccttccagtatttcatgtacttggtggtggcagtcaacgggg

SEQ ID NO: 680979 - DNA, 120 bp, Artificial Sequence
  ENSG00000186815_14 (sequence is synthesized)
tctggatcctcgtggagacatttatgctgaaaggtgggaacttcttctccaagcacgtgccctggagttacctcgtctttctaactatctatggggtggagctgttcctgaaggttgccg

SEQ ID NO: 680980 - DNA, 120 bp, Artificial Sequence
  ENSG00000186815_15 (sequence is synthesized)
gcctgggccctgtggagtacttgtcttccggatggaacttgtttgacttctccgtgacagtgttcgccttcctgggactgctggcgctggccctcaacatggagcccttctatttcatcg

SEQ ID NO: 680981 - DNA, 120 bp, Artificial Sequence
  ENSG00000186815_16 (sequence is synthesized)
tggtcctgcgccccctccagctgctgaggttgtttaagttgaaggagcgctaccgcaacgtgctggacaccatgttcgagctgctgccccggatggccagcctgggcctcaccctgctca

SEQ ID NO: 680982 - DNA, 120 bp, Artificial Sequence
  ENSG00000186815_17 (sequence is synthesized)
tcttttactactccttcgccatcgtgggcatggagttcttctgcgggatcgtcttccccaactgctgcaacacgagtacagtggcagatgcctaccgctggcgcaaccacaccgtgggca

SEQ ID NO: 680983 - DNA, 120 bp, Artificial Sequence
  ENSG00000186815_18 (sequence is synthesized)
acaggaccgtggtggaggaaggctactattatctcaataattttgacaacatcctcaacagctttgtgaccctgtttgagctcacagttgtcaacaactggtacatcatcatggaaggcg

SEQ ID NO: 680984 - DNA, 120 bp, Artificial Sequence
  ENSG00000186815_19 (sequence is synthesized)
tcacctctcagacctcccactggagccgcctctacttcatgaccttttacattgtgaccatggtggtgatgacgatcattgtcgcctttatcctcgaggccttcgtcttccgaatgaact

SEQ ID NO: 680985 - DNA, 120 bp, Artificial Sequence
  ENSG00000186815_20 (sequence is synthesized)
acagccgcaagaaccaggactcggaagttgatggtggcatcacccttgagaaggaaatctccaaagaagagctggttgccgtcctggagctctaccgggaggcacggggggcctcctcgg

SEQ ID NO: 680986 - DNA, 120 bp, Artificial Sequence
  ENSG00000186815_21 (sequence is synthesized)
aggaggagatccaggagtggtatgaggagcatgccagggagcaagagcagcagcgacaactcagcagcagtgcagcccccgccgcccagcagcccccaggcagccgccagcgctcccaga

SEQ ID NO: 680987 - DNA, 120 bp, Artificial Sequence
  ENSG00000186815_22 (sequence is synthesized)
ccgttacctagcccagcgcccgaaagccgtctcttctatgcaataacacaatagtattactctactgcgatgtacggaactgcggtgtgtgtacacatactcacgtatatgcacatattt

SEQ ID NO: 680988 - DNA, 120 bp, Artificial Sequence
  ENSG00000186815_23 (sequence is synthesized)
atatacaggaagaaaaaagacagacaagatggggcttggtttataaccaccttgccctgtcttccttaactccagaagccagtttggtgaggggtgggggtgcggccaccaggtctgagc

SEQ ID NO: 680989 - DNA, 120 bp, Artificial Sequence
  ENSG00000186815_24 (sequence is synthesized)
tcttcctactgtggaaggctccagaaggcccttcacaaggagacccctcacctggatccagtcgactgcggggcttgcccctcatgtgggctggcctccatcggccacgtccaaagctgt

SEQ ID NO: 680990 - DNA, 120 bp, Artificial Sequence
  ENSG00000186815_25 (sequence is synthesized)
cactgctactgcttcaggctcacatccccccgacctgatggcgtgcccgccccctctccctgcggcccatgccacaggtttctgtgttttgctttagggacagaaccacttaggaaggaa

SEQ ID NO: 680991 - DNA, 120 bp, Artificial Sequence
  ENSG00000186815_26 (sequence is synthesized)
agaactcccggtctccagggtggtatttcagtgtctgtgataatgtcacgcaacacctcttcggggaccagtgcccaggatctaatggaagcggaattggggcaactgggcccatgtggc

SEQ ID NO: 680992 - DNA, 120 bp, Artificial Sequence
  ENSG00000186815_27 (sequence is synthesized)
cagagctcagttagccagtgccgggcggccacagattacactgaccaatctcctcccttggctctgcaagcctcccacccagccttctctggcttaacccttgttggcgaaaactcttcc

SEQ ID NO: 680993 - DNA, 120 bp, Artificial Sequence
  ENSG00000186815_28 (sequence is synthesized)
acagtggcctccttggggacccagaacccggaggaaggggcatgaggcaggaagtggggccgatgtctgcaacccagaccacttcgtggaatgggctcttgaccaaatccctttttttgc

SEQ ID NO: 680994 - DNA, 120 bp, Artificial Sequence
  ENSG00000186815_29 (sequence is synthesized)
gatttacccgttcaagcaaaacaacgttttggttaactaaggattgtgctaaagccgataccaggtccttcacacgtgtgcactaggaacaggagcgaacagcacagagagacgctccct

SEQ ID NO: 680995 - DNA, 120 bp, Artificial Sequence
  ENSG00000186815_30 (sequence is synthesized)
gtgggacgcagcagccccgtggccccggcccagttcccagccaccctccctggctctgctcacaccagagatttccatagcaggagcggttggtgcagaagtaggttcagatgaacctca

SEQ ID NO: 680996 - DNA, 120 bp, Artificial Sequence
  ENSG00000186815_31 (sequence is synthesized)
gttaacgtcgccacccctcctcccaccatggtaccctgtaggagccctgtatgacatctgagcgtggtggaggtaggagggttgccagctgcagtgaccctgccacagaggcagggtcag

SEQ ID NO: 680997 - DNA, 120 bp, Artificial Sequence
  ENSG00000186815_32 (sequence is synthesized)
tgcagaggtcgctttggttccgcttccctgggccacagaacggaacacagcataggttctgcagcaggagccgcagtggcaggatggagggtgcgaagggcaaggagtgcactgctgggc

SEQ ID NO: 680998 - DNA, 120 bp, Artificial Sequence
  ENSG00000186815_33 (sequence is synthesized)
attcctggccagccccggccctctggtgcctgcttcctgtgacttcagaaggcaggtggacagagcctccctctggccttgtcctcttcccagccacagaacgggcagggtggcacccga

SEQ ID NO: 680999 - DNA, 120 bp, Artificial Sequence
  ENSG00000186815_34 (sequence is synthesized)
ccccaggggagcagtacctggtcccccaccccctcctcccaaccacctccaaggccaagctgggtcccatagccagcacggcatggttctccccttccccccttcccaggtcaggggagt

SEQ ID NO: 681000 - DNA, 120 bp, Artificial Sequence
  ENSG00000186815_35 (sequence is synthesized)
tggacaagtagcaggtgtttgtttttaaagcacagccctttgggaaagcaacacattattgagactcactgtgattcccccgggagtcagactggctttgtcctcttcctctctggaggg

SEQ ID NO: 681001 - DNA, 120 bp, Artificial Sequence
  ENSG00000186815_36 (sequence is synthesized)
ccatgggccatcagcaggagctccacatcgagccccaggccagaaccccctccctttcacagagagggaactttattgcacaattgggtgccttttagcttttgtgtgttgaaatgggcg

SEQ ID NO: 681002 - DNA, 120 bp, Artificial Sequence
  ENSG00000186815_37 (sequence is synthesized)
ttttggaagcaagggtcaggggacagcttctaaaggtgtgagtctctgacctgagcatctgggcctcgcctgggcccttcttcctccccaggggtggaaacgtggaggggccagcagcac

SEQ ID NO: 681003 - DNA, 120 bp, Artificial Sequence
  ENSG00000186815_38 (sequence is synthesized)
cccggggtctgcccaggggagtcaaggccccgaggtgggggggcctattccaggaggagtgggatctcggccctgtccagagcgagttaatgtgtccatctgcccaaccctgtcctgaga

SEQ ID NO: 681004 - DNA, 120 bp, Artificial Sequence
  ENSG00000186815_39 (sequence is synthesized)
aaggacctggttttggccaggacctgacaaatacccaatggcagcagtgtcaacagacgggagtccagccagggtgggtgcccttgtcattgaggttagggacagctatccccaggttat

SEQ ID NO: 681005 - DNA, 120 bp, Artificial Sequence
  ENSG00000186815_40 (sequence is synthesized)
gcctggccccacccagcagggagttggggtccccccacaggctgtgagctctgtgggccctgggatgtgatctagctcagatgccctctcatccttgatgtcatagttgagtgcacccaa

SEQ ID NO: 681006 - DNA, 120 bp, Artificial Sequence
  ENSG00000186815_41 (sequence is synthesized)
gtggcacccactggcggccaggggcacagcctggtggtggtggcaatagaactgtgcccctcctcagctcctcgcttcccctcccacagccccagccttactccaccatgcggacaatca

SEQ ID NO: 681007 - DNA, 120 bp, Artificial Sequence
  ENSG00000186815_42 (sequence is synthesized)
ttttgtacggatcacgggagcaatgctgtacggttttgtacactggtggtttgtttcctagaaaacccattgtgtctctggatttctagcacattactaaaagagcctctgctttgtaaa

SEQ ID NO: 681008 - DNA, 120 bp, Artificial Sequence
  ENSG00000186815_43 (sequence is synthesized)
ggaagtgacccagaatgagccagaaggttcacaagccagagtcacagatgtcaccccctggagaatcaccatggggtcaacatccccacccctgagggtgtgcaggctgcctgtgccctt

SEQ ID NO: 681009 - DNA, 120 bp, Artificial Sequence
  ENSG00000186815_44 (sequence is synthesized)
cccctcactgcaccaggtgcctctgggcagagaaacccagcccatgactcatgtgcaccccacctgaggtggcattgcaccagcgacaggagcccatatgctcaagtcacagatcacaga

SEQ ID NO: 681010 - DNA, 120 bp, Artificial Sequence
  ENSG00000186815_45 (sequence is synthesized)
tgtttcagacttctgtcctctctggaggtgactgatcgccttgtgaccctccctcctttctcccttgtgctccggccagcacgagtacagtggcagatgcctaccgctggcgcaaccaca

SEQ ID NO: 681011 - DNA, 120 bp, Artificial Sequence
  ENSG00000186815_46 (sequence is synthesized)
acagaacgctctttgtccttcgtcttccacatcaccagctgcccctgctcttcagcctgcagcgtcagggagtggggctgggtcccatctggccggactctgttgggcgtgggctgcgca

SEQ ID NO: 681012 - DNA, 120 bp, Artificial Sequence
  ENSG00000186815_47 (sequence is synthesized)
gccacggacacctacccaccctcctcccctgcctctgcccctccctccctatccctggccaggtggtgatgacgatcattgtcgcctttatcctcgaggccttcgtcttccgaatgaact

SEQ ID NO: 681013 - DNA, 120 bp, Artificial Sequence
  ENSG00000186815_48 (sequence is synthesized)
aacgagtaaggcggggaacaagggaggagtaaggggcgtggattcttcgtcccgccccttcttaaggaggcgggcagggagtaccgcatcggcggcgggcgagacctgcggaaggacgtg

SEQ ID NO: 681014 - DNA, 120 bp, Artificial Sequence
  ENSG00000186815_49 (sequence is synthesized)
tgccccactggctccctccaacggcctgggccaagaagagctacctagcaaaagacgctgctgcatgctgtgctccagcaaacagaaaccttggattccctgcagggtcatttccgatgt

SEQ ID NO: 681015 - DNA, 120 bp, Artificial Sequence
  ENSG00000186815_50 (sequence is synthesized)
ggcgtgcaaagcagccagctgtttcgagggagcgtctgggccctgtgacatcagcatgtgggagtgttaccgtgtgtgcaaacagatggcggcagctatgccatccacgactcccaggcc

SEQ ID NO: 681016 - DNA, 120 bp, Artificial Sequence
  ENSG00000186815_51 (sequence is synthesized)
gttgctaggttacccgccaatctcagaaggcgagactcggtgtctgactgacctttcttttcaccattcaatttattgttccgctcagttgtccccacctcctgaagtctgaccaatcag

SEQ ID NO: 681017 - DNA, 120 bp, Artificial Sequence
  ENSG00000186815_52 (sequence is synthesized)
aagcaccgccattttgacctttcaccaatggaaagacttgggactccctctgggttggactcaacgaatggcggcagctatgccatccacgactcccaggcccccagtctcagctctggg

SEQ ID NO: 681018 - DNA, 120 bp, Artificial Sequence
  ENSG00000186815_53 (sequence is synthesized)
ctttcggcgtagcatctcatgctagatttttatctgggggcctttgaagagccagccggcacagaagcatggtggcaacgctgtgcctggaaaactcatcagtgtcactctggtttattt

SEQ ID NO: 681019 - DNA, 120 bp, Artificial Sequence
  ENSG00000186815_54 (sequence is synthesized)
tcctctcctctttgagctctttcccatggtgtggggctctcagtgacaactggcaagcggcggggcggttgctcgttgtcattctggtaggcgctggtttccggagggctccgagtgctt

SEQ ID NO: 681020 - DNA, 120 bp, Artificial Sequence
  ENSG00000186815_55 (sequence is synthesized)
tgctgccccggatggccaggtactgccagcccccaccctggcctgcaggtccaggtgccgtgtggcagtgccccgtgggggcgggagccgagtggcagtcgggggaaaggagttccacaa

SEQ ID NO: 681021 - DNA, 120 bp, Artificial Sequence
  ENSG00000186815_56 (sequence is synthesized)
aggactgcaatcgagggcctgacggggctccaaggagcctggaatcttgaccaccacaggtctcctgggcaccatttttctccactgacctgtctgacatatttagtagggagggcaggg

SEQ ID NO: 681022 - DNA, 120 bp, Artificial Sequence
  ENSG00000186815_57 (sequence is synthesized)
agctgtcaactcgcttaccacctgtgtctacattcacaggtaaggggtcacctgtgagtctaccttcacaggtaaggggtgaatctctgggaaaggggcatttgttcatagcgtcctgac

SEQ ID NO: 681023 - DNA, 120 bp, Artificial Sequence
  ENSG00000186815_58 (sequence is synthesized)
ttgagctgtttttcaccccagagctgccccacgaggccccttccccgcaggcactttccagttggtgaaccgaccaggggcatggccctgcagtcagccccacgggtccgaggaggccgg

SEQ ID NO: 681024 - DNA, 120 bp, Artificial Sequence
  ENSG00000186815_59 (sequence is synthesized)
gaaagacttgggactccctctgggttggactcaacgaagatggagtcttgctacattgcccaggctggtcttgaactgctaggctcaagcagttctcccaccttgacctcccaaagcgct

SEQ ID NO: 681025 - DNA, 120 bp, Artificial Sequence
  ENSG00000186815_60 (sequence is synthesized)
gccaaacggtgtctttttgctcttaagcctgggtgccaagtgaatctctctcctcttccaatgcagatggcggcagctatgccatccacgactcccaggcccccagtctcagctctgggg

SEQ ID NO: 681026 - DNA, 120 bp, Artificial Sequence
  ENSG00000186815_61 (sequence is synthesized)
ccctttcctcctttggcttaagcctttggcaggacagattttgggctggaggccagcaattcaactgggagggctctgtgccagttcttgcctttctgaagatggcggcagctatgccat

SEQ ID NO: 681027 - DNA, 120 bp, Artificial Sequence
  ENSG00000186815_62 (sequence is synthesized)
tgtaagtgtgaaatatctccactctaggccactttccccctgagtcctttgctgttctagaagcgggagaggcaagagattggtcctagagtcctgtgtttgactttttattgtggggaa

SEQ ID NO: 681028 - DNA, 120 bp, Artificial Sequence
  ENSG00000186815_63 (sequence is synthesized)
cccagctctgtctgtctgtctgggtggctgtccagccagccatcaggctgtcatttttctgctgtctggctgtccagcttatctatctggcttgtctttctagatcttgtatttgcattg

SEQ ID NO: 681029 - DNA, 120 bp, Artificial Sequence
  ENSG00000186815_64 (sequence is synthesized)
attttcaaatatttaatgtcagaaaacgtaatctaactttaaaataagacagagcatgtcatagttggagaaaaatcaagaagtagagaaaggcttatgtggcagcagcagcccctgccc

SEQ ID NO: 681030 - DNA, 120 bp, Artificial Sequence
  ENSG00000186815_65 (sequence is synthesized)
tgcctttccctcccgtcctccagaggcttctccttcttggctatttcttctgttagtcatctccacgtttctcaataataggttcacactacggttcttgatttaaatggtgtaaatatt

SEQ ID NO: 681031 - DNA, 120 bp, Artificial Sequence
  ENSG00000186815_66 (sequence is synthesized)
gcttatggcacaggcgaatcgtattcctgctgcaactggatggtgctggctttagtgactgcctcactcttcccagattgcacagctttctgtgtgctgaccctcccttcttcccaaatt

SEQ ID NO: 681032 - DNA, 71 bp, Artificial Sequence
  ENSG00000186815_67 (sequence is synthesized)
aggtcggagtgagaccctgtctcttaaaagaaacagaaaaccctgtgcccacacttgttacctctcatcct

SEQ ID NO: 681033 - DNA, 120 bp, Artificial Sequence
  ENSG00000186815_68 (sequence is synthesized)
aacagaaaaccctgtgcccacacttgttacctctcatcctcagatctctgtgctatcagaccatctgaccattttctctgtgcttagaggccccttcctgaaaccctctggccctgtaac

SEQ ID NO: 681034 - DNA, 120 bp, Artificial Sequence
  ENSG00000186815_69 (sequence is synthesized)
agctgccagctagacctgcgctcctgacatcacagcagagggaggggaagggaaaggagggccaacgaggagagcaggacaccaatgcagtgtcggtttagagagagaaccttaagaccc

SEQ ID NO: 681035 - DNA, 120 bp, Artificial Sequence
  ENSG00000186815_70 (sequence is synthesized)
acatttgcccagggctctgcttgggtttggagcctttactaacgtgtgtcaataatgcgggtccaccttccataccatcttgcaaccaattatcagaaagagaaggcctgagcaggggga

SEQ ID NO: 681036 - DNA, 120 bp, Artificial Sequence
  ENSG00000186815_71 (sequence is synthesized)
gtagcctccaacccctgggctcaagtgatcctccccactcagcctacccaagcagctggaactacaggagtggtatgaggagcatgccagggagcaagagcagcagcgacaactcagcag

SEQ ID NO: 681037 - DNA, 120 bp, Artificial Sequence
  ENSG00000186818_0 (sequence is synthesized)
ggcctgtgggaggcagaatagtgacctcccagagatgtccacctcctgaggcccagaccctcccagggagacccattttggacttgtgacctccgggacgagaacctggtgcctgcctca

SEQ ID NO: 681038 - DNA, 120 bp, Artificial Sequence
  ENSG00000186818_1 (sequence is synthesized)
gccctagctctggggaaatgaaagccaggctggggttcaaatgagggcagtttcccttcctgtgggctgctgatggaacaaccccatgacgagaaggacccagcctccaagcggccacac

SEQ ID NO: 681039 - DNA, 120 bp, Artificial Sequence
  ENSG00000186818_2 (sequence is synthesized)
cctgtgtgtctctttgtcctgccggcactgaggactcatccatctgcacagctggggcccctgggaggagacgccatgatccccaccttcacggctctgctctgcctcgggctgagtctg

SEQ ID NO: 681040 - DNA, 120 bp, Artificial Sequence
  ENSG00000186818_3 (sequence is synthesized)
ggccccaggacccacatgcaggcagggcccctccccaaacccaccctctgggctgagccaggctctgtgatcagctgggggaactctgtgaccatctggtgtcaggggaccctggaggct

SEQ ID NO: 681041 - DNA, 120 bp, Artificial Sequence
  ENSG00000186818_4 (sequence is synthesized)
cgggagtaccgtctggataaagaggaaagcccagcaccctgggacagacagaacccactggagcccaagaacaaggccagattctccatcccatccatgacagaggactatgcagggaga

SEQ ID NO: 681042 - DNA, 120 bp, Artificial Sequence
  ENSG00000186818_5 (sequence is synthesized)
taccgctgttactatcgcagccctgtaggctggtcacagcccagtgaccccctggagctggtgatgacaggagcctacagtaaacccaccctttcagccctgccgagtcctcttgtgacc

SEQ ID NO: 681043 - DNA, 120 bp, Artificial Sequence
  ENSG00000186818_6 (sequence is synthesized)
tcaggaaagagcgtgaccctgctgtgtcagtcacggagcccaatggacacttttcttctgatcaaggagcgggcagcccatcccctactgcatctgagatcagagcacggagctcagcag

SEQ ID NO: 681044 - DNA, 120 bp, Artificial Sequence
  ENSG00000186818_7 (sequence is synthesized)
caccaggctgaattccccatgagtcctgtgacctcagtgcacggggggacctacaggtgcttcagctcacacggcttctcccactacctgctgtcacaccccagtgaccccctggagctc

SEQ ID NO: 681045 - DNA, 120 bp, Artificial Sequence
  ENSG00000186818_8 (sequence is synthesized)
atagtctcaggatccttggagggtcccaggccctcacccacaaggtccgtctcaacagctgcaggccctgaggaccagcccctcatgcctacagggtcagtcccccacagtggtctgaga

SEQ ID NO: 681046 - DNA, 120 bp, Artificial Sequence
  ENSG00000186818_9 (sequence is synthesized)
aggcactgggaggtactgatcggggtcttggtggtctccatcctgcttctctccctcctcctcttcctcctcctccaacactggcgtcagggaaaacacaggacattggcccagagacag

SEQ ID NO: 681047 - DNA, 120 bp, Artificial Sequence
  ENSG00000186818_10 (sequence is synthesized)
gctgatttccaacgtcctccaggggctgccgagccagagcccaaggacgggggcctacagaggaggtccagcccagctgctgacgtccagggagaaaacttctgtgctgccgtgaagaac

SEQ ID NO: 681048 - DNA, 120 bp, Artificial Sequence
  ENSG00000186818_11 (sequence is synthesized)
acacagcctgaggacggggtggaaatggacactcggcagagcccacacgatgaagacccccaggcagtgacgtatgccaaggtgaaacactccagacctaggagagaaatggcctctcct

SEQ ID NO: 681049 - DNA, 120 bp, Artificial Sequence
  ENSG00000186818_12 (sequence is synthesized)
ccctccccactgtctggggaattcctggacacaaaggacagacaggcagaagaggacagacagatggacactgaggctgctgcatctgaagccccccaggatgtgacctacgcccggctg

SEQ ID NO: 681050 - DNA, 120 bp, Artificial Sequence
  ENSG00000186818_13 (sequence is synthesized)
cacagctttaccctcagacagaaggcaactgagcctcctccatcccaggaaggggcctctccagctgagcccagtgtctatgccactctggccatccactaatccaggggggacccagac

SEQ ID NO: 681051 - DNA, 120 bp, Artificial Sequence
  ENSG00000186818_14 (sequence is synthesized)
cccacaagccatggagactcaggaccccagaaggcatggaagctgcctccagtagacatcactgaaccccagccagcccagacccctgacacagaccactagaagattccgggaacgttg

SEQ ID NO: 681052 - DNA, 120 bp, Artificial Sequence
  ENSG00000186818_15 (sequence is synthesized)
ggagtcacctgattctgcaaagataaataatatccctgcattatcaaaataaagtagcagacctctcaattcacaatgagttaactgataaaacaaaacagaagtcagacaatgttttaa

SEQ ID NO: 681053 - DNA, 120 bp, Artificial Sequence
  ENSG00000186818_16 (sequence is synthesized)
gggaaaatgggagcttctaatgaggacaaacaaaaaatagagaaaaattaataaagtcaaaatgtttattcttgaaaacattaatgatacatgaatcttggccacaatgagaaaaataaa

SEQ ID NO: 681054 - DNA, 120 bp, Artificial Sequence
  ENSG00000186818_17 (sequence is synthesized)
aatgaaaaaagagcaggcatccatttccatacaggaacaaaataggaggcagcactacagaccctacacacagctttacagaggtgaaagaaaactgtcagcaattctatgctgacataa

SEQ ID NO: 681055 - DNA, 120 bp, Artificial Sequence
  ENSG00000186818_18 (sequence is synthesized)
cagaaaatgtagatgagatagatgaaatacgaaaaattacagtttacttaatgaacataaggataaatagaaaaactgaatcatcatacataaacatatataaaatgcattgatcctgta

SEQ ID NO: 681056 - DNA, 120 bp, Artificial Sequence
  ENSG00000186818_19 (sequence is synthesized)
atcaaaaatgttcccacaaagtaaatgccacttcagcaaggtttgttggtggttttttcaaactcttatgcactcatgaaacacacagacacacacacacacaaacttgcataaattttc

SEQ ID NO: 681057 - DNA, 120 bp, Artificial Sequence
  ENSG00000186818_20 (sequence is synthesized)
cctgagaatattttgtatatatttacacaaatacatttgatcagactaggaacaagttgataccaaaacctgaaaaggaaactacagaatgggaaagtcatagaagatctctcacagaaa

SEQ ID NO: 681058 - DNA, 120 bp, Artificial Sequence
  ENSG00000186818_21 (sequence is synthesized)
tataaatcccttaacaaatattaacaagtaagattcatgtctctataaaatagacagtatatcatgaccacactggttttttgttatcctttgattttgtttatgaaaagcaaggatagc

SEQ ID NO: 681059 - DNA, 120 bp, Artificial Sequence
  ENSG00000186818_22 (sequence is synthesized)
ttaattttcaaaaactcaatcaatgtaattcagtattttaacaaaaggaatgaaaaattatcatctcaatagacaaagcttttgtctgagcaccttttcatatagctgctgaccatttgt

SEQ ID NO: 681060 - DNA, 120 bp, Artificial Sequence
  ENSG00000186818_23 (sequence is synthesized)
atgtcttcttttgagaaatgcctgttcagctactttgcccatgtttcaagtagtttttggtttcttgctgttgctttgttttagttccttacatatttttgcatattaaccctttatcag

SEQ ID NO: 681061 - DNA, 120 bp, Artificial Sequence
  ENSG00000186818_24 (sequence is synthesized)
gtatacagcttgcaactattttctcccatttctgagttgtctcttcattctgtttgcagaagctgtttagaagccacaccttttgtctatttttgcttttgttgcttgtgttttcagggc

SEQ ID NO: 681062 - DNA, 120 bp, Artificial Sequence
  ENSG00000186818_25 (sequence is synthesized)
catatccaaaaaaaccttgcccggaccaacgtcttgaagcttttctcccacccatttttgtatatgggataagggttcaatttcattcttcttcatatgaatatccccaggatgtgtcct

SEQ ID NO: 681063 - DNA, 120 bp, Artificial Sequence
  ENSG00000186818_26 (sequence is synthesized)
atgcccagctgcacagcttaccctcaaacagaaaataatgaagccttcttcctcccaggaaaggggacgttcagctgagccgagtgtgtatactgctctggccatccactagcccaggga

SEQ ID NO: 681064 - DNA, 120 bp, Artificial Sequence
  ENSG00000186818_27 (sequence is synthesized)
ggacccagacctccacactccatggagactcagttctcctaggaccatttattcaaaaggactgccctctcttgttcttggaaactttgttgaggatcaattcaccataaatatgtgtgt

SEQ ID NO: 681065 - DNA, 120 bp, Artificial Sequence
  ENSG00000186818_28 (sequence is synthesized)
ttccttctttgctttcatccctgttgcactgatcactgtacctgtttctattccagttccatgatgtcttcctggctgtagctttgtaggatatttggggattccatagtgtgatatccc

SEQ ID NO: 681066 - DNA, 120 bp, Artificial Sequence
  ENSG00000186818_29 (sequence is synthesized)
cttcttccctttgctcaagattgttttggctatttggggtccttttgtagtcccattcaaattttaggattgtttttctatttctgtggaaaacgaccttggaattttgttaggaattgc

SEQ ID NO: 681067 - DNA, 120 bp, Artificial Sequence
  ENSG00000186818_30 (sequence is synthesized)
gttaggaattgcattgagtctgcaggtatgaacttttttttaaagttccagggcacatgtacaggacctgcagctttgttacataggtaggcttgtgccatggtggtttgctgcacctat

SEQ ID NO: 681068 - DNA, 120 bp, Artificial Sequence
  ENSG00000186818_31 (sequence is synthesized)
gcacctatcaacccattacctagttattaagcccagcatgcattagctctttttcctgatgctctccctcccttcatcatccgccctcccactacaagccccagtgtgtgttgttcccct

SEQ ID NO: 681069 - DNA, 120 bp, Artificial Sequence
  ENSG00000186818_32 (sequence is synthesized)
attgttatacgaacattttaacaatgttaattcttgcagaccatgaacataagctaccttcccatttatatgcgtcttgttcaatttcattcatcaatgttataaagattttagtgcaga

SEQ ID NO: 681070 - DNA, 120 bp, Artificial Sequence
  ENSG00000186818_33 (sequence is synthesized)
gcgtctctgctgatctgagcctgtcctgcagcatggacctgcaactttcctgaagcatctccagggctggatgccatgatattgagacccagagacctgattctcagccagctggtctta

SEQ ID NO: 681071 - DNA, 120 bp, Artificial Sequence
  ENSG00000186818_34 (sequence is synthesized)
gccaacaacctggttcttttctctaaacgaatcccccagacaatggcagcttttggaatgaaatccttcctggacgaggctggatgaaacttgtcttctatctatacacagagtggccag

SEQ ID NO: 681072 - DNA, 120 bp, Artificial Sequence
  ENSG00000186818_35 (sequence is synthesized)
aggggtttccctcagcaccgcctgtctccccagtggcttccaggccatgaagcttcaacctcagtatctctaggaggatggaactccgaattaggtccacaaagtgcattgttttctgct

SEQ ID NO: 681073 - DNA, 120 bp, Artificial Sequence
  ENSG00000186818_36 (sequence is synthesized)
gccccctctgctggatcttgcaaattgtggcatatacccatattgcaatgcatgtaactggcccaatgaagagcaaaaacgtgagtatggaataaatgtataggtactctcctcacccat

SEQ ID NO: 681074 - DNA, 120 bp, Artificial Sequence
  ENSG00000186818_37 (sequence is synthesized)
tctaggatgattgctattcttagcaaatgcagtcattttctcccttgtggatggtatgtctttggccctcatggactacaccagcagctccatgatcctcttcttatatagacacaagca

SEQ ID NO: 681075 - DNA, 120 bp, Artificial Sequence
  ENSG00000186818_38 (sequence is synthesized)
gacagtccaatgcattcgcagccacggcctctccccctgaaaatctcatgaaactagagccacacacaccatcctcgtcctggtgagcatgtttgtctcctctcatggtctagctggtat

SEQ ID NO: 681076 - DNA, 120 bp, Artificial Sequence
  ENSG00000186818_39 (sequence is synthesized)
ttcagcccctttgggttcattgtcagtgatgcccgcgtctcacagttctgcactgtctgctggacaaggaagacaaatgctccaagtgtggtctctgggctctaagttccctctagacaa

SEQ ID NO: 681077 - DNA, 120 bp, Artificial Sequence
  ENSG00000186818_40 (sequence is synthesized)
ttgcgtcctttatttaatcacttctccccacaatatctgttggatcatacattatgccagttaatacgcaaggactttgggactcagtattgaataaaaatgataataaccatagcctca

SEQ ID NO: 681078 - DNA, 120 bp, Artificial Sequence
  ENSG00000186818_41 (sequence is synthesized)
tattgcttcttaggctctcaaaaaatgaacgcagtgtaaaaattacccagatgtatgtcagttcctcagaagattaaacacagaattaccatatgacccggcaatttctgggaaaattaa

SEQ ID NO: 681079 - DNA, 120 bp, Artificial Sequence
  ENSG00000186818_42 (sequence is synthesized)
agcaaggatttaaaaggatgctcatatactcatgttcataacagcgttattcacattaacaaaaaagtagaaaaaacccaaagatggataaatggataaacaaatgttatagaaactagg

SEQ ID NO: 681080 - DNA, 120 bp, Artificial Sequence
  ENSG00000186818_43 (sequence is synthesized)
aaatactgttcagtctctcaaagaaatgaaattgtgactgacatacactataatatggagagccttgaagatattatgctaagtgaaataagccagtctcataaaggacaaatattgcaa

SEQ ID NO: 681081 - DNA, 120 bp, Artificial Sequence
  ENSG00000186818_44 (sequence is synthesized)
atattgctaagattctatctatatgagctacctgtcaaactcacagactcaggaagtagaatcacggttaacagaggcttgggggcctggaaactgagagttggtgtttactgaatataa

SEQ ID NO: 681082 - DNA, 120 bp, Artificial Sequence
  ENSG00000186818_45 (sequence is synthesized)
agcttcaattggaaagataaaatactttggggatggtgatggcgatggttgcatagcaatgtcaaaccacttcacaatactgcactgtagagttagaaagagtaaatatggtaaatttta

SEQ ID NO: 681083 - DNA, 120 bp, Artificial Sequence
  ENSG00000186818_46 (sequence is synthesized)
aaacttctcaggtgctgccgtgaagaacacacagcctgaggacggggtggaaatggacactcgggtgagaacccgcccctgtccccggcaccaaaggcctcctggtgccagatctaatcc

SEQ ID NO: 681084 - DNA, 120 bp, Artificial Sequence
  ENSG00000186818_47 (sequence is synthesized)
gctgtcctgggacctcatgggcctcctcccgggtccccttcctgctcctcatcctctgtttggccatctggttgttagagagctccccaggcctcaggaggatgacgaataaatgaacca

SEQ ID NO: 681085 - DNA, 120 bp, Artificial Sequence
  ENSG00000186818_48 (sequence is synthesized)
ctccagtcccctgggctccccttcattcattcatctagtgagtgttcccagggagctcactgtggatggggctccccatgggagctgcagacacagcagggagcaaagccgcccccgcct

SEQ ID NO: 681086 - DNA, 120 bp, Artificial Sequence
  ENSG00000186818_49 (sequence is synthesized)
cctgagctcacctcgtggtgggagacaaaatgcaaataaatgcatcgtgtccaggagtgcaacgtgctgtaaggaacataaaccaggtaaagggcagagagtgtggggcagtggggccag

SEQ ID NO: 681087 - DNA, 120 bp, Artificial Sequence
  ENSG00000186818_50 (sequence is synthesized)
tctgaatggaaagggagggctgtctgctcagctgtcatctgagaagcctggacggagagggccacgtgatcctctaatggacgagcccctgcaggcagaggaaacagccgtgcaaaggcc

SEQ ID NO: 681088 - DNA, 120 bp, Artificial Sequence
  ENSG00000186827_0 (sequence is synthesized)
agactctggcgacagcagagacgaggatgtgcgtgggggctcggcggctgggccgcgggccgtgtgcggctctgctcctcctgggcctggggctgagcaccgtgacggggctccactgtg

SEQ ID NO: 681089 - DNA, 120 bp, Artificial Sequence
  ENSG00000186827_1 (sequence is synthesized)
tcggggacacctaccccagcaacgaccggtgctgccacgagtgcaggccaggcaacgggatggtgagccgctgcagccgctcccagaacacggtgtgccgtccgtgcgggccgggcttct

SEQ ID NO: 681090 - DNA, 120 bp, Artificial Sequence
  ENSG00000186827_2 (sequence is synthesized)
acaacgacgtggtcagctccaagccgtgcaagccctgcacgtggtgtaacctcagaagtgggagtgagcggaagcagctgtgcacggccacacaggacacagtctgccgctgccgggcgg

SEQ ID NO: 681091 - DNA, 120 bp, Artificial Sequence
  ENSG00000186827_3 (sequence is synthesized)
gcacccagcccctggacagctacaagcctggagttgactgtgccccctgccctccagggcacttctccccaggcgacaaccaggcctgcaagccctggaccaactgcaccttggctggga

SEQ ID NO: 681092 - DNA, 120 bp, Artificial Sequence
  ENSG00000186827_4 (sequence is synthesized)
gcccactgaagcctggcccagaacctcacagggaccctccacccggcccgtggaggtccccgggggccgtgcggttgccgccatcctgggcctgggcctggtgctggggctgctgggccc

SEQ ID NO: 681093 - DNA, 120 bp, Artificial Sequence
  ENSG00000186827_5 (sequence is synthesized)
cctggccatcctgctggccctgtacctgctccggagggaccagaggctgccccccgatgcccacaagccccctgggggaggcagtttccggacccccatccaagaggagcaggccgacgc

SEQ ID NO: 681094 - DNA, 120 bp, Artificial Sequence
  ENSG00000186827_6 (sequence is synthesized)
ccactccaccctggccaagatctgacctgggcccaccaaggtggacgctgggccccgccaggctggagcccggagggtctgctgggcgagcagggcaggtgcaggccgcctgccccgcca

SEQ ID NO: 681095 - DNA, 120 bp, Artificial Sequence
  ENSG00000186827_7 (sequence is synthesized)
cgctcctgggccaactctgcaccgttctaggtgccgatggctgcctccggctctctgcttacgtatgccatgcatacctcctgccccgcgggaccacaataaaaaccttggcagacggga

SEQ ID NO: 681096 - DNA, 120 bp, Artificial Sequence
  ENSG00000186827_8 (sequence is synthesized)
gctccaagccgtgcaagccctgcacgtggtgtaacctcagtgagctcccacctggccccacagccccacccagcacagggggcggcagcctggcacccacattcccacgcagcagcatgg

SEQ ID NO: 681097 - DNA, 120 bp, Artificial Sequence
  ENSG00000186827_9 (sequence is synthesized)
ggctcccacagccgcagaaacgaacctcaaaccacagcggggtctgctccgccacaggggtccttcgaggagctgaggcgtctcccaggggcaccccctctccctccgggggcccagact

SEQ ID NO: 681098 - DNA, 120 bp, Artificial Sequence
  ENSG00000186827_10 (sequence is synthesized)
cggcccaggccacgtggagtcggggagaccacgctggccatgtggcctggccttgctggcctgagcagtgaggctggggggttgggccatggagaccctgccgcaggcggggctggcggc

SEQ ID NO: 681099 - DNA, 120 bp, Artificial Sequence
  ENSG00000186827_11 (sequence is synthesized)
tggaggcggtggaggggtagggaagggtggctggggctgccacggaaccagccccaggttgtggccaggaagggagggcccaggagcctcgggggctgcaggggctccaagtctcagggg

SEQ ID NO: 681100 - DNA, 120 bp, Artificial Sequence
  ENSG00000186827_12 (sequence is synthesized)
aggccgcagacccctgcccacggccctctgtgtggtggggaggccaacctgtcctccagtgcccacgcttcctgaggaccctgtccacagcccccacctgaccacccccccatccggccc

SEQ ID NO: 681101 - DNA, 120 bp, Artificial Sequence
  ENSG00000186827_13 (sequence is synthesized)
gtgcctcatggccctgccgcactgctcctggcgggtgaggcccacccaccaatctctccttttttcctccccagggggaggcagtttccggacccccatccaagaggagcaggccgacgc

SEQ ID NO: 681102 - DNA, 120 bp, Artificial Sequence
  ENSG00000186827_14 (sequence is synthesized)
cccaggggcaccccctctccctccgggggcccagactcggcccaggccacgtggagtcggggagaccacgctggccatgtggcctggccttgctggcctgagcagaagtgggagtgagcg

SEQ ID NO: 681103 - DNA, 120 bp, Artificial Sequence
  ENSG00000186832_0 (sequence is synthesized)
acagcacgctctcagccttcctgagcacctttccttctttcagccaactgctcactcgctcacctccctccttggcaccatgaccacctgcagccgccagttcacctcctccagctccat

SEQ ID NO: 681104 - DNA, 120 bp, Artificial Sequence
  ENSG00000186832_1 (sequence is synthesized)
gaagggctcctgcggcatcggaggcggcatcgggggcggctccagccgcatctcctccgtcctggccggagggtcctgccgtgcccccagcacctacgggggcggcctgtctgtctcctc

SEQ ID NO: 681105 - DNA, 120 bp, Artificial Sequence
  ENSG00000186832_2 (sequence is synthesized)
tcgcttctcctctgggggagcctgcgggctggggggcggctatggcggtggcttcagcagcagcagcagctttggtagtggcttcgggggaggatatggtggtggccttggtgctggctt

SEQ ID NO: 681106 - DNA, 120 bp, Artificial Sequence
  ENSG00000186832_3 (sequence is synthesized)
cggtggtggcttgggtgctggctttggtggtggttttgctggtggtgatgggcttctggtgggcagtgagaaggtgaccatgcagaacctcaatgaccgcctggcctcctacctggacaa

SEQ ID NO: 681107 - DNA, 120 bp, Artificial Sequence
  ENSG00000186832_4 (sequence is synthesized)
ggtgcgtgctctggaggaggccaacgccgacctggaagtgaagatccgtgactggtaccagaggcagcggcccagtgagatcaaagactacagtccctacttcaagaccatcgaggacct

SEQ ID NO: 681108 - DNA, 120 bp, Artificial Sequence
  ENSG00000186832_5 (sequence is synthesized)
gaggaacaagatcattgcggccaccattgagaatgcgcagcccattttgcagattgacaatgccaggctggcagccgatgacttcaggaccaagtatgagcatgaactggccctgcggca

SEQ ID NO: 681109 - DNA, 120 bp, Artificial Sequence
  ENSG00000186832_6 (sequence is synthesized)
agctggcctacctgaggaagaaccacgaggaggagatgcttgctctgagaggtcagaccggcggagatgtgaacgtggagatggatgctgcacctggcgtggacctgagccgcatcctga

SEQ ID NO: 681110 - DNA, 120 bp, Artificial Sequence
  ENSG00000186832_7 (sequence is synthesized)
atgagatgcgtgaccagtacgagcagatggcagagaaaaaccgcagagacgctgagacctggttcctgagcaagaccgaggagctgaacaaagaagtggcctccaacagcgaactggtac

SEQ ID NO: 681111 - DNA, 120 bp, Artificial Sequence
  ENSG00000186832_8 (sequence is synthesized)
agagcagccgcagtgaggtgacggagctccggagggtgctccagggcctggagattgagctgcagtcccagctcagcatgaaagcatccctggagaacagcctggaggagaccaaaggcc

SEQ ID NO: 681112 - DNA, 120 bp, Artificial Sequence
  ENSG00000186832_9 (sequence is synthesized)
gctactgcatgcagctgtcccagatccagggactgattggcagtgtggaggagcagctggcccagctacgctgtgagatggagcagcagagccaggagtaccagatcttgctggatgtga

SEQ ID NO: 681113 - DNA, 120 bp, Artificial Sequence
  ENSG00000186832_10 (sequence is synthesized)
agacgcggctggagcaggagattgccacctaccgccgcctgctggagggcgaggatgcccacctttcctcccagcaagcatctggccaatcctattcttcccgcgaggtcttcacctcct

SEQ ID NO: 681114 - DNA, 120 bp, Artificial Sequence
  ENSG00000186832_11 (sequence is synthesized)
cctcgtcctcttcgagccgtcagacccggcccatcctcaaggagcagagctcatccagcttcagccagggccagagctcctagaactgagctgcctctaccacagcctcctgcccaccag

SEQ ID NO: 681115 - DNA, 120 bp, Artificial Sequence
  ENSG00000186832_12 (sequence is synthesized)
ctggcctcacctcctgaaggcccgggtcaggaccctgctctcctggcgcagttcccagctatctcccctgctcctctgctggtggtgggctaataaagctgactttctggttgatgcaaa

SEQ ID NO: 681116 - DNA, 120 bp, Artificial Sequence
  ENSG00000186832_13 (sequence is synthesized)
acttttccttcctcctgccctgaagcctgtggctctggcttgtccacccgaggctgggggccctgcagcagccccctctctcccctcagcttctctgcccccctccttagcccccaagct

SEQ ID NO: 681117 - DNA, 120 bp, Artificial Sequence
  ENSG00000186832_14 (sequence is synthesized)
gcctcctgccttcccagtctgagttggctggggagcttgtaaaacagccccaccagcaggcttgtcctgagcggtgctgatgcgggagttggagcagggctgcaaatcttcatggggact

SEQ ID NO: 681118 - DNA, 120 bp, Artificial Sequence
  ENSG00000186832_15 (sequence is synthesized)
aggctggggctacagtggcccttgggatacctctttttagcaattacactttacaaacagggagactgggcacctttggggagtggccaggatcacccagggaagtggtagcagagggtc

SEQ ID NO: 681119 - DNA, 120 bp, Artificial Sequence
  ENSG00000186832_16 (sequence is synthesized)
ccttttcagtatctctgtgcccggactggggctgttaccctaaatctcttatttccttcaagggttcagctgcaagttcagcttccctgccttgggcccaggaagggggtgatcgggatg

SEQ ID NO: 681120 - DNA, 120 bp, Artificial Sequence
  ENSG00000186832_17 (sequence is synthesized)
gagtgcatccctacgtagcctgagctggtggagaaggcatgccagccctgccagccagaagacttccagatttggggcggttccttttgcccctttctgcctttcatgctcaagtagtaa

SEQ ID NO: 681121 - DNA, 120 bp, Artificial Sequence
  ENSG00000186834_0 (sequence is synthesized)
gcaggttgggagggaaagtcgggggaggacgcggaagaggagctgtgggaagggggaggagggagggaggaaaagaggaggaggcggaggagaactgagcagagcagagcatcgagccaa

SEQ ID NO: 681122 - DNA, 120 bp, Artificial Sequence
  ENSG00000186834_1 (sequence is synthesized)
aggggagatgagtttgtctgtcctctgctgaggctacggccgggcctagggaactgggagcttgggtggaagcgacacccgtggaagtgggaggaggtggcgccgggactttaacccctt

SEQ ID NO: 681123 - DNA, 120 bp, Artificial Sequence
  ENSG00000186834_2 (sequence is synthesized)
gtgggctctgcggcaggggatttaaccctttgtggatctggcccctcggaggcagcgtcatcggtagttttaaccccttcggggctgggtttcacgcactggacttaccctcatcacctt

SEQ ID NO: 681124 - DNA, 120 bp, Artificial Sequence
  ENSG00000186834_3 (sequence is synthesized)
gctcaccaactcctttattggggtgctccgcttggaggtttgaggcccacctccgcccattacgtactgttcctgccgctgcacccccttggacccgctagctggccgcactgtgggcgc

SEQ ID NO: 681125 - DNA, 120 bp, Artificial Sequence
  ENSG00000186834_4 (sequence is synthesized)
ttaaccctttactgacttgagctccccagattgcagttggagtttgctgatagaaggactagctaaaggcgtcactgcaggaattacaaactgaagaggactctgttggactgttttttt

SEQ ID NO: 681126 - DNA, 120 bp, Artificial Sequence
  ENSG00000186834_5 (sequence is synthesized)
tttctttttcttttttttaagaaaaacccatttttttccttaaggacttactagccaaaatttcttaaacttcgaggactctactagccatggccgagccattcttgtcagaatatcaac

SEQ ID NO: 681127 - DNA, 120 bp, Artificial Sequence
  ENSG00000186834_6 (sequence is synthesized)
accagcctcaaactagcaactgtacaggtgctgctgctgtccaggaagagctgaaccctgagcgccccccaggcgcggaggagcgggtgcccgaggaggacagtaggtggcaatcgagag

SEQ ID NO: 681128 - DNA, 120 bp, Artificial Sequence
  ENSG00000186834_7 (sequence is synthesized)
cgttcccccagttgggtggccgtccggggccggagggggaagggagcctggaatcccaaccacctcccttgcagacccaggcctgtccagaatctagctgcctgagagagggcgagaagg

SEQ ID NO: 681129 - DNA, 120 bp, Artificial Sequence
  ENSG00000186834_8 (sequence is synthesized)
gccagaatggggacgactcgtccgctggcggcgacttcccgccgccggcagaagtggaaccgacgcccgaggccgagctgctcgcccagccttgtcatgactccgaggccagtaagttgg

SEQ ID NO: 681130 - DNA, 120 bp, Artificial Sequence
  ENSG00000186834_9 (sequence is synthesized)
gggctcctgccgcagggggcgaagaggagtggggacagcagcagagacagctggggaagaaaaaacataggagacgcccgtccaagaagaagcggcattggaaaccgtactacaagctga

SEQ ID NO: 681131 - DNA, 120 bp, Artificial Sequence
  ENSG00000186834_10 (sequence is synthesized)
cctgggaagagaagaaaaagttcgacgagaaacagagccttcgagcttcaaggatccgagccgagatgttcgccaagggccagccggtcgcgccctataacaccacgcagttcctcatgg

SEQ ID NO: 681132 - DNA, 120 bp, Artificial Sequence
  ENSG00000186834_11 (sequence is synthesized)
atgatcacgaccaggaggagccggatctcaaaaccggcctgtactccaagcgggccgccgccaaatccgacgacaccagcgatgacgacttcatggaagaagggggtgaggaggatgggg

SEQ ID NO: 681133 - DNA, 120 bp, Artificial Sequence
  ENSG00000186834_12 (sequence is synthesized)
gcagcgatgggatgggaggggacggcagcgagtttctgcagcgggacttctcggagacgtacgagcggtaccacacggagagcctgcagaacatgagcaagcaggagctcatcaaggagt

SEQ ID NO: 681134 - DNA, 120 bp, Artificial Sequence
  ENSG00000186834_13 (sequence is synthesized)
acctggaactggagaagtgcctctcgcgcatggaggacgagaacaaccggctgcggctggagagcaagcggctgggtggcgacgacgcgcgtgtgcgggagctggagctggagctggacc

SEQ ID NO: 681135 - DNA, 120 bp, Artificial Sequence
  ENSG00000186834_14 (sequence is synthesized)
ggctgcgcgccgagaacctccagctgctgaccgagaacgaactgcaccggcagcaggagcgagcgccgctttccaagtttggagactagactgaaacttttttgggggagggggcaaagg

SEQ ID NO: 681136 - DNA, 120 bp, Artificial Sequence
  ENSG00000186834_15 (sequence is synthesized)
ggactttttacagtgatggaatgtaacattatatacatgtgtatataagacagtggacctttttatgacacataatcagaagagaaatccccctggctttggtttcgtaaatttagctat

SEQ ID NO: 681137 - DNA, 120 bp, Artificial Sequence
  ENSG00000186834_16 (sequence is synthesized)
atgtagcttgcgtgctttctcctgttcttttaattatgtgaaactgaagagttgcttttcttgttttcctttttagaagtttttttccttaatgtgaaagtaatttgaccaagttataat

SEQ ID NO: 681138 - DNA, 120 bp, Artificial Sequence
  ENSG00000186834_17 (sequence is synthesized)
gcatttttgtttttaacaaatcccctccttaaacggagctataaggtggccaaatctgagaacaattaaattcattttagttataataaatttaatatttgtaaatgtaacatagtttca

SEQ ID NO: 681139 - DNA, 120 bp, Artificial Sequence
  ENSG00000186834_18 (sequence is synthesized)
gtgtgatttctagagctaattcaaaatagtattgatatattttatgtgactgcatttttggggaggggtaccgaaatcgttaaatttgtcagtttgcaaaaatatcaatctttaatggga

SEQ ID NO: 681140 - DNA, 120 bp, Artificial Sequence
  ENSG00000186834_19 (sequence is synthesized)
gaattttcaatttgccaattttttccttgaatgggtttaagtatgctacaatatacagttcaggcaaaatttaagatgtaattatcttcaatacttaagtgtgcttgctttctagtgcct

SEQ ID NO: 681141 - DNA, 120 bp, Artificial Sequence
  ENSG00000186834_20 (sequence is synthesized)
tggttttctttcttgatgctggaaaaataaacaaaccggtattgagtgtttaggcgagtggaaagtggctacaatccaaaattttaaatttaactctgcctcggccattcaaaagtctaa

SEQ ID NO: 681142 - DNA, 120 bp, Artificial Sequence
  ENSG00000186834_21 (sequence is synthesized)
taacaaaaaatgtaaacctaatttggcagtttgttaggttagacaactgacagcctcatttcattcctacaagttggttttcagtaatctcttccttccccccagtaaggctggaagagg

SEQ ID NO: 681143 - DNA, 120 bp, Artificial Sequence
  ENSG00000186834_22 (sequence is synthesized)
ctcttggcaaacttcttagtgcaagcaatggttagattaatttgtgaggcagctctttaagacgttcagaggtaagaaatactggatttataaagcaaatggctgtttgggggattccaa

SEQ ID NO: 681144 - DNA, 120 bp, Artificial Sequence
  ENSG00000186834_23 (sequence is synthesized)
ggatttacctaattgtccaattctacgtgctctctataccaaaacaaaaaaaaaaagctatccacctttccatgtgggtcaaactaaaattagaaatgtcccctcactgcagatcaaatg

SEQ ID NO: 681145 - DNA, 120 bp, Artificial Sequence
  ENSG00000186834_24 (sequence is synthesized)
taaagcttccagttaaggagctaaatgaggtcctcagctgaatgaggaaccctgtacatccccttgcacagccctattctaaatcgcttaaactatgctgatagctgcttaggttcttga

SEQ ID NO: 681146 - DNA, 120 bp, Artificial Sequence
  ENSG00000186834_25 (sequence is synthesized)
gtagttctgctcttaaacgtagggaggccctgagaactaaattttgccccaaaataaaaacagaaattatgagattgcctcctgtcattttggttaacccagtccttcacctgccctgtg

SEQ ID NO: 681147 - DNA, 120 bp, Artificial Sequence
  ENSG00000186834_26 (sequence is synthesized)
tcagtgtcttctgagggcaattgcgttgctcaaatcactagcacagaggttccttaatttggggccttagaaaccattgtgggccttggggtccatgaaccccatgaaattatttgtaga

SEQ ID NO: 681148 - DNA, 120 bp, Artificial Sequence
  ENSG00000186834_27 (sequence is synthesized)
cttgtatgtacatttttctggggagaaggttcaagagattcataagattgtcaaactccttgaaggttcagaacctctgcagggaagggggaagaaaaccctcccattaggaagcatgct

SEQ ID NO: 681149 - DNA, 120 bp, Artificial Sequence
  ENSG00000186834_28 (sequence is synthesized)
tttgcagttaaatggcgatggtggaggtgatagggacttcaagagtaaaatgcaccttgtattgcataagaagcatacacaaatcaataaatcaagggagattataccagtaggactgaa

SEQ ID NO: 681150 - DNA, 120 bp, Artificial Sequence
  ENSG00000186834_29 (sequence is synthesized)
tcagggccttcaaagctggactgagttggtcctgttctggcacatatggtccactggagacaatgtatgattgagtttttctttggtctaaaaattatattaaacatttattttgaaata

SEQ ID NO: 681151 - DNA, 120 bp, Artificial Sequence
  ENSG00000186838_0 (sequence is synthesized)
cgccgcgtctcagaacccggtgcgggagacgctctccccgcccaaagagggaaggcgggcgggactccccaaccggcttgccccggtccccctgggccccatgaataaccaggcgcggac

SEQ ID NO: 681152 - DNA, 120 bp, Artificial Sequence
  ENSG00000186838_1 (sequence is synthesized)
cccagccccctcctcggcgcggacttcaacctcagtccgggcttctaccccgacccggacaccgactccactccggaccccgactccggtccggactcggacccccatccggaccctgac

SEQ ID NO: 681153 - DNA, 120 bp, Artificial Sequence
  ENSG00000186838_2 (sequence is synthesized)
tccagtcctgactccgtctccagccgggacttcccctctggtcctgactcctgctccagcccagattcccactctggtccccactcccgctctggcccggatcccccgtctggttccgcc

SEQ ID NO: 681154 - DNA, 120 bp, Artificial Sequence
  ENSG00000186838_3 (sequence is synthesized)
tcctgctccggcctggatccctactccggtgccgactcccgttcccgtccggaacccaactccggtcccgactccggctcggaccctgactcctccagtccgggtcccagccccagcccc

SEQ ID NO: 681155 - DNA, 120 bp, Artificial Sequence
  ENSG00000186838_4 (sequence is synthesized)
agcccagctcctggcagggattcgggccgcgctccccgtcttggactcctacctggccccggccctacctttggatccgcccccggaacctgctccggagctgcctttgttgcccgagga

SEQ ID NO: 681156 - DNA, 120 bp, Artificial Sequence
  ENSG00000186838_5 (sequence is synthesized)
cccgaggaggaccctgagccggcgccgagcctgaagctcatcccgtcggtctccagcgaggccgggcccgccccggggccccttcccacgcgcaccccgctggccgcgaactcacccggg

SEQ ID NO: 681157 - DNA, 120 bp, Artificial Sequence
  ENSG00000186838_6 (sequence is synthesized)
ggacttcaccttcagggcagacccgtcggccatcgggctggcggatccccccattcccagtcctgtcccctcgcccatcctggggaccatcccgtcggccatctccttacagaattgtac

SEQ ID NO: 681158 - DNA, 120 bp, Artificial Sequence
  ENSG00000186838_7 (sequence is synthesized)
gaacttcgcgctggacaagagggtcctgattcgagtgacctactgtggcctctgaagctatagccttcggtacattctactgaaaaagagcctggagcagcaatttccgaatcacctact

SEQ ID NO: 681159 - DNA, 120 bp, Artificial Sequence
  ENSG00000186838_8 (sequence is synthesized)
ctttgaggaggacagagctgcccaggctacaggggagtttgaggtgtttgtgaacgggagactggtccattccaagaagaggggtgatggctttgtgaacgagtccaggctgcagaaaat

SEQ ID NO: 681160 - DNA, 120 bp, Artificial Sequence
  ENSG00000186838_9 (sequence is synthesized)
tgtgagcgttatcgatgaggaaatcaagaaaaggtagccggcaaggggtggagctggaggagtctcagctggatgatgagaagggctgaaatgttgccaagtcaggtccttttctgatgg

SEQ ID NO: 681161 - DNA, 120 bp, Artificial Sequence
  ENSG00000186838_10 (sequence is synthesized)
tggctggggctggggtgagctcagggaggggaagaggagaatacatgcagagtcagcacccctgtgtccagtctgactgtgtctgctgtcgccacactcacctctgaggtctgtggaagt

SEQ ID NO: 681162 - DNA, 120 bp, Artificial Sequence
  ENSG00000186838_11 (sequence is synthesized)
cacctgatattctggccccaggggtgggagggaggggagcttggaaggctagtcctgtagctccagtcctctgtctggcctccactcctcttgctcctgagggcagtttgtttcttttgt

SEQ ID NO: 681163 - DNA, 120 bp, Artificial Sequence
  ENSG00000186838_12 (sequence is synthesized)
ggattcgtcatttcccatgccctggttccagatacattttgaaaaccttccatcttattggcattttctggggttgtgagggaaacggggatggcagtcagactcaaacccgtgacactc

SEQ ID NO: 681164 - DNA, 120 bp, Artificial Sequence
  ENSG00000186838_13 (sequence is synthesized)
cccgtgacactccaaactcgattatgctccagggcccactttctaaacctgtaagatctatgttccagcctgcgcaacatagtgagaccccaactctacaaaaaataaaaaattagccag

SEQ ID NO: 681165 - DNA, 120 bp, Artificial Sequence
  ENSG00000186838_14 (sequence is synthesized)
cagcgagaacttcgcgctggacaagagggtcctgattcgagtgacctactgtacattctactgaaaaagagcctggagcagcaatttccgaatcacctactctttgtaagtgtgtggggg

SEQ ID NO: 681166 - DNA, 120 bp, Artificial Sequence
  ENSG00000186844_0 (sequence is synthesized)
atgtcctgccagcagagccagcagcagtgccagccccctcccaagtgcacccccaagtgccctcccaagtgccccactcctaagtgccccccaaagtgtccccctaagtgccctccagtc

SEQ ID NO: 681167 - DNA, 120 bp, Artificial Sequence
  ENSG00000186844_1 (sequence is synthesized)
tcttcctgctgcagtgtcagctccggaggctgctgtggctccagctctgggggcggctgcagctctgggggaggtggctgctgcctgagccaccacaggcgccacaggtcccaccgtcac

SEQ ID NO: 681168 - DNA, 120 bp, Artificial Sequence
  ENSG00000186844_2 (sequence is synthesized)
gccagccctcgggaggctccagctgctgtggaggggacagcggccagcactctggaggctgctgctgaagcggactctgcacctagaagagcagactcgggtgaaatgagtgatcaaaca

SEQ ID NO: 681169 - DNA, 120 bp, Artificial Sequence
  ENSG00000186844_3 (sequence is synthesized)
tttcctcctcacctgtctcctcctgggcctgcaagagtggctgagatgcccgcgtgaaggctctgagctctggcctagaggatccctctgccctgggatccagaaacttgattcttctcc

SEQ ID NO: 681170 - DNA, 120 bp, Artificial Sequence
  ENSG00000186844_4 (sequence is synthesized)
cacaaacctatctgctgcccctgacaccaactgtgttgtctactctgggatcccaagccacaaactcactctccagctcatttcctgcagcctcaagtgaaacaataaagcaaaagatct

SEQ ID NO: 681171 - DNA, 120 bp, Artificial Sequence
  ENSG00000186847_0 (sequence is synthesized)
acccgagcaccttctcttcactcagccaactgctcgctcgctcacctccctcctctgcaccatgaccacctgcagccgccagttcacctcctccagctccatgaagggctcctgcggcat

SEQ ID NO: 681172 - DNA, 120 bp, Artificial Sequence
  ENSG00000186847_1 (sequence is synthesized)
cgggggcggcatcgggggcggctccagccgcatctcctccgtcctggccggagggtcctgccgcgcccccagcacctacgggggcggcctgtctgtctcatcctcccgcttctcctctgg

SEQ ID NO: 681173 - DNA, 120 bp, Artificial Sequence
  ENSG00000186847_2 (sequence is synthesized)
gggagcctgcgggctggggggcggctatggcggtggcttcagcagcagcagcagcagctttggtagtggctttgggggaggatatggtggtggccttggtgctggcttgggtggtggctt

SEQ ID NO: 681174 - DNA, 120 bp, Artificial Sequence
  ENSG00000186847_3 (sequence is synthesized)
tggtggtggctttgctggtggtgatgggcttctggtgggcagtgagaaggtgaccatgcagaacctcaatgaccgcctggcctcctacctggacaaggtgcgtgctctggaggaggccaa

SEQ ID NO: 681175 - DNA, 120 bp, Artificial Sequence
  ENSG00000186847_4 (sequence is synthesized)
cgccgacctggaagtgaagatccgtgactggtaccagaggcagcggcctgctgagatcaaagactacagtccctacttcaagaccattgaggacctgaggaacaagattctcacagccac

SEQ ID NO: 681176 - DNA, 120 bp, Artificial Sequence
  ENSG00000186847_5 (sequence is synthesized)
agtggacaatgccaatgtccttctgcagattgacaatgcccgtctggccgcggatgacttccgcaccaagtatgagacagagttgaacctgcgcatgagtgtggaagccgacatcaatgg

SEQ ID NO: 681177 - DNA, 120 bp, Artificial Sequence
  ENSG00000186847_6 (sequence is synthesized)
ctggcctacctgaagaagaaccacgaggaggagatgaatgccctgagaggccaggtgggtggagatgtcaatgtggagatggacgctgcacctggcgtggacctgagccgcattctgaac

SEQ ID NO: 681178 - DNA, 120 bp, Artificial Sequence
  ENSG00000186847_7 (sequence is synthesized)
gagatgcgtgaccagtatgagaagatggcagagaagaaccgcaaggatgccgaggaatggttcttcaccaagacagaggagctgaaccgcgaggtggccaccaacagcgagctggtgcag

SEQ ID NO: 681179 - DNA, 120 bp, Artificial Sequence
  ENSG00000186847_8 (sequence is synthesized)
agcggcaagagcgagatctcggagctccggcgcaccatgcagaacctggagattgagctgcagtcccagctcagcatgaaagcatccctggagaacagcctggaggagaccaaaggtcgc

SEQ ID NO: 681180 - DNA, 120 bp, Artificial Sequence
  ENSG00000186847_9 (sequence is synthesized)
tactgcatgcagctggcccagatccaggagatgattggcagcgtggaggagcagctggcccagctccgctgcgagatggagcagcagaaccaggagtacaagatcctgctggacgtgaag

SEQ ID NO: 681181 - DNA, 120 bp, Artificial Sequence
  ENSG00000186847_10 (sequence is synthesized)
acgcggctggagcaggagatcgccacctaccgccgcctgctggagggcgaggacgcccacctctcctcctcccagttctcctctggatcgcagtcatccagagatgtgacctcctccagc

SEQ ID NO: 681182 - DNA, 120 bp, Artificial Sequence
  ENSG00000186847_11 (sequence is synthesized)
cgccaaatccgcaccaaggtcatggatgtgcacgatggcaaggtggtgtccacccacgagcaggtccttcgcaccaagaactgaggctgcccagccccgctcaggcctaggaggcccccc

SEQ ID NO: 681183 - DNA, 120 bp, Artificial Sequence
  ENSG00000186847_12 (sequence is synthesized)
gtgtggacacagatcccactggaagatcccctctcctgcccaagcacttcacagctggaccctgcttcaccctcaccccctcctggcaatcaatacagcttcattatctgagttgcataa

SEQ ID NO: 681184 - DNA, 120 bp, Artificial Sequence
  ENSG00000186847_13 (sequence is synthesized)
aaagccctcgctgtgatcaggatgggtgtctcataccttttctctggggtcattccaggtatgagacagagttgaacctgcgcatgagtgtggaagccgacatcaatggcctgcgcaggg

SEQ ID NO: 681185 - DNA, 120 bp, Artificial Sequence
  ENSG00000186847_14 (sequence is synthesized)
gagctctagtgctgtcacccagtttcccttgtgaacctccttgggtggaagaagctattttctaaaccctccttagggctaggagaggcagcccccacctcttgcttctacgtggtgtct

SEQ ID NO: 681186 - DNA, 120 bp, Artificial Sequence
  ENSG00000186847_15 (sequence is synthesized)
gaaccagccaggtgtgagctcttaggaagctctaatctgagggcaaagactctgtctctgacctttgggagccctcgtctgaaagaaatgtgttgatggtatcagtgcttgggcaacagc

SEQ ID NO: 681187 - DNA, 120 bp, Artificial Sequence
  ENSG00000186847_16 (sequence is synthesized)
agggagtgaagcagtaatcaggggagagggcaatggggagccagtttgagtttcctcaccttcttggcctccttactcctgattagtccattgtctgtccacctctggtaacgtcctctt

SEQ ID NO: 681188 - DNA, 80 bp, Artificial Sequence
  ENSG00000186854_0 (sequence is synthesized)
ctccgctgccgcctaggcgcggggctgacctgcgggggtggggtggggggagggaggtcgaggcccggccccacgtggcc

SEQ ID NO: 681189 - DNA, 120 bp, Artificial Sequence
  ENSG00000186854_1 (sequence is synthesized)
cgcggccccggctagccagggcgggcggccacctctgccctactccttccctccgcgttccgggcctcggagccgccttgaggaggatgagtccctggagctggttcctgctgcagaccc

SEQ ID NO: 681190 - DNA, 120 bp, Artificial Sequence
  ENSG00000186854_2 (sequence is synthesized)
tctgcctcctgcccacgggcgcagcttcgcggcgcggggcgcccggcaccgccaactgcgagctcaagccccaacaaagcgagctgaattccttcttgtggaccattaagcgagacccac

SEQ ID NO: 681191 - DNA, 120 bp, Artificial Sequence
  ENSG00000186854_3 (sequence is synthesized)
catcttacttctttggcacaatccatgtcccgtacacccgagtttgggacttcatccccgacaactctaaggaggctttcctgcagagcagcattgtgtactttgagttggatctcacag

SEQ ID NO: 681192 - DNA, 120 bp, Artificial Sequence
  ENSG00000186854_4 (sequence is synthesized)
acccctataccatctcagctctcaccagctgtcagatgctgccacagggcgagaacctccaagatgtgctccccagggacatctactgccgcctcaagcgccacctggagtatgtcaagc

SEQ ID NO: 681193 - DNA, 120 bp, Artificial Sequence
  ENSG00000186854_5 (sequence is synthesized)
tcatgatgcccttgtggatgaccccagaccagcgcggcaaggggctctacgcagactacctcttcaatgctattgccggaaactgggagcgcaagaggcctgtctgggtgatgctcatgg

SEQ ID NO: 681194 - DNA, 120 bp, Artificial Sequence
  ENSG00000186854_6 (sequence is synthesized)
tcaactccctgactgaagtggacattaagtcccgtggagtgcctgtcttagacctgttccttgcccaggaggctgagcggctgaggaaacagactggggcagtggaaaaggtggaagagc

SEQ ID NO: 681195 - DNA, 120 bp, Artificial Sequence
  ENSG00000186854_7 (sequence is synthesized)
tttattaatgccacgctaccacctcaggagcgcatcactgctcaggagattgacagctacttacgccgggagctgatctacaagcggaatgagagaatagggaagcgggtgaaggccctt

SEQ ID NO: 681196 - DNA, 120 bp, Artificial Sequence
  ENSG00000186854_8 (sequence is synthesized)
ttggaggagttccctgacaaaggcttcttctttgcctttggagctggtcatttcatgggcaacaacacagtgctggatgttttgcggcgtgaaggctatgaggtagaacacgcccctgct

SEQ ID NO: 681197 - DNA, 120 bp, Artificial Sequence
  ENSG00000186854_9 (sequence is synthesized)
ggacgacccatccacaaagggaagagtaaaaagacctccacacggcccactctgtccaccatctttgctccaaaagtccctaccctggaagtaccggcaccagaagccgtatcctcaggg

SEQ ID NO: 681198 - DNA, 120 bp, Artificial Sequence
  ENSG00000186854_10 (sequence is synthesized)
cactcaacgctgcctccccttgtgtcccggcctggaagtgccgacacgcccagtgaggccgaacagaggttccggaagaagcggaggcggtcacagcggaggccgcgactccggcaattc

SEQ ID NO: 681199 - DNA, 120 bp, Artificial Sequence
  ENSG00000186854_11 (sequence is synthesized)
agcgatctgtgggtccgcctggaggagagtgacatagtcccgcaactccaggtccctgtcctggacaggcacatctccactgaactgcggctccctcgccgtgggcattcccaccacagc

SEQ ID NO: 681200 - DNA, 120 bp, Artificial Sequence
  ENSG00000186854_12 (sequence is synthesized)
cagatggtggccagcagtgcctgcctgtctctctggactcctgtgttctgggtgctggtgctggctttccaaacagagacacccctcctgtaacgactggaagcaccaggctaagaacct

SEQ ID NO: 681201 - DNA, 120 bp, Artificial Sequence
  ENSG00000186854_13 (sequence is synthesized)
gacccctcggacttgaagaatggccattcctgtactccacattctggtctagccttgttgggcccaatccagaagagactgctcttgaaaaagcggcccagtgttgattcttctctttcc

SEQ ID NO: 681202 - DNA, 120 bp, Artificial Sequence
  ENSG00000186854_14 (sequence is synthesized)
aaggaatgtgactttgggttatccaactttgggggcaggtgtacagttttgtaacatagtgagttgtgtgaaaataaattataaatgagttgtatgaaaataaatacctttttttgtata

SEQ ID NO: 681203 - DNA, 120 bp, Artificial Sequence
  ENSG00000186854_15 (sequence is synthesized)
aaaggcttcttctttgcctttggagctgcttcacagtagccttgaaaatcaggagccttgaactacagtagctgtgaaaactgtttgcctaatggttactggaggggacagaatgggttc

SEQ ID NO: 681204 - DNA, 120 bp, Artificial Sequence
  ENSG00000186854_16 (sequence is synthesized)
aaagttcctccaaagctccatccttaaagaatcatcactatttgacatgtccaatagttccctgaaatttccattcccaagcttgtcttcatttgacctgactcagagcttgctctgtgt

SEQ ID NO: 681205 - DNA, 120 bp, Artificial Sequence
  ENSG00000186854_17 (sequence is synthesized)
gaatagccctattcttagggtgtgtgttgaaaacaatcagtagcagctgtttaacatcatagttgctggaaatagcaatattaattgaagcttacaaggggctgcccaaaaaacttaaaa

SEQ ID NO: 681206 - DNA, 120 bp, Artificial Sequence
  ENSG00000186854_18 (sequence is synthesized)
gcaaaatcccatagggggtatagaaaagctctaaaatattcctagagagtcacatgcatgagaagagctgtgcacatgcccaggaaagacctgagaaggtcctaatctctcacctctggc

SEQ ID NO: 681207 - DNA, 120 bp, Artificial Sequence
  ENSG00000186854_19 (sequence is synthesized)
tttgctttgaaccagaccctcctgcagcaggaaagcctgcgagcaggcagtcttcagatcccctacacgacggaggatctcatcaaacactataactgcggggacctcagctccgtcatc

SEQ ID NO: 681208 - DNA, 90 bp, Artificial Sequence
  ENSG00000186854_20 (sequence is synthesized)
cactgcactccagcctgtgtgacagagtaagactctctgtattaaaaaaaaaaaaggctctcactgggcactgaatgcctatgcctagat

SEQ ID NO: 681209 - DNA, 120 bp, Artificial Sequence
  ENSG00000186854_21 (sequence is synthesized)
cctctagaactgtgagaaataaatttctattgcttataaatgacccagtctgtggtattttgtaacagcaacacagactaaggcatgtttgctgtaactctaggtcccagaggcttcagt

SEQ ID NO: 681210 - DNA, 120 bp, Artificial Sequence
  ENSG00000186854_22 (sequence is synthesized)
tcccagaggcttcagtttcctctagtgacctctagtttttcctctagtattttttgtcttgtgctttcttaagaaccttcttaaatagagtctgagtcttgctgcactttcacatataat

SEQ ID NO: 681211 - DNA, 120 bp, Artificial Sequence
  ENSG00000186854_23 (sequence is synthesized)
ccactgttattttactggagtcctattgttgtggtgctaaagtgaagataccatttcatactcactaggctataataaaaaagatggagagtaaaaagttttggtgaagacatggagaaa

SEQ ID NO: 681212 - DNA, 120 bp, Artificial Sequence
  ENSG00000186854_24 (sequence is synthesized)
ttggcaccctcatacattgctactgggaatttaaaatggtgtagccattttggaaaactgtttagcagtttttaaaaattaaacatggggctaccatttgattcagcatttcaacttcca

SEQ ID NO: 681213 - DNA, 120 bp, Artificial Sequence
  ENSG00000186854_25 (sequence is synthesized)
gatatatgcctaggagaattgaaaacatatgtccacacgaaaatttgtacacagatgttcatggcagcattatttataatagccaaaaagtggaaccaatccaactatccatcaactgac

SEQ ID NO: 681214 - DNA, 120 bp, Artificial Sequence
  ENSG00000186854_26 (sequence is synthesized)
atggataaataaaaggtgatatatacacacaaatggaatactatttggccataaaaaggaaagaggtactgatatatggtactacatggatgaactttgaaaacattatgctaagtgaaa

SEQ ID NO: 681215 - DNA, 120 bp, Artificial Sequence
  ENSG00000186854_27 (sequence is synthesized)
acagccagtcacaaaatcatatgattatatttatatgaaatgtccagaacaggcaaatctatagagacagaaagtattcatagattagtggttgccaggggctggggtcaaaacgatgaa

SEQ ID NO: 681216 - DNA, 120 bp, Artificial Sequence
  ENSG00000186854_28 (sequence is synthesized)
aatgttttaaaattagatagtggtcatgattgcatgattttctgaatatacagaaaaaatcaccgactggcatacgttaaaaggatgaattttatgttatgtgaattatattcaaatatt

SEQ ID NO: 681217 - DNA, 120 bp, Artificial Sequence
  ENSG00000186854_29 (sequence is synthesized)
aataaaactgttatagaaatataaggggtttggctcccacattatgctcattgaaaagttctgccacaaacaaactgcagtttgtgccctcagcaatgcccgtgagtatgtggtagtttt

SEQ ID NO: 681218 - DNA, 120 bp, Artificial Sequence
  ENSG00000186854_30 (sequence is synthesized)
cttcttctgtaagtcctgtgtttcatgtctggattgggcaccgtgtgcacatttgtactgtctcaacaaatggcttcttggaacaaagctgttagcctgggcctcactcttgaggcaccg

SEQ ID NO: 681219 - DNA, 120 bp, Artificial Sequence
  ENSG00000186854_31 (sequence is synthesized)
taacagtggtgcagaccccagatgagaaagttaggaaacagagccagtggtggtgtcccaatgcaccaccccgggtctgtgtggatggaaggtgcccaggtgctggagtgtgggcttctg

SEQ ID NO: 681220 - DNA, 120 bp, Artificial Sequence
  ENSG00000186854_32 (sequence is synthesized)
ctttccacccctgccagacttaggtgagctcccaaaaacttcccgtatgtcccgtggcaggggtaatggggcgctggggagaggggaaaggtcgactgggttctgggctggtgggaggct

SEQ ID NO: 681221 - DNA, 120 bp, Artificial Sequence
  ENSG00000186854_33 (sequence is synthesized)
ggggcacagcttggtctgagcagttcggtgggtgggccctcgtggtgggggttctgccaggcaggtggaacaggcaacaccaacacctgagcttgcccagtactcagggcttgatttgtc

SEQ ID NO: 681222 - DNA, 120 bp, Artificial Sequence
  ENSG00000186854_34 (sequence is synthesized)
atactgatgcagggctagattggggctgacagcccctgggcactcctgatgcccgaagtgcccaggggctgtgagcccccatctagcactggctccttctaaggcaaagttatattcctg

SEQ ID NO: 681223 - DNA, 120 bp, Artificial Sequence
  ENSG00000186854_35 (sequence is synthesized)
tagctgctttctctctgtgccttctgaaggctaagttgaacagaggaaactacagaaattgctccgaaacacattaccgtgtgcttttaaaacttaaaagctgtgtggttagcaaacttt

SEQ ID NO: 681224 - DNA, 120 bp, Artificial Sequence
  ENSG00000186854_36 (sequence is synthesized)
cagcgacttttgtcatggggatctggatataaaatgcgaagattagaaatggaaatcacctttgcagtagaagaaaaattgaagtcagaagtgctaagtggaaactataatcacttgttc

SEQ ID NO: 681225 - DNA, 120 bp, Artificial Sequence
  ENSG00000186854_37 (sequence is synthesized)
taaattgccagttccttatttgcaaatgaataacctaggatcagtggtgaaagacatgactttttttcttatttaggtgtcgatcttaaatcagctcatgctgatttttggctcctgttt

SEQ ID NO: 681226 - DNA, 120 bp, Artificial Sequence
  ENSG00000186854_38 (sequence is synthesized)
gccagggttacttctccagtggcctcctctcctaccccacatttctaggttacagctatcgcccctgcactggcagctgtctaggctggtctaggctgtggggaggagaggggaggatgg

SEQ ID NO: 681227 - DNA, 120 bp, Artificial Sequence
  ENSG00000186854_39 (sequence is synthesized)
gagggaatggttttgccaaacttccctttctgagcccctgctgacccatgaacaccccctttgatgcatgagggtgaaaatgaaagcaggaaccatgggccttctgcttccttctcgggg

SEQ ID NO: 681228 - DNA, 120 bp, Artificial Sequence
  ENSG00000186854_40 (sequence is synthesized)
cctatttgctgtactgccgcaggctcccagggttccctggttgtgactcctgagactacagtgggtttgtcctatgcagaaacctccaagaatgacagatcttagattaggttgccttta

SEQ ID NO: 681229 - DNA, 120 bp, Artificial Sequence
  ENSG00000186854_41 (sequence is synthesized)
ctttttctagaaagtggtgattgggaagtagccattccttccgtcccaccagcctccctgttttttcagagagcacaattgcattccatcctgtagttgggaattcccccccctcctttt

SEQ ID NO: 681230 - DNA, 120 bp, Artificial Sequence
  ENSG00000186854_42 (sequence is synthesized)
ttacaggtgtgagccactgtgctcagcttgaattcttgtattttctccagaccagtgtcctcacctttcaggatcctgctcacatatcacctcttctgggaggtcttaccaggttgcagt

SEQ ID NO: 681231 - DNA, 120 bp, Artificial Sequence
  ENSG00000186854_43 (sequence is synthesized)
gagtcagctaggaggaggccagagggaaacagtggggctttcgaagcttatcaaaagcaaaccttgctcttttgaaaaagcattttccaacgcaacctggggacaaagtggggttaaatt

SEQ ID NO: 681232 - DNA, 120 bp, Artificial Sequence
  ENSG00000186854_44 (sequence is synthesized)
ttacacagattgcttacgagcaagagttaagtggctaacaagtcatgaaatcttacggagaagcaggtaaagccaaaattaaaaactccctccgagtcagcccattctgcgacccacctc

SEQ ID NO: 681233 - DNA, 120 bp, Artificial Sequence
  ENSG00000186854_45 (sequence is synthesized)
cgaggatgcctccaagttgtgagaaaatcaagcatctacaaggaaaggccacatgtcggcattccagccacagcctcagctgaggtcagagctaacagccagcatcaaccactaaccaca

SEQ ID NO: 681234 - DNA, 120 bp, Artificial Sequence
  ENSG00000186854_46 (sequence is synthesized)
caagtgaaggagacttcgaagcttcaaactgccccagctaatgccaagtggagcagagatgagttgtccctgctgaaattgcagactcatgagcaaaataaatgtagttgttttaagaca

SEQ ID NO: 681235 - DNA, 120 bp, Artificial Sequence
  ENSG00000186854_47 (sequence is synthesized)
agttatcagattctcaaaatggacagcgacttaaagcaattaaagaccactgcgacaaatgctcctgcgaacaccactccgaagttaatggcgcagacgtctggactttaaaagcaaagc

SEQ ID NO: 681236 - DNA, 120 bp, Artificial Sequence
  ENSG00000186854_48 (sequence is synthesized)
acaagctggtgtacaaaagagctggtttacaagcttggcttggtttatatgcagcaattactcagcatggagcagccctggatgcacgatgtgagctggtgcctaagatgaagggaaata

SEQ ID NO: 681237 - DNA, 120 bp, Artificial Sequence
  ENSG00000186854_49 (sequence is synthesized)
gttccctgacaaaggcttcttctttgcctttggagctggtgagtagtgggtcacctctgattagcctctgaaatctgaggcttctcccaagaagggaatgttgaggtgagcccctgctta

SEQ ID NO: 681238 - DNA, 120 bp, Artificial Sequence
  ENSG00000186854_50 (sequence is synthesized)
gagagaagagaggatggaggggttttacagagagatctgtctcctttggttaaggttgcatcacaggcacaggaaatattagagtaactgagggaggtaaactatgtggaaggagggatg

SEQ ID NO: 681239 - DNA, 120 bp, Artificial Sequence
  ENSG00000186854_51 (sequence is synthesized)
ctgtggtttgaatgtgtcccctccaaaattcagatgttgctagtgtgatggtattaaaaggtgaggcctttaggaggtgattaagccatgaaggctcctctttataaggacctttttggg

SEQ ID NO: 681240 - DNA, 120 bp, Artificial Sequence
  ENSG00000186854_52 (sequence is synthesized)
attaagactcctctttataaggcctttatgggattaaggccctaataaaagaggtgtcatgcagccattcagttagcttgcccttctgtcttcttccatgtgaggatgcagcaagaaggc

SEQ ID NO: 681241 - DNA, 120 bp, Artificial Sequence
  ENSG00000186854_53 (sequence is synthesized)
ctctgtgtaagcagagtgtgaaagctaaggcaaagtcataaattgcctgttgaagcatcaaatacatgcccccaaactcacacagcccctctgcaaaggttgggaaacttgcaaggaatt

SEQ ID NO: 681242 - DNA, 120 bp, Artificial Sequence
  ENSG00000186854_54 (sequence is synthesized)
taaggaaatctctgttcagtcattagccagccactaaactaactgagcagatccttcagtgatcacacacaacaaagaatacagactttacagacttagtcctagaaaatcactacacaa

SEQ ID NO: 681243 - DNA, 120 bp, Artificial Sequence
  ENSG00000186854_55 (sequence is synthesized)
tatttaaatgtctagttttcaataaaaacaattataagacacagagcaaaactagaaagtatggcccatacccagggaaaaacaagcaaccaatagaagctgtccttgaggaagttaata

SEQ ID NO: 681244 - DNA, 120 bp, Artificial Sequence
  ENSG00000186854_56 (sequence is synthesized)
cttgaggaagttaatatcttggacttactagaaaatgactttaacactagttattataaatatgttcaaaaaactaaaagaggccaggtgcggaggctcacgcctataatcccagcactt

SEQ ID NO: 681245 - DNA, 120 bp, Artificial Sequence
  ENSG00000186854_57 (sequence is synthesized)
aaaaaaaaccctaaaattaaccatatctaaagaattaaaggaaagtttgagaacaatatctcaccaatacagaatatcaataaaaatataaaaattattttaaaagaaccaaataggaat

SEQ ID NO: 681246 - DNA, 120 bp, Artificial Sequence
  ENSG00000186854_58 (sequence is synthesized)
gaattctggaatttaaagtgtaggaactgaaatgaaaaattcactacgggggctgaacagtagatttgaactggcagaagaagaatcaacatacatgaagataggttgattgagatgatt

SEQ ID NO: 681247 - DNA, 120 bp, Artificial Sequence
  ENSG00000186854_59 (sequence is synthesized)
cagtatgagaaagagaaaggaaaaggaatgaagaaaaatgaatagatcttcagatacctgtgagacaccctcaagtgtgccaatgtatacctaacgggagtcccagaagacaggagagaa

SEQ ID NO: 681248 - DNA, 120 bp, Artificial Sequence
  ENSG00000186854_60 (sequence is synthesized)
aaaaagaaagaaataaaaagaatatttgaatttaaaattgcttgaaaatgtctcaaatttgatgaaaaatattactctgcacattcaacccatgaactataagttgtataaaatcaaaaa

SEQ ID NO: 681249 - DNA, 120 bp, Artificial Sequence
  ENSG00000186854_61 (sequence is synthesized)
gtttcacaccaaggcgtgtcatagccaaactgtcaaaagccaaagacacagaatcttgaaagcagtgagagcaaagcagacaagggatccccaataggattaacagcagatttctcatca

SEQ ID NO: 681250 - DNA, 120 bp, Artificial Sequence
  ENSG00000186854_62 (sequence is synthesized)
gaagccatgcaagccagaaggctatgggagacatactcaaaatgctgaaataaaagactgtcaacaaacatttccacatccagcaaaaatcaaaaacgaaggagaaatctgttgcatgtg

SEQ ID NO: 681251 - DNA, 120 bp, Artificial Sequence
  ENSG00000186854_63 (sequence is synthesized)
agctgaatagaatttgtattctgctgttgttggatgaagtattctttaaatgtcaattagatcaatttgattgatgatgctcttcagttcaactatattccctatctgataattccagaa

SEQ ID NO: 681252 - DNA, 120 bp, Artificial Sequence
  ENSG00000186854_64 (sequence is synthesized)
tctctatcatgtctgagtctgggtctgatgctttcattgtttcttcagattgtgatttttcttgcctcccagtgtgacttgtaatttttaattgaaagctggatatgatgtatttggcaa

SEQ ID NO: 681253 - DNA, 120 bp, Artificial Sequence
  ENSG00000186854_65 (sequence is synthesized)
tgggaagtgagggaaatatgtttttagtgtgagggtttatgttaatctttctcagagttgggctgtttaatgttttgctgtggtctgaatgttccttaaaacttgtgtgttgaaacttaa

SEQ ID NO: 681254 - DNA, 120 bp, Artificial Sequence
  ENSG00000186860_0 (sequence is synthesized)
accgtcagtcgtggggaactccggctgcgttaccgacctgcgagctgacgggcccggaccatggggtgctgcccgggggactgcttcacctgctgcacccaggagcaaaactgctgtgaa

SEQ ID NO: 681255 - DNA, 120 bp, Artificial Sequence
  ENSG00000186860_1 (sequence is synthesized)
gagtgctgctgtcagccgggctgctgtggctgctgcggctcctgctgtggctgtgggggctctggctgcgggggctctggctgcgggggcagctgctgcggatcgtcttgctgtggatct

SEQ ID NO: 681256 - DNA, 120 bp, Artificial Sequence
  ENSG00000186860_2 (sequence is synthesized)
ggctgcggaggctgtggaggctgcggaggctgcgggggtggctgctgtggatccagttgctgtgggtccagttgctgcggctccgggtgctgtgggcctgtgtgctgccagcccacacct

SEQ ID NO: 681257 - DNA, 120 bp, Artificial Sequence
  ENSG00000186860_3 (sequence is synthesized)
agcccctcgtgtccagaaccttccatacccccaagacagtgtcttgtctttctgtgatttgtagaggagggcttgttctccaacaccttctctggtatttcaaggcaccgagaacaagag

SEQ ID NO: 681258 - DNA, 120 bp, Artificial Sequence
  ENSG00000186860_4 (sequence is synthesized)
ccatactctgatgaaacattaaaactcggtcacaactaagtgatcccaagctcaagggtgaatccccaatactttacttattcacatgaagttcaatgtcttgtactataagacatcctc

SEQ ID NO: 681259 - DNA, 120 bp, Artificial Sequence
  ENSG00000186860_5 (sequence is synthesized)
ttcttcaaggtgtctttgggactgatcctccgccctggctttctgcagctttgagatgcaaaaaaggtccatcttctttgtgagcctcttaataaatttgagcatgctggcataacctaa

SEQ ID NO: 681260 - DNA, 120 bp, Artificial Sequence
  ENSG00000186862_0 (sequence is synthesized)
agtagctctcgcctgcgggtggtttgacaaggctggcggcgccacaccagcgaccaggcctggagctcacacttctgagaggcatcgcaagcgagggccttcacgttactgagaccccag

SEQ ID NO: 681261 - DNA, 120 bp, Artificial Sequence
  ENSG00000186862_1 (sequence is synthesized)
ccccgcacagaggctcatggagctcgaagcacgcagggctggcctctccagagctagcagattccttctggacctgtagggtgccgccctagcccagccgccatggcgcagggtttcgca

SEQ ID NO: 681262 - DNA, 120 bp, Artificial Sequence
  ENSG00000186862_2 (sequence is synthesized)
gtgggcttcgacccactgggcctaggagacctgagctccggctctctgagctccctctcctcccgaggccacctaggcagcgactcaggctccaccgcaacgcgatacctgctaaggaag

SEQ ID NO: 681263 - DNA, 120 bp, Artificial Sequence
  ENSG00000186862_3 (sequence is synthesized)
caacaacggctgctgaacgggcccccccgcggaatccgagcctcatcgcccatgggacgcgtcatcctcatcaactcccccatcgaagccaacagtgatgaaagtgacatcatccattca

SEQ ID NO: 681264 - DNA, 120 bp, Artificial Sequence
  ENSG00000186862_4 (sequence is synthesized)
gtccgggtggagaagagtccagcagggaggctgggcttcagcgtgcgcgggggctcagagcatggcctgggcatcttcgtcagcaaagtggaggaaggcagcagtgcagagcgggctggc

SEQ ID NO: 681265 - DNA, 120 bp, Artificial Sequence
  ENSG00000186862_5 (sequence is synthesized)
ctgtgcgtgggggacaagatcacggaggtgaatgggctgagcctggagagcaccaccatgggtagcgccgtaaaggtgctgaccagcagcagccgcctgcacatgatggttcggcgcatg

SEQ ID NO: 681266 - DNA, 120 bp, Artificial Sequence
  ENSG00000186862_6 (sequence is synthesized)
ggccgtgtgccgggcatcaagttctccaaggagaagaccacgtgggtggatgtggtgaatcggcgcctggtagtggagaagtgcggttcaacaccctccgacaccagctcagaagatggt

SEQ ID NO: 681267 - DNA, 120 bp, Artificial Sequence
  ENSG00000186862_7 (sequence is synthesized)
gtccggcgcatcgtccacctatacacaacctccgacgacttctgcctgggcttcaacatccgtgggggcaaggagtttggcctgggcatctatgtgtccaaagtggaccatggtgggctg

SEQ ID NO: 681268 - DNA, 120 bp, Artificial Sequence
  ENSG00000186862_8 (sequence is synthesized)
gccgaggagaatggcatcaaggtgggggaccaggtcctggcagccaacggtgtcaggtttgacgacatcagccacagccaggccgtggaggtgctgaagggccaaacgcacatcatgctg

SEQ ID NO: 681269 - DNA, 120 bp, Artificial Sequence
  ENSG00000186862_9 (sequence is synthesized)
accatcaaggagaccggccggtatcctgcctacaaggagatggtttctgagtactgctggctggaccgactgagcaacggggtgctgcagcagctgtccccggcctctgagagcagctcc

SEQ ID NO: 681270 - DNA, 120 bp, Artificial Sequence
  ENSG00000186862_10 (sequence is synthesized)
agcgtctcttcgtgcgcctccagcgccccctacagctcgggctccctgccgtcggaccgcatggacatctgcctcgggcaggaggagcccggcagccgcggcccaggctgggggcgggcg

SEQ ID NO: 681271 - DNA, 120 bp, Artificial Sequence
  ENSG00000186862_11 (sequence is synthesized)
gacacagccatgcagacggagcccgatgcgggaggccgggtggagacctggtgcagcgtgcggcccacagtcatcctcagggacaccgccatccgctcggacggcccccatcccggccgc

SEQ ID NO: 681272 - DNA, 120 bp, Artificial Sequence
  ENSG00000186862_12 (sequence is synthesized)
cgccttgactctgcgctctctgagtctcccaagacggctttgctgctggccctcagccgaccccggccccccatcacgcgctcccagagctatctgaccttgtgggaggagaagcagcag

SEQ ID NO: 681273 - DNA, 120 bp, Artificial Sequence
  ENSG00000186862_13 (sequence is synthesized)
cggaagaaggagaagtcggggtcccctggggagaagggtgccctgcagcgctccaagacgctgatgaacctcttcttcaagggagggcggcaggggaggctagcgcgggacgggcgcaga

SEQ ID NO: 681274 - DNA, 120 bp, Artificial Sequence
  ENSG00000186862_14 (sequence is synthesized)
gaggcctggacactggacagcgggagcctggccaaaacttaccctcgcctggacatagagaaagcagggggcgtgggcccggtacagaagtttgtcacctggagactgagacgtgaccag

SEQ ID NO: 681275 - DNA, 120 bp, Artificial Sequence
  ENSG00000186862_15 (sequence is synthesized)
gagaggggccgggccctgctgtctgccaggtctgggagtccctccagccagctgcctaatgtggatgagcaggttcaggcctgggagagccggcggcccctcattcaggacctggcccag

SEQ ID NO: 681276 - DNA, 120 bp, Artificial Sequence
  ENSG00000186862_16 (sequence is synthesized)
aggctgctgactgatgacgaggtgctggctgtcacccgccactgctcccggtatgtgcacgagggaggcatagaggacctggtgaggcccctgctggccatcctcgacaggccggagaag

SEQ ID NO: 681277 - DNA, 120 bp, Artificial Sequence
  ENSG00000186862_17 (sequence is synthesized)
ggcccccacagacctgggccgcttcgacagcatggtgatgcttgtggagctggaggcttttgaggccctcaagagcagggcagtccggcctcctgctttgagaccagcccggcaggacac

SEQ ID NO: 681278 - DNA, 120 bp, Artificial Sequence
  ENSG00000186862_18 (sequence is synthesized)
gccacccaagcgtcaccttatcacccccgtgcctgacagccgcggaggcttctacctgctgccggtgaacggcttcccggaagaggaagataatggggagctgagggagcggctgggggc

SEQ ID NO: 681279 - DNA, 120 bp, Artificial Sequence
  ENSG00000186862_19 (sequence is synthesized)
cctcaaggtctccccaagtgcctctgcccctcgccacccccataaagggatcccccctctacaagacgtgccagtagatgccttcacccccctccgaattgcctgcacaccccctcccca

SEQ ID NO: 681280 - DNA, 120 bp, Artificial Sequence
  ENSG00000186862_20 (sequence is synthesized)
gctaccccccgtggctccccggcccctgcggcctaactggctgctgacagaacccctgagccgagagcaccctccgcagagccagatccggggccgggctcagagccgtagccgcagccg

SEQ ID NO: 681281 - DNA, 120 bp, Artificial Sequence
  ENSG00000186862_21 (sequence is synthesized)
tagccgcagccgcagccgcagcagccggggtcaaggcaagtctccaggtagacgctccccatccccggtgcctacccctgcccccagcatgaccaatgggcgctaccacaagcctcggaa

SEQ ID NO: 681282 - DNA, 120 bp, Artificial Sequence
  ENSG00000186862_22 (sequence is synthesized)
ggccagaccccctctgccacgacctctggatggggaggcagccaaggtgggggccaagcaagggccctcggagagtggaactgaggggacggccaaggaggcagccatgaagaaccccag

SEQ ID NO: 681283 - DNA, 120 bp, Artificial Sequence
  ENSG00000186862_23 (sequence is synthesized)
tggcgagctgaagacagtgacactgtccaagatgaagcagtccttaggtatcagcatttctgggggcattgagtccaaggtgcagcccatggtgaagatagagaagatcttccctggggg

SEQ ID NO: 681284 - DNA, 120 bp, Artificial Sequence
  ENSG00000186862_24 (sequence is synthesized)
ggccgctttcctcagtggggccctgcaggctggcttcgagcttgtggcagtggacggagagaatctagagcaggtgacccaccagcgtgcagtagacaccatccgtcgggcttatcgaaa

SEQ ID NO: 681285 - DNA, 120 bp, Artificial Sequence
  ENSG00000186862_25 (sequence is synthesized)
caaggcccgggagcccatggagcttgtggtcagggtccccgggcccagcccacggccctcaccctctgactcatcagcccttactgatgggggccttcctgctgaccacttgcctgccca

SEQ ID NO: 681286 - DNA, 120 bp, Artificial Sequence
  ENSG00000186862_26 (sequence is synthesized)
ccaaccccttgatgctgctccagttcctgcccactggctcccagaacctcccaccaatccccagactcctcccactgatgccaggctcctccagccaactcccagcccagccccctcccc

SEQ ID NO: 681287 - DNA, 120 bp, Artificial Sequence
  ENSG00000186862_27 (sequence is synthesized)
agccctccagactcctgattctaagcccgcaccctccccacgcatcccatgaccctccccctaacctcagattcacccactgactccagcatcccgttatccccaggacctctcctacca

SEQ ID NO: 681288 - DNA, 120 bp, Artificial Sequence
  ENSG00000186862_28 (sequence is synthesized)
acttcttcaggactctccagctcctgcccaccctgcctcctcccagtgccacactggtggctcacatctttccactttcttccctcctcagctgtcattaaggctctgccttagtgtcca

SEQ ID NO: 681289 - DNA, 120 bp, Artificial Sequence
  ENSG00000186862_29 (sequence is synthesized)
aggacaaggtgctagtgggcagcctgtgtcacctgcactcactgctccccaacctcccaagccaggatagggggtgagaaagccaaggtctggagcttgggattggtgggcactttctca

SEQ ID NO: 681290 - DNA, 120 bp, Artificial Sequence
  ENSG00000186862_30 (sequence is synthesized)
catgctgtcccttatgagtcgcccaagcctccagggacacagactctcagacagggccctgaaggggtcaatgcatccattcctcaaccccaagcagcattctgtgcaaggaaacggatg

SEQ ID NO: 681291 - DNA, 120 bp, Artificial Sequence
  ENSG00000186862_31 (sequence is synthesized)
aaaggcttttctagtccctgaaatcctgagagatcatttcacgttggggtccactaagacctcagacattctactggatttgtccttcctccatcaccttttctccccaagagagctcta

SEQ ID NO: 681292 - DNA, 120 bp, Artificial Sequence
  ENSG00000186862_32 (sequence is synthesized)
tgagggggaggagaatagccagcaaatggtgggggggggggggtcaaacaagttcctgtactctttatccagcacattcacattatttttaaacaaaaaaattttttttaattttttctt

SEQ ID NO: 681293 - DNA, 120 bp, Artificial Sequence
  ENSG00000186862_33 (sequence is synthesized)
tgggtttgtacaagaaatttacagtgtgaaaaatatacaagtgaaaacgaggccataaacctgggtgaagggagaggctgcttggtcacaaacacaaataaacaagacatttctgagttc

SEQ ID NO: 681294 - DNA, 120 bp, Artificial Sequence
  ENSG00000186862_34 (sequence is synthesized)
gggccacctccatgcccgcatatgcatgagagaggtgatgccatgagctgtcctgacctctcttttgtctcacacctctctaagccccagggcccgcagtaatcccaactccactctcaa

SEQ ID NO: 681295 - DNA, 120 bp, Artificial Sequence
  ENSG00000186862_35 (sequence is synthesized)
gatgtgactccaatctcagtgaatggcaggggatgctgctgtcagggacagacggaagagtccccagctctggagggcctgattgatggggagacagggccaaccctcaagtcagaatgg

SEQ ID NO: 681296 - DNA, 120 bp, Artificial Sequence
  ENSG00000186862_36 (sequence is synthesized)
tttaagggacagatccctaggcactgggaacactcagcccctgctctgacaatcctcactctgattgagaagctcagtttgaccccagggagctccatctgatgggggaggctcagcccc

SEQ ID NO: 681297 - DNA, 120 bp, Artificial Sequence
  ENSG00000186862_37 (sequence is synthesized)
caagtgaggcctggccaaccacctgtctcagtgagggcctgggagggggcgggaggccccagtaggagggtcaaggaccttgactggtgcagtcttgtgtccaagagaagggggtctgga

SEQ ID NO: 681298 - DNA, 120 bp, Artificial Sequence
  ENSG00000186862_38 (sequence is synthesized)
aacccactggcaggagaggcttctgttcctcctgctcgctggctcaggaaacgcaggggatccaaaggcctgacctcaaaataaggagaggctgcatctttcccctgccctcctccaata

SEQ ID NO: 681299 - DNA, 120 bp, Artificial Sequence
  ENSG00000186862_39 (sequence is synthesized)
gctctgctctcccagatcccagtggttctgctgccacattgccgctgctcctgctgtgaaacccagaggcaaaacaccacctctctacaggggtgctgtaaggattagaaatggggccta

SEQ ID NO: 681300 - DNA, 120 bp, Artificial Sequence
  ENSG00000186862_40 (sequence is synthesized)
tttgccggctgcggcagtagctctcgcctgcgggtggtttgacaaggctggcggcgccacaccagcgaccagccccagggcccgcagtaatcccaactccactctcaacctctactgagg

SEQ ID NO: 681301 - DNA, 120 bp, Artificial Sequence
  ENSG00000186862_41 (sequence is synthesized)
actggggacgggagtagatgactcagccccgagcaggaatgaggggtgaaaggttcccacctgccttgtataaagtcagcgagagtccaagatggtgcctggacggggcagttctctggc

SEQ ID NO: 681302 - DNA, 120 bp, Artificial Sequence
  ENSG00000186862_42 (sequence is synthesized)
attcgaggcgatgcccccagcctgggccacctggaccaggccctaagctgcttcccagagccaatcccacctcggggatcagttctggccccctccccagccaaagggaggaggggctgg

SEQ ID NO: 681303 - DNA, 120 bp, Artificial Sequence
  ENSG00000186862_43 (sequence is synthesized)
agccgcgggcgctgctcccttggtttacagtcccctggcgggcctcagcagacccccagccctgcagcaagcggtctaggtgcccagagagaaagccccgggcgcaggcctggagctcac

SEQ ID NO: 681304 - DNA, 120 bp, Artificial Sequence
  ENSG00000186862_44 (sequence is synthesized)
ctcccacctcagcctcccaaagtgctggcatgacacgtgtgcatcaccatgctcagctaatttttttgcatctttttgtagagatgggggtttcaccctgttgcccaggctagtctcaaa

SEQ ID NO: 681305 - DNA, 120 bp, Artificial Sequence
  ENSG00000186862_45 (sequence is synthesized)
gagatgggggtttcaccctgttgcccaggctagtctcaaattcctggactgaagctatctacccgccttagtctcccaaagtgctaggattacagcgtgatctaccacacctggccaatc

SEQ ID NO: 681306 - DNA, 66 bp, Artificial Sequence
  ENSG00000186862_46 (sequence is synthesized)
gtgctaggattacagcgtgatctaccacacctggccaatcccaactactctggaagctgaagcagc

SEQ ID NO: 681307 - DNA, 120 bp, Artificial Sequence
  ENSG00000186862_47 (sequence is synthesized)
ggaaaggaggatgggccttctacttctttccccactaggggcagttgtggcttccaggcacattgtggttccctgaaggaaagctcttgtccaccagagccattttatcacatctgctgg

SEQ ID NO: 681308 - DNA, 120 bp, Artificial Sequence
  ENSG00000186862_48 (sequence is synthesized)
tcaccacctgtactattacttaatagttggtttgaaacccactcacttttaaaatctagtctcattctatgcagtaacctctgagaaattacgtttggtgtgctagtcgtattttttctt

SEQ ID NO: 681309 - DNA, 120 bp, Artificial Sequence
  ENSG00000186862_49 (sequence is synthesized)
ctgagaaattacgtttggtgtgctagtcgtattttttcttagacacattaaaatagaacggtaacgattccagcaggaagcattaaaatgtaattctaggccgggcgcggtggctcacgc

SEQ ID NO: 681310 - DNA, 63 bp, Artificial Sequence
  ENSG00000186862_50 (sequence is synthesized)
ggtggatcgcttgaggtgaggagtcctgggctttttggtgcacgcctgtaatcccagctactc

SEQ ID NO: 681311 - DNA, 120 bp, Artificial Sequence
  ENSG00000186866_0 (sequence is synthesized)
gccggaagtgcgtggccgcccggggccatggcgacactcagcttcgtcttcctgctgctgggggcagtgtcctggcctccggcttctgcctccggccaggagttctggcccggacaatcg

SEQ ID NO: 681312 - DNA, 120 bp, Artificial Sequence
  ENSG00000186866_1 (sequence is synthesized)
gcggccgatattctgtcgggggcggcttcccgcagacggtatcttctgtatgacgtcaaccccccggaaggcttcaacctgcgcagggatgtctatatccgaatcgcctctctcctgaag

SEQ ID NO: 681313 - DNA, 120 bp, Artificial Sequence
  ENSG00000186866_2 (sequence is synthesized)
actctgctgaagacggaggagtgggtgcttgtcctgcctccatggggccgcctctatcactggcagagtcctgacatccaccaggtccggattccctggtctgagttttttgatcttcca

SEQ ID NO: 681314 - DNA, 120 bp, Artificial Sequence
  ENSG00000186866_3 (sequence is synthesized)
agtctcaataaaaacatccccgtcatcgagtatgagcagttcatcgcagaatctggtgggccctttattgaccaggtttacgtcctgcaaagttacgcagaggggtggaaagaagggacc

SEQ ID NO: 681315 - DNA, 120 bp, Artificial Sequence
  ENSG00000186866_4 (sequence is synthesized)
tgggaagagaaggtggacgagcggccgtgtattgatcagctcctgtactcccaggacaagcacgagtactacagaggatggttttggggttatgaggagaccaggggtctaaacgtctcc

SEQ ID NO: 681316 - DNA, 120 bp, Artificial Sequence
  ENSG00000186866_5 (sequence is synthesized)
tgtctgtccgtccagggctcagcctccatcgtggcgcccctgctgctgagaaacacatcagcccggtccgtgatgttagacagagccgagaacctacttcacgaccactatggagggaaa

SEQ ID NO: 681317 - DNA, 120 bp, Artificial Sequence
  ENSG00000186866_6 (sequence is synthesized)
gaatactgggatacccgtcgcagcatggtgtttgccaggcacctgcgggaggtgggagacgagttcaggagcagacatctcaactccacggacgacgcagacaggatccccttccaggag

SEQ ID NO: 681318 - DNA, 120 bp, Artificial Sequence
  ENSG00000186866_7 (sequence is synthesized)
gactggatgaagatgaaggtcaagctgggctccgcgctagggggcccctacctgggagtccacctgagaagaaaagatttcatctggggtcacagacaggatgtacccagtctggaaggg

SEQ ID NO: 681319 - DNA, 120 bp, Artificial Sequence
  ENSG00000186866_8 (sequence is synthesized)
gccgtgaggaagatccgcagcctcatgaagacccaccggctggacaaggtgtttgtggccacagatgccgtcagaaaggaatatgaagagctaaaaaagctgttacccgagatggtgagg

SEQ ID NO: 681320 - DNA, 120 bp, Artificial Sequence
  ENSG00000186866_9 (sequence is synthesized)
tttgaacccacgtgggaggagctggagctctacaaggacggaggcgttgcgattattgaccagtggatctgcgcacacgccaggttttttattggcacctcagtctcaacattttctttt

SEQ ID NO: 681321 - DNA, 120 bp, Artificial Sequence
  ENSG00000186866_10 (sequence is synthesized)
cggattcatgaggaaagagaaatcctggggttggaccccaagacgacgtacaacaggttctgcggagaccaagagaaggcgtgtgagcaacccacccactggaagatcacctactgagga

SEQ ID NO: 681322 - DNA, 120 bp, Artificial Sequence
  ENSG00000186866_11 (sequence is synthesized)
tcgcagggtcccaggcccagaagaggccccacgcctctagagctgggctccgtcctcggcgttgccagccgccatggctgatgaagaggctccgctgctctcgggggtggcggttgtttt

SEQ ID NO: 681323 - DNA, 120 bp, Artificial Sequence
  ENSG00000186866_12 (sequence is synthesized)
caggcagcgtctgtgaacccacagctcggttgccagcagtgcccgcgtggtgacccagaagcaggagtgtttgtcaggctcccgctctggcctttccagccacctttcatgtcttcatat

SEQ ID NO: 681324 - DNA, 120 bp, Artificial Sequence
  ENSG00000186866_13 (sequence is synthesized)
tttaagtgcattgaggatagatgcaggcgggtgagctgccctccgtcaggtggacccgggctgacatttccctgggagctggtgcaaggagaagcgtcattttaaatgtctgcagagcga

SEQ ID NO: 681325 - DNA, 120 bp, Artificial Sequence
  ENSG00000186866_14 (sequence is synthesized)
ccaggggcctcatgaatctctccgttgccctccgcgcagcaggaggctgcctgtgtgtttcctcctgggatgcgtgcaaggcagacctggtgctgcaaaggaaagggcctgaggcctcag

SEQ ID NO: 681326 - DNA, 120 bp, Artificial Sequence
  ENSG00000186866_15 (sequence is synthesized)
ggagccccgtggagggatgacagttcaggccctactgctggcacgtcagagcactgggaagtttttcagtgacgtctctggggcactcagtggattgtctgtaggaaacttgcagctctg

SEQ ID NO: 681327 - DNA, 120 bp, Artificial Sequence
  ENSG00000186866_16 (sequence is synthesized)
gaaacttgcagctctgctcctcacaccaggcccggctggccacccaccctcgcccccactggccacccctccctcgccccgactgccccgccccaccctcaccccgactgccccgccctc

SEQ ID NO: 681328 - DNA, 120 bp, Artificial Sequence
  ENSG00000186866_17 (sequence is synthesized)
ctgccctcgccccggctggcaggtgcacatggggcctccaggtctgccattcgctattgagaactagaaatgaggaaggacagttacgctaactccaaaaggctgtctaggatgagctgc

SEQ ID NO: 681329 - DNA, 120 bp, Artificial Sequence
  ENSG00000186866_18 (sequence is synthesized)
tttatcagggagctccttgtacccattttacagaaatcatttttaggtctttgtgccaccaccacgaggggcatctgcaaagagggcaacgctagacacagaatccgtggaaggtgcagc

SEQ ID NO: 681330 - DNA, 120 bp, Artificial Sequence
  ENSG00000186866_19 (sequence is synthesized)
agtgcctcaggggtcctcagggtcagggagcccccctcaccctcttggcccgttaccctttgtgactttccaccatggtgtcgtgtgaccctcagtcaggttggtgggggctgagtcctc

SEQ ID NO: 681331 - DNA, 120 bp, Artificial Sequence
  ENSG00000186866_20 (sequence is synthesized)
actgagcagccactttccacatctgctagaggaacagtgacatggacacctgtgacagagagaggacagttaggagggacagacagctcttcctttcggagcctggctagtctaggacat

SEQ ID NO: 681332 - DNA, 120 bp, Artificial Sequence
  ENSG00000186866_21 (sequence is synthesized)
caccttgctgtgtcttctcaagcttttaaaattgaccctgaacgtgtgacagggtcctatggtgttactcaaagctgtgcagggtaaatgatgacatatttattctttttccatttgttc

SEQ ID NO: 681333 - DNA, 120 bp, Artificial Sequence
  ENSG00000186866_22 (sequence is synthesized)
tagaaacagtgcctttttcatcagttgcattttccaggctgagagctgtataaaacattttggactgtgaccatgtaccttcctttttaagaaaaataaactgctttatggaagttggta

SEQ ID NO: 681334 - DNA, 120 bp, Artificial Sequence
  ENSG00000186866_23 (sequence is synthesized)
ctgagcccagtgtgtgccgcagcttcccacggcaggggctggcagagccggcaggggtgggcggcttgccctgcgttggcttcatgcaggagaccctccaagagcctccaccgtggatgg

SEQ ID NO: 681335 - DNA, 120 bp, Artificial Sequence
  ENSG00000186866_24 (sequence is synthesized)
acacgccagttcatgaagtgccgctggagagccagagaccagctgcgcaggagccggaggaacgggcaggccgctgacctgaggtctggagaaacccctggagaagggtgtccccaccag

SEQ ID NO: 681336 - DNA, 120 bp, Artificial Sequence
  ENSG00000186866_25 (sequence is synthesized)
cccatacagcgtgtgtgtggagggggccttgacctccgtgatgtctactgtgcctcaggataaggacccgccatgccctggctagacagtgtgtggttttttattggcacctcagtctca

SEQ ID NO: 681337 - DNA, 120 bp, Artificial Sequence
  ENSG00000186866_26 (sequence is synthesized)
ggtggctttcaaaggttcttctgtcccaagtactcggtgtcagagcagatggtcgcctgtgttcacagtggtcatttccatactgtttgcctcctcgtctgagtctcctgtagcatctgg

SEQ ID NO: 681338 - DNA, 120 bp, Artificial Sequence
  ENSG00000186866_27 (sequence is synthesized)
ttcagtgtttccctgggctgaagttaattgttcatcttgcccctttagttctcatgcacagaattcctccatagcaggctgttggcatagctggcctcgtctcagaacctcttcttgtgt

SEQ ID NO: 681339 - DNA, 120 bp, Artificial Sequence
  ENSG00000186866_28 (sequence is synthesized)
cgcattttcccatcattcccggtttctgcccctgtctgccccctgccctgagagttgcccgtgccctggacttgggcatgtccttgttgctgtgttgttgagcatccgtgagcgtccccg

SEQ ID NO: 681340 - DNA, 120 bp, Artificial Sequence
  ENSG00000186866_29 (sequence is synthesized)
aggccgggagcgtgggccctcgtgtgatcattctcgtggggctgccatgagcgtccccaaggctgggagcatgggccctcgtgtgatcgttcttgtggggctgccgtgagcgtccccgag

SEQ ID NO: 681341 - DNA, 120 bp, Artificial Sequence
  ENSG00000186866_30 (sequence is synthesized)
gccgggagcgtgggccctcgtgtgatcattctcgtggggctgccgtgagcgtcccagaggccgggagcgtgggccctgcgtgcagtcattcctctggggttgctgtgggaggtacgcctg

SEQ ID NO: 681342 - DNA, 120 bp, Artificial Sequence
  ENSG00000186866_31 (sequence is synthesized)
ggcctctgttcctccaaagacctgcctgcccatctgcataggagatgaaggctggggttagggtgaaacggtttgagttaaatggaaaatgaaagtagagggaatgatcttccccgtggt

SEQ ID NO: 681343 - DNA, 120 bp, Artificial Sequence
  ENSG00000186866_32 (sequence is synthesized)
tagcactgtgcacacgcgtgcgtctctgtgggttagtctgtctctctcctgcccgaggaatgctgagcgccctgagccggtgcctcttcacacatctgctatttcctgtggtgttctggg

SEQ ID NO: 681344 - DNA, 120 bp, Artificial Sequence
  ENSG00000186866_33 (sequence is synthesized)
catggtgtgtaagacccacagaggctccgggtgatgctgtctgctgggtgtgggtccctttccctgttaagcagacaggatgcagcgctgacttcttaggtcagggcggaggtgtgcagg

SEQ ID NO: 681345 - DNA, 120 bp, Artificial Sequence
  ENSG00000186866_34 (sequence is synthesized)
agcccagttacgaactcacccctgcttctcaggtgtggccttgggattttgactgcgaccttggcggtgctgtctccgcagcccaggaagcctgctgtggggaggcttcgcactgagctc

SEQ ID NO: 681346 - DNA, 120 bp, Artificial Sequence
  ENSG00000186866_35 (sequence is synthesized)
tcagcctcctgccctcagctgcgcgaagcgctcggcccagctcactgaagctgccctgcctccgggccggcgcggcctgctctggcaggcccctgtgtgtggggtggtgagggtctcccc

SEQ ID NO: 681347 - DNA, 120 bp, Artificial Sequence
  ENSG00000186866_36 (sequence is synthesized)
gcactggcgtgcctggcctgggatttggtgacggagaggagggctcccagggggacatgcggtgggacaggagcgtggcggctgctgactgtggggtgtggatggggctgcagcaccagg

SEQ ID NO: 681348 - DNA, 120 bp, Artificial Sequence
  ENSG00000186866_37 (sequence is synthesized)
cagagcccctcagggcgccgatgtcgagggcacctgagcgaggggtgccagcaagggggcggccggctggtgggtgctcgggggacggccgtgttggttccatgtaactgtggaactcat

SEQ ID NO: 681349 - DNA, 120 bp, Artificial Sequence
  ENSG00000186866_38 (sequence is synthesized)
ttcactcagctgctcctctcagttctccctgactctggaacctctgtgacgccagttctccctgactctggaacctctgtgatcctttgcaggttttttattggcacctcagtctcaaca

SEQ ID NO: 681350 - DNA, 120 bp, Artificial Sequence
  ENSG00000186866_39 (sequence is synthesized)
tctcaataaaaacatccccgtcatcgagtatgagcagttcatcgcaggaagacgcactgcgtgtggagtatgcttcgtggtgtctcagtgcagcgccagggataaagaatctggtgggcc

SEQ ID NO: 681351 - DNA, 120 bp, Artificial Sequence
  ENSG00000186866_40 (sequence is synthesized)
acttcccatagccacccctggttctgtgagtgagtgggagcagagggcgggaagtggctgccccctcccgtggacacagcaggcctgctgacgtgttcaccagggcagcagcttgtaaag

SEQ ID NO: 681352 - DNA, 120 bp, Artificial Sequence
  ENSG00000186866_41 (sequence is synthesized)
ccggaacctgcctgcaggagacacagtccctgctcacgtgggactttgtgcaggtcagtcccaccccgtttggcaaagcaggatgtgctaaccgcctaagctagaagtcgagttggggag

SEQ ID NO: 681353 - DNA, 120 bp, Artificial Sequence
  ENSG00000186866_42 (sequence is synthesized)
tcagctcctgtactcccaggacaagcacgagtactacagggatggaggtcttgtcagtcccaagtgtcgattgccattaaaggctctgacactaccaggcctcctgtggaaaagctgtca

SEQ ID NO: 681354 - DNA, 120 bp, Artificial Sequence
  ENSG00000186866_43 (sequence is synthesized)
tcaataaaaacatccccgtcatcgagtatgagcagttcatcgcaggtgaggccgagcggcacgctgggaggccgtggttgcttaactggggccaggcagtcatttctaaggtagacatca

SEQ ID NO: 681355 - DNA, 120 bp, Artificial Sequence
  ENSG00000186866_44 (sequence is synthesized)
ggttgggcttacgattgcatccagcctcaccagcatcctccagtgcccagtgctgctgcctgaggcctgtggcagcacctcctccgttcaggagcacagtccctttcccacgctgcagtg

SEQ ID NO: 681356 - DNA, 120 bp, Artificial Sequence
  ENSG00000186867_0 (sequence is synthesized)
atggccagaaggcggggagccagaggcgccaggaccctcgcgtggcgctccagcaccccagaccgtggcggcgcctcgccttagggaagagcaagggaagaactttatttgaaccgcgaa

SEQ ID NO: 681357 - DNA, 120 bp, Artificial Sequence
  ENSG00000186867_1 (sequence is synthesized)
cattttttggtcactgagatcgagtctcccagtgctttggcttcccgcctctttatcgtgggtttgatccctgagctgctctcctttcccgaacctcccggggtgcagcctagagccctc

SEQ ID NO: 681358 - DNA, 120 bp, Artificial Sequence
  ENSG00000186867_2 (sequence is synthesized)
ccgcgcggctgactccagagtagaggaagggaggcggcctccggctggtcccccgaagccctcgctgccccgcagatgcggatggccagccagtagcgggcggtggccccgcgtcccggg

SEQ ID NO: 681359 - DNA, 120 bp, Artificial Sequence
  ENSG00000186867_3 (sequence is synthesized)
agcgcacagcaatgcaggcgcttaacattaccccggagcagttctctcggctgctgcgggaccacaacctgacgcgggagcagttcatcgctctgtaccggctgcgaccgctcgtctaca

SEQ ID NO: 681360 - DNA, 120 bp, Artificial Sequence
  ENSG00000186867_4 (sequence is synthesized)
ccccagagctgccgggacgcgccaagctggccctcgtgctcaccggcgtgctcatcttcgccctggcgctctttggcaatgctctggtgttctacgtggtgacccgcagcaaggccatgc

SEQ ID NO: 681361 - DNA, 120 bp, Artificial Sequence
  ENSG00000186867_5 (sequence is synthesized)
gcaccgtcaccaacatctttatctgctccttggcgctcagtgacctgctcatcaccttcttctgcattcccgtcaccatgctccagaacatttccgacaactggctggggggtgctttca

SEQ ID NO: 681362 - DNA, 120 bp, Artificial Sequence
  ENSG00000186867_6 (sequence is synthesized)
tttgcaagatggtgccatttgtccagtctaccgctgttgtgacagaaatcctcactatgacctgcattgctgtggaaaggcaccagggacttgtgcatccttttaaaatgaagtggcaat

SEQ ID NO: 681363 - DNA, 120 bp, Artificial Sequence
  ENSG00000186867_7 (sequence is synthesized)
acaccaaccgaagggctttcacaatgctaggtgtggtctggctggtggcagtcatcgtaggatcacccatgtggcacgtgcaacaacttgagatcaaatatgacttcctatatgaaaagg

SEQ ID NO: 681364 - DNA, 120 bp, Artificial Sequence
  ENSG00000186867_8 (sequence is synthesized)
aacacatctgctgcttagaagagtggaccagccctgtgcaccagaagatctacaccaccttcatccttgtcatcctcttcctcctgcctcttatggtgatgcttattctgtacagtaaaa

SEQ ID NO: 681365 - DNA, 120 bp, Artificial Sequence
  ENSG00000186867_9 (sequence is synthesized)
catggaaaagaaatgtccaaaatagccaggaagaagaaacgagctgtcattatgatggtgacagtggtggctctctttgctgtgtgctgggcaccattccatgttgtccatatgatgatt

SEQ ID NO: 681366 - DNA, 120 bp, Artificial Sequence
  ENSG00000186867_10 (sequence is synthesized)
gaatacagtaattttgaaaaggaatatgatgatgtcacaatcaagatgatttttgctatcgtgcaaattattggattttccaactccatctgtaatcccattgtctatgcatttatgaat

SEQ ID NO: 681367 - DNA, 120 bp, Artificial Sequence
  ENSG00000186867_11 (sequence is synthesized)
gaaaacttcaaaaaaaatgttttgtctgcagtttgttattgcatagtaaataaaaccttctctccagcacaaaggcatggaaattcaggaattacaatgatgcggaagaaagcaaagttt

SEQ ID NO: 681368 - DNA, 120 bp, Artificial Sequence
  ENSG00000186867_12 (sequence is synthesized)
tccctcagagagaatccagtggaggaaaccaaaggagaagcattcagtgatggcaacattgaagtcaaattgtgtgaacagacagaggagaagaaaaagctcaaacgacatcttgctctc

SEQ ID NO: 681369 - DNA, 120 bp, Artificial Sequence
  ENSG00000186867_13 (sequence is synthesized)
tttaggtctgaactggctgagaattctcctttagacagtgggcattaattataacaatatcttcataattaatgcccttcagattgtaacccaaagagaaaattattttgagcaaaggtc

SEQ ID NO: 681370 - DNA, 120 bp, Artificial Sequence
  ENSG00000186867_14 (sequence is synthesized)
aaatactctttttattcttaagatgatgacaagaagaaaacaaatcatgtttccattaaaaaatgacacgaggctagtccaagtgcagtgatgtttacaaccaattgatcacaatcattt

SEQ ID NO: 681371 - DNA, 120 bp, Artificial Sequence
  ENSG00000186867_15 (sequence is synthesized)
gtttacaaccaattgatcacaatcatttaacagatttctgtgttccttctcattcccactgcttcacttgactagccttaaaaaagcaacatggaaggccaggcacggtggctcatgcct

SEQ ID NO: 681372 - DNA, 61 bp, Artificial Sequence
  ENSG00000186867_16 (sequence is synthesized)
aggcggagccgtctcaaaaaaaatttttttgaaaaattcgtaaaccatacttttaagatta

SEQ ID NO: 681373 - DNA, 120 bp, Artificial Sequence
  ENSG00000186867_17 (sequence is synthesized)
tttttgaaaaattcgtaaaccatacttttaagattatttcagtggatttttaaaaatcttgtacagaaatcagggttcttagctagcagtttttctcccacgcagtcactgtaatgtgac

SEQ ID NO: 681374 - DNA, 120 bp, Artificial Sequence
  ENSG00000186867_18 (sequence is synthesized)
agagtagcttcttatctaacttgtaggcattggaatataatttgagagtttcagtgctttccctgtttgccttcatctccacaccatctctcttttaggctgacctcaaaactgaaaatg

SEQ ID NO: 681375 - DNA, 120 bp, Artificial Sequence
  ENSG00000186867_19 (sequence is synthesized)
tatcattttgggtatactttttcagtttacatcttaaacgtttaagcactatgttcagctaatctaagataacctaccagtggcattgccacattaacactcattagattgagaactatc

SEQ ID NO: 681376 - DNA, 80 bp, Artificial Sequence
  ENSG00000186868_0 (sequence is synthesized)
ggacggccgagcggcagggcgctcgcgcgcgcccactagtggccggaggagaaggctcccgcggaggccgcgctgcccgc

SEQ ID NO: 681377 - DNA, 120 bp, Artificial Sequence
  ENSG00000186868_1 (sequence is synthesized)
cgcctgcgccgcccgccggcctcaggaacgcgccctcttcgccggcgcgcgccctcgcagtcaccgccacccaccagctccggcaccaacagcagcgccgctgccaccgcccaccttctg

SEQ ID NO: 681378 - DNA, 120 bp, Artificial Sequence
  ENSG00000186868_2 (sequence is synthesized)
cgccaccacagccaccttctcctcctccgctgtcctctcccgtcctcgcctctgtcgactatcaggtgaactttgaaccaggatggctgagccccgccaggagttcgaagtgatggaaga

SEQ ID NO: 681379 - DNA, 120 bp, Artificial Sequence
  ENSG00000186868_3 (sequence is synthesized)
tcacgctgggacgtacgggttgggggacaggaaagatcaggggggctacaccatgcaccaagaccaagagggtgacacggacgctggcctgaaagaatctcccctgcagacccccactga

SEQ ID NO: 681380 - DNA, 120 bp, Artificial Sequence
  ENSG00000186868_4 (sequence is synthesized)
ggacggatctgaggaaccgggctctgaaacctctgatgctaagagcactccaacagcggaagatgtgacagcacccttagtggatgagggagctcccggcaagcaggctgccgcgcagcc

SEQ ID NO: 681381 - DNA, 120 bp, Artificial Sequence
  ENSG00000186868_5 (sequence is synthesized)
ccacacggagatcccagaaggaaccacagctgaagaagcaggcattggagacacccccagcctggaagacgaagctgctggtcacgtgacccaagagcctgaaagtggtaaggtggtcca

SEQ ID NO: 681382 - DNA, 120 bp, Artificial Sequence
  ENSG00000186868_6 (sequence is synthesized)
ggaaggcttcctccgagagccaggccccccaggtctgagccaccagctcatgtccggcatgcctggggctcccctcctgcctgagggccccagagaggccacacgccaaccttcggggac

SEQ ID NO: 681383 - DNA, 120 bp, Artificial Sequence
  ENSG00000186868_7 (sequence is synthesized)
aggacctgaggacacagagggcggccgccacgcccctgagctgctcaagcaccagcttctaggagacctgcaccaggaggggccgccgctgaagggggcagggggcaaagagaggccggg

SEQ ID NO: 681384 - DNA, 120 bp, Artificial Sequence
  ENSG00000186868_8 (sequence is synthesized)
gagcaaggaggaggtggatgaagaccgcgacgtcgatgagtcctccccccaagactcccctccctccaaggcctccccagcccaagatgggcggcctccccagacagccgccagagaagc

SEQ ID NO: 681385 - DNA, 120 bp, Artificial Sequence
  ENSG00000186868_9 (sequence is synthesized)
caccagcatcccaggcttcccagcggagggtgccatccccctccctgtggatttcctctccaaagtttccacagagatcccagcctcagagcccgacgggcccagtgtagggcgggccaa

SEQ ID NO: 681386 - DNA, 120 bp, Artificial Sequence
  ENSG00000186868_10 (sequence is synthesized)
agggcaggatgcccccctggagttcacgtttcacgtggaaatcacacccaacgtgcagaaggagcaggcgcactcggaggagcatttgggaagggctgcatttccaggggcccctggaga

SEQ ID NO: 681387 - DNA, 120 bp, Artificial Sequence
  ENSG00000186868_11 (sequence is synthesized)
ggggccagaggcccggggcccctctttgggagaggacacaaaagaggctgaccttccagagccctctgaaaagcagcctgctgctgctccgcgggggaagcccgtcagccgggtccctca

SEQ ID NO: 681388 - DNA, 120 bp, Artificial Sequence
  ENSG00000186868_12 (sequence is synthesized)
actcaaagctcgcatggtcagtaaaagcaaagacgggactggaagcgatgacaaaaaagccaagacatccacacgttcctctgctaaaaccttgaaaaataggccttgccttagccccaa

SEQ ID NO: 681389 - DNA, 120 bp, Artificial Sequence
  ENSG00000186868_13 (sequence is synthesized)
acaccccactcctggtagctcagaccctctgatccaaccctccagccctgctgtgtgcccagagccaccttcctctcctaaatacgtctcttctgtcacttcccgaactggcagttctgg

SEQ ID NO: 681390 - DNA, 120 bp, Artificial Sequence
  ENSG00000186868_14 (sequence is synthesized)
agcaaaggagatgaaactcaagggggctgatggtaaaacgaagatcgccacaccgcggggagcagcccctccaggccagaagggccaggccaacgccaccaggattccagcaaaaacccc

SEQ ID NO: 681391 - DNA, 120 bp, Artificial Sequence
  ENSG00000186868_15 (sequence is synthesized)
gcccgctccaaagacaccacccagctctggtgaacctccaaaatcaggggatcgcagcggctacagcagccccggctccccaggcactcccggcagccgctcccgcaccccgtcccttcc

SEQ ID NO: 681392 - DNA, 120 bp, Artificial Sequence
  ENSG00000186868_16 (sequence is synthesized)
aaccccacccacccgggagcccaagaaggtggcagtggtccgtactccacccaagtcgccgtcttccgccaagagccgcctgcagacagcccccgtgcccatgccagacctgaagaatgt

SEQ ID NO: 681393 - DNA, 120 bp, Artificial Sequence
  ENSG00000186868_17 (sequence is synthesized)
caagtccaagatcggctccactgagaacctgaagcaccagccgggaggcgggaaggtgcagataattaataagaagctggatcttagcaacgtccagtccaagtgtggctcaaaggataa

SEQ ID NO: 681394 - DNA, 120 bp, Artificial Sequence
  ENSG00000186868_18 (sequence is synthesized)
tatcaaacacgtcccgggaggcggcagtgtgcaaatagtctacaaaccagttgacctgagcaaggtgacctccaagtgtggctcattaggcaacatccatcataaaccaggaggtggcca

SEQ ID NO: 681395 - DNA, 120 bp, Artificial Sequence
  ENSG00000186868_19 (sequence is synthesized)
ggtggaagtaaaatctgagaagcttgacttcaaggacagagtccagtcgaagattgggtccctggacaatatcacccacgtccctggcggaggaaataaaaagattgaaacccacaagct

SEQ ID NO: 681396 - DNA, 120 bp, Artificial Sequence
  ENSG00000186868_20 (sequence is synthesized)
gaccttccgcgagaacgccaaagccaagacagaccacggggcggagatcgtgtacaagtcgccagtggtgtctggggacacgtctccacggcatctcagcaatgtctcctccaccggcag

SEQ ID NO: 681397 - DNA, 120 bp, Artificial Sequence
  ENSG00000186868_21 (sequence is synthesized)
catcgacatggtagactcgccccagctcgccacgctagctgacgaggtgtctgcctccctggccaagcagggtttgtgatcaggcccctggggcggtcaataattgtggagaggagagaa

SEQ ID NO: 681398 - DNA, 120 bp, Artificial Sequence
  ENSG00000186868_22 (sequence is synthesized)
tgagagagtgtggaaaaaaaaagaataatgacccggcccccgccctctgcccccagctgctcctcgcagttcggttaattggttaatcacttaacctgcttttgtcactcggctttggct

SEQ ID NO: 681399 - DNA, 120 bp, Artificial Sequence
  ENSG00000186868_23 (sequence is synthesized)
cgggacttcaaaatcagtgatgggagtaagagcaaatttcatctttccaaattgatgggtgggctagtaataaaatatttaaaaaaaaacattcaaaaacatggccacatccaacatttc

SEQ ID NO: 681400 - DNA, 120 bp, Artificial Sequence
  ENSG00000186868_24 (sequence is synthesized)
ctcaggcaattccttttgattcttttttcttccccctccatgtagaagagggagaaggagaggctctgaaagctgcttctgggggatttcaagggactgggggtgccaaccacctctggc

SEQ ID NO: 681401 - DNA, 120 bp, Artificial Sequence
  ENSG00000186868_25 (sequence is synthesized)
cctgttgtgggggtgtcacagaggcagtggcagcaacaaaggatttgaaacttggtgtgttcgtggagccacaggcagacgatgtcaaccttgtgtgagtgtgacgggggttggggtggg

SEQ ID NO: 681402 - DNA, 120 bp, Artificial Sequence
  ENSG00000186868_26 (sequence is synthesized)
gcgggaggccacgggggaggccgaggcaggggctgggcagaggggagaggaagcacaagaagtgggagtgggagaggaagccacgtgctggagagtagacatccccctccttgccgctgg

SEQ ID NO: 681403 - DNA, 120 bp, Artificial Sequence
  ENSG00000186868_27 (sequence is synthesized)
gagagccaaggcctatgccacctgcagcgtctgagcggccgcctgtccttggtggccgggggtgggggcctgctgtgggtcagtgtgccaccctctgcagggcagcctgtgggagaaggg

SEQ ID NO: 681404 - DNA, 120 bp, Artificial Sequence
  ENSG00000186868_28 (sequence is synthesized)
cttcgtggatgacctccttagaaaagactgaccttgatgtcttgagagcgctggcctcttcctccctccctgcagggtagggggcctgagttgaggggcttccctctgctccacagaaac

SEQ ID NO: 681405 - DNA, 120 bp, Artificial Sequence
  ENSG00000186868_29 (sequence is synthesized)
cctgttttattgagttctgaaggttggaactgctgccatgattttggccactttgcagacctgggactttagggctaaccagttctctttgtaaggacttgtgcctcttgggagacgtcc

SEQ ID NO: 681406 - DNA, 120 bp, Artificial Sequence
  ENSG00000186868_30 (sequence is synthesized)
acccgtttccaagcctgggccactggcatctctggagtgtgtgggggtctgggaggcaggtcccgagccccctgtccttcccacggccactgcagtcaccccgtctgcgccgctgtgctg

SEQ ID NO: 681407 - DNA, 120 bp, Artificial Sequence
  ENSG00000186868_31 (sequence is synthesized)
ttgtctgccgtgagagcccaatcactgcctatacccctcatcacacgtcacaatgtcccgaattcccagcctcaccaccccttctcagtaatgaccctggttggttgcaggaggtaccta

SEQ ID NO: 681408 - DNA, 120 bp, Artificial Sequence
  ENSG00000186868_32 (sequence is synthesized)
ctccatactgagggtgaaattaagggaaggcaaagtccaggcacaagagtgggaccccagcctctcactctcagttccactcatccaactgggaccctcaccacgaatctcatgatctga

SEQ ID NO: 681409 - DNA, 120 bp, Artificial Sequence
  ENSG00000186868_33 (sequence is synthesized)
ttcggttccctgtctcctcctcccgtcacagatgtgagccagggcactgctcagctgtgaccctaggtgtttctgccttgttgacatggagagagccctttcccctgagaaggcctggcc

SEQ ID NO: 681410 - DNA, 120 bp, Artificial Sequence
  ENSG00000186868_34 (sequence is synthesized)
ccttcctgtgctgagcccacagcagcaggctgggtgtcttggttgtcagtggtggcaccaggatggaagggcaaggcacccagggcaggcccacagtcccgctgtcccccacttgcaccc

SEQ ID NO: 681411 - DNA, 120 bp, Artificial Sequence
  ENSG00000186868_35 (sequence is synthesized)
tagcttgtagctgccaacctcccagacagcccagcccgctgctcagctccacatgcatagtatcagccctccacacccgacaaaggggaacacacccccttggaaatggttcttttcccc

SEQ ID NO: 681412 - DNA, 120 bp, Artificial Sequence
  ENSG00000186868_36 (sequence is synthesized)
cagtcccagctggaagccatgctgtctgttctgctggagcagctgaacatatacatagatgttgccctgccctccccatctgcaccctgttgagttgtagttggatttgtctgtttatgc

SEQ ID NO: 681413 - DNA, 120 bp, Artificial Sequence
  ENSG00000186868_37 (sequence is synthesized)
ttggattcaccagagtgactatgatagtgaaaagaaaaaaaaaaaaaaaaaaggacgcatgtatcttgaaatgcttgtaaagaggtttctaacccaccctcacgaggtgtctctcacccc

SEQ ID NO: 681414 - DNA, 120 bp, Artificial Sequence
  ENSG00000186868_38 (sequence is synthesized)
cacactgggactcgtgtggcctgtgtggtgccaccctgctggggcctcccaagttttgaaaggctttcctcagcacctgggacccaacagagaccagcttctagcagctaaggaggccgt

SEQ ID NO: 681415 - DNA, 120 bp, Artificial Sequence
  ENSG00000186868_39 (sequence is synthesized)
tcagctgtgacgaaggcctgaagcacaggattaggactgaagcgatgatgtccccttccctacttccccttggggctccctgtgtcagggcacagactaggtcttgtggctggtctggct

SEQ ID NO: 681416 - DNA, 120 bp, Artificial Sequence
  ENSG00000186868_40 (sequence is synthesized)
tgcggcgcgaggatggttctctctggtcatagcccgaagtctcatggcagtcccaaaggaggcttacaactcctgcatcacaagaaaaaggaagccactgccagctggggggatctgcag

SEQ ID NO: 681417 - DNA, 120 bp, Artificial Sequence
  ENSG00000186868_41 (sequence is synthesized)
ctcccagaagctccgtgagcctcagccacccctcagactgggttcctctccaagctcgccctctggaggggcagcgcagcctcccaccaagggccctgcgaccacagcagggattgggat

SEQ ID NO: 681418 - DNA, 120 bp, Artificial Sequence
  ENSG00000186868_42 (sequence is synthesized)
gaattgcctgtcctggatctgctctagaggcccaagctgcctgcctgaggaaggatgacttgacaagtcaggagacactgttcccaaagccttgaccagagcacctcagcccgctgacct

SEQ ID NO: 681419 - DNA, 120 bp, Artificial Sequence
  ENSG00000186868_43 (sequence is synthesized)
tgcacaaactccatctgctgccatgagaaaagggaagccgcctttgcaaaacattgctgcctaaagaaactcagcagcctcaggcccaattctgccacttctggtttgggtacagttaaa

SEQ ID NO: 681420 - DNA, 120 bp, Artificial Sequence
  ENSG00000186868_44 (sequence is synthesized)
ggcaaccctgagggacttggcagtagaaatccagggcctcccctggggctggcagcttcgtgtgcagctagagctttacctgaaaggaagtctctgggcccagaactctccaccaagagc

SEQ ID NO: 681421 - DNA, 120 bp, Artificial Sequence
  ENSG00000186868_45 (sequence is synthesized)
ctccctgccgttcgctgagtcccagcaattctcctaagttgaagggatctgagaaggagaaggaaatgtggggtagatttggtggtggttagagatatgcccccctcattactgccaaca

SEQ ID NO: 681422 - DNA, 120 bp, Artificial Sequence
  ENSG00000186868_46 (sequence is synthesized)
gtttcggctgcatttcttcacgcacctcggttcctcttcctgaagttcttgtgccctgctcttcagcaccatgggccttcttatacggaaggctctgggatctcccccttgtggggcagg

SEQ ID NO: 681423 - DNA, 120 bp, Artificial Sequence
  ENSG00000186868_47 (sequence is synthesized)
ctcttggggccagcctaagatcatggtttagggtgatcagtgctggcagataaattgaaaaggcacgctggcttgtgatcttaaatgaggacaatccccccagggctgggcactcctccc

SEQ ID NO: 681424 - DNA, 120 bp, Artificial Sequence
  ENSG00000186868_48 (sequence is synthesized)
ctcccctcacttctcccacctgcagagccagtgtccttgggtgggctagataggatatactgtatgccggctccttcaagctgctgactcactttatcaatagttccatttaaattgact

SEQ ID NO: 681425 - DNA, 120 bp, Artificial Sequence
  ENSG00000186868_49 (sequence is synthesized)
tcagtggtgagactgtatcctgtttgctattgcttgttgtgctatggggggaggggggaggaatgtgtaagatagttaacatgggcaaagggagatcttggggtgcagcacttaaactgc

SEQ ID NO: 681426 - DNA, 120 bp, Artificial Sequence
  ENSG00000186868_50 (sequence is synthesized)
ctcgtaacccttttcatgatttcaaccacatttgctagagggagggagcagccacggagttagaggcccttggggtttctcttttccactgacaggctttcccaggcagctggctagttc

SEQ ID NO: 681427 - DNA, 120 bp, Artificial Sequence
  ENSG00000186868_51 (sequence is synthesized)
attccctccccagccaggtgcaggcgtaggaatatggacatctggttgctttggcctgctgccctctttcaggggtcctaagcccacaatcatgcctccctaagaccttggcatccttcc

SEQ ID NO: 681428 - DNA, 120 bp, Artificial Sequence
  ENSG00000186868_52 (sequence is synthesized)
ctctaagccgttggcacctctgtgccacctctcacactggctccagacacacagcctgtgcttttggagctgagatcactcgcttcaccctcctcatctttgttctccaagtaaagccac

SEQ ID NO: 681429 - DNA, 120 bp, Artificial Sequence
  ENSG00000186868_53 (sequence is synthesized)
gaggtcggggcgagggcagaggtgatcacctgcgtgtcccatctacagacctgcagcttcataaaacttctgatttctcttcagctttgaaaagggttaccctgggcactggcctagagc

SEQ ID NO: 681430 - DNA, 120 bp, Artificial Sequence
  ENSG00000186868_54 (sequence is synthesized)
ctcacctcctaatagacttagccccatgagtttgccatgttgagcaggactatttctggcacttgcaagtcccatgatttcttcggtaattctgagggtggggggagggacatgaaatca

SEQ ID NO: 681431 - DNA, 120 bp, Artificial Sequence
  ENSG00000186868_55 (sequence is synthesized)
tcttagcttagctttctgtctgtgaatgtctatatagtgtattgtgtgttttaacaaatgatttacactgactgttgctgtaaaagtgaatttggaaataaagttattactctgattaaa

SEQ ID NO: 681432 - DNA, 120 bp, Artificial Sequence
  ENSG00000186868_56 (sequence is synthesized)
cgggaaggaggtggccaggtggaagtaaaatctgagaagcttgacttcaaggacagagtccagtcgaagattgggtccctggacaatatcacccacgtccctggcggaggaaataaaaag

SEQ ID NO: 681433 - DNA, 120 bp, Artificial Sequence
  ENSG00000186868_57 (sequence is synthesized)
atttagcagattcttttgttgtgccgtggatggtgctggttgatgtgggcaaaacaaagaacacctcgcatggtcagtaaaagcaaagacgggactggaagcgatgacaaaaaagccaag

SEQ ID NO: 681434 - DNA, 120 bp, Artificial Sequence
  ENSG00000186868_58 (sequence is synthesized)
aggagttgagagttccgggccggcagaggaaggcgcctgaaaggcccctggccaatgagattagcgcccacgtccagcctggaccctgcggagaggcctctggggtctctgggccgtgcc

SEQ ID NO: 681435 - DNA, 120 bp, Artificial Sequence
  ENSG00000186868_59 (sequence is synthesized)
tcggggagaaagagccagaagctcccgtcccgctgaccgcgagccttcctcagcaccgtcccgtttgcccagcgcctcctccaacaggaggccctcaggagccctccctggagtggggac

SEQ ID NO: 681436 - DNA, 120 bp, Artificial Sequence
  ENSG00000186868_60 (sequence is synthesized)
aagggccctgaaactaaatgtgtccccttaggaaagcaggagttttcttgcaagtggcaatcttctgcttatgtctcattggccagagctgggtcttacggccaccccttgctgcgagca

SEQ ID NO: 681437 - DNA, 120 bp, Artificial Sequence
  ENSG00000186868_61 (sequence is synthesized)
aggctgggacattgagcattttgccgtccaacctctttagcagaataaaccaagggggaagaacgttaatagtggcttttgagtcactagttggcagtatctgcccctctatctttccat

SEQ ID NO: 681438 - DNA, 120 bp, Artificial Sequence
  ENSG00000186868_62 (sequence is synthesized)
cctccccatggagtttcaaggttcctttctcagtacttcttcaggctctgcacgttcatttggatcttgtgtcttggggtgaaaaactggcccaagtgtctccccaagcatccacctttg

SEQ ID NO: 681439 - DNA, 120 bp, Artificial Sequence
  ENSG00000186868_63 (sequence is synthesized)
gattaatttggaaaatggctgtcaagtgcccgcctcttgcttggtataatgctacagctttagaggacgcagcaggcatgggccttgccgctgaggttcttagcctcatgagaatatcca

SEQ ID NO: 681440 - DNA, 120 bp, Artificial Sequence
  ENSG00000186868_64 (sequence is synthesized)
gatcagattctcttggctccttcttagagccagtgatgcaagacacttcctgctcatcttgtcgggacggttttacaagttgcctgccatcctgagaaagtctacaaaacgatgccagac

SEQ ID NO: 681441 - DNA, 120 bp, Artificial Sequence
  ENSG00000186868_65 (sequence is synthesized)
ctcatgccagcttcccaagccttgactctcagtgctccctcaacaggattctggaagaatctcccaaacaagtcgcaatgccctctggaccctgtgcaggcatgagactcaagagcattg

SEQ ID NO: 681442 - DNA, 120 bp, Artificial Sequence
  ENSG00000186868_66 (sequence is synthesized)
gctcccacccctggtggagggaacactgctggggctgggatcttgcctggttgctccgcctgcacccaagacaaccataattaaaatgtccttcattgaacttggaaagccttcaaagct

SEQ ID NO: 681443 - DNA, 120 bp, Artificial Sequence
  ENSG00000186868_67 (sequence is synthesized)
gacaactccttatgtgtacccggaaaggcctgggagtgtgccagggcattgctcgggagggacgctgatttggaagcatttacctgatgagagactgacagcagctcctggtagccgagc

SEQ ID NO: 681444 - DNA, 120 bp, Artificial Sequence
  ENSG00000186868_68 (sequence is synthesized)
tttccctcctgcctctgctgtgaaggtggacccatccaacagtcaaatgcctgactctggacaggagcggacctatttattgccatgcaagggactctgcacttttgaattgtgggtcat

SEQ ID NO: 681445 - DNA, 120 bp, Artificial Sequence
  ENSG00000186868_69 (sequence is synthesized)
gggcttggatttaggggttagagctgggagaagtcttggaagtcacctagagatgacactgccattttgcagatgaggaaaccgtccaatcaaaatggaccaaggacttgcccaaagcct

SEQ ID NO: 681446 - DNA, 120 bp, Artificial Sequence
  ENSG00000186868_70 (sequence is synthesized)
cacagcaaaaccataggcccccgcactaaccccagagtccctgtgctgtcttaaggatcatatagttgtaagcaatcatctggttttcagtatttcttcttttaaaatgcctggggccat

SEQ ID NO: 681447 - DNA, 120 bp, Artificial Sequence
  ENSG00000186868_71 (sequence is synthesized)
gcccagcagtctgtttcactgcagcgtttacacagggctgccgggctttcctggtggatgagctgggcggttcatgagccagaaccactcagcagcatgtcagtgtgcttcctggggagc

SEQ ID NO: 681448 - DNA, 120 bp, Artificial Sequence
  ENSG00000186868_72 (sequence is synthesized)
tggtagcaggggctccgggccctacttcagggctgctttctggcatatggctgatcccctcctcactcctcctccctgcattgctcctgcgcaagaagcaaaggtgaggggctgggtatg

SEQ ID NO: 681449 - DNA, 120 bp, Artificial Sequence
  ENSG00000186868_73 (sequence is synthesized)
gctcgtcctggcccctctaaggtggatctcggtggtttctagatgtgacagcacccttagtggatgagggagctcccggcaagcaggctgccgcgcagccccacacggagatcccagaag

SEQ ID NO: 681450 - DNA, 120 bp, Artificial Sequence
  ENSG00000186868_74 (sequence is synthesized)
gaaccacaggtgagggtaagccccagagacccccaggcagtcaaggccctgctgggtgccccagctgacctgtgacagaagtgagggagctttgcgtgtttatcctcctgtggggcagga

SEQ ID NO: 681451 - DNA, 120 bp, Artificial Sequence
  ENSG00000186868_75 (sequence is synthesized)
acatgggtggattctggctcctgggaatcttgggttgtgagtagctcgatgccttggtgctcagttacctccctggctgcctgccagcctctcagagcatttagggccttctggacttct

SEQ ID NO: 681452 - DNA, 120 bp, Artificial Sequence
  ENSG00000186868_76 (sequence is synthesized)
agatgctcctcatcttgcctcagtcagcgcgtcagttccagagacttctctgcagggttttctggggcaggtggtggcagacccgtgccttcttgacacctgaggtcagtccaccctcct

SEQ ID NO: 681453 - DNA, 120 bp, Artificial Sequence
  ENSG00000186868_77 (sequence is synthesized)
gctcagactgcccagcacagggtcacctcccaaggggtggaccccaagatcacctgagcgcacagagggtgcagatgactggaccacaccttttggtgatcttaatgaggtggtcccaga

SEQ ID NO: 681454 - DNA, 120 bp, Artificial Sequence
  ENSG00000186868_78 (sequence is synthesized)
ggagctcagacatgcaatctagcatccagttctgggactctgtctccttttcaaacgtattcatgtagaacaggcatgacgagaatgccttgtcaacatgggtgatggggaatcaatcag

SEQ ID NO: 681455 - DNA, 120 bp, Artificial Sequence
  ENSG00000186868_79 (sequence is synthesized)
acagggcgccgggctcaaggctgcagtcacccaagagtggctcagcccaccaggccctaggaaacgcctgcacagcctggagctcctggagtcatttccttcatgtcttcttcactgcac

SEQ ID NO: 681456 - DNA, 120 bp, Artificial Sequence
  ENSG00000186868_80 (sequence is synthesized)
ttacgtaaagatgccagccattggtttggtgatttggagggtgcccagttgcccaacaagaaatgcagaagaggcctagccaggatttcaccagcagtggagagtagagaagatgtggcc

SEQ ID NO: 681457 - DNA, 120 bp, Artificial Sequence
  ENSG00000186868_81 (sequence is synthesized)
agaaaagagtttcctttccctcctaaagatggtactccctgcagctactggggaagcctgcagcattctctagggctctgtgtgttgagagcagccccaccctggccccttctgagtgca

SEQ ID NO: 681458 - DNA, 120 bp, Artificial Sequence
  ENSG00000186868_82 (sequence is synthesized)
tttctgctttgtgacttgatccgtgaagtcccctgagatgggcagaggggatgtcctcgaagctggggcagagcctcatccttgaacgtgaaggacgtttgaagactgtggcatgatcac

SEQ ID NO: 681459 - DNA, 120 bp, Artificial Sequence
  ENSG00000186868_83 (sequence is synthesized)
aggatgagatcacagggaacttgagtttctctcctcctctcccttcacagttatttcactgagggaaatccctcccctgcccagaatgaaaactctagccaactcttgacttttccatca

SEQ ID NO: 681460 - DNA, 120 bp, Artificial Sequence
  ENSG00000186868_84 (sequence is synthesized)
ctccaaagtagttgaaagtacattagtctccacagtggcaaaacagtgtgcaaaagctaaataattagaacagccagtcccatgtgacagtcaaagcttctaactccattcaaagttgca

SEQ ID NO: 681461 - DNA, 120 bp, Artificial Sequence
  ENSG00000186868_85 (sequence is synthesized)
gccattcccctcgagggctggcagggaggggaggggtaagagaaacaggaaggttcttactgagttggtcctggtgtgagctgcgtcacactccctgcagaggtttcaaggagactctct

SEQ ID NO: 681462 - DNA, 120 bp, Artificial Sequence
  ENSG00000186868_86 (sequence is synthesized)
ctctctctgtctccatggggaccttatttgaattcttctactcttaccccagcctgccatctccagctatcctcccctgaagagcccttctgctgcgctggattctggtggccatgtcat

SEQ ID NO: 681463 - DNA, 120 bp, Artificial Sequence
  ENSG00000186868_87 (sequence is synthesized)
ctcctcggccccgtgggagtctgaagatctggctgcagcctcacctctgaggtcctgctagttgccacctcttaaacatgatctgaggctcccatgcactctgacctgtgcccacatggg

SEQ ID NO: 681464 - DNA, 120 bp, Artificial Sequence
  ENSG00000186868_88 (sequence is synthesized)
cagcacctgtcctttgctctgcccccaaagcaaggccagcccatcttccatcctctagtgttccttggtggggccctgaccacagtccaccaggtccctaaccagaggggacacacacca

SEQ ID NO: 681465 - DNA, 120 bp, Artificial Sequence
  ENSG00000186868_89 (sequence is synthesized)
ggtgtcctcaatgtattgccttgaaacagttgtgctgggactgtgatggggggtggccatgtagccacccccaccacccccaagccactctctccaaggaaatcctcctaaagatccctt

SEQ ID NO: 681466 - DNA, 120 bp, Artificial Sequence
  ENSG00000186868_90 (sequence is synthesized)
tacatcctccatgtggtggggaggttctagagttgggtgcatgtgtcttcagctactgacaatgcagaccttagttggcacctcgctctggcctatcctgtttgctgttcttggcgctcc

SEQ ID NO: 681467 - DNA, 120 bp, Artificial Sequence
  ENSG00000186868_91 (sequence is synthesized)
agtgaaactccccatgggccatccagttggggtgcagtgtggccacccccttgcaggttcctgccttgctggagagcacagggccctcctggctcttgtaaaacactccccatggtacag

SEQ ID NO: 681468 - DNA, 120 bp, Artificial Sequence
  ENSG00000186868_92 (sequence is synthesized)
agaggccagcagtgatgtgaggcccaacctccctccatggtgttcccaagcagctccctttctggggtcaaggggtggcaaagacagtgcagcgtccaatttctgactcaagccgggcct

SEQ ID NO: 681469 - DNA, 120 bp, Artificial Sequence
  ENSG00000186868_93 (sequence is synthesized)
ggctatcgcagctctgcactgtgtgtgacagcaaggcaactcacccagtgccgtggcagtgaccgtgtccgaggaagcctcctcacaccctctgtctcaaggactctggcatttagctgg

SEQ ID NO: 681470 - DNA, 120 bp, Artificial Sequence
  ENSG00000186868_94 (sequence is synthesized)
acttgctgtagctctgagcctttctgccattgccatcaccttgtcagaaactcaggccgaatctgcactcagagttgtgcccaggcagttgagccaacacttgctcagcgatattgtcac

SEQ ID NO: 681471 - DNA, 120 bp, Artificial Sequence
  ENSG00000186868_95 (sequence is synthesized)
atgacaaggcactgtcaccactgggcatcgtgggtagcgcagtgtcggctggatggacccggagggtgtctgtgtcatgctagtgctagtgatgggagccccgtgagcccattgcccgcc

SEQ ID NO: 681472 - DNA, 120 bp, Artificial Sequence
  ENSG00000186868_96 (sequence is synthesized)
ctcccatgccctcagcagctgcctggggacagccaatggcctgggtgtttctgaggctaccacatggcttccaggaaactcgagaacctttctctcccttgcctacactcttcacacagg

SEQ ID NO: 681473 - DNA, 120 bp, Artificial Sequence
  ENSG00000186868_97 (sequence is synthesized)
cctgtgctggccagcggtggggatccggcattcctatcttaggtgcagagagtgactgactcattgcaggcctgggagataagactgatggcccagccagcaagatgtatggatttctca

SEQ ID NO: 681474 - DNA, 120 bp, Artificial Sequence
  ENSG00000186868_98 (sequence is synthesized)
gaggcagtggcctctgtcattgtcctcaggaaatgctggtgattctggtggcctgaggtcaatgcatgtcaacgtggccaacttgccttataaactttttttctggacaattgcgtgcac

SEQ ID NO: 681475 - DNA, 120 bp, Artificial Sequence
  ENSG00000186868_99 (sequence is synthesized)
tgtcctgtaacagtgtcctgttgtttatgatgcagaaataggtgtttttaaagcctattgattttggtactattaatgtggtcaggaactttctcagtctttcttgtttggggtgagctg

SEQ ID NO: 681476 - DNA, 120 bp, Artificial Sequence
  ENSG00000186868_100 (sequence is synthesized)
tggcttcctaaacaggaacccaagacacccccaaaagctgctcaccagcactgccagcctccctcttaccaagtagcacccgttcaggacattctgcgaaaggcatttgcccagaagttg

SEQ ID NO: 681477 - DNA, 120 bp, Artificial Sequence
  ENSG00000186868_101 (sequence is synthesized)
ggaggaaggaaatgtaacattttggggcacctaccatatgccaggcaccaggctaaacgtgttcacacaaattctcttactaaccctcaccatccttctacaagacaaactagtatcttc

SEQ ID NO: 681478 - DNA, 120 bp, Artificial Sequence
  ENSG00000186868_102 (sequence is synthesized)
atcttggggttcaagatgaggaaatggaggctcagagaggttgaatgaatgccggtgcctggatatgaaccccatctgcctgactccgcaacccaggcaaagtctttccttgaacttccc

SEQ ID NO: 681479 - DNA, 120 bp, Artificial Sequence
  ENSG00000186868_103 (sequence is synthesized)
agcagccactgcttagacacagcctccacaaccatggctcagcagcaaattgcttctctgacctcactcagcctgtgtgtccttgttgagtgaggcattcaggaccctggtcccaaagtg

SEQ ID NO: 681480 - DNA, 120 bp, Artificial Sequence
  ENSG00000186868_104 (sequence is synthesized)
gagaaagtctttcctactaggtcatagctacacctgcatgtgggtgctgtgccttttgtttagtgaacttttatcaccagcatcctcagcaatgacatttgcagagaagccagagctgag

SEQ ID NO: 681481 - DNA, 120 bp, Artificial Sequence
  ENSG00000186868_105 (sequence is synthesized)
gcaccttggtattcttgggatgtgactttcctgaatgtttaagggaaaatgcccgaaggtacagagagcttggtttctagtaaacaataactgtcttgcttttaccccccttcatttgct

SEQ ID NO: 681482 - DNA, 120 bp, Artificial Sequence
  ENSG00000186868_106 (sequence is synthesized)
aaccattgatctgatggctgagacaccactgggaagactggagaggcttttctgggcatgcagtgccaggcacaggaggagctgagggaagatgactaagagaatctcccctgcagaccc

SEQ ID NO: 681483 - DNA, 120 bp, Artificial Sequence
  ENSG00000186868_107 (sequence is synthesized)
gacttgggggttggggggagggacatggggtgggctctgccctgaaaagatcatttggacctgagctctaattcacaagtccaggagattttagggagttggttcttatcaaaggttggc

SEQ ID NO: 681484 - DNA, 120 bp, Artificial Sequence
  ENSG00000186868_108 (sequence is synthesized)
tactcagatatagaaagagccctagtggtttttttctaataccatttctgggtaattcctaaggcatttagtgttctgaaagatgctagccttgtccagcctgggagttgagaatgaatg

SEQ ID NO: 681485 - DNA, 120 bp, Artificial Sequence
  ENSG00000186868_109 (sequence is synthesized)
gccttgtccagcctgggagttgagaatgaatgtctaacagaaactctaggccgggcctggtggctcacgcctctaatcccagcactatgggagacccaggtgggcagatcacctgaggtc

SEQ ID NO: 681486 - DNA, 66 bp, Artificial Sequence
  ENSG00000186868_110 (sequence is synthesized)
gagaccagcctggccaacatgtgaaatcctgtctcactacaaataaaaaaattagccgggtgtgcg

SEQ ID NO: 681487 - DNA, 88 bp, Artificial Sequence
  ENSG00000186868_111 (sequence is synthesized)
actcaaatatgtgtgacaggcgattctcactgcaggctgccctgtggctgatccaggagcaaggccttaaccatgtcatccccaagcg

SEQ ID NO: 681488 - DNA, 120 bp, Artificial Sequence
  ENSG00000186868_112 (sequence is synthesized)
tgatccaggagcaaggccttaaccatgtcatccccaagcgattgcttgtaaactttcttctgtgcagccttcaacccttattatgattttcttctcaggaaccaaactgctgtattcaag

SEQ ID NO: 681489 - DNA, 120 bp, Artificial Sequence
  ENSG00000186868_113 (sequence is synthesized)
aaaggcagctttgtgtaatcatttatcataaatatcttaagaaaaatcctagagattcctaattttaggaaatgggagacctatggtactgatataatgtgggctgggcttgttttctgt

SEQ ID NO: 681490 - DNA, 120 bp, Artificial Sequence
  ENSG00000186868_114 (sequence is synthesized)
catttgctagataaatgaacttgagagcctactgtaaaatgtggaagcttctagattgcagaagggctggaaagacactgttcttttctcccgagtgatgggatctgtccagtatttaga

SEQ ID NO: 681491 - DNA, 120 bp, Artificial Sequence
  ENSG00000186868_115 (sequence is synthesized)
gctgcctctgaggccatctgattctaggagactctgcctcgttgaggatattttgaggcctaactacacattcctgcccccagagaggtcacagcctatagcaggctgatgtttctcatg

SEQ ID NO: 681492 - DNA, 120 bp, Artificial Sequence
  ENSG00000186868_116 (sequence is synthesized)
tcacatggcacagaaaggcacattttcgttctcaggctaacaaagagcttcaaaaactattagaagggacagtggctataagagaagaacctcagtcaatgtgtgaaattaactaggaac

SEQ ID NO: 681493 - DNA, 120 bp, Artificial Sequence
  ENSG00000186868_117 (sequence is synthesized)
ctggctcctgtttcttttaggtcatgtttttcagcttaggtaaaactagaggctttgataaagcatgacctctagaaatcattgcttttcataaatggaagtgggtttgagttttttcta

SEQ ID NO: 681494 - DNA, 120 bp, Artificial Sequence
  ENSG00000186868_118 (sequence is synthesized)
ctgattgttagtgcaggtgatgtctacatgcccccagaacatattccatgcaacaaaaaaagcccaggtcaccgtctttgctgggaacttgacttttgtgctcactgaattttaagcttt

SEQ ID NO: 681495 - DNA, 120 bp, Artificial Sequence
  ENSG00000186868_119 (sequence is synthesized)
ctgacagcagcctggaatcatggagggataaagtacctattagtaagatggaaaaaggtgtttcaggttggagctgcagtctgttgagagtaagctatgggaaggcctgtatacgagggg

SEQ ID NO: 681496 - DNA, 120 bp, Artificial Sequence
  ENSG00000186868_120 (sequence is synthesized)
tggacttttcttctgtaagtgtccagagaccaggcctcctgaagagggcatgggggcttaacttacctggactactgtgtttacaatactcatttatcttgaactcctcctaacccctga

SEQ ID NO: 681497 - DNA, 120 bp, Artificial Sequence
  ENSG00000186868_121 (sequence is synthesized)
gaactcctcctaacccctgagaattgctacatttagtatttgctgagtacttcctagcatcctagggaatcaatagaacattctcccaaccaggctgggtgcggtggctcatgtctgtaa

SEQ ID NO: 681498 - DNA, 66 bp, Artificial Sequence
  ENSG00000186868_122 (sequence is synthesized)
ctttgggaggccaaggtaggcagatcccttgaggccaggagtgcaagactagcctggctgtacaca

SEQ ID NO: 681499 - DNA, 120 bp, Artificial Sequence
  ENSG00000186871_0 (sequence is synthesized)
atgcgcggggcgggagtgagcgaaattcaagctccaaactctaagctccaagctccaagctccaagctccaagctccaaactcccgccggggtaactggaacccaatccgagggtcatgg

SEQ ID NO: 681500 - DNA, 120 bp, Artificial Sequence
  ENSG00000186871_1 (sequence is synthesized)
aggcatcccgaaggtttccggaagccgaggccttgagcccagagcaggctgctcattacctaagatatgtgaaagaggccaaagaagcaactaagaatggagacctggaagaagcattta

SEQ ID NO: 681501 - DNA, 120 bp, Artificial Sequence
  ENSG00000186871_2 (sequence is synthesized)
aacttttcaatttggcaaaggacatttttcccaatgaaaaagtgctgagcagaatccaaaaaatacaggaagccttggaggagttggcagaacagggagatgatgaatttacagatgtgt

SEQ ID NO: 681502 - DNA, 120 bp, Artificial Sequence
  ENSG00000186871_3 (sequence is synthesized)
gcaactctggcttgctactttatcgagaactgcacaaccaactctttgagcaccagaaggaaggcatagctttcctctatagcctgtatagggatggaagaaaaggtggtatattggctg

SEQ ID NO: 681503 - DNA, 120 bp, Artificial Sequence
  ENSG00000186871_4 (sequence is synthesized)
atgatatgggattagggaagactgttcaaatcattgctttcctttccggtatgtttgatgcatcacttgtgaatcatgtgctgctgatcatgccaaccaatcttattaacacatgggtaa

SEQ ID NO: 681504 - DNA, 120 bp, Artificial Sequence
  ENSG00000186871_5 (sequence is synthesized)
aagaattcatcaagtggactccaggaatgagagtcaaaacctttcatggtcctagcaaggatgaacggaccagaaacctcaatcggattcagcaaaggaatggtgttattatcactacat

SEQ ID NO: 681505 - DNA, 120 bp, Artificial Sequence
  ENSG00000186871_6 (sequence is synthesized)
accaaatgttaatcaataactggcagcaactttcaagctttaggggccaagagtttgtgtgggactatgtcatcctcgatgaagcacataaaataaaaacctcatctactaagtcagcaa

SEQ ID NO: 681506 - DNA, 120 bp, Artificial Sequence
  ENSG00000186871_7 (sequence is synthesized)
tatgtgctcgtgctattcctgcaagtaatcgcctcctcctcacaggaaccccaatccagaataatttacaagaactatggtccctatttgattttgcttgtcaagggtccctgctgggaa

SEQ ID NO: 681507 - DNA, 120 bp, Artificial Sequence
  ENSG00000186871_8 (sequence is synthesized)
cattaaaaacttttaagatggagtatgaaaatcctattactagagcaagagagaaggatgctaccccaggagaaaaagccttgggatttaaaatatctgaaaacttaatggcaatcataa

SEQ ID NO: 681508 - DNA, 120 bp, Artificial Sequence
  ENSG00000186871_9 (sequence is synthesized)
aaccctattttctcaggaggactaaagaagacgtacagaagaaaaagtcaagcaacccagaggccagacttaatgaaaagaatccagatgttgatgccatttgtgaaatgccttcccttt

SEQ ID NO: 681509 - DNA, 120 bp, Artificial Sequence
  ENSG00000186871_10 (sequence is synthesized)
ccaggaaaaatgatttaattatttggatacgacttgtgcctttacaagaagaaatatacaggaaatttgtgtctttagatcatatcaaggagttgctaatggagacgcgctcacctttgg

SEQ ID NO: 681510 - DNA, 120 bp, Artificial Sequence
  ENSG00000186871_11 (sequence is synthesized)
ctgagctaggtgtcttaaagaagctgtgtgatcatcctaggctgctgtctgcacgggcttgttgtttgctaaatcttgggacattctctgctcaagatggaaatgagggggaagattccc

SEQ ID NO: 681511 - DNA, 120 bp, Artificial Sequence
  ENSG00000186871_12 (sequence is synthesized)
cagatgtggaccatattgatcaagtaactgatgacacattgatggaagaatctggaaaaatgatattcctaatggacctacttaagaggctgcgagatgagggacatcaaactctggtgt

SEQ ID NO: 681512 - DNA, 120 bp, Artificial Sequence
  ENSG00000186871_13 (sequence is synthesized)
tttctcaatcgaggcaaattctaaacatcattgaacgcctcttaaagaataggcactttaagacattgcgaatcgatgggacagttactcatcttttggaacgagaaaaaagaattaact

SEQ ID NO: 681513 - DNA, 120 bp, Artificial Sequence
  ENSG00000186871_14 (sequence is synthesized)
tattccagcaaaataaagattactctgtttttctgcttaccactcaagtaggtggtgtcggtttaacattaactgcagcaactagagtggtcatttttgaccctagctggaatcctgcaa

SEQ ID NO: 681514 - DNA, 120 bp, Artificial Sequence
  ENSG00000186871_15 (sequence is synthesized)
ctgatgctcaagctgtggatagagtttaccgaattggacaaaaagagaatgttgtggtttataggctaatcacttgtgggactgtagaggaaaaaatatacagaagacaggttttcaagg

SEQ ID NO: 681515 - DNA, 120 bp, Artificial Sequence
  ENSG00000186871_16 (sequence is synthesized)
actcattaataagacaaactactggtgaaaaaaagaaccctttccgatattttagtaaacaagaattaagagagctctttacaatcgaggatcttcagaactctgtaacccagctgcagc

SEQ ID NO: 681516 - DNA, 120 bp, Artificial Sequence
  ENSG00000186871_17 (sequence is synthesized)
ctcagaggaaatctgatataaaactagatgaacatattgcctacctgcagtctttggggatagctggaatctcagaccatgatttgatgtacacatgtgatctgtctgttaaagaagagc

SEQ ID NO: 681517 - DNA, 120 bp, Artificial Sequence
  ENSG00000186871_18 (sequence is synthesized)
ttgatgtggtagaagaatctcactatattcaacaaagggttcagaaagctcaattcctcgttgaattcgagtctcaaaataaagagttcctgatggaacaacaaagaactagaaatgagg

SEQ ID NO: 681518 - DNA, 120 bp, Artificial Sequence
  ENSG00000186871_19 (sequence is synthesized)
gggcctggctaagagaacctgtatttccttcttcaacaaagaagaaatgccctaaattgaataaaccacagcctcagccttcacctcttctaagtactcatcatactcaggaagaagata

SEQ ID NO: 681519 - DNA, 120 bp, Artificial Sequence
  ENSG00000186871_20 (sequence is synthesized)
tcagttccaaaatggcaagtgtagtcattgatgatctgcccaaagagggtgagaaacaagatctctccagtataaaggtgaatgttaccaccttgcaagatggtaaaggtacaggtagtg

SEQ ID NO: 681520 - DNA, 120 bp, Artificial Sequence
  ENSG00000186871_21 (sequence is synthesized)
ctgactctatagctactttaccaaaggggtttggaagtgtagaagaactttgtactaactcttcattgggaatggaaaaaagctttgcaactaaaaatgaagctgtacaaaaagagacat

SEQ ID NO: 681521 - DNA, 120 bp, Artificial Sequence
  ENSG00000186871_22 (sequence is synthesized)
tacaagaggggcctaagcaagaggcactgcaagaggatcctctggaaagttttaattatgtacttagcaaatcaaccaaagctgatattgggccaaatttagatcaactaaaggatgatg

SEQ ID NO: 681522 - DNA, 120 bp, Artificial Sequence
  ENSG00000186871_23 (sequence is synthesized)
agattttacgtcattgcaatccttggcccattatttccataacaaatgaaagtcaaaatgcagaatcaaatgtatccattattgaaatagctgatgacctttcagcatcccatagtgcac

SEQ ID NO: 681523 - DNA, 120 bp, Artificial Sequence
  ENSG00000186871_24 (sequence is synthesized)
tgcaggatgctcaagcaagtgaggccaagttggaagaggaaccttcagcatcttcaccacagtatgcatgtgatttcaatcttttcttggaagactcagcagacaacagacaaaattttt

SEQ ID NO: 681524 - DNA, 120 bp, Artificial Sequence
  ENSG00000186871_25 (sequence is synthesized)
ccagtcagtctttagagcatgttgagaaagaaaatagcttgtgtggctctgcacctaattccagagcagggtttgtgcatagcaaaacatgtctcagttgggagttttctgagaaagacg

SEQ ID NO: 681525 - DNA, 120 bp, Artificial Sequence
  ENSG00000186871_26 (sequence is synthesized)
atgaaccagaagaagtagtagttaaagcaaaaatcagaagtaaagctagaaggattgtttcagatggcgaagatgaagatgattcttttaaagatacctcaagcataaatccattcaaca

SEQ ID NO: 681526 - DNA, 120 bp, Artificial Sequence
  ENSG00000186871_27 (sequence is synthesized)
catctctctttcaattctcatctgtgaaacaatttgatgcttcaactcccaaaaatgacatcagtccaccaggaaggttcttttcatctcaaatacccagtagtgtaaataagtctatga

SEQ ID NO: 681527 - DNA, 120 bp, Artificial Sequence
  ENSG00000186871_28 (sequence is synthesized)
actctagaagatctctggcttctaggaggtctcttattaatatggttttagaccacgtggaggacatggaggaaagacttgacgacagcagtgaagcaaagggtcctgaagattatccag

SEQ ID NO: 681528 - DNA, 120 bp, Artificial Sequence
  ENSG00000186871_29 (sequence is synthesized)
aagaaggggtggaggaaagcagtggcgaagcctccaagtatacagaagaggatccttccggagaaacactgtcttcagaaaacaagtccagctggttaatgacgtctaagcctagtgctc

SEQ ID NO: 681529 - DNA, 120 bp, Artificial Sequence
  ENSG00000186871_30 (sequence is synthesized)
tagctcaagagacctctcttggtgcccctgagcctttgtctggtgaacagttggttggttctccccaggataaggcggcagaggctacaaatgactatgagactcttgtaaagcgtggaa

SEQ ID NO: 681530 - DNA, 120 bp, Artificial Sequence
  ENSG00000186871_31 (sequence is synthesized)
aagaactaaaagagtgtggaaaaatccaggaggccctaaactgcttagttaaagcgcttgacataaaaagtgcagatcctgaagttatgctcttgactttaagtttgtataagcaactta

SEQ ID NO: 681531 - DNA, 120 bp, Artificial Sequence
  ENSG00000186871_32 (sequence is synthesized)
ataacaattgagaatgtaacctgtttattgtattttaaagtgaaactgaatatgagggaatttttgttcccataattggattctttgggaacatgaagcattcaggcttaaggcaagaaa

SEQ ID NO: 681532 - DNA, 120 bp, Artificial Sequence
  ENSG00000186871_33 (sequence is synthesized)
gatctcaaaaagcaacttctgccctgcaacgccccccactccatagtctggtattctgagcactagcttaatatttcttcacttgaatattcttatattttaggcatattctataaattt

SEQ ID NO: 681533 - DNA, 120 bp, Artificial Sequence
  ENSG00000186871_34 (sequence is synthesized)
aactgtgttgtttcttggaaagttttgtaaaattattctggtcattcttaattttactctgaaagtgatcatctttgtatataacagttcagataagaaaattaaagttacttttctcaa

SEQ ID NO: 681534 - DNA, 120 bp, Artificial Sequence
  ENSG00000186881_0 (sequence is synthesized)
atgttcccggcaaattggacatctgtaaaagtatttttcttcctgggattttttcactaccccaaagttcaggtcatcatatttgcggtgtgcttgctgatgtacctgatcaccttgctg

SEQ ID NO: 681535 - DNA, 120 bp, Artificial Sequence
  ENSG00000186881_1 (sequence is synthesized)
ggcaacatttttctgatctccatcaccattctagattcccacctgcacacccctatgtacctcttcctcagcaatctctcctttctggacatctggtactcctcttctgccctctctcca

SEQ ID NO: 681536 - DNA, 120 bp, Artificial Sequence
  ENSG00000186881_2 (sequence is synthesized)
atgctggcaaactttgtttcagggagaaacactatttcattctcagggtgcgccactcagatgtacctctcccttgccatgggctccactgagtgtgtgctcctgcccatgatggcatat

SEQ ID NO: 681537 - DNA, 120 bp, Artificial Sequence
  ENSG00000186881_3 (sequence is synthesized)
gaccggtatgtggccatctgcaaccccctgagataccctgtcatcatgaataggagaacctgtgtgcagattgcagctggctcctggatgacaggctgtctcactgccatggtggaaatg

SEQ ID NO: 681538 - DNA, 120 bp, Artificial Sequence
  ENSG00000186881_4 (sequence is synthesized)
atgtctgtgctgccactgtctctctgtggtaatagcatcatcaatcatttcacttgtgaaattctggccatcttgaaattggtttgtgtggacacctccctggtgcagttaatcatgctg

SEQ ID NO: 681539 - DNA, 120 bp, Artificial Sequence
  ENSG00000186881_5 (sequence is synthesized)
gtgatcagtgtacttcttctccccatgccaatgctactcatttgtatctcttatgcatttatcctcgccagtatcctgagaatcagctcagtggaaggtcgaagtaaagccttttcaacg

SEQ ID NO: 681540 - DNA, 120 bp, Artificial Sequence
  ENSG00000186881_6 (sequence is synthesized)
tgcacagcccacctgatggtggtagttttgttctatgggacggctctctccatgcacctgaagccctccgctgtagattcacaggaaatagacaaatttatggctttggtgtatgccgga

SEQ ID NO: 681541 - DNA, 120 bp, Artificial Sequence
  ENSG00000186881_7 (sequence is synthesized)
caaacccccatgttgaatcctatcatctatagtctacggaacaaagaggtgaaagtggccttgaaaaaattgctgattagaaatcattttaatactgccttcatttccatcctcaaataa

SEQ ID NO: 681542 - DNA, 120 bp, Artificial Sequence
  ENSG00000186886_0 (sequence is synthesized)
aggtccccaaggccttgggggcaaatatttgtgacacagtttggtgctaggacttagtttctagatgtgaccttatctctgctatctatgagttttcttaataggttgggtaaaaaagta

SEQ ID NO: 681543 - DNA, 120 bp, Artificial Sequence
  ENSG00000186886_1 (sequence is synthesized)
acatttaaaatcttcaaggaaatatactctcgacactcctactgttgttttcaggtttgtttctattaattaagtgctaagcgggagcattattggagttcgttaatttcagcaaaagat

SEQ ID NO: 681544 - DNA, 120 bp, Artificial Sequence
  ENSG00000186886_2 (sequence is synthesized)
ccttcagtaaatgaatcactcagatgcctctgtatttaggattcaaaaaaatcagactgctggagtcaccttcatcctcttgggcttctcagaatttccagaccttcagatacccctgtt

SEQ ID NO: 681545 - DNA, 120 bp, Artificial Sequence
  ENSG00000186886_3 (sequence is synthesized)
cctggtcttcctgaccatctacacaatcactgtgatggggaatctgggcatgatcatggtcatcaggatcaaccccaaactccacacccctatgtactttttcctcagccacttgtcctt

SEQ ID NO: 681546 - DNA, 120 bp, Artificial Sequence
  ENSG00000186886_4 (sequence is synthesized)
tgttgatttctgttattccaccacaattacaccaaaactgctggagaacttggttgtggaagacagaatcatctccttcacaggatgcatcatgcaattcttctttgcctgtatatttgt

SEQ ID NO: 681547 - DNA, 120 bp, Artificial Sequence
  ENSG00000186886_5 (sequence is synthesized)
ggtgacagaaacattcatgctggcagcgatggcttatgacagatttgtggcagtgtgtaaccctctgctttacacagttgcaatgtcccagaggctttgctccttgttagtggctgcatc

SEQ ID NO: 681548 - DNA, 120 bp, Artificial Sequence
  ENSG00000186886_6 (sequence is synthesized)
atactcttggagtttagtttgttccttaacatacacatattttctgttgactttatctttttgtaggactaacttcattaataactttgtctgtgagcacgctgccattgttgctgtgtc

SEQ ID NO: 681549 - DNA, 120 bp, Artificial Sequence
  ENSG00000186886_7 (sequence is synthesized)
ctgctctgacccctacatgagccagaaggtcattttagtttctgcaacattcaatgaaataagcagcctggtgatcattctcacttcctatgctttcatttttatcactgtcatgaagat

SEQ ID NO: 681550 - DNA, 120 bp, Artificial Sequence
  ENSG00000186886_8 (sequence is synthesized)
gccttccactggggggcgcaagaaagcgttctccacgtgtgcctcccacctgaccgccattaccattttccatgggactatcctttttctctactgtgttcctaactccaaaagttcatg

SEQ ID NO: 681551 - DNA, 120 bp, Artificial Sequence
  ENSG00000186886_9 (sequence is synthesized)
gctcatggtcaaggtggcctctgtcttttacacagtggtcattcccatgctgaaccccttgatctatagcctcaggaacaaagatgtaaaagagacagtcaggaagttagtcattaccaa

SEQ ID NO: 681552 - DNA, 120 bp, Artificial Sequence
  ENSG00000186886_10 (sequence is synthesized)
attattatgtcataaaatgtaatgctagaaatattaattatttatccttgagagcagcactgcagttgttcaataactagtcattgcatgaaattatgataaccctccaactgacagtac

SEQ ID NO: 681553 - DNA, 120 bp, Artificial Sequence
  ENSG00000186886_11 (sequence is synthesized)
aatatctattcacactgatgtttagtaaaataactttaaagttataaatactgtaagtatggaatctcagaccatttaaactaaatttttgatcgagaatattgtaatacaaaagttttt

SEQ ID NO: 681554 - DNA, 120 bp, Artificial Sequence
  ENSG00000186886_12 (sequence is synthesized)
gtgttagtatacgtttattgtgattgtccaggtcaaatttcagttcaatttaaatcttgcaaaatgtaaaaatttttgagatgatctgaagaatagtagtttataatgaggaagtttacc

SEQ ID NO: 681555 - DNA, 120 bp, Artificial Sequence
  ENSG00000186886_13 (sequence is synthesized)
tgataacataaaattactatgataagagctgttcagtataaaacactatctataaaataattacaattaattctgtatgggcaactttggcattagaagatttacagacaaacaaaaata

SEQ ID NO: 681556 - DNA, 120 bp, Artificial Sequence
  ENSG00000186886_14 (sequence is synthesized)
aataagaaaattatcttccttacgaagtccagaatctggtaaagttaagttatacttggtattataaattatatttttctttatgcatgataataagaagatggtaaatatttttgcaaa

SEQ ID NO: 681557 - DNA, 120 bp, Artificial Sequence
  ENSG00000186886_15 (sequence is synthesized)
ttctattcattttcctttgtaagaaataatatagaggaattccaattatcttttaaccagtttccccctaagatagtacaatataacaaccaggataatgatattgagataatacacata

SEQ ID NO: 681558 - DNA, 120 bp, Artificial Sequence
  ENSG00000186886_16 (sequence is synthesized)
cattattcaagcattagttatgtattgataaaagaaatattcataaactcagtgatatctaacagtaagcaatcctttcaaataagtgacttgactggggtagctctgttgatatcagtt

SEQ ID NO: 681559 - DNA, 120 bp, Artificial Sequence
  ENSG00000186886_17 (sequence is synthesized)
cgaccatttgggtgtcaagaatggggtaactagatcagctacctttggaactagagacctgtatgtatgtcatcttctttggactctttggctgatagtctttgttgaaagcagagccac

SEQ ID NO: 681560 - DNA, 120 bp, Artificial Sequence
  ENSG00000186886_18 (sequence is synthesized)
aatagagtattccaaaaataaaagcatacttaacgttcctgtttgggtctcacctgttaacattttatgagtcagagaaaatcacgtccaagccccaaagcaagagttgagaaagttatc

SEQ ID NO: 681561 - DNA, 120 bp, Artificial Sequence
  ENSG00000186886_19 (sequence is synthesized)
tatttcttgtagaactgcaagattacaagtcaagagtgatgggtacagggagaaatgaaaaactgggttcaaaattgattgaaacatttacatctttaaacacattcttccttgataatg

SEQ ID NO: 681562 - DNA, 120 bp, Artificial Sequence
  ENSG00000186886_20 (sequence is synthesized)
ccagataactttactgcagaaaacagataacccatggctctaattggttttagagaagttttcaaataattgaaataatttgattgccttaaccaaatggctggttgagattaagtataa

SEQ ID NO: 681563 - DNA, 120 bp, Artificial Sequence
  ENSG00000186886_21 (sequence is synthesized)
gaacttacattttctccttgtgtcttgccagtcatgattaaggcttacaagcacagaatatgaagtcaaccatgtgttgaaggtccaatccaagctgttaagtgatacttgtttcccctc

SEQ ID NO: 681564 - DNA, 120 bp, Artificial Sequence
  ENSG00000186886_22 (sequence is synthesized)
aaggtttatctttatttccaaataaaaattcaataactttttaccttaatgctttacaccaacttacatgtctatgcaacttactgtttaggaatatacaacaaaattctcaacacttac

SEQ ID NO: 681565 - DNA, 120 bp, Artificial Sequence
  ENSG00000186886_23 (sequence is synthesized)
agaatacagcaaaagtaacagaggatttactttaatttttaactgtagataatgagtcataattaaatgctctagtcgagtatttttaaagctgtgtgtatgtgtgtgcatatgtgtata

SEQ ID NO: 681566 - DNA, 120 bp, Artificial Sequence
  ENSG00000186886_24 (sequence is synthesized)
gtttaataaagatgttaaggagcacaaaaaaggatttagaaagtttgagtatgcatcgcagaatatttagtatattcaataaggtttccaggataaagttagaatatactatttttaaat

SEQ ID NO: 681567 - DNA, 120 bp, Artificial Sequence
  ENSG00000186886_25 (sequence is synthesized)
attgttttggaagatgtaagctgtaatttggtaggtttcttttagtacaaaataaaaatcaaagaaaaaaagaatagttgctaatccctttaatacaagatttttttattttggtaaatg

SEQ ID NO: 681568 - DNA, 120 bp, Artificial Sequence
  ENSG00000186886_26 (sequence is synthesized)
ttcataaatgggcagtttacacaaatataatgcaatttcccccccaaattctcaaattatactttcagtgtgaaagcaaacatgttaactgtgaagataaatacattttagataatgtaa

SEQ ID NO: 681569 - DNA, 120 bp, Artificial Sequence
  ENSG00000186886_27 (sequence is synthesized)
gtgagtttgctaatggtcatattaagtgatagctatgggctattttttttctacaaatacatttgtatgctgctcttcttttaaacttttggatacagtaggtataaatgtgactttttt

SEQ ID NO: 681570 - DNA, 120 bp, Artificial Sequence
  ENSG00000186886_28 (sequence is synthesized)
cccatggagggctgtggcaggacatttgctatcatatgcacaatactaaagcaagttatatagtttaatgctcacttcttagtggattaacaactataaaaattatatctggaccatttt

SEQ ID NO: 681571 - DNA, 120 bp, Artificial Sequence
  ENSG00000186886_29 (sequence is synthesized)
atgtaaatgtcaactttcatattatgttgactaaacaaagacggcatcaaagattgtattagtgttggacaaatatatcattacgtgattatattacataacactttgcttacgtgagtg

SEQ ID NO: 681572 - DNA, 120 bp, Artificial Sequence
  ENSG00000186889_0 (sequence is synthesized)
acggagcctcggagcgcccgcagactagcccgtgtctgagggggtgagggatactgaggcccaggcatggagctgccggatccggtgcgccagcggctgggaaacttcagccgggccgtg

SEQ ID NO: 681573 - DNA, 120 bp, Artificial Sequence
  ENSG00000186889_1 (sequence is synthesized)
ttcagtgattccaatcggaccggtccagagtccaatgagggtccggaaaatgaaatggtctccagtttggcactgcagatgtcactttattttaatacctactatttcccactgtggtgg

SEQ ID NO: 681574 - DNA, 120 bp, Artificial Sequence
  ENSG00000186889_2 (sequence is synthesized)
gtgagcagcattatgatgcttcacatgaagtattcaatcttacctgactactacaaattcattgtgatcactgttatcatcctaataaccttaattgaagccatccggttgtatctgggc

SEQ ID NO: 681575 - DNA, 120 bp, Artificial Sequence
  ENSG00000186889_3 (sequence is synthesized)
tacgtgggtaacctacaggagaaggttcctgagttggctggcttttggcttttgagccttctattgcagttacctttaattcttttcttgctctttaatgaaggcctaacaaatctgccc

SEQ ID NO: 681576 - DNA, 120 bp, Artificial Sequence
  ENSG00000186889_4 (sequence is synthesized)
ttggaaaaagcgatacatatcatcttcactctcttccttgctttccaagttgttgcagcatttcttaccttaaggaaaatggttaatcagttggcagttcgtttccacctccaagacttt

SEQ ID NO: 681577 - DNA, 120 bp, Artificial Sequence
  ENSG00000186889_5 (sequence is synthesized)
gaccggctctctgcaaacagaggagacatgagaaggatgaggtcatgtatagaagagatctgatccagtgttgttgagtgaaaatctgacagatcattctagagactgtaagagttagga

SEQ ID NO: 681578 - DNA, 120 bp, Artificial Sequence
  ENSG00000186889_6 (sequence is synthesized)
tttgtacagtatatgaaacagtatattaaccctaaaacctagatgttgtccacctgatgccaaatttcttaattttttttgatgttgttgtctttttcaggagtgtagaaatctatgtat

SEQ ID NO: 681579 - DNA, 120 bp, Artificial Sequence
  ENSG00000186889_7 (sequence is synthesized)
tggtggttgtcatttgccagctctctcgtagcatttctggttagaatctttaactagagatgtatacatttctttaaaacttgttggttatccatgtcttgtctgtacatatgaccatgt

SEQ ID NO: 681580 - DNA, 120 bp, Artificial Sequence
  ENSG00000186889_8 (sequence is synthesized)
catgtcttgtctgtacatatgaccatgtttcttgacatggaaataccagtcagtgttcctatgtatttgtctatatttgtaaaccaagagaccggctgggtgtggtggctcacgcctgta

SEQ ID NO: 681581 - DNA, 120 bp, Artificial Sequence
  ENSG00000186889_9 (sequence is synthesized)
ataaataaataaaaaataaaacaagagaccaaattttcatgtctgctagggttaaattctaaccctaatattagctgttatactgagatgaagaagaaaacaggtggattgccttggtat

SEQ ID NO: 681582 - DNA, 120 bp, Artificial Sequence
  ENSG00000186889_10 (sequence is synthesized)
ttaggaaatatttttgttataaaattacaactttcataaaaccatattcagtatttgtaatggtggtatacaaaatgcttttacaataaattattaaatatttaaggtatcagcagcaaa

SEQ ID NO: 681583 - DNA, 120 bp, Artificial Sequence
  ENSG00000186889_11 (sequence is synthesized)
atctgaggtttccttaagcgggtttttgctttactgattttcttccctcggcttgacgttcccatctcccacatggttgacgcatggagcagctgcttcatatagcagaaaatgaaatgg

SEQ ID NO: 681584 - DNA, 120 bp, Artificial Sequence
  ENSG00000186889_12 (sequence is synthesized)
ataaatgaaatcagttttcataacaagtaaaaggcagtgaggtgtggcagaaagagcacaggcctgaatttaaagcctgactccagctttaccacttctgtcactgtggtctgtttgctt

SEQ ID NO: 681585 - DNA, 120 bp, Artificial Sequence
  ENSG00000186889_13 (sequence is synthesized)
aatctcttgagccctggtttcctcatatataaaatgaggaaaataatatttacttcacaggtttgttgtgattaagtgaaatgatttatgtaaagtatatgaatgtagtaaacacttaaa

SEQ ID NO: 681586 - DNA, 120 bp, Artificial Sequence
  ENSG00000186889_14 (sequence is synthesized)
attgatattttccctcttcttatcagtcttgaaaatacatggttacttaaacatgtgtatttggatcctgaataagaaaatgggggaaaattatgaattcatttcctatgccaggcccat

SEQ ID NO: 681587 - DNA, 120 bp, Artificial Sequence
  ENSG00000186889_15 (sequence is synthesized)
gttttctgcatcatcatgctgcctaagcatttgtggttaccagagtatagggataatgcctaaagattcccgtggttttctaggcccttcataataaggccccacccagcctgtcttact

SEQ ID NO: 681588 - DNA, 120 bp, Artificial Sequence
  ENSG00000186889_16 (sequence is synthesized)
gtaggttttgctgttttctcactcagccatccattccaggctgatgtgctgattcccaatcatgctaatttcacgtgtttgcttacttacctttttgcctcttccttcttctccacaact

SEQ ID NO: 681589 - DNA, 120 bp, Artificial Sequence
  ENSG00000186889_17 (sequence is synthesized)
attgttcactaaagtgtagtattctaggattgttttacatgaattagttttctcatctagactgtaagttctctgaggacaaggaccatgtcatcctcctttggaatcactcacagagcc

SEQ ID NO: 681590 - DNA, 120 bp, Artificial Sequence
  ENSG00000186889_18 (sequence is synthesized)
actggcaaatgtgagggctccttgtatcgcagtccaaccccagctcatttcttagtataggtttgtttttaggatggtcgagctcaaagcagaactaagggatctgccgttttgtacacg

SEQ ID NO: 681591 - DNA, 120 bp, Artificial Sequence
  ENSG00000186889_19 (sequence is synthesized)
tgtacacggccgaggcgcgcggctccctgggcctggaacgcgctctgagcgcgccggtcccttccaggttgcgcgggctccggacgagacccagcccagccgggcagccccgcgcgctcc

SEQ ID NO: 681592 - DNA, 80 bp, Artificial Sequence
  ENSG00000186891_0 (sequence is synthesized)
atggcacagcacggggcgatgggcgcgtttcgggccctgtgcggcctggcgctgctgtgcgcgctcagcctgggtcagcg

SEQ ID NO: 681593 - DNA, 120 bp, Artificial Sequence
  ENSG00000186891_1 (sequence is synthesized)
cttgggacgggaacggacgcgcgctgctgccgggttcacacgacgcgctgctgccgcgattacccgggcgaggagtgctgttccgagtgggactgcatgtgtgtccagcctgaattccac

SEQ ID NO: 681594 - DNA, 120 bp, Artificial Sequence
  ENSG00000186891_2 (sequence is synthesized)
tgcggagacccttgctgcacgacctgccggcaccacccttgtcccccaggccagggggtacagtcccaggggaaattcagttttggcttccagtgtatcgactgtgcctcggggaccttc

SEQ ID NO: 681595 - DNA, 120 bp, Artificial Sequence
  ENSG00000186891_3 (sequence is synthesized)
cgaaggccactgcaaaccttggacagactgctgctggaggtgccgccgtcgaccgaagacgccagaagctgccagttccccgaggaagagcggggcgagcgatcggcagaggagaagggg

SEQ ID NO: 681596 - DNA, 120 bp, Artificial Sequence
  ENSG00000186891_4 (sequence is synthesized)
cggctgggagacctgtgggtgtgagcctggccgtcctccggggccaccgaccgcagccagcccctccccaggagctccccaggccgcaggggctctgcgttctgctctgggccgggccct

SEQ ID NO: 681597 - DNA, 120 bp, Artificial Sequence
  ENSG00000186891_5 (sequence is synthesized)
gctcccctggcagcagaagtgggtgcaggaaggtggcagtgaccagcgccctggaccatgcagttcggcggccgcggctgggccctgcaggagggagagagagacacagtcatggccccc

SEQ ID NO: 681598 - DNA, 120 bp, Artificial Sequence
  ENSG00000186891_6 (sequence is synthesized)
ttcctcccttgctggccctgatggggtggggtcttaggacgggaggctgtgtccgtgggtgtgcagtgcccagcacgggacccggctgcaggggaccttcaataaacacttgtccagtga

SEQ ID NO: 681599 - DNA, 120 bp, Artificial Sequence
  ENSG00000186891_7 (sequence is synthesized)
gggtccccgccggcagagccgcttgggtggctgaccgtcgtcctcctggccgtggccgcctgcgtcctcctcctgacctcggcccagcttggactgcacatctggcagctgaggaagacc

SEQ ID NO: 681600 - DNA, 120 bp, Artificial Sequence
  ENSG00000186891_8 (sequence is synthesized)
atggccccaggagaaagagacagctggataaacccagggtccagactcccagccaggagccctctgctccctggagccaactgtgggtggagaacggacaacctcactcccctggagggc

SEQ ID NO: 681601 - DNA, 120 bp, Artificial Sequence
  ENSG00000186891_9 (sequence is synthesized)
cgaggggaggcctggggaggagggggcctcagcccagctgctggggggctggcctgtctcctgcccaggcgaggagtgctgttccgagtgggactgcatgtgtgtccagcctgaattcca

SEQ ID NO: 681602 - DNA, 80 bp, Artificial Sequence
  ENSG00000186895_0 (sequence is synthesized)
agagccaggagggctttcgggggcgtggggcgcgctgcggagcggagccgcggctcgacggcggtgcgctggcggcgagt

SEQ ID NO: 681603 - DNA, 120 bp, Artificial Sequence
  ENSG00000186895_1 (sequence is synthesized)
ggctccccacccgccggcctcccgcccctcccgcgcctccgcctggggaccacgtcggccttttgttggcgaaccgtcctttctttcagcgctttgcgcagcaacggaaatttcattgct

SEQ ID NO: 681604 - DNA, 120 bp, Artificial Sequence
  ENSG00000186895_2 (sequence is synthesized)
cctgggtggaaattaaagggactcgcgttccctctctccctctccctctcccactctccctctctttctctctctcgcccacccttcccccttcttcccccacctttcccgcgaagccgg

SEQ ID NO: 681605 - DNA, 120 bp, Artificial Sequence
  ENSG00000186895_3 (sequence is synthesized)
tttcccgcgaagccggagtcagcatctccaggcgcgggatcccgctccgagcacctcgcagctgtccggctgccgccccttccatgggcgccgcgctcgcctgcagccgccgccgccgcg

SEQ ID NO: 681606 - DNA, 120 bp, Artificial Sequence
  ENSG00000186895_4 (sequence is synthesized)
acgatgggcctaatctggctgctactgctcagcctgctggagcccggctggcccgcagcgggccctggggcgcggttgcggcgcgatgcgggcggccgtggcggcgtctacgagcacctt

SEQ ID NO: 681607 - DNA, 120 bp, Artificial Sequence
  ENSG00000186895_5 (sequence is synthesized)
ggcggggcgccccggcgccgcaagctctactgcgccacgaagtaccacctccagctgcacccgagcggccgcgtcaacggcagcctggagaacagcgcctacagtattttggagataacg

SEQ ID NO: 681608 - DNA, 120 bp, Artificial Sequence
  ENSG00000186895_6 (sequence is synthesized)
ccgagtgcgagtttgtggagcggatccacgagctgggctataatacgtatgcctcccggctgtaccggacggtgtctagtacgcctggggcccgccggcagcccagcgccgagagactgt

SEQ ID NO: 681609 - DNA, 120 bp, Artificial Sequence
  ENSG00000186895_7 (sequence is synthesized)
ggtacgtgtctgtgaacggcaagggccggccccgcaggggcttcaagacccgccgcacacagaagtcctccctgttcctgccccgcgtgctggaccacagggaccacgagatggtgcggc

SEQ ID NO: 681610 - DNA, 120 bp, Artificial Sequence
  ENSG00000186895_8 (sequence is synthesized)
agctacagagtgggctgcccagaccccctggtaagggggtccagccccgacggcggcggcagaagcagagcccggataacctggagccctctcacgttcaggcttcgagactgggctccc

SEQ ID NO: 681611 - DNA, 120 bp, Artificial Sequence
  ENSG00000186895_9 (sequence is synthesized)
agctggaggccagtgcgcactagctgggcctggtggccaccgccagagctcctggcgacatcttggcgtggcagcctcttgactctgactctcctccttgagcccttgcccctgcgtccc

SEQ ID NO: 681612 - DNA, 120 bp, Artificial Sequence
  ENSG00000186895_10 (sequence is synthesized)
gcgtctgggttctcagctatttccagagccagctcaaatcagggtccagtgggaactgaagagggcccaagtcggagctcggagggggctgcctgcaatgcagggcatttgtgggtctgt

SEQ ID NO: 681613 - DNA, 120 bp, Artificial Sequence
  ENSG00000186895_11 (sequence is synthesized)
gtggcaggaagccggcagggaagggcctgagtgccagccctggcagactgaggagcctcccaggagcagcggggcagtgtggggctttgtgtcatcacaacattaaagtattttattcta

SEQ ID NO: 681614 - DNA, 120 bp, Artificial Sequence
  ENSG00000186895_12 (sequence is synthesized)
aagacactccggttctctccaaagccaggctccccctcggagtcgcacagcatccaaacttcttggtgtattttggagataacggcagtggaggtgggcattgtggccatcaggggtctc

SEQ ID NO: 681615 - DNA, 120 bp, Artificial Sequence
  ENSG00000186897_0 (sequence is synthesized)
ataccacccgcgcccgggagggaggggaggaaggttagggaggcggagagggaccgcgcccgcaggagagaggcgcgggccagggctctagcagggactggggccgcggcaggggtagca

SEQ ID NO: 681616 - DNA, 120 bp, Artificial Sequence
  ENSG00000186897_1 (sequence is synthesized)
aggtgagtcggtgcttgccaagaggcagagcgcaaaacctactaggagatcgcgcccggtgagcagcacccgcagctcagagcccgggacgtccggagcgcggggagcagtcccctctcc

SEQ ID NO: 681617 - DNA, 120 bp, Artificial Sequence
  ENSG00000186897_2 (sequence is synthesized)
atcagggagtggtctatctgggcagtctgggacccaggcaccgcgccatccctgagagagcagcagtctggagagcaggcatctcagatccctaagaaaccagccgtccgagaagccgcg

SEQ ID NO: 681618 - DNA, 120 bp, Artificial Sequence
  ENSG00000186897_3 (sequence is synthesized)
gatctcaggtgcccaggatcgttaggactgaacgggagggtactagaggaccactggctctggaccgtcgggagctgcccctgacgtaacccacgaggggcctccccttgacggacggct

SEQ ID NO: 681619 - DNA, 120 bp, Artificial Sequence
  ENSG00000186897_4 (sequence is synthesized)
ggacggcttggggagcggcaccgccgcggctggagcccgcagaggcagggtaaggggagcggggggcagccgtcgggggagtgcagacccaggcccaaggcgggtcaccgcctcctggcc

SEQ ID NO: 681620 - DNA, 120 bp, Artificial Sequence
  ENSG00000186897_5 (sequence is synthesized)
gccccggccccggcagccattgcgcccaagagtgaggaagatttgctggccctggcagcgtcgcggctgagccgccgcaagagggtggcgggcgcggccgtcggagtggccatggtgctg

SEQ ID NO: 681621 - DNA, 120 bp, Artificial Sequence
  ENSG00000186897_6 (sequence is synthesized)
ctgctgctggtggccatcccgctgctggtgcacagctcccgcgggccagcgcactacgagatgctgggtcgctgccgcatggtgtgcgacccgcatgggccccgtggccctggtcccgac

SEQ ID NO: 681622 - DNA, 120 bp, Artificial Sequence
  ENSG00000186897_7 (sequence is synthesized)
ggcgcgcctgcttccgtgccccccttcccgccaggcgccaagggagaggtgggccggcgcgggaaagcaggcctgcgggggccccctggaccaccaggtccaagagggcccccaggagaa

SEQ ID NO: 681623 - DNA, 120 bp, Artificial Sequence
  ENSG00000186897_8 (sequence is synthesized)
ccaggtccgggcggggtggcgcccgctgccggctacgtgcctcgcattgctttctacgcgggcctgcggcggccccacgagggttacgaggtgctgcgcttcgacgacgtggtgaccaac

SEQ ID NO: 681624 - DNA, 120 bp, Artificial Sequence
  ENSG00000186897_9 (sequence is synthesized)
gtgggcaacgcctacgaggcagccagcggcaagtttacttgccccatgccaggcgtctacttcttcgcttaccacgtgctcatgcgcggcggcgacggcaccagcatgtgggccgacctc

SEQ ID NO: 681625 - DNA, 120 bp, Artificial Sequence
  ENSG00000186897_10 (sequence is synthesized)
atgaagaacggacaggtccgggccagcgccattgctcaggacgcggaccagaactacgactacgccagcaacagcgtcattctgcacctggacgtgggcgacgaggtcttcatcaagctg

SEQ ID NO: 681626 - DNA, 120 bp, Artificial Sequence
  ENSG00000186897_11 (sequence is synthesized)
gacggcgggaaagtgcacggcggcaacaccaacaagtacagcaccttctccggcttcatcatctaccccgactgagccggccccgccccgtgcccccgctcgccccttctctcccgtcct

SEQ ID NO: 681627 - DNA, 120 bp, Artificial Sequence
  ENSG00000186897_12 (sequence is synthesized)
cacccacctcctgcccgccccacccgaggcgccaccccaccctttgagagcctggcggtggggtggacccttccgttcccggaggcggcctaaatgggcgaactcttggtgctcaagggt

SEQ ID NO: 681628 - DNA, 120 bp, Artificial Sequence
  ENSG00000186897_13 (sequence is synthesized)
ataagtggccgggaagaggaggagacccggccagaggagcagagcgacttccggagggatcacccgcacccaagtgcgcgctggaccccataggggcagaggtcgtggctttctcttttg

SEQ ID NO: 681629 - DNA, 120 bp, Artificial Sequence
  ENSG00000186897_14 (sequence is synthesized)
tacagagatggggagcagttttaatagcgggactcagaggcccagaaagccggagggaagcccccgcagcttgcgagggaaataacagaaacaggaggagcccatttaggcaagagaaga

SEQ ID NO: 681630 - DNA, 120 bp, Artificial Sequence
  ENSG00000186897_15 (sequence is synthesized)
cattaaaacagggtagtgcaggttctccgtcacaactttctctcgccaccctctcgtcccctcgtctccactttcaggctcaggctccagccttggcagccttcctgtgaactggaggaa

SEQ ID NO: 681631 - DNA, 120 bp, Artificial Sequence
  ENSG00000186897_16 (sequence is synthesized)
ccagtgaattctttcctggcatttaaaacgcattctgtacagtccccattcccccctatccggactaggccctggggctacagctgctgctgcctcttctaataaagtgaggttggggga

SEQ ID NO: 681632 - DNA, 120 bp, Artificial Sequence
  ENSG00000186907_0 (sequence is synthesized)
actctccctcggctagcagcctgggcacacggacagacggactgacggactctcgagcggacagcgcagctagcggggcgcgggcgctgggcgtcgacggccagccccagccttccccgc

SEQ ID NO: 681633 - DNA, 80 bp, Artificial Sequence
  ENSG00000186907_1 (sequence is synthesized)
gggcgtcgacggccagccccagccttccccgccccgtcgcgccccgccccgtcccgtcggggccgatggctcctcccgag

SEQ ID NO: 681634 - DNA, 120 bp, Artificial Sequence
  ENSG00000186907_2 (sequence is synthesized)
ctcccggagccccgcggggtccccgccgtgcatccggcgggctcagggagcgagtgggagcgccctccccccgctgccccctcccccgagcatcgagacaagatgctgcccgggctcagg

SEQ ID NO: 681635 - DNA, 120 bp, Artificial Sequence
  ENSG00000186907_3 (sequence is synthesized)
tgctgcaagctcccgcctcggcctgcctcctgctgatgctcctggccctgcccctggcggcccccagctgccccatgctctgcacctgctactcatccccgcccaccgtgagctgccagg

SEQ ID NO: 681636 - DNA, 120 bp, Artificial Sequence
  ENSG00000186907_4 (sequence is synthesized)
ccaacaacttctcctctgtgccgctgtccctgccacccagcactcagcgactcttcctgcagaacaacctcatccgcacgctgcggccaggcacctttgggtccaacctgctcaccctgt

SEQ ID NO: 681637 - DNA, 120 bp, Artificial Sequence
  ENSG00000186907_5 (sequence is synthesized)
ggctcttctccaacaacctctccaccatctacccgggcactttccgccacttgcaagccctggaggagctggacctcggtgacaaccggcacctgcgctcgctggagcccgacaccttcc

SEQ ID NO: 681638 - DNA, 120 bp, Artificial Sequence
  ENSG00000186907_6 (sequence is synthesized)
agggcctggagcggctgcagtcgctgcatttgtaccgctgccagctcagcagcctgcccggcaacatcttccgaggcctggtcagcctgcagtacctctacctccaggagaacagcctgc

SEQ ID NO: 681639 - DNA, 120 bp, Artificial Sequence
  ENSG00000186907_7 (sequence is synthesized)
tccacctacaggatgacttgttcgcggacctggccaacctgagccacctcttcctccacgggaaccgcctgcggctgctcacagagcacgtgtttcgcggcctgggcagcctggaccggc

SEQ ID NO: 681640 - DNA, 120 bp, Artificial Sequence
  ENSG00000186907_8 (sequence is synthesized)
tgctgctgcacgggaaccggctgcagggcgtgcaccgcgcggccttccgcggcctcagccgcctcaccatcctctacctgttcaacaacagcctggcctcgctgcccggcgaggcgctcg

SEQ ID NO: 681641 - DNA, 120 bp, Artificial Sequence
  ENSG00000186907_9 (sequence is synthesized)
gcggccgctctgggcctggttccagcgcgcgcgcgtgtccagctccgacgtgacctgcgccacccccccggagcgccagggccgagacctgcgcgcgctccgcgaggccgacttccaggc

SEQ ID NO: 681642 - DNA, 120 bp, Artificial Sequence
  ENSG00000186907_10 (sequence is synthesized)
ccgcggcacccacgcggccgggcagccgcgcccgcggcaacagctcctccaaccacctgtacggggtggccgaggccggggcgcccccagccgatccctccaccctctaccgagatctgc

SEQ ID NO: 681643 - DNA, 120 bp, Artificial Sequence
  ENSG00000186907_11 (sequence is synthesized)
agatctgcctgccgaagactcgcgggggcgccagggcggggacgcgcctactgaggacgactactgggggggctacgggggtgaggaccagcgaggggagcagatgtgccccggcgctgc

SEQ ID NO: 681644 - DNA, 120 bp, Artificial Sequence
  ENSG00000186907_12 (sequence is synthesized)
ctgccaggcgcccccggactcccgaggccctgcgctctcggccgggctccccagccctctgctttgcctcctgctcctggtgccccaccacctctgactgcggtgctgagatcgaagagg

SEQ ID NO: 681645 - DNA, 120 bp, Artificial Sequence
  ENSG00000186907_13 (sequence is synthesized)
ccagtgtccgatccccgcttcccgtccacccggggctgcggctccggccccagtcgccccaccttccctggccttgctgcctccctttcccctcccagctcctctcctccccggggagca

SEQ ID NO: 681646 - DNA, 120 bp, Artificial Sequence
  ENSG00000186907_14 (sequence is synthesized)
ggccgcctctccttgcctgccccctgggctgtcctgacttgtggcagccccaagagggcgtgtgtggtggctcagccctgccctccccagttctggccattaactcttccccatcccaag

SEQ ID NO: 681647 - DNA, 120 bp, Artificial Sequence
  ENSG00000186907_15 (sequence is synthesized)
gctggggtggggccccccaggcagccgctgacccgcactcctaagggcccacagcggacaccagaggggcttttgtctgcagagcgtcttccaccagcagagcctttggaagctccccca

SEQ ID NO: 681648 - DNA, 120 bp, Artificial Sequence
  ENSG00000186907_16 (sequence is synthesized)
gggagccccacccaggaccctttgggggatgcctcagtcagggccaggctgaccctgacccctgcttaccctagtcccctcaacctcctgacactggaggaatacttttctcctaagtct

SEQ ID NO: 681649 - DNA, 120 bp, Artificial Sequence
  ENSG00000186907_17 (sequence is synthesized)
accctggacactttttagggcacctggagagaactttcctctccactgtggcccctgcgtggtgaagatcaaaagaagttgtttgggaaaaaaaatttattaaaaaattctattatttta

SEQ ID NO: 681650 - DNA, 120 bp, Artificial Sequence
  ENSG00000186907_18 (sequence is synthesized)
tacaggggaagaaagaaaagggtaaatctctgttatgcagctggagaatggatgctctgaaaatggaaggaataccagtaattgttattcattgttattattattgatctaattattgtt

SEQ ID NO: 681651 - DNA, 120 bp, Artificial Sequence
  ENSG00000186908_0 (sequence is synthesized)
ttgtatccatgtttttccgggcgtcccccggagggacaggttgcgggtgaccttttcaagtgtggaggaaagggaagctgcttttgtcttcaggaatgatgcaggtctcgactcaagcct

SEQ ID NO: 681652 - DNA, 120 bp, Artificial Sequence
  ENSG00000186908_1 (sequence is synthesized)
gacgggcccaaacctccctggagctggctgacgactctgcccgagttcctgaagaggggtcccgggggtcccggagcggaagtgggagcgcgtgggcgtgggctcctcggctgcctgggg

SEQ ID NO: 681653 - DNA, 120 bp, Artificial Sequence
  ENSG00000186908_2 (sequence is synthesized)
ctccagacttgtgctgcgtgcggctccggagctctgttctcgctcctgagcagctgctaggtttcccaagcgactgtctcaaccgcccggccgcctcccccgggcagccagagcttcaca

SEQ ID NO: 681654 - DNA, 120 bp, Artificial Sequence
  ENSG00000186908_3 (sequence is synthesized)
cacatctacctccagccgggacccgcccccgagccgcggggcccacgcccagagccctccgccgtccccagcgcagtgcagcagagcgcgatccagtctggggccgggccgcgcttccgc

SEQ ID NO: 681655 - DNA, 120 bp, Artificial Sequence
  ENSG00000186908_4 (sequence is synthesized)
gcgcggagaaacccgcgccctccgaggggggaggggacagagggggcgtcacgggggcaggagaagaaggaggaggaggcccgcgtcgcctccggcggggctcgcgctcgccccgcgctc

SEQ ID NO: 681656 - DNA, 120 bp, Artificial Sequence
  ENSG00000186908_5 (sequence is synthesized)
gccctccgcctcgcccgagccccgggagggtgaaacgctttctcccagcatgcagcgggaggagggatttaacaccaagatggcggacggcccggatgagtacgataccgaagcgggctg

SEQ ID NO: 681657 - DNA, 120 bp, Artificial Sequence
  ENSG00000186908_6 (sequence is synthesized)
tgtgccccttctccacccagaggaaatcaaaccccaaagccattataaccatggatatggtgaacctcttggacggaaaactcatattgatgattacagcacatgggacatagtcaaggc

SEQ ID NO: 681658 - DNA, 120 bp, Artificial Sequence
  ENSG00000186908_7 (sequence is synthesized)
tacacaatatggaatatatgaacgctgtcgagaattggtggaagcaggttatgatgtacggcaaccggacaaagaaaatgttaccctcctccattgggctgccatcaataacagaataga

SEQ ID NO: 681659 - DNA, 120 bp, Artificial Sequence
  ENSG00000186908_8 (sequence is synthesized)
tttagtcaaatactatatttcgaaaggtgctattgtggatcaacttggaggggacctgaattcaactccattgcactgggccacaagacaaggccatctatccatggttgtgcaactaat

SEQ ID NO: 681660 - DNA, 120 bp, Artificial Sequence
  ENSG00000186908_9 (sequence is synthesized)
gaaatatggtgcagatccttcattaattgatggagaaggatgtagctgtattcatctggctgctcagttcggacatacctcaattgttgcttatctcatagcaaaaggacaggatgtaga

SEQ ID NO: 681661 - DNA, 120 bp, Artificial Sequence
  ENSG00000186908_10 (sequence is synthesized)
tatgatggatcagaatggaatgacgcctttaatgtgggcagcatatagaacacatagtgtggatccaactagattgcttttaacattcaatgtttcagttaaccttggtgacaagtatca

SEQ ID NO: 681662 - DNA, 120 bp, Artificial Sequence
  ENSG00000186908_11 (sequence is synthesized)
caaaaacactgctctgcattgggcagtgctagcagggaataccacagtcattagccttcttctggaagctggagctaatgttgatgcccagaatatcaagggcgaatcagcgcttgattt

SEQ ID NO: 681663 - DNA, 120 bp, Artificial Sequence
  ENSG00000186908_12 (sequence is synthesized)
ggcaaaacagagaaaaaatgtgtggatgatcaaccacttacaagaggcaaggcaagcaaaaggatatgacaatccgtccttccttagaaagctgaaagctgataaggaatttcggcagaa

SEQ ID NO: 681664 - DNA, 120 bp, Artificial Sequence
  ENSG00000186908_13 (sequence is synthesized)
agtaatgttaggaactcctttcctagttatttggctggttgggtttatagcagacctaaatattgattcttggctcattaaagggctaatgtatggtggtgtttgggctacagtacagtt

SEQ ID NO: 681665 - DNA, 120 bp, Artificial Sequence
  ENSG00000186908_14 (sequence is synthesized)
tctttcaaaatcctttttcgatcattcaatgcatagtgcattgccccttgggatatatttggcaaccaaattctggatgtatgtgacgtggttcttctggttttggaatgatctcaactt

SEQ ID NO: 681666 - DNA, 120 bp, Artificial Sequence
  ENSG00000186908_15 (sequence is synthesized)
tttatttatccatcttccattccttgccaatagtgttgcacttttctacaattttggaaaatcttggaaatcagatccagggattattaaagcaacagaagagcaaaagaaaaagacaat

SEQ ID NO: 681667 - DNA, 120 bp, Artificial Sequence
  ENSG00000186908_16 (sequence is synthesized)
agttgaacttgcagagacaggaagtctggacctcagtatattctgcagtacctgtttgatacgaaaaccggtgaggtccaaacattgtggtgtgtgcaaccgctgtatagcaaaatttga

SEQ ID NO: 681668 - DNA, 120 bp, Artificial Sequence
  ENSG00000186908_17 (sequence is synthesized)
tcatcattgcccatgggtgggtaactgtgtaggtgcaggcaaccatagatattttatgggctacctattcttcttgctttttatgatctgctggatgatttatggttgtatatcttactg

SEQ ID NO: 681669 - DNA, 120 bp, Artificial Sequence
  ENSG00000186908_18 (sequence is synthesized)
gggactccactgtgagaccacttacaccaaggatggattttggacatacattactcagattgccacgtgttcaccttggatgttttggatgttcctgaacagtgttttccacttcatgtg

SEQ ID NO: 681670 - DNA, 120 bp, Artificial Sequence
  ENSG00000186908_19 (sequence is synthesized)
ggtggctgtattactcatgtgtcagatgtaccagatatcatgtttaggtattactacaaatgaaagaatgaatgccaggagatacaagcactttaaagtcacaacaacgtctattgaaag

SEQ ID NO: 681671 - DNA, 120 bp, Artificial Sequence
  ENSG00000186908_20 (sequence is synthesized)
cccattcaaccatggatgtgtaagaaatattatagacttctttgaatttcgatgctgtggcctctttcgtcctgttatcgtggactggaccaggcagtatacaatagaatatgaccaaat

SEQ ID NO: 681672 - DNA, 120 bp, Artificial Sequence
  ENSG00000186908_21 (sequence is synthesized)
ctcgaatccacatcctttgaacaagagcatgctatgtgtagggctaatggtgaattttacagtctttttttcaacacttttattaacaaaagtaaacatggacagaacacactgccattt

SEQ ID NO: 681673 - DNA, 120 bp, Artificial Sequence
  ENSG00000186908_22 (sequence is synthesized)
ctgggaagagtaaagatgataaaaaataattttaatggttcttaatgtggaaattcacaacatactcaacttttgggttttgttctcacagtatttttcacaaaaaaagggtaaacttat

SEQ ID NO: 681674 - DNA, 120 bp, Artificial Sequence
  ENSG00000186908_23 (sequence is synthesized)
tctattgacagacatggtgtactgatcagaaatgttcagttttaactaaaactaaatttatgttatttggctaaatgttatgatgcagtctagtacgagtattgcatctaattccaggag

SEQ ID NO: 681675 - DNA, 120 bp, Artificial Sequence
  ENSG00000186908_24 (sequence is synthesized)
cattgttttaagttgattgactagttattatgtacatttcagaatgtacacataaatactgtgatgaaaatcatgtgattgggatctactgtgatgttgtcttcaaaggcaggagaaaat

SEQ ID NO: 681676 - DNA, 120 bp, Artificial Sequence
  ENSG00000186908_25 (sequence is synthesized)
aatgttcacaataaaatgtgctaacaatgttttgtttctatcagctgttgcaatgctgatatatttctagttcagtgaaataatttgtagtaaccttactctgaggttttacggtctgat

SEQ ID NO: 681677 - DNA, 120 bp, Artificial Sequence
  ENSG00000186908_26 (sequence is synthesized)
aatgaagcacttgcatgagtatagtaagtcatgtttttttgttcaaatttaaaagccctgctaattgcatgacacaccacatagaatgtatactagcagatactatccagtgaagcataa

SEQ ID NO: 681678 - DNA, 120 bp, Artificial Sequence
  ENSG00000186908_27 (sequence is synthesized)
attagaatttaatttgatgttcaaaaacagttccatttttaagggttaaggtggtattttcaagaaaaggcagaacaaataatgcaaaattctcagtaatagtgatacatggatatactt

SEQ ID NO: 681679 - DNA, 120 bp, Artificial Sequence
  ENSG00000186908_28 (sequence is synthesized)
ccttttaaattctcagctgcaaaataattgtagacaaaataatggcatttaactaaagatggagcatgatctaagtacatagcacatgtgaataaaagaaaagctgacagtatattctgg

SEQ ID NO: 681680 - DNA, 120 bp, Artificial Sequence
  ENSG00000186908_29 (sequence is synthesized)
tttcaataaaatgacctatcagaaagtagaatttcatccccaagagtatttcagtttatccaatattgagtaagttctgaaacagttttagaaaaaattttctttttgttaaatgtgatg

SEQ ID NO: 681681 - DNA, 120 bp, Artificial Sequence
  ENSG00000186908_30 (sequence is synthesized)
cactgatcaatttttgtcacagcattttcataccttcatggtggactactagtcactgcttccataaatattgtttacagggtgagatttggtttattcatcttaagtgctgtagcaaac

SEQ ID NO: 681682 - DNA, 120 bp, Artificial Sequence
  ENSG00000186908_31 (sequence is synthesized)
tgtggttcgagcaacctgtgggaaatctgtgagagggaatggggtgggagatgtgggggaatggtggtcagactgatgacagatcctagaccaatgtaaagaatgtgtatctgtatataa

SEQ ID NO: 681683 - DNA, 120 bp, Artificial Sequence
  ENSG00000186908_32 (sequence is synthesized)
ataatttatcaaatagttttctctttgtgtctgtgttagtgtttttaaagctgctcatttcattttgtccaaccaaaaagaaaagggagataactaatgagcttctagtgatgttcaaaa

SEQ ID NO: 681684 - DNA, 120 bp, Artificial Sequence
  ENSG00000186908_33 (sequence is synthesized)
ttgctgttaataggcattataccctgcaagttcactgcatgtctgatgcttggtaaaactagtcttccctgtaaaatgcagattacaggtattaaagcaatctagtggtatacccgcccc

SEQ ID NO: 681685 - DNA, 120 bp, Artificial Sequence
  ENSG00000186908_34 (sequence is synthesized)
ttgccttagtaagaggagcagtgaaatgtatatagttgatgttcagtatttccaagtaccatttttatatagtagcttatttgaccataagtcacacatcaaaaaaagattacccttagt

SEQ ID NO: 681686 - DNA, 120 bp, Artificial Sequence
  ENSG00000186908_35 (sequence is synthesized)
gtatgtgttttaatattagaaaattggcatatgtactttatttttgaaaagggaagagatgggtgtggggtggcaatagcattgtgccattttgtcatagaatgtaaaaattggttaact

SEQ ID NO: 681687 - DNA, 120 bp, Artificial Sequence
  ENSG00000186908_36 (sequence is synthesized)
ttacaaatgtcagctagttttgactactaattgggggaaattttagataatttttaaattcaaagttatttataaaatgctagaatttgttttaattttttgtattttgagccacttcac

SEQ ID NO: 681688 - DNA, 120 bp, Artificial Sequence
  ENSG00000186908_37 (sequence is synthesized)
atgaagactcagttgcatttttatcgaatacatttttatcaacagttaaagactatggtggttttttcagagtttggctaagaatgttgttaccatcttctttgtttgtggtacaatatt

SEQ ID NO: 681689 - DNA, 120 bp, Artificial Sequence
  ENSG00000186908_38 (sequence is synthesized)
ttcagtgcaaaagagatgtcattcagttaaaaagacaaacctctagatgtgtaattacatggaaaatactagcaatgtgaatgcttttgtagtaaccatcttgtagtacctgtgaaatct

SEQ ID NO: 681690 - DNA, 120 bp, Artificial Sequence
  ENSG00000186908_39 (sequence is synthesized)
ataactcagaaatggtcagatggtcaggagccagctatgcagcagtataccatctgtttaattattttgtaggtcctgtgtgtggaaccaactataaacccagttctaaagttgtgtatg

SEQ ID NO: 681691 - DNA, 120 bp, Artificial Sequence
  ENSG00000186908_40 (sequence is synthesized)
atggtgaacctttgggaatagttcttatcaacttaattggatacttttagcaaataggaacttaattctcagcactgaacatgaattacttccttggagttttttttcattcatattttt

SEQ ID NO: 681692 - DNA, 120 bp, Artificial Sequence
  ENSG00000186908_41 (sequence is synthesized)
gttgtttccaggaatttatttgatattaatgggcgtaaaacagcatcattgtacttaagctatggatgtttttattttatattttctttatttataactgtgccaagtattattttgcta

SEQ ID NO: 681693 - DNA, 120 bp, Artificial Sequence
  ENSG00000186908_42 (sequence is synthesized)
cttaccgtgttattctgtggaaagaaaaacctgtaaagtgtttaataaattagccctccttacataaattaaatgtcaaaattttgtaaaatattaatcagaataaatactgactcttaa

SEQ ID NO: 681694 - DNA, 120 bp, Artificial Sequence
  ENSG00000186908_43 (sequence is synthesized)
gcccagaatatcaaggcaatccttaggtgtcacatggccctctagtggaagggatgctcagctggaccgaggcaactgcaggatattcccggggagttgttacccaagggattgctttta

SEQ ID NO: 681695 - DNA, 120 bp, Artificial Sequence
  ENSG00000186908_44 (sequence is synthesized)
atttaacaccaagatggcggacggcccggatgagtacgataccgaagcgggctgtgtgccccttctccacccagagcaagaatggccttgccagatgtgggccccttcaccttggactac

SEQ ID NO: 681696 - DNA, 120 bp, Artificial Sequence
  ENSG00000186908_45 (sequence is synthesized)
ggaggtgttgatggttctgctgtgtcgccgcgctgcgtttgagagcagaggcggaggggcctggtgtggtttttgaaccgcagcttagaccctagtcttgctccaagcctcttggggcca

SEQ ID NO: 681697 - DNA, 120 bp, Artificial Sequence
  ENSG00000186908_46 (sequence is synthesized)
ggtggaagcgcgtctggttttgatttctttttccttcgccagggtgaatgacggtatctattgcttccttttagtccactgtgaggggacagtttcatgggcatagtgatgtccttccag

SEQ ID NO: 681698 - DNA, 120 bp, Artificial Sequence
  ENSG00000186908_47 (sequence is synthesized)
ctgtaaagtggggataatagcaggatttatcatagggttcttgtgctgcttaaatggcacatagttggtgattaatatattattttgttaataattagatacattatgataccagtcata

SEQ ID NO: 681699 - DNA, 120 bp, Artificial Sequence
  ENSG00000186908_48 (sequence is synthesized)
attaaaaatgcagaataccaaaattaaaagaagtttaattctgggttgtagagttcttgtttctgtctttatgctttttttagtgctttctcattttctctaataataaaattaatactg

SEQ ID NO: 681700 - DNA, 120 bp, Artificial Sequence
  ENSG00000186908_49 (sequence is synthesized)
ttctctaataataaaattaatactgaaaacagccatatattcatagagtgtgcctatttccattaattttttttttttttttttccgagactgagtctcactctgttgtccaggctggag

SEQ ID NO: 681701 - DNA, 84 bp, Artificial Sequence
  ENSG00000186908_50 (sequence is synthesized)
cagtagctgggattacagtgttgcacttttctacaattttggaaaatcttggaaatcagatccagggattattaaagcaacaga

SEQ ID NO: 681702 - DNA, 120 bp, Artificial Sequence
  ENSG00000186908_51 (sequence is synthesized)
gatttaacaccaagatggcggacggcccggatgagtacgataccgaagcgggctgtgtgccccttctccacccagagaatggccttgccagatgtgggccccttcaccttggactactca

SEQ ID NO: 681703 - DNA, 85 bp, Artificial Sequence
  ENSG00000186908_52 (sequence is synthesized)
cagtagctgggattacagaataaacagctgaaagtttgacttcttatttactctctgctggctataccggtatattttgtggaat

SEQ ID NO: 681704 - DNA, 120 bp, Artificial Sequence
  ENSG00000186908_53 (sequence is synthesized)
atttactctctgctggctataccggtatattttgtggaataagattggaaaaagttgggggaaaagagaggattggagaaaaaaggaaaagataagtcacttttgaatatgccagtgttg

SEQ ID NO: 681705 - DNA, 120 bp, Artificial Sequence
  ENSG00000186908_54 (sequence is synthesized)
ctagcattaggactgccagccctttgaagatcaccaatgagttcttgtattcacttggctgatttagagtaatatacgaaaaccggtgaggtccaaacattgtggtgtgtgcaaccgctg

SEQ ID NO: 681706 - DNA, 90 bp, Artificial Sequence
  ENSG00000186908_55 (sequence is synthesized)
aacaccaagatggcggacggcccggatgagtacgataccgaagcgggctgtgtgccccttctccacccagagtttgagatggagttgacg

SEQ ID NO: 681707 - DNA, 120 bp, Artificial Sequence
  ENSG00000186908_56 (sequence is synthesized)
gtaaagataaaatagggctattttaaacctcacaaagaataggattagaggtcagaattgtgatttatttagttctttgggacttgaacaccattgtcatcattatatctttgtgtgtaa

SEQ ID NO: 681708 - DNA, 120 bp, Artificial Sequence
  ENSG00000186908_57 (sequence is synthesized)
ttgcaagcattcttatttaagatttttattaaaacatttttcctgaaaaccactttataaaataatgaatgtatgtgtgattatcatcaaaactgtagcacacctttcatggcatacccc

SEQ ID NO: 681709 - DNA, 120 bp, Artificial Sequence
  ENSG00000186908_58 (sequence is synthesized)
atgtaaaatagcttttaaacctttttaagatttctgtagaaatagcatcagttcaccataataacaacaaaacagaattcatcacattaactgtatataataaagttgtgatatctcctt

SEQ ID NO: 681710 - DNA, 120 bp, Artificial Sequence
  ENSG00000186908_59 (sequence is synthesized)
tttgaatattcaaaatatatacagcttcatgtttggtagcaactttaggataccgaccagattcttttatatattccggcattctgaaaacagtttttgtttctgtgctttacaatgggt

SEQ ID NO: 681711 - DNA, 120 bp, Artificial Sequence
  ENSG00000186908_60 (sequence is synthesized)
aatttacaaaattgatattctttttcttaatatttagaatgttttaatacactgctgttctgtggaaatatactgttccacaaagtatgcagtgctgatgtacttgccatatggcaaaca

SEQ ID NO: 681712 - DNA, 120 bp, Artificial Sequence
  ENSG00000186908_61 (sequence is synthesized)
aattatatagtcattcaatacagatagcagtttcattgtcaaatacatatttgatggcaagaataagactaattttgtcatcatagcataaatgttttattatatattatttataagcca

SEQ ID NO: 681713 - DNA, 120 bp, Artificial Sequence
  ENSG00000186908_62 (sequence is synthesized)
catacttcttgttgtaaagaagatttcctattataaaatcttgcagatcagcagaggtagttgtcattatatgggtatgcttcactttggtaagtagacaagtccctaaggcttgtagat

SEQ ID NO: 681714 - DNA, 120 bp, Artificial Sequence
  ENSG00000186908_63 (sequence is synthesized)
cagagctttcttaaaaacgaattactttgttgattgcacccctgcactccagcctgggccacagagtgaaaccctgtctcaaaaaaagaaaaaagaaaggattactttgtaagtgatcca

SEQ ID NO: 681715 - DNA, 120 bp, Artificial Sequence
  ENSG00000186908_64 (sequence is synthesized)
aggaaccttgagaccaagtcacaccttaaccagttagtctgtttttcagatttttgacagtgttgcagctgagggttggaagtggggatagaagttgtttgaatatcctgctgccttctc

SEQ ID NO: 681716 - DNA, 120 bp, Artificial Sequence
  ENSG00000186908_65 (sequence is synthesized)
ctaagtagatttagtctaacaactgtggtgaagaataacttacccttttctttattccacagataattttggtagatgtaagaactgtgtattcactgtgccttttccttggtacctcaa

SEQ ID NO: 681717 - DNA, 120 bp, Artificial Sequence
  ENSG00000186908_66 (sequence is synthesized)
aatagtgtgtaactttatgcaaactaatggagaaatggcagtgcttttgttgaaacgctgaagtatatttataaatttttttctggcaagagttaataactgcagctcttttatcatatg

SEQ ID NO: 681718 - DNA, 120 bp, Artificial Sequence
  ENSG00000186908_67 (sequence is synthesized)
tgagttcttgtattcacttggctgatttagagtaatgtaggttttaaaaaccatttcaaaatgcttgaaaaacagacatcataagcatggattctttattgcctgtcaatagctgaataa

SEQ ID NO: 681719 - DNA, 120 bp, Artificial Sequence
  ENSG00000186908_68 (sequence is synthesized)
tgaattatatggggtttttttttttgcaagaaatagtgacttcttaagcatgttctgcattcttaaatatggtcatttcagcaggagaaatgctgtaccttaatctgagatctcagaagg

SEQ ID NO: 681720 - DNA, 120 bp, Artificial Sequence
  ENSG00000186908_69 (sequence is synthesized)
cactttactgaagagaaatagatgtgtacatatgggtttttgctggatttgttaatttggggaagacaaatattttattgatgattttgaattttaagagctttttaaattcacttttag

SEQ ID NO: 681721 - DNA, 120 bp, Artificial Sequence
  ENSG00000186908_70 (sequence is synthesized)
cctgaccttcctagtaaggaataattttattttattgaaaaacaccaatatcatgaccattaatcataatggaacatcatttagaagactggagattgatatgtttttattactcagaaa

SEQ ID NO: 681722 - DNA, 120 bp, Artificial Sequence
  ENSG00000186908_71 (sequence is synthesized)
tttgagggatgtgaattaaacatagcatcattcatcaaatcaaattggtaattcttagcttttgtaaattgatggttcagttccattcttaagagcatattttctagagtagcctcattc

SEQ ID NO: 681723 - DNA, 120 bp, Artificial Sequence
  ENSG00000186908_72 (sequence is synthesized)
cctcattcttttattctttgtttttgcagttgaaattttattaaacaatagtgacttttggtttcattcatttggaaaccttgatataatcttgtttaaaaaatatagttttattttttt

SEQ ID NO: 681724 - DNA, 120 bp, Artificial Sequence
  ENSG00000186908_73 (sequence is synthesized)
attttgagaaaataaatagtcagcttttctctcttagtataatgcctttcataatcctttaacatgcctattaacagatacgaaaaccggtgaggtccaaacattgtggtgtgtgcaacc

SEQ ID NO: 681725 - DNA, 120 bp, Artificial Sequence
  ENSG00000186910_0 (sequence is synthesized)
aaacaccattttcctgtgggtagaggtgatgcagtgctgaagacctgggcccctgctcagtgcctttgctctagaatgggtccagcttggctttggctactgggaacagggatcctggcc

SEQ ID NO: 681726 - DNA, 120 bp, Artificial Sequence
  ENSG00000186910_1 (sequence is synthesized)
tctgtccactgtcagccccttcttgcccatggagataaaagtctgcaggggcctcaaccccccaggcatcagctctcagagccagcccccgcctaccacagaatcacacccaccattacc

SEQ ID NO: 681727 - DNA, 120 bp, Artificial Sequence
  ENSG00000186910_2 (sequence is synthesized)
aattttgctttgcgtttgtataaagagctggcagcagacgcccccggaaacatcttcttctcgccagtgagcatctccaccaccctggccctgctctctcttggggcccaagctaacacc

SEQ ID NO: 681728 - DNA, 120 bp, Artificial Sequence
  ENSG00000186910_3 (sequence is synthesized)
tcagctctgatcctggagggcctgggattcaacctcacagaaacccctgaagccgacatccaccagggcttccggagcctcctccacacccttgccctgcccagccccaaactcgaacta

SEQ ID NO: 681729 - DNA, 120 bp, Artificial Sequence
  ENSG00000186910_4 (sequence is synthesized)
aaagtaggaaactccctgttcctagacaagcgactaaagcctcggcagcactatttggacagcatcaaggagctttatggagcttttgctttttctgccaacttcacagattctgttaca

SEQ ID NO: 681730 - DNA, 120 bp, Artificial Sequence
  ENSG00000186910_5 (sequence is synthesized)
actgggaggcagattaatgactatttgagaaggcaaacatacgggcaagtcgtggactgcctcccggagttcagccaggacacgttcatggttcttgccaattacatcttcttcaaagcc

SEQ ID NO: 681731 - DNA, 120 bp, Artificial Sequence
  ENSG00000186910_6 (sequence is synthesized)
gtttctttgtggatgagaggacttctctccaggtccccatgatgcaccaaaaggaaatgcacagattcctctatgaccaggatttggcttgcaccgtcctccagatagaatacagaggaa

SEQ ID NO: 681732 - DNA, 120 bp, Artificial Sequence
  ENSG00000186910_7 (sequence is synthesized)
atgccttggcgctgctggtcctccctgacccggggaaaatgaagcaggtggaggctgctctgcagccacagaccctgagaaaatggggccaattgctcctgcccagtctgttggatttgc

SEQ ID NO: 681733 - DNA, 120 bp, Artificial Sequence
  ENSG00000186910_8 (sequence is synthesized)
acttgccaaggttttcaatttctggaacatataacctggaagacatacttccccaaattggtctcaccaacatactcaacttagaagctgacttctcaggagtcactgggcagctcaaca

SEQ ID NO: 681734 - DNA, 120 bp, Artificial Sequence
  ENSG00000186910_9 (sequence is synthesized)
aaaccatctccaaggtgtcacacaaggcgatggtggacatgagtgagaaggggaccgaggccggggctgcttcaggcctcctctcccagcccccatctctgaacaccatgtcagacccac

SEQ ID NO: 681735 - DNA, 120 bp, Artificial Sequence
  ENSG00000186910_10 (sequence is synthesized)
atgcccacttcaacaggcctttcctcttgctcctttgggaggtcaccacccagagcttactcttcctgggaaaagttgtcaacccagttgcagggtaaccatggtgggaggccaggagtt

SEQ ID NO: 681736 - DNA, 120 bp, Artificial Sequence
  ENSG00000186910_11 (sequence is synthesized)
atcttatctcatcctggaccaaacagataggccagaaccagcctgcatcctggggctgctatgtggttcagttaatcagtgtgccaagattctaataaagttgaccttgggttctgtgaa

SEQ ID NO: 681737 - DNA, 120 bp, Artificial Sequence
  ENSG00000186912_0 (sequence is synthesized)
cagatgcgcttctgtcagctctccctagtgcttcaaccactgctctccctgctctactttttttgctccagctcagggatgggggtgggcagggaaatcctgccaccctcacttctcccc

SEQ ID NO: 681738 - DNA, 120 bp, Artificial Sequence
  ENSG00000186912_1 (sequence is synthesized)
ttcccatctccaggggggccatggccagtacagagtcctccctgttgagatccctaggcctcagcccaggtcctggcagcagtgaggtggagctggactgttggtttgatgaggatttca

SEQ ID NO: 681739 - DNA, 120 bp, Artificial Sequence
  ENSG00000186912_2 (sequence is synthesized)
agttcatcctgctgcctgtgagctatgcagttgtctttgtgctgggcttgggccttaacgccccaaccctatggctcttcatcttccgcctccgaccctgggatgcaacggccacctaca

SEQ ID NO: 681740 - DNA, 120 bp, Artificial Sequence
  ENSG00000186912_3 (sequence is synthesized)
tgttccacctggcattgtcagacaccttgtatgtgctgtcgctgcccaccctcatctactattatgcagcccacaaccactggccctttggcactgagatctgcaagttcgtccgctttc

SEQ ID NO: 681741 - DNA, 120 bp, Artificial Sequence
  ENSG00000186912_4 (sequence is synthesized)
ttttctattggaacctctactgcagtgtccttttcctcacctgcatcagcgtgcaccgctacctgggcatctgccacccacttcgggcactacgctggggccgccctcgcctcgcaggcc

SEQ ID NO: 681742 - DNA, 120 bp, Artificial Sequence
  ENSG00000186912_5 (sequence is synthesized)
ttctctgcctggcagtttggttggtcgtagccggctgcctcgtgcccaacctgttctttgtcacaaccagcaacaaagggaccaccgtcctgtgccatgacaccactcggcctgaagagt

SEQ ID NO: 681743 - DNA, 120 bp, Artificial Sequence
  ENSG00000186912_6 (sequence is synthesized)
gggctgctctttggcgtgccctgcctggtcactcttgtttgctatggactcatggctcgtcgcctgtatcagcccttgccaggctctgcacagtcgtcttctcgcctccgctctctccgc

SEQ ID NO: 681744 - DNA, 120 bp, Artificial Sequence
  ENSG00000186912_7 (sequence is synthesized)
accatagctgtggtgctgactgtctttgctgtctgcttcgtgcctttccacatcacccgcaccatttactacctggccaggctgttggaagctgactgccgagtactgaacattgtcaac

SEQ ID NO: 681745 - DNA, 120 bp, Artificial Sequence
  ENSG00000186912_8 (sequence is synthesized)
gtggtctataaagtgactcggcccctggccagtgccaacagctgcctggatcctgtgctctacttgctcactggggacaaatatcgacgtcagctccgtcagctctgtggtggtggcaag

SEQ ID NO: 681746 - DNA, 120 bp, Artificial Sequence
  ENSG00000186912_9 (sequence is synthesized)
ccccagccccgcacggctgcctcttccctggcactagtgtccctgcctgaggatagcagctgcaggtgggcggccaccccccaggacagtagctgctctactcctagggcagatagattg

SEQ ID NO: 681747 - DNA, 120 bp, Artificial Sequence
  ENSG00000186912_10 (sequence is synthesized)
taacacgggaagccgggaagtgagagaaaaggggatgagtgcagggcagaggtgagggaacccaatagtgatacctggtaaggtgcttcttcctcttttccaggctctggagagaagccc

SEQ ID NO: 681748 - DNA, 120 bp, Artificial Sequence
  ENSG00000186912_11 (sequence is synthesized)
tcaccctgagggttgcagggaggcagggatatcatgggtgacctcatctctcataaccccttcagttgccgactctttttagccaatgccaatcttctactcctttctcgttgtttctgt

SEQ ID NO: 681749 - DNA, 120 bp, Artificial Sequence
  ENSG00000186912_12 (sequence is synthesized)
tccttcctggggccattggtcctacaatcttcctgaaaatcttccccagtcctctttccctgtcccatttcccccacagcctcctatagcatgtgtttctctacccagaccagagcattc

SEQ ID NO: 681750 - DNA, 120 bp, Artificial Sequence
  ENSG00000186918_0 (sequence is synthesized)
aagtgcgcatgtgcgcgaggagtcgctcgggcacttattgagcgccgactgtctacgggcggccgggggtgatgggcagaggcttcagtgtccccttcgcctccgcaggagaggagaggc

SEQ ID NO: 681751 - DNA, 120 bp, Artificial Sequence
  ENSG00000186918_1 (sequence is synthesized)
agcagcatggcgagtgtcctgtcccgacgccttggaaagcggtccctcctgggagcccgggtgttgggacccagtgcctcggaggggccctcggctgccccaccctcggagccactgcta

SEQ ID NO: 681752 - DNA, 120 bp, Artificial Sequence
  ENSG00000186918_2 (sequence is synthesized)
gaaggggccgctccccagcctttcaccacctctgatgacaccccctgccaggagcagcccaaggaagtccttaaggctcccagcacctcgggccttcagcaggtggcctttcagcctggg

SEQ ID NO: 681753 - DNA, 120 bp, Artificial Sequence
  ENSG00000186918_3 (sequence is synthesized)
cagaaggtttatgtgtggtacgggggtcaagagtgcacaggactggtggagcagcacagctggatggagggtcaggtgaccgtctggctgctggagcagaagctgcaggtctgctgcagg

SEQ ID NO: 681754 - DNA, 120 bp, Artificial Sequence
  ENSG00000186918_4 (sequence is synthesized)
gtggaggaggtgtggctggcagagctgcagggcccctgtccccaggcaccacccctggagcccggagcccaggccctggcctacaggcccgtctccaggaacatcgatgtcccaaagagg

SEQ ID NO: 681755 - DNA, 120 bp, Artificial Sequence
  ENSG00000186918_5 (sequence is synthesized)
aagtcggacgcagtggaaatggatgagatgatggcggccatggtgctgacgtccctgtcctgcagccctgttgtacagagtcctcccgggaccgaggccaacttctctgcttcccgtgcg

SEQ ID NO: 681756 - DNA, 120 bp, Artificial Sequence
  ENSG00000186918_6 (sequence is synthesized)
gcctgcgacccatggaaggagagtggtgacatctcggacagcggcagcagcactaccagcggtcactggagtgggagcagtggtgtctccaccccctcgcccccccacccccaggccagc

SEQ ID NO: 681757 - DNA, 120 bp, Artificial Sequence
  ENSG00000186918_7 (sequence is synthesized)
cccaagtatttgggggatgcttttggttctccccaaactgatcatggctttgagaccgatcctgaccctttcctgctggacgaaccagctccacgaaaaagaaagaactctgtgaaggtg

SEQ ID NO: 681758 - DNA, 120 bp, Artificial Sequence
  ENSG00000186918_8 (sequence is synthesized)
atgtacaagtgcctgtggccaaactgtggcaaagttctgcgctccattgtgggcatcaaacgacacgtcaaagccctccatctgggggacacagtggactctgatcagttcaagcgggag

SEQ ID NO: 681759 - DNA, 120 bp, Artificial Sequence
  ENSG00000186918_9 (sequence is synthesized)
gaggatttctactacacagaggtgcagctgaaggaggaatctgctgctgctgctgctgctgctgccgcaggcaccccagtccctgggactcccacctccgagccagctcccacccccagc

SEQ ID NO: 681760 - DNA, 120 bp, Artificial Sequence
  ENSG00000186918_10 (sequence is synthesized)
atgactggcctgcctctgtctgctcttccaccacctctgcacaaagcccagtcctccggcccagaacatcctggcccggagtcctccctgccctcaggggctctcagcaagtcagctcct

SEQ ID NO: 681761 - DNA, 120 bp, Artificial Sequence
  ENSG00000186918_11 (sequence is synthesized)
gggtccttctggcacattcaggcagatcatgcataccaggctctgccatccttccagatcccagtctcaccacacatctacaccagtgtcagctgggctgctgccccctccgccgcctgc

SEQ ID NO: 681762 - DNA, 120 bp, Artificial Sequence
  ENSG00000186918_12 (sequence is synthesized)
tctctctctccggtccggagccggtcgctaagcttcagcgagccccagcagccagcacctgcgatgaaatctcatctgatcgtcacttctccaccccgggcccagagtggtgccaggaaa

SEQ ID NO: 681763 - DNA, 120 bp, Artificial Sequence
  ENSG00000186918_13 (sequence is synthesized)
gcccgaggggaggctaagaagtgccgcaaggtgtatggcatcgagcaccgggaccagtggtgcacggcctgccggtggaagaaggcctgccagcgctttctggactgagctgtgctgcag

SEQ ID NO: 681764 - DNA, 120 bp, Artificial Sequence
  ENSG00000186918_14 (sequence is synthesized)
gttctactctgttcctggccctgccggcagccactgacaagaggccagtgtgtcaccagccctcagcagaaaccgaaagagaaagaacggaaacacggagtttgggctctgttggctaag

SEQ ID NO: 681765 - DNA, 120 bp, Artificial Sequence
  ENSG00000186918_15 (sequence is synthesized)
gtgtaacacttaaagcaattttctcccattgtgcgaacattttattttttaaaaaaaagaaacaaaaatatttttccccctaaaataggagagagccaaaactgaccaaggctattcagc

SEQ ID NO: 681766 - DNA, 120 bp, Artificial Sequence
  ENSG00000186918_16 (sequence is synthesized)
agtgaaccagtgaccaaagaattaattaccctccgtttcccacatccccactctctaggggattagcttgtgcgtgtcaaaagaaggaacagctcgttctgcttcctgctgagtcggtga

SEQ ID NO: 681767 - DNA, 120 bp, Artificial Sequence
  ENSG00000186918_17 (sequence is synthesized)
aggaacagctcgttctgcttcctgctgagtcggtgaattctttgctttctaaactcttccagaaaggactgtgagcaagatgaatttacttttcttaaaaaaaaaaaaaaaaaaaaaaaa

SEQ ID NO: 681768 - DNA, 120 bp, Artificial Sequence
  ENSG00000186918_18 (sequence is synthesized)
gactgcctggccgtggggcagaggggtttgcccttctcggagggtacctcctgttccctgtctgagcatcctgcatggaagtcaaaggaaatccctttcttggtgacgacttaaatctgg

SEQ ID NO: 681769 - DNA, 120 bp, Artificial Sequence
  ENSG00000186918_19 (sequence is synthesized)
aattcactttttggaatgtggcagttaaacactaccttgatcattctctcctctttcctcgaggaactcctggagggtttgagcgtctggaaactctctgctctgacccgaggaagcacc

SEQ ID NO: 681770 - DNA, 120 bp, Artificial Sequence
  ENSG00000186918_20 (sequence is synthesized)
ctcctgacgccgccttcctccggttattgaaaggacgcctcagaaatgctttgttttcttttacgatgtattcagaagcctttactgattaaagttttcttttatttgggtggccgggag

SEQ ID NO: 681771 - DNA, 120 bp, Artificial Sequence
  ENSG00000186918_21 (sequence is synthesized)
agacccagggaggttctggaggttcctttctgtctcctggccccaccagggatttccccatttctgtttgctgcctgaaagcaggatgaggaaggccaaggagagtccttgcacccgtga

SEQ ID NO: 681772 - DNA, 120 bp, Artificial Sequence
  ENSG00000186918_22 (sequence is synthesized)
gcgtcaggatgaggaaatgacaggaggaagacgtgggtttgggttagtggctgctggcgttttggcccttggtgtttctggagcctccagggatctaggggagcctgggctgcgtgcatg

SEQ ID NO: 681773 - DNA, 120 bp, Artificial Sequence
  ENSG00000186918_23 (sequence is synthesized)
tcgataagcagagctgttcttggggagaaggagggaggtctcgggagtgtagcaccatgccaaccagccctgcgcgaagacagagtgagccacgcccggatggcagggcatgtttctgtt

SEQ ID NO: 681774 - DNA, 120 bp, Artificial Sequence
  ENSG00000186918_24 (sequence is synthesized)
ttggtgtctcactttcctcccagcgtgacttatttggggattcctcagggcctactggaatgtgactgcccactgcccagctgcctcgggtacaagtcctggccctatgtcccagctgtc

SEQ ID NO: 681775 - DNA, 120 bp, Artificial Sequence
  ENSG00000186918_25 (sequence is synthesized)
aggggctcagggaatcctacccagccacctgtcctgggatggagtgtcagcatccaccccttggttgtcatcgaggccgccctcccagtcctgggtgaagatatttgggccaccagggct

SEQ ID NO: 681776 - DNA, 120 bp, Artificial Sequence
  ENSG00000186918_26 (sequence is synthesized)
cccttggccccttcacgtaggaaatagacacgtgctttttaatgcaggacactttgagtgttacaaaatctgtagacctggcagtagggtcatgatgttgggaagggtgtagtgccctag

SEQ ID NO: 681777 - DNA, 120 bp, Artificial Sequence
  ENSG00000186918_27 (sequence is synthesized)
gttggtgacagaagggacagacacttgtgcacaggtgtctttggtgatggggtttttttttttataacttagtaaaaaaaaaaaaatgtatgtggaattctgtctcttggtaaagctcaa

SEQ ID NO: 681778 - DNA, 120 bp, Artificial Sequence
  ENSG00000186918_28 (sequence is synthesized)
agccaggctagcctgaggtggcgcagggctctccttcctgtcccttcgatctccttgagaattaagagctggcagctgctgatggtgtttcccaacccccctcacttcccaagacaaccc

SEQ ID NO: 681779 - DNA, 120 bp, Artificial Sequence
  ENSG00000186918_29 (sequence is synthesized)
ccagcttcaggtcctcatggggaggggagggcacgttcttgacacatgggaacttcgctcaggagggcctccccttcccctctccctcagagttttcactgccgtctcgtctttagaaag

SEQ ID NO: 681780 - DNA, 120 bp, Artificial Sequence
  ENSG00000186918_30 (sequence is synthesized)
ctgtttgaattccccccgcccccagtttggaccgtgtagatataactggatatacggatttttctctttgtgcaggcttcttatgccgttggtatacagggcaggaaagagaggaataaa

SEQ ID NO: 681781 - DNA, 120 bp, Artificial Sequence
  ENSG00000186918_31 (sequence is synthesized)
gggagagagcagtgtggaaaccacggtggttttgctttgttcttactaggttttggtgccaccttccctgcctgcgcttgtgccccctctcctccttggcactggcggcctccttgcctc

SEQ ID NO: 681782 - DNA, 120 bp, Artificial Sequence
  ENSG00000186918_32 (sequence is synthesized)
ccttccacccgtgctgccatcccgtgcctgtcgtgttggttcttcacacgtgctctgttctcggggttgttccattcatgccttcttggagggtgagggtggcttgggaaccgacccagt

SEQ ID NO: 681783 - DNA, 120 bp, Artificial Sequence
  ENSG00000186918_33 (sequence is synthesized)
gatcatgcctactttcttctttgtatctccctccttcccagcccacccgggcagcagactctgatggaaggaaggtgccgtaggtgggcttttagaaactaacgggactggttttcaaag

SEQ ID NO: 681784 - DNA, 120 bp, Artificial Sequence
  ENSG00000186918_34 (sequence is synthesized)
cagttatcttgggaaactgtttattccagcgatgtgacttttttcagaatatttcttggaatcatattcagagtctggggctgtgtgttgagcagccttaaggatgctagacactcattt

SEQ ID NO: 681785 - DNA, 120 bp, Artificial Sequence
  ENSG00000186918_35 (sequence is synthesized)
agtgcccagggagtccagcgaatgacgtctgtggccaagcgaggtctcaggtgcaaagcaaaaggaccatttaaagtaaaatagcttggattcaatcatgtgacttttaaattggctcag

SEQ ID NO: 681786 - DNA, 120 bp, Artificial Sequence
  ENSG00000186918_36 (sequence is synthesized)
aaagcaattttgtaatttcagagagtgttttgagccatggccacgttgtcattgtgagtctatagcttgactccttggagaacaatattcatttggttgtggagactgatttgctgggag

SEQ ID NO: 681787 - DNA, 120 bp, Artificial Sequence
  ENSG00000186918_37 (sequence is synthesized)
aaatctgtcctgttactttctggtcatcccaggttctgacttttaccaggggcaaaaaaaaaaaaagcaagagggagataaatcccatctgtgagtttgtcttattggcgcctttttcct

SEQ ID NO: 681788 - DNA, 120 bp, Artificial Sequence
  ENSG00000186918_38 (sequence is synthesized)
cagctgtcttccaagtattatttttactgttaaaaaattttttaaaaatgtgaaatgtaatgtttttacagcaacaatatgaaatatattttataaggaataaaatggtaccttgtctga

SEQ ID NO: 681789 - DNA, 120 bp, Artificial Sequence
  ENSG00000186918_39 (sequence is synthesized)
ctgcacagggagtttgtcttgtgcaaacaatttccaaggcagcgttttcttccctgcctgggagtgcagggctcagcgccttcactttggaactgactcagagacctaaagaagcccacc

SEQ ID NO: 681790 - DNA, 120 bp, Artificial Sequence
  ENSG00000186918_40 (sequence is synthesized)
tggccagcgggaaggggggccgccgccgcctcccggttttgggcagccctggccagctccctgtggccttggaggacttccaccgggcaggcgttcccatgatgccaggctaccaggcgc

SEQ ID NO: 681791 - DNA, 70 bp, Artificial Sequence
  ENSG00000186918_41 (sequence is synthesized)
gcgaggagtcgctcgggcacttattgagcgccgactgtctacgggcggccggggacagtcttgcactgtt

SEQ ID NO: 681792 - DNA, 89 bp, Artificial Sequence
  ENSG00000186918_42 (sequence is synthesized)
acagctcactgcagccttgacttccccaggccagttgggaccacaggcctgagccgcgccttgctgctgggtctccacttgtggggaag

SEQ ID NO: 681793 - DNA, 120 bp, Artificial Sequence
  ENSG00000186918_43 (sequence is synthesized)
aggacagcgcgggaaactgacaatgccactgcttgctagctttgggattttggacaaataggtgtttcttgatttctcttggctgctccagaaccatatggcaaactaggggatggctgg

SEQ ID NO: 681794 - DNA, 120 bp, Artificial Sequence
  ENSG00000186918_44 (sequence is synthesized)
tttatagggaccattgatagctcccaagaaagaacttaccagaggagtgaatgaagtggagattctggaggagagaggttggaaggaggccaccgctggaatggtggaagtgcaccaggt

SEQ ID NO: 681795 - DNA, 120 bp, Artificial Sequence
  ENSG00000186918_45 (sequence is synthesized)
ggcagggccgcggccgctgcagcccggagctgagctagccgtccgagccgagccgtccgagccggggaagccgggcgcgtgctgccgctcgtggcgggccgaggtgatgggcagaggctt

SEQ ID NO: 681796 - DNA, 89 bp, Artificial Sequence
  ENSG00000186918_46 (sequence is synthesized)
cacagctcactgcagccttgacttccccaggccagttgggaccacaggagaggagaggcagcagcatggcgagtgtcctgtcccgacgc

SEQ ID NO: 681797 - DNA, 120 bp, Artificial Sequence
  ENSG00000186919_0 (sequence is synthesized)
aattgctcagctgccagagaagtgactggaatagaggttgtagcttaggcaccgctgctccctccagtccctccgtgcagccgatgatggccctatggtccctgctccatctcaccttcc

SEQ ID NO: 681798 - DNA, 120 bp, Artificial Sequence
  ENSG00000186919_1 (sequence is synthesized)
tggggttcagcattaccttgctgttggtccacgggcagggcttccaagggacagcagccatctggccatccctcttcaacgtcaacttgtccaagaaggttcaggaaagcatccagatcc

SEQ ID NO: 681799 - DNA, 120 bp, Artificial Sequence
  ENSG00000186919_2 (sequence is synthesized)
cgaacaatgggagtgcgcccctgctcgtggatgtgcgggtgtttgtctccaacgtgtttaatgtggacatcctgcgatacacaatgtcctccatgctgctgcttaggctgtcctggctgg

SEQ ID NO: 681800 - DNA, 120 bp, Artificial Sequence
  ENSG00000186919_3 (sequence is synthesized)
acactcgcctggcctggaacactagtgcacacccgcggcacgccatcacgctgccctgggagtctctctggacaccaaggctcaccatcctggaggcgctctgggtggactggagggacc

SEQ ID NO: 681801 - DNA, 120 bp, Artificial Sequence
  ENSG00000186919_4 (sequence is synthesized)
agagcccccaggctcgagtagaccaggacggccacgtgaagctcaacctggccctcgccacggagaccaactgcaactttgagctcctccacttcccccgggaccacagcaactgcagcc

SEQ ID NO: 681802 - DNA, 120 bp, Artificial Sequence
  ENSG00000186919_5 (sequence is synthesized)
tcagcttctacgctctcagcaacacggcgatggagttagagttccaggcccacgtggtgaacgagattgtgagtgtcaagagggaatacgtagtttatgatctgaagacccaagtcccac

SEQ ID NO: 681803 - DNA, 120 bp, Artificial Sequence
  ENSG00000186919_6 (sequence is synthesized)
aggctgaagaacacggcgctcaagtccatcatcgctctcttggtgcctgcagaggcactgctgttggctgacgtgtgcggggggttgctgcccctccgggccattgagcgcataggctac

SEQ ID NO: 681804 - DNA, 120 bp, Artificial Sequence
  ENSG00000186919_7 (sequence is synthesized)
aaggtgacattgctgctgagttacctcgtcctccactcctccctggtgcaggccctgcccagctcctcctcctgcaacccactgctcatttactacttcaccatcctgctgctgctgctc

SEQ ID NO: 681805 - DNA, 120 bp, Artificial Sequence
  ENSG00000186919_8 (sequence is synthesized)
ttcctcagcaccatagagactgtgctgctggctgggctgctggcccggggcaaccttggggccaagagcggccccagcccagccccgagaggggaacagcgagagcacggcaacccaggg

SEQ ID NO: 681806 - DNA, 120 bp, Artificial Sequence
  ENSG00000186919_9 (sequence is synthesized)
cctcatcctgctgaagagccctccagaggagtaaaggggtcacagagaagctggcctgagactgctgaccgcatcttcttcctcgtgtatgtggttggggtgctgtgcacccaattcgtc

SEQ ID NO: 681807 - DNA, 120 bp, Artificial Sequence
  ENSG00000186919_10 (sequence is synthesized)
tttgcaggaatctggatgtgggcagcgtgcaagtctgacgcagcccctggagaggctgcaccccatggcaggcggcctagactgtaaaggggcagggcctgggctgcacaccttaggatg

SEQ ID NO: 681808 - DNA, 120 bp, Artificial Sequence
  ENSG00000186919_11 (sequence is synthesized)
aagtttgctttcccatggctgggggcgggccatgacagggcctctggattaagccaccctgagctctccctccgctagcacacaagcacagagcgtgaaataaacccatctccagtgcaa

SEQ ID NO: 681809 - DNA, 120 bp, Artificial Sequence
  ENSG00000186919_12 (sequence is synthesized)
tgaagtggtgcaaagtacatttatttttacaatgaaagctcatctatgaatctgataaaggccttccttcaactggagacaatttgggatgttgcaaaacaaggtttgggaagcccttct

SEQ ID NO: 681810 - DNA, 120 bp, Artificial Sequence
  ENSG00000186919_13 (sequence is synthesized)
atggatcggttttgtgtccaagtctgtccctgccaaaagccatcaaaagtctccatcacccctgggctccagtctgctacccccagacttggcagctgggatctctccttcctggttcat

SEQ ID NO: 681811 - DNA, 120 bp, Artificial Sequence
  ENSG00000186919_14 (sequence is synthesized)
cagctggtgccctgcttccaggtgacggtgagtcaagtcgggaggaggccgacagagggctgctggaggcgggtgggagtgaggatgcacggccagaggccaggccccatgcccccgatg

SEQ ID NO: 681812 - DNA, 120 bp, Artificial Sequence
  ENSG00000186919_15 (sequence is synthesized)
ctcctgcaacccactgctcagtaagccctgctcccttacccagtctgccctgtttctccccggtcacccactggtgctcagctcgctgggcaccagagacacagggactggcccctgagc

SEQ ID NO: 681813 - DNA, 120 bp, Artificial Sequence
  ENSG00000186919_16 (sequence is synthesized)
agggctggggtgagggcacggaggtccaggtgtgggtagaggccccttgcatccaccctgctggctctcctgtccctggtctccaccatgtcctcctcccttagaagaaacaggtctggg

SEQ ID NO: 681814 - DNA, 120 bp, Artificial Sequence
  ENSG00000186919_17 (sequence is synthesized)
gcagggagcaagctgagcctccctgaagtcccaggtgacctcaatcccctgataacccatgccttgcacagcctaagagggtgtttcttcaactgaagatggcctgaaatgggccagacc

SEQ ID NO: 681815 - DNA, 120 bp, Artificial Sequence
  ENSG00000186919_18 (sequence is synthesized)
cagctgagaatctaagaaaggaagcgatacaggctgatgacccctggggttcgctcttccgctcatgttgaggggaccttgaagaacagctcctttccctgtatctctccccacagagcc

SEQ ID NO: 681816 - DNA, 120 bp, Artificial Sequence
  ENSG00000186919_19 (sequence is synthesized)
ttcaatctcgtcctaaataggtggggccctattttttgcttccaacccccattttgctccttaacttttccccattgtccctgtctcccagcccacaggcaggcagcctaattgctcctt

SEQ ID NO: 681817 - DNA, 120 bp, Artificial Sequence
  ENSG00000186919_20 (sequence is synthesized)
ctgcaaccacgactgcctggccctgggccaagaggcactgaggctgggggccagagacaggggcctgaggaaggctgtagagggtggggcggaactcctcctccgaacgcctcctgcagt

SEQ ID NO: 681818 - DNA, 120 bp, Artificial Sequence
  ENSG00000186919_21 (sequence is synthesized)
gtgctggactctagggaaaatggccagtgagcctgcctcccccagccacctaggggactcctgggagggaaaggtcccagacctcaggcctgtgggcgggcgggaatgtgttttaagaga

SEQ ID NO: 681819 - DNA, 120 bp, Artificial Sequence
  ENSG00000186919_22 (sequence is synthesized)
gggggtcagtcccgactgcctttcctccaggagctctggctgcttctctgagccctgccacatctctgggctgtaggggagttctctgtccccacctctgacctaggctggagggagggc

SEQ ID NO: 681820 - DNA, 120 bp, Artificial Sequence
  ENSG00000186919_23 (sequence is synthesized)
ccttctgccctgctgctcttggtacacatggagcagcagtgggcacaggcctctgtcttccttctctcttttcctgtttcagaagccatcagggtcataaaagccaaggtgtggagggac

SEQ ID NO: 681821 - DNA, 120 bp, Artificial Sequence
  ENSG00000186919_24 (sequence is synthesized)
cccaggcttccgggagagtgctggttcggctgggaacacgggctgtggggaaaaagcaggagccaggactagggggctcagggacacagctcccggaggcgtggagacaggtctctgtcc

SEQ ID NO: 681822 - DNA, 120 bp, Artificial Sequence
  ENSG00000186919_25 (sequence is synthesized)
cagaggacttcaagctcacccagcccagaggcaagctaacactggtttatctgtccaatgacacgccagtctggtggaaccaggcagggctagcagcaggctcaggcagaggtgtcgaaa

SEQ ID NO: 681823 - DNA, 120 bp, Artificial Sequence
  ENSG00000186919_26 (sequence is synthesized)
ctccaacgtgtttaatgtgtcttctgtcctccccagagcaactgccctccacagccatggcgactgcagtggctcggccccttgcagcaaggccagaggctcaggttgccatggcctcac

SEQ ID NO: 681824 - DNA, 120 bp, Artificial Sequence
  ENSG00000186919_27 (sequence is synthesized)
tcctggaaaccacctgaaggtgcagccaccctgtataaacccatcaggtgacatctaacttggcagagaagtcctacccttccctccatgagagaccacagcggtagccctggggatcct

SEQ ID NO: 681825 - DNA, 120 bp, Artificial Sequence
  ENSG00000186919_28 (sequence is synthesized)
gcttcagctgtgagatgatagactgacgagcctgtgaccacttctccctccatcatgaagtggtgcaaagtacatttatttttacaatgaaagctcatctatgaatctgataaaggcctt

SEQ ID NO: 681826 - DNA, 120 bp, Artificial Sequence
  ENSG00000186919_29 (sequence is synthesized)
cctctccccagttcagtggctcaaggtgccaaagcaaggtgctcaaggtgtcacttggtcacaagccctccaactggacaactgcggggcaccaggggaaacctgcctgatatcccagtg

SEQ ID NO: 681827 - DNA, 120 bp, Artificial Sequence
  ENSG00000186919_30 (sequence is synthesized)
ccactggaagaaacggacctagccaggacggcgagggggacacgaggaaagactagtcgagagacagaccccccccggaattctgagcaccaaaagtctggccatccctcttcaacgtca

SEQ ID NO: 681828 - DNA, 120 bp, Artificial Sequence
  ENSG00000186919_31 (sequence is synthesized)
gtttgtctccaacgtgtttaatgtggtaagtgcctctaggccaagggccccaagtgctgagctgggcagggaacaggactcagccctggatagtgctggggtctcctgctgcgttctttc

SEQ ID NO: 681829 - DNA, 120 bp, Artificial Sequence
  ENSG00000186919_32 (sequence is synthesized)
aacacagcgctcaccctgaggtgatgcattgcccttcccccaggacatcctgcgatacacaatgtcctccatgctgctgcttaggctggtgagctcctatgcctggggaggtgggatggg

SEQ ID NO: 681830 - DNA, 120 bp, Artificial Sequence
  ENSG00000186919_33 (sequence is synthesized)
tcagcttctacgctctcagcaacacgggtgctgacagggcaggggctgcagggttgaggaggggaggaggaaggtgggggaggggaactcccaggtctgtggtgcaggggcagggtgcgg

SEQ ID NO: 681831 - DNA, 120 bp, Artificial Sequence
  ENSG00000186919_34 (sequence is synthesized)
ggcaaggggaaggggcaaaggcagacagaaggcgaactcccaggtctgtgttcagagcagtctaccccaggcttaggcgggcagcacctgctctcccactgcgccccccactcgagtggc

SEQ ID NO: 681832 - DNA, 120 bp, Artificial Sequence
  ENSG00000186924_0 (sequence is synthesized)
ctgctatacaactgagcctacctttcttgaaaccatgagctttgataacaactaccatggtggccagggctatgccaaaggaggcctgggctgcagctatggctgtggtcttagcggcta

SEQ ID NO: 681833 - DNA, 120 bp, Artificial Sequence
  ENSG00000186924_1 (sequence is synthesized)
tctgagaaattagagattgctgatctgtttaggccattctcttatgagctatgttttcttcccgtgtttttttctgttcaaagagtgacaactaaaatttagcccacattgccaagtcag

SEQ ID NO: 681834 - DNA, 120 bp, Artificial Sequence
  ENSG00000186925_0 (sequence is synthesized)
gcattgaactgaatctctagtccctgacaccatgagatactatggcagctactacagaggcctgggatatggctgtggaggctttggtggtctgggctatggctgtggctgtggaggcta

SEQ ID NO: 681835 - DNA, 120 bp, Artificial Sequence
  ENSG00000186925_1 (sequence is synthesized)
aacttgctgattctcatactctaactccaagatcttgcccgtatgcttcagcaaggcgaacacttttctcaatgtagagaaaatacctaccattttttggcttcatgctccagaaggaac

SEQ ID NO: 681836 - DNA, 120 bp, Artificial Sequence
  ENSG00000186930_0 (sequence is synthesized)
cccaaggacaacctccacaaccatcacgatgtgcggcagctactacggaaactactacggcgaccatggctatgggtgctgtggatacgaaggcctaggctatggctatggaagcctgcg

SEQ ID NO: 681837 - DNA, 120 bp, Artificial Sequence
  ENSG00000186930_1 (sequence is synthesized)
tgcggctctggctactactattgaggacaccgtgggagactcatcctctatcctgtgacatcgggattcaccaattctgaaccccgtatgctctgagctcggggctggatgaagattatc

SEQ ID NO: 681838 - DNA, 120 bp, Artificial Sequence
  ENSG00000186943_0 (sequence is synthesized)
atggaaaggaccaacgattccacgtcgacagaatttttcctggtagggctttctgcccacccaaagctccagacagttttcttcgttctaattttgtggatgtacctgatgatcctgctt

SEQ ID NO: 681839 - DNA, 120 bp, Artificial Sequence
  ENSG00000186943_1 (sequence is synthesized)
ggaaatggagtccttatctcagttatcatctttgattctcacctgcacacccccatgtatttcttcctctgtaatctttccttcctcgacgtttgctacacaagttcctctgtcccacta

SEQ ID NO: 681840 - DNA, 120 bp, Artificial Sequence
  ENSG00000186943_2 (sequence is synthesized)
attcttgccagctttctggcagtaaagaaaaaggtttccttctctgggtgtatggtgcaaatgtttatttcttttgccatgggggccacggagtgcatgatcttaggcacgatggcactg

SEQ ID NO: 681841 - DNA, 120 bp, Artificial Sequence
  ENSG00000186943_3 (sequence is synthesized)
gaccgctatgtggccatctgctacccactgagataccctgtcatcatgagcaagggtgcctatgtggccatggcagctgggtcctgggtcactgggcttgtggactcagtagtgcagaca

SEQ ID NO: 681842 - DNA, 120 bp, Artificial Sequence
  ENSG00000186943_4 (sequence is synthesized)
tttgcaatgcagttaccattctgtgctaataatgtcattaaacattttgtctgtgaaattctggctatcttgaaactggcctgtgctgatatttcaatcaatgtgattagtatgacaggg

SEQ ID NO: 681843 - DNA, 120 bp, Artificial Sequence
  ENSG00000186943_5 (sequence is synthesized)
tcgaatctgattgttctggttattccattgttagtaatttccatctcttacatatttattgttgccactattctgaggattccttccactgaaggaaaacataaggccttctccacctgc

SEQ ID NO: 681844 - DNA, 120 bp, Artificial Sequence
  ENSG00000186943_6 (sequence is synthesized)
tcagcccacctgacagtggtgattatattctatggaaccatcttcttcatgtacgcaaagcctgagtctaaagcctctgttgattcaggtaatgaagacatcattgaggccctcatctcc

SEQ ID NO: 681845 - DNA, 120 bp, Artificial Sequence
  ENSG00000186943_7 (sequence is synthesized)
cttttctatggagtgatgactcccatgcttaatcctctcatctatagtctgcgaaacaaggatgtaaaggctgctgtcaaaaacatactgtgtaggaaaaacttttctgatggaaaatga

SEQ ID NO: 681846 - DNA, 120 bp, Artificial Sequence
  ENSG00000186951_0 (sequence is synthesized)
gcgccgcctccttcggcgttcgccccacggaccggcaggcggcggaccgcggcccaggctgaagctcagggccctgtctgctctgtggactcaacagtttgtggcaagacaagctcagaa

SEQ ID NO: 681847 - DNA, 120 bp, Artificial Sequence
  ENSG00000186951_1 (sequence is synthesized)
ctgagaagctgtcaccacagtagcttggagctcggcggcacaaccagcaccatctggtcgcgatggtggacacggaaagcccactctgccccctctccccactcgaggccggcgatctag

SEQ ID NO: 681848 - DNA, 120 bp, Artificial Sequence
  ENSG00000186951_2 (sequence is synthesized)
agagcccgttatctgaagagttcctgcaagaaatgggaaacatccaagagatttcgcaatccatcggcgaggatagttctggaagctttggctttacggaataccagtatttaggaagct

SEQ ID NO: 681849 - DNA, 120 bp, Artificial Sequence
  ENSG00000186951_3 (sequence is synthesized)
gtcctggctcagatggctcggtcatcacggacacgctttcaccagcttcgagcccctcctcggtgacttatcctgtggtccccggcagcgtggacgagtctcccagtggagcattgaaca

SEQ ID NO: 681850 - DNA, 120 bp, Artificial Sequence
  ENSG00000186951_4 (sequence is synthesized)
tcgaatgtagaatctgcggggacaaggcctcaggctatcattacggagtccacgcgtgtgaaggctgcaagggcttctttcggcgaacgattcgactcaagctggtgtatgacaagtgcg

SEQ ID NO: 681851 - DNA, 120 bp, Artificial Sequence
  ENSG00000186951_5 (sequence is synthesized)
accgcagctgcaagatccagaaaaagaacagaaacaaatgccagtattgtcgatttcacaagtgcctttctgtcgggatgtcacacaacgcgattcgttttggacgaatgccaagatctg

SEQ ID NO: 681852 - DNA, 120 bp, Artificial Sequence
  ENSG00000186951_6 (sequence is synthesized)
agaaagcaaaactgaaagcagaaattcttacctgtgaacatgacatagaagattctgaaactgcagatctcaaatctctggccaagagaatctacgaggcctacttgaagaacttcaaca

SEQ ID NO: 681853 - DNA, 120 bp, Artificial Sequence
  ENSG00000186951_7 (sequence is synthesized)
tgaacaaggtcaaagcccgggtcatcctctcaggaaaggccagtaacaatccaccttttgtcatacatgatatggagacactgtgtatggctgagaagacgctggtggccaagctggtgg

SEQ ID NO: 681854 - DNA, 120 bp, Artificial Sequence
  ENSG00000186951_8 (sequence is synthesized)
ccaatggcatccagaacaaggaggcggaggtccgcatctttcactgctgccagtgcacgtcagtggagaccgtcacggagctcacggaattcgccaaggccatcccaggcttcgcaaact

SEQ ID NO: 681855 - DNA, 120 bp, Artificial Sequence
  ENSG00000186951_9 (sequence is synthesized)
tggacctgaacgatcaagtgacattgctaaaatacggagtttatgaggccatattcgccatgctgtcttctgtgatgaacaaagacgggatgctggtagcgtatggaaatgggtttataa

SEQ ID NO: 681856 - DNA, 120 bp, Artificial Sequence
  ENSG00000186951_10 (sequence is synthesized)
ctcgtgaattcctaaaaagcctaaggaaaccgttctgtgatatcatggaacccaagtttgattttgccatgaagttcaatgcactggaactggatgacagtgatatctccctttttgtgg

SEQ ID NO: 681857 - DNA, 120 bp, Artificial Sequence
  ENSG00000186951_11 (sequence is synthesized)
ctgctatcatttgctgtggagatcgtcctggccttctaaacgtaggacacattgaaaaaatgcaggagggtattgtacatgtgctcagactccacctgcagagcaaccacccggacgata

SEQ ID NO: 681858 - DNA, 120 bp, Artificial Sequence
  ENSG00000186951_12 (sequence is synthesized)
tctttctcttcccaaaacttcttcaaaaaatggcagacctccggcagctggtgacggagcatgcgcagctggtgcagatcatcaagaagacggagtcggatgctgcgctgcacccgctac

SEQ ID NO: 681859 - DNA, 120 bp, Artificial Sequence
  ENSG00000186951_13 (sequence is synthesized)
tgcaggagatctacagggacatgtactgagttccttcagatcagccacaccttttccaggagttctgaagctgacagcactacaaaggagacgggggagcagcacgattttgcacaaata

SEQ ID NO: 681860 - DNA, 120 bp, Artificial Sequence
  ENSG00000186951_14 (sequence is synthesized)
tccaccactttaaccttagagcttggacagtctgagctgtaggtaaccggcatattattccatatctttgttttaaccagtacttctaagagcatagaactcaaatgctgggggtaggtg

SEQ ID NO: 681861 - DNA, 120 bp, Artificial Sequence
  ENSG00000186951_15 (sequence is synthesized)
gctaatctcaggactgggaagattacggcgaattatgctcaatggtctgattttaactcacccgatgttaatcaatgcacattgctttagatcacattcgtgatttaccatttaattaac

SEQ ID NO: 681862 - DNA, 120 bp, Artificial Sequence
  ENSG00000186951_16 (sequence is synthesized)
tggtaacctcaaaattcgtggcctgtcttcccattcaccccgcttttgactattgtgctcctttataattctgaaaactaatcagcactttttaacaatgtttataatcctataagtcta

SEQ ID NO: 681863 - DNA, 120 bp, Artificial Sequence
  ENSG00000186951_17 (sequence is synthesized)
gatgtatccaaaggtgaagtatgtaaaaagcagcaaaatatttatttcaaagacttcacttctgtttcctgaatctaaagaaagacaacatgctgctttttaatcataggatggagaatt

SEQ ID NO: 681864 - DNA, 69 bp, Artificial Sequence
  ENSG00000186951_18 (sequence is synthesized)
aaagacaacatgctgctttttaatcataggatggagaattttaaagaactgtttgggccaggcacagtc

SEQ ID NO: 681865 - DNA, 120 bp, Artificial Sequence
  ENSG00000186951_19 (sequence is synthesized)
cagcctggtgacagaacgagactctgtcttaaaaacaaacaaacaaaaaaaaaatctgttagataagctatcaaaatgcagctgttgttttgtttttggctcactgttttcgtggttgta

SEQ ID NO: 681866 - DNA, 120 bp, Artificial Sequence
  ENSG00000186951_20 (sequence is synthesized)
tggctcactgttttcgtggttgtaactaatatgtggaaaggcccatttccaggtttgcgtagaagagcccagaaaacagagtctcaagacccccgctctggactgtcataagctagcacc

SEQ ID NO: 681867 - DNA, 120 bp, Artificial Sequence
  ENSG00000186951_21 (sequence is synthesized)
cgtggtaagcgggacgagacaagctcccgaagcccgccagcttcctgctccactcagctccgtccagtcaacctgaacccacccagtccagctgtctgtgggaatggtggtgttcttagg

SEQ ID NO: 681868 - DNA, 120 bp, Artificial Sequence
  ENSG00000186951_22 (sequence is synthesized)
gacagactgacaccttacttgtcagtgttcctccgggccccatttggcagctcccgtatcttttgttatgttgcttttaaagatatgatgttttattgttttaactcttggtgacagtag

SEQ ID NO: 681869 - DNA, 120 bp, Artificial Sequence
  ENSG00000186951_23 (sequence is synthesized)
atgctctctggagcgcagacgaggcacatgtgtcttcatagcctgggctgggtgggagccagtcaccctgcggatcgagagagggggtagagtcttcttcaaatggcagttttacttcaa

SEQ ID NO: 681870 - DNA, 120 bp, Artificial Sequence
  ENSG00000186951_24 (sequence is synthesized)
atggcagatttcacaagagttggttattttttacaatggtttaggttgttaagtctcctttgtatgtaaggtagttttttcaacatctaaaatttttgttttagccttcaaaaccaactt

SEQ ID NO: 681871 - DNA, 120 bp, Artificial Sequence
  ENSG00000186951_25 (sequence is synthesized)
accaacctcagtccagctgggaaggcagcgttgattatggtagtttgtcaagaatatatggacctggaaacactttctctctctgtccacctggtagataaattgtcctgttgagaattt

SEQ ID NO: 681872 - DNA, 120 bp, Artificial Sequence
  ENSG00000186951_26 (sequence is synthesized)
ttagatctggactggaactgccaggaccaccgcctccagggagtcgctgggcacctggaggtatcgtcgatgcctctcccccatctttagaaaatttggctcttctgaggtcattattat

SEQ ID NO: 681873 - DNA, 120 bp, Artificial Sequence
  ENSG00000186951_27 (sequence is synthesized)
tttaagaatgattaggattgataagggtcccatgaccagcattatgaaaatgcgagagtgggaaggacacagtgtgagacttccactagaaaaaagtgaaagttagggttaggacatcct

SEQ ID NO: 681874 - DNA, 120 bp, Artificial Sequence
  ENSG00000186951_28 (sequence is synthesized)
tgaaagttagggttaggacatccttttttaaaaattacaaatttagtccgttttggtttttgtaatcaggctaggcacagtggctcacacatggaatcccagcactttgggaggccgagg

SEQ ID NO: 681875 - DNA, 89 bp, Artificial Sequence
  ENSG00000186951_29 (sequence is synthesized)
gtacacaaaatttaaaaattagttcatcggggtggcacacatcagtagtcccagctactctgcaggctgaggtgggaggattgcttgaa

SEQ ID NO: 681876 - DNA, 89 bp, Artificial Sequence
  ENSG00000186951_30 (sequence is synthesized)
cttagattccaccctctcccaccccggcaaaaaaaaaaaaaaaagatgcaatcaaaggggctgttggccagcaatggcagcagcagcgg

SEQ ID NO: 681877 - DNA, 120 bp, Artificial Sequence
  ENSG00000186951_31 (sequence is synthesized)
aatcaaaggggctgttggccagcaatggcagcagcagcggcgggcagtctgcccaagtgtcttaggaaccaaaagcaaataaaagtgtttccatatatgccaccagccaagtggccatcc

SEQ ID NO: 681878 - DNA, 120 bp, Artificial Sequence
  ENSG00000186951_32 (sequence is synthesized)
taattcagaaagaagctagcctttgagtgtctgtcatggtgcatccgtttcagtattatttcctaaaatgagaagcccctgtgtcaacaagatccaggggctggagcccaatgccaagcc

SEQ ID NO: 681879 - DNA, 120 bp, Artificial Sequence
  ENSG00000186951_33 (sequence is synthesized)
tgtgttgtccccagcgaccctgcagctgctcgctctgatgtaccctgtgccattcaaggagatgtggtccaggaaagtgagcctcatggttttcagagaagtcattgttctgtttacatt

SEQ ID NO: 681880 - DNA, 120 bp, Artificial Sequence
  ENSG00000186951_34 (sequence is synthesized)
ttcataaaacctgtttaaaatagctccccgtctcaggctttcagcagtaacagtgagctgactggcaagttcgatgttagctcccgggacactcagcagcgatggtgagcattttggttt

SEQ ID NO: 681881 - DNA, 120 bp, Artificial Sequence
  ENSG00000186951_35 (sequence is synthesized)
ccttaaggcccagcaagacttccagggacatctctggtgaagccagaatggagacacccgtgacctcaggctgaaagtcactcgacattggtctcttgtgttgatagggaaggaaatcag

SEQ ID NO: 681882 - DNA, 120 bp, Artificial Sequence
  ENSG00000186951_36 (sequence is synthesized)
gcattcctatttctttaaataacaaaaccactaattgccactcaatgctggaatattttgggtcacctaatcatagatttctcagggcatcaatactcaaatataggctgattatgcccc

SEQ ID NO: 681883 - DNA, 120 bp, Artificial Sequence
  ENSG00000186951_37 (sequence is synthesized)
agttcaaatgggaactattaacagagtgcatttcttgcttgctgggtttcaacagacatcagccaaaagaacaaaagagatgtcaggacagattccaggagtgtcggagcacatgtgtgg

SEQ ID NO: 681884 - DNA, 120 bp, Artificial Sequence
  ENSG00000186951_38 (sequence is synthesized)
cacccgctccctctggcagcgaatgtaggaagtcgccaaatttacccactcttcaacaagtcattgtttaaacacggtttttcattttctcaacttttaatagcaaaaagtgccaaagtc

SEQ ID NO: 681885 - DNA, 120 bp, Artificial Sequence
  ENSG00000186951_39 (sequence is synthesized)
ctcagagacctaacagccttggtctaccgtgctgaccagggtgaaggcacggcgagggactcctcccagacgtgcctcttgtgtgccagctggctgtggctcgggagcagacgcaggcct

SEQ ID NO: 681886 - DNA, 120 bp, Artificial Sequence
  ENSG00000186951_40 (sequence is synthesized)
ttgtccaggggagcctggcggcgcatccctcctctcccacctcctggcacttccagctgggtgtcccacatgttggattccgtccccaccacacttccagagaccggagaactgtgcagg

SEQ ID NO: 681887 - DNA, 120 bp, Artificial Sequence
  ENSG00000186951_41 (sequence is synthesized)
gcctaaggccgtttggatgaattgtcaaaacaagatgcttccagttacagcggcaggagcgggactgggagcacgggctgacggctgctggtgcctttcttcccacctcgcttgcctgtt

SEQ ID NO: 681888 - DNA, 120 bp, Artificial Sequence
  ENSG00000186951_42 (sequence is synthesized)
tccgcttgacccttcctccagctccgatgagaagagtataaagcatcttcctaacgggtgtgtttgctatacgaacataatggacgtgaagtggggcagaaacccagaactcagcattca

SEQ ID NO: 681889 - DNA, 120 bp, Artificial Sequence
  ENSG00000186951_43 (sequence is synthesized)
aggatgcccaggagagctgtccctgttttaaagagctgtgttttgttttgtttcgcatttagagagcagacaaggcacccttctgctgcgctgatacgtttcttacactgggccatttta

SEQ ID NO: 681890 - DNA, 120 bp, Artificial Sequence
  ENSG00000186951_44 (sequence is synthesized)
gacccccagggaaacagccttcctggagcgttgtctggaggttccagggacagggcagcctcccagagccgagcaagagctcaaggtacaaatgagagatttgctataccgtgagaagtc

SEQ ID NO: 681891 - DNA, 120 bp, Artificial Sequence
  ENSG00000186951_45 (sequence is synthesized)
aacaacttagccaccacttccccgcaatggaccatgtaacaaatacctcagcaggccctgcaaaaggccatgctagagctgaggcgcacagcctgtggcctctgtagttagggcaggtgg

SEQ ID NO: 681892 - DNA, 120 bp, Artificial Sequence
  ENSG00000186951_46 (sequence is synthesized)
gatggagactccttgagtgcacacacctgagcctgcccacacacaggggagcagcatctcgtatgacgtctggaaggaacttcggttgtgtaaagggagccttgaagatacgtgcaaaag

SEQ ID NO: 681893 - DNA, 120 bp, Artificial Sequence
  ENSG00000186951_47 (sequence is synthesized)
gtgctaccccaatttggtgaaactgacattgggcacgtcttgggcttaggagaagcggccgatggtcccggcctgcagtgacaaacccccctccccgcaccgcccccagcaccccctctc

SEQ ID NO: 681894 - DNA, 120 bp, Artificial Sequence
  ENSG00000186951_48 (sequence is synthesized)
ctcttcacctcttcctgctggccacgaggaagccacttcctcagagagaccctaccagatgcggatggaaacagatgcaccaaagcaagccctgatgaaaccgcgacttcctaaggtctg

SEQ ID NO: 681895 - DNA, 120 bp, Artificial Sequence
  ENSG00000186951_49 (sequence is synthesized)
tctcctctgaacttgcacctgggcctctctgtgtttggttccaagcacttcccacctcaaactcccattttcaaaccactgtatctctgcgcacatctgctacttaccagccgcatacat

SEQ ID NO: 681896 - DNA, 120 bp, Artificial Sequence
  ENSG00000186951_50 (sequence is synthesized)
gatggagggttttttggtcctgatccagtggccacacctgtctttgaaatgtctcactgaactccagttttaaaatagattcattgcttcaacacagcaagcccaatgcacccagctaag

SEQ ID NO: 681897 - DNA, 120 bp, Artificial Sequence
  ENSG00000186951_51 (sequence is synthesized)
actggcttgaccgacagcctggcctttggtggggggcttcctggggcctggggaaagctggccaccttcaacagctggtacctcttcaacagtgtggcctttcaaaatgcagatgccacc

SEQ ID NO: 681898 - DNA, 120 bp, Artificial Sequence
  ENSG00000186951_52 (sequence is synthesized)
aggagaacatgcccacagctcaccacctatggatgccatggctctgggcagctttcaaagcaggttcctgtggtctcctcagctgtttgagggggtaacagcaaatcagcctccatttta

SEQ ID NO: 681899 - DNA, 120 bp, Artificial Sequence
  ENSG00000186951_53 (sequence is synthesized)
aaatgaaaacaccagcctccagatgtagggcctgctgggtgttgctagccgctggtccccaggcacggtgcactttctccacctcctgcagcctccctgttgtttctagactcttgcacc

SEQ ID NO: 681900 - DNA, 120 bp, Artificial Sequence
  ENSG00000186951_54 (sequence is synthesized)
tggtgagtgcaaggataggtgacccaggggcctgcagccttgtcctcagctcccatctcctggactgccagcctcaccctctgcagttagcatggttggcctgatgcagggatcccgagg

SEQ ID NO: 681901 - DNA, 120 bp, Artificial Sequence
  ENSG00000186951_55 (sequence is synthesized)
gattactttttagaccttctttcacattcagaaaagtagtatagattcaggagaggcaagaaaattatgctgtccatagaagtcacccatgaagactgatgccaccacctgaaggctcat

SEQ ID NO: 681902 - DNA, 120 bp, Artificial Sequence
  ENSG00000186951_56 (sequence is synthesized)
gattgttaaaaatgtccacgggaacctctcgtccacaggaggtttgtctcaacacttcccatttttacggcattggcattgccaagcatggggaagtatctgctcttctcatgttaaaag

SEQ ID NO: 681903 - DNA, 120 bp, Artificial Sequence
  ENSG00000186951_57 (sequence is synthesized)
tggcccagcttttcttaactcagtccaagctgacttgtttagctgcactggaatttcttaccaaccaaatatttgcatcgagcaaagggggctgtgtgcacctccctaatggcagcgatg

SEQ ID NO: 681904 - DNA, 120 bp, Artificial Sequence
  ENSG00000186951_58 (sequence is synthesized)
atggctgctgtcattcaagcccatcttcagacgtcacagtctggaagtgaaatgtccacaaacatctgtggcagaaaaggctatacggaccacccagttgtgctgcagctttacagagca

SEQ ID NO: 681905 - DNA, 120 bp, Artificial Sequence
  ENSG00000186951_59 (sequence is synthesized)
aggaagggttgtggcaaataaatgattaacctgcctcgactgtgctgagggcaacaaaggccatctcaccaaaggattattcgatgccattaaatcatcccgtgaccttcctgcttccga

SEQ ID NO: 681906 - DNA, 120 bp, Artificial Sequence
  ENSG00000186951_60 (sequence is synthesized)
gtccatggcctttgcccagggcatgtactcccctgagaggccttctgcctagaaagatctatgactgggttccaaagttgaggcctaggtttttgctgggatttagatattttcaggcac

SEQ ID NO: 681907 - DNA, 120 bp, Artificial Sequence
  ENSG00000186951_61 (sequence is synthesized)
cattttgacagcattcaggaaaacggttattgaccccatagactagggtaagaataaaggcaataaatttggtctgactcagaatataggagatccatatatttctctggaaaccacagt

SEQ ID NO: 681908 - DNA, 120 bp, Artificial Sequence
  ENSG00000186951_62 (sequence is synthesized)
gtacactaaaatgtgaaattgaaggttttgttaaaaagaaaaagataatgagcttcatgctttgtttaattacataatgatttccattacgctatttctgtgaaatgcagcaggttctta

SEQ ID NO: 681909 - DNA, 120 bp, Artificial Sequence
  ENSG00000186951_63 (sequence is synthesized)
aacgttatttcagtggcatgggctggaagcttatcacaaaaagccatgtgtgtggccttatcagaacagaaagagacaggctggtgcccaaggctgctgcctgctccaccttttgccagc

SEQ ID NO: 681910 - DNA, 120 bp, Artificial Sequence
  ENSG00000186951_64 (sequence is synthesized)
tctggacatctgaggacgtcccggcagatctggaatggggccctcaactgaccatttgcttctcagaatttcagtttgagacatgagaggtataatcagttacttttctccccccagaga

SEQ ID NO: 681911 - DNA, 120 bp, Artificial Sequence
  ENSG00000186951_65 (sequence is synthesized)
aacccttttgtgaggggagaggagctatggtatgtggttcagctgaaacacatacaactgcatccttttggagtcctttgccaacaaaaacagaccaacagaccagatggtgtccatgtt

SEQ ID NO: 681912 - DNA, 120 bp, Artificial Sequence
  ENSG00000186951_66 (sequence is synthesized)
agatggtgtccatgttcaatatcatgtcttgatggacgcagctgatgacctcaaatacttgagtggtctcatggctgttagatggattatttgaaaaaaaaaaaaaaaaaagagagaaaa

SEQ ID NO: 681913 - DNA, 120 bp, Artificial Sequence
  ENSG00000186951_67 (sequence is synthesized)
atcagagatagcaaactaagacctggggaggggggtcagcttttattttattttattttttttaagtttgctagttgggtcaaatgtgaggaggagggagtctacctgccacctcttctc

SEQ ID NO: 681914 - DNA, 120 bp, Artificial Sequence
  ENSG00000186951_68 (sequence is synthesized)
ttgcccctcttctgcccacacatccagcatccaaaatccattcatttaatgaattgataaagtgccgtgcaaactggtgcacaaacaggcccccagtccacgcagcctggctcctaggaa

SEQ ID NO: 681915 - DNA, 120 bp, Artificial Sequence
  ENSG00000186951_69 (sequence is synthesized)
aagtggtgaccgggcgtgggggggcatgccgcagccctgggacacagtcgggcaccttccccggacccccaggccttggctgtgcctcaagtcagagagggtcagccttcaggccccgga

SEQ ID NO: 681916 - DNA, 120 bp, Artificial Sequence
  ENSG00000186951_70 (sequence is synthesized)
gacgagtgactggccgatcatttcacaataaaatcactcacttttggcaacttcactttttttaaggcacagtcagttccttttctcatgtacctcacaaaagatgaagaccatgtagta

SEQ ID NO: 681917 - DNA, 120 bp, Artificial Sequence
  ENSG00000186951_71 (sequence is synthesized)
ctctttttggtaaagttacagtgttcatgttaaatatcacttttttctacattgtgtggtaaaaagaactacgttaatagctatatcttaaatactgtgatttgactttttgaaaaatat

SEQ ID NO: 681918 - DNA, 120 bp, Artificial Sequence
  ENSG00000186951_72 (sequence is synthesized)
cctaatacaaatattttactaacttacaatcactcatttaataagaaacatttggattcttttgaaatcagtgttaattgactcatattcttaaaagcctggctcttgaccctattggaa

SEQ ID NO: 681919 - DNA, 89 bp, Artificial Sequence
  ENSG00000186951_73 (sequence is synthesized)
actcatattcttaaaagcctggctcttgaccctattggaaacacaaaggaagctgaaatcaaacatctaaaatacactgcgtacacgtg

SEQ ID NO: 681920 - DNA, 120 bp, Artificial Sequence
  ENSG00000186951_74 (sequence is synthesized)
ttcaatgtggaaatctgttccctttaccacactgtatatgcacagagcacaagagaggctatctctagtcacttccaccagcgaggccttagactccgtattagaggccaccgatttcat

SEQ ID NO: 681921 - DNA, 120 bp, Artificial Sequence
  ENSG00000186951_75 (sequence is synthesized)
acaacagtgtttcgctaaagacccttcactattcttgtttagtaaatagctgtctgctcttcagggaactgttacctatgggttattaccaaagaacgctggcaattggaaatgtcctga

SEQ ID NO: 681922 - DNA, 120 bp, Artificial Sequence
  ENSG00000186951_76 (sequence is synthesized)
tggaaattctttgcacgtgccggttctctggcatcctccaggtggcccaacccaaagcagaaagcagaaaccacagaccccgtgagtctccccataccttgtttccaataacttggcaaa

SEQ ID NO: 681923 - DNA, 120 bp, Artificial Sequence
  ENSG00000186951_77 (sequence is synthesized)
acttcttggtgcatattggttacaccctctgggattcataatgccattaggctaaaaccctaagagagagggttgacagaaacacacgcgagaatgaggcagatcccagagcaaggactg

SEQ ID NO: 681924 - DNA, 120 bp, Artificial Sequence
  ENSG00000186951_78 (sequence is synthesized)
ggcccagactctccacatgtgctctactagtgagtgccttatactctcagtattttggggcttacagcttcttatttgtgctaaaaaggtgcagttccaaagtaggaactgccacacagg

SEQ ID NO: 681925 - DNA, 120 bp, Artificial Sequence
  ENSG00000186951_79 (sequence is synthesized)
ccccagcatcctctctccaacttcatacctctctcctggtggggggagcgggcatccaggacctccggaatcaaggatgtgcagagaagagcgaaagtaatttttctagtcacatgaact

SEQ ID NO: 681926 - DNA, 120 bp, Artificial Sequence
  ENSG00000186951_80 (sequence is synthesized)
gattggttccaggcaattagaaaatggctataaaataaccttaattttaaaaaaaaatcttgggtcttcgttttcctattaggagactgaactgaccacatgtattgatttatatcctga

SEQ ID NO: 681927 - DNA, 120 bp, Artificial Sequence
  ENSG00000186951_81 (sequence is synthesized)
atatatgggaacttctgtgtttgggatgtcctactgtaagactgatgaatgtacagagttaatttcagggtacagttttgccttaatggttttaaaaaataaactattttttaaaatttt

SEQ ID NO: 681928 - DNA, 120 bp, Artificial Sequence
  ENSG00000186951_82 (sequence is synthesized)
aaaaaaaaaaaaaaaaaaaccacattaattaaaatatgtatttgcttattataaatatatttgaaacatgccaatttttcttctctttttttgctctattggtttctgtgtgtggatgga

SEQ ID NO: 681929 - DNA, 120 bp, Artificial Sequence
  ENSG00000186951_83 (sequence is synthesized)
tgtgtggatggatatatttttaatggcaaataggatgagtgtctttacttccaagtagtcagtgtttttctttaatgtttgtactaattttgtcacattgcagttagaggttgtggcctg

SEQ ID NO: 681930 - DNA, 120 bp, Artificial Sequence
  ENSG00000186951_84 (sequence is synthesized)
tctaatttctgcttttttggaacttgagagtctctgtttttatttgtttttggtagcctggcatagagtccatttttcttttcttttctttttttgagacggagtttagctcttgttgcc

SEQ ID NO: 681931 - DNA, 120 bp, Artificial Sequence
  ENSG00000186951_85 (sequence is synthesized)
gagccactgcgcccagctgtagatactttttaaaaaggtatagtttctgattatggggtagaaatgtgctatgtctgtcatttcagccttatgaattgcccagaataagctagatcacct

SEQ ID NO: 681932 - DNA, 120 bp, Artificial Sequence
  ENSG00000186951_86 (sequence is synthesized)
tgtttaaaagaatgtgcttctttttccaagtatttctgccgcttgcatgcactgagcttctttggaaaggagcaccatgcaggcatattttccagacaggaccggatttgctcgttactc

SEQ ID NO: 681933 - DNA, 120 bp, Artificial Sequence
  ENSG00000186951_87 (sequence is synthesized)
agaggtgtgtgcattctttgcttttaggatatttaattagcatcttttaatagtgatattacggtgtcttaaaagtttatgcatttgaaaagaaaagaacttactccttgccaggtctca

SEQ ID NO: 681934 - DNA, 120 bp, Artificial Sequence
  ENSG00000186951_88 (sequence is synthesized)
acctatcatggttatctttgcagctgagctgcgttggttttgaggctcacatatggtaaaagtggttggaaatctggaaatattgctgtgtatctgcaaagcagcttgatatagtggaaa

SEQ ID NO: 681935 - DNA, 120 bp, Artificial Sequence
  ENSG00000186951_89 (sequence is synthesized)
aggtattaggtcattaatcatgagatttggattctagccccttagctgctgcctgccaggcctggagacctttgttctcttctttaaactgctgctttctcatcagaaaatgaagttcct

SEQ ID NO: 681936 - DNA, 120 bp, Artificial Sequence
  ENSG00000186951_90 (sequence is synthesized)
ctccataccacctctctgaagggctgtgaagctcgaagtggcagcttaaaaaactgcccatctcaggaggtgtcttaagaaggaggacataccgctggctcctgcctttctcacttagcc

SEQ ID NO: 681937 - DNA, 120 bp, Artificial Sequence
  ENSG00000186951_91 (sequence is synthesized)
aggtctgatacctgtgttgttttcactgtggccattttaggatttttcaaaggctttcagaaagcaacatgctaccgtaccccttatacaccaaaactggttttcattttggaatataaa

SEQ ID NO: 681938 - DNA, 120 bp, Artificial Sequence
  ENSG00000186951_92 (sequence is synthesized)
gtgcgcggctggggacctgagggcgaggagcgaggacacacaccgaggactcttgcgagggatctcggggcccagctcggcctccctcctagcgctgggggcctgcccggaacccgagtc

SEQ ID NO: 681939 - DNA, 120 bp, Artificial Sequence
  ENSG00000186951_93 (sequence is synthesized)
tgtcccctcggagggagggcccacgggcggggacatcgggacttgccctttcctcggcgcagcggagctggggcgtcgccgactcagaaggtgctttccgagacctccagggatctccga

SEQ ID NO: 681940 - DNA, 120 bp, Artificial Sequence
  ENSG00000186951_94 (sequence is synthesized)
ggcgaggaaacccgggccccggacagaccgaccctgggctgaagctcagggccctgtctgctctgtggactcaacagtttgtggcaagacaagctcagaactgagaagctgtcaccacag

SEQ ID NO: 681941 - DNA, 120 bp, Artificial Sequence
  ENSG00000186951_95 (sequence is synthesized)
gcattgttctaagatacgtaagtgaacaaaacccatgacaccctcgtctatgagagctgatcctctggcagggacagacaggtcatgagtggagtgatggagcagctggcctggtgactt

SEQ ID NO: 681942 - DNA, 86 bp, Artificial Sequence
  ENSG00000186951_96 (sequence is synthesized)
ggtcatgagtggagtgatggagcagctggcctggtgacttagccgccttcaggtacagtaggaggagcaagcccaggacagttcac

SEQ ID NO: 681943 - DNA, 120 bp, Artificial Sequence
  ENSG00000186951_97 (sequence is synthesized)
tgggaagttcaagatcaaagtgccagcagattcagtgtcatgtgaggacgtgcttcctgcttcatagataagagtgccacacccccctgtcccagtgcactggggctgtggatcccttca

SEQ ID NO: 681944 - DNA, 120 bp, Artificial Sequence
  ENSG00000186951_98 (sequence is synthesized)
ccagtgtcgtagaggacgattaaggacacatgtgttgaatgttgagaaaattatatttatcccacagttaagcaaaggacagcgaagatggaaacagttcattctgagactctgagctgt

SEQ ID NO: 681945 - DNA, 120 bp, Artificial Sequence
  ENSG00000186951_99 (sequence is synthesized)
agcttaacaacaactcctttcttcttgcttggagccacctcaaagctcttagcaactaagttattatactggctatgtaattaatacacttaaaaaaaaccttaatagcttaccaagtac

SEQ ID NO: 681946 - DNA, 83 bp, Artificial Sequence
  ENSG00000186951_100 (sequence is synthesized)
ttaatacacttaaaaaaaaccttaatagcttaccaagtactaagatgatttcttaggagcattttttcttaaatagagatagg

SEQ ID NO: 681947 - DNA, 83 bp, Artificial Sequence
  ENSG00000186951_101 (sequence is synthesized)
ggtgtttgatgttgttgttgttttgttttgtttttgttttttggtagagatgagatgtttcccaggctggtctcaaactcctg

SEQ ID NO: 681948 - DNA, 61 bp, Artificial Sequence
  ENSG00000186951_102 (sequence is synthesized)
cactggcattacaggtgtgagtcatggcacccagcattaactggatttaaaaaaaaaaaaa

SEQ ID NO: 681949 - DNA, 120 bp, Artificial Sequence
  ENSG00000186952_0 (sequence is synthesized)
gtccttagcaaccagccttggttcccagcggctcagagcgcagcgaatttatgatttatgaatatgcctgttaacaaatcacctatgattaatacatgtggaggcatatcttccccttat

SEQ ID NO: 681950 - DNA, 120 bp, Artificial Sequence
  ENSG00000186952_1 (sequence is synthesized)
catgaagagctctggaaattaaattttcaacatttaagtggagaaaggggtcataaatcaaggccaacattttcaatcacaaaagaattcatcttgagattcaatcaaacacaaaattcc

SEQ ID NO: 681951 - DNA, 120 bp, Artificial Sequence
  ENSG00000186952_2 (sequence is synthesized)
aaagagaaggaagaattgttggaactagctagaaaaatcattctcagatgtaagagaaaattgggtctcaaaaccctgggctctggaaggcatgtgcatcttcctgctgcatggactgaa

SEQ ID NO: 681952 - DNA, 120 bp, Artificial Sequence
  ENSG00000186952_3 (sequence is synthesized)
gtaatatatctggctcaatgcaaaggggaaatccaagatgaatctttaaatatgctttatgcatctctggaccatgcttcctttgattatgatcatctgcctgccttattttttgttgcg

SEQ ID NO: 681953 - DNA, 120 bp, Artificial Sequence
  ENSG00000186952_4 (sequence is synthesized)
gaatcggttttatacagactgtgttgtgatgcatccctcaaaacatatttatattcagttgaaataaagctagcaaagattggctatttggtcttcttacgactttttatatttttcctg

SEQ ID NO: 681954 - DNA, 120 bp, Artificial Sequence
  ENSG00000186952_5 (sequence is synthesized)
catggtcatctagaaagttttaaacaacatttacttaggcttcaaccatatttatacgcactttctttctctggagcatcatatcacaagtatccaaacatcttttcaaatgtgcaattc

SEQ ID NO: 681955 - DNA, 120 bp, Artificial Sequence
  ENSG00000186952_6 (sequence is synthesized)
atcctgaaagcctcggaaattataggtaaaagagaactccgttctgaatccatttttagacctgtggaagataagaaaagatatgagaacacagattctgatatgggaggatatgaaatt

SEQ ID NO: 681956 - DNA, 120 bp, Artificial Sequence
  ENSG00000186952_7 (sequence is synthesized)
aaccacctgctctggcactgtgttgctgcttggtcttgtgttcagaataacagtcctcagttgaataacgtgcttgaacatctcgtcttccataagacacagcttcaaaagaaatgctgg

SEQ ID NO: 681957 - DNA, 120 bp, Artificial Sequence
  ENSG00000186952_8 (sequence is synthesized)
ttggattcagtactggctttactggtccttggggaggctgccaaattaaacatggcctgcttgaaagctttaatggacgtagtgagagattttgtttcaagcattatgtctgttcaaaat

SEQ ID NO: 681958 - DNA, 120 bp, Artificial Sequence
  ENSG00000186952_9 (sequence is synthesized)
caggaagaaagttgcaaggtagatgatttttcctgggcctggaatgtagtctacatatatacagtaattcttgcagaaatctgcttgtatgcagccacttctgatttgcgaaaaactgct

SEQ ID NO: 681959 - DNA, 120 bp, Artificial Sequence
  ENSG00000186952_10 (sequence is synthesized)
ttaattggtttctgtcactgtaaaagttcacaaaaaaatattttatacttggacaaatcagtacctccagaattaaaggaaacaagtattttaagtcttttggaatatttctcttcaaaa

SEQ ID NO: 681960 - DNA, 120 bp, Artificial Sequence
  ENSG00000186952_11 (sequence is synthesized)
atgtcagagaactgtgatcaagtagtctggactggttactatggcttagtgtataacctggtgaaaatttcatgggaacttcaaggagacgaagaacaggatggacttagaaacatgata

SEQ ID NO: 681961 - DNA, 120 bp, Artificial Sequence
  ENSG00000186952_12 (sequence is synthesized)
caaatatttcatcaaatgtaggagaagaagttttctccaaatatattgggtggagaattgccaacactctttccaaactattctttccccccattgaggcccattttcttcctttgaaga

SEQ ID NO: 681962 - DNA, 120 bp, Artificial Sequence
  ENSG00000186952_13 (sequence is synthesized)
aaccatcaataaaaaaggatcaaacaaaatatccaaataaaaagctggagtctgtgaaaaagcaagttctacatttcactgtaagggaacatccttctgtatcagaaattcccatgtttc

SEQ ID NO: 681963 - DNA, 120 bp, Artificial Sequence
  ENSG00000186952_14 (sequence is synthesized)
catatccagatttcttcaccaaggcagataaagagttggcaaaaatcattgaccatcactggcaggaagagctaaagatccgagaaaaagaagatgcaatatgcaaggcccaagaactta

SEQ ID NO: 681964 - DNA, 120 bp, Artificial Sequence
  ENSG00000186952_15 (sequence is synthesized)
aagataaaaagttagcagagaaaaatcactttcaagaagttatgaagaaaagagaagagaaactacataagcaaaccaagccctatgaacttccttataggaaggaagtaatttaattag

SEQ ID NO: 681965 - DNA, 120 bp, Artificial Sequence
  ENSG00000186952_16 (sequence is synthesized)
aaaagaaaatgtcacctcccaaaattgaggactacatggcagaaatacataggatgaaaaataccaagatagctacatagtaagagaactttcttgtcattaaatggaggtattgtttag

SEQ ID NO: 681966 - DNA, 120 bp, Artificial Sequence
  ENSG00000186952_17 (sequence is synthesized)
aaagaatttgttttcctgatacaagctgtttgtttaatagttatttcttagttctaaattaatgaccaacttttaatcacacttgaatgaagtgatttcactagtcaaaaatttccaaga

SEQ ID NO: 681967 - DNA, 120 bp, Artificial Sequence
  ENSG00000186952_18 (sequence is synthesized)
ctacatctagtatttttctcaattgacctttatctcatgattgtacagcatacttgataactgattctcagaacattgatattcatcaaacaaacagtttgatggaaattcattacaaat

SEQ ID NO: 681968 - DNA, 120 bp, Artificial Sequence
  ENSG00000186952_19 (sequence is synthesized)
taattaatgggtcaccagataagaattatttcttgaaaacagaatgaacataaactaacaatcctgtaattactattattcaaataaaaacagtatggcatcttatttgattggcatttt

SEQ ID NO: 681969 - DNA, 120 bp, Artificial Sequence
  ENSG00000186952_20 (sequence is synthesized)
atagtcaatttataccaaaccaaacaaaccctatttcagagatttgaatctgggagggctggtcatcttagattgattggcttgatctttaacagatgccagaggggattcctgagagat

SEQ ID NO: 681970 - DNA, 120 bp, Artificial Sequence
  ENSG00000186952_21 (sequence is synthesized)
ggtggttttactctgttctgtgagtttatgagaatgaattcttatgaacctggaaggtccaggagcaactgctgaagacattcatagaaataggagttattttagaaatggaacttcact

SEQ ID NO: 681971 - DNA, 120 bp, Artificial Sequence
  ENSG00000186952_22 (sequence is synthesized)
tcatctgaagttctgaacctatgagtaagagtaatagggtggagtttttgtgatgtcttatattcctttcctgaaaactgaaaaatatagataatactcatacctcgatttcacacagat

SEQ ID NO: 681972 - DNA, 120 bp, Artificial Sequence
  ENSG00000186952_23 (sequence is synthesized)
gacttggtgatactcaagagacagagacttttatcaggggtgtcaaactcaaatgactaccaggtcagaaaggtaacataaattagtgaagccggctaaggaatacctatcccatataga

SEQ ID NO: 681973 - DNA, 120 bp, Artificial Sequence
  ENSG00000186952_24 (sequence is synthesized)
gaaatttcccatcactcggttacattccaaaatgtatgtcagtattgtaaaatcatccagcctttcaagaagcttttaaatgggattatttttcaaaataaaagtagctaagtaaccaaa

SEQ ID NO: 681974 - DNA, 120 bp, Artificial Sequence
  ENSG00000186952_25 (sequence is synthesized)
agggagacgcggcggtaacctggaccttaaaagtttgttgtcgttagggaataggtgggaatatggttgtgggattaatgaaacacagtaccaaagagattccagaaagagaactggtgt

SEQ ID NO: 681975 - DNA, 120 bp, Artificial Sequence
  ENSG00000186952_26 (sequence is synthesized)
aggaatagggcctgcatgggaggagttcaaagatgcttcttggagggagccgataacccgcgggtggagcctacccgagacagggcatcactgtgttgccaaggctggtcttgaactggc

SEQ ID NO: 681976 - DNA, 120 bp, Artificial Sequence
  ENSG00000186952_27 (sequence is synthesized)
agaaaggggtcataaatcaagattatttccttgggataaagtttctacaatgagtgcaagagcaattgaaaagaactttcacaaagactttacagtcacaaataatatactttttctagt

SEQ ID NO: 681977 - DNA, 120 bp, Artificial Sequence
  ENSG00000186952_28 (sequence is synthesized)
ttttctgtgctatccttgtcccaataccatagtgatccatattgtaaaaaaaagtagcaggagaagttgttatccacctagaatcctacagagaagaaaataaaattcaaaatatatcat

SEQ ID NO: 681978 - DNA, 120 bp, Artificial Sequence
  ENSG00000186952_29 (sequence is synthesized)
aagttttggggaatcatccaatataccaccacatattccagattgaggtttctactatcattctcttctaaaagaaatcaaggctccatggacagtgtctatatcatggacttcttgcct

SEQ ID NO: 681979 - DNA, 120 bp, Artificial Sequence
  ENSG00000186952_30 (sequence is synthesized)
tcagaaagtaaggccttcatcggaagaaattgcaatagaactaagacaagaaagttagctaaagaaaaggttatggtagccaaataattaaaagggaacatccttctgtatcagaaattc

SEQ ID NO: 681980 - DNA, 120 bp, Artificial Sequence
  ENSG00000186952_31 (sequence is synthesized)
ccatgtttccatatccagatttcttcaccaaggcagataaagagttggcaaaaatcattgaccatcacacagaagcaacatgctgtgcaaaattatacatcatgttacagcagctgagaa

SEQ ID NO: 681981 - DNA, 120 bp, Artificial Sequence
  ENSG00000186952_32 (sequence is synthesized)
gacaacatatatcacatcaatgctgcctctgtaaggcactcacaagagaatatttcaattactctcttggccactcctcatcacccatcatacgatcctatctacttcgtcattttcctt

SEQ ID NO: 681982 - DNA, 120 bp, Artificial Sequence
  ENSG00000186952_33 (sequence is synthesized)
agtgcccataaaaagacatgctgaagttgtaaagagaatgcaagagagatcaatagcctctgatgtgttggactcagctcagattttcccatgtaaaagatctgattttcggctggactg

SEQ ID NO: 681983 - DNA, 120 bp, Artificial Sequence
  ENSG00000186952_34 (sequence is synthesized)
cgacaccatgccaagattaaactttccgctccttaactcacacacatgtgttcgtgtcttcaatcctcttggcactagatgatgagccctgggtatttaccccagacagtgatgccactt

SEQ ID NO: 681984 - DNA, 120 bp, Artificial Sequence
  ENSG00000186952_35 (sequence is synthesized)
ggatagccaaacattaatcagcgaaaaggagtttgacctatagagccaaggagaagttggacaaagaacgtgaaaaggacaacaggcaaatccaatccagtgaatgagagctcaatgaga

SEQ ID NO: 681985 - DNA, 120 bp, Artificial Sequence
  ENSG00000186952_36 (sequence is synthesized)
atcttcaaaggaccacacttctgtgtcctacaggcctggagatctgggagcaaaacagaaagtaccagacaactgagagaaagagtgctataatgaagtacaaagtgagaggcatgcaac

SEQ ID NO: 681986 - DNA, 120 bp, Artificial Sequence
  ENSG00000186952_37 (sequence is synthesized)
tctcctttcaagtggagtttattccttccttcaccctcttgcatatgagctggcctaggactactttgaccgttaaattcagtggaaattctattgtgccagtttggggcctagacttta

SEQ ID NO: 681987 - DNA, 120 bp, Artificial Sequence
  ENSG00000186952_38 (sequence is synthesized)
acaaaactagcagtttctgctttcttcctcttggaacccagcccctgtgctgtgaggaagcccaagcaacctcgtggaaaagtccataggaagaagaatcaaggcctgtagacagcagcg

SEQ ID NO: 681988 - DNA, 120 bp, Artificial Sequence
  ENSG00000186952_39 (sequence is synthesized)
ccaactgagctaccagctggcagccatcaacaatttgtttgccactgaagacaagaacttgatgattcataaagctttgtgaagtgtggttactgcaagacttggagtagtttgaaagaa

SEQ ID NO: 681989 - DNA, 120 bp, Artificial Sequence
  ENSG00000186952_40 (sequence is synthesized)
acttgtgacttctaaaagcagctgagagaaaggaggaaatagctaatgcaacaagccttcctctcacaaaaggaagccatttacataactctgagcttctgaaggaagacacaaagtgag

SEQ ID NO: 681990 - DNA, 120 bp, Artificial Sequence
  ENSG00000186952_41 (sequence is synthesized)
atgaatgaatttaaaatttcctcaacttgctgtcaagaaaggagctggaagcaaagccaaggatctcagttttcattcctgtttatacttctggcttattaaaacatccatgagcaaccc

SEQ ID NO: 681991 - DNA, 120 bp, Artificial Sequence
  ENSG00000186952_42 (sequence is synthesized)
gtccttagcaaccagccttggttcccagcggctcagagcgcagcgaactcatctgaaagacttttataaatgacagtgcatcaacagttgagcatgtgttaacgtggagtggtatattaa

SEQ ID NO: 681992 - DNA, 120 bp, Artificial Sequence
  ENSG00000186952_43 (sequence is synthesized)
tagaaagaagcataatatagcacaaagcactcagtcaagcttctagtccagaaagcgtatgattttatctgaagtaatttggaataaatttacttgaaggcaaggtattctatatgagaa

SEQ ID NO: 681993 - DNA, 120 bp, Artificial Sequence
  ENSG00000186952_44 (sequence is synthesized)
atcctgaaggctggcatcaaaataactcttaaacaatgaactattacagagatttccacttgagtcatgactcatgccatcttcccctcaagtgcaacataagaatttatgatttatgaa

SEQ ID NO: 681994 - DNA, 120 bp, Artificial Sequence
  ENSG00000186952_45 (sequence is synthesized)
gtccttagcaaccagccttggttcccagcggctcagagcgcagcgaaattgtcttttaaagtatacagtttcaacctcatttttattggaactttaaaaaaatacatgaagaattaatag

SEQ ID NO: 681995 - DNA, 120 bp, Artificial Sequence
  ENSG00000186952_46 (sequence is synthesized)
taaaactaaaaaaagaaatctgggtctgtgccaggttgcagatgaactgccaagcacccaggcagactgctggagccatttcatgagctgaaacatttctctttaaagtataaacattct

SEQ ID NO: 681996 - DNA, 120 bp, Artificial Sequence
  ENSG00000186952_47 (sequence is synthesized)
ataccaccagggggcatacataacattataaatcttaaataggaaactagcagtttctgcatctaagtactgaatttaattatagtttaatagctaaaagacaaatgaaacacagtgcaa

SEQ ID NO: 681997 - DNA, 120 bp, Artificial Sequence
  ENSG00000186952_48 (sequence is synthesized)
gaaaacaaaggattatgaggaagatgtacgaatccaaaatgcaatcaatatagctcaggaaggaaaaccaaccagaaccctggacaagctttttctctaatgggagagaagttttatatg

SEQ ID NO: 681998 - DNA, 120 bp, Artificial Sequence
  ENSG00000186952_49 (sequence is synthesized)
aagcaatggatcttaggagcataataaatggactttacagactgctatcaggtgccaccaagatcccctgagatgctccttcccctgctgccaggggtattgccagccaagggctcaaag

SEQ ID NO: 681999 - DNA, 120 bp, Artificial Sequence
  ENSG00000186952_50 (sequence is synthesized)
attaaaaattgacctcagaaaaagctgtcaacgtcatgcaagtttatatctcctctctgggagcagtttcatcaatgatttttagttgatgtgagatataaaggtccaatccccatactt

SEQ ID NO: 682000 - DNA, 120 bp, Artificial Sequence
  ENSG00000186952_51 (sequence is synthesized)
caatttgggacaatcttgaaggccatcagagctccagagctgcctgtgtaacaggttgaggctctgttgtgcctgcattacacttcaacgcctccttggcctcactctgctttcctcagg

SEQ ID NO: 682001 - DNA, 120 bp, Artificial Sequence
  ENSG00000186952_52 (sequence is synthesized)
acctcactgatgttctccctgggagtactccccactgaattatttgcaagtgaaactatgtgttgaggtctgttttccagggcagctaccctaagacaaatactgacaatcattagctgc

SEQ ID NO: 682002 - DNA, 120 bp, Artificial Sequence
  ENSG00000186952_53 (sequence is synthesized)
tacacactcagaaaagagaggtgatgaaagcacagtgtctgtacttataagaccataccttgggcagtgttttaggtccatgttttaagagtgtctgacaaactcaaatgcacaagctgg

SEQ ID NO: 682003 - DNA, 120 bp, Artificial Sequence
  ENSG00000186952_54 (sequence is synthesized)
tgaaatagctataaaaagcatcaaatgaggaagcatcagtcaggagcttggatttttaaatgaagtacattagatttaggttgattgtgatagctctctttagatcattgaaaaactaac

SEQ ID NO: 682004 - DNA, 120 bp, Artificial Sequence
  ENSG00000186952_55 (sequence is synthesized)
atatgagaggaagattgggaattcatcttacattacccataatatagatctaagatcaataagtaaaaattacagagcagatttcaattcagaatgaaaagaaacacaatgcctgataat

SEQ ID NO: 682005 - DNA, 120 bp, Artificial Sequence
  ENSG00000186952_56 (sequence is synthesized)
taaaaatttcaacaattgaatgagttgctttgaaagagaatgagttccctgttattgaagctatttgtcttagtctattcaggctgctataacaaaaatatcagaaactgggtagcttat

SEQ ID NO: 682006 - DNA, 120 bp, Artificial Sequence
  ENSG00000186952_57 (sequence is synthesized)
tcattacagttttggaggctaggaagtccaagagcaaggtgctagcagatttggtgtctggtaaaggcctgctttctggttcatcagttatgtcttccagctgtgccctcacatgtggaa

SEQ ID NO: 682007 - DNA, 120 bp, Artificial Sequence
  ENSG00000186952_58 (sequence is synthesized)
ggggaagggcagctctctgggatcttttaggatggcactaatcccattcatgagggttctgccctcatgacctaagccttactgtcgccttgggaattggaatttcaatataggaatttg

SEQ ID NO: 682008 - DNA, 120 bp, Artificial Sequence
  ENSG00000186952_59 (sequence is synthesized)
aggatgagggaacacaaacattgataccatagcagtatataaggagaagctgcataatcatttttgtggacattgttagtatagttttggggtcataaattaaatgaattatgaggtgtg

SEQ ID NO: 682009 - DNA, 120 bp, Artificial Sequence
  ENSG00000186952_60 (sequence is synthesized)
tgttagttttctattactctatagcaaactatcacaaaagtagcagcttaaaacaatacatatttatctcactgtttccatgggtcaggagtctggatgtgggctatctgcagctcacca

SEQ ID NO: 682010 - DNA, 120 bp, Artificial Sequence
  ENSG00000186952_61 (sequence is synthesized)
gtttgaatcaaggagtcagctaggtctggggtgtcctcttaatgcctggggccctcttccatgctcactctggttggttgcaaggtgcacagtttcttggaactcttgaattgaagtcct

SEQ ID NO: 682011 - DNA, 120 bp, Artificial Sequence
  ENSG00000186952_62 (sequence is synthesized)
tgttgttttgctgtttggacaggggactctctaagatactagaggctactccttgtttcttgccacataccaccatcctctgccccccgctttggccctctgtattcttacactcaaatc

SEQ ID NO: 682012 - DNA, 120 bp, Artificial Sequence
  ENSG00000186952_63 (sequence is synthesized)
tttctccaggaagggaccatgaccttttaagggctaactttattaggtcagtccaaatcagataagtcaactgatttgtaatgtcatcgtaggagtgatattccatcatattcacagatt

SEQ ID NO: 682013 - DNA, 120 bp, Artificial Sequence
  ENSG00000186952_64 (sequence is synthesized)
ctacccatatttaatggaagacaattatacaaggcatgtatactagaagtcaggaatcttgggtccaggcccgtctcagaattctgcctgccatattgtgctttccacatatacatctcc

SEQ ID NO: 682014 - DNA, 120 bp, Artificial Sequence
  ENSG00000186952_65 (sequence is synthesized)
agaattcaggtcaccacaatcattcatggatgatcactaaattaaagatctcatgggatgacaaactgtacttcctgggctgacttttaacatgacatcagcctcggtcctgagataata

SEQ ID NO: 682015 - DNA, 120 bp, Artificial Sequence
  ENSG00000186952_66 (sequence is synthesized)
agaccatctccaggttagtgatgcctcagaggttcctggtgaggttggcgtgggatatgagtgtttagagcaatgcccgtagcactccaggcttccccaggtatctccgaaacactgtgg

SEQ ID NO: 682016 - DNA, 120 bp, Artificial Sequence
  ENSG00000186952_67 (sequence is synthesized)
atctagagatgatttggaatccccagaatttctgaggacccaaaagaatagttgctgaacacccagaacagtgtgtggtactagaagatttctggaaatagactacaatttttcagggtt

SEQ ID NO: 682017 - DNA, 120 bp, Artificial Sequence
  ENSG00000186952_68 (sequence is synthesized)
aagccatgaagaggttcgatttccctccttctgttctttgtctcaattttcagcttttcatctggagactaaagggttaggattttgtgcagaattatgacagtagctcaaccgagaccc

SEQ ID NO: 682018 - DNA, 120 bp, Artificial Sequence
  ENSG00000186952_69 (sequence is synthesized)
ctccgtaaagagagaaaggatggaattactggatagaaatttagatatggaaagccatacacactaaggatctggctacaaatgcctccgggccctgaaggaggtgatacagagacgatt

SEQ ID NO: 682019 - DNA, 120 bp, Artificial Sequence
  ENSG00000186952_70 (sequence is synthesized)
ttctgtcacccacaataagccagcctaatctgctttcattgtatgtgtctattgcttcctgtgactgtgcccctccaaatcagactgaaaataacccatttggcttcaccaaggtgtgaa

SEQ ID NO: 682020 - DNA, 120 bp, Artificial Sequence
  ENSG00000186952_71 (sequence is synthesized)
actaggagaaatcctggctctcctgacattttggctcccagttcctatatcactggccctgagagagctgagccaagcaaacagatctttatctttgttcagcgagctgcttatctcatc

SEQ ID NO: 682021 - DNA, 120 bp, Artificial Sequence
  ENSG00000186952_72 (sequence is synthesized)
cttgagcaggaaccaagcaacctttttaaataagggtgtaatgttggacagaccctaaacaataagtcttgctttgtacagaaattctaaagaaatggacactctatataaaattataca

SEQ ID NO: 682022 - DNA, 120 bp, Artificial Sequence
  ENSG00000186952_73 (sequence is synthesized)
accacatgaacactgttctaaactaatattcaagcagaatcaaagcatgctatttttttggataagcagttaacatatttgagctaaggcttttgattttacctctaaacttatacccac

SEQ ID NO: 682023 - DNA, 120 bp, Artificial Sequence
  ENSG00000186952_74 (sequence is synthesized)
ataatttgaagtagactccaccctcacttattttttattctgtgggcatgtatgtttgtgtgtattagtctgcatatatgtcattgttctgataaaaaaataaatccttatagaaaatgc

SEQ ID NO: 682024 - DNA, 120 bp, Artificial Sequence
  ENSG00000186952_75 (sequence is synthesized)
agatgcgaaccttgattgagagtgataatcaactttgttttgattgaactgacatttttttctgtggttttatcactttttattttttatgggtgtataagacagggcatcactgtgttg

SEQ ID NO: 682025 - DNA, 120 bp, Artificial Sequence
  ENSG00000186952_76 (sequence is synthesized)
aaagggaacatagaaataacactgaaacagtagctgctggaaactgctaccacatttggagccatggaatcagagagaagaggtttgcattgttaaaatcgaagggatgtagaaggcact

SEQ ID NO: 682026 - DNA, 120 bp, Artificial Sequence
  ENSG00000186952_77 (sequence is synthesized)
tcacacagccggactcggatccttgacagggagacattgcccagttattgctggtacttttgagggggcacaatacaactggttctgggagtgcagaaaaaagtgaaaactgaaacaact

SEQ ID NO: 682027 - DNA, 120 bp, Artificial Sequence
  ENSG00000186952_78 (sequence is synthesized)
tgtatcttgctgaaaccacactatcagaaagagtgagaaaactggaagaatcaggtattttcttccctctcatcctgaaactcttcctgatgtgcttcctgttctccggcatcacaaagc

SEQ ID NO: 682028 - DNA, 120 bp, Artificial Sequence
  ENSG00000186952_79 (sequence is synthesized)
agagaaaacaagggtggacttggagatgaaagacactagttaaataaatgaacattgtatggcttagaaggttatcagaccattcaataaaagttaactctcctttcttttcttttgcat

SEQ ID NO: 682029 - DNA, 120 bp, Artificial Sequence
  ENSG00000186965_0 (sequence is synthesized)
gcaaacccaactcactatctctgacaccgtgagctactagggcagctactgtggaggtctgggctatggctgtggaggctttggtggcatgtgctatggctacggctgtggatgtggcag

SEQ ID NO: 682030 - DNA, 120 bp, Artificial Sequence
  ENSG00000186965_1 (sequence is synthesized)
ggatgcagatatggttgtggccacagaggctgtggagatggctgctgctgcccatcatgctacagaagatatagattcactggcttctactaagctgctgctctagtgatgcagcatctg

SEQ ID NO: 682031 - DNA, 120 bp, Artificial Sequence
  ENSG00000186965_2 (sequence is synthesized)
ttattttgaagggatttaaaaacaagttacttacttctaagatacaatgggggtaaaggtgtaaatgtgtaaatgctcccattccaaagggagaaattgaccaaaacaaaggggctataa

SEQ ID NO: 682032 - DNA, 120 bp, Artificial Sequence
  ENSG00000186967_0 (sequence is synthesized)
attcacacttaggatcttgccttgagcagccaaacaactcaccactcctgacgccatgagctactatggcagctattacagaggcctgggctatggctgtggaggctttggtggcctagg

SEQ ID NO: 682033 - DNA, 120 bp, Artificial Sequence
  ENSG00000186967_1 (sequence is synthesized)
atatggattctcaattctactgaaatcctaccctgaggacacgatatcagaggtcataagaagatcattcaatttaaccaaatattgagtcaaacaagggcacactagatcaatccaaga

SEQ ID NO: 682034 - DNA, 120 bp, Artificial Sequence
  ENSG00000186970_0 (sequence is synthesized)
cacacacacacgctcctcactgcaaatcacctgagctcagaactcctgttaacatgtcttacaactgcagctctggaaacttctcctcctgctgttttggaagttacctgaggtatccag

SEQ ID NO: 682035 - DNA, 120 bp, Artificial Sequence
  ENSG00000186970_1 (sequence is synthesized)
tttccacttataatttgttctaccccagcaatgccatctattctccaaatacctgccaactgggctcctctctctacaatggctgtcaggagacctactgtgagcccaccagctgccaga

SEQ ID NO: 682036 - DNA, 120 bp, Artificial Sequence
  ENSG00000186970_2 (sequence is synthesized)
cgccagactaactacataagatcccttggatgtggaaacactggccttggatctcttggttgtggaagcactggcttccaatctctggactgtgggtccagcttctaccacccaactacc

SEQ ID NO: 682037 - DNA, 120 bp, Artificial Sequence
  ENSG00000186970_3 (sequence is synthesized)
ttttcatccaggaatttccaggcaacttgttactaaccagcctttgggtctcgcctttttggatcatcttactgaatattctccattctctcatgattatttctgtactctatggaactg

SEQ ID NO: 682038 - DNA, 120 bp, Artificial Sequence
  ENSG00000186970_4 (sequence is synthesized)
caacactcagcctgtccaatatctgtgattgttgaccatctacatcagtaggactcagcatcctagccctcttggaagtatatgattgaacacggacaaattaatcttgacctaggaccc

SEQ ID NO: 682039 - DNA, 120 bp, Artificial Sequence
  ENSG00000186971_0 (sequence is synthesized)
agaatcttcttaggtacactcagctgaactcccatctctcatcagcatgtcctacaactgctgctctagaaacttctcctcccgctcctttgggggctacctgtactacccaggctccta

SEQ ID NO: 682040 - DNA, 120 bp, Artificial Sequence
  ENSG00000186971_1 (sequence is synthesized)
ccccagcagcctggtctacagcactgccctctgctctcccagcacctgccagctgcgttcctctctctacagggactgtcagaagacctgctgggagcccgccagctgccagaaatcctg

SEQ ID NO: 682041 - DNA, 120 bp, Artificial Sequence
  ENSG00000186971_2 (sequence is synthesized)
ctaccgccccaggacctccatcctctgctgtccctgtcagacgacttgctctggatctctaggctttcggtccagcagctgtcgctcccagggctatggatctaggtgctgctactcgct

SEQ ID NO: 682042 - DNA, 120 bp, Artificial Sequence
  ENSG00000186971_3 (sequence is synthesized)
tctgctacccaaactacttggcttctggagcctggcagtcttcttgttacagaccaatctgtggatctcgcttctatcaattcacctgctaaatttctagatccttttgagtattgggat

SEQ ID NO: 682043 - DNA, 120 bp, Artificial Sequence
  ENSG00000186971_4 (sequence is synthesized)
caaagtctctactgaatgcagccattattttcattcttgccagatcccaatatctttttattcttccaccaccagcttcttgcatgaccaacttctggcagactgcgaaattaatgagta

SEQ ID NO: 682044 - DNA, 120 bp, Artificial Sequence
  ENSG00000186971_5 (sequence is synthesized)
acctaatattaacttctaatatctttaccattgatcgaatatatgctatctgattttcatccaaaaactgttgaaaatggaaattttaatctaataaatgtatgtaatctggtacccaaa

SEQ ID NO: 682045 - DNA, 120 bp, Artificial Sequence
  ENSG00000186973_0 (sequence is synthesized)
ggagactgtggaaggcccaggcaagagggcgcgtggcagcccaaggccatggcgggacacccaaaagagaaggtgattccagatgaggtccatcagaaccagatcttgcgggaactgtac

SEQ ID NO: 682046 - DNA, 120 bp, Artificial Sequence
  ENSG00000186973_1 (sequence is synthesized)
ctcaaggagctacgaacccagaaactctacacgcagtatcacgtgaatcccctccgcaagattcatacagtcaccaggaagcccatgtcttggcatgataacctggaggaacctgcagat

SEQ ID NO: 682047 - DNA, 120 bp, Artificial Sequence
  ENSG00000186973_2 (sequence is synthesized)
agagacacagactgaaaaccaggaagttggatgggacttagagcccttgatcaacccagaacgccatgaccgcaggctgaatcacttcagggtctgcagtgacatcactctgtacaaggc

SEQ ID NO: 682048 - DNA, 120 bp, Artificial Sequence
  ENSG00000186973_3 (sequence is synthesized)
taaaacgtggggcttaggagatgatcaccacaagtagcatcccagcggatgagcccatctgtggatctaatgccttaagtgtgcacagcccagagaaataaaatactactttaaaacgaa

SEQ ID NO: 682049 - DNA, 120 bp, Artificial Sequence
  ENSG00000186973_4 (sequence is synthesized)
cagccagcctgcatgaggttctctacgtttgagactggcttctccacggaacttggtctgtagccacagagcaaactgcagggccattgacagagaatgaagaggagagtgaagagtgga

SEQ ID NO: 682050 - DNA, 120 bp, Artificial Sequence
  ENSG00000186973_5 (sequence is synthesized)
aagcgtggctccttcctcaggaaatacgaggaaacacagcagcaatatcaacccagaacgccatgaccgcaggctgaatcacttcagggtctgcagtgacatcactctgtacaaggctaa

SEQ ID NO: 682051 - DNA, 120 bp, Artificial Sequence
  ENSG00000186973_6 (sequence is synthesized)
aggaaagggcacaggaccaacctctggtcccaaagcctgactccttcataactcatacctcgtctcccagccaggtttctgaatctcattcaccatgctgcccagggaccaaggaagaag

SEQ ID NO: 682052 - DNA, 120 bp, Artificial Sequence
  ENSG00000186976_0 (sequence is synthesized)
agtcagcgactgccgtcgtctctcgggcaacagcgtcctagagacgccgaatgggcagcccctctgagaccccgcggcttggggtccgcgcacgcgggtgccggcccagctaggcggaga

SEQ ID NO: 682053 - DNA, 120 bp, Artificial Sequence
  ENSG00000186976_1 (sequence is synthesized)
atcgaggaggggttcccgggctcatcgcagaggattggaagggcctagattactgcccaatgacaaaagtgtgggcttaatgtcctcactcttcagggagagaatgtggactttagcatt

SEQ ID NO: 682054 - DNA, 120 bp, Artificial Sequence
  ENSG00000186976_2 (sequence is synthesized)
tgaactgaatatttgagattgaagatttctgaataggatttaatgtgcaaaatggcgattataccagactggcttaggtcgcatcctcacacacgaaaatttacacattcaagaccccat

SEQ ID NO: 682055 - DNA, 120 bp, Artificial Sequence
  ENSG00000186976_3 (sequence is synthesized)
tcttcaccgtgtagagtatattcaaggaatggttccccaaataagttcagatcttcttcaaccacagctgttgcaaatccaacactgtcctccttagatgttaaacggattttatttcaa

SEQ ID NO: 682056 - DNA, 120 bp, Artificial Sequence
  ENSG00000186976_4 (sequence is synthesized)
aaaattaccgacagaggggatgagttgcaaaaagcctttcagctgctggatactggtcagaacttgactgtgtcaaaaagtgaactgagaagaatcatcacagacttcctgatgccgctc

SEQ ID NO: 682057 - DNA, 120 bp, Artificial Sequence
  ENSG00000186976_5 (sequence is synthesized)
acacgagaacagtttcaggacgtgttggctcagatcccccttagcacctctggtactgtaccgtaccttgcctttctgtccaggtttggtggaattgacctatatataaatggtataaag

SEQ ID NO: 682058 - DNA, 120 bp, Artificial Sequence
  ENSG00000186976_6 (sequence is synthesized)
aggggaggtgggaatgaaatgaattgctgccgcacattaagagaacttgaaatccaagtgggagaaaaggttttcaaaaacattaagactgttatgaaagcctttgagctcattgatgtt

SEQ ID NO: 682059 - DNA, 120 bp, Artificial Sequence
  ENSG00000186976_7 (sequence is synthesized)
aacaagactggactggttcgaccgcaggagctaagaagggttctggagaccttctgtatgaagttaagagacgaggaatacgaaaagttttcgaaacactacaacatccacaaggatact

SEQ ID NO: 682060 - DNA, 120 bp, Artificial Sequence
  ENSG00000186976_8 (sequence is synthesized)
gcagtagattacaacgtgtttttgaagaatctcagcataaataacgacttgaaccttagatattgtatgggaaatcaagaggtctcgttggagaatcaacaagccaaaaattccaaaaag

SEQ ID NO: 682061 - DNA, 120 bp, Artificial Sequence
  ENSG00000186976_9 (sequence is synthesized)
gaacgtttgctaggttctgcatcatctgaagatatctggagaaactactccttggatgaaattgagaggaacttttgtctacaactttcgaagtcttatgaaaaggttgaaaaggccctc

SEQ ID NO: 682062 - DNA, 120 bp, Artificial Sequence
  ENSG00000186976_10 (sequence is synthesized)
agtgcaggggacccctgtaaaggtggctacgtgtcttttaattatctaaagattgtcctcgacacttttgtataccaaataccaagaagaatttttatccagttaatgaaaagatttgga

SEQ ID NO: 682063 - DNA, 120 bp, Artificial Sequence
  ENSG00000186976_11 (sequence is synthesized)
cttaaagccaccactaaaatcaattggaagcaatttctaacatcatttcatgagcctcaggggttgcaagttagcagtaaaggtcccctgacaaaaagaaatagcatcaactctagaaat

SEQ ID NO: 682064 - DNA, 120 bp, Artificial Sequence
  ENSG00000186976_12 (sequence is synthesized)
gaatctcacaaggaaaacatcatcacaaagttatttagacacactgaagatcactctgcgtcactgaagaaagcattactgataatcaacactaaacccgatggaccgataacaagagaa

SEQ ID NO: 682065 - DNA, 120 bp, Artificial Sequence
  ENSG00000186976_13 (sequence is synthesized)
gaatttcgatatattctaaattgcatggctgtaaaactaagcgattcagaattcaaagaactaatgcaaatgcttgaccctggggacactggagtggtcaacaccagcatgtttattgat

SEQ ID NO: 682066 - DNA, 120 bp, Artificial Sequence
  ENSG00000186976_14 (sequence is synthesized)
ctgattgaagagaactgtaggatgagaaagacatctccctgtacagatgctaagacacctttcctcctggcctgggattcagtggaagaaattgttcatgatacaattactaggaaccta

SEQ ID NO: 682067 - DNA, 120 bp, Artificial Sequence
  ENSG00000186976_15 (sequence is synthesized)
caagctttttataacatgctacgctcatatgaccttggagacacagggcgcattggccgaaataatttcaagaaaatcatgcacgtcttctgtccatttttaacgaatgcacatttcata

SEQ ID NO: 682068 - DNA, 120 bp, Artificial Sequence
  ENSG00000186976_16 (sequence is synthesized)
aaactctgcagtaagattcaggacattggttcaggaagaatcctttacaagaaacttttggcatgcataggaattgatggcccacccactgtctctccagttcttgttccaaaggatcag

SEQ ID NO: 682069 - DNA, 120 bp, Artificial Sequence
  ENSG00000186976_17 (sequence is synthesized)
ctgttaagtgaacatttacaaaaagatgaacagcagcagccagatctttctgagagaaccaagctcacggaggataaaaccaccctgaccaagaagatgaccacagaagaagtgattgaa

SEQ ID NO: 682070 - DNA, 120 bp, Artificial Sequence
  ENSG00000186976_18 (sequence is synthesized)
aaattcaaaaagtgtatacagcagcaggacccggcattcaaaaaacgatttcttgacttcagcaaggagcctaatggaaaaattaacgtgcatgactttaagaaggtactggaagacact

SEQ ID NO: 682071 - DNA, 120 bp, Artificial Sequence
  ENSG00000186976_19 (sequence is synthesized)
gggatgcccatggacgatgatcagtatgccctgctgaccactaaaataggcttcgagaaggaagggatgagctatcttgattttgcagcaggatttgaagatcctccaatgagagggccg

SEQ ID NO: 682072 - DNA, 120 bp, Artificial Sequence
  ENSG00000186976_20 (sequence is synthesized)
gcagaagaatgcctgaagcttttccctaggaggctgaaggagtcattccgggacccctactctgccttctttaaaacagatgctgacagggatggcataatcaacatgcatgaccttcac

SEQ ID NO: 682073 - DNA, 120 bp, Artificial Sequence
  ENSG00000186976_21 (sequence is synthesized)
agactgctcctgcatctactgcttaatctcaaagacgacgagtttgagcgcttccttggccttcttggcttgagacttagtgtcactttaaattttcgggaatttcaaaatttgtgtgag

SEQ ID NO: 682074 - DNA, 120 bp, Artificial Sequence
  ENSG00000186976_22 (sequence is synthesized)
aagagaccatggagaacagatgaagcgcctcaaagactcattagaccaaaacagaaggttgcggattcagaactagcttgtgagcaggctcatcagtatcttgttaccaaagcaaaaaac

SEQ ID NO: 682075 - DNA, 120 bp, Artificial Sequence
  ENSG00000186976_23 (sequence is synthesized)
agatggtcagacttgtctaagaattttctagaaaccgataatgagggcaatggcattcttcgacgccgggacataaagaacgcactgtacggttttgatattcccctcacaccaagagag

SEQ ID NO: 682076 - DNA, 120 bp, Artificial Sequence
  ENSG00000186976_24 (sequence is synthesized)
tttgaaaagctttgggcaagatacgacaccgagggaaaagggcacattacttaccaggaatttttacagaaattgggtattaactattcgcctgctgtccatcggccctgtgcagaggat

SEQ ID NO: 682077 - DNA, 120 bp, Artificial Sequence
  ENSG00000186976_25 (sequence is synthesized)
tatttcaacttcatgggtcattttacaaagccacagcagctacaggaagagatgaaggagctgcagcagagcacagagaaggctgtggcagccagggataagcttatggaccgccatcaa

SEQ ID NO: 682078 - DNA, 120 bp, Artificial Sequence
  ENSG00000186976_26 (sequence is synthesized)
gatatcagcaaagcattcaccaaaactgatcaatccaaaaccaactacatatccatatgcaagatgcaggaagtgctggaagaatgtggatgttctcttaccgaaggggagctgacccat

SEQ ID NO: 682079 - DNA, 120 bp, Artificial Sequence
  ENSG00000186976_27 (sequence is synthesized)
ctgctaaacagttggggagtcagccggcatgataatgctatcaattacctcgacttcctgagagcagtggagaacagcaagtcaacaggagctcagcccaaggaaaaagaagagagcatg

SEQ ID NO: 682080 - DNA, 120 bp, Artificial Sequence
  ENSG00000186976_28 (sequence is synthesized)
ccaatcaattttgcaacgctgaatccacaggaggctgtgaggaagatccaggaagtagttgagtcctcccagctggctttgtccacggcattttctgcattggataaagaggatacagga

SEQ ID NO: 682081 - DNA, 120 bp, Artificial Sequence
  ENSG00000186976_29 (sequence is synthesized)
tttgtaaaggctacagaattcggacaagttcttaaggatttctgttacaaactaacggacaatcagtatcattattttttgaggaaactaagaattcatctaaccccctatataaattgg

SEQ ID NO: 682082 - DNA, 120 bp, Artificial Sequence
  ENSG00000186976_30 (sequence is synthesized)
aaatattttctccagaactttagctgtttccttgaggagacagctgatgagtgggctgagaaaatgcccaaaggcccgccgcctacctctcccaaggccacagccgacagagacatcctg

SEQ ID NO: 682083 - DNA, 120 bp, Artificial Sequence
  ENSG00000186976_31 (sequence is synthesized)
gctcgcctccacaaagcagtgacttcccattaccatgccatcacccaggagtttgagaattttgacaccatgaaaacgaacaccatctccagagaggagtttagggccatttgtaatcgc

SEQ ID NO: 682084 - DNA, 120 bp, Artificial Sequence
  ENSG00000186976_32 (sequence is synthesized)
cgcgtccaaatcctgacggacgaacagtttgacagactctggaacgagatgccagtcaatgccaaggggaggctgaaatacccggacttcctgagcaggttcagttccgagacagcagcc

SEQ ID NO: 682085 - DNA, 120 bp, Artificial Sequence
  ENSG00000186976_33 (sequence is synthesized)
acaccaatggccactggtgactcggccgtggcccagagagggagcagtgtccctgacgtctcggaaggcaccagatctgccctctcattgcccactcaggagctgagaccagggtcaaag

SEQ ID NO: 682086 - DNA, 120 bp, Artificial Sequence
  ENSG00000186976_34 (sequence is synthesized)
tcgcagagccacccctgtactccagcgagcaccaccgtgatcccgggcactccacccttgcagaactgtgatcccatagagagcaggctccggaagagaatccagggctgctggcgccag

SEQ ID NO: 682087 - DNA, 120 bp, Artificial Sequence
  ENSG00000186976_35 (sequence is synthesized)
ctcctgaaagaatgcaaggagaaggacgtggccagacagggggacatcaacgcctccgatttcctggctcttgtggagaaattcaacctggacataagcaaagaggagtgtcagcagctc

SEQ ID NO: 682088 - DNA, 120 bp, Artificial Sequence
  ENSG00000186976_36 (sequence is synthesized)
attataaaatacgacttaaagagcaacgggaaatttgcatactgtgacttcattcagagctgtgtcctcctgctaaaagcaaaggaaagctcactgatgcacaggatgaagatccagaat

SEQ ID NO: 682089 - DNA, 120 bp, Artificial Sequence
  ENSG00000186976_37 (sequence is synthesized)
gcacacaagatgaaagaagccggcgcggagacgccatctttttactctgctctgctgcgtattcagcccaaaattgtgcactgctggaggccaatgcggcgcacgttcaaaagctatgat

SEQ ID NO: 682090 - DNA, 120 bp, Artificial Sequence
  ENSG00000186976_38 (sequence is synthesized)
gaggctggaacagggctgctaagcgtcgcagatttcaggacggtcctgagacagtacagcatcaacctctctgaggaagagttcttccatattctggagtattacgataagacgctgtct

SEQ ID NO: 682091 - DNA, 120 bp, Artificial Sequence
  ENSG00000186976_39 (sequence is synthesized)
tcaaaaatctcctacaacgacttcctccgggcattcctccagtagacacccctgctgtgtgcccagcgggacgacagccacagggcctgtttcaaggctaataaaatcctataatttggg

SEQ ID NO: 682092 - DNA, 120 bp, Artificial Sequence
  ENSG00000186976_40 (sequence is synthesized)
ccagaatgggaaccagtagccttgatcccaggttttccaactgttcaggtggcagacacctggttatggtggctcttcccaggcgtctgtgtgaccaaggtgtcatacagtgccctggag

SEQ ID NO: 682093 - DNA, 120 bp, Artificial Sequence
  ENSG00000186976_41 (sequence is synthesized)
gcagcaccctctcaggcagtaccaaagccagatcccccttagcacctctggtactgtaccgtaccttgcctttctgtccaggtttggtggaattgacctatatataaatggtataaagag

SEQ ID NO: 682094 - DNA, 120 bp, Artificial Sequence
  ENSG00000186976_42 (sequence is synthesized)
ccagggatttaatgtgcaaaatggcgattataccagactggcttaggtcgcatcctcacacacgaaaatttacacattcaagaccccattcttcaccgtgtagagtatattcaaggaatg

SEQ ID NO: 682095 - DNA, 120 bp, Artificial Sequence
  ENSG00000186976_43 (sequence is synthesized)
ccagaatgtacagagtttaagactgttctctatttttaaaatgcttgcagttttgttattttgtttttcaatcttcctgaagattcacaggaatcttctgtttatgtaacaactataaat

SEQ ID NO: 682096 - DNA, 120 bp, Artificial Sequence
  ENSG00000186976_44 (sequence is synthesized)
tacaccattttcatcagggtacaaatactgtcactgttgcctttaaaatcaaattcaactccgcttcggctcccacactccttctcccttccctggagcatcccggaggtaatgtggtct

SEQ ID NO: 682097 - DNA, 120 bp, Artificial Sequence
  ENSG00000186976_45 (sequence is synthesized)
gggtctgtcatgggcagcaactatctggggccagtgttgcgcaggcagtaaaaagaatgtaccaagacagttgtaggtaaaaaaggcagatgtattagaaaaagtatgaaaatatgttgc

SEQ ID NO: 682098 - DNA, 120 bp, Artificial Sequence
  ENSG00000186976_46 (sequence is synthesized)
cttgtgctgggtgctgaagaaggctttgtgcagtactggaaacaccaaggttgcagtgagctaccttgcatttttctatgagccgggggtctggtgatagctgggcgcaggaaggttgtt

SEQ ID NO: 682099 - DNA, 120 bp, Artificial Sequence
  ENSG00000186976_47 (sequence is synthesized)
atttgtgcaggaggactacgtgttctggaccatgaacaaaggcagacttagcggcttacctgctttttcattttgctttcctctgttcccaccagcctgattcctttcccctaattagga

SEQ ID NO: 682100 - DNA, 120 bp, Artificial Sequence
  ENSG00000186976_48 (sequence is synthesized)
ctccacatggtccaaagaaggtgggcagtcggtccccacgcctggagggtcacagaccctggcaggaggctggcgctcctcccgccaccccaacctgccttctccttgctactacctggt

SEQ ID NO: 682101 - DNA, 120 bp, Artificial Sequence
  ENSG00000186976_49 (sequence is synthesized)
gctgctgctggcagtgtgggatgctccgggctgctgctctaagcatgctgggtacatgccacccctggtgggcctctccactgtgcacaggctggacacaggccctgcctctctaagatc

SEQ ID NO: 682102 - DNA, 120 bp, Artificial Sequence
  ENSG00000186976_50 (sequence is synthesized)
ctcctccctatcacagaatccccagaaggaggttcttcccagcctcctcccctaaggactggactgagctcttctgtggctcaaaggctccgacaacctgctcccctgggccgctatggc

SEQ ID NO: 682103 - DNA, 120 bp, Artificial Sequence
  ENSG00000186976_51 (sequence is synthesized)
ccttcatggccttccaaggccaagagcacctcccagtggggtggcgtcctcagagtctgccttgccatggcagctgtgggagggaagagagcacctgcccagcctgcctcccatccatag

SEQ ID NO: 682104 - DNA, 120 bp, Artificial Sequence
  ENSG00000186976_52 (sequence is synthesized)
tcacactgaacaccagcaccaggggagcagtgccccaggttgctttgttcctcgctgtgccctaaatgccaaagcagtgcagggcgctgagtgggtgctcagtacatgctgctgaatgga

SEQ ID NO: 682105 - DNA, 120 bp, Artificial Sequence
  ENSG00000186976_53 (sequence is synthesized)
cagcgtccatactccccagcccttcaccgtcctcggcagccccgtggctgatcagccaagtaacacagagcaccactgatccagttacagaagtagatttcccttcactcagaaaatgca

SEQ ID NO: 682106 - DNA, 120 bp, Artificial Sequence
  ENSG00000186976_54 (sequence is synthesized)
cagctacaagccctctctagttctcaaatgcatcaatgtcccattcccagagaataattcagactaaaacataaaatccccaaatacttaacaaagcaactctgcctccctccttcctcc

SEQ ID NO: 682107 - DNA, 120 bp, Artificial Sequence
  ENSG00000186976_55 (sequence is synthesized)
tggttctgctcagtctcagcccagggagttccctgcagacactgcgtggaaatgtcactctttcgcctccaaaactgggccattacaacctcttgtctcattttgtcagagttgcagggt

SEQ ID NO: 682108 - DNA, 120 bp, Artificial Sequence
  ENSG00000186976_56 (sequence is synthesized)
aaggccttggaagtattcatagggaagcgtgatcatcgcagtcacccctggctctactcacagctctgaactcactgccccaagaatgcatgccgtaaagacattaagaatgtgactatc

SEQ ID NO: 682109 - DNA, 120 bp, Artificial Sequence
  ENSG00000186976_57 (sequence is synthesized)
aggtttaacattcctaaaatatcacctttctcaagcattttggtgtgatcatttttgctaagcaaaattaaatgctgtttccaaatgatcctgccccattgcacgtcaaagccgagcaaa

SEQ ID NO: 682110 - DNA, 120 bp, Artificial Sequence
  ENSG00000186976_58 (sequence is synthesized)
ctctgtatttgcaaatactcctcttagcataaatgaaaataagcctttgaaattaatacagttgcatttattattctatggggccaagtaatcaaggttttactaataaagattttttta

SEQ ID NO: 682111 - DNA, 120 bp, Artificial Sequence
  ENSG00000186976_59 (sequence is synthesized)
atttcacctaaatgagtaaaattttactctaattatagatagaaattaatgacatgctgacatatctggcattcatcacagagaattcaattttaattgtccactaagaaaacttcacca

SEQ ID NO: 682112 - DNA, 120 bp, Artificial Sequence
  ENSG00000186976_60 (sequence is synthesized)
cttcaccatcctcagcacatcaagccccttccccaaccaaattaaacacttatttttaaacgcggctttctaaaaataagctgacgtgtctcttacatgcagccaacaaacatatgaaaa

SEQ ID NO: 682113 - DNA, 62 bp, Artificial Sequence
  ENSG00000186976_61 (sequence is synthesized)
aaaaaaagctcaacatcactgagcatactatttaaaagtcaaaaaacaacagatgctggtga

SEQ ID NO: 682114 - DNA, 120 bp, Artificial Sequence
  ENSG00000186976_62 (sequence is synthesized)
aaaggaatgcttctacactgttggtagaagttgggagtgtcagttagtttagccattgtggatgacactgtggtgatttctcaaagacctagaggcagtaataccatatgaccaagccat

SEQ ID NO: 682115 - DNA, 120 bp, Artificial Sequence
  ENSG00000186976_63 (sequence is synthesized)
tataaatcattctattataaagatacacacacgtatgtacattgcagcgcttttcacaatagcaaagacaaggaaaaaaactaaatgcccatcagtgataggctggttaaagaaaatgtg

SEQ ID NO: 682116 - DNA, 80 bp, Artificial Sequence
  ENSG00000186976_64 (sequence is synthesized)
ttcacaatagcaaagacaaggaaaaaaactaaatgcccatcagtgataggctggttaaagaaaatgtggtacatcggcca

SEQ ID NO: 682117 - DNA, 120 bp, Artificial Sequence
  ENSG00000186976_65 (sequence is synthesized)
tatggaaaactattaggtttacacattatttctaaaatttgtttcgatcctacctatgtcttctccaatactgagaccccctctacctcccaataacagcaatacattgatcatggataa

SEQ ID NO: 682118 - DNA, 120 bp, Artificial Sequence
  ENSG00000186977_0 (sequence is synthesized)
acactcaggatcttgccttgagcagcataccaactcaccactcctgacaccatgaactactacggcaactactatggaggcctgggctacggctacggaggcttcgatgacctgggctat

SEQ ID NO: 682119 - DNA, 120 bp, Artificial Sequence
  ENSG00000186977_1 (sequence is synthesized)
ggctatggctgtggatgtggcagcttccgcagactgggctatggcggtggctacggaggctacggatacggctctggcttcggaggctatggataccgcagctgccgtccatcatgctat

SEQ ID NO: 682120 - DNA, 120 bp, Artificial Sequence
  ENSG00000186977_2 (sequence is synthesized)
atatggattctctggattttattgaaatccttccctgacaacctaacatgaggggacataagaagatcacccaaacctgactgcaataacaaacaaacgaggtcaccctggatcaagcca

SEQ ID NO: 682121 - DNA, 120 bp, Artificial Sequence
  ENSG00000186977_3 (sequence is synthesized)
agatcaagagcagttagcatctaagaggtttaagaatacctatcattccataattctttgctttatgtctctggatgtgtcttacttgtacctttataactgtggggtttctctgttcct

SEQ ID NO: 682122 - DNA, 120 bp, Artificial Sequence
  ENSG00000186980_0 (sequence is synthesized)
cgtaccccagcaacctggtctacagcactgaacctttgatctcccagcacctgccagctgggttcctctctctgcaagggctttcaggagacttgctgggaaacccctagctgccagatg

SEQ ID NO: 682123 - DNA, 120 bp, Artificial Sequence
  ENSG00000186994_0 (sequence is synthesized)
gggctcgggtgcgggcgcggctggggctgcggcttcagggtgcctctgacagctgctgcaggaaacatggccaagtttgccctgaatcagaacctgcccgacctgggcggcccccgcctg

SEQ ID NO: 682124 - DNA, 120 bp, Artificial Sequence
  ENSG00000186994_1 (sequence is synthesized)
tgcccggtccccgccgccgggggcgcacgcagcccgagctcgccctactcggtggagacgccctacggcttccacctggacctggacttcctcaagtacatagaggagctggagcgtggc

SEQ ID NO: 682125 - DNA, 120 bp, Artificial Sequence
  ENSG00000186994_2 (sequence is synthesized)
cccccgacctcgcgccgtccccgcgcgccccggcccggcctcgcgggcgcacgtagcccaggcgcctggacatccagcgagtccctggccagtgacgacggtggagcaccgggcatactc

SEQ ID NO: 682126 - DNA, 120 bp, Artificial Sequence
  ENSG00000186994_3 (sequence is synthesized)
gacggtggagcaccgggcatactctcccagggcgcgccctcggggctcctgatgcagccgctgtcgccgcgcgcgcccgtgcgcaacccgcgcgtcgagcacacgctccgggagaccagc

SEQ ID NO: 682127 - DNA, 80 bp, Artificial Sequence
  ENSG00000186994_4 (sequence is synthesized)
gggtcccgcgcagcccacgcgggtccggccgcagcagccccgcccctaaccttgcccctgcttcgcccggccctgcccaa

SEQ ID NO: 682128 - DNA, 120 bp, Artificial Sequence
  ENSG00000186994_5 (sequence is synthesized)
ggccctgcccaactgcagctggtgcgcgagcagatggccgcggcgctgcggcgcctgcgcgagctcgaggaccaggcgcgaacgctgcccgagctgcaggagcaggtgcgcgcgctgcgc

SEQ ID NO: 682129 - DNA, 80 bp, Artificial Sequence
  ENSG00000186994_6 (sequence is synthesized)
gccgagaaggcgcggctgctggccgggcgcgcgcagcccgagccggacggggaggctgagacgcgcccggacaagctcgc

SEQ ID NO: 682130 - DNA, 120 bp, Artificial Sequence
  ENSG00000186994_7 (sequence is synthesized)
cgcggcggccgtgccagggccagcccccgggctgacagcccagacggcctggctgcagggcgcagcgagggcgcgctccaggtcctcgacggggaggtcgggagtctcgatgggacgccc

SEQ ID NO: 682131 - DNA, 120 bp, Artificial Sequence
  ENSG00000186994_8 (sequence is synthesized)
ggaggtggccgccgaggccgtgcccgagacccgagaagcgggtgcccaggccgtgccggagacccgggaggccggcgtggaggctgcccccgagaccgtggaggcggacgcgtgggtgac

SEQ ID NO: 682132 - DNA, 120 bp, Artificial Sequence
  ENSG00000186994_9 (sequence is synthesized)
tgggtgaccgaggcgctgctggggctgcctgcggccgccgagcgcgagctagagctgctgcgcgccagtctggagcaccagcgcggggtgagtgagcttctgcggggccggttgcgggag

SEQ ID NO: 682133 - DNA, 120 bp, Artificial Sequence
  ENSG00000186994_10 (sequence is synthesized)
ctggaggaagcccgcgaggctgcggaggaggcagcggcgggggcccgggcccagctacgcgaggccaccacccagaccccgtggagctgtgccgaaaaggccgcgcagaccgagtccccg

SEQ ID NO: 682134 - DNA, 120 bp, Artificial Sequence
  ENSG00000186994_11 (sequence is synthesized)
agctcgcccggatccatggacggagacagggccgtggcgcccgcgggcatcctcaaatccatcatgaagaagagagacggcacacctggtgcccaacccagctccggacccaagagcctg

SEQ ID NO: 682135 - DNA, 120 bp, Artificial Sequence
  ENSG00000186994_12 (sequence is synthesized)
cagtttgttggggtcctcaacggagagtacgagagctcctccagcgaggacgccagcgacagcgatggcgacagcgagaacggtggcgccgagcccccgggtagctcctcgggctccggg

SEQ ID NO: 682136 - DNA, 120 bp, Artificial Sequence
  ENSG00000186994_13 (sequence is synthesized)
gatgacagcggcgggggatccgactcgggcacccctggccctcccagcggcggggacatccgggaccctgagcccgaggcggaggcagagcctcagcaggtggcacaggggaggtgcgag

SEQ ID NO: 682137 - DNA, 120 bp, Artificial Sequence
  ENSG00000186994_14 (sequence is synthesized)
ctgagcccgcgtctgagggaggcgtgcgtagcgctgcagcggcagctgagccggccccgcggagtagccagcgacggcggcgcagtgcgcctcgtggcccaggagtggtttcgagtgtcc

SEQ ID NO: 682138 - DNA, 120 bp, Artificial Sequence
  ENSG00000186994_15 (sequence is synthesized)
agccagcggcgctctcaggcggagcccgtggccaggatgctggaaggggtgaggcgcctgggacccgaactgctggcgcacgtggtgaacctggcggatggcaacgggaacacggccctg

SEQ ID NO: 682139 - DNA, 120 bp, Artificial Sequence
  ENSG00000186994_16 (sequence is synthesized)
cactacagtgtgtcccacgggaacctggccatcgcaagcctgctcctggatacgggggcctgcgaggtcaaccgccagaaccgagccggctactcggccctcatgctggctgcactcacc

SEQ ID NO: 682140 - DNA, 120 bp, Artificial Sequence
  ENSG00000186994_17 (sequence is synthesized)
tctgtgaggcaggaagaggaggacatggctgtggtccagagactcttctgcatgggtgatgtcaatgccaaggccagtcagacggggcagacagccctcatgctggccatcagccatggc

SEQ ID NO: 682141 - DNA, 120 bp, Artificial Sequence
  ENSG00000186994_18 (sequence is synthesized)
cgacaggacatggtggcaaccctactggcgtgtggggctgatgtgaatgcgcaggatgcggatggggccacagcgctgatgtgtgccagtgagtatgggcgcctggacaccgtgcggctg

SEQ ID NO: 682142 - DNA, 120 bp, Artificial Sequence
  ENSG00000186994_19 (sequence is synthesized)
ctgctcacccagccaggctgtgaccctgccatcctggacaatgagggcaccagtgccctggccatcgccctggaggctgagcaggatgaggtggccgctctgctacatgcccacctgagc

SEQ ID NO: 682143 - DNA, 120 bp, Artificial Sequence
  ENSG00000186994_20 (sequence is synthesized)
tcgggccagcccgacacccagagcgagtcaccccctggctcccagacagccacacctggtgaaggagaatgcggtgacaatggagagaacccccaggttcagtaagctgcctcgtctggc

SEQ ID NO: 682144 - DNA, 120 bp, Artificial Sequence
  ENSG00000186994_21 (sequence is synthesized)
tcactacacctagctgtggggagatctcctcgtcagtcacctcagcctttggcgcacagaagggtccagggtcccctgctcagaggctaacactggccgaagagaaaggcaatttcagtt

SEQ ID NO: 682145 - DNA, 120 bp, Artificial Sequence
  ENSG00000186994_22 (sequence is synthesized)
ggggtgactgtggcaggaaggggctcactctggccccaccaaggtgaggtggggaccaagtgatagagccctgatccacccactctctgaaacttctttgctaataaaacattcctacta

SEQ ID NO: 682146 - DNA, 120 bp, Artificial Sequence
  ENSG00000186994_23 (sequence is synthesized)
tgagccatcgcgcctggcacaacttacaattttttgacttcatgatagcataaaagcaatgtgtgcttagtaaaaaccacacttcagcagagtattcaataaattacataagacattcaa

SEQ ID NO: 682147 - DNA, 120 bp, Artificial Sequence
  ENSG00000186994_24 (sequence is synthesized)
gtctgggcaatcctcagtttcctcatcgttaaatgggaacggccacacccacatcgcaggactccagaacgagcccacaggggaggtttagcagacacctcccaccctgcccccaggtac

SEQ ID NO: 682148 - DNA, 120 bp, Artificial Sequence
  ENSG00000186994_25 (sequence is synthesized)
gggctcgggtgcgggcgcggctggggctgcggcttcagggtgcctctgacagctgctgcaggaaacatggccaagtttgccctgaatcagaacctgcccggcatcctcaaatccatcatg

SEQ ID NO: 682149 - DNA, 120 bp, Artificial Sequence
  ENSG00000186994_26 (sequence is synthesized)
catcctgagtctctcctggcctcctctgcaggtgcgagctgagcccgcgtctgagggaggcgtgcgtagcgctgcagcggcagctgagccggccccgcggagtgccagcgacggcggcgc

SEQ ID NO: 682150 - DNA, 120 bp, Artificial Sequence
  ENSG00000186994_27 (sequence is synthesized)
ccaggaaatgggtggggggagagggcaggggctgacctaggctcaaagactctggagaggaaagcagagaatggctgtccagcacagggcaccactcctccttgagtttattttatttta

SEQ ID NO: 682151 - DNA, 65 bp, Artificial Sequence
  ENSG00000186994_28 (sequence is synthesized)
agcacagggcaccactcctccttgagtttattttattttattttttcacactgtcaccaggcagg

SEQ ID NO: 682152 - DNA, 120 bp, Artificial Sequence
  ENSG00000186998_0 (sequence is synthesized)
gcgcggagggcgcctggtgcagcatgggcggcccgcgggcttgggcgctgctctgcctcgggctcctgctcccgggaggcggcgctgcgtggagcatcggggcagctccgttctccggac

SEQ ID NO: 682153 - DNA, 120 bp, Artificial Sequence
  ENSG00000186998_1 (sequence is synthesized)
gcaggaactggtgctcctatgtggtgacccgcaccatctcatgccatgtgcagaatggcacctaccttcagcgagtgctgcagaactgcccctggcccatgagctgtccggggagcagct

SEQ ID NO: 682154 - DNA, 120 bp, Artificial Sequence
  ENSG00000186998_2 (sequence is synthesized)
acagaactgtggtgagacccacatacaaggtgatgtacaagatagtgaccgcccgtgagtggaggtgctgccctgggcactcaggagtgagctgcgaggaagttgcagcttcctctgcct

SEQ ID NO: 682155 - DNA, 120 bp, Artificial Sequence
  ENSG00000186998_3 (sequence is synthesized)
ccttggagcccatgtggtcgggcagtaccatgcggcggatggcgcttcggcccacagccttctcaggttgtctcaactgcagcaaagtgtcagagctgacagagcggctgaaggtgctgg

SEQ ID NO: 682156 - DNA, 120 bp, Artificial Sequence
  ENSG00000186998_4 (sequence is synthesized)
aggccaagatgaccatgctgactgtcatagagcagccagtacctccaacaccagctacccctgaggaccctgccccgctctggggtccccctcctgcccagggcagccccggagatggag

SEQ ID NO: 682157 - DNA, 120 bp, Artificial Sequence
  ENSG00000186998_5 (sequence is synthesized)
gcctccaggaccaagtcggtgcttgggggcttcccgggcccaccggccccaagggagatgccggcagtcggggcccaatggggatgagaggcccaccaggtccacagggccccccaggga

SEQ ID NO: 682158 - DNA, 120 bp, Artificial Sequence
  ENSG00000186998_6 (sequence is synthesized)
tggccgggctggagctgtgggcacccctggagagaggggacctcctgggccaccagggcctcctggcccccctgggcccccagcccctgttgggccaccccatgcccggatctcccagca

SEQ ID NO: 682159 - DNA, 120 bp, Artificial Sequence
  ENSG00000186998_7 (sequence is synthesized)
gcccatgggtccccctgggcctcctggccccacaggtgtccctgggagtcctggtcacataggacccccaggccccactggacccaaaggaatctctggccacccaggagagaagggcga

SEQ ID NO: 682160 - DNA, 120 bp, Artificial Sequence
  ENSG00000186998_8 (sequence is synthesized)
gagaggactgcgtggggagcctggcccccaaggctctgctgggcagcggggggaacctggccctaagggagaccctggtgagaagagccactggggggaggggttgcaccagctacgcga

SEQ ID NO: 682161 - DNA, 120 bp, Artificial Sequence
  ENSG00000186998_9 (sequence is synthesized)
ggctttgaagattttagctgagagggttttaatcttggaaacaatgattgggctctatgaaccagagctggggtctggggcgggccctgccggcacaggcacccccagcctccttcgggg

SEQ ID NO: 682162 - DNA, 120 bp, Artificial Sequence
  ENSG00000186998_10 (sequence is synthesized)
caagaggggcggacatgcaaccaactaccggatcgtggcccccaggagccgggacgagagaggctgagggtggtggcggcccctgaggcagaccaggccaggcttcccctcctacctgga

SEQ ID NO: 682163 - DNA, 120 bp, Artificial Sequence
  ENSG00000186998_11 (sequence is synthesized)
ctcggccagctgcctccagggaccgcccgtccatatttattaatgtcctcagggtcccttctgccatctaggccttaggggtaagcaggtctcagtcctggcaccatgcacatgtctgag

SEQ ID NO: 682164 - DNA, 120 bp, Artificial Sequence
  ENSG00000186998_12 (sequence is synthesized)
gctgagcaagggctgagaggagaggcttgggcctcagtttccctctgtgaagtggggggaggcaggccttcaaggagggatagaggtacaaggcttcgtctcatctgctgtctgagcatc

SEQ ID NO: 682165 - DNA, 120 bp, Artificial Sequence
  ENSG00000186998_13 (sequence is synthesized)
caggcccaaaggcactgagggagtcaggagctggggctcggcacatgcagagatgacagggcagggggcagtcttcctccccctccccgaccaaacctcggggagccctcctgtgcccct

SEQ ID NO: 682166 - DNA, 120 bp, Artificial Sequence
  ENSG00000186998_14 (sequence is synthesized)
ccctccttgttgtccagtgctgggctccccaccccgaggtcaggctgcccaatcctctgactggatcaccgggggcttcttgcctcagttcttccctctgagcccccaggccctcccgca

SEQ ID NO: 682167 - DNA, 120 bp, Artificial Sequence
  ENSG00000186998_15 (sequence is synthesized)
tctcaggttggggatggggacatggagaggaaggggccgcctactcctgcaaatgcttgtgacagatgccaggaggtagatgtgtgctggccaataaaggcccctacctgattccccgca

SEQ ID NO: 682168 - DNA, 120 bp, Artificial Sequence
  ENSG00000186998_16 (sequence is synthesized)
caatgattgggctctatggctcctagcttacagagcttcctgcagcagcaggctcagctggagctcctggccagacgggtcaccctcctggaagccatcatctggccaggtaatggcagg

SEQ ID NO: 682169 - DNA, 120 bp, Artificial Sequence
  ENSG00000186998_17 (sequence is synthesized)
gcgggcaggcaggggcagcctcttccaggaagggcctggaaaaggcctgggcatgcagaaggcgccttccgatgcttggcccaggccagcggacactcattcttcatccagccagccagc

SEQ ID NO: 682170 - DNA, 120 bp, Artificial Sequence
  ENSG00000186998_18 (sequence is synthesized)
cagcaaatggtgcctggcagagagaaggctctggtcacttgagtgaatgcgcacctgctctgtgccaggcaccttgctgggacaggctccacaagataagacagacacagtcctgccctt

SEQ ID NO: 682171 - DNA, 120 bp, Artificial Sequence
  ENSG00000186998_19 (sequence is synthesized)
ctgcctgccagccttccccaagccctcctggggtggaactggcctgagcccagtcatgaggctggagaaggtgcctgccccaggcaagcatggacctgagaggccacaaccacccttccc

SEQ ID NO: 682172 - DNA, 120 bp, Artificial Sequence
  ENSG00000186998_20 (sequence is synthesized)
tcaatgactggttccctcctccacgggtgcaggggtgccctagaaacccgggccctgctgctgtggtcagacctgggcctctaagcattatgggtagtgtggtttctaggcctgcaggga

SEQ ID NO: 682173 - DNA, 120 bp, Artificial Sequence
  ENSG00000186998_21 (sequence is synthesized)
accagagatgaaagattttaagtttggaagaaattatgggcaatggaaccaaactccactccagcagtgggattgtgggtaacagagccagactcctggagtgcaaggaaccatggggaa

SEQ ID NO: 682174 - DNA, 120 bp, Artificial Sequence
  ENSG00000186998_22 (sequence is synthesized)
tccaatcacagctcaggacaacaggaggattataggtaatggatccagactctagtcagccttcagctctagagaaatcatgggtaacagagtcaggcccgcaggacaataggtcatgga

SEQ ID NO: 682175 - DNA, 120 bp, Artificial Sequence
  ENSG00000186998_23 (sequence is synthesized)
ggcccacagccttctcagagactgaagggttctgaggggaagcctaggacccttggccctggccccagcttcctccctccccgcaggttgtctcaactgcagcaaagtgtcagagctgac

SEQ ID NO: 682176 - DNA, 120 bp, Artificial Sequence
  ENSG00000186998_24 (sequence is synthesized)
ggtgagtgcccgcaatgctgccccacagctcctctggccatcccctccaccaggtgggcccttccctgctcctgacatggccaggatgacctgggccctttcatctacttgcctcttcac

SEQ ID NO: 682177 - DNA, 120 bp, Artificial Sequence
  ENSG00000186998_25 (sequence is synthesized)
tcagcaccccaccacggagtgccctgcccacgcctgggctccatgaagtcctctcttatgttcactgacccacattccctgggcacctacacttatcaggctctgagctgggcactgggt

SEQ ID NO: 682178 - DNA, 120 bp, Artificial Sequence
  ENSG00000186998_26 (sequence is synthesized)
ggggtcagacatgtccctgcccttctggagcttccatgctgctgggagcagggctgggcagaggagaagcagcaatgcttgccccatgtgaccagggtttctatgaggggttttgggggt

SEQ ID NO: 682179 - DNA, 120 bp, Artificial Sequence
  ENSG00000186998_27 (sequence is synthesized)
ttgggagccccaaggaaggaagactcagcctggacgaggtggagaactaggtgctgtgctcatccccctgttagactaccaggcagcctaggcctgtggactccggggccctctctcatg

SEQ ID NO: 682180 - DNA, 120 bp, Artificial Sequence
  ENSG00000186998_28 (sequence is synthesized)
ggtgagtccccctgggatcccagcaggtggaggtgggggtggagtagccatcagcacagtgcccgctaccatctgccacgtgccttctgtgtgccagccctgctcacgataggccacatg

SEQ ID NO: 682181 - DNA, 120 bp, Artificial Sequence
  ENSG00000186998_29 (sequence is synthesized)
tgacccagtcctccagcaggcgccgttgtcctcctgtggttacaggtgaggaacactgaggaccagagagggaaggtggcttgccagggtcccacagcctgggcgtaggggaacggcttc

SEQ ID NO: 682182 - DNA, 120 bp, Artificial Sequence
  ENSG00000186998_30 (sequence is synthesized)
caggaagtgagtcctgaactcccaaggccacaggcccggcccctcctccaggccctgacgtgcgtccttggcttcttccctttggcagcccagcctgacctgcccatgggctgccagggg

SEQ ID NO: 682183 - DNA, 120 bp, Artificial Sequence
  ENSG00000186998_31 (sequence is synthesized)
tcagagtgtggagcgccaggtttcagcctcttctccactgtgtttttggtgcacaacccagcacaccattcattcattctgccatcccagcattcattccatctcactatccatacgatg

SEQ ID NO: 682184 - DNA, 120 bp, Artificial Sequence
  ENSG00000186998_32 (sequence is synthesized)
gggacaatgacagtgccagcctcccagagctgcgtaacatccatgtacagaagcctggcacacagtaggtggtggataaatggtatcttttattgtcattcccatttgacaggtgacagt

SEQ ID NO: 682185 - DNA, 120 bp, Artificial Sequence
  ENSG00000186998_33 (sequence is synthesized)
acaggctctgaaaagtagaaagtgttgctggatgtcaccagctggattgcagtggggttagaacccacatctccctgcctcctggtcttgcgggaccaacactctccacactcctcaccc

SEQ ID NO: 682186 - DNA, 120 bp, Artificial Sequence
  ENSG00000186998_34 (sequence is synthesized)
tggagcaggtgcccaggtggtaccagccatgctgcaggctgccccatagggcagtccaagctgtcttggcagaggtggcaggtgaagactaaccaccccactctacccagctctactcac

SEQ ID NO: 682187 - DNA, 120 bp, Artificial Sequence
  ENSG00000186998_35 (sequence is synthesized)
ggcctcctggccccacaggtgtccctgggagtcctggtcacatagtgagtagttctccttgtactctcacccatgtgtctgtccatctttccatctatgcatacatccatacatctgtcc

SEQ ID NO: 682188 - DNA, 120 bp, Artificial Sequence
  ENSG00000186998_36 (sequence is synthesized)
atcatccacccttgtatccatctatccatccatccattcatccttccattcattcattcaacaagtatttattgagcacttaatatgcaaactaccttccataaatcttattcaatccaa

SEQ ID NO: 682189 - DNA, 120 bp, Artificial Sequence
  ENSG00000187003_0 (sequence is synthesized)
aggccttgaatccagtgggattgagaactttctaagagtggtgcggctcttgacaacatgtgggctccaccagcagcaatcatgggggatgggcccaccaagaaggtgggcaaccaggcc

SEQ ID NO: 682190 - DNA, 120 bp, Artificial Sequence
  ENSG00000187003_1 (sequence is synthesized)
cccctgcagacacaggccctccagactgcctctttaagggatggcccggcgaagcgggccgtgtgggtccgccatacgagttcagagccacaagaacctactgaatcaaaggcagccaag

SEQ ID NO: 682191 - DNA, 120 bp, Artificial Sequence
  ENSG00000187003_2 (sequence is synthesized)
gagaggcccaagcaggaggtgaccaaagcagtggtcgtggacctgggcactggctactgtaaatgtggctttgccggcctgccaagacccacccacaagatctcaacaacggtgggcaag

SEQ ID NO: 682192 - DNA, 120 bp, Artificial Sequence
  ENSG00000187003_3 (sequence is synthesized)
ccctacatggagaccgccaagactggggataatcgcaaggagacattcgtggggcaggaactcaacaacacaaacgttcatctcaagctggttaaccctctgcgacatggcatcatcgtg

SEQ ID NO: 682193 - DNA, 120 bp, Artificial Sequence
  ENSG00000187003_4 (sequence is synthesized)
gactgggatacagtgcaggatatctgggaatatctcttccgacaagagatgaagatcgccccggaggagcatgcggtcttggtttcagacccgccactgagcccacacaccaacagagag

SEQ ID NO: 682194 - DNA, 120 bp, Artificial Sequence
  ENSG00000187003_5 (sequence is synthesized)
aaatatgctgaaatgctgtttgaagccttcaacacccctgcaatgcacatcgcctaccagtcgcgcctgtccatgtactcctatggaaggacctccggcctggtggtggaggtgggccat

SEQ ID NO: 682195 - DNA, 120 bp, Artificial Sequence
  ENSG00000187003_6 (sequence is synthesized)
accggaaggctggactacgcgggctctgacctgacagcctacctgctgggcctgctgaacagtgcggggaacgaattcacccaggaccagatgggcatcgtggaggacatcaagaagaaa

SEQ ID NO: 682196 - DNA, 120 bp, Artificial Sequence
  ENSG00000187003_7 (sequence is synthesized)
tgctgctttgtggccctggatcccattgaggagaagaaagtccctctcagtgagcatacgatccgctacgtgctgccggatgggaaggagattcagctgtgccaggaacggttcctctgc

SEQ ID NO: 682197 - DNA, 120 bp, Artificial Sequence
  ENSG00000187003_8 (sequence is synthesized)
tcggagatgttcttcaagccatctctcatcaagtccatgcagctgggcctccacacccaaaccgtgtcctgccttaacaagtgtgacatcgccctcaaacgggacctcatggggaacatc

SEQ ID NO: 682198 - DNA, 120 bp, Artificial Sequence
  ENSG00000187003_9 (sequence is synthesized)
ctgctctgcgggggcagcacgatgctcagtggcttccctaaccgtctgcagaaggagctaagcagcatgtgtcccaatgacaccccgcaggtaaacgtgctgcctgaaagagacagtgcc

SEQ ID NO: 682199 - DNA, 120 bp, Artificial Sequence
  ENSG00000187003_10 (sequence is synthesized)
gtgtggaccggtggctccatcctggcctcacttcagggtttccaaccattgtgggtccaccgctttgagtacgaggaacacgggcctttcttcctctacagaaggtgcttctgaacagcg

SEQ ID NO: 682200 - DNA, 120 bp, Artificial Sequence
  ENSG00000187003_11 (sequence is synthesized)
acgaggatggacactgcactggcagtgcctaccctcgacagggtgagcgcactcctacacacagggggtggagccggcgcttattcctgtagcattaaacacccctcatatgcccctcca

SEQ ID NO: 682201 - DNA, 120 bp, Artificial Sequence
  ENSG00000187005_0 (sequence is synthesized)
cctcagaagcatcttcttgaaacccatctcaattctctcctcttgacaacatgtgttgcaactactacggcaactcctgtggctatggctccggctgtggctgtggctatggctctggct

SEQ ID NO: 682202 - DNA, 120 bp, Artificial Sequence
  ENSG00000187005_1 (sequence is synthesized)
ttggctcccattatggctgtggttatggaactggctatggctgtggatatggctctggctctggctactgtggctaccggccattttgctttagaagatgctattcttcctgctaaaaca

SEQ ID NO: 682203 - DNA, 120 bp, Artificial Sequence
  ENSG00000187005_2 (sequence is synthesized)
tcactgtcggaggaccatttgcttctaaaatgacacgtctgaagataatgctgattcaaggattcgtactccaagatttctatatccaagaattacatgcttgacagaatcttcgacctc

SEQ ID NO: 682204 - DNA, 120 bp, Artificial Sequence
  ENSG00000187010_0 (sequence is synthesized)
ctggtgctggtggaacccctgcacagagacggacacaggatgagctctaagtacccgcggtctgtccggcgctgcctgcccctctgggccctaacactggaagcagctctcattctcctc

SEQ ID NO: 682205 - DNA, 120 bp, Artificial Sequence
  ENSG00000187010_1 (sequence is synthesized)
ttctatttttttacccactatgacgcttccttagaggatcaaaaggggctcgtggcatcctatcaagttggccaagatctgaccgtgatggcggccattggcttgggcttcctcacctcg

SEQ ID NO: 682206 - DNA, 120 bp, Artificial Sequence
  ENSG00000187010_2 (sequence is synthesized)
agtttccggagacacagctggagcagtgtggccttcaacctcttcatgctggcgcttggtgtgcagtgggcaatcctgctggacggcttcctgagccagttcccttctgggaaggtggtc

SEQ ID NO: 682207 - DNA, 120 bp, Artificial Sequence
  ENSG00000187010_3 (sequence is synthesized)
atcacactgttcagtattcggctggccaccatgagtgctttgtcggtgctgatctcagtggatgctgtcttggggaaggtcaacttggcgcagttggtggtgatggtgctggtggaggtg

SEQ ID NO: 682208 - DNA, 120 bp, Artificial Sequence
  ENSG00000187010_4 (sequence is synthesized)
acagctttaggcaacctgaggatggtcatcagtaatatcttcaacacagactaccacatgaacatgatgcacatctacgtgttcgcagcctattttgggctgtctgtggcctggtgcctg

SEQ ID NO: 682209 - DNA, 120 bp, Artificial Sequence
  ENSG00000187010_5 (sequence is synthesized)
ccaaagcctctacccgagggaacggaggataaagatcagacagcaacgatacccagtttgtctgccatgctgggcgccctcttcttgtggatgttctggccaagtttcaactctgctctg

SEQ ID NO: 682210 - DNA, 120 bp, Artificial Sequence
  ENSG00000187010_6 (sequence is synthesized)
ctgagaagtccaatcgaaaggaagaatgccgtgttcaacacctactatgctgtagcagtcagcgtggtgacagccatctcagggtcatccttggctcacccccaagggaagatcagcaag

SEQ ID NO: 682211 - DNA, 120 bp, Artificial Sequence
  ENSG00000187010_7 (sequence is synthesized)
acttatgtgcacagtgcggtgttggcaggaggcgtggctgtgggtacctcgtgtcacctgatcccttctccgtggcttgccatggtgctgggtcttgtggctgggctgatctccgtcggg

SEQ ID NO: 682212 - DNA, 120 bp, Artificial Sequence
  ENSG00000187010_8 (sequence is synthesized)
ggagccaagtacctgccggggtgttgtaaccgagtgctggggattccccacagctccatcatgggctacaacttcagcttgctgggtctgcttggagagatcatctacattgtgctgctg

SEQ ID NO: 682213 - DNA, 120 bp, Artificial Sequence
  ENSG00000187010_9 (sequence is synthesized)
gtgcttgataccgtcggagccggcaatggcatgattggcttccaggtcctcctcagcattggggaactcagcttggccatcgtgatagctctcatgtctggtctcctgacaggtttgctc

SEQ ID NO: 682214 - DNA, 120 bp, Artificial Sequence
  ENSG00000187010_10 (sequence is synthesized)
ctaaatcttaaaatatggaaagcacctcatgaggctaaatattttgatgaccaagttttctggaagtttcctcatttggctgttggattttaagcaaaagcatccaagaaaaacaaggcc

SEQ ID NO: 682215 - DNA, 120 bp, Artificial Sequence
  ENSG00000187010_11 (sequence is synthesized)
acgctcatgacagcaaagtctccaatgttcgcgcaggcactggagtcagagaaaatggagttgaatcctttctctgccactctttgaggagaatctcaccatttattatgcactgtagaa

SEQ ID NO: 682216 - DNA, 120 bp, Artificial Sequence
  ENSG00000187010_12 (sequence is synthesized)
tacaacaataaaatacagccatgtaccacataacaacatcttggtaaacaacagactgcatatatgatggtggtcatccagtaagctaaggttaatttattattattccttgtttttttt

SEQ ID NO: 682217 - DNA, 120 bp, Artificial Sequence
  ENSG00000187010_13 (sequence is synthesized)
gcccgcctcggcctcccaaagtgctggaaccacaggcctgagccactgtgcccagccttgtttgcttttttaacagataacagtgtgctcatagaaactgctttgacatgactgcaatca

SEQ ID NO: 682218 - DNA, 120 bp, Artificial Sequence
  ENSG00000187010_14 (sequence is synthesized)
gtgctcatagaaactgctttgacatgactgcaatcatgtgcttcatagaaacttaattagattataccactagagtcttcagatttttatactttttttttttgaaacggagtctcactc

SEQ ID NO: 682219 - DNA, 87 bp, Artificial Sequence
  ENSG00000187010_15 (sequence is synthesized)
gcgcactaccacacccagctaatttttgcatttttacttgacagggtttcaccatgttggctaggatagtttcaccaggatctcttg

SEQ ID NO: 682220 - DNA, 80 bp, Artificial Sequence
  ENSG00000187010_16 (sequence is synthesized)
accacacccagctaatttttgcatttttacttgacagggtttcaccatgttggctaggatagtttcaccaggatctcttg

SEQ ID NO: 682221 - DNA, 120 bp, Artificial Sequence
  ENSG00000187010_17 (sequence is synthesized)
ttttgaataccatttggtgttttgaagaattaacagctttgtgaacgtggcagtgcttgtgattcaggcttccattgagaccaaggggagaacctggttgcaggacaaacagacggacag

SEQ ID NO: 682222 - DNA, 120 bp, Artificial Sequence
  ENSG00000187010_18 (sequence is synthesized)
cgtgtggcagtgtttaaatgctcttctgaaggctgatacgacagctctctgtgcactgattgcatatgcatcccaagattatattattgttttctactgctatgtgtcacactttgccaa

SEQ ID NO: 682223 - DNA, 120 bp, Artificial Sequence
  ENSG00000187010_19 (sequence is synthesized)
acaggatgtggaaaatgaataagcggttttcttaggcacttcttaacagacaattggtcaaaatgaactccattgcttaagaaacacataaacaccatttagtcactgaacatagctata

SEQ ID NO: 682224 - DNA, 120 bp, Artificial Sequence
  ENSG00000187010_20 (sequence is synthesized)
tgtatggttgttactatgggaaatcttgttttgccaattttctttgaaaattctggcagaccaaggttctttttgtttacataatacttgaaaaataaaaatgaacaagctaacaaacta

SEQ ID NO: 682225 - DNA, 120 bp, Artificial Sequence
  ENSG00000187010_21 (sequence is synthesized)
ctcggctggaacctggctgtaaaaatggctgaagcaggtgatgaggagctgatgcgtttggacgtgtctcagagaaatcatggaggcgctgcggttcctaccggttcttggatgccttct

SEQ ID NO: 682226 - DNA, 120 bp, Artificial Sequence
  ENSG00000187010_22 (sequence is synthesized)
tgataccgtcggagccggcaatggcatgtgggtcactgggcttaccccccatccccttaacactcccctccaactcaggaagaaatgtgtgcagagtccttagctggggcgtgtgcactc

SEQ ID NO: 682227 - DNA, 120 bp, Artificial Sequence
  ENSG00000187010_23 (sequence is synthesized)
ggggccaggtgctcagtaggcttcggtgaatatttgttggctgatttattcagaaattctgtccagcccctaccttggatggatttatcacctctccaggccacctcttctttccaaata

SEQ ID NO: 682228 - DNA, 120 bp, Artificial Sequence
  ENSG00000187017_0 (sequence is synthesized)
gagcgccaggcagcgcggagcggaggccaggcccacagccgctccgcctcccggcccgcagatccccgacggccgcaccgcgggctcctctggcccgcaagaacacgtgcatggcgtcct

SEQ ID NO: 682229 - DNA, 120 bp, Artificial Sequence
  ENSG00000187017_1 (sequence is synthesized)
acgtgcatggcgtcctggggaaggcgctgagtgcggagtcgcggcgccgcacgcggcaccatggccctggagcaggcgctgcaggcggcgcggcagggcgagctggacgtgctgaggtcg

SEQ ID NO: 682230 - DNA, 120 bp, Artificial Sequence
  ENSG00000187017_2 (sequence is synthesized)
ctgcacgccgcaggcctcctggggccctcgctgcgcgacccgctggacgcgctgcccgtgcaccacgcggcccgcgctgggaagctgcactgtctgcgcttcctggtggaggaagccgcc

SEQ ID NO: 682231 - DNA, 120 bp, Artificial Sequence
  ENSG00000187017_3 (sequence is synthesized)
ctccccgccgcggcccgcgcccgcaacggcgccacaccggcccacgacgcctccgccaccggccacctcgcctgcctgcagtggctgctgtcgcagggcggctgcagagtgcaggacaaa

SEQ ID NO: 682232 - DNA, 120 bp, Artificial Sequence
  ENSG00000187017_4 (sequence is synthesized)
gacaattctggtgccacagtcttgcatctggctgcccgcttcggccaccccgaggtggtgaactggctcttgcatcatggcggtggggaccccaccgcggccacagacatgggcgccctg

SEQ ID NO: 682233 - DNA, 120 bp, Artificial Sequence
  ENSG00000187017_5 (sequence is synthesized)
cctatccactacgctgccgccaaaggagacttcccctccctgaggcttctcgtcgagcactaccctgagggagtgaatgcccaaaccaagaacggtgccacgcccctgtacctggcgtgc

SEQ ID NO: 682234 - DNA, 120 bp, Artificial Sequence
  ENSG00000187017_6 (sequence is synthesized)
caggagggccacctggaggtgacccagtacctggtgcaggaatgcggcgcagacccgcacgcgcgcgcccacgacggcatgaccccgctgcacgccgcggcgcagatgggccacagccca

SEQ ID NO: 682235 - DNA, 120 bp, Artificial Sequence
  ENSG00000187017_7 (sequence is synthesized)
gtcatcgtgtggttggtgagctgcaccgacgtgagcctgtccgagcaggacaaagacggcgccaccgccatgcacttcgcggcgagccgcggccacaccaaggtgctcagctggctgctg

SEQ ID NO: 682236 - DNA, 120 bp, Artificial Sequence
  ENSG00000187017_8 (sequence is synthesized)
ctgcacggcggggagatctcggctgacctgtggggcgggaccccgctgcacgacgccgccgagaacggggagctagagtgctgccagatcctggtagtgaacggcgcggagctggacgtc

SEQ ID NO: 682237 - DNA, 120 bp, Artificial Sequence
  ENSG00000187017_9 (sequence is synthesized)
cgcgaccgcgacgggtacacggccgccgacctgtcggacttcaacggccacagccactgcacccgctacctgcgcacggtggagaacctgagcgtggagcaccgcgtgctttcccgggat

SEQ ID NO: 682238 - DNA, 120 bp, Artificial Sequence
  ENSG00000187017_10 (sequence is synthesized)
ccatccgcagagctggaggctaagcagccggattcaggcatgtcctcacccaataccacggtgtcggtccagccgctgaactttgacctcagctcgcctaccagcaccctctccaactac

SEQ ID NO: 682239 - DNA, 120 bp, Artificial Sequence
  ENSG00000187017_11 (sequence is synthesized)
gactcctgctcctccagccactccagcatcaagggccagcaccctccatgtgggctttccagcgctagagctgcagacatacagagctacatggacatgctgaacccggagctgggcctg

SEQ ID NO: 682240 - DNA, 120 bp, Artificial Sequence
  ENSG00000187017_12 (sequence is synthesized)
cctcggggcacgattgggaagcccacacccccaccacccccacccagcttccccccgccacccccgcccccaggcacccaactgcccccacccccacctggctacccagctcccaagcct

SEQ ID NO: 682241 - DNA, 120 bp, Artificial Sequence
  ENSG00000187017_13 (sequence is synthesized)
cctgtaggaccacaggcagctgacatctacatgcagaccaagaacaaactccgccacgtggagacagaggccctcaagaaggagctgagctcctgtgacggccacgacgggctgcggagg

SEQ ID NO: 682242 - DNA, 120 bp, Artificial Sequence
  ENSG00000187017_14 (sequence is synthesized)
ttcagcaagcagcccagcacgggggactactaccggcagctgggccgctgccccggcgagacgctggccgcacgcccgggcatggcgcacagcgaggaggtgcgtgcccgccagcccgcg

SEQ ID NO: 682243 - DNA, 120 bp, Artificial Sequence
  ENSG00000187017_15 (sequence is synthesized)
ggctcactcgaaggcccctccgctcccccgcaggcggcgctgcttcctgggaaccatgttcctaacggctgcgccgcggaccccaaggcgtccagggagctgccaccgccgcccccaccg

SEQ ID NO: 682244 - DNA, 120 bp, Artificial Sequence
  ENSG00000187017_16 (sequence is synthesized)
gcccctgccggaggccgcgagttcgccaccgccggccccgcctctgcccctcgagagcgctggccctggctgcgggcagcgccgctcctcctcgtccaccggcagcaccaagtctttcaa

SEQ ID NO: 682245 - DNA, 120 bp, Artificial Sequence
  ENSG00000187017_17 (sequence is synthesized)
tctttcaacatgatgtccccgacgggcgacaactcggagctactggctgagattaaggcaggcaagagcctgaagccgacgccccagagcaaggggctgaccacagtgttctcaggcatc

SEQ ID NO: 682246 - DNA, 120 bp, Artificial Sequence
  ENSG00000187017_18 (sequence is synthesized)
gggcagccggccttccagcccgattcgccgctgccttctgtgtcacctgcactgtcaccagtccggagccccacaccgccagctgcggggtttcagccgctgctcaatggaagcttggtt

SEQ ID NO: 682247 - DNA, 120 bp, Artificial Sequence
  ENSG00000187017_19 (sequence is synthesized)
cccgtgccgcccactactcctgcgccgggagtgcagctggacgtggaggctctcatccccacgcacgatgagcagggccggcccatccccgagtggaagcgccaggtgatggtgcgcaag

SEQ ID NO: 682248 - DNA, 120 bp, Artificial Sequence
  ENSG00000187017_20 (sequence is synthesized)
atgcagctgaagatgcaggaggaggaggagcagaggcggaaggaggaggaggaggaggcccggctggccagcatgcccgcctggaggcgggacctcctgcggaagaagctggaagaagag

SEQ ID NO: 682249 - DNA, 120 bp, Artificial Sequence
  ENSG00000187017_21 (sequence is synthesized)
agggagcagaagcggaaagaggaggagcgacagaagcaggaggagctgcggcgggagaaggaacagtcagagaagctgcggacgctgggctacgatgagagcaagctggcgccctggcag

SEQ ID NO: 682250 - DNA, 120 bp, Artificial Sequence
  ENSG00000187017_22 (sequence is synthesized)
cgacaggtcatcctgaagaagggggacatcgctaagtactagaggccgcagactcctgtccgcagcctcgcagctccgtggggccctccgccccagccccagccagccaggccctggtgg

SEQ ID NO: 682251 - DNA, 120 bp, Artificial Sequence
  ENSG00000187017_23 (sequence is synthesized)
aaaggctgggagccgcacagccctcccctcctgcgctggaaaccctccctgacccccaccctggccccccgtatccccagcccttggcaacactggagtgcacacgccgccacggttgcc

SEQ ID NO: 682252 - DNA, 120 bp, Artificial Sequence
  ENSG00000187017_24 (sequence is synthesized)
cagaaaaagtgcccaagctgctgacgcaaacaacaacaaatgctgcttatttgcatgccgacttacatatatttgcatgttcgttgactatcaaagagtgcagagctctccccagccccg

SEQ ID NO: 682253 - DNA, 120 bp, Artificial Sequence
  ENSG00000187017_25 (sequence is synthesized)
tgggtggtgactttgttttcctgcggggctcagccccctccaggatgcagccccctcccccgcaccccggaaccggcgtcgctggcgcatcctgggtggaggcaggccccgagctcgggg

SEQ ID NO: 682254 - DNA, 120 bp, Artificial Sequence
  ENSG00000187017_26 (sequence is synthesized)
aaggggttttcccttcctctctgacccagatctgcgcgcggcctagcccgggcctcatttcttatccccgccaagggtttcctctcagtcatttgtttaccagaaacatgaaaactgcct

SEQ ID NO: 682255 - DNA, 120 bp, Artificial Sequence
  ENSG00000187017_27 (sequence is synthesized)
gtctggccgggccgcacttgtggcccccgggaccccacctctggccccacctccctcaagtctgcgccccgtccccagccagacccactcgctgccgggaccctttcactgccccggtgg

SEQ ID NO: 682256 - DNA, 120 bp, Artificial Sequence
  ENSG00000187017_28 (sequence is synthesized)
agtgaatagaggatgaggggccctgaccctgtgtctccaactgctgcaccccatcccgaccctgtctccgccacctcgcagccccattaaagcgctctcatctgggctccggttcactca

SEQ ID NO: 682257 - DNA, 120 bp, Artificial Sequence
  ENSG00000187017_29 (sequence is synthesized)
atgcagctgaagatgcaggaggaggaggagcagaggcggaagctgacggccgccagctcgtgctgctacccccgcgagggctggaggtactcccgcgagcacaacgccatcctcgggccc

SEQ ID NO: 682258 - DNA, 120 bp, Artificial Sequence
  ENSG00000187017_30 (sequence is synthesized)
tttggcgagcttatgaccgaagccgacatcctccgcatcgagcagcaaatcgagaacctgcaggtgctgcacaaggcgcagaagctggaggcgcgcctcgagcaactggagctggagctg

SEQ ID NO: 682259 - DNA, 120 bp, Artificial Sequence
  ENSG00000187017_31 (sequence is synthesized)
gagcagctgctgcccatctcggccgccctgtcggcgccgcgcttcaccgtcgatccgcgccgaatgcatggccgcgccgccagcctgcccgcctggtgcagcaagatctccacgttgctc

SEQ ID NO: 682260 - DNA, 120 bp, Artificial Sequence
  ENSG00000187017_32 (sequence is synthesized)
gctcaagaacatggccacgctgctggctgcgctgggcggccggcctgcgcacctggcggagctgctgaccgctgacacgggccagccgctggcgccgctgcccgacgcgccctggctgcc

SEQ ID NO: 682261 - DNA, 120 bp, Artificial Sequence
  ENSG00000187017_33 (sequence is synthesized)
ccgctctgcctgggtcgctcgcactcgctcagctggtgccgcgaggctgtggcgcgcgagatcctcgagtgcggcgtctccgtgcagcatctccgcgccacctacgagctgcgcgcacgg

SEQ ID NO: 682262 - DNA, 80 bp, Artificial Sequence
  ENSG00000187017_34 (sequence is synthesized)
agtccgctggcgccccgggccgggagcccatcttggaggaggactacgtggcggcccgctctggccagcccagcgccgcc

SEQ ID NO: 682263 - DNA, 120 bp, Artificial Sequence
  ENSG00000187017_35 (sequence is synthesized)
ccgctggtcgactgggagcccctgggcaccctgggcccgcccgaggtacaggatcgccaggcggcgctgcctgagcccgagcagctggcgcgccggccgcccctctgcacgaagctgcgc

SEQ ID NO: 682264 - DNA, 120 bp, Artificial Sequence
  ENSG00000187017_36 (sequence is synthesized)
acgaagctgcgcggcgtccaggactacctcgacctgcgcaaggagcgcatcgtttacctcttcctggagcactggcgccgctgggcctgccgcggaccaggccgccgcgcccaggcgcgc

SEQ ID NO: 682265 - DNA, 80 bp, Artificial Sequence
  ENSG00000187017_37 (sequence is synthesized)
gcccggggctggaggccacggacgccccccggctgccggcgagcaacagcgaggcccacagccccgacgaacggctgcgg

SEQ ID NO: 682266 - DNA, 120 bp, Artificial Sequence
  ENSG00000187017_38 (sequence is synthesized)
cagctgctgaggcagcggcaggcggtgggcaagctgctgggccactggcggagcctgctgcgtcgcgtgccggcaagcccgggcctggcgcacggcctgtattggccccagcacttcctg

SEQ ID NO: 682267 - DNA, 120 bp, Artificial Sequence
  ENSG00000187017_39 (sequence is synthesized)
ccgcccctggacggcggcgcacccccgcactacgacagcctcacgctcgacctcttcatgctcggctacttccagctactcgagatgggcctgagccgcgaggagcgcaagttccgccac

SEQ ID NO: 682268 - DNA, 120 bp, Artificial Sequence
  ENSG00000187017_40 (sequence is synthesized)
ctactgtgctacgagatgttcgaccgactgggcagccacccgtgggagcgcatccgcctcttccaccgcgtggtgctggaggaggtggaggccggccggcgcggctggagcgacggcttc

SEQ ID NO: 682269 - DNA, 120 bp, Artificial Sequence
  ENSG00000187017_41 (sequence is synthesized)
gaggacctcaggcaccggttcttcggaaacggcctggaggctgagccggcccccgaagaacaggcgaaggaaaaggaagaggaggggaaagaacaggagcggaccgaagaggctgctcca

SEQ ID NO: 682270 - DNA, 120 bp, Artificial Sequence
  ENSG00000187017_42 (sequence is synthesized)
cgaggccctggcccctgcgccgcagccgccgccgccgcccccgcccgccgcgcctcccccgacctcagactctcctggttccgaagcccccgccgaagaccccttggaactggtgtctga

SEQ ID NO: 682271 - DNA, 120 bp, Artificial Sequence
  ENSG00000187017_43 (sequence is synthesized)
cccgccgaagaccccttggaactggtgtctgagatgggcgagttcagcaacgaggacatctgccgctacatcgaccgcagcttctccttctggaaagagaaggaggcagagctgtttgac

SEQ ID NO: 682272 - DNA, 120 bp, Artificial Sequence
  ENSG00000187017_44 (sequence is synthesized)
atctgagcagcggaattcggaattctcagttcaccctcgagcgtcttaacgtgggcctggacgcctgtctgacgccctccagaggctggaagcagcaggaagagcccaggactgtggcct

SEQ ID NO: 682273 - DNA, 120 bp, Artificial Sequence
  ENSG00000187017_45 (sequence is synthesized)
tgagcagcccggagggcccaggaccaggctgcctcagcctctgaggtcccatcgtggcgggctgtggggcgttggtcggataggcagggcaggcacagaacagaccaggtgtccgcctct

SEQ ID NO: 682274 - DNA, 120 bp, Artificial Sequence
  ENSG00000187017_46 (sequence is synthesized)
ggccccgtggccttgctgagctctgtgtggagccaggcagcagaagaagcccctctgagtgaggggctgcggctcctccttgcggcagtgtggcctgctctttggttttccactggagtt

SEQ ID NO: 682275 - DNA, 120 bp, Artificial Sequence
  ENSG00000187017_47 (sequence is synthesized)
cacagctacctccttggctgaggtcaagggtgccacgtgtgcagtgttctgtgtgaagtgtgccgtgtacagacccgttctcctctgtaacattcaggaaataaaactctttgctgtaaa

SEQ ID NO: 682276 - DNA, 120 bp, Artificial Sequence
  ENSG00000187017_48 (sequence is synthesized)
ttcgttcgtgcttcttcgccttggctggagcgataggggcgagcaggggtggggccggctggtgctgctacgcagggccgtgccagcggcttaataagtgacataaaatgtctacacgca

SEQ ID NO: 682277 - DNA, 120 bp, Artificial Sequence
  ENSG00000187017_49 (sequence is synthesized)
catgaccctcgcccgctgcccactgtgagaaccagggggtctaggaagtcagctgctgcacccctcgacggccgctggccgcgagtccccaggagctgagctcctgtgacggccacgacg

SEQ ID NO: 682278 - DNA, 120 bp, Artificial Sequence
  ENSG00000187017_50 (sequence is synthesized)
atcaggtaacgcaggtgtcgggtcctgccgcccccacagccaggtgcacagcgggggccaccagcaccgtggcagctgagctcctgtgacggccacgacgggctgcggaggcaggactcc

SEQ ID NO: 682279 - DNA, 120 bp, Artificial Sequence
  ENSG00000187017_51 (sequence is synthesized)
gggagcagggtcgtggcgtccgaacctccgggctgcagggggcgcggagcgggcgggctggcccagaaaacaaatcctgcggtgtcgcatttcctgcaacgtgagccagctgagctcctg

SEQ ID NO: 682280 - DNA, 120 bp, Artificial Sequence
  ENSG00000187017_52 (sequence is synthesized)
tgttctcaggcatcgggcagccggccttccaggtaggcgggcccagcaggagcctgcgacccggcttccctggccctaggccaccgggcgctcagccccaccgcttctccctgcagcccg

SEQ ID NO: 682281 - DNA, 120 bp, Artificial Sequence
  ENSG00000187017_53 (sequence is synthesized)
gggagagcagagctcaccgcaggtctggcccccccaccagctgtgcagaccgccgtgggcctctacagatagaacccagtgggcccccaccagcccctgatccccaagaccccggcactc

SEQ ID NO: 682282 - DNA, 120 bp, Artificial Sequence
  ENSG00000187017_54 (sequence is synthesized)
actgtgccttggttacggggtgaataatttaggccgctgagtgtcagtcatgaaatattcaacagcctgttcctgacgcagcagcatgggagtgaatgcccaaaccaagaacggtgccac

SEQ ID NO: 682283 - DNA, 120 bp, Artificial Sequence
  ENSG00000187017_55 (sequence is synthesized)
atgtttctgaagatagatacgtagctgtgtcttctgtctccctcatctatgtcgacgggaccccctctggatcaccaggcatggtgcctgctccccgcaccatcgtgaagtgccgggctc

SEQ ID NO: 682284 - DNA, 120 bp, Artificial Sequence
  ENSG00000187021_0 (sequence is synthesized)
gatccggtgggagggaacatctggaacattagacaggatgctgatcttctggacaatcacacttttcctgctgggagcagccaaaggaaaagaagtttgctatgaggacctcgggtgctt

SEQ ID NO: 682285 - DNA, 120 bp, Artificial Sequence
  ENSG00000187021_1 (sequence is synthesized)
ttctgacactgagccctggggcgggacagcaatcaggcccctgaaaattctcccctggagccctgagaagatcggcacccgcttcctgctgtacaccaatgaaaacccaaacaactttca

SEQ ID NO: 682286 - DNA, 120 bp, Artificial Sequence
  ENSG00000187021_2 (sequence is synthesized)
aattctcctcctctctgatccatcaacaattgaggcatcaaattttcaaatggacagaaagacccggttcatcatccatggcttcatagacaaaggagatgagagctgggtgacagacat

SEQ ID NO: 682287 - DNA, 120 bp, Artificial Sequence
  ENSG00000187021_3 (sequence is synthesized)
gtgcaagaaactgttcgaggtggaggaggtgaactgcatctgcgtggactggaagaagggctcccaagccacctacacacaggctgccaacaacgtgcgagtggtgggcgcccaggtggc

SEQ ID NO: 682288 - DNA, 120 bp, Artificial Sequence
  ENSG00000187021_4 (sequence is synthesized)
ccagatgctcgacatcctcttgacagagtatagctaccccccttccaaagttcacctcattggccacagcctgggagcccacgtggctggagaggcaggaagcaagactccaggcctgag

SEQ ID NO: 682289 - DNA, 120 bp, Artificial Sequence
  ENSG00000187021_5 (sequence is synthesized)
caggattacagggttggatcctgtagaagcaagtttcgagagtactcctgaagaggtgcgacttgatccctctgatgctgactttgttgatgtgattcacacggatgcagctcccctgat

SEQ ID NO: 682290 - DNA, 120 bp, Artificial Sequence
  ENSG00000187021_6 (sequence is synthesized)
aggagagagcatgccgggatgcaagaagaatgccctgtctcagatcgtggatctagatggcatctgggcgggaacccgggactttgtggcttgcaatcacctaagaagctacaagtatta

SEQ ID NO: 682291 - DNA, 120 bp, Artificial Sequence
  ENSG00000187021_7 (sequence is synthesized)
cttggaaagcatcctcaatcccgatgggtttgctgcatatccctgcacttcctacaagtcctttgagtctgacaagtgcttcccgtgtccagatcaaggatgcccacagatgggtcacta

SEQ ID NO: 682292 - DNA, 120 bp, Artificial Sequence
  ENSG00000187021_8 (sequence is synthesized)
tgctgataaatttgctggcaggacaagtgaagagcagcagaaattcttcttgaacacaggagaggctagcaatttcgctcgctggagatatggggtttccatcacactgtctggaagaac

SEQ ID NO: 682293 - DNA, 120 bp, Artificial Sequence
  ENSG00000187021_9 (sequence is synthesized)
agccactggtcagatcaaagttgctttgtttggaaataagggaaacactcaccagtacagtatcttcagggggattctcaaaccaggctcaacccattcctatgagtttgatgcaaagct

SEQ ID NO: 682294 - DNA, 120 bp, Artificial Sequence
  ENSG00000187021_10 (sequence is synthesized)
ggatgttggaacaattgagaaagtcaagtttctttggaataacaatgtgataaatccaaccctccccaaagtgggtgccaccaagatcactgtgcaaaagggagaagagaagacagtgta

SEQ ID NO: 682295 - DNA, 120 bp, Artificial Sequence
  ENSG00000187021_11 (sequence is synthesized)
caacttctgtagcgaagacacagtgcgggaagacacgctgctcaccctcacgccctgctaagctcccggggcgacgaggctgctgcgttcacactaataaaatccactggtgcatctgta

SEQ ID NO: 682296 - DNA, 120 bp, Artificial Sequence
  ENSG00000187021_12 (sequence is synthesized)
tgcaagcctggggcatcgccaagagcctgaaaggaccccttacagtcaaatccacaaggtcatttagacactggccaccggagattgcacctaagacttttccttttcaaaacaggactc

SEQ ID NO: 682297 - DNA, 120 bp, Artificial Sequence
  ENSG00000187021_13 (sequence is synthesized)
ttttcatgatgcaattgtttttcccttactaaccaaccttactgaatttggttgaaggaaaccagagagtagccagcttccaattaatctgcaagctggagggggaatcagtttgccttt

SEQ ID NO: 682298 - DNA, 120 bp, Artificial Sequence
  ENSG00000187021_14 (sequence is synthesized)
ctcatagcattcaccctgaaggataactcctaattaccaacaggattccctaacagagtctagtttatctcatgccctagctaggagaagagagaagtggccatttctgagccctggctg

SEQ ID NO: 682299 - DNA, 120 bp, Artificial Sequence
  ENSG00000187021_15 (sequence is synthesized)
tctctgtttggtagagatgcagctgagagttatggattaaagaaggacaaagaattgatatccagaccttacttctaaaactctgaaatttgccttcataatgacacgccagtggaagca

SEQ ID NO: 682300 - DNA, 120 bp, Artificial Sequence
  ENSG00000187021_16 (sequence is synthesized)
aaaataagaatcgctaacacttagaaagtggttttttaaaaatcatcttcaatttacagataaagaaactgaggcccagaaagtttaactagtttgctcccaaagtcataaagcaaatga

SEQ ID NO: 682301 - DNA, 120 bp, Artificial Sequence
  ENSG00000187021_17 (sequence is synthesized)
atagaagacctgccttttgatccagaccatctagcttcagaattcacccacaacaccaggtgggctctgtttcgcgtgaaacacagcatggccagagagagccacagagagccaacggac

SEQ ID NO: 682302 - DNA, 120 bp, Artificial Sequence
  ENSG00000187021_18 (sequence is synthesized)
agtacgtgcaattggcatgtaccagctctactggcctggtggtatgggtcctattgatgttggggaattccttctgccacaatcatttcacttatttcttcctatactgtttcattatag

SEQ ID NO: 682303 - DNA, 120 bp, Artificial Sequence
  ENSG00000187021_19 (sequence is synthesized)
ctaactccttcagtctttaattctttaagttgctaatcctttgtgactattttctataccaggtaatgactacagccatttctgtcttatagttaaagggtctacaaaagaatcaacttc

SEQ ID NO: 682304 - DNA, 120 bp, Artificial Sequence
  ENSG00000187021_20 (sequence is synthesized)
tgcactcctgcagaaatcaaaacccatggtatttgtgcaagaagtatgatagaccaataaatgaagtgcctttgggtgaacgtctctgagatcaacatgtgcaaatacctcatagctcta

SEQ ID NO: 682305 - DNA, 120 bp, Artificial Sequence
  ENSG00000187021_21 (sequence is synthesized)
aagtaaagaagacacatgagatcccagaccatcaaggagcttgcagtgaaaacttgcaatgccagtagagtgcgatctattagtgggttctgatggggagagtaggagctttacaggaac

SEQ ID NO: 682306 - DNA, 120 bp, Artificial Sequence
  ENSG00000187021_22 (sequence is synthesized)
acatagaaggcagctaatccacactgatggggtggggaaagggcttaaggaggtctcccaaggaagagacgtctaaattgacagctgaaggctagtctgttgatgttagctggcaagtgc

SEQ ID NO: 682307 - DNA, 120 bp, Artificial Sequence
  ENSG00000187021_23 (sequence is synthesized)
ttgggggatagacaacaacaagaagagaagaacaaaccaggcccagaggtgagaggctatgatgtattcgagggtctgaaagttcaacaaagggtttggctgaagagtctagaaaaatag

SEQ ID NO: 682308 - DNA, 120 bp, Artificial Sequence
  ENSG00000187021_24 (sequence is synthesized)
atgatgagttaggaaagctcggaggccttcagaatgagtttgggcttgatcctgaaggcaatgagaggcatggaaggttttcagcagaggagtaatatccattaggctggcattttagaa

SEQ ID NO: 682309 - DNA, 120 bp, Artificial Sequence
  ENSG00000187021_25 (sequence is synthesized)
tttgctgcatatccctgcacttcctacaagtcctttgagtctgtaagctattgtcctgcctcgagcaacaagcatcacccctctgagggactgctgtcctgctgcgtttgggatttgcaa

SEQ ID NO: 682310 - DNA, 120 bp, Artificial Sequence
  ENSG00000187021_26 (sequence is synthesized)
tgccttctcactacacgttttgcattgaccctcagagttcatggtcctgtggagtggaagagaaaaaaaagacaagtgcttcccgtgtccagatcaaggatgcccacagatgggtcacta

SEQ ID NO: 682311 - DNA, 85 bp, Artificial Sequence
  ENSG00000187021_27 (sequence is synthesized)
agaagctactgtgagggctgttgaatttttctccaaagctcagatgcccagtattcctagtcttcgaaagagagagaggaagaag

SEQ ID NO: 682312 - DNA, 120 bp, Artificial Sequence
  ENSG00000187021_28 (sequence is synthesized)
catgccccaccccatccctcaagctgccccccagacctagctagacctagacagagcaggtctttagtaatgttggcttgaatgaatgaatggttcacatttgccagaacctctagctac

SEQ ID NO: 682313 - DNA, 120 bp, Artificial Sequence
  ENSG00000187021_29 (sequence is synthesized)
ctttccatgtttccgcactacatctgcacactgaagcaaccacatttgctgttagaaaagtactcctactacctaatttctggttaaaccaaggcctgatgttttctgcttccatttgta

SEQ ID NO: 682314 - DNA, 68 bp, Artificial Sequence
  ENSG00000187021_30 (sequence is synthesized)
ggggtttctttgttcaaatttttcccacatccctgagaggctgacatgtgttgctgtgaccacttaat

SEQ ID NO: 682315 - DNA, 120 bp, Artificial Sequence
  ENSG00000187021_31 (sequence is synthesized)
gtgcaaggtaggagccagctctgatccctgtggccagctgaggccaacacttctgctaacatctctgcatcactttatgcactcaagaaatctttacatattaggtaactttatgcaatt

SEQ ID NO: 682316 - DNA, 73 bp, Artificial Sequence
  ENSG00000187021_32 (sequence is synthesized)
accagcctggcgaacatggtgaaaccctatctctactaatgatacaaaaatcagcctgttgtggtggcaggct

SEQ ID NO: 682317 - DNA, 120 bp, Artificial Sequence
  ENSG00000187021_33 (sequence is synthesized)
agagttcatggtcctgtggagtggaagagaaaaaaaagtaaacaacttttggcaggagatggctaaaattttagatgacatgagttatgtggcagaggaaaactgggaaatcagagagaa

SEQ ID NO: 682318 - DNA, 120 bp, Artificial Sequence
  ENSG00000187021_34 (sequence is synthesized)
agagcagtcaattcaatgatatagaggcttcctgcaggaggcaacctctgaatctagcttaaaaatgatacagtttagaaaacacaggaatgcacatttctggcaagggcagagcgagag

SEQ ID NO: 682319 - DNA, 120 bp, Artificial Sequence
  ENSG00000187021_35 (sequence is synthesized)
gaggtaaacagtactgaagtccagggcgtcggtgctcactgctctggcaatgcccggtgagactgaattatgtttaaatttattgtagatgctgatcttctggacaatcacacttttcct

SEQ ID NO: 682320 - DNA, 120 bp, Artificial Sequence
  ENSG00000187024_0 (sequence is synthesized)
atcttctcctgcagcaggcccatgcgcgtgttggcgccctcgtcctgagggctcagcgccagcgcctgctggtagtccgcctcggcaaaggccaggttgcccagctggaagaagcaatct

SEQ ID NO: 682321 - DNA, 120 bp, Artificial Sequence
  ENSG00000187024_1 (sequence is synthesized)
agggtccggaggcggggatgctttggaacacgtggctggtcccaaagatgtgctgcaggatccctttgggggctggaatcacccatggctttgggatgtcccgtgaggggccctggtcaa

SEQ ID NO: 682322 - DNA, 120 bp, Artificial Sequence
  ENSG00000187024_2 (sequence is synthesized)
ccttcagggcatcctagaaccgaaggacagcaagctggagcaggcccccgagacgacccccacccactgacacactccccagcattctgcagggagggaggagaggcggaaatgaggcct

SEQ ID NO: 682323 - DNA, 120 bp, Artificial Sequence
  ENSG00000187024_3 (sequence is synthesized)
ggaaggaggcactcccactcggggttccggtggcgctcccagccccattccccttagggacgctccaacctgtccctctgcagtcctgcccttctccctctcctgtggtcaaggtcaggg

SEQ ID NO: 682324 - DNA, 120 bp, Artificial Sequence
  ENSG00000187024_4 (sequence is synthesized)
atcagggtcctcatgcttacaacaccgtctgttctcccccagggccttcccagctcccacttccggctactgacaccccaagctttgatgtctccagctcaggcctggtcccaagtctca

SEQ ID NO: 682325 - DNA, 120 bp, Artificial Sequence
  ENSG00000187024_5 (sequence is synthesized)
ggccttgggggtcctacagtcccttgggtaaccttcaggaccctcactccagcaggccacactgagcacctcacctgacttctgccccaggttctcccattttggtgaggtcaccttccc

SEQ ID NO: 682326 - DNA, 120 bp, Artificial Sequence
  ENSG00000187024_6 (sequence is synthesized)
caccagctacccaagccagagacctctgtccaagcagccgccgagccttacaaggatctttcacatgcctggttcttggcatggcggccagggccttccctgagtcggactgctgcccct

SEQ ID NO: 682327 - DNA, 120 bp, Artificial Sequence
  ENSG00000187024_7 (sequence is synthesized)
gcctctcccggccttcaccctttcctgcgaacccagcctcggtctctctgcctggccctctgcctttgcgttagtcttctcccaagcccgcacctcgtccgaatctgtcatgaggcccct

SEQ ID NO: 682328 - DNA, 120 bp, Artificial Sequence
  ENSG00000187024_8 (sequence is synthesized)
tccaggaggaccccgaggcctctgccaactacctcgcggccctggccctgacgttgctaggcaccatcaccaggacgcccacaggccccacccctctggccacgcccccgggaaccaagc

SEQ ID NO: 682329 - DNA, 120 bp, Artificial Sequence
  ENSG00000187024_9 (sequence is synthesized)
tttttgagccggagggaggtagaaaacttttattagctggagaggttgaggcctacagcggggaaaggacttgccagattttcgccgcaagtcagggccatagcggggggcataacaagg

SEQ ID NO: 682330 - DNA, 120 bp, Artificial Sequence
  ENSG00000187024_10 (sequence is synthesized)
cctcccaaccgaaggtcaagcaagagctccgagcgtcccacacaagtcccgaagggacactgtgacgccgcgctactgaaggcgcctgggttcccggactcggccaccgcctcgccgctt

SEQ ID NO: 682331 - DNA, 120 bp, Artificial Sequence
  ENSG00000187024_11 (sequence is synthesized)
cggtggacgccaaacagttggcaacacgattggctgctgcggggtgatgacgtcagggggcggtgtcggagtgaatgggggcagcatgaggccgggcggctttttgggcgccggacagcg

SEQ ID NO: 682332 - DNA, 120 bp, Artificial Sequence
  ENSG00000187024_12 (sequence is synthesized)
gctgagtagagccatgagccgatgtgttttggagcctcgccccccggggaagcggtggatggtggctggcctggggaatcccggactgcccggcacgcgacacagcgtgggcatggcggt

SEQ ID NO: 682333 - DNA, 120 bp, Artificial Sequence
  ENSG00000187024_13 (sequence is synthesized)
gctggggcagctggcgcggcggctgggtgtggcggagagttggacgcgcgaccggcactgtgccgccgacctcgccctggccccgctgggggatgcccaactggtcctgctccggccacg

SEQ ID NO: 682334 - DNA, 120 bp, Artificial Sequence
  ENSG00000187024_14 (sequence is synthesized)
gcggcttatgaacgccaacgggcgcagcgtggcccgggctgcggagctgtttgggctgactgccgaggaagtctacctggtgcatgatgagctggacaagcccctggggagactggctct

SEQ ID NO: 682335 - DNA, 120 bp, Artificial Sequence
  ENSG00000187024_15 (sequence is synthesized)
gaagctggggggcagtgccaggggccacaatggagtccgttcctgcattagctgcctcaactccaatgcaatgccaaggctgcgggtgggtatcgggcgcccggcgcaccctgaggcggt

SEQ ID NO: 682336 - DNA, 120 bp, Artificial Sequence
  ENSG00000187024_16 (sequence is synthesized)
tcaggcccatgtgctgggctgcttctcccctgctgagcaggagctgctgcctctgttgctggatcgagccaccgacctgatcttggaccacatccgtgagcgaagccaggggccctcact

SEQ ID NO: 682337 - DNA, 120 bp, Artificial Sequence
  ENSG00000187024_17 (sequence is synthesized)
ggggccgtgacactagtggccatggctgcctgcctgactgtagtgcccaccaacccagccactgccacagagctgccacgccagccttggtatctactttttatacaaatctcctctaga

SEQ ID NO: 682338 - DNA, 120 bp, Artificial Sequence
  ENSG00000187024_18 (sequence is synthesized)
ctgttccaggctgcctgcggattaaagtgggggtgactgtgactggaccagtccatttctggagtaggttcttctctctgtgtcctacttgggacgtaggggaacttcaggaagactaaa

SEQ ID NO: 682339 - DNA, 120 bp, Artificial Sequence
  ENSG00000187024_19 (sequence is synthesized)
ttgggacgtaggggaacttcaggaagactaaacttttcaagcctttttagagaaccaggggcacgcatctgtaagattaaagatgctggcttggaggccgggtgcagtggctcacaccta

SEQ ID NO: 682340 - DNA, 120 bp, Artificial Sequence
  ENSG00000187024_20 (sequence is synthesized)
tgtggaaagaggccaagggtggatttaacccagtttcttcagtgtgtccagcagtttctgtggggtgaggatgtgtgtggatcctggaggaggcagagaagacagtgagcttgccagttc

SEQ ID NO: 682341 - DNA, 120 bp, Artificial Sequence
  ENSG00000187024_21 (sequence is synthesized)
tggtttccaacacttcctttcctgcgcttctcgattcccagatctgcacccacccccctccccaaccctggtctgggtatagtggaagcagggaggggagtcagaattggggttggggtc

SEQ ID NO: 682342 - DNA, 120 bp, Artificial Sequence
  ENSG00000187024_22 (sequence is synthesized)
ggctgtggataaacaaaacacatcctctggctcaggcagggtcccaggctgcaccaaggaacgagctgcctcaccatcagggtgcagagccatctgcaggtgatgggcagctgcgtttct

SEQ ID NO: 682343 - DNA, 120 bp, Artificial Sequence
  ENSG00000187024_23 (sequence is synthesized)
aattcactcttaaactccaggtgaagccagggagagaaattccaaacatggcaaggcagggaaaggctgaaaatggggccagagttggtagggggaccatgtgtggaaagcatggtgcct

SEQ ID NO: 682344 - DNA, 120 bp, Artificial Sequence
  ENSG00000187024_24 (sequence is synthesized)
ggggcagcatgaggccgggcggctttttgggcgccggacagcggctgagtagagccatgagccgatgtgttttggagcctcgccccccggggaagcggtggatggtgagtggcgtggggc

SEQ ID NO: 682345 - DNA, 120 bp, Artificial Sequence
  ENSG00000187024_25 (sequence is synthesized)
ggcgacgtaggggctcccggtccctagcttcagttcggccattatgtcccgggagccgagtgcccccaaattgctgctctgttttcttaactggcttggcttggactcatcgtcaacagc

SEQ ID NO: 682346 - DNA, 120 bp, Artificial Sequence
  ENSG00000187024_26 (sequence is synthesized)
atcatcatcatcatcatcatcatcaatggctgagccctcactgtgcttcctgggagccgggctcagcttcccgcctccacgggcactacaggagggaacaaagtcacctgtcaggatcat

SEQ ID NO: 682347 - DNA, 120 bp, Artificial Sequence
  ENSG00000187024_27 (sequence is synthesized)
gaaagaggccaagggtggatttaacccaggcaccacatgattggagagggagcatctgcaaagatggagccctgcagtgcctgcgttagaaaagcattctaaggctgaggtgggcgaatc

SEQ ID NO: 682348 - DNA, 81 bp, Artificial Sequence
  ENSG00000187024_28 (sequence is synthesized)
tgcctgcaatcccaagagacagaggttgcagggagccgagactcgccactgcatactccagcctgggcaacagagtgagac

SEQ ID NO: 682349 - DNA, 120 bp, Artificial Sequence
  ENSG00000187024_29 (sequence is synthesized)
gtcctgagggctcagcgccagcgcctgctggtagtccgcctcggcaaaggccaggttgcccagctggaagaagcaatctagggtccggaggcgggggtgagtggacccccaactcccagt

SEQ ID NO: 682350 - DNA, 120 bp, Artificial Sequence
  ENSG00000187024_30 (sequence is synthesized)
gcccgggagccccagcccagccggctccagcccgggggccagggcctgaaactggtggctgataaccccccgccgcagtctccgtcctctctagttttctgggcgtctgggcactgttcc

SEQ ID NO: 682351 - DNA, 120 bp, Artificial Sequence
  ENSG00000187024_31 (sequence is synthesized)
aatgggggcagcatgaggccgggcggctttttgggcgccggacagcggctgagtagagccatgagccgatgtgttttggagcctcgccccccggggaagcggtggatgtttccctggtgc

SEQ ID NO: 682352 - DNA, 120 bp, Artificial Sequence
  ENSG00000187026_0 (sequence is synthesized)
agtcacacttcagaaatatcctcctacacctcaactgaaatctaacctcctgaaatcatgtgttgcaactactacagaaactgctgtgggggctgtggatatggctctggctggagttcc

SEQ ID NO: 682353 - DNA, 120 bp, Artificial Sequence
  ENSG00000187026_1 (sequence is synthesized)
gtggatatggctgtggatacagctctagctgctgtggctaccgaccactttgctacagaagatgctattcctcttgctactaatcatcactacaggtcatccttggctttgcaatgacct

SEQ ID NO: 682354 - DNA, 120 bp, Artificial Sequence
  ENSG00000187026_2 (sequence is synthesized)
ctccaagatcaagttcaattgaaatctcccctacccattatcttcacatctaagtaaaggttgactatggtcacctgactatctgaatgcatataagagaagctgttggcagtggatgga

SEQ ID NO: 682355 - DNA, 120 bp, Artificial Sequence
  ENSG00000187033_0 (sequence is synthesized)
gggcttaacatcttttagcctatctgtagaggatatcagagggcaaagtttctgtcatgaaataggactaatcaacttagttgaatttgtatttaaagcaaggttaaactgaattaagac

SEQ ID NO: 682356 - DNA, 120 bp, Artificial Sequence
  ENSG00000187033_1 (sequence is synthesized)
catttttgaaagaattgtcagatgtacctttcaacccgcagccagagaagcttctgcagttgaaggccagaaagtctttgtatggttcttccatctgcaatatcaaagacaagaagtctt

SEQ ID NO: 682357 - DNA, 120 bp, Artificial Sequence
  ENSG00000187033_2 (sequence is synthesized)
catagaggatggcctcctttggggattccaaagtaagacaatctcatctccttttggtgattcatctccacggcttttcctaaagaactccattagtggcgagagatattgaagacaaac

SEQ ID NO: 682358 - DNA, 120 bp, Artificial Sequence
  ENSG00000187033_3 (sequence is synthesized)
ccggtgatggctgtgaaccctttattgacaccaacagggcagcagacaatcccactgatcccctcaccatttgggcctccaactgtggacagagatgtattgccttccaccgtagctcca

SEQ ID NO: 682359 - DNA, 120 bp, Artificial Sequence
  ENSG00000187033_4 (sequence is synthesized)
actgacccaagacagttttgcgttccttcccaatttggatcctctgttctaccaaacacaaatatggcaaatgtgttgtccagtcggatctacccaggttggggcattttaccacctgaa

SEQ ID NO: 682360 - DNA, 120 bp, Artificial Sequence
  ENSG00000187033_5 (sequence is synthesized)
tccataaaggcagtggccagaaggaatgaaatgattcaacggcatcatactgccaggacagaaatggaaatgtatgctatttaccagcaaaggagaatggaaaaaattaatcccaaggga

SEQ ID NO: 682361 - DNA, 120 bp, Artificial Sequence
  ENSG00000187033_6 (sequence is synthesized)
ctagcaggcctagggatacccttcctctatggctccagtgtcccagctgcccccgctgcctaccatggcaggagcatgctccctgccggtgacctgcattttcacagaagcaccctcaga

SEQ ID NO: 682362 - DNA, 120 bp, Artificial Sequence
  ENSG00000187033_7 (sequence is synthesized)
aaccttcagggaaaccccatgctagcggcaactgcaccacactttgaggagagctgggggcagagatgtcgtcgactcaggaaaaatacagggaatcaaaaagctctagacagtgatgct

SEQ ID NO: 682363 - DNA, 120 bp, Artificial Sequence
  ENSG00000187033_8 (sequence is synthesized)
gagagttccaaaagtcaagcagaagaaaaaatcctaggtcagactcatgcagttccctatgaagaggatcattatgcaaaagacccagacattgaagcacccagcaaccagaagtcaagt

SEQ ID NO: 682364 - DNA, 120 bp, Artificial Sequence
  ENSG00000187033_9 (sequence is synthesized)
aaagcaaaggcctgggacgatgggaaagaggaggcttcggagcagatttttgcaacctgtgatgaaaagaatggggtttgccctccagttcctcgaccatctctgccaggaacacatgca

SEQ ID NO: 682365 - DNA, 120 bp, Artificial Sequence
  ENSG00000187033_10 (sequence is synthesized)
ctggttacaattggggggaatctttctttggatgaagatattcagaagtggaccgtggatgatgtgcacagcttcattcgcagccttccaggttgttcagactatgctcaggtatttaaa

SEQ ID NO: 682366 - DNA, 120 bp, Artificial Sequence
  ENSG00000187033_11 (sequence is synthesized)
gatcatgcaattgatggagaaactttgccattactcacagaagagcatcttcgaggcactatgggattaaagctagggccggcactaaaaattcagtcacaggtatctcagcatgtggga

SEQ ID NO: 682367 - DNA, 120 bp, Artificial Sequence
  ENSG00000187033_12 (sequence is synthesized)
agtatgttctacaagaaaactctttcatttcctataagacaagcatttgatcaaccagcagatacatcccctcttctggatcctaattcctggagtgatacaatgaacattttttgtccc

SEQ ID NO: 682368 - DNA, 120 bp, Artificial Sequence
  ENSG00000187033_13 (sequence is synthesized)
caggatacaataattcctaaaggaattgagcgaggtagtatgagaaactaaaagccctcaaggaggaagaatagtcttagccagttttccaaagagcctaggatattacaaaggatgtgt

SEQ ID NO: 682369 - DNA, 120 bp, Artificial Sequence
  ENSG00000187033_14 (sequence is synthesized)
gaggatttcccagtactggatggagaatgagaagagaaagtcagcctttctggggctttcatggaggagacttgcccaaggggcttccctgccagggctgaatgaccccagcaccaaatg

SEQ ID NO: 682370 - DNA, 120 bp, Artificial Sequence
  ENSG00000187033_15 (sequence is synthesized)
actggagacgcatccttaggagcaaatgctaatgaaggggagatttacaaacatcaagaaagctgcagatggatgtttccatgaagaaatctctgaagaaaccaaaagagctgaaactga

SEQ ID NO: 682371 - DNA, 120 bp, Artificial Sequence
  ENSG00000187033_16 (sequence is synthesized)
aaaaagagctccctcccttttttcactcattttccattcccaaaccctgaaagagataaaggcaacccaatgaaaccacagagaggcagaagagaacgggcagaagtacagaacagaaat

SEQ ID NO: 682372 - DNA, 120 bp, Artificial Sequence
  ENSG00000187033_17 (sequence is synthesized)
ggagaagctgaccacgactccatctcttctcattccagatttccagcgtgaagcaggcccaagctagggaaggtgagaagctttaaccttaaattttcgagttttggccaggcgcggtgg

SEQ ID NO: 682373 - DNA, 120 bp, Artificial Sequence
  ENSG00000187033_18 (sequence is synthesized)
agggtttgaaaacctcttcccagtactttaggttttttgaggattaatctctggcaaggaactagctgtgctgcgtaagccccatccctgctaaatttgcctcgtctgtttaaaggacag

SEQ ID NO: 682374 - DNA, 120 bp, Artificial Sequence
  ENSG00000187037_0 (sequence is synthesized)
atgcctggccacaatacctccaggaattcctcttgcgatcctatagtgacaccccacttaatcagcctctacttcatagtgcttattggcgggctggtgggtgtcatttccattcttttc

SEQ ID NO: 682375 - DNA, 120 bp, Artificial Sequence
  ENSG00000187037_1 (sequence is synthesized)
ctcctggtgaaaatgaacacccggtcagtgaccaccatggcggtcattaacttggtggtggtccacagcgtttttctgctgacagtgccatttcgcttgacctacctcatcaagaagact

SEQ ID NO: 682376 - DNA, 120 bp, Artificial Sequence
  ENSG00000187037_2 (sequence is synthesized)
tggatgtttgggctgcccttctgcaaatttgtgagtgccatgctgcacatccacatgtacctcacgttcctattctatgtggtgatcctggtcaccagatacctcatcttcttcaagtgc

SEQ ID NO: 682377 - DNA, 120 bp, Artificial Sequence
  ENSG00000187037_3 (sequence is synthesized)
gtggtacccctggttgtctcccggtatggaatccatgaggaatacaatgaggagcactgttttaaatttcacaaagagcttgcttacacatatgtgaaaatcatcaactatatgatagtc

SEQ ID NO: 682378 - DNA, 120 bp, Artificial Sequence
  ENSG00000187037_4 (sequence is synthesized)
atttttgtcatagccgttgctgtgattctgttggtcttccaggtcttcatcattatgttgatggtgcagaagctacgccactctttactatcccaccaggagttctgggctcagctgaaa

SEQ ID NO: 682379 - DNA, 120 bp, Artificial Sequence
  ENSG00000187037_5 (sequence is synthesized)
aacctattttttataggggtcatccttgtttgtttccttccctaccagttctttaggatctattacttgaatgttgtgacgcattccaatgcctgtaacagcaaggttgcattttataac

SEQ ID NO: 682380 - DNA, 120 bp, Artificial Sequence
  ENSG00000187037_6 (sequence is synthesized)
gaaatcttcttgagtgtaacagcaattagctgctatgatttgcttctctttgtctttgggggaagccattggtttaagcaaaagataattggcttatggaattgtgttttgtgccgttag

SEQ ID NO: 682381 - DNA, 120 bp, Artificial Sequence
  ENSG00000187037_7 (sequence is synthesized)
gtagccatcactgagaaatctggattttcaagcaatgattttcaacaattataaaatggaagttgtagactggataagagatgctcagctaagggagttcctggatggtctttagattga

SEQ ID NO: 682382 - DNA, 120 bp, Artificial Sequence
  ENSG00000187037_8 (sequence is synthesized)
tacaccaatcctctgaaattgcatgcaaaaatgttttcctgggatcagctgcactccttagcaaaagtatattggagaatcaactgagaaagtaactgagacatttcaatcatttctagg

SEQ ID NO: 682383 - DNA, 120 bp, Artificial Sequence
  ENSG00000187037_9 (sequence is synthesized)
atctctgtagccatcactgagaaatctggattttcaagggcctttctctctgttgcccaggctggagtttagcgactcaatcatggctcactgactgcagcatcgacctccggggctcaa

SEQ ID NO: 682384 - DNA, 120 bp, Artificial Sequence
  ENSG00000187037_10 (sequence is synthesized)
gacatggataaaagaaatccctgtaaaaggcagcttaactggatgtttccctccaatggcaaagtgactctcaatgggccaagagatctcattatgttacccaggctggtctcaaactcc

SEQ ID NO: 682385 - DNA, 120 bp, Artificial Sequence
  ENSG00000187037_11 (sequence is synthesized)
atccttctaccttggcctctcaaagtgctgcagttacagatgtgagccactgtgcctggcctgatgttaatttataatgctttcctatgaataaactgttaaaacactttagtcaatgta

SEQ ID NO: 682386 - DNA, 120 bp, Artificial Sequence
  ENSG00000187037_12 (sequence is synthesized)
agatctgcctcctgctgaccttgtacccagctgcagcgacaccgagctcctcacagcttcccaaagtgggctggcccctctcacgacagggtcatcgcacaggctccctctgtgggggaa

SEQ ID NO: 682387 - DNA, 120 bp, Artificial Sequence
  ENSG00000187037_13 (sequence is synthesized)
gctttccactcggaactgagacctaaaactggaaactaggctgcaggaccacctgggtacgtgtgaattacagaggttcatgcatttccaaatgggggtgtcattttagaactggggcgt

SEQ ID NO: 682388 - DNA, 120 bp, Artificial Sequence
  ENSG00000187037_14 (sequence is synthesized)
aagatgatgagcaacagaaaagacaacgccgagcccccgggtatgagctcagaactctttacatgtttgatgctccaaatggtctagggcaggggggcttcagagccttggcagcagaac

SEQ ID NO: 682389 - DNA, 120 bp, Artificial Sequence
  ENSG00000187037_15 (sequence is synthesized)
gtggtcgcgtagatgtttatctgattttctgttgcgctgctgctcaaccgccactacggaagtgcacactgccaccttatggacgtcttgagaagttacacttacacgttattaattata

SEQ ID NO: 682390 - DNA, 120 bp, Artificial Sequence
  ENSG00000187045_0 (sequence is synthesized)
gagccacctaccctgctccgaggccaggcctgcagggcctcatcggccagagggtgatcagtgagcagaaggatgcccgtggccgaggccccccaggtggctggcgggcagggggacgga

SEQ ID NO: 682391 - DNA, 120 bp, Artificial Sequence
  ENSG00000187045_1 (sequence is synthesized)
ggtgatggcgaggaagcggagccggaggggatgttcaaggcctgtgaggactccaagagaaaagcccggggctacctccgcctggtgcccctgtttgtgctgctggccctgctcgtgctg

SEQ ID NO: 682392 - DNA, 120 bp, Artificial Sequence
  ENSG00000187045_2 (sequence is synthesized)
gcttcggcgggggtgctactctggtatttcctagggtacaaggcggaggtgatggtcagccaggtgtactcaggcagtctgcgtgtactcaatcgccacttctcccaggatcttacccgc

SEQ ID NO: 682393 - DNA, 120 bp, Artificial Sequence
  ENSG00000187045_3 (sequence is synthesized)
cgggaatctagtgccttccgcagtgaaaccgccaaagcccagaagatgctcaaggagctcatcaccagcacccgcctgggaacttactacaactccagctccgtctattcctttggggag

SEQ ID NO: 682394 - DNA, 120 bp, Artificial Sequence
  ENSG00000187045_4 (sequence is synthesized)
ggacccctcacctgcttcttctggttcattctccaaatccccgagcaccgccggctgatgctgagccccgaggtggtgcaggcactgctggtggaggagctgctgtccacagtcaacagc

SEQ ID NO: 682395 - DNA, 120 bp, Artificial Sequence
  ENSG00000187045_5 (sequence is synthesized)
tcggctgccgtcccctacagggccgagtacgaagtggaccccgagggcctagtgatcctggaagccagtgtgaaagacatagctgcattgaattccacgctgggttgttaccgctacagc

SEQ ID NO: 682396 - DNA, 120 bp, Artificial Sequence
  ENSG00000187045_6 (sequence is synthesized)
tacgtgggccagggccaggtcctccggctgaaggggcctgaccacctggcctccagctgcctgtggcacctgcagggccccaaggacctcatgctcaaactccggctggagtggacgctg

SEQ ID NO: 682397 - DNA, 120 bp, Artificial Sequence
  ENSG00000187045_7 (sequence is synthesized)
gcagagtgccgggaccgactggccatgtatgacgtggccgggcccctggagaagaggctcatcacctcggtgtacggctgcagccgccaggagcccgtggtggaggttctggcgtcgggg

SEQ ID NO: 682398 - DNA, 120 bp, Artificial Sequence
  ENSG00000187045_8 (sequence is synthesized)
gccatcatggcggtcgtctggaagaagggcctgcacagctactacgaccccttcgtgctctccgtgcagccggtggtcttccaggcctgtgaagtgaacctgacgctggacaacaggctc

SEQ ID NO: 682399 - DNA, 120 bp, Artificial Sequence
  ENSG00000187045_9 (sequence is synthesized)
gactcccagggcgtcctcagcaccccgtacttccccagctactactcgccccaaacccactgctcctggcacctcacggtgccctctctggactacggcttggccctctggtttgatgcc

SEQ ID NO: 682400 - DNA, 120 bp, Artificial Sequence
  ENSG00000187045_10 (sequence is synthesized)
tatgcactgaggaggcagaagtatgatttgccgtgcacccagggccagtggacgatccagaacaggaggctgtgtggcttgcgcatcctgcagccctacgccgagaggatccccgtggtg

SEQ ID NO: 682401 - DNA, 120 bp, Artificial Sequence
  ENSG00000187045_11 (sequence is synthesized)
gccacggccgggatcaccatcaacttcacctcccagatctccctcaccgggcccggtgtgcgggtgcactatggcttgtacaaccagtcggacccctgccctggagagttcctctgttct

SEQ ID NO: 682402 - DNA, 120 bp, Artificial Sequence
  ENSG00000187045_12 (sequence is synthesized)
gtgaatggactctgtgtccctgcctgtgatggggtcaaggactgccccaacggcctggatgagagaaactgcgtttgcagagccacattccagtgcaaagaggacagcacatgcatctca

SEQ ID NO: 682403 - DNA, 120 bp, Artificial Sequence
  ENSG00000187045_13 (sequence is synthesized)
caaggtctgtgatgggcagcctgattgtctcaacggcagcgacgaagagcagtgccaggaaggggtgccatgtgggacattcaccttccagtgtgaggaccggagctgcgtgaagaagcc

SEQ ID NO: 682404 - DNA, 120 bp, Artificial Sequence
  ENSG00000187045_14 (sequence is synthesized)
caacccgcagtgtgatgggcggcccgactgcagggacggctcggatgaggagcactgtgactgtggcctccagggcccctccagccgcattgttggtggagctgtgtcctccgagggtga

SEQ ID NO: 682405 - DNA, 120 bp, Artificial Sequence
  ENSG00000187045_15 (sequence is synthesized)
gtggccatggcaggccagcctccaggttcggggtcgacacatctgtgggggggccctcatcgctgaccgctgggtgataacagctgcccactgcttccaggaggacagcatggcctccac

SEQ ID NO: 682406 - DNA, 120 bp, Artificial Sequence
  ENSG00000187045_16 (sequence is synthesized)
ggtgctgtggaccgtgttcctgggcaaggtgtggcagaactcgcgctggcctggagaggtgtccttcaaggtgagccgcctgctcctgcacccgtaccacgaagaggacagccatgacta

SEQ ID NO: 682407 - DNA, 120 bp, Artificial Sequence
  ENSG00000187045_17 (sequence is synthesized)
cgacgtggcgctgctgcagctcgaccacccggtggtgcgctcggccgccgtgcgccccgtctgcctgcccgcgcgctcccacttcttcgagcccggcctgcactgctggattacgggctg

SEQ ID NO: 682408 - DNA, 120 bp, Artificial Sequence
  ENSG00000187045_18 (sequence is synthesized)
gggcgccttgcgcgagggcggccccatcagcaacgctctgcagaaagtggatgtgcagttgatcccacaggacctgtgcagcgaggtctatcgctaccaggtgacgccacgcatgctgtg

SEQ ID NO: 682409 - DNA, 120 bp, Artificial Sequence
  ENSG00000187045_19 (sequence is synthesized)
tgccggctaccgcaagggcaagaaggatgcctgtcagggtgactcaggtggtccgctggtgtgcaaggcactcagtggccgctggttcctggcggggctggtcagctggggcctgggctg

SEQ ID NO: 682410 - DNA, 120 bp, Artificial Sequence
  ENSG00000187045_20 (sequence is synthesized)
tggccggcctaactacttcggcgtctacacccgcatcacaggtgtgatcagctggatccagcaagtggtgacctgaggaactgcccccctgcaaagcagggcccacctcctggactcaga

SEQ ID NO: 682411 - DNA, 120 bp, Artificial Sequence
  ENSG00000187045_21 (sequence is synthesized)
gagcccagggcaactgccaagcagggggacaagtattctggcggggggtgggggagagagcaggccctgtggtggcaggaggtggcatcttgtctcgtccctgatgtctgctccagtgat

SEQ ID NO: 682412 - DNA, 120 bp, Artificial Sequence
  ENSG00000187045_22 (sequence is synthesized)
ggcaggaggatggagaagtgccagcagctgggggtcaagacgtcccctgaggacccaggcccacacccagcccttctgcctcccaattctctctcctccgtccccttcctccactgctgc

SEQ ID NO: 682413 - DNA, 120 bp, Artificial Sequence
  ENSG00000187045_23 (sequence is synthesized)
ctaatgcaaggcagtggctcagcagcaagaatgctggttctacatcccgaggagtgtctgaggtgcgccccactctgtacagaggctgtttgggcagccttgcctccagagagcagattc

SEQ ID NO: 682414 - DNA, 120 bp, Artificial Sequence
  ENSG00000187045_24 (sequence is synthesized)
cagcttcggaagcccctggtctaacttgggatctgggaatggaaggtgctcccatcggaggggaccctcagagccctggagactgccaggtgggcctgctgccactgtaagccaaaaggt

SEQ ID NO: 682415 - DNA, 120 bp, Artificial Sequence
  ENSG00000187045_25 (sequence is synthesized)
ggggaagtcctgactccagggtccttgccccacccctgcctgccacctgggccctcacagcccagaccctcactgggaggtgagctcagctgccctttggaataaagctgcctgatccaa

SEQ ID NO: 682416 - DNA, 120 bp, Artificial Sequence
  ENSG00000187045_26 (sequence is synthesized)
aaaaggcagggaagtcctgcttccgtgccccaccggtgctcagcagaggctcccttgcaaatgcgaggctgtttccaactttggtctgtttccctggcaggatgcccgtggccgaggccc

SEQ ID NO: 682417 - DNA, 120 bp, Artificial Sequence
  ENSG00000187045_27 (sequence is synthesized)
cttgagccagacccagtccagctctggtgcctgccctctggtgcgagctgacctgagatgcacttccctcctctgtgagctgtctcggcacccacttgcagtcactgccgcctgatgttg

SEQ ID NO: 682418 - DNA, 120 bp, Artificial Sequence
  ENSG00000187045_28 (sequence is synthesized)
aggaggtaccacttcctctcctccctctggcttcctttcctccctccccctccctctcttccctcctcaatagtgaccccctcattggaagcccaagtccccaatctcagaggggcagca

SEQ ID NO: 682419 - DNA, 120 bp, Artificial Sequence
  ENSG00000187045_29 (sequence is synthesized)
aggggagcgagcagaggctggggctggtgtcaggcctgttgcccttgaccttgtcctcgtcccagcctccgccctggccccggcttcccctctggctaccccagaggtctcagacacgtt

SEQ ID NO: 682420 - DNA, 120 bp, Artificial Sequence
  ENSG00000187045_30 (sequence is synthesized)
tggtcatcagacaccttggatgtttattctaattacagcaaaattgtctcatcttcttgggtgctgtaaccccctctggcaccctcaatccttcaataaaatgtttccagagccaaagga

SEQ ID NO: 682421 - DNA, 120 bp, Artificial Sequence
  ENSG00000187045_31 (sequence is synthesized)
gagagtttgaatatctaagatgccagtcttggaagatgccaaaattggaaggctctggggctctagaattcttggatttctggggtgtgtgttcccaatcaccaacacttgtaatttgct

SEQ ID NO: 682422 - DNA, 120 bp, Artificial Sequence
  ENSG00000187045_32 (sequence is synthesized)
tgttggctgatcctattcaaaaggatcatccagacaaaaggtgacgaagaatgacaaggtttgcttgactcctttttgcaatttatctgggactaggattaaaagaaaggagaagaaata

SEQ ID NO: 682423 - DNA, 120 bp, Artificial Sequence
  ENSG00000187045_33 (sequence is synthesized)
agtcacagtgctgtccaggacccagcaggaggagttccatggagcctgaggccacaggccacaggggacaagggccagacaccctggtcatggctctaggccattgatccagcctgggct

SEQ ID NO: 682424 - DNA, 120 bp, Artificial Sequence
  ENSG00000187045_34 (sequence is synthesized)
ggctgggtgggggtggggaggccttggcctggacaaacagaggctcctgaggcctgtgtgcaggcccggcacctatctgccgctcccaaaggatgcccgtggccgaggccccccaggtgg

SEQ ID NO: 682425 - DNA, 120 bp, Artificial Sequence
  ENSG00000187048_0 (sequence is synthesized)
agagagaggtaggggcactcagagatccagcaggtgctgcaccatgagtgtctctgtgctgagccccagcagactcctgggtgatgtctctggaatcctccaagcggcctccctgctcat

SEQ ID NO: 682426 - DNA, 120 bp, Artificial Sequence
  ENSG00000187048_1 (sequence is synthesized)
tctgcttctgctgctgatcaaggcagttcagctctacctgcacaggcagtggctgctcaaagccctccagcagttcccgtgccctccctcccactggctcttcgggcacatccaggagct

SEQ ID NO: 682427 - DNA, 120 bp, Artificial Sequence
  ENSG00000187048_2 (sequence is synthesized)
ccaacaggaccaggagctacaacggattcagaaatgggtggagacattcccaagtgcctgtcctcattggctatggggaggcaaagttcgtgtccagctctatgaccctgactatatgaa

SEQ ID NO: 682428 - DNA, 120 bp, Artificial Sequence
  ENSG00000187048_3 (sequence is synthesized)
ggtgattctggggagatcagacccgaaatcccatggttcctacagattcctggctccatggattgggtacggcttgctcctgttgaatgggcagacatggttccagcatcgacggatgct

SEQ ID NO: 682429 - DNA, 120 bp, Artificial Sequence
  ENSG00000187048_4 (sequence is synthesized)
gaccccagccttccactatgacatcctgaagccctatgtggggctcatggcagactctgtacgagtgatgctggacaaatgggaagagctccttggccaggattcccctctggaggtctt

SEQ ID NO: 682430 - DNA, 120 bp, Artificial Sequence
  ENSG00000187048_5 (sequence is synthesized)
tcagcacgtctccttgatgaccctggacaccatcatgaagtgtgccttcagccatcagggcagcatccaggtggacaggaattctcagtcctacatacaggccattagtgacctgaacaa

SEQ ID NO: 682431 - DNA, 120 bp, Artificial Sequence
  ENSG00000187048_6 (sequence is synthesized)
cctggttttttcccgtgtgaggaatgcctttcaccagaatgacaccatctacagcctgacctctgctggccgctggacacaccgcgcctgccagctggcccatcagcacacagaccaagt

SEQ ID NO: 682432 - DNA, 120 bp, Artificial Sequence
  ENSG00000187048_7 (sequence is synthesized)
gatccaactgaggaaggctcaactacagaaggagggggagctggagaagatcaagaggaagaggcatttggattttctggatatcctcctcttggccaaaatggagaatgggagcatctt

SEQ ID NO: 682433 - DNA, 120 bp, Artificial Sequence
  ENSG00000187048_8 (sequence is synthesized)
gtcagacaaggacctccgtgctgaggtggacacgttcatgtttgagggccacgacaccacagccagtgggatctcctggatcctctatgctctggccacacaccccaagcatcaggagag

SEQ ID NO: 682434 - DNA, 120 bp, Artificial Sequence
  ENSG00000187048_9 (sequence is synthesized)
gtgccgggaggagatccacagcctcctgggtgatggagcctccatcacctggaaccacctggaccagatgccctacaccaccatgtgcattaaggaggcactgaggctctacccaccggt

SEQ ID NO: 682435 - DNA, 120 bp, Artificial Sequence
  ENSG00000187048_10 (sequence is synthesized)
ggcagagagctcagcactcccgtcaccttccctgatgggcgctccttgcccaaaggtatcatggtcctcctctccatttatggccttcaccacaacccaaaagtgtggcccaacccagag

SEQ ID NO: 682436 - DNA, 120 bp, Artificial Sequence
  ENSG00000187048_11 (sequence is synthesized)
gtgtttgaccctttccgttttgcaccgggttctgctcaacacagccacgctttcctgcccttctcaggaggatcaaggaactgcatcgggaaacaatttgccatgaacgagctgaaggtg

SEQ ID NO: 682437 - DNA, 120 bp, Artificial Sequence
  ENSG00000187048_12 (sequence is synthesized)
gccacggccctgaccctgctccgctttgagctgctgcctgatcccaccaggatccccatccccattgcacgacttgtgttgaaatccaaaaatggaatccacctgcgtctcaggaggctc

SEQ ID NO: 682438 - DNA, 120 bp, Artificial Sequence
  ENSG00000187048_13 (sequence is synthesized)
cctaacccttgtgaagacaaggaccagctttgagggcctccacctgccgtcctgtcttcctgacccccgcttctgtccccttcctgtctgcccatatcctgttttctgtctgcccacctt

SEQ ID NO: 682439 - DNA, 120 bp, Artificial Sequence
  ENSG00000187048_14 (sequence is synthesized)
cccttcttcccacctgcctgctgtcccccagtctgcctgcccttctctctctcacctttctccaggctccctacctgcttgtctacctgtctcctacccacctgtatctcttgttgggag

SEQ ID NO: 682440 - DNA, 90 bp, Artificial Sequence
  ENSG00000187048_15 (sequence is synthesized)
tcttgttgggacgagcttgcatgtctgacataatgtaaaagagtcttggatcatgtccaggatccagggtctaaaaccccttgtggcctt

SEQ ID NO: 682441 - DNA, 65 bp, Artificial Sequence
  ENSG00000187048_16 (sequence is synthesized)
cagggctcgtggctctggaatgtgtctgaacttgctgcctcctcgctccttgctctcccaggatc

SEQ ID NO: 682442 - DNA, 86 bp, Artificial Sequence
  ENSG00000187048_17 (sequence is synthesized)
tctgcacttccagagctcggggccttcacagcctccatccttagctttggcgccctggacccactttctctctcaaactgtctttt

SEQ ID NO: 682443 - DNA, 79 bp, Artificial Sequence
  ENSG00000187048_18 (sequence is synthesized)
tttgactctcaccccaacatccctgaatctccacccacctcccaaactcctgcctgccctccagactgtctgcccatac

SEQ ID NO: 682444 - DNA, 120 bp, Artificial Sequence
  ENSG00000187048_19 (sequence is synthesized)
tcccaaactcctgcctgccctccagactgtctgcccatacacctgtctccttcttcctgcctgcttgtctgttcctatattagtttcctattactgctgtaataaactatcacaatctca

SEQ ID NO: 682445 - DNA, 120 bp, Artificial Sequence
  ENSG00000187048_20 (sequence is synthesized)
gaaggagggggagctggagaagatcaagaggaagaggcatttggattttctggatatcctcctcttggccaaagaaccacctggaccagatgccctacaccaccatgtgcattaaggagg

SEQ ID NO: 682446 - DNA, 120 bp, Artificial Sequence
  ENSG00000187048_21 (sequence is synthesized)
cgctttcctgcccttctcaggaggatcaaggtgagacgtcctgtgtggtaattcgaatagaggaatgagggaagtctctggtcaaccctctgatctttgtgagcctgatgttcatatgtg

SEQ ID NO: 682447 - DNA, 120 bp, Artificial Sequence
  ENSG00000187048_22 (sequence is synthesized)
gcatcttcaggtgtgctcttaaatgttggtatttgtgggaaagtcaggcacctggtgtgggcgtctctgtgtacaaaaggaaggtggcattcagagcaccccatggagactttgctccct

SEQ ID NO: 682448 - DNA, 120 bp, Artificial Sequence
  ENSG00000187048_23 (sequence is synthesized)
ctgcttcttcaaatgggcagcctgaattcactgtcagtgcatgttccaaacttcagtatattcatgtattttcctcactttaaggatatgaattctcaaaattagatattctccagtaaa

SEQ ID NO: 682449 - DNA, 120 bp, Artificial Sequence
  ENSG00000187048_24 (sequence is synthesized)
actaccttccctatttaattcactagtctgtcgtagagatgaatcattgaagtctttgcatctgtttataatacagatgacctgcaagtcctacctttcaagtcatataagggagaggtt

SEQ ID NO: 682450 - DNA, 120 bp, Artificial Sequence
  ENSG00000187048_25 (sequence is synthesized)
aaggtagccctttgaagaaagttttacaacagtgtgtgtcatatcatacattcttctgtcttgcccaatgaaatttttactgcattatatagtgttcacatatttacatctattttcccg

SEQ ID NO: 682451 - DNA, 120 bp, Artificial Sequence
  ENSG00000187048_26 (sequence is synthesized)
tttgacaaattctgtacatgccttgagatctttataccatagtcctgtaatccacttagcacaatattggccaaaaacataaaaatgtgaacagtacactgtcttggagagaaaagccca

SEQ ID NO: 682452 - DNA, 120 bp, Artificial Sequence
  ENSG00000187048_27 (sequence is synthesized)
ataattatcatataacgcacaacatttgaagcctcctggtatgtgaaatataaaacacacttgaaattgcttttgagctggagaggaaaactccagaatggttgcggtggagatcattgt

SEQ ID NO: 682453 - DNA, 120 bp, Artificial Sequence
  ENSG00000187048_28 (sequence is synthesized)
ggcatcaggaatcgtcctgtgacatacacacaggcaaaaacgatataaattcttagtagaaacaaagtttgttcaaagaaataattatgtgactttttgaaacggtgagtccacttacac

SEQ ID NO: 682454 - DNA, 120 bp, Artificial Sequence
  ENSG00000187048_29 (sequence is synthesized)
agaacaggctttaagaaaaagcttcctcctgaaactccttctccagcactggtctgtctatcccagcatgagaaagtcctcctaaacattgcctgcaaatcatgtcgctgccactagaga

SEQ ID NO: 682455 - DNA, 120 bp, Artificial Sequence
  ENSG00000187048_30 (sequence is synthesized)
actggagagcattcctaaggtccatttctagctcagaattaatatttactctcagtgtatttcattatattttattcattttaaaacttaacatcattcaaatatagaagtatttcttaa

SEQ ID NO: 682456 - DNA, 120 bp, Artificial Sequence
  ENSG00000187049_0 (sequence is synthesized)
gtttccggcagcgccgcgctgctccgggagccgctgtggcagcgtatgctgccacggggactgaagatggcgccgcgaggtaaacggttgtcctccaccccgctggaaatcctgttcttt

SEQ ID NO: 682457 - DNA, 120 bp, Artificial Sequence
  ENSG00000187049_1 (sequence is synthesized)
ctgaacgggtggtataatgctacctatttcctgctggaacttttcatatttctgtataaaggtgtcctgctaccatatccaacagctaacctagtactggatgtggtgatgctcctcctt

SEQ ID NO: 682458 - DNA, 120 bp, Artificial Sequence
  ENSG00000187049_2 (sequence is synthesized)
tatcttggaattgaagtaattcgcctgttttttggtacaaagggaaacctctgccagcgaaagatgccgctcagtattagcgtggccttgaccttcccatctgccatgatggcctcctat

SEQ ID NO: 682459 - DNA, 120 bp, Artificial Sequence
  ENSG00000187049_3 (sequence is synthesized)
tacctgctgctgcagacctacgtactccgcctggaagccatcatgaatggcatcttgctcttcttctgtggctcagagcttttacttgaggtgctcaccttggctgctttctccaggatt

SEQ ID NO: 682460 - DNA, 120 bp, Artificial Sequence
  ENSG00000187049_4 (sequence is synthesized)
agttgtcctgagaaaggctgtgtggcttttcttcagcacagacatttgggcaagcaactcagcataaggccagtgggtaccatcttctaaaccaggaccatcagcccaagagactcttct

SEQ ID NO: 682461 - DNA, 120 bp, Artificial Sequence
  ENSG00000187049_5 (sequence is synthesized)
acactccagtatagggaggggcaaggttattcccatcctgccccttctcagaaccagtcccctgctgacctcaagttctcctccttgatcaccgtggccagagcatctcgtgtggaccat

SEQ ID NO: 682462 - DNA, 120 bp, Artificial Sequence
  ENSG00000187049_6 (sequence is synthesized)
ctaggctccttgggcttcaagcaggacctgagccacatgctccctgtacgagctgtgctatacctgtcccacatgagcacggagagcctcatgttggtgggtttccagagtgatgtgaaa

SEQ ID NO: 682463 - DNA, 120 bp, Artificial Sequence
  ENSG00000187049_7 (sequence is synthesized)
gcctctcaccccaatcctcggagactgagttccacaacttttttagtagctcatagtgttatttttctactctcttcatgaaactaactttattttataataaatatgtattttctgttg

SEQ ID NO: 682464 - DNA, 120 bp, Artificial Sequence
  ENSG00000187049_8 (sequence is synthesized)
acttccgcccaacgcccggtagtctgagagcctccaaggtcctcccccgcacccctgaggtcctgcagacgacggcgtcgtgggtggtcaccgttatcccttaggtctggagaggggaca

SEQ ID NO: 682465 - DNA, 120 bp, Artificial Sequence
  ENSG00000187049_9 (sequence is synthesized)
ggttgactatcatagactggatctgtatatcctattactccgtctctgaagtttcaagttgctgcttcatacattgggtcaagatttacctgtttgttgctctgtaaggctagagatggg

SEQ ID NO: 682466 - DNA, 120 bp, Artificial Sequence
  ENSG00000187049_10 (sequence is synthesized)
caatagaatgggatattagatgattccttcccagctgcctaactgcaagaagagtgcttggttcttctcactagtattcttaggggaataggttcagttgtaactccacgtcagggcagg

SEQ ID NO: 682467 - DNA, 120 bp, Artificial Sequence
  ENSG00000187051_0 (sequence is synthesized)
gccgccatgtccgccgccctgctgcggcggggcctggagctgctggcggcgtccgaggccccccgggaccctccaggtcaggccaagccgagaggggctccggtgaaacggccccggaag

SEQ ID NO: 682468 - DNA, 120 bp, Artificial Sequence
  ENSG00000187051_1 (sequence is synthesized)
gaagacgaaggcaattcaggcccagaaactgcggaactcggccaagggaaaggtgcccaagtcggcactggacgagtaccggaagcgagagtgtcgagaccacctcagagtaaacctgaa

SEQ ID NO: 682469 - DNA, 120 bp, Artificial Sequence
  ENSG00000187051_2 (sequence is synthesized)
gtttctgaccaggacgagaagcaccgtggctgagtctgtgagccagcagattttgcgccagaaccggggccgcaaggcctgtgaccggcctgtggccaagaccaagaagaagaaggctga

SEQ ID NO: 682470 - DNA, 120 bp, Artificial Sequence
  ENSG00000187051_3 (sequence is synthesized)
cagcctccgactcctgctggctccaggaaccggccgtgccgcgcggccagcagatggcgatgcaggaccagcctggctcgaggaagccgcggagctgagccgagtggaggctggaatgga

SEQ ID NO: 682471 - DNA, 120 bp, Artificial Sequence
  ENSG00000187051_4 (sequence is synthesized)
gctggtgggccggaagtcctggggaggatttacacacagaccggagctggcttccgcaggcctgggcagagcatctgcacctgccggaaaggaacgtatctgttttgtttgcttttgccc

SEQ ID NO: 682472 - DNA, 120 bp, Artificial Sequence
  ENSG00000187051_5 (sequence is synthesized)
aggtggggcctctgggctgtttgctgtggagcaaggctaattcctgagcccttggggacgacagctccaggagtaggaagaagggtgggcttccaagttacaataaatgtgaacccaaga

SEQ ID NO: 682473 - DNA, 120 bp, Artificial Sequence
  ENSG00000187051_6 (sequence is synthesized)
ctataggaagggacctgggaggtgagagccgaggctgttcccctagggacccatggcggtctcagccctgagcatagggtgggaggctgggccagccctgccctgcgccgaactcccctg

SEQ ID NO: 682474 - DNA, 120 bp, Artificial Sequence
  ENSG00000187051_7 (sequence is synthesized)
cgccctgctgcggcggggcctggagctgctggcggcgtccgagggtgaggagggctggccaggggacgtccggcgcgggcaggaggatggtagtggctgcgggcgggagccctggatgga

SEQ ID NO: 682475 - DNA, 120 bp, Artificial Sequence
  ENSG00000187051_8 (sequence is synthesized)
tggatggaaaacaatccaggccgggcttagccccagtggcatgggaacgctgcgcgccctctgacctgggtctcttcctctctcttcccctacagccccccgggaccctccaggtcaggc

SEQ ID NO: 682476 - DNA, 120 bp, Artificial Sequence
  ENSG00000187051_9 (sequence is synthesized)
gctgggacctgcgccccagaggaggtggcgcttgaggcagggcttgaagcgttcgcccggtattgctagacctactgtgtgccaggcgcggagcggggccctggacatacgaaggtgaca

SEQ ID NO: 682477 - DNA, 120 bp, Artificial Sequence
  ENSG00000187051_10 (sequence is synthesized)
ctacggccctagtggggagagaagcatcaaagaatatcaaacccagtgtgtcattgctaagtgcattgaagcctatgaattaaaagactacggtactctgatggggacttaggccaagtc

SEQ ID NO: 682478 - DNA, 120 bp, Artificial Sequence
  ENSG00000187051_11 (sequence is synthesized)
agccttctctgaggaagcgacatttcagccgagagctgaaggatgtataagagtgagctaggtgaaaagtaggagaatattctaggaagaatagtatgtgcaaaggtcctgagtcagaaa

SEQ ID NO: 682479 - DNA, 120 bp, Artificial Sequence
  ENSG00000187051_12 (sequence is synthesized)
ggaggttgttgcctttgagaatttgaaaaaataaaggctggtaaaggtgacctagtgaatgaggatcaaagatggagcatttaaacacattcactaacactctgtaccaggtgctgattc

SEQ ID NO: 682480 - DNA, 120 bp, Artificial Sequence
  ENSG00000187051_13 (sequence is synthesized)
taagtgctgtacaaatgtaagctcgtttgatccttacagcagccctttgaggtcgatactactatcacccccgttttacagattcagaaaaaggcacctgcccaggtggtacaggcattg

SEQ ID NO: 682481 - DNA, 120 bp, Artificial Sequence
  ENSG00000187051_14 (sequence is synthesized)
gtggaaaatatgttaaagagggggcagcagagaatttcagcctttagaggggttttagtggtgaattggctgtgaaggtggagcctagtttcttgggggacgtagtgtcacttaatagac

SEQ ID NO: 682482 - DNA, 120 bp, Artificial Sequence
  ENSG00000187051_15 (sequence is synthesized)
ataaagactttcggaggggctggtgtaggcaagatggtgatattttgacatgtgtcaggacgtggcaagctcttactgtgtctgaatccctagagtctaatgcataaaagatgttaaagt

SEQ ID NO: 682483 - DNA, 120 bp, Artificial Sequence
  ENSG00000187051_16 (sequence is synthesized)
atttgttaaaagaattatgaattccaaggaggaaatacaacttaagccaaagtctggaggcaggaaagtgagacaggtttgagccccagcgatacttgccatgaagcaggagtgtggagt

SEQ ID NO: 682484 - DNA, 120 bp, Artificial Sequence
  ENSG00000187051_17 (sequence is synthesized)
gccagaggtcattcccatctgtcccagcccttgtctcactgtcgtgtcctgggtgctcacccacctcccctgttggatggaagctcctaaaggcacacacctccttgggcttgtccgcag

SEQ ID NO: 682485 - DNA, 120 bp, Artificial Sequence
  ENSG00000187051_18 (sequence is synthesized)
ccttggtgtccaccacaggttttggcacatagatgctgagtgagaggaatggcaagcctcgcagccaatggaaagaacacctctgcagctgccactttgctccaagctgcatcgtctctt

SEQ ID NO: 682486 - DNA, 120 bp, Artificial Sequence
  ENSG00000187051_19 (sequence is synthesized)
gcctgaattattgcagaagcctagccggtctcctgccttccacatgcccctccccccgtaatcttgttctcaacagcaaccaaagtgatcgtgtaaaatcagaagtcattccttgttttt

SEQ ID NO: 682487 - DNA, 120 bp, Artificial Sequence
  ENSG00000187051_20 (sequence is synthesized)
cctctgggtggctctcattgtagtcactaaaaggtggcggtcttagggtgcctgacaagggctatatgacctacccccacccccagccaaacttggtctcttcctgctacccactccccc

SEQ ID NO: 682488 - DNA, 64 bp, Artificial Sequence
  ENSG00000187051_21 (sequence is synthesized)
tcatctcactccaacctctagcctcccgagttcaaacgatgctcctgcctcagcctcccgagta

SEQ ID NO: 682489 - DNA, 120 bp, Artificial Sequence
  ENSG00000187051_22 (sequence is synthesized)
tacaggtgtgagccaccgcacccagccattccagctgttttgtgtttttcaaacacatttgacacatttctgcttcagggcctttgcactgggtgttccctctacctagacaaatgctct

SEQ ID NO: 682490 - DNA, 120 bp, Artificial Sequence
  ENSG00000187051_23 (sequence is synthesized)
tccctctacctagacaaatgctctttccccggatatccacagctctcttcgagtcatttcagtgagaccttctcattccctcctatttgaaattgcaccctccacccctggaattcccct

SEQ ID NO: 682491 - DNA, 120 bp, Artificial Sequence
  ENSG00000187051_24 (sequence is synthesized)
tttctgtttcctcttttgtttttctccatgaaatgtttgcgcttctaaaatactgggtcctttgtccttcatctctcactgaagcgaaagctccagagtagctcccttggtgagtagtat

SEQ ID NO: 682492 - DNA, 120 bp, Artificial Sequence
  ENSG00000187051_25 (sequence is synthesized)
tcaggacataattgttggaaaatgggggtgggggccaagagcctggggctttcagcaggacctgtgtggagaatgcatttgatggagaagagcccagccgctgtaataacctgggaaggg

SEQ ID NO: 682493 - DNA, 120 bp, Artificial Sequence
  ENSG00000187051_26 (sequence is synthesized)
aacgatgaggtctttggcagggccatgggccagggactgagaatggttccagggggagtgaatctgaaatggtgctccctgcctgctacccacagacgagtaccggaagcgagagtgtcg

SEQ ID NO: 682494 - DNA, 120 bp, Artificial Sequence
  ENSG00000187054_0 (sequence is synthesized)
ctgagggagaaggaaagggaccaagagtaggacattgtcaaacatggttttagtctcattttttacaaagaacatgtattaatatgttgtttgtctaattgaaaatgtttatttcttctc

SEQ ID NO: 682495 - DNA, 120 bp, Artificial Sequence
  ENSG00000187054_1 (sequence is synthesized)
tttttttcattctgataaatgtctgtcaatgttttatcacattaagtcatttggggaaacatatagttttatattaatttatttgcctgtactctcagaagtgggtatttaaaaaaacta

SEQ ID NO: 682496 - DNA, 120 bp, Artificial Sequence
  ENSG00000187054_2 (sequence is synthesized)
ttatgtattagtaaattcactatgcttctgtaagatacctgctgttcaacatgaatttatggaatatttcttgagttatatttttattatgtatttagattttaagatctgtttgttttt

SEQ ID NO: 682497 - DNA, 120 bp, Artificial Sequence
  ENSG00000187054_3 (sequence is synthesized)
atctagagcttttatgtgacagtttctttaaaatacttatatacctaccataatcttctttaaattcttaattctagtacattcctaaggtatttctcattctaatctttgtaaccagtt

SEQ ID NO: 682498 - DNA, 120 bp, Artificial Sequence
  ENSG00000187054_4 (sequence is synthesized)
tctcctcctttaacaaaattagtccatactaaaaaaatattgctttcttgttgggactatcctgtctctggctttcttcaaggccttctatgggttgaaacttctctgttcagacttgtc

SEQ ID NO: 682499 - DNA, 120 bp, Artificial Sequence
  ENSG00000187054_5 (sequence is synthesized)
aaactagtttcatttcaactacttgtaatttgtttccttatttctttgagccgtagacttctaatacatctagagatgtcatatagttgattagaaagttgagttcagtgggtgcagacc

SEQ ID NO: 682500 - DNA, 120 bp, Artificial Sequence
  ENSG00000187054_6 (sequence is synthesized)
tgcaagatcatattcttcctcctgtacatgatgtatcggacagtgggatttggcacccgaagcagaaatctgaagccatggatgattgccgttctcattgtgttgtccctgacagtggtg

SEQ ID NO: 682501 - DNA, 120 bp, Artificial Sequence
  ENSG00000187054_7 (sequence is synthesized)
gcagtgaccataggtctcctggttcacttcctagtatttgaccaaaaaaaggagtactatcatggctcctttaaaattttagatccacaaatcaataacaatttcggacaaagcaacaca

SEQ ID NO: 682502 - DNA, 120 bp, Artificial Sequence
  ENSG00000187054_8 (sequence is synthesized)
tatcaacttaaggacttacgagagacgaccgaaaatttggtgagtcaggtggatgagatatttatagattcagcctggaagaaaaattatatcaagaaccaagtagtcagactgactcca

SEQ ID NO: 682503 - DNA, 120 bp, Artificial Sequence
  ENSG00000187054_9 (sequence is synthesized)
gaggaagatggtgtgaaagtagatgtcattatggtgttccagttcccctctactgaacaaagggcagtaagagagaagaaaatccaaagcatcttaaatcagaagataaggaatttaaga

SEQ ID NO: 682504 - DNA, 120 bp, Artificial Sequence
  ENSG00000187054_10 (sequence is synthesized)
gccttgccaataaatgcctcatcagttcaagttaatgcaatgagctcatcaacaggggagttaactgtccaagcaagttgtggtaaacgagttgttccattaaacgtcaacagaatagca

SEQ ID NO: 682505 - DNA, 120 bp, Artificial Sequence
  ENSG00000187054_11 (sequence is synthesized)
tctggagtcattgcacccaaggcggcctggccttggcaagcttcccttcagtatgataacatccatcagtgtggggccaccttgattagtaacacatggcttgtcactgcagcacactgc

SEQ ID NO: 682506 - DNA, 120 bp, Artificial Sequence
  ENSG00000187054_12 (sequence is synthesized)
aaccctcccttaatgaaaagaaatgtcagaagatttattatccatgagaagtaccgctctgcagcaagagagtacgacattgctgttgtgcaggtctcttccagagtcaccttttcggat

SEQ ID NO: 682507 - DNA, 120 bp, Artificial Sequence
  ENSG00000187054_13 (sequence is synthesized)
gacatacgccagatttgtttgccagaagcctctgcatccttccaaccaaatttgactgtccacatcacaggatttggagcactttactatggtggggaatcccaaaatgatctccgagaa

SEQ ID NO: 682508 - DNA, 120 bp, Artificial Sequence
  ENSG00000187054_14 (sequence is synthesized)
gccagagtgaaaatcataagtgatgatgtctgcaagcaaccacaggtgtatggcaatgatataaaacctggaatgttctgtgccggatatatggaaggaatttatgatgcctgcaggggt

SEQ ID NO: 682509 - DNA, 120 bp, Artificial Sequence
  ENSG00000187054_15 (sequence is synthesized)
gattctgggggacctttagtcacaagggatctgaaagatacgtggtatctcattggaattgtaagctggggagataactgtggtcaaaaggacaagcctggagtctacacacaagtgact

SEQ ID NO: 682510 - DNA, 120 bp, Artificial Sequence
  ENSG00000187054_16 (sequence is synthesized)
tattaccgaaactggattgcttcaaaaacaggcatctaattcacgataaaagttaaacaaagaaagctgtatgcaggtcatatatgcatgagaattcaactatttagtgggtgtagtaca

SEQ ID NO: 682511 - DNA, 120 bp, Artificial Sequence
  ENSG00000187054_17 (sequence is synthesized)
acaaagtgatattaaattactggatctagtaacatgaaacacacaacgtaagttatttagaatcactttaatcaaccaataatccttagccaatttataagggacttttatttgtaaagt

SEQ ID NO: 682512 - DNA, 120 bp, Artificial Sequence
  ENSG00000187054_18 (sequence is synthesized)
aatggatctggcttgaaaaatacggtagagatacttagctctttaaatcacgaatgttgaagtaccagtgagactcaatacatatttttgaagatagtccatgggatttttagaatgtcg

SEQ ID NO: 682513 - DNA, 120 bp, Artificial Sequence
  ENSG00000187054_19 (sequence is synthesized)
ttgtcaagggtctccttttaactgagaaactttttgaactcacaaagtgttcaagaaacccttgtataattccctacatttctctcgagctcacaaatacttttttttctttttccttat

SEQ ID NO: 682514 - DNA, 120 bp, Artificial Sequence
  ENSG00000187054_20 (sequence is synthesized)
tcaatcagattttccaaagtacctttccaccataagaaatgaattttctacttctacacccatttgagagacaccaataaaagaaagtcatatgtaggaaacaaagtctgatagtaaaac

SEQ ID NO: 682515 - DNA, 120 bp, Artificial Sequence
  ENSG00000187054_21 (sequence is synthesized)
aagccagagatcttctaactttttttagttataaaacctctaatttttggtgacttttctacacacacacacacatacagtcacatagatattcttatcctacagatataatcagaaaaa

SEQ ID NO: 682516 - DNA, 120 bp, Artificial Sequence
  ENSG00000187054_22 (sequence is synthesized)
tcccgattaatgaattatatatagatagatagagtgattagttaatcaaaactatatatttgttaaaaatttgggagaaggtgatggtaatttcattagtcccaaaacaccggcataaga

SEQ ID NO: 682517 - DNA, 120 bp, Artificial Sequence
  ENSG00000187054_23 (sequence is synthesized)
aatttgacatttcacagatgcacttacatattttgaccacaagggggaaattttgtgcattattattgtagggttaaatgcctgaaaaaaataagcatttactaataccttgaaaaatca

SEQ ID NO: 682518 - DNA, 120 bp, Artificial Sequence
  ENSG00000187054_24 (sequence is synthesized)
aagaacattatgttcctccgtagcaagaaaaattttatgccctcgcattgctacagccaaatagcttataaggcttatggcaatgtcccaactattgcaatcataaaaccctagttttag

SEQ ID NO: 682519 - DNA, 120 bp, Artificial Sequence
  ENSG00000187054_25 (sequence is synthesized)
atgttttctcttttggaccactttgttatatgtggtccacaagagaaaacatactccatcagcaacgtgtctcctgaagtcattaggagagtaaggctcatgtatttcgtaatacaatta

SEQ ID NO: 682520 - DNA, 120 bp, Artificial Sequence
  ENSG00000187054_26 (sequence is synthesized)
aattaaggctttatggaagcaattattctgcttggcaatgcctgtgaaatattatggtctgcaggctggggagtcatttactcatttagcccaaatataagacaaatcattggaacgatg

SEQ ID NO: 682521 - DNA, 120 bp, Artificial Sequence
  ENSG00000187054_27 (sequence is synthesized)
aacttgctttataataatttccctcacatgctattgagaaggcatgaaaataatcctaaaatatctaaaagagatatgcagttcactcataaaacacttgattcataatttagactcata

SEQ ID NO: 682522 - DNA, 120 bp, Artificial Sequence
  ENSG00000187054_28 (sequence is synthesized)
gaattttaaagctgagaagagattgcatgtcacataggccaatatacttatgttatgtttaagaatatgagtatattcttaactatttttattgaattcttaactatttttattgaatca

SEQ ID NO: 682523 - DNA, 120 bp, Artificial Sequence
  ENSG00000187054_29 (sequence is synthesized)
tcagatctgtaaaattttaagtgagagctattgaacctgtattaagatagaaaactcttaagataagaattttaaatgacgagattcatttaggcagctggctgccaattctctgaattc

SEQ ID NO: 682524 - DNA, 120 bp, Artificial Sequence
  ENSG00000187054_30 (sequence is synthesized)
acttcaagacaaagtttcttcttcatatataaatatacataggcatataaattattctatattatggtggtaaaacttaatgctgactttggatgttcagattcaggaaatgatcttaga

SEQ ID NO: 682525 - DNA, 120 bp, Artificial Sequence
  ENSG00000187054_31 (sequence is synthesized)
attatgaactttgtatttttaaactatttggtgcagcatttcattttgggtcacatgtaagcagatattgatatgtcatttttaatctaataaagttggtgatcagagcattctacaaac

SEQ ID NO: 682526 - DNA, 120 bp, Artificial Sequence
  ENSG00000187054_32 (sequence is synthesized)
ggatttggcacccgaagcagaaatctgaagccatggatgattgccgttctcattgtgttgtccctgacagtggtggcagtgaccataggtctcctggttcacttcctagtatttgatcca

SEQ ID NO: 682527 - DNA, 120 bp, Artificial Sequence
  ENSG00000187066_0 (sequence is synthesized)
ctgggcagggcctgcttgctccagctctcaagtctgacttgcatctacactgcgggcaagatgtggctgcaagaccgcatcgccacgttcttcttcccaaaaggcatgatgctcaccacg

SEQ ID NO: 682528 - DNA, 120 bp, Artificial Sequence
  ENSG00000187066_1 (sequence is synthesized)
gctgcgctgatgctcttcttcttacacctgggcatcttcatcagagacgtgcacaacttctgcatcacctaccactatgaccacatgagctttcactacacggtcgtcctgatgttctcc

SEQ ID NO: 682529 - DNA, 120 bp, Artificial Sequence
  ENSG00000187066_2 (sequence is synthesized)
ctgctgggctgccatggggtcactctatgctgagatgacagaaaacaagtacgtctgcttctccgccctgaccatcctgatgctcaacggagccatgttcttcaaccgcctgtccttgga

SEQ ID NO: 682530 - DNA, 120 bp, Artificial Sequence
  ENSG00000187066_3 (sequence is synthesized)
gtttctggccatcgagtaccgggaggagcaccactgaggcctggggagtcggaacagggctaaggagggggaagcaaaaggctgcctcgggtgttttaataaagttgttgtttatttcca

SEQ ID NO: 682531 - DNA, 120 bp, Artificial Sequence
  ENSG00000187066_4 (sequence is synthesized)
gcaagagggagcggggagctttggaaccctgagatgtggcaaggagtagccagggaagggtactggggctcatggggggctctgtcccccgcccagtgctcaacggagccatgttcttca

SEQ ID NO: 682532 - DNA, 120 bp, Artificial Sequence
  ENSG00000187066_5 (sequence is synthesized)
gccactctggtggacttggctttgggtctggggtcttagtgtcttaggcttgagggagaggggcagtgaagaggtgccctcagcctccccattaccccgcctctcctccacagaacccac

SEQ ID NO: 682533 - DNA, 120 bp, Artificial Sequence
  ENSG00000187066_6 (sequence is synthesized)
atcctaggctggcctagccacaagcaagggggctcaggaggggcccacgcggatgtgagggttcatgagtgggtccaggttgggatcgctgtcagctgcggcccggcctaggcgagacat

SEQ ID NO: 682534 - DNA, 120 bp, Artificial Sequence
  ENSG00000187066_7 (sequence is synthesized)
gagggcaaggagggccaggaagcccagcagtcccaagagtagcagcagccccgcccgctggagcagggtcagcggccgcttccgagacccagcccggctcctggggggatgaggggaaaa

SEQ ID NO: 682535 - DNA, 120 bp, Artificial Sequence
  ENSG00000187066_8 (sequence is synthesized)
tcaggtcaggccccagtccctggtggcccccgcggctggagagaagccctggtcaccacccattcctgagcctccatctcctcgtctgtgcctcagggatgatcactcctgcacctgcca

SEQ ID NO: 682536 - DNA, 120 bp, Artificial Sequence
  ENSG00000187066_9 (sequence is synthesized)
ccatagggcgttattgtgcagctcaaaccagctgaggcgcacgactgtattctggaaaccacagtgtgtcagacgtcggggagaattacaaagattagggggtgtcagatcgggaagggg

SEQ ID NO: 682537 - DNA, 120 bp, Artificial Sequence
  ENSG00000187066_10 (sequence is synthesized)
cctcaaagagcctgagttcaaacctcctgtgtaggaggcatagagacagtcccagagagaagcaaaacacagcttctgctgcacagccaaggcctctctgcacagccccagcaccaggta

SEQ ID NO: 682538 - DNA, 120 bp, Artificial Sequence
  ENSG00000187066_11 (sequence is synthesized)
ctgttactccccagaacaagccccttttgtcatgaaaccatcccttccaggacctctggctcccattccctctccaccccttcctggcattccgccctgcctgaccctgtgtaccttagc

SEQ ID NO: 682539 - DNA, 120 bp, Artificial Sequence
  ENSG00000187066_12 (sequence is synthesized)
agccgggccagccaacccaaggccggccgacgtcggtacttgtcatcgtcacagtctccatggaggcctggtgtccggtcatcatcccgcgtatcatacaccttcctaggggctacaggg

SEQ ID NO: 682540 - DNA, 120 bp, Artificial Sequence
  ENSG00000187066_13 (sequence is synthesized)
tggagccactagcatcaatagactcaggaaaactggccgctttggggagggctagggggatcacctgctctcctcagtctgacagaacatctcagaattgtgaggaggtaatggctgtgc

SEQ ID NO: 682541 - DNA, 120 bp, Artificial Sequence
  ENSG00000187066_14 (sequence is synthesized)
ctggattaaggaaaggttcctccgggtgggtctctggatcctcaagctccccctatacaaaccattccaccctcttcctatccttctgcggcctggataactcccaggctcaccgtgagt

SEQ ID NO: 682542 - DNA, 120 bp, Artificial Sequence
  ENSG00000187066_15 (sequence is synthesized)
cctggggaagctgggggccggggggcctggctgtagaaggctggggcagcagaggcgctgtctacctcctctggtccaggggtactgctggctgtgggtggaaagagagccgtcagcaga

SEQ ID NO: 682543 - DNA, 120 bp, Artificial Sequence
  ENSG00000187066_16 (sequence is synthesized)
agcagtgcatagagctcaggggtagagcatgtgactgcagaccaagggagctgtcagcagagcagggaggctaaagcccaaacagtcggtggaagccaccacttaccattaaaactagac

SEQ ID NO: 682544 - DNA, 120 bp, Artificial Sequence
  ENSG00000187066_17 (sequence is synthesized)
cagtcagagaagtcagacgtgttgaggggctcgggctctgggctcaccacctcatcgatctggaggaaggaatctgggtcaccaggctgcctagtattgtccccacccacccatctgact

SEQ ID NO: 682545 - DNA, 120 bp, Artificial Sequence
  ENSG00000187066_18 (sequence is synthesized)
caggtggggcccagggcagatagatggtcagacagacgagggactctcaccagagggaggcccagtcctgcccgggcccagttgactgtggccagcttctctctcagtgcggaggccacg

SEQ ID NO: 682546 - DNA, 120 bp, Artificial Sequence
  ENSG00000187066_19 (sequence is synthesized)
gggccagccaggttggttggggggaagatggggccattgcagctggggcactgatagccggcaggtgccgtgtttcggggtagctgggcagcacgttcattgaggcaggcccagtgaaag

SEQ ID NO: 682547 - DNA, 120 bp, Artificial Sequence
  ENSG00000187066_20 (sequence is synthesized)
agatcttagggcccatgagacaggggagaagagacatgaggaagaagacacttagggctcctagcctagcaatagtccccagaccattgcaggacatatggacacatgtgtgtgtgccag

SEQ ID NO: 682548 - DNA, 120 bp, Artificial Sequence
  ENSG00000187066_21 (sequence is synthesized)
agccttctcctccccgtcctgttccctaaaatgtcagtcttcttggctaccaccatctaagtccaggcaggtgctaccaagctgtccagctcacaggggtaagtttgggtaggaagaaaa

SEQ ID NO: 682549 - DNA, 120 bp, Artificial Sequence
  ENSG00000187066_22 (sequence is synthesized)
cgccacctcccctttcagtcctttcaatgagtcctctctgggcctgcactcatcatattctttgggctaatggctaataatgaacagtttcagaaaaggttcctcgatacacacacaggc

SEQ ID NO: 682550 - DNA, 120 bp, Artificial Sequence
  ENSG00000187066_23 (sequence is synthesized)
acacatatacatgtacacatccctgggcacaaatgtacatgtccttataagcacataatcaaacacaagtggcattccctatatctacactatgggtacaggagccctcacacatacaca

SEQ ID NO: 682551 - DNA, 120 bp, Artificial Sequence
  ENSG00000187066_24 (sequence is synthesized)
tctatacactcacaggtttgctaacaggcaccctcaaccatgcattctcttgcactcccacaacacacctgtgttcatatgttcacatacatacatttacccattcattcaccccaagta

SEQ ID NO: 682552 - DNA, 120 bp, Artificial Sequence
  ENSG00000187066_25 (sequence is synthesized)
cagatcaacacactaacactcatttaaacacacaatgtacattaagtgcctgcaagtacacacatgcactcacaaggagaaacacatatggagctgactcttgcatgagctccttcaaaa

SEQ ID NO: 682553 - DNA, 120 bp, Artificial Sequence
  ENSG00000187066_26 (sequence is synthesized)
actggagctaaggctcttaccccagattcaggtcaaagtcatgacacatatgtctgctgacttcttttagctaactttaatgtgggaaactcacttcctctctgtttagccttggaatca

SEQ ID NO: 682554 - DNA, 120 bp, Artificial Sequence
  ENSG00000187066_27 (sequence is synthesized)
gtggtggatcctgaatatctgaaagcaacatgccggtctggctagctaatagtcacggccaccagcatacccgtaagcttgactggttctcgctgaaacctccagattggcagggcttaa

SEQ ID NO: 682555 - DNA, 120 bp, Artificial Sequence
  ENSG00000187066_28 (sequence is synthesized)
tttttaggaaagaggaactaggagctttaatttttaggaaagacagtgaggcctagaaaggaagaataacttgcctgaacttacacagcaggtaaggaactttaacaggactagaatctg

SEQ ID NO: 682556 - DNA, 120 bp, Artificial Sequence
  ENSG00000187066_29 (sequence is synthesized)
ggctctgagactcgggggactcactgtcctgctgcttgaggagggcctggaaaccagtcaccaagctggcccctgaggctggcctgatccccccgaggtgccaaggcctcaccatagcag

SEQ ID NO: 682557 - DNA, 120 bp, Artificial Sequence
  ENSG00000187066_30 (sequence is synthesized)
acaaggcgggtcgtctctcggctggccaggggtatgttgcacaggcggcaattggggttgtagtcgctatcttggagccattgcaggtaggactggacgatgcactggagtgggagagag

SEQ ID NO: 682558 - DNA, 120 bp, Artificial Sequence
  ENSG00000187066_31 (sequence is synthesized)
atgtcacaactggtgctggggctgctcggcctatcaccccaaggtccgactgtctctttttctctagccacagaggagactcatcctttcgtttgtttaatcaataaatatttattgagc

SEQ ID NO: 682559 - DNA, 80 bp, Artificial Sequence
  ENSG00000187068_0 (sequence is synthesized)
gtcgcagcgcccggggcggctcctcctcgagcctgggaccgccgcgctcccgccgccgccgcgtgctggcgtgactcccg

SEQ ID NO: 682560 - DNA, 120 bp, Artificial Sequence
  ENSG00000187068_1 (sequence is synthesized)
gcgtgactcccggcccgtgccgcgccctcccgcgtccgcagccggctcggcttcctgcccacccagacgtcgcttctcccgggctcccggtgtcggctccgcgcggagggagaggaaatg

SEQ ID NO: 682561 - DNA, 120 bp, Artificial Sequence
  ENSG00000187068_2 (sequence is synthesized)
agtgcggcggcctcgccggcgtcggagcggggttggaagagcgagaaactagatgaggctcaggccctggcgcggagttgcgccgcccgcagacccgacttccagccgtgcgacgggctg

SEQ ID NO: 682562 - DNA, 120 bp, Artificial Sequence
  ENSG00000187068_3 (sequence is synthesized)
tctatctgtgccacgcacagccatggcaagtgcttcaagctgcactggtgctgtcacctaggatggtgtcactgcaaatacatgtatcagcctatgacccctgtggaacagcttccaagc

SEQ ID NO: 682563 - DNA, 120 bp, Artificial Sequence
  ENSG00000187068_4 (sequence is synthesized)
actgagattcctgccaggcctcgggaacccacaaacaccattcagatctcagtctcgctcaccgaacactttttgaaatttgcatctgtcttccagcctccccttccccctgactcaccg

SEQ ID NO: 682564 - DNA, 120 bp, Artificial Sequence
  ENSG00000187068_5 (sequence is synthesized)
aggtactgtatgatttcagacctttttattgacaactatcaggttaaatgtattaatgggaagatgtgttatgtgcagaagcagccggcaccacattcccacagaatgagccctgaggag

SEQ ID NO: 682565 - DNA, 120 bp, Artificial Sequence
  ENSG00000187068_6 (sequence is synthesized)
gtctctgcacacgatgccttaatttcaaaagagagcaatacaccaaaaatagatcactgctcttctccctcaagttctgaggactctgggatcaatgcgattggggctcactatgtggaa

SEQ ID NO: 682566 - DNA, 120 bp, Artificial Sequence
  ENSG00000187068_7 (sequence is synthesized)
tcgtgtgacgaggacacagaagaaggagcagaactgagttcagaggaagattacagtccagagagcagctgggaaccggatgagtgcacccttctctccccctcgcagtctgacctggaa

SEQ ID NO: 682567 - DNA, 120 bp, Artificial Sequence
  ENSG00000187068_8 (sequence is synthesized)
gtgattgaaacgatagaaacgactgtgtgagagtccagacaggaagccacagcctcggacccacgccgagcttttgtacctttgtctggtggatccttttttccaatgctgttgatattt

SEQ ID NO: 682568 - DNA, 120 bp, Artificial Sequence
  ENSG00000187068_9 (sequence is synthesized)
tctacccaccccgccccgctccaaccaacaaccgtagcagttcagtggtatgctgattagcttctctccgtcttacaactaagacattctttttattataaacagttttcttttgtatcc

SEQ ID NO: 682569 - DNA, 120 bp, Artificial Sequence
  ENSG00000187068_10 (sequence is synthesized)
tgacttactttctatgtagcatctggtgtcatgaattgtgaccccgccttaatttcactgggagatttgaaggcggtgaagtgatggtcgcagagaatcttggatcagattgaggaggta

SEQ ID NO: 682570 - DNA, 120 bp, Artificial Sequence
  ENSG00000187068_11 (sequence is synthesized)
ccgaaagggaaggagccggtgttttctcggtagccagtccttcacagagactcttgccattccctttggcatgttcacaggcactcccgtcctgtcctgcttgtcctacgcaagtagcac

SEQ ID NO: 682571 - DNA, 120 bp, Artificial Sequence
  ENSG00000187068_12 (sequence is synthesized)
tccctactgagtgtgcactggtagatgccgtttcttcccttccccttctccccacacctgcactgggtctggatcagagctgcctcggcttacttctgggaggtcactggaggccagctc

SEQ ID NO: 682572 - DNA, 120 bp, Artificial Sequence
  ENSG00000187068_13 (sequence is synthesized)
agcccatggtttgtggccagtgtctgtacaaggctccgtgactggggctgagctaaacattcacatgagaagagatgacctcatctgtctcatgctcaatccagccttagctgagcacct

SEQ ID NO: 682573 - DNA, 120 bp, Artificial Sequence
  ENSG00000187068_14 (sequence is synthesized)
gtcccctgcagggggctgtggggacacagcatgaataagacctgattcccaccatgaaggggcccacagtcctatatatgacacattcaactcatggcacccaaaaagctctgggaaccc

SEQ ID NO: 682574 - DNA, 120 bp, Artificial Sequence
  ENSG00000187068_15 (sequence is synthesized)
aggggaaggatgaggtttacttggctggggctagctggggaatgtgtttcagcatttgagctggcttcttggtgggttccccaacatttttctgcttttaattgttcttcaagtctggga

SEQ ID NO: 682575 - DNA, 120 bp, Artificial Sequence
  ENSG00000187068_16 (sequence is synthesized)
aaaactcttaggaagttatataggtatcacatttaggtggcagccacatctgacatcttaaggaaaaaaaataaattaatagttttagttagcatggaaatgctacagacagaagccctt

SEQ ID NO: 682576 - DNA, 120 bp, Artificial Sequence
  ENSG00000187068_17 (sequence is synthesized)
tagggattaggactgaatctaataggtttgattaattctgcttcatttggttgtatgaagcattcgtatggtttaagtgaggaatggattagaattcagtgtgatgcatggatttttatg

SEQ ID NO: 682577 - DNA, 120 bp, Artificial Sequence
  ENSG00000187068_18 (sequence is synthesized)
cagctgcaaaagcagttgaaatagtttgctgctaagtcaggagaaaatatccagtgtaatagccattcactttcccacacagtctgtctgttgtatgtgttctctcccctcacatgcaca

SEQ ID NO: 682578 - DNA, 120 bp, Artificial Sequence
  ENSG00000187068_19 (sequence is synthesized)
aaatagtgactaattctttcttatttagctctcttcagaattctacttctactctccatttataccaggtattcttgtgagtcagttaactgctatttctccaaaccttctatccatgag

SEQ ID NO: 682579 - DNA, 120 bp, Artificial Sequence
  ENSG00000187068_20 (sequence is synthesized)
gcatagtttcaaatcctggaaattttaagtatggcctaatgagaacatcagagttggagacagaacagtacttccatcctaactatccagaagcgcactctcaggccattgtgctctgag

SEQ ID NO: 682580 - DNA, 89 bp, Artificial Sequence
  ENSG00000187068_21 (sequence is synthesized)
aactatccagaagcgcactctcaggccattgtgctctgagattcccttgtgctctggcaccattatggtacatctctacgtcacattaa

SEQ ID NO: 682581 - DNA, 120 bp, Artificial Sequence
  ENSG00000187068_22 (sequence is synthesized)
gtgttctcccctgaagcctccatttggcatcattcacaaactactcaaggaagaatttgctttcccagttgtatgtataatttaagtcgtttactagatagaacttttttttaggtttag

SEQ ID NO: 682582 - DNA, 120 bp, Artificial Sequence
  ENSG00000187068_23 (sequence is synthesized)
atggccaagacatctatatggtttagaaggcagagtatacattttcctttgcaaacagtatgagttaaaactttctatgctaaatgagaatgcggcataaagtctccacttactgaaatt

SEQ ID NO: 682583 - DNA, 120 bp, Artificial Sequence
  ENSG00000187068_24 (sequence is synthesized)
taaagattcaacaagacaaaccgagaagggggtcagaggagctctaggaaaggcccaggagagggcagttggaggcaggtgtgagcatgaggagcttccccctgccagggcatggctcag

SEQ ID NO: 682584 - DNA, 120 bp, Artificial Sequence
  ENSG00000187068_25 (sequence is synthesized)
gtggcacagggacatctgatgaaccctgcccgaggttctcggtgcctcccgtgcatgagtggctcactgaaggcaggtgtggaagccaaatgcctgcaagccgtgtgtcaggccacagca

SEQ ID NO: 682585 - DNA, 120 bp, Artificial Sequence
  ENSG00000187068_26 (sequence is synthesized)
gtgcagtcatgcatcacgcactcaggtttgtaacagcaacaccagggccctgtctagattcaccctgtgggtgagcccgttctccagatgggcgtataaaggggctttctcctctacacc

SEQ ID NO: 682586 - DNA, 120 bp, Artificial Sequence
  ENSG00000187068_27 (sequence is synthesized)
atacgtggtcacggggccacatttctgcagctggctcagtggcaggcttgggccgtctctcagtaccatctaagacttctgtctaggttcctgtttttttagactcctgaactgccattc

SEQ ID NO: 682587 - DNA, 120 bp, Artificial Sequence
  ENSG00000187068_28 (sequence is synthesized)
tgattagacacaattttaatggaatttttggatttaataatagttgataatcaccttatgtatttgcacaatctctttataattaaaaactcgctaagcttcacttgctactatctacta

SEQ ID NO: 682588 - DNA, 120 bp, Artificial Sequence
  ENSG00000187068_29 (sequence is synthesized)
tatagaattagagacattccattggattctaagcatcagacactcctggatctcaaaatgaccttttctaaataagcacaagatttatttttgtcctagcactgttgataacactctgaa

SEQ ID NO: 682589 - DNA, 120 bp, Artificial Sequence
  ENSG00000187068_30 (sequence is synthesized)
atatgttattgaactggaattgtttctttatgcttgcattccaaaaccaactgaaacagattgtagtttcactttaaattctaggcctgttctatattatgtgaaggaattctctgtaac

SEQ ID NO: 682590 - DNA, 120 bp, Artificial Sequence
  ENSG00000187068_31 (sequence is synthesized)
gctgatactatgttgctaatttgtgtacttacagacactttagaaaatgtttagactgcaacatgcactataacattgaactcagtcacatgaagtggttaacacttgcacactgactga

SEQ ID NO: 682591 - DNA, 120 bp, Artificial Sequence
  ENSG00000187068_32 (sequence is synthesized)
cagatatgaaagctgtatactttggacccagtaatatgctcattggagcaagggttgggctgtgtggatggataaactgctttcttgggtttacatggaaacctggtaccactcctactt

SEQ ID NO: 682592 - DNA, 120 bp, Artificial Sequence
  ENSG00000187068_33 (sequence is synthesized)
ttggaaagttggtataaaagctattaggtagaagcttaattccactaaatgtagaatttagttttcttctctaaccaagattttagaagtttcaagtttcaaatatgcttataacttttc

SEQ ID NO: 682593 - DNA, 120 bp, Artificial Sequence
  ENSG00000187068_34 (sequence is synthesized)
caagaaatgatgattacagtgcttttgtggttacaactgtttggtatattaaaaaataagggtttactatcacatctaggtcttttttactatgtcatttttaagatatgaaataagaat

SEQ ID NO: 682594 - DNA, 120 bp, Artificial Sequence
  ENSG00000187068_35 (sequence is synthesized)
ctgaggacagccctgaagaacagtcctttcctgggaggggaagacttgtaattcaaggtcatacaatacaaaataaaacaaaaacaaaagcaccaagagcagaacaaaacaacgtagttg

SEQ ID NO: 682595 - DNA, 84 bp, Artificial Sequence
  ENSG00000187068_36 (sequence is synthesized)
aaaacaaaagcaccaagagcagaacaaaacaacgtagttgctttcctgaaatactttttggatttgattctatcttgggagtgg

SEQ ID NO: 682596 - DNA, 69 bp, Artificial Sequence
  ENSG00000187068_37 (sequence is synthesized)
gatctcatgacctcaccacgcccggccggctttacttctaatcctccacttcttggtctatttgaacca

SEQ ID NO: 682597 - DNA, 120 bp, Artificial Sequence
  ENSG00000187068_38 (sequence is synthesized)
ctttacttctaatcctccacttcttggtctatttgaaccatcacaagtattttgggaccgataacaaaccccttttatgctaatttaattcttgacttgggtaataggtgcacctggata

SEQ ID NO: 682598 - DNA, 120 bp, Artificial Sequence
  ENSG00000187068_39 (sequence is synthesized)
atttataaagctgtccatagatctaagtttagtggtacagatactactgggcaggagaaaaagcacaagttaaaatatttctacagtcagctcttaatattcccacatcttgtttgcaaa

SEQ ID NO: 682599 - DNA, 120 bp, Artificial Sequence
  ENSG00000187068_40 (sequence is synthesized)
attttatggtcacgttctggcttttttacatgaggaaaacaaagttttaacagttttctcttctgtccccttctccagaggaggtgtgaaccagaactgaggaggccagttatattttag

SEQ ID NO: 682600 - DNA, 120 bp, Artificial Sequence
  ENSG00000187068_41 (sequence is synthesized)
gcttttcagtagtacgattttgtcctctcccactgaggaggagggaagaagggggaagccagtgggagttccacacacgtggtcagtgctgtaagttcccggatatcagtgtctctcaca

SEQ ID NO: 682601 - DNA, 120 bp, Artificial Sequence
  ENSG00000187068_42 (sequence is synthesized)
tcaacacagaaatagggcacttctcaacattaattttggaattattcaccatttaaaaattgtcactgctctttttcattactgtagataactgagagttagctgttctaggaaaaggcc

SEQ ID NO: 682602 - DNA, 120 bp, Artificial Sequence
  ENSG00000187068_43 (sequence is synthesized)
atgtttcagttagtgctatgacttcttttttcgattaaggttgaagcagtgttctcttagtagcctgaacacttctcaaagcgacttatcactagcggctttaatattgagcttctatat

SEQ ID NO: 682603 - DNA, 120 bp, Artificial Sequence
  ENSG00000187068_44 (sequence is synthesized)
cgttgtgtccacctcactttttaaggctgttcatacctggcaatattcacttactctgctatttttaaaaactattttaaagttttaagcacaatgttgactcttctgtaatttcctaaa

SEQ ID NO: 682604 - DNA, 120 bp, Artificial Sequence
  ENSG00000187068_45 (sequence is synthesized)
attatattgttttcctacagacagctcaactttccttgatatgtaacactttaggaaaataactgccttgtaaaataaacgtgattttttttttcttttataccagaacaaatctgctgt

SEQ ID NO: 682605 - DNA, 120 bp, Artificial Sequence
  ENSG00000187068_46 (sequence is synthesized)
tttggagtgtacccaaccccaaaaccaaaactcacgtttgcaaagtgtgaaacatttatatatcaggtctttcctacgtgctaggaaatagcgtatggccattaccccattaaaccttta

SEQ ID NO: 682606 - DNA, 120 bp, Artificial Sequence
  ENSG00000187068_47 (sequence is synthesized)
caagacctcaatgaggtgcagataaactgtactgtccgcagtatctactcagagtcaccactcatgataactcccagaactctggctacattgggtttatagcaaataaaacttgatacc

SEQ ID NO: 682607 - DNA, 120 bp, Artificial Sequence
  ENSG00000187068_48 (sequence is synthesized)
ccccccccaccaccaccaaatagcatttatttcacacgcagttacagcctttctgttcggcttacacgtgtcatgtggggcagtgttggctgcagttctaactgaagatcaggcatcgag

SEQ ID NO: 682608 - DNA, 120 bp, Artificial Sequence
  ENSG00000187068_49 (sequence is synthesized)
ggaggctgctgcccggcagagcttgggggggtcgcttggtcaccaagactcaggggccaggcctcagcgcggcaagtccatactcagaaaagaacagcttcaagggttggagtctattga

SEQ ID NO: 682609 - DNA, 120 bp, Artificial Sequence
  ENSG00000187068_50 (sequence is synthesized)
acaaccttcctaggaactgctaaataaagtcattatcagtaataaaatccttgttaatattaattatagttcaatggctaccttaagctttctatgcataatctccacagcaaccctgtg

SEQ ID NO: 682610 - DNA, 120 bp, Artificial Sequence
  ENSG00000187068_51 (sequence is synthesized)
agggagattaaagcagccccatttcacagatcaggaaaagagctcaagaagtccacatctttacccagtgtggcacagctcgtacatgagtggcagtcagggtttgaacccggtcacttt

SEQ ID NO: 682611 - DNA, 120 bp, Artificial Sequence
  ENSG00000187068_52 (sequence is synthesized)
ggctctagagtccgcactcttggcccattgtctgcattactccatccccctaacccagcagataccttcccacagactagtgcctcgtctacctcagtgcacctggtcccaacacagtgg

SEQ ID NO: 682612 - DNA, 120 bp, Artificial Sequence
  ENSG00000187068_53 (sequence is synthesized)
aggagaaacactgacaggcttccctctttgtccccttctctgtcctccatacagtgcccccccaccccgcaccctataccatgtctctgcaaatatctctatgctctgatgaggccattg

SEQ ID NO: 682613 - DNA, 120 bp, Artificial Sequence
  ENSG00000187068_54 (sequence is synthesized)
cttcttccatgtttaatcacctcttgactagcattcaagactagctctgcctttcctaaagctaactgatcttttaaagtgattcctgcagacagcgcatctcatctgcgtgtgcactct

SEQ ID NO: 682614 - DNA, 120 bp, Artificial Sequence
  ENSG00000187068_55 (sequence is synthesized)
actgttttaactctctacctaattgtattgccaagtcctagaaggcatctcattgtagcctcttacaaatgctgactgcacacacttttattctgcaataaactttaatttagcatctca

SEQ ID NO: 682615 - DNA, 120 bp, Artificial Sequence
  ENSG00000187079_0 (sequence is synthesized)
tcgcagttaccaccaaacccaggaggagactctccctggaaaacttcccttccctttcggtttattttcttgaaaaggctccaggcttcggcttggaaaatcccaccgccaaaattgagc

SEQ ID NO: 682616 - DNA, 120 bp, Artificial Sequence
  ENSG00000187079_1 (sequence is synthesized)
ccagcagctggagcggcagtgagagccctgccgaaaacatggaaaggatgagtgactctgcagataagccaattgacaatgatgcagaaggggtctggagccccgacatcgagcaaagct

SEQ ID NO: 682617 - DNA, 120 bp, Artificial Sequence
  ENSG00000187079_2 (sequence is synthesized)
ttcaggaggccctggctatctatccaccatgtgggaggaggaaaatcatcttatcagacgaaggcaaaatgtatggtaggaatgaattgatagccagatacatcaaactcaggacaggca

SEQ ID NO: 682618 - DNA, 120 bp, Artificial Sequence
  ENSG00000187079_3 (sequence is synthesized)
agacgaggaccagaaaacaggtgtctagtcacattcaggttcttgccagaaggaaatctcgtgattttcattccaagctaaaggtaacaagcatggatcagactgcaaaggataaggccc

SEQ ID NO: 682619 - DNA, 120 bp, Artificial Sequence
  ENSG00000187079_4 (sequence is synthesized)
tgcagcacatggcggccatgtcctcagcccagatcgtctcggccactgccattcataacaagctggggctgcctgggattccacgcccgaccttcccaggggcgccggggttctggccgg

SEQ ID NO: 682620 - DNA, 120 bp, Artificial Sequence
  ENSG00000187079_5 (sequence is synthesized)
gaatgattcaaacagggcagccaggatcctcacaagacgtcaagccttttgtgcagcaggcctaccccatccagccagcggtcacagcccccattccagggtttgagcctgcatcggccc

SEQ ID NO: 682621 - DNA, 120 bp, Artificial Sequence
  ENSG00000187079_6 (sequence is synthesized)
cagctccctcagtccctgcctggcaaggtcgctccattggcacaaccaagcttcgcctggtggaattttcagcttttctcgagcagcagcgagacccagactcggctgatttaaactgca

SEQ ID NO: 682622 - DNA, 120 bp, Artificial Sequence
  ENSG00000187079_7 (sequence is synthesized)
atattcaagatgatgctggggctttttatggtgtaaccagtcagtacgagagttctgaaaatatgacagtcacctgttccaccaaagtttgctcctttgggaagcaagtagtagaaaaag

SEQ ID NO: 682623 - DNA, 120 bp, Artificial Sequence
  ENSG00000187079_8 (sequence is synthesized)
tagagacggagtatgcaaggtttgagaatggccgatttgtataccgaataaaccgctccccaatgtgtgaatatatgatcaacttcatccacaagctcaaacacttaccagagaaatata

SEQ ID NO: 682624 - DNA, 120 bp, Artificial Sequence
  ENSG00000187079_9 (sequence is synthesized)
tgatgaacagtgttttggaaaacttcacaattttattggtggtaacaaacagggatacacaagaaactctactctgcatggcctgtgtgtttgaagtttcaaatagtgaacacggagcac

SEQ ID NO: 682625 - DNA, 120 bp, Artificial Sequence
  ENSG00000187079_10 (sequence is synthesized)
aacatcatatttacaggcttgtaaaggactgaacatggttatttatatatatagatatctgtatatacacacacacatatgtgcacacacacactctctctccattatcgaacgactgac

SEQ ID NO: 682626 - DNA, 120 bp, Artificial Sequence
  ENSG00000187079_11 (sequence is synthesized)
tgtaaacctcaccacacagggtggtgccctggccccgaggtcaccccgacttttctaaatcttgtttgagtgaagtcattttttcatgtgttcatactatcattgtagctgtgaagttct

SEQ ID NO: 682627 - DNA, 120 bp, Artificial Sequence
  ENSG00000187079_12 (sequence is synthesized)
ggtgaacctgaacaacccaagtctctctctgcagagccctgtttctaattgtggtagaaaatattgagacagagcatttgccatgggacatttacagcctttatacaaatgtatttagtt

SEQ ID NO: 682628 - DNA, 120 bp, Artificial Sequence
  ENSG00000187079_13 (sequence is synthesized)
tttttccaacataaaattcttgttttaagatacaagtaaaattaatctttaaatataaatgtaaattagtacacaaaactaagaatctttagacttatctttgtaactaattagggtgga

SEQ ID NO: 682629 - DNA, 120 bp, Artificial Sequence
  ENSG00000187079_14 (sequence is synthesized)
tggaagttatgaaagaatgtaattcactaaattattttttaaatgaaacctttttttttctttttgaaaccaaatgttaaactatagccttaagaaatgcttggtagaagtgtcctaatg

SEQ ID NO: 682630 - DNA, 120 bp, Artificial Sequence
  ENSG00000187079_15 (sequence is synthesized)
agacaaatttgtacttttatcctcaaggttaacactaatctcctaatccattaaactcttgaacaggtattacaaaggaagaaaacttcaccccttatccttaacatatatagtatattt

SEQ ID NO: 682631 - DNA, 120 bp, Artificial Sequence
  ENSG00000187079_16 (sequence is synthesized)
aaaaaatataaaattgtattgtactaatgtgatgatggattatttaatgaaaaagaaaaaatggctctttttgcaataagtagatacatactgaaaaaatctaaacttacaatgtttata

SEQ ID NO: 682632 - DNA, 120 bp, Artificial Sequence
  ENSG00000187079_17 (sequence is synthesized)
gtcttgtgtgtgcagttatattttatatggacgaccaaattttttattaagatgagtaaatatttgaaccactgaattttaataacaaaattttaaaattggcatgaatacggaatactg

SEQ ID NO: 682633 - DNA, 120 bp, Artificial Sequence
  ENSG00000187079_18 (sequence is synthesized)
cactgtgagatgcaaagtatacagaatctgtggctgggagaaaatttcatcaaatagacaagtaaaaggctcatcagttttagcatctctgctccccagaaaattgtaagcatcctcacc

SEQ ID NO: 682634 - DNA, 120 bp, Artificial Sequence
  ENSG00000187079_19 (sequence is synthesized)
agcctgtggatacattctttatttctagtgacccaatatgcatattaacctgctataactagggctatatgtgtaggtatgtgtatacatatacacaaatgcacatatagagttaacaca

SEQ ID NO: 682635 - DNA, 120 bp, Artificial Sequence
  ENSG00000187079_20 (sequence is synthesized)
tttagtgaacacttgtttagtgtcactcagtttgctaggtgctgatatgtacgtatatctcaatgtgtctgtagacttagatacatcctcttgaagcacatccatttctttagcgtctct

SEQ ID NO: 682636 - DNA, 120 bp, Artificial Sequence
  ENSG00000187079_21 (sequence is synthesized)
cagtaagttacagtacttgtttgacttaggtttaagaggcccagctacctatctctgaccttttcaaataggctcatttgggagattcttttgccaggagagattcaactttccaatcta

SEQ ID NO: 682637 - DNA, 120 bp, Artificial Sequence
  ENSG00000187079_22 (sequence is synthesized)
agtattccagagcattgcccaggcagagttggtttgatgtggccagatgttttgagttatttcccttaagtgtttcactggggagagaacagggagtgctcctccagcttcccaaagaaa

SEQ ID NO: 682638 - DNA, 120 bp, Artificial Sequence
  ENSG00000187079_23 (sequence is synthesized)
tatgtttttgtaagtggtaggaacatgtgcacacaatagaacatgaaataagttttttaacttgtaaaacatgtcaagatttttccaccaagctagaaaataaaaaacttagttctacca

SEQ ID NO: 682639 - DNA, 120 bp, Artificial Sequence
  ENSG00000187079_24 (sequence is synthesized)
catccaattaacttacacacccccttccctgtctcaacacctgctttgaccctgcttttctattattacatcagtcagcatcttgtggtccctaacatgaggatgtggctggctcgtggg

SEQ ID NO: 682640 - DNA, 120 bp, Artificial Sequence
  ENSG00000187079_25 (sequence is synthesized)
tgagaggcttcacattctgttggaaaatggatttaatccctaaaaaaagccttgccccattgggtcttcccagtaaatgttgagaggtacggtaggttgagtgtggtttagccttctggc

SEQ ID NO: 682641 - DNA, 120 bp, Artificial Sequence
  ENSG00000187079_26 (sequence is synthesized)
tgtgttatttatccatgcatgtttgctttttttggcctattttgtggctctgtattttagtccatgtgctcgtggctgtgcctgtgtaacctgcctggtagccatgcgttatgtattaag

SEQ ID NO: 682642 - DNA, 120 bp, Artificial Sequence
  ENSG00000187079_27 (sequence is synthesized)
aactgtccccatttggaatgcccattccttctagaaaccagttggacagtgctcctctgcccttcataaacagactactgttgggtccctgattccaggctggcctgtgaaggattgccc

SEQ ID NO: 682643 - DNA, 120 bp, Artificial Sequence
  ENSG00000187079_28 (sequence is synthesized)
caggtgtcccctttcacggttgtcacatttacagtgacttctgttgaacacccctcttagggatgtttcttttgctcttatttcctgcatctttccttaagggaagccccatcctctccc

SEQ ID NO: 682644 - DNA, 120 bp, Artificial Sequence
  ENSG00000187079_29 (sequence is synthesized)
aggaccaggagtttatgaccaggcgagcacaaatggctaaaagccaagctgtcctagaacttcagtgggagagctgtctggttcatattctacccaggaatggtacttttcagtgcagcc

SEQ ID NO: 682645 - DNA, 120 bp, Artificial Sequence
  ENSG00000187079_30 (sequence is synthesized)
aggagggctcttgggatttcctttccaaagcacaaaaatactgggacccaagaagaacagctagaggacaactctgttggcacagagacggggacagcccagtctgctgacctcacaggg

SEQ ID NO: 682646 - DNA, 120 bp, Artificial Sequence
  ENSG00000187079_31 (sequence is synthesized)
tcagctgggcccccctggtgcttcaccacctgcatcctcttgctcagaatgcctttgcagttgagttttctgggtttctatgattgaccttgaggtttactccttgctcttacaacattt

SEQ ID NO: 682647 - DNA, 120 bp, Artificial Sequence
  ENSG00000187079_32 (sequence is synthesized)
ctaaggatttttaaaagtttacttcttgtcttgttcttctaaagctttctccaggacagatattttccctgtcttaaccactggtccagtcatcccagtgggcttctctttgtctctccc

SEQ ID NO: 682648 - DNA, 120 bp, Artificial Sequence
  ENSG00000187079_33 (sequence is synthesized)
agattagacctttgggtgagattggcatcacaacatctaatctgagtctgtcttttgtccttcattctgtatggcagtctccctttgttataaaagctttctaaagcatactaaagaagc

SEQ ID NO: 682649 - DNA, 120 bp, Artificial Sequence
  ENSG00000187079_34 (sequence is synthesized)
cttcccagagccccgtcttgcttctcttccaggtgctctatcccctcgagaccctctggtgccaggcttgcttcacggccatcttgtgttgtcactgcagagtttggaggccagttttcc

SEQ ID NO: 682650 - DNA, 120 bp, Artificial Sequence
  ENSG00000187079_35 (sequence is synthesized)
acagcctaaacagggaggagctgcagaatggggctctggtctctgggcattcatttccctcatagaggctgagaataaaacaaggacttattcacacatgttctagaaccccagaatggc

SEQ ID NO: 682651 - DNA, 120 bp, Artificial Sequence
  ENSG00000187079_36 (sequence is synthesized)
gctgtcctttgcactgtaggagatttactaatatccctggcctctacccagtagtaccactagcacctattccccacccagcgtgtctccagatattgtcaaatatcccatcgggtgcaa

SEQ ID NO: 682652 - DNA, 120 bp, Artificial Sequence
  ENSG00000187079_37 (sequence is synthesized)
aatgatccctggtcaagatctgttgcccaagatgttacaggtcacaatgaccacatttgaaattgttttccctttcattttaccctgtgaaagcatctctcctagagccttgcaagaggc

SEQ ID NO: 682653 - DNA, 120 bp, Artificial Sequence
  ENSG00000187079_38 (sequence is synthesized)
aggtgacattgtgtccatatttcttcctgtttcagaacttctgtttcacaacaatttctctctcgctacaagtattctttcactcagcactggggaagttgggaacagctggtcaccatc

SEQ ID NO: 682654 - DNA, 120 bp, Artificial Sequence
  ENSG00000187079_39 (sequence is synthesized)
atccctttaatcaactcacacctgtttaaagagtgtttctgatttgaccttcatcccttagtttactggcgttaaaaaaagtctcagcaattttcattatttctcgtgggtctcattatc

SEQ ID NO: 682655 - DNA, 120 bp, Artificial Sequence
  ENSG00000187079_40 (sequence is synthesized)
aaacctttacttatttcggcatatttcctctgggcttcttctagtttctgccttacaagcaatgctgttctgtaaatttattgaaacctctggaacatttcacctttagagatggaggat

SEQ ID NO: 682656 - DNA, 120 bp, Artificial Sequence
  ENSG00000187079_41 (sequence is synthesized)
ggaaggattggtaccagaagagggctaagatacgttttctgtcttgagctgaaagcacagtctactctccttcgttttgtcgatgagaaagttgaggccagaggggaggtgacatgttta

SEQ ID NO: 682657 - DNA, 120 bp, Artificial Sequence
  ENSG00000187079_42 (sequence is synthesized)
gagtcacccagctggttagtgacagaaaaagcgtgagagttgtctaggattcctgccactttggtccctggcctctcctgggggaggctgctgttcttaggtgctctaagcttaatccct

SEQ ID NO: 682658 - DNA, 120 bp, Artificial Sequence
  ENSG00000187079_43 (sequence is synthesized)
cagaatgtgtggacaggtcagcttagaagagatggggagattcaggatccccctgtgccagagcacagcctcaccggatgctgcttcccacactgaagtgtcctgtccgaccattgctat

SEQ ID NO: 682659 - DNA, 120 bp, Artificial Sequence
  ENSG00000187079_44 (sequence is synthesized)
ctgaggcatccacaagcaggtaggaaagctggcgagccattttacttcctgaggacaattccccagccacaggctctgagtcaaatttctatttggtaagcatcctagcagcaaagtcct

SEQ ID NO: 682660 - DNA, 120 bp, Artificial Sequence
  ENSG00000187079_45 (sequence is synthesized)
gcactcagaccagccaaaaaacagcccccattccaagtacttggtgtcaaaagtccccgaacgacttttaaacccaagtcttcttaaggtttcagtactgtggtggctttagcagttgtt

SEQ ID NO: 682661 - DNA, 120 bp, Artificial Sequence
  ENSG00000187079_46 (sequence is synthesized)
tttgtgcaactataaattatttaaatcatctgagatgacagtcaattttacaaaccaggtacatattaatttgtataattttgtatatgctctggtacactacctgaactaacgaagggt

SEQ ID NO: 682662 - DNA, 120 bp, Artificial Sequence
  ENSG00000187079_47 (sequence is synthesized)
agaactaattctgtttgtcagtgttcacacctgtaacattaggaggatatgtctgcattgcttatttctttatgttggtgtttctgtggcaaagccctgcacatggcatttctgaaaagc

SEQ ID NO: 682663 - DNA, 120 bp, Artificial Sequence
  ENSG00000187079_48 (sequence is synthesized)
cttaaatctttaagatgttgcatgtagggtatgcagtgcaaaaggctgcctcagaactgtgagcccttttgtaagctggaagcatttctcttactactgttacttttgtaggaagttttc

SEQ ID NO: 682664 - DNA, 120 bp, Artificial Sequence
  ENSG00000187079_49 (sequence is synthesized)
aattcagagctgccaaagtgttcccgtaagcagtgccttagtaataccttagtcatgccgccagccttttcttacaccaattcctaatgttcatttacgaattggcccaatattggaaac

SEQ ID NO: 682665 - DNA, 120 bp, Artificial Sequence
  ENSG00000187079_50 (sequence is synthesized)
aaaacaagcaaaaattgtcttcatttttgttttgtaagcccattttttctccagttctataggaaactgactgcttggtgtaaaatccgaaactggacacaagtcagttctttcaccaca

SEQ ID NO: 682666 - DNA, 120 bp, Artificial Sequence
  ENSG00000187079_51 (sequence is synthesized)
ctcaaatgtatataccaaaacaaaaggttgcaacttcatagtttactatgaaaagcaaattgtactttttaatgttgccttttaaattcatgaccaaatacttagctatttgtgaatctt

SEQ ID NO: 682667 - DNA, 120 bp, Artificial Sequence
  ENSG00000187079_52 (sequence is synthesized)
ctgcactctagcatgaaagtgcctttggtttgagattccagcttagaaaagtgctgccataataacgataatttgtagagagaccaaaaatattttgagatcaccgtaatgcctttggtt

SEQ ID NO: 682668 - DNA, 120 bp, Artificial Sequence
  ENSG00000187079_53 (sequence is synthesized)
taccgggatgagtaaccaaccacaggcctctgttcacaagagcacgacgtggtccccgcctgctgctagtctgtctgccactgggggcctcccaacatccatagcacacttcagcggaag

SEQ ID NO: 682669 - DNA, 120 bp, Artificial Sequence
  ENSG00000187079_54 (sequence is synthesized)
gaccccagaaactgttgtgtttgtgtgtgctgatgacctagtgtgtcatttcacctcgtcacccagccctgcgtccggatgaggggacttctgcacaaatgacagaatctcggctggtgg

SEQ ID NO: 682670 - DNA, 120 bp, Artificial Sequence
  ENSG00000187079_55 (sequence is synthesized)
acagatactacagctttctcctcctccttgtgttcgtgttcagtctctgtggagactttcttttccattcaaatgacagtgcgcacttatctggtttacacaatgataccattttgaaag

SEQ ID NO: 682671 - DNA, 120 bp, Artificial Sequence
  ENSG00000187079_56 (sequence is synthesized)
ttggaagcctcaaactgagacgacagtgcagaacaaaacaaaagtgagttagggtcgttaaaattgaagtgttcttcttagggcaaacatgttgactccgagtattgtgtatgaatgtgc

SEQ ID NO: 682672 - DNA, 120 bp, Artificial Sequence
  ENSG00000187079_57 (sequence is synthesized)
tacgagaaacttccaaagagcaccattcacaatttggcattttcaaagaatgttccagccctcaaaggggcaactctttaaagtccttgttggcttttatccaaaccttgtagaaattgg

SEQ ID NO: 682673 - DNA, 120 bp, Artificial Sequence
  ENSG00000187079_58 (sequence is synthesized)
gaaagctgatagaggtaaggaagacgagtgaaaaggacaagaaggccaaacaccagccaaaaagaaactaggaaaaaaagattttctttgctaatatagatgtaaaaataacatcagaca

SEQ ID NO: 682674 - DNA, 120 bp, Artificial Sequence
  ENSG00000187079_59 (sequence is synthesized)
tctttgaaaattagcctctaaactcttaatacatacgttctgtgtgtctctacctggcgtctttaagaatatcctctctgggctctgaaattttaggagtgattcttatccactccaagt

SEQ ID NO: 682675 - DNA, 120 bp, Artificial Sequence
  ENSG00000187079_60 (sequence is synthesized)
tgtaagtatttgtagaaatttgtgcaaacaaacaaaaactatcaaatgaaaagaaaatgtactcaacctaacttatagttagcagctggaattctcaactcttccctgccagcactatac

SEQ ID NO: 682676 - DNA, 120 bp, Artificial Sequence
  ENSG00000187079_61 (sequence is synthesized)
cacagtgtggaagaaattagtcaaatgcttgttttcctgcttctcttttcaactgttactgtgctttgtttgaaagtagttttctctctcaaagccgttgcttatatcgttaagaatgaa

SEQ ID NO: 682677 - DNA, 120 bp, Artificial Sequence
  ENSG00000187079_62 (sequence is synthesized)
ggtttgtgtttaaaatttattgcattgcaaagggtagtttcactgaagtcatgcaccattaaataagatgaaatatttgtatttattgtcctacttcctaagccgtaacttcttttcctc

SEQ ID NO: 682678 - DNA, 120 bp, Artificial Sequence
  ENSG00000187079_63 (sequence is synthesized)
tgtgaatttgcattgagtcactcatgctacactacatcgctttagtatttgagatggcatttatgtttcctctcgtttatcatgaaatggggtcagattccatcagattccacctctgtc

SEQ ID NO: 682679 - DNA, 120 bp, Artificial Sequence
  ENSG00000187079_64 (sequence is synthesized)
aggtggactcttgtctgccttccatgatgagattttttttctccttcccctttctttaagagaggctgacagatctaggtgtcaatcaattggaaaccagtctctgattttttttcatta

SEQ ID NO: 682680 - DNA, 120 bp, Artificial Sequence
  ENSG00000187079_65 (sequence is synthesized)
gttattttctatcattagtttcactgtgtaaattagatatcaactgcacttctttaaaaaaaaatacatctccctattacctccttgaaagatttacttctgtaggcctttttcaatagg

SEQ ID NO: 682681 - DNA, 120 bp, Artificial Sequence
  ENSG00000187079_66 (sequence is synthesized)
ctcatgactgcagacaaggaaaaaaaaagtaaaaacaaaaacagtatgtgcctgaaaatgacaaaaaaaaaatttgtaacatttaaaaaagaaacctgaatagcctttaattctttaata

SEQ ID NO: 682682 - DNA, 120 bp, Artificial Sequence
  ENSG00000187079_67 (sequence is synthesized)
atacacttaaattttatgtaaatcggttttcgccacgtgtgtttgttcacattctaaatgacttaatgggattctcacggtctgtgtctttgtgtcacgtgtataaaatgggcttgtgat

SEQ ID NO: 682683 - DNA, 120 bp, Artificial Sequence
  ENSG00000187079_68 (sequence is synthesized)
gtaagcgtttcatctggtcagtggttcctttgatattgtactgctgctgggagtgggctgtggaacctgccttcgggtaactgggttcctcttgggtagattggagagatgggggtgggc

SEQ ID NO: 682684 - DNA, 120 bp, Artificial Sequence
  ENSG00000187079_69 (sequence is synthesized)
gtgggcaaattctcacacatgttttcttaacctatttgcagaaactttcaaaaggcatttgattaaacctcttggcagtacagtattcttgtatttgttaacgtctgtgtttaggtactg

SEQ ID NO: 682685 - DNA, 120 bp, Artificial Sequence
  ENSG00000187079_70 (sequence is synthesized)
gtacctttttgttttaaaatgttctaagtgttggctttaaagtgaatttatctttagtatgatagttatatgaaaattataggatttgtgtgcagagaatttttttataaagtgctttgt

SEQ ID NO: 682686 - DNA, 80 bp, Artificial Sequence
  ENSG00000187079_71 (sequence is synthesized)
cccccacccctccacctttgcccggagcgcgggcagcagcccagcgcgccagccggccccggggcaggagcggtgctagg

SEQ ID NO: 682687 - DNA, 120 bp, Artificial Sequence
  ENSG00000187079_72 (sequence is synthesized)
aaagacgtttaaaaaccccagcttgactctggcgggctgagggtgctgccgtgccactgctgcaggatggagctctcttcctggtggagacttgattcacaaggacgctaattattcatt

SEQ ID NO: 682688 - DNA, 120 bp, Artificial Sequence
  ENSG00000187079_73 (sequence is synthesized)
cttcctccgtgcagcccgctgaaacaattgctgtgcttgttcggtgcacagtgtggcgtcggacagtcaggcctttttatgtaactgatggcgctgtaggaatgaattgatagccagata

SEQ ID NO: 682689 - DNA, 120 bp, Artificial Sequence
  ENSG00000187079_74 (sequence is synthesized)
catcaaactcaggacaggcaagacgaggaccagaaaacaggtgtctagtcatatacaggtcttagcaagaaagaaagttcgagaaattcaagccgccattaaggtacgtctggcttgccc

SEQ ID NO: 682690 - DNA, 120 bp, Artificial Sequence
  ENSG00000187079_75 (sequence is synthesized)
acttgtagggggcttttcatctccatggttacaggcttttcctttgttttcctcccttcccctaccctgcaggtgtctagtcacattcaggttcttgccagaaggaaatctcgtgatttt

SEQ ID NO: 682691 - DNA, 120 bp, Artificial Sequence
  ENSG00000187079_76 (sequence is synthesized)
atctcacttcctgttttccatggtgactggtgaatgcctggtgctgggattctcgtaacctagtttccttgcatgtgagagctgtttacatttctttgtgtttaatctctctgtttctgt

SEQ ID NO: 682692 - DNA, 120 bp, Artificial Sequence
  ENSG00000187079_77 (sequence is synthesized)
actagcctcacattaaactcaatgtgtgtgagcgcgtgtgtgtgtttgcgtgtgtgtgtgcgtgtgtatgtgtgtgttcctaataacaatgcaaatgcagcagagagctggtcttgataa

SEQ ID NO: 682693 - DNA, 120 bp, Artificial Sequence
  ENSG00000187079_78 (sequence is synthesized)
cttttcagcacagaaacatgattttttttttttaaccttcagatgtccaccaagcagccatgggctaggaaagcttaaaaaaagaaaagtccagagatgcaaaattgagtagaaattatt

SEQ ID NO: 682694 - DNA, 120 bp, Artificial Sequence
  ENSG00000187079_79 (sequence is synthesized)
tagaaagaatcatttccaaagtggtcatgaaattacctttttaaaaaatttagaaattattttaactcatgcttttgatgtatttttaagaagacttataaaaaatacgtctttttcatg

SEQ ID NO: 682695 - DNA, 120 bp, Artificial Sequence
  ENSG00000187079_80 (sequence is synthesized)
catgtctcttccctcagagtattttcagccagatttcttccacattgcttactactgttttttaagtgaatggcgctcttattaaaagagaaatctgagcagtggcctttaaaaaaaaaa

SEQ ID NO: 682696 - DNA, 120 bp, Artificial Sequence
  ENSG00000187079_81 (sequence is synthesized)
attccgaacattcttagcatcgctcgcgccgcgccgcgccgcctgagccgagccgagcctctgctgccgccgccgcggccccgccgcccgccgcgggcgcccaccaagcactttgcagac

SEQ ID NO: 682697 - DNA, 120 bp, Artificial Sequence
  ENSG00000187079_82 (sequence is synthesized)
gcgccgaagtttgcctcggactcgccgggcgctgcggtggctccctgggccgaggactgttgctgccgctgccgccgccgcttcattgcacattcaagtggaaaattttcaggagtcagc

SEQ ID NO: 682698 - DNA, 120 bp, Artificial Sequence
  ENSG00000187079_83 (sequence is synthesized)
tacaacaaacacctcttcgtgcacattgggcatgccaaccattcttacagtgacccattgcttgaatcagtggacattcgtcagatttatgacaaatttcctgaaaagaaaggtggctta

SEQ ID NO: 682699 - DNA, 120 bp, Artificial Sequence
  ENSG00000187079_84 (sequence is synthesized)
gtattctagcttttgcggtacatatgtgtgataactttaatacccatgacagttaagtgcaattatttcatcactctaaaaatgctatttttgtgtcagttcctgcaggtgttttcatgt

SEQ ID NO: 682700 - DNA, 120 bp, Artificial Sequence
  ENSG00000187079_85 (sequence is synthesized)
ctttgcaaagtgacacattttgatgccttcttgataaagtggtagacattttgtagctttctagaaactttgtattcatacggtatcaatgaaaaataaagaaaatgaaagtgtgggtca

SEQ ID NO: 682701 - DNA, 120 bp, Artificial Sequence
  ENSG00000187080_0 (sequence is synthesized)
atgaacatttcagatgtcatctcctttgatattttggtttcagccatgaaaacaggaaatcaaagttttgggacagattttctacttgttggtcttttccaatatggctggataaactct

SEQ ID NO: 682702 - DNA, 120 bp, Artificial Sequence
  ENSG00000187080_1 (sequence is synthesized)
cttctctttgtcgtcattgccaccctctttacagttgctctgacaggaaatatcatgctgatccacctcattcgactgaacaccagactccacactccaatgtactttctgctcagtcag

SEQ ID NO: 682703 - DNA, 120 bp, Artificial Sequence
  ENSG00000187080_2 (sequence is synthesized)
ctctccatcgttgacctcatgtacatctccaccacagtgcccaagatggcagtcagcttcctctcacagagtaagaccattagatttttgggctgtgagattcaaacgtatgtgttcttg

SEQ ID NO: 682704 - DNA, 120 bp, Artificial Sequence
  ENSG00000187080_3 (sequence is synthesized)
gcccttggtggaactgaagcccttctccttggttttatgtcttatgatcgctatgtagctatctgtcaccctttacattatcctatgcttatgagcaagaagatctgctgcctcatggtt

SEQ ID NO: 682705 - DNA, 120 bp, Artificial Sequence
  ENSG00000187080_4 (sequence is synthesized)
tatgtgtttcagcttccattctgtaggtctcggctcattaaccactttttctgtgaagttccagctctactatcattggtgtgtcaggacacctcccagtatgagtatacagtcctcctg

SEQ ID NO: 682706 - DNA, 120 bp, Artificial Sequence
  ENSG00000187080_5 (sequence is synthesized)
agtggacttattatcttgctactaccattcctagccattctggcttcctatgctcgtgtgcttattgtggtattccagatgagctcaggaaaaggacaggcaaaagctgtttccacttgt

SEQ ID NO: 682707 - DNA, 120 bp, Artificial Sequence
  ENSG00000187080_6 (sequence is synthesized)
tcctcccacctgattgtggcaagcctgttctatgcaaccactctctttacctacacaaggccacactccttgcgttccccttcacgggataaggcggtggcagtattttacaccattgtc

SEQ ID NO: 682708 - DNA, 120 bp, Artificial Sequence
  ENSG00000187080_7 (sequence is synthesized)
acacctctactgaacccatttatctacagcctgagaaataaggaagtgacgggggcagtgaggagactgttgggatattggatatgctgtagaaaatatgacttcagatctctgtattga

SEQ ID NO: 682709 - DNA, 120 bp, Artificial Sequence
  ENSG00000187082_0 (sequence is synthesized)
ctcaagacccacccagtcatgaggactttcctctttctctttgccgtgctcttctttctgaccccagccaagaatgcattttttgatgagaaatgcaacaaacttaaagggacatgcaag

SEQ ID NO: 682710 - DNA, 120 bp, Artificial Sequence; identical to SEQ ID NO: 679716
  ENSG00000187082_1 (sequence is synthesized)

SEQ ID NO: 682711 - DNA, 80 bp, Artificial Sequence
  ENSG00000187091_0 (sequence is synthesized)
cagaagggggcggggagagacgagggttggcgggctcagggggcgggggcgcagggcagcgggggcggggcggtgtcccg

SEQ ID NO: 682712 - DNA, 120 bp, Artificial Sequence
  ENSG00000187091_1 (sequence is synthesized)
attcaggtccctgcaccgcactccgctcggaccccaggccgccggtgctgtcgctactcaagtgagtcccgcggtgcccctcccgccgcgccgcccgtcgggcatggactcgggccggga

SEQ ID NO: 682713 - DNA, 120 bp, Artificial Sequence
  ENSG00000187091_2 (sequence is synthesized)
cttcctgaccctgcacggcctacaggatgatgaggatctacaggcgctgctgaagggcagccagctcctgaaggtgaagtccagctcatggaggagagagcgcttctacaagttgcagga

SEQ ID NO: 682714 - DNA, 120 bp, Artificial Sequence
  ENSG00000187091_3 (sequence is synthesized)
ggactgcaagaccatctggcaggagtcccgcaaggtcatgcggaccccggagtcccagctgttctccatcgaggacattcaggaggtgcgaatggggcaccgcacggagggtctggagaa

SEQ ID NO: 682715 - DNA, 120 bp, Artificial Sequence
  ENSG00000187091_4 (sequence is synthesized)
gttcgcccgtgatgtgcccgaggaccgctgcttctccattgtcttcaaggaccagcgcaatacactagacctcatcgccccatcgccagctgatgcccagcactgggtgctggggctgca

SEQ ID NO: 682716 - DNA, 120 bp, Artificial Sequence
  ENSG00000187091_5 (sequence is synthesized)
caagatcatccaccactcaggctccatggaccagcgtcagaagctacagcactggattcactcctgcttgcgaaaagctgacaaaaacaaggacaacaagatgagcttcaaggagctgca

SEQ ID NO: 682717 - DNA, 120 bp, Artificial Sequence
  ENSG00000187091_6 (sequence is synthesized)
gaacttcctgaaggagctcaacatccaggtggacgacagctatgcccggaagatcttcagggagtgtgaccactcccagacagactccctggaggacgaggagattgaggccttctacaa

SEQ ID NO: 682718 - DNA, 120 bp, Artificial Sequence
  ENSG00000187091_7 (sequence is synthesized)
gatgctgacccagcgggtggagatcgaccgcaccttcgccgaggccgcgggctcaggggagactctgtcggtggatcagttagtgacgttcctgcagcaccagcagcgggaggaggcggc

SEQ ID NO: 682719 - DNA, 120 bp, Artificial Sequence
  ENSG00000187091_8 (sequence is synthesized)
agggcctgcgctggccctctccctcattgagcgctacgagcccagcgagactgccaaggcgcagcggcagatgaccaaggacggcttcctcatgtacttactgtcggctgacggcagcgc

SEQ ID NO: 682720 - DNA, 120 bp, Artificial Sequence
  ENSG00000187091_9 (sequence is synthesized)
cttcagcctggcacaccgccgtgtctaccaggacatgggccagccacttagccactacctggtgtcctcttcacacaacacctacctgctggaggaccagctagccgggcccagcagcac

SEQ ID NO: 682721 - DNA, 120 bp, Artificial Sequence
  ENSG00000187091_10 (sequence is synthesized)
tgaagcctacatccgggcactgtgcaaaggctgccgatgcctggagcttgactgctgggacgggcccaaccaggaaccaatcatctaccacggctatactttcacttccaagatcctctt

SEQ ID NO: 682722 - DNA, 120 bp, Artificial Sequence
  ENSG00000187091_11 (sequence is synthesized)
gctcagggccatccgggactatgccttcaaggcgtccccctaccctgtcatcctatccctggagaaccactgcacactggagcagcagcgcgtgatggcgcggcacctgcatgccatcct

SEQ ID NO: 682723 - DNA, 120 bp, Artificial Sequence
  ENSG00000187091_12 (sequence is synthesized)
gggccccatgctgttgaaccgaccactggatggggtcaccaacagcctgccctcccctgagcaactgaaggggaagatcctgctgaaggggaagaagctcggggggctcctgccccctgg

SEQ ID NO: 682724 - DNA, 120 bp, Artificial Sequence
  ENSG00000187091_13 (sequence is synthesized)
aggggagggtggccctgaggccactgtggtgtcagacgaagacgaggctgctgagatggaggatgaggcagtgaggagccgtgtgcagcacaagcccaaggaggacaagctcaggctagc

SEQ ID NO: 682725 - DNA, 120 bp, Artificial Sequence
  ENSG00000187091_14 (sequence is synthesized)
acaggagctctctgacatggtcatttactgcaagagtgtccactttgggggcttctccagtcctggcacccctggacaggccttctacgagatggcgtccttctctgagaaccgtgccct

SEQ ID NO: 682726 - DNA, 120 bp, Artificial Sequence
  ENSG00000187091_15 (sequence is synthesized)
tcgactgctccaagaatcaggaaacggctttgtccgccacaacgtggggcacctgagcagaatctacccggctggatggagaacagactcctccaactacagccccgtggagatgtggaa

SEQ ID NO: 682727 - DNA, 120 bp, Artificial Sequence
  ENSG00000187091_16 (sequence is synthesized)
tgggggctgccagatcgtggccctgaatttccagacacctgggccagagatggacgtgtaccagggccgcttccaggacaacggggcctgtgggtacgtgctgaagcccgccttcctgcg

SEQ ID NO: 682728 - DNA, 120 bp, Artificial Sequence
  ENSG00000187091_17 (sequence is synthesized)
agaccccaacggcacctttaacccccgcgccctggctcaggggccctggtgggcacggaagcggctcaacatcagggtcatttcggggcagcagctgccaaaagtcaacaagaataagaa

SEQ ID NO: 682729 - DNA, 120 bp, Artificial Sequence
  ENSG00000187091_18 (sequence is synthesized)
ttcaattgtggaccccaaagtgacagtggagatccatggcgtgagccgggacgtggccagccgccagactgctgtcatcaccaacaatggtttcaacccatggtgggacacggagtttgc

SEQ ID NO: 682730 - DNA, 120 bp, Artificial Sequence
  ENSG00000187091_19 (sequence is synthesized)
gtttgaggtagttgtgcctgaccttgccctcatccgcttcttggtggaagattatgatgcctcctccaagaatgacttcattggccagagtaccatccccttgaacagcctcaagcaagg

SEQ ID NO: 682731 - DNA, 120 bp, Artificial Sequence
  ENSG00000187091_20 (sequence is synthesized)
ataccgccatgtccacctcatgtctaagaacggggaccagcatccatcagccaccctctttgtgaagatctccctccaggactaggctggaggaagccagtggggtcccccctgagtggg

SEQ ID NO: 682732 - DNA, 120 bp, Artificial Sequence
  ENSG00000187091_21 (sequence is synthesized)
ctgggccctctgtccacatgtggggacagggctggtgtggctgctcccagcctcttgctcagagctaggcccccaaattgccttcagccctaacatagtgtctgctgctgcctccctggg

SEQ ID NO: 682733 - DNA, 120 bp, Artificial Sequence
  ENSG00000187091_22 (sequence is synthesized)
gaccaggagctagcccagtccctggagctgtccttcattccgttaggaataacactgcagccctctccaccctccggccagcgagtggtcaaggatttttataaaaatcacgataagatt

SEQ ID NO: 682734 - DNA, 120 bp, Artificial Sequence
  ENSG00000187091_23 (sequence is synthesized)
ctcacccgtgggaggtctgccttgtctcagttctctgtggctgccactcagaccctctgccccgctctctctgtctgtctccctctgtctctctgcgcctgggtttctggctttctcagt

SEQ ID NO: 682735 - DNA, 120 bp, Artificial Sequence
  ENSG00000187091_24 (sequence is synthesized)
ggaggagggtttcagtcccaaggccgggggcctggagcctcgaaggccatgcagtggagctctgaggacccaagcagggtcaaatgcaggggcttgtggagctggtaatatcagtctgga

SEQ ID NO: 682736 - DNA, 120 bp, Artificial Sequence
  ENSG00000187091_25 (sequence is synthesized)
aatatctgcccaccagcatgtcacagtgtctgaaacctcattagcacactagtcctttgaattctcacaccaggaatggaaggtgtggttagcatggtgggtcactgagggtggcaggag

SEQ ID NO: 682737 - DNA, 120 bp, Artificial Sequence
  ENSG00000187091_26 (sequence is synthesized)
ggcagcaggcattggagtgatgctgggccctgctaactcaccatgtgaccctaggccttagtgtaccctgagcaggctgtgctctagggccccagggccagcccacagcctgtgactgct

SEQ ID NO: 682738 - DNA, 120 bp, Artificial Sequence
  ENSG00000187091_27 (sequence is synthesized)
attcctggactccgcccctgctcccctccaagggcgacagttccgccccccggaccagagcagagggtgttgtgagcataaaacactggaggcggcactgccccggacccggctccgcgc

SEQ ID NO: 682739 - DNA, 120 bp, Artificial Sequence
  ENSG00000187091_28 (sequence is synthesized)
aggcaggggcactgtggagggccatgcagtgcctggggatccggagccggagccgctccagggagctctacctgcaggagcggagccttaaggtggcggcgctcaatggacggaggctgg

SEQ ID NO: 682740 - DNA, 120 bp, Artificial Sequence
  ENSG00000187091_29 (sequence is synthesized)
ccacttgtcccttaacgcggggccatttgccttggagcctttaattggacatgtttagtacttctgtgagtgtgtggcccactgtggggcagtgtttgcagtggtagcacgtcggggcct

SEQ ID NO: 682741 - DNA, 120 bp, Artificial Sequence
  ENSG00000187091_30 (sequence is synthesized)
aggacactggacaggaccctgagaaggtatggcctgccaacctgtggccagtggaggggctgaagtctccatcgaggacattcaggaggtgcgaatggggcaccgcacggagggtctgga

SEQ ID NO: 682742 - DNA, 120 bp, Artificial Sequence
  ENSG00000187091_31 (sequence is synthesized)
caagaataagaattcaattgtggaccccaaagtgacagtggagatccatggcgtgagccgggacgtggccagccgccagactgctgtcatcaccaacaatggtaggtgctgggcctgggc

SEQ ID NO: 682743 - DNA, 120 bp, Artificial Sequence
  ENSG00000187091_32 (sequence is synthesized)
ttcttctcgtcccgcctcctgtattctgactccccccactcatttactttgcctcggtttcgctctcgcctcaccttcagggggcataggtcccgccgctcgtggactagctccgcctcc

SEQ ID NO: 682744 - DNA, 120 bp, Artificial Sequence
  ENSG00000187091_33 (sequence is synthesized)
atccctgggggagggtggggagcctagccggggcgctaggtgtgtcttgaccagttgcccctccccacctagcaactgaaggggaagatcctgctgaaggggaagaagctcggggggctc

SEQ ID NO: 682745 - DNA, 120 bp, Artificial Sequence
  ENSG00000187094_0 (sequence is synthesized)
cacttcaaccggttgtcgccccagtggccgccctctgagcacgtgttactgccagtctgcgtcagcgttgggtaaatacatgactggccgacgccgccgggtggggctatttaagagaca

SEQ ID NO: 682746 - DNA, 120 bp, Artificial Sequence
  ENSG00000187094_1 (sequence is synthesized)
gccgcccgctggtcctccctgaacttggctcagctgccgggctgctccggttggaaacgccaagccagctgcgtcctaatccaaaagccatgaacagcggcgtgtgcctgtgcgtgctga

SEQ ID NO: 682747 - DNA, 120 bp, Artificial Sequence
  ENSG00000187094_2 (sequence is synthesized)
tggcggtactggcggctggcgccctgacgcagccggtgcctcccgcagatcccgcgggctccgggctgcagcgggcagaggaggcgccccgtaggcagctgagggtatcgcagagaacgg

SEQ ID NO: 682748 - DNA, 120 bp, Artificial Sequence
  ENSG00000187094_3 (sequence is synthesized)
cccagccacaggataagtgaccgggactacatgggctggatggattttggccgtcgcagtgccgaggagtatgagtacccctcctagaggacccagccgccatcagcccaacgggaagca

SEQ ID NO: 682749 - DNA, 120 bp, Artificial Sequence
  ENSG00000187094_4 (sequence is synthesized)
acctcccaacccagaggaggcagaataagaaaacaatcacactcataactcattgtctgtggagtttgacattgtatgtatctatttattaagttctcaatgtgaaaaatgtgtctgtaa

SEQ ID NO: 682750 - DNA, 120 bp, Artificial Sequence
  ENSG00000187094_5 (sequence is synthesized)
gattgtccagtgcaaccacacacctcaccagaattgtgcaaatggaagacaaaatgttttcttcatctgtgactcctggtctgaaaatgttgttatgctattaaagtgatttcattctgc

SEQ ID NO: 682751 - DNA, 120 bp, Artificial Sequence
  ENSG00000187094_6 (sequence is synthesized)
attccagagggaattccagagcggaatacggattccgattttaaaataagcgcttctaaatctttctccttgcatctaagacgggtgggggaaagaaagggagaggagttgaggtcccaa

SEQ ID NO: 682752 - DNA, 120 bp, Artificial Sequence
  ENSG00000187094_7 (sequence is synthesized)
ggttcaaggcctggtgatctccaggtcccaggctgggcggcctcggtgcacggagagggcgaggggcgtgttgtggagccttggcaaggcgctgctcttcctcgcgcctcggtttgcggt

SEQ ID NO: 682753 - DNA, 120 bp, Artificial Sequence
  ENSG00000187094_8 (sequence is synthesized)
ctgtgaaatggggttggcagtgcctttgcagggacgcggcgaactcaagcaccagcaagcggactcgaactcaaagggtttcagggtgtagacgaccagagcgcactgaggggctccagg

SEQ ID NO: 682754 - DNA, 120 bp, Artificial Sequence
  ENSG00000187094_9 (sequence is synthesized)
tcggcccgctccggagccgggagagtaaccgcgtgcagggaaaggcgcacggcagcctcggtgcctcccttccctccaccggacgggtgactgactaggggtgaggtcctcacctccagg

SEQ ID NO: 682755 - DNA, 120 bp, Artificial Sequence
  ENSG00000187094_10 (sequence is synthesized)
ctgcgcagctgagttctggaagctgcgtcaagagaggcccaggacaccaagagccagctgtggccagagccctttcactgacccagaacactggccctcggaaacctggagaactgcgag

SEQ ID NO: 682756 - DNA, 120 bp, Artificial Sequence
  ENSG00000187094_11 (sequence is synthesized)
gagaggcactctgcaaacacttcctcaaactttaggaaagcaaaaacattccttctgctcaacacggcagaaaacagggtctctgccccttggcgctgggtgaggagttcccaaagacca

SEQ ID NO: 682757 - DNA, 120 bp, Artificial Sequence
  ENSG00000187094_12 (sequence is synthesized)
cgctagcctgatggggatgacctctctcggtaggaaacaagcaacatgatttctggcggtcctttgtagcaatctgagaaggggtatggaggacttaatttataagtaaggggaaccttc

SEQ ID NO: 682758 - DNA, 120 bp, Artificial Sequence
  ENSG00000187094_13 (sequence is synthesized)
ttgaaaagctttctttgaactaatttttagcagtgttgctgattaagttcaacaccattttaccaagccattaaaagataattattgaagcctaggaaagggttcctagatacagtgaat

SEQ ID NO: 682759 - DNA, 120 bp, Artificial Sequence
  ENSG00000187094_14 (sequence is synthesized)
accctctactgaaaacgcaaaggaccttggagccacccagataccaacccttggaaatcctctagcaggaaggggtcaatgctgagaatgcctgagatctggctacaacagtttaaaaaa

SEQ ID NO: 682760 - DNA, 120 bp, Artificial Sequence
  ENSG00000187097_0 (sequence is synthesized)
tagcccaggcgccgcggcgcgcggggtggggcggaggtcgcgccgagggcggcgggctgccgcgcaagggtggcgcgcgcgcgttttccttgttcctggtcaacaaagaaatgtggagtg

SEQ ID NO: 682761 - DNA, 120 bp, Artificial Sequence
  ENSG00000187097_1 (sequence is synthesized)
tcttggctgaatcctcatacagacaagatcattatggtgctgttaggtaggacttgtatccagatgtaaggttgaaaaagtgatataataaaggaaccaaggagaaaattcagaaggaaa

SEQ ID NO: 682762 - DNA, 120 bp, Artificial Sequence
  ENSG00000187097_2 (sequence is synthesized)
gaaaaaattgcctctgcaggtgtgcgagcaggattgcttctgcaacaaaagcctccacccagccacatcttgggaaaagaatggccacttcttggggcacagtctttttcatgctggtgg

SEQ ID NO: 682763 - DNA, 120 bp, Artificial Sequence
  ENSG00000187097_3 (sequence is synthesized)
tatcctgtgtttgcagcgctgtctcccacaggaaccagcagacttggtttgagggtatcttcctgtcttccatgtgccccatcaatgtcagcgccagcaccttgtatggaattatgtttg

SEQ ID NO: 682764 - DNA, 120 bp, Artificial Sequence
  ENSG00000187097_4 (sequence is synthesized)
atgcagggagcactggaactcgaattcatgtttacacctttgtgcagaaaatgccaggacagcttccaattctagaaggggaagtttttgattctgtgaagccaggactttctgcttttg

SEQ ID NO: 682765 - DNA, 120 bp, Artificial Sequence
  ENSG00000187097_5 (sequence is synthesized)
tagatcaacctaagcagggtgctgagaccgttcaagggctcttagaggtggccaaagactcaatcccccgaagtcactggaaaaagaccccagtggtcctaaaggcaacagcaggactac

SEQ ID NO: 682766 - DNA, 120 bp, Artificial Sequence
  ENSG00000187097_6 (sequence is synthesized)
gcttactgccagaacacaaagccaaggctctgctctttgaggtaaaggagatcttcaggaagtcacctttcctggtaccaaagggcagtgttagcatcatggatggatccgacgaaggca

SEQ ID NO: 682767 - DNA, 120 bp, Artificial Sequence
  ENSG00000187097_7 (sequence is synthesized)
tattagcttgggttactgtgaattttctgacaggtcagctgcatggccacagacaggagactgtggggaccttggacctagggggagcctccacccaaatcacgttcctgccccagtttg

SEQ ID NO: 682768 - DNA, 120 bp, Artificial Sequence
  ENSG00000187097_8 (sequence is synthesized)
agaaaactctggaacaaactcctaggggctacctcacttcctttgagatgtttaacagcacttataagctctatacacatagttacctgggatttggattgaaagctgcaagactagcaa

SEQ ID NO: 682769 - DNA, 120 bp, Artificial Sequence
  ENSG00000187097_9 (sequence is synthesized)
ccctgggagccctggagacagaagggactgatgggcacactttccggagtgcctgtttaccgagatggttggaagcagagtggatctttgggggtgtgaaataccagtatggtggcaacc

SEQ ID NO: 682770 - DNA, 120 bp, Artificial Sequence
  ENSG00000187097_10 (sequence is synthesized)
aagaaggggaggtgggctttgagccctgctatgccgaagtgctgagggtggtacgaggaaaacttcaccagccagaggaggtccagagaggttccttctatgctttctcttactattatg

SEQ ID NO: 682771 - DNA, 120 bp, Artificial Sequence
  ENSG00000187097_11 (sequence is synthesized)
accgagctgttgacacagacatgattgattatgaaaaggggggtattttaaaagttgaagattttgaaagaaaagccagggaagtgtgtgataacttggaaaacttcacctcaggcagtc

SEQ ID NO: 682772 - DNA, 120 bp, Artificial Sequence
  ENSG00000187097_12 (sequence is synthesized)
ctttcctgtgcatggatctcagctacatcacagccctgttaaaggatggctttggctttgcagacagcacagtcttacagctcacaaagaaagtgaacaacatagagacgggctgggcct

SEQ ID NO: 682773 - DNA, 120 bp, Artificial Sequence
  ENSG00000187097_13 (sequence is synthesized)
tgggggccacctttcacctgttgcagtctctgggcatctcccattgaggccacgtacttccttggagacctgcatttgccaacacctttttaaggggaggagagagcacttagtttctga

SEQ ID NO: 682774 - DNA, 120 bp, Artificial Sequence
  ENSG00000187097_14 (sequence is synthesized)
actagtctggggacatcctggacttgagcctagagatttaggtttaattaattttacacatctaatgtgaactgctgcctaaccactcaagagtacacagctggcaccagagcatcacag

SEQ ID NO: 682775 - DNA, 120 bp, Artificial Sequence
  ENSG00000187097_15 (sequence is synthesized)
agagccctgtgagccaaaaagtatagttttggaacttaaccttggagtgagagcccagggacaggtccctggaaaccaaagaaaaatcgcatttcaaccctttgagtgcctcattccact

SEQ ID NO: 682776 - DNA, 120 bp, Artificial Sequence
  ENSG00000187097_16 (sequence is synthesized)
gaatatttaaattttcctcttaaatggtaaactgacttattgcaatcccaagacccatcaatatcagtatttttttcctccctatacagtgccctgcccacccttatctgcacccacctc

SEQ ID NO: 682777 - DNA, 120 bp, Artificial Sequence
  ENSG00000187097_17 (sequence is synthesized)
ccctgaaaaagagagaaaaaaaaaaacctggttttgctttccatgtataattcaacaacgcaaaatgggaccatgtcagaatctgtatgatcctattctgtgttagctccaatcagccag

SEQ ID NO: 682778 - DNA, 120 bp, Artificial Sequence
  ENSG00000187097_18 (sequence is synthesized)
ctgagagccatcctaaatattaataggatgagagagtaactcctaactgtgcataaattacagccttaagaaagaaggccacccggtctctggggacatgttttgggagggtgtggctgc

SEQ ID NO: 682779 - DNA, 120 bp, Artificial Sequence
  ENSG00000187097_19 (sequence is synthesized)
ctcatatagcctacctttgctttaatcagcattttatcagtcaactctgggattaatgaacatatccgactttatgggtatgtgtatattcagtgccagtaccacctcccaggctaatgt

SEQ ID NO: 682780 - DNA, 120 bp, Artificial Sequence
  ENSG00000187097_20 (sequence is synthesized)
gttaacagtgttttctatgattctaaacttgttttctttgtatttctaagaaatacaactaggccctaacttttggtctgtggtcagaggtcagtgtctgtgctattccaggatctatta

SEQ ID NO: 682781 - DNA, 120 bp, Artificial Sequence
  ENSG00000187097_21 (sequence is synthesized)
tttcagtttgcccttttattctctccgtttgtaacagtaccttcctgtcctggtccctgatcactttagctaatatcctttgaattatttatctagttcagagtttccaataccgttcct

SEQ ID NO: 682782 - DNA, 120 bp, Artificial Sequence
  ENSG00000187097_22 (sequence is synthesized)
gacaaaaccccacttggatttggttggctctctcagcccacatcagtacagtggaccaacatttccagggagaaccatatttaatgtccctcatgctctctttttgaatccaagtgctca

SEQ ID NO: 682783 - DNA, 85 bp, Artificial Sequence
  ENSG00000187097_23 (sequence is synthesized)
ttaatgtccctcatgctctctttttgaatccaagtgctcagagctcttgactgtgaattatttaccccaaattcattatcttgca

SEQ ID NO: 682784 - DNA, 73 bp, Artificial Sequence
  ENSG00000187097_24 (sequence is synthesized)
tggccaggctggtttccaactcctgatctcaattgatccacccttatcttgcactttcaacataatcatccct

SEQ ID NO: 682785 - DNA, 120 bp, Artificial Sequence
  ENSG00000187097_25 (sequence is synthesized)
ctggccttatcttgcactttcaacataatcatccctgcttctcatctgccctgcagtgctcttggacctggaagatctccctgtggtctggcccctttgccttggttgttaacctccagc

SEQ ID NO: 682786 - DNA, 120 bp, Artificial Sequence
  ENSG00000187097_26 (sequence is synthesized)
ttctttgcaggagtgtatttccccaaaacttgtggctttcacagtagactccgtttccatcctctctctcacaaaggatgttaagtatgcctggccctcacacagtccatgggaaacctt

SEQ ID NO: 682787 - DNA, 120 bp, Artificial Sequence
  ENSG00000187097_27 (sequence is synthesized)
atttttaacattactccattgagtcaataaatatttaccatctgctgtgtgcaagttactaggcaaatttctgtatccttgtccctaaaattcttgtctttaaattcattgtggaatttc

SEQ ID NO: 682788 - DNA, 120 bp, Artificial Sequence
  ENSG00000187097_28 (sequence is synthesized)
tttagacttcacactgacttttattactaaggtcacctttataccaactgccttcctcaaaatgcttataatgaaataacagaatcttgagttggaaacagcccaaagaaataatccaat

SEQ ID NO: 682789 - DNA, 120 bp, Artificial Sequence
  ENSG00000187097_29 (sequence is synthesized)
gttgtactcagtgcagaattccctagaatttctaacaggttgtcattcagcttctgctaagccatgttcaaacagcttattccatttggaactgcactgatattaaaaaaaattccttat

SEQ ID NO: 682790 - DNA, 120 bp, Artificial Sequence
  ENSG00000187097_30 (sequence is synthesized)
attgagctgaaatctacctatcttctaagtggtcttagttctgctctaatctctccttccaaaatctttggatcttttgaaaaaagttcctcccaagttcttttataagtgacatgactt

SEQ ID NO: 682791 - DNA, 120 bp, Artificial Sequence
  ENSG00000187097_31 (sequence is synthesized)
ttagaccccttcccatctttgtcaacaaaagtagggtgccagaccagtcacagaacactaaatgtcatccatgtttccttcagtagaaaccagcagttttaaaagaggtaagctgtgttc

SEQ ID NO: 682792 - DNA, 120 bp, Artificial Sequence
  ENSG00000187097_32 (sequence is synthesized)
actaaagactgttccagcttgacaaatgcagagatataagtctctggtctttaatcactgtgggggccattttgtaaaacacacatactgtccagcagactcctttggtcatcccaaata

SEQ ID NO: 682793 - DNA, 120 bp, Artificial Sequence
  ENSG00000187097_33 (sequence is synthesized)
cctctgaactccagggaagatgcattctaactccacgaacttacctattttgttaaccttgattagaccttctggagaagtaaccaatttgtccatcttaggagcaatttggaatgagag

SEQ ID NO: 682794 - DNA, 120 bp, Artificial Sequence
  ENSG00000187097_34 (sequence is synthesized)
tttttatttttttctgtaacgcccatcctgcctgcagtagaccctttgggcttaagaggtcctacagattctaatagtttcctctttgtagatgtgttaacatatttaaaatacttagga

SEQ ID NO: 682795 - DNA, 120 bp, Artificial Sequence
  ENSG00000187097_35 (sequence is synthesized)
catggcctggtacgtgacagatggtgtttaacatcattgtcatatgaagaacactctctgtgggccaatggaggtgtgccttaaaattcttcatcttgcctgattttgtttgcataactt

SEQ ID NO: 682796 - DNA, 120 bp, Artificial Sequence
  ENSG00000187097_36 (sequence is synthesized)
ctggagagtctgtgtcctcctcatctaggccacctttccattttttgtgaaagatgaccttgtccctgcagtctccgccaggagtcacacagcttttcacagcagctgccatctttaatt

SEQ ID NO: 682797 - DNA, 120 bp, Artificial Sequence
  ENSG00000187097_37 (sequence is synthesized)
ctttttcctgagattccagcaaggttgtgacattgtcacttttttgttctagactcttttaaattttctgcatttgcctgaaaagcacccctgtaagaatagatttctcatggctctaaa

SEQ ID NO: 682798 - DNA, 120 bp, Artificial Sequence
  ENSG00000187097_38 (sequence is synthesized)
aattattcccaagaataccttacttggttcaaaagcagactgtttctcttcatttcatctcaaatcagacttctgggcaagatgttctttagagtaagcaaacctacaacctaaaaatct

SEQ ID NO: 682799 - DNA, 120 bp, Artificial Sequence
  ENSG00000187097_39 (sequence is synthesized)
cttcaagaggcatctctggtcttgtgacgagacctcttcaaaaacccacagtaaaactcccctccctccagttggccaccagtctgccaccaaacatgaacaaattctgctgctaatcgg

SEQ ID NO: 682800 - DNA, 120 bp, Artificial Sequence
  ENSG00000187097_40 (sequence is synthesized)
tttcccttgtgatctggttcctgaggtcttcggatctgtgcaatgaattatttattgttttattaaaccgacagtggtgtcccagagaggaaccataaataaaatggaaatctggtgctg

SEQ ID NO: 682801 - DNA, 120 bp, Artificial Sequence
  ENSG00000187097_41 (sequence is synthesized)
tgataaagtaataactagcattaatgagacctggttttcctttcagaaagtccagtatacctgtaacaaaggttaaagcaatttatatttaatttgcattctgatgttaacatttaaaca

SEQ ID NO: 682802 - DNA, 120 bp, Artificial Sequence
  ENSG00000187097_42 (sequence is synthesized)
gcaattctaacaaaaatgcatcgagtctaattcttacctctatcaaaaaacaactgtataaatttatgaccaacattaaaacaaaaacaaaatgtaaattttctctttagaaatgattaa

SEQ ID NO: 682803 - DNA, 120 bp, Artificial Sequence
  ENSG00000187097_43 (sequence is synthesized)
ctggaaatgagtgagacagcaccttgtgggttttttagtaataaaaagctcttttcaaccaaattgtaagtcttccttcgaagttttttcctttggtctggctaatatacgctcctcaca

SEQ ID NO: 682804 - DNA, 120 bp, Artificial Sequence
  ENSG00000187097_44 (sequence is synthesized)
gcaaattatcattcattatttgggtgccacaggcccattaagcaaagaagaaaaagagaattttaatgtaaagtaagtttattaaattaaataagatcttgaaaatatgtatgatgggtc

SEQ ID NO: 682805 - DNA, 120 bp, Artificial Sequence
  ENSG00000187097_45 (sequence is synthesized)
ctgggcaggatgttctttttcatcaacgtaatctttctttaggagaggagtactcatttgcttgcaaaggccataatctgttcctggagaaaaaataaaagtgaatgaaactcttaacac

SEQ ID NO: 682806 - DNA, 120 bp, Artificial Sequence
  ENSG00000187097_46 (sequence is synthesized)
agtaaggtgaagaaaataattattgtagataataatcacgtaggtattcttcccaagtgtccttgttttatttcagctaaaaaaagaaaaatatacatacatatacacacgttttagaga

SEQ ID NO: 682807 - DNA, 62 bp, Artificial Sequence
  ENSG00000187097_47 (sequence is synthesized)
aaaaagaaaaatatacatacatatacacacgttttagagacagggtctcactctgttgactg

SEQ ID NO: 682808 - DNA, 80 bp, Artificial Sequence
  ENSG00000187097_48 (sequence is synthesized)
gacgccgagctggcaatgccccacccgcgccgctgacggcgcgcggagagcgcacgcgcccgtgacgtagcccaggcgcc

SEQ ID NO: 682809 - DNA, 120 bp, Artificial Sequence
  ENSG00000187097_49 (sequence is synthesized)
gcgcaagggtggcgcgcgcgcggtgagtgtgcgagtgtcggcggcgccggatcctctacgtggggcccgggctctgcgggcgggaggcgggagctggcagccccaggcggtagcgcttcg

SEQ ID NO: 682810 - DNA, 120 bp, Artificial Sequence
  ENSG00000187097_50 (sequence is synthesized)
gcgcttcgtcctgcggcctgggtgtgtcaggagtcgctgcggtcggggcgcccttgcctcaggagacttagatccccgctgatccgcccgtcccgccgcagtggtctgagccgcagccct

SEQ ID NO: 682811 - DNA, 120 bp, Artificial Sequence
  ENSG00000187097_51 (sequence is synthesized)
ttcccgtgccgcccgcgggtcccgttcctcccgtgtctccatgccgcagccagcgtggccgcggctaccttgccctcgcccccgctccgcttctgccgctcccggcactgccttactcct

SEQ ID NO: 682812 - DNA, 120 bp, Artificial Sequence
  ENSG00000187097_52 (sequence is synthesized)
ttctgtaagggatagtgcagccagcggacgtcccaggccaaatgttttttgataggcagtcgaggactttcccgagggcggtggttgagggcgaggctgccagcctccgaagagcagcgg

SEQ ID NO: 682813 - DNA, 120 bp, Artificial Sequence
  ENSG00000187097_53 (sequence is synthesized)
cacgccagggagccgggcggggaggggagtgctgccaccgaggtcgggagcagggtcctcggcctcactaggtcctgtgtggccgatacttcctgcccacgaccgccccccggatttcca

SEQ ID NO: 682814 - DNA, 120 bp, Artificial Sequence
  ENSG00000187097_54 (sequence is synthesized)
tttgctaataccggtccgcagccttctttcctgaaagttgcataaagttggaagctcttcaacttgcctccccgactcctgaaatcccgaatacacctctgaaaaggagtgtactcacaa

SEQ ID NO: 682815 - DNA, 120 bp, Artificial Sequence
  ENSG00000187097_55 (sequence is synthesized)
aattcatgtttacacctttgtgcagaaaatgccaggtcacttatggagcctggggaaaggtggaggagttaggtgtccaccagagaaatggtagcagaaatggaccctcagaggttgctc

SEQ ID NO: 682816 - DNA, 120 bp, Artificial Sequence
  ENSG00000187097_56 (sequence is synthesized)
aacttttggtaaccagctctctcttctgttttgttccatggacaaaataggacagcttccaattctagaaggggaagtttttgattctgtgaagccaggactttctgcttttgtagatca

SEQ ID NO: 682817 - DNA, 120 bp, Artificial Sequence
  ENSG00000187097_57 (sequence is synthesized)
acctaagcaggtgagtttcttatgatttgatgtttagattctcaatgccttgataacttgaccacaccactgctgttaaatatttcatgctattcactaatgagattgagatcatgtgtg

SEQ ID NO: 682818 - DNA, 120 bp, Artificial Sequence
  ENSG00000187097_58 (sequence is synthesized)
agatcagctttctctcctcagctaatctcctggataaaattaattacatttcccacgctcatgagggctgggtggaagaaggctagaaaattggttgtggtaatgcaaggatgacactag

SEQ ID NO: 682819 - DNA, 120 bp, Artificial Sequence
  ENSG00000187097_59 (sequence is synthesized)
cttttaagagattactccctatgtacttactgtttaaaattttgagttgaagccatcagttgtatttgttcatgtaagcgcagaagataaacatgaagttctgtagggtatgatgtataa

SEQ ID NO: 682820 - DNA, 120 bp, Artificial Sequence
  ENSG00000187097_60 (sequence is synthesized)
acatggcagttgaaggcatggtgagcagtgaattccatttcagagtgccttgatgcaggatggaaccatatctatacttgagaaattaggcaacaacccatgatgacaaaaatctttggt

SEQ ID NO: 682821 - DNA, 120 bp, Artificial Sequence
  ENSG00000187097_61 (sequence is synthesized)
ggtagaagatgaatagagagtttgtggcgactatatttcacatttgagcatctacaacatactacatcctatgtgtctgaggccatgttgaaataaaatagaataatgcagaatgttaaa

SEQ ID NO: 682822 - DNA, 120 bp, Artificial Sequence
  ENSG00000187097_62 (sequence is synthesized)
agagaaaaagagagtaagggaggagggaaggatagagaagggagtgagttagcaaaatgccacactgttagttgcaaactggcacaaaggtgaatgcggttcatgaggctcgcttgatta

SEQ ID NO: 682823 - DNA, 120 bp, Artificial Sequence
  ENSG00000187097_63 (sequence is synthesized)
gcccaaggtggtcttgaaatcctgacctcaagtaatcctcctgcctcgaccttccaaagtgctaagattacagacaagagccactgtgcccagccctgttttctccagtaagctgaaatt

SEQ ID NO: 682824 - DNA, 120 bp, Artificial Sequence
  ENSG00000187097_64 (sequence is synthesized)
tcttctatatcggattcctctgtatatatcaagaatctagcacagtgcctggtatatattagatactcagtacatgcttattaactagacaggtgaatgcccaggtttctaaagtttttt

SEQ ID NO: 682825 - DNA, 120 bp, Artificial Sequence
  ENSG00000187097_65 (sequence is synthesized)
caagaaaagaccttctggtttgtgaagaaaaagaggcaacaatagcaacagctttcctccaagtgattattgtagcaaagtcaagcctgaaacaatggagaatgaagttatgcctgactc

SEQ ID NO: 682826 - DNA, 120 bp, Artificial Sequence
  ENSG00000187097_66 (sequence is synthesized)
attttgttattacacccaaatgagttcattgtacagaatgggcctttttgacacgtgtctaatgatattttgatgcaaatgaaataatacacataaaaaatgacctgtttacaggaaaga

SEQ ID NO: 682827 - DNA, 120 bp, Artificial Sequence
  ENSG00000187097_67 (sequence is synthesized)
cagcacagtcttacagcacatcatcagctgggtaaattgatactcacaaaggcagagttaacggcatccacaaatttttcctcatccatgctaactagctctgctgcatgttcatgggac

SEQ ID NO: 682828 - DNA, 120 bp, Artificial Sequence
  ENSG00000187097_68 (sequence is synthesized)
gtggaccaaaccaaggaactcaaggtgtctgagagctgtgtcaaaagaacaccaataccaacggctaagactctgctgcacttggaaactctcaagcataaaaagacaaaaagggaactt

SEQ ID NO: 682829 - DNA, 120 bp, Artificial Sequence
  ENSG00000187097_69 (sequence is synthesized)
acaaacagcctgggcagattcccttgaaaccagaaaaaggctgagagaaagtgaagaggaaaggcttgcatgcatgtgggcggactggtcagaaggacctcttaccgggagcagagcaat

SEQ ID NO: 682830 - DNA, 120 bp, Artificial Sequence
  ENSG00000187097_70 (sequence is synthesized)
aggcccagagggaagaaatctctgccaggctacgttgttttctgtggcctgcaacagagaggagaaaagtttctctgtgaagtacctagtgcctatgaataaagtccccagatggcagct

SEQ ID NO: 682831 - DNA, 120 bp, Artificial Sequence
  ENSG00000187097_71 (sequence is synthesized)
caggatcttacctctgataaatgcagagtagccacaacagcagactggtcatagttccagctcacattctggattccaacagcctgccgtactccggagttgtgaccatctgcacctatc

SEQ ID NO: 682832 - DNA, 120 bp, Artificial Sequence
  ENSG00000187097_72 (sequence is synthesized)
tgcatggacacatgagcctgctaagtcttccagcctcttcataaactgcttcagaagtttttctctgctccctaaagtttcctccagctctgattgttgtgtggcaggataattccatca

SEQ ID NO: 682833 - DNA, 120 bp, Artificial Sequence
  ENSG00000187097_73 (sequence is synthesized)
ggcctgcttcactcacagcccctagaggtggagcccctgcactgtcacatcagcctcagccaacagagccaaagctggacatgactgaacaggtgccagccatgagttaaactcagccag

SEQ ID NO: 682834 - DNA, 120 bp, Artificial Sequence
  ENSG00000187097_74 (sequence is synthesized)
gccctcctgatatttgaactagagagcaataaggaaagtttcagtatggggcacacactggagctgaatagttctgatgtagggttaggaatggctaccatgcaaaaagggaagcttgtg

SEQ ID NO: 682835 - DNA, 120 bp, Artificial Sequence
  ENSG00000187097_75 (sequence is synthesized)
agcagaaaggagaaaaatgagaggcaagagatcaatgaccacagactcctcagagggaaagaacagcctccattcccaacactctggtgcctgtcctgtgaggcccagctatctgttatt

SEQ ID NO: 682836 - DNA, 120 bp, Artificial Sequence
  ENSG00000187097_76 (sequence is synthesized)
tcacaacctaagacggcccatgagattgctccctgtacaggatttacgatgagaccatctccacttgagctggcctgaataggtactggtcctcataaccaaaagttttgcctaaaatta

SEQ ID NO: 682837 - DNA, 120 bp, Artificial Sequence
  ENSG00000187097_77 (sequence is synthesized)
aactatagcttaaatcgaaaaccagagtccctagaatctaggataagatgtagatatacaagacccctagcaaaataagaatcttcaactaccaacaatttggtctggaaggtgctgcca

SEQ ID NO: 682838 - DNA, 120 bp, Artificial Sequence
  ENSG00000187097_78 (sequence is synthesized)
tcacctagggtaatatgaacccaagggctggagtcggccataggaaatggacaaggccaggtatagcgaatggctttgctcctgtagagaaccgtcactcggtctggggaggtcaaaaga

SEQ ID NO: 682839 - DNA, 120 bp, Artificial Sequence
  ENSG00000187097_79 (sequence is synthesized)
gaggaaaaaaaattagaaaggtgggccacataggctgaggaaaaagccataactaaacctaaagcaaggtcccaggacagcagtgtcttgtcatttaagattaaaaaaatcagtaattaa

SEQ ID NO: 682840 - DNA, 120 bp, Artificial Sequence
  ENSG00000187097_80 (sequence is synthesized)
gcagagttcaggtgtgacctctggcagcaaagtgagaagggagtggccctgctctgttatcgtcttacccaatgagcgccacccgaggcctgacgtactcagcagcatgtcccaacccaa

SEQ ID NO: 682841 - DNA, 120 bp, Artificial Sequence
  ENSG00000187097_81 (sequence is synthesized)
gaggaaacagaactcggcttttggcatccaccctggctacgcttgggggcagctggcgagccgagaccttagtgggcttcagaaggctgacagcatactgcagcatggcaccagctgtgt

SEQ ID NO: 682842 - DNA, 120 bp, Artificial Sequence
  ENSG00000187097_82 (sequence is synthesized)
cgatgaagtccgtgtggtcagcatcactccactgagcagcatcagccacaagacaaacaaggtgaaatgtgagtagcagggaattaaaaattcaataaagaaaccttgtttgtaaccaaa

SEQ ID NO: 682843 - DNA, 120 bp, Artificial Sequence
  ENSG00000187098_0 (sequence is synthesized)
cgggcggccgcgagccggcgagcgggcagagctcggcactgcgccggggcgcacggctcgggggacccaggcccagctaccttccctccgcccccgggctctgttctcactttccagcag

SEQ ID NO: 682844 - DNA, 120 bp, Artificial Sequence
  ENSG00000187098_1 (sequence is synthesized)
ctgttctcactttccagcagtggaaggacgggaagcgggagccatgcagtccgaatcggggatcgtgccggatttcgaagtcggggaggagtttcatgaagagcccaaaacctattacga

SEQ ID NO: 682845 - DNA, 120 bp, Artificial Sequence
  ENSG00000187098_2 (sequence is synthesized)
actcaaaagtcaaccgctgaagagcagcagttccgccgagcatcctggggcctccaagcctccgataagctcctccagtatgacatcacgcatcttgctacgccagcaactcatgcgtga

SEQ ID NO: 682846 - DNA, 120 bp, Artificial Sequence
  ENSG00000187098_3 (sequence is synthesized)
gcagatgcaggagcaggagcgcagggagcagcagcagaagctgcaggcggcccagttcatgcaacagagagtgcccgtgagtcagacaccagccataaacgtcagtgtgcccaccaccct

SEQ ID NO: 682847 - DNA, 120 bp, Artificial Sequence
  ENSG00000187098_4 (sequence is synthesized)
tccctctgccacgcaggtgccgatggaagtccttaaggtgcagacccacctcgaaaaccccaccaagtaccacatacagcaagcccaacggcagcaggtaaagcagtacctttctaccac

SEQ ID NO: 682848 - DNA, 120 bp, Artificial Sequence
  ENSG00000187098_5 (sequence is synthesized)
tttagcaaataaacatgccaaccaagtcctgagcttgccatgtccaaaccagcctggcgatcatgtcatgccaccggtgccggggagcagcgcacccaacagccccatggctatgcttac

SEQ ID NO: 682849 - DNA, 120 bp, Artificial Sequence
  ENSG00000187098_6 (sequence is synthesized)
gcttaactccaactgtgaaaaagagggattttataagtttgaagagcaaaacagggcagagagcgagtgcccaggcatgaacacacattcacgagcgtcctgtatgcagatggatgatgt

SEQ ID NO: 682850 - DNA, 120 bp, Artificial Sequence
  ENSG00000187098_7 (sequence is synthesized)
aatcgatgacatcattagcctagaatcaagttataatgaggaaatcttgggcttgatggatcctgctttgcaaatggcaaatacgttgcctgtctcgggaaacttgattgatctttatgg

SEQ ID NO: 682851 - DNA, 120 bp, Artificial Sequence
  ENSG00000187098_8 (sequence is synthesized)
aaaccaaggtctgcccccaccaggcctcaccatcagcaactcctgtccagccaaccttcccaacataaaaagggagctcacagagtctgaagcaagagcactggccaaagagaggcagaa

SEQ ID NO: 682852 - DNA, 120 bp, Artificial Sequence
  ENSG00000187098_9 (sequence is synthesized)
aaaggacaatcacaacctgattgaacgaagaagaagatttaacataaatgaccgcattaaagaactaggtactttgattcccaagtcaaatgatccagacatgcgctggaacaagggaac

SEQ ID NO: 682853 - DNA, 120 bp, Artificial Sequence
  ENSG00000187098_10 (sequence is synthesized)
catcttaaaagcatccgtggactatatccgaaagttgcaacgagaacagcaacgcgcaaaagaacttgaaaaccgacagaagaaactggagcacgccaaccggcatttgttgctcagaat

SEQ ID NO: 682854 - DNA, 120 bp, Artificial Sequence
  ENSG00000187098_11 (sequence is synthesized)
acaggaacttgaaatgcaggctcgagctcatggactttcccttattccatccacgggtctctgctctccagatttggtgaatcggatcatcaagcaagaacccgttcttgagaactgcag

SEQ ID NO: 682855 - DNA, 120 bp, Artificial Sequence
  ENSG00000187098_12 (sequence is synthesized)
ccaagacctccttcagcatcatgcagacctaacctgtacaacaactctcgatctcacggatggcaccatcaccttcaacaacaacctcggaactgggactgaggccaaccaagcctatag

SEQ ID NO: 682856 - DNA, 120 bp, Artificial Sequence
  ENSG00000187098_13 (sequence is synthesized)
tgtccccacaaaaatgggatccaaactggaagacatcctgatggacgacaccctttctcccgtcggtgtcactgatccactcctttcctcagtgtcccccggagcttccaaaacaagcag

SEQ ID NO: 682857 - DNA, 120 bp, Artificial Sequence
  ENSG00000187098_14 (sequence is synthesized)
ccggaggagcagtatgagcatggaagagacggagcacacttgttagcgaatcctccctgcactgcattcgcacaaactgcttcctttcttgattcgtagatttaataacttacctgaagg

SEQ ID NO: 682858 - DNA, 120 bp, Artificial Sequence
  ENSG00000187098_15 (sequence is synthesized)
ggttttcttgataattttcctttaatatgaaattttttttcatgctttatcaatagcccaggatatattttatttttagaattttgtgaaacagacttgtatattctattttacaactac

SEQ ID NO: 682859 - DNA, 120 bp, Artificial Sequence
  ENSG00000187098_16 (sequence is synthesized)
aaatgcctccaaagtattgtacaaataagtgtgcagtatctgtgaactgaattcaccacagactttagctttctgagcaagaggattttgcgtcagagaaatgtctgtccatttttattc

SEQ ID NO: 682860 - DNA, 120 bp, Artificial Sequence
  ENSG00000187098_17 (sequence is synthesized)
aggggaaacttgatttgagatttttatgcctgtgacttccttggaaatcaaatgtaaagtttaattgaaagaatgtaaagcaaccaaaaagaaaaaaaaaaagaaagaaagaggaaaaga

SEQ ID NO: 682861 - DNA, 120 bp, Artificial Sequence
  ENSG00000187098_18 (sequence is synthesized)
aatccatactaacccttttccattttataaatgtattgattcattggtactgccttaaagatacagtacccctctagctttgtttagtctttatactgcaaactatttaaagaaatatgt

SEQ ID NO: 682862 - DNA, 120 bp, Artificial Sequence
  ENSG00000187098_19 (sequence is synthesized)
attctgtaaaagaaaaaaaaaatgcggccttttcatgaggatcgtctggttagaaaacataactgataccaaccgaaactgaagggagttagaccaaggctctgaaatataaagtctaat

SEQ ID NO: 682863 - DNA, 120 bp, Artificial Sequence
  ENSG00000187098_20 (sequence is synthesized)
ttctgtgctgttacagttttcttcatcaatgagtgtgatccagtttttcataagatattttattttgaaatggaaattaatgtcctctcaaagtaaaatattgaggagcactgaaagtat

SEQ ID NO: 682864 - DNA, 120 bp, Artificial Sequence
  ENSG00000187098_21 (sequence is synthesized)
gttttactttttttttattttatttttgcttttgataagaaaaccgaactgggcatatttctaattggctttactatttttatttttaaattatgttttactgttcatttgatttgtaca

SEQ ID NO: 682865 - DNA, 120 bp, Artificial Sequence
  ENSG00000187098_22 (sequence is synthesized)
gattctttattatcattgttcttttcaatatatttgtattaatttgtaagaatatgcatcttaaaatggcaagttttccatatttttacaactcactggtggttttccgcattctttgta

SEQ ID NO: 682866 - DNA, 120 bp, Artificial Sequence
  ENSG00000187098_23 (sequence is synthesized)
cacccatgaaagaaaacttttatgcaaggtcttgcatttaaaagacagctttgcgaatattttgtaaattacagtctcactcagaactgtttttggacacatttaaggtgtagtattaat

SEQ ID NO: 682867 - DNA, 120 bp, Artificial Sequence
  ENSG00000187098_24 (sequence is synthesized)
aggttaaaaccaggctttctagaaagaataaacttacatatttatttttaggacatgaaaatagcaatattcttggagattgataaccatagcattaatacgcccattatggtcatttaa

SEQ ID NO: 682868 - DNA, 120 bp, Artificial Sequence
  ENSG00000187098_25 (sequence is synthesized)
attggggtttatttcagcaaacttgttgaatttatttttaagaaagaaatactgtattgggaagttactgttacttgataacaatgttttaacaagaagcaatgttataaagttagtttc

SEQ ID NO: 682869 - DNA, 120 bp, Artificial Sequence
  ENSG00000187098_26 (sequence is synthesized)
agtgcattatctacttgtgtagtcctatgcaataacagtagtgttacatgtatcaagcctagatgttttatacagatgccatatagtgttatgagccaggctgttgaatggaatttctca

SEQ ID NO: 682870 - DNA, 120 bp, Artificial Sequence
  ENSG00000187098_27 (sequence is synthesized)
gtagcagcctacaactgaatagcaagtggcataaagcatatccattcagaatgaagtgccttaaatatagcagtagtcttttttggactagcactgactgaactgtaatgtaggggaaag

SEQ ID NO: 682871 - DNA, 120 bp, Artificial Sequence
  ENSG00000187098_28 (sequence is synthesized)
tttcatgatggtatctatagtcaagacgaacatgtagcatggtgcctatgtagacaatataagagcttccaattttccttcagatatttttaatattaaatatattttagtgacagagtg

SEQ ID NO: 682872 - DNA, 120 bp, Artificial Sequence
  ENSG00000187098_29 (sequence is synthesized)
ccaacttctttcatcaggaaaccttattcaggagggtttttaaaaagtgtttaaatgtcaaatgtgaattggtgatgggtgatggagggttcagagaggagtgatcgtcagatgtgtgaa

SEQ ID NO: 682873 - DNA, 120 bp, Artificial Sequence
  ENSG00000187098_30 (sequence is synthesized)
tggacggtttaggtgaaaataatcaactgcatagttcccatgcacgctgggcaatgagaatccttggaaacattggtgatgctatcagttttatagctttatttcttaagggggtaggga

SEQ ID NO: 682874 - DNA, 120 bp, Artificial Sequence
  ENSG00000187098_31 (sequence is synthesized)
aaattagttcccattctttcaacccccttaactgtatagctcttttcctagaatagtgacgcaaatctgcatgaacagctaattgtaccatagtgttcattgatacaatcatagcattgt

SEQ ID NO: 682875 - DNA, 120 bp, Artificial Sequence
  ENSG00000187098_32 (sequence is synthesized)
ctatttttctcttcatatttatatgggggggagggcgctggatgcaaaagttgaagatcgtgatgctatgatgttagttttccttagctgattttgagggtttttaaaaataaagcaagg

SEQ ID NO: 682876 - DNA, 120 bp, Artificial Sequence
  ENSG00000187098_33 (sequence is synthesized)
ttgactaacctacggccacgggaacaggaccatggttaagcaaccatatagaaagctttgttgaaagaaagtatggcatcttgtaccactgccctgactgtcacaactcctaaccttgcc

SEQ ID NO: 682877 - DNA, 120 bp, Artificial Sequence
  ENSG00000187098_34 (sequence is synthesized)
attgcctgcctccccctccccttctccttaagagacaatttctgcaggtggcaggtgagcaagcccaggagaatgctgcaatcttgggggtggttttatttatttcttttttgccaaata

SEQ ID NO: 682878 - DNA, 120 bp, Artificial Sequence
  ENSG00000187098_35 (sequence is synthesized)
gagtgtggattcatttcaggggctagctaagccaagaggcagtggtttgggcttgttgtttgtaacaagaaaatgatccacaccactcccccgattcccgggtgcagaattgtaactcgg

SEQ ID NO: 682879 - DNA, 120 bp, Artificial Sequence
  ENSG00000187098_36 (sequence is synthesized)
ggttgggcctctatatggagtgaccaaaatgccaaaattgtccatctgcctctgagtagggcaatggaaataccaaaccttctgactttgccaaaaagcatacaagcaacctggtcatac

SEQ ID NO: 682880 - DNA, 120 bp, Artificial Sequence
  ENSG00000187098_37 (sequence is synthesized)
ataggatgacaaaattctttctggttgtttttaaacaataaagcaataagaacaaatacaatacataggaagttaaaagcacaaaggaatgaacttattaatatttttgaaaaatgcact

SEQ ID NO: 682881 - DNA, 120 bp, Artificial Sequence
  ENSG00000187098_38 (sequence is synthesized)
gggaaaaagttgatgtcaataacagtataaaacagccctatttcttgataaaaaatgacaaatgactgtctcttgcggatgcttggtactgtaatgttaataatagtcacctgctgttgg

SEQ ID NO: 682882 - DNA, 120 bp, Artificial Sequence
  ENSG00000187098_39 (sequence is synthesized)
atgcagcaataatttctgtatggtccatagcactgtatattatggatcgatattaatgtatccaatgaaataatcgacttgttcttgatagcctcattaaagcatttggtttttcacata

SEQ ID NO: 682883 - DNA, 120 bp, Artificial Sequence
  ENSG00000187098_40 (sequence is synthesized)
agtgccagaactaactttgactttcactcttcgccaagggcttgcagaacaccttaaaggaaaaaagatggaggcgcttagagttcagatgttcatgccatgctcctttgaaagcttgta

SEQ ID NO: 682884 - DNA, 120 bp, Artificial Sequence
  ENSG00000187098_41 (sequence is synthesized)
ctttgccagtccatcttcaaattggaattatagaaagtagagggagggatagtctaccgtctctcactggattggtgccacctaaaacattgttatgctggaaatgctagaatataatca

SEQ ID NO: 682885 - DNA, 120 bp, Artificial Sequence
  ENSG00000187098_42 (sequence is synthesized)
gaagcagtgagaatgcagagagaggagaaggggaggtggaaaaggaaaagcaaaaatagaagaggtgtgggacatgctgtttagaagttccgcttgttgtgaatgtctggaatattattt

SEQ ID NO: 682886 - DNA, 120 bp, Artificial Sequence
  ENSG00000187098_43 (sequence is synthesized)
attctgtttcataataaaattgccactgcccgttaaatctgctttggtgaaggctggattggaaacaagactcaaactaccttcaagctaattggtgcatcaaaatttgcagcatacaaa

SEQ ID NO: 682887 - DNA, 120 bp, Artificial Sequence
  ENSG00000187098_44 (sequence is synthesized)
tacctgagagctgtgatttaatgctcattatttccaaattatgagatgatgagcttcatctcaatgggatttaccgtactatggactatgaagtgtttatgcaaattcggaggcaacttt

SEQ ID NO: 682888 - DNA, 120 bp, Artificial Sequence
  ENSG00000187098_45 (sequence is synthesized)
tctagagttggattgattttaatttctagagggactaaaatctttgcccctatgcccaaaccaactgctttatttttctctacccaaatttgtcatctagcaagatgatttgacacaagt

SEQ ID NO: 682889 - DNA, 120 bp, Artificial Sequence
  ENSG00000187098_46 (sequence is synthesized)
tcttccttcattatttcatcttttggtcagattccactttgtttgaaagcttagttcatcttgttgctgtgccatcagctttgtgtgaacaggtcattaaaaagtcatttgcaaatccaa

SEQ ID NO: 682890 - DNA, 120 bp, Artificial Sequence
  ENSG00000187098_47 (sequence is synthesized)
tgagtgaattaaacctcttttctttataagttacccagcctccggtatttctttatagcaatgtggactaatacagaaaattggtgccaagaaatggggcattgctataaagatacctga

SEQ ID NO: 682891 - DNA, 120 bp, Artificial Sequence
  ENSG00000187098_48 (sequence is synthesized)
aactttggaattgggtaacaggcagaggttggaagaatttgggggactcagaagaagataggaagatgatggaaagtttggaatttcctagagactgattaaatggttgtgaacaaaatg

SEQ ID NO: 682892 - DNA, 120 bp, Artificial Sequence
  ENSG00000187098_49 (sequence is synthesized)
ttgtaatagacatactgttttcaataagtataaatctgctcttttaatgctgtttattatttgatgccataagaagtaattcaatgtagttttgaacaaagtaaatattagtaggattct

SEQ ID NO: 682893 - DNA, 120 bp, Artificial Sequence
  ENSG00000187098_50 (sequence is synthesized)
tttttttttttttttttggcctagtgtgtggctaaactatcttcatcagctcctgttcattgctcataagattaaattgtctttatcaagaaaaaagtgacttaaaattgaataatgttg

SEQ ID NO: 682894 - DNA, 120 bp, Artificial Sequence
  ENSG00000187098_51 (sequence is synthesized)
ttttttggggaaaagtatttctcgttctgaattaatgtctgtaggaaaggagaaaaaacatcctgttggcttgttaatagtcatgtcttttaaaacacatacgtgtgcagacccacctcg

SEQ ID NO: 682895 - DNA, 120 bp, Artificial Sequence
  ENSG00000187098_52 (sequence is synthesized)
cagacctattccgctccatctctgaagtcaaatgggacaccttgaaaatacttcagtggttttcccacgagctattttctctctctgtgaaaaggaaaccaggaaattgactctgtgcct

SEQ ID NO: 682896 - DNA, 120 bp, Artificial Sequence
  ENSG00000187098_53 (sequence is synthesized)
gttgaataaagaatgacctagatggctgaagtgtttctggtgtgctagaagggatttattccaaatcttccttattactaaattctcagtggacctctctgggtttcgagcaagtgcgga

SEQ ID NO: 682897 - DNA, 120 bp, Artificial Sequence
  ENSG00000187098_54 (sequence is synthesized)
aaattccatttggtgttcgccggctgatgtgcaagtaaaagcagggaatgtatgatggaaaatgtcataccctttatgatgacttttgatctgtgaagaatataattattctgtgtttaa

SEQ ID NO: 682898 - DNA, 120 bp, Artificial Sequence
  ENSG00000187098_55 (sequence is synthesized)
aatttagccttcctagtgttgagagaaggtgcacgtaagcgtgtggcagaacgtctgcaatcgcatctttgtaataatctcctttctgagacggttcagtggactcaatgttccgccaaa

SEQ ID NO: 682899 - DNA, 120 bp, Artificial Sequence
  ENSG00000187105_0 (sequence is synthesized)
ggaacctaagaaaccaaggaaggcttaagatgcagaaccttgcttctctctgaggactgccttttaggaggccatttggaaagtaattttgaaacactgctcctttgccagtatctgaaa

SEQ ID NO: 682900 - DNA, 120 bp, Artificial Sequence
  ENSG00000187105_1 (sequence is synthesized)
ggtgctggatggtgtcagctggaagatgaggggcaacctgaggtagctgaaaaaactttggattaggtgtcaaaagggtgccaggtctcatctccaggcctttcctctaggccaggcagt

SEQ ID NO: 682901 - DNA, 120 bp, Artificial Sequence
  ENSG00000187105_2 (sequence is synthesized)
gtggaaggaagcatttgctgggacgcggtatgaccaggacccagaagggaaagacctttctcccccattgcttctatcagtcactgcccccacgactgggatggggcatgattttaaact

SEQ ID NO: 682902 - DNA, 120 bp, Artificial Sequence
  ENSG00000187105_3 (sequence is synthesized)
actcaaaattgaaaggcaaggaggagtgtgcctctgtctccagtgtgcctatggtcttcttcagctcacagtaccgtctacaccgcaagagccaatatttgaaaatggctgctgcaaacc

SEQ ID NO: 682903 - DNA, 120 bp, Artificial Sequence
  ENSG00000187105_4 (sequence is synthesized)
ttaccttctctcaggaggtggtgtggcagcgaggcctgcccagcattccttatagccagtacagctttgaccacctctacaataccaatgacatcatccatactccccagatcaggaagg

SEQ ID NO: 682904 - DNA, 120 bp, Artificial Sequence
  ENSG00000187105_5 (sequence is synthesized)
cccggcctcagaaacctgttagcttcaagttcctgggttcctcaagtcccttaacaggagacacctccctggctgtgaagacagaaagctctgccaatcccgaaaagaagctgaagaaat

SEQ ID NO: 682905 - DNA, 120 bp, Artificial Sequence
  ENSG00000187105_6 (sequence is synthesized)
caaagccagccagcaccgtccgggaagcaccccgccctctcatccatcatccctgcatgcatccagatatgctgggtcggccaccttctctagatgtgaacctggaggaaagagaagcct

SEQ ID NO: 682906 - DNA, 120 bp, Artificial Sequence
  ENSG00000187105_7 (sequence is synthesized)
ggcttctgcctcctgagaaggaggccagagcgtgggaggccactgtgctggaaaagctgaacgagcgcacagcccgatggatccagagcaagcgtcctcgaaggcctggggcatccccca

SEQ ID NO: 682907 - DNA, 120 bp, Artificial Sequence
  ENSG00000187105_8 (sequence is synthesized)
acaagtggcagagcttcctgcgccagcagtacgactggagtcacattcgggatgagcttacctctgccagtgacctggagctcctgaaacagctggaggcagaagagacagcagagtttg

SEQ ID NO: 682908 - DNA, 120 bp, Artificial Sequence
  ENSG00000187105_9 (sequence is synthesized)
aggatcaaagtgtcatcctgcccccacaggaaaagaagaagccagaactgctgcttcccgtttactacagattgcccagttacttccaacaagcagagacagttgagatcatgcctggca

SEQ ID NO: 682909 - DNA, 120 bp, Artificial Sequence
  ENSG00000187105_10 (sequence is synthesized)
acaagagcactgaggatatccatgaaaagacgagcctctcccagccccaaacccagagctactttcgccaggtgactccccgagctggaaagtttgcctactccacagacaacacctttg

SEQ ID NO: 682910 - DNA, 120 bp, Artificial Sequence
  ENSG00000187105_11 (sequence is synthesized)
aacaggagatttactttgatgaagtccagatcatccaccagattggtgcaaagagagaccagattgtcctggaaaacctaaatcggtacaacaagcagctatctaaggtcttccctgaaa

SEQ ID NO: 682911 - DNA, 120 bp, Artificial Sequence
  ENSG00000187105_12 (sequence is synthesized)
ctccagaaaagtggagtgcccaggcaattcctgaagcatcttacagacctgtgcaaggagccctgcgctggactgctttgcccacccccgccaaggatatgctgctgcaggtgggtgaga

SEQ ID NO: 682912 - DNA, 120 bp, Artificial Sequence
  ENSG00000187105_13 (sequence is synthesized)
aggatgtgcctattaagaccaggagattgaagaagcaggcaaaatcactgcaggaggatgtgacctgggaactggtggtcctgcggaggatgctgaaggaatggaagactgcctgggctc

SEQ ID NO: 682913 - DNA, 120 bp, Artificial Sequence
  ENSG00000187105_14 (sequence is synthesized)
ggaacggccccggattgccaccagccagagagactcagacaagaccatccaggacttgccggaggttctactgcctgccctagaggctgctctttgtgacaagaatgcccatgtgcggat

SEQ ID NO: 682914 - DNA, 120 bp, Artificial Sequence
  ENSG00000187105_15 (sequence is synthesized)
ggcagcagcaatatgccaatatgccatacagtcacataatccccttgcccggaacatcatgcagactgcccttctgaagggtaacagtgtggatagctgggctgcagctcagtgcttggc

SEQ ID NO: 682915 - DNA, 120 bp, Artificial Sequence
  ENSG00000187105_16 (sequence is synthesized)
tctggaaggtactgctacttaccctgtgattaagaggatcctccaccagctgtttacaaagaagaatgaggacactgaggaacagtcttatatcctcctgagctatctgagtgagaagac

SEQ ID NO: 682916 - DNA, 120 bp, Artificial Sequence
  ENSG00000187105_17 (sequence is synthesized)
aaccctgatacacaccatgcttgctgtggagctgaacagctgtcaatggaagaaccggattgtggcctgccaggctttctcccggatcagtggaaatgtctgcttggatatgaaacataa

SEQ ID NO: 682917 - DNA, 120 bp, Artificial Sequence
  ENSG00000187105_18 (sequence is synthesized)
gttgatccagctgatgtggaatgactggaataaggaagtgaggagagcagctgcacaggcgcttgggcaaatgagcctcgggaaagaggtgcacgacataatcagggtcaagctaggtca

SEQ ID NO: 682918 - DNA, 120 bp, Artificial Sequence
  ENSG00000187105_19 (sequence is synthesized)
aggaaattcccaggagcgtgtggaagctctctacctgataggtgagctcaagcttatgaccgccaagcttctcccaagcttcctgcactgcttctctgatgacttcacagcagttcggcg

SEQ ID NO: 682919 - DNA, 120 bp, Artificial Sequence
  ENSG00000187105_20 (sequence is synthesized)
ggcagcctgtttggcagctggtgccctgcagatccgcgacaagatggtgcttgaatgcctcctgaacctgatgcagagagatccttactggaaaatcaaggcctttgccattcgagcttt

SEQ ID NO: 682920 - DNA, 120 bp, Artificial Sequence
  ENSG00000187105_21 (sequence is synthesized)
gggacagattgggcaagtaagtcccgagctgacggatcttctgctctgggctatccactatgaagagtcaccaggtgtacggctggaagcttgccgtagcatcctagccctgaaacttca

SEQ ID NO: 682921 - DNA, 120 bp, Artificial Sequence
  ENSG00000187105_22 (sequence is synthesized)
aggggaccgggtcagggacaccttcctagacgtgctgctcctggagaaccacgatgctgttctaaaagaaatgtaccagacaatgaagatactcaacttaggaaatgaaggaaaccaaga

SEQ ID NO: 682922 - DNA, 120 bp, Artificial Sequence
  ENSG00000187105_23 (sequence is synthesized)
aatgcttcaggagatcaagaacaggattaaaacactaagccaaaaggacttgctgacacacaaaatactcaagctggagatggtcatgggaaaagtgagggaggaagcaaaacgtgttta

SEQ ID NO: 682923 - DNA, 120 bp, Artificial Sequence
  ENSG00000187105_24 (sequence is synthesized)
cttgaaacccaaaggagaacaaggaccactaacactccagactttactccaagaaacttttcaggatgagatggttcttcctagaagaccttccgaggtttgtgacactgaagcagtgat

SEQ ID NO: 682924 - DNA, 120 bp, Artificial Sequence
  ENSG00000187105_25 (sequence is synthesized)
aaagcctgtgaagccccgcgcaccaaatccctggttacaaagttcagtcccaggcctaaccacacgaagcaaagttcgttcatcacttgtcaaagatctacgcacctcccccgagaaaag

SEQ ID NO: 682925 - DNA, 120 bp, Artificial Sequence
  ENSG00000187105_26 (sequence is synthesized)
gattgctgtgggaccatttagatccgactacccagctctttatctgggtaaattctcagagagaacatttttttctcccatcatgtcttctccctctggaaagaaaggtgctcatctcta

SEQ ID NO: 682926 - DNA, 120 bp, Artificial Sequence
  ENSG00000187105_27 (sequence is synthesized)
agctgaacacttgtcttacttcaagatgcaggaagcagtggacctggtcacattgggtctttttaattgatactgtacaatcttgttgtcactatgtttataaagagaaattatttaaca

SEQ ID NO: 682927 - DNA, 120 bp, Artificial Sequence
  ENSG00000187105_28 (sequence is synthesized)
tggacaacatatttgagcttcttcaagactactattttgaattccctgtctggaaaggtcacatatctctgtcactcctggattggtcactggtgccttatttagtccatttggtgaaat

SEQ ID NO: 682928 - DNA, 69 bp, Artificial Sequence
  ENSG00000187105_29 (sequence is synthesized)
tctgaaaggtgctggatggtgtcagctggaagatgaggggcaacctgagagacggaacacgcctcagcc

SEQ ID NO: 682929 - DNA, 120 bp, Artificial Sequence
  ENSG00000187109_0 (sequence is synthesized)
aaaagatatggtggggtgcttaacagaggaggttagacaccggcgggaaccagaggagcccaagcgcggcgcctgggcctcggggctgcaggagtcctcggtgggggtatggaggtcgcc

SEQ ID NO: 682930 - DNA, 120 bp, Artificial Sequence
  ENSG00000187109_1 (sequence is synthesized)
ggggaaggaggacggttcagttgctaggcaacccggcctggacccgcctctcgctcgcgttgctgggagactacaaggccgggaggagggcggcgaaagggccctacgtgctgacgctaa

SEQ ID NO: 682931 - DNA, 120 bp, Artificial Sequence
  ENSG00000187109_2 (sequence is synthesized)
ttgtatatgagcgcgagcggcgggctcttgggtcttttttagcgccatctgctcgcggcgccgcctcctgctcctcccgctgctgctgccgctgccgccctgagtcactgcctgcgcagc

SEQ ID NO: 682932 - DNA, 120 bp, Artificial Sequence
  ENSG00000187109_3 (sequence is synthesized)
tccggccgcctggctccccatactagtcgccgatatttggagttcttacaacatggcagacattgacaacaaagaacagtctgaacttgatcaagatttggatgatgttgaagaagtaga

SEQ ID NO: 682933 - DNA, 120 bp, Artificial Sequence
  ENSG00000187109_4 (sequence is synthesized)
agaagaggaaactggtgaagaaacaaaactcaaagcacgtcagctaactgttcagatgatgcaaaatcctcagattcttgcagcccttcaagaaagacttgatggtctggtagaaacacc

SEQ ID NO: 682934 - DNA, 120 bp, Artificial Sequence
  ENSG00000187109_5 (sequence is synthesized)
aacaggatacattgaaagcctgcctagggtagttaaaagacgagtgaatgctctcaaaaacctgcaagttaaatgtgcacagatagaagccaaattctatgaggaagttcacgatcttga

SEQ ID NO: 682935 - DNA, 120 bp, Artificial Sequence
  ENSG00000187109_6 (sequence is synthesized)
aaggaagtatgctgttctctatcagcctctatttgataagcgatttgaaattattaatgcaatttatgaacctacggaagaagaatgtgaatggaaaccagatgaagaagatgagatttc

SEQ ID NO: 682936 - DNA, 120 bp, Artificial Sequence
  ENSG00000187109_7 (sequence is synthesized)
ggaggaattgaaagaaaaggccaagattgaagatgagaaaaaagatgaagaaaaagaagaccccaaaggaattcctgaattttggttaactgtttttaagaatgttgacttgctcagtga

SEQ ID NO: 682937 - DNA, 120 bp, Artificial Sequence
  ENSG00000187109_8 (sequence is synthesized)
tatggttcaggaacacgatgaacctattctgaagcacttgaaagatattaaagtgaagttctcagatgctggccagcctatgagttttgtcttagaatttcactttgaacccaatgaata

SEQ ID NO: 682938 - DNA, 120 bp, Artificial Sequence
  ENSG00000187109_9 (sequence is synthesized)
ttttacaaatgaagtgctgacaaagacatacaggatgaggtcagaaccagatgattctgatcccttttcttttgatggaccagaaattatgggttgtacagggtgccagatagattggaa

SEQ ID NO: 682939 - DNA, 120 bp, Artificial Sequence
  ENSG00000187109_10 (sequence is synthesized)
aaaaggaaagaatgtcactttgaaaactattaagaagaagcagaaacacaagggacgtgggacagttcgtactgtgactaaaacagtttccaatgactctttctttaacttttttgcccc

SEQ ID NO: 682940 - DNA, 120 bp, Artificial Sequence
  ENSG00000187109_11 (sequence is synthesized)
tcctgaagttcctgagagtggagatctggatgatgatgctgaagctatccttgctgcagacttcgaaattggtcactttttacgtgagcgtataatcccaagatcagtgttatattttac

SEQ ID NO: 682941 - DNA, 120 bp, Artificial Sequence
  ENSG00000187109_12 (sequence is synthesized)
tggagaagctattgaagatgatgatgatgattatgatgaagaaggtgaagaagcggatgaggaaggggaagaagaaggagatgaggaaaatgatccagactatgacccaaagaaggatca

SEQ ID NO: 682942 - DNA, 120 bp, Artificial Sequence
  ENSG00000187109_13 (sequence is synthesized)
aaacccagcagagtgcaagcagcagtgaagcaggatgtatgtggccttgaggataacctgcactggtctaccttctgcttccctggaaaggatgaatttacatcatttgacaagcctatt

SEQ ID NO: 682943 - DNA, 120 bp, Artificial Sequence
  ENSG00000187109_14 (sequence is synthesized)
ttcaagttatttgttgtttgtttgcttgtttttgtttttgcagctaaaataaaaatttcaaatacaattttagttcttacaagataatgtcttaattttgtaccaattcaggtagaagta

SEQ ID NO: 682944 - DNA, 120 bp, Artificial Sequence
  ENSG00000187109_15 (sequence is synthesized)
gaggcctaccttgaattaagggttatactcagtttttaacacattgttgaagaaaaggtaccagctttggaacgagatgctatactaataagcaagtgtaaaaaaaaaaaaaaaagagga

SEQ ID NO: 682945 - DNA, 120 bp, Artificial Sequence
  ENSG00000187109_16 (sequence is synthesized)
agaaaatcttaagtgattgatgctgttttcttttaaaaaaaaaaaaaaaaattcattttctttgggttagagctagagagaaggccccaagcttctatggtttcttctaattcttattgc

SEQ ID NO: 682946 - DNA, 120 bp, Artificial Sequence
  ENSG00000187109_17 (sequence is synthesized)
ttaaagtatgagtatgtcacttacccgtgcttctgtttactgtgtaattaaaatgggtagtactgtttacctaactacctcatggatgtgttaaggcatattgagttaaatctcatataa

SEQ ID NO: 682947 - DNA, 120 bp, Artificial Sequence
  ENSG00000187109_18 (sequence is synthesized)
gtttctcaatcttgttaaaagctcaaaattttgggcctatttgtaatgccagtgtgacactaagcattttgttcacaccacgctttgataactaaactggaaaacaaaggtgttaagtac

SEQ ID NO: 682948 - DNA, 120 bp, Artificial Sequence
  ENSG00000187109_19 (sequence is synthesized)
ctctgttctggatctgggcagtcagcactctttttagatctttgtgtggctcctatttttatagaagtggagggatgcactatttcacaaggtccaagatttgttttcagatatttttga

SEQ ID NO: 682949 - DNA, 120 bp, Artificial Sequence
  ENSG00000187109_20 (sequence is synthesized)
tgactgtattgtaaatactacagggatagcactatagtattgtagtcatgagacttaaagtggaaataagactatttttgacaaaagatgccattaaatttcagactgtagagccacatt

SEQ ID NO: 682950 - DNA, 120 bp, Artificial Sequence
  ENSG00000187109_21 (sequence is synthesized)
tacaatacctcaggctaattactgttaattttggggttgaacttttttttgacagtgagggtggattattggattgtcattagaggaaggtctagatttcctgctcttaataaaattaca

SEQ ID NO: 682951 - DNA, 120 bp, Artificial Sequence
  ENSG00000187109_22 (sequence is synthesized)
ttgaattgatttttagaggtaatgaaaacttcctttctgagaagttagtgttaaggtcttggaatgtgaacacattgtttgtagtgctatccattcctctcctgagattttaacttacta

SEQ ID NO: 682952 - DNA, 120 bp, Artificial Sequence
  ENSG00000187109_23 (sequence is synthesized)
ctggaaatccttaaccaattataatagctttttttctttattttcaaaatgatttcctttgctttgattagacactatgtgctttttttttttaaccatagttcatcgaaatgcagcttt

SEQ ID NO: 682953 - DNA, 120 bp, Artificial Sequence
  ENSG00000187109_24 (sequence is synthesized)
ttctgaacttcaaagatagaatcccatttttaatgaactgaagtagcaaaatcatctttttcattctttaggaaatagctattgccaaagtgaaggtgtagataatacctagtcttgtta

SEQ ID NO: 682954 - DNA, 120 bp, Artificial Sequence
  ENSG00000187109_25 (sequence is synthesized)
cataaaggggatgtggtttgcagaagaattttctttataaaattgaagttttaagggacgtcagtgtttatgccatttttccagttccaaaatgattccattccattctagaaatttgaa

SEQ ID NO: 682955 - DNA, 120 bp, Artificial Sequence
  ENSG00000187109_26 (sequence is synthesized)
gtatgtaacctgaaatccttaataaaatttggatttaattttataaaatgtactggtgatattttgggtgtttttttttaaatgaatgtatatactttttttttgaagagtggagagtag

SEQ ID NO: 682956 - DNA, 120 bp, Artificial Sequence
  ENSG00000187109_27 (sequence is synthesized)
tgatgtctagagggagctattttgtgctgaggccactatgttctgtaaatatataattttaagagcaacctcacaatccctgctaagtggagtttattatttgaagactaaaatggaatt

SEQ ID NO: 682957 - DNA, 120 bp, Artificial Sequence
  ENSG00000187109_28 (sequence is synthesized)
ccatagttcctgataggttatattctgggttattattctgagttatctacaaacatttttgagatttgtctttacactctgattgtagtttccagcagcccatgcacactgccaagtaag

SEQ ID NO: 682958 - DNA, 120 bp, Artificial Sequence
  ENSG00000187109_29 (sequence is synthesized)
tctcattttttcctgttagaaatggtgaaatatcatataatcacttataaagaaaactgatatgaaaaaattttagagttgtttgctttatggtcactcaagtagggtaagtgttccaca

SEQ ID NO: 682959 - DNA, 120 bp, Artificial Sequence
  ENSG00000187109_30 (sequence is synthesized)
aattccacaagttgatagtttaacatggatgtctgaaagccacatatataatttcttaggattcttaaattagtaaatctagcttactgaagcagtattagcatcactattttagattgc

SEQ ID NO: 682960 - DNA, 120 bp, Artificial Sequence
  ENSG00000187109_31 (sequence is synthesized)
aaaaataccttaattgtgtggaactggcttgtagagtggtacttaagaaaaatgggattctacctctatttctgttttagcacacttaatcaggaaaggatatattaactttcataaaaa

SEQ ID NO: 682961 - DNA, 120 bp, Artificial Sequence
  ENSG00000187109_32 (sequence is synthesized)
tatttttgttgtgtgaataggttaatgatatggtaaggcccctaaaataactgaattaattgtttattgtaattgtaggccattcccattattaaaaataaagacaaaacttgaagtaac

SEQ ID NO: 682962 - DNA, 120 bp, Artificial Sequence
  ENSG00000187109_33 (sequence is synthesized)
tgaaaatcttatcgtgctatgtagaaatattgaactaatattcaaatatttgaatgctttggtttcagggattggtttaaaattggagtccttttttatgggttagtcttacaaaaattt

SEQ ID NO: 682963 - DNA, 120 bp, Artificial Sequence
  ENSG00000187109_34 (sequence is synthesized)
aagcctttatatttttgactttaaatcaaaacaaatgttattttaaatgtacagaatagattggtagtgcagaagagtgtaagttcttcataggagctttagaaaagagaaatatgtgct

SEQ ID NO: 682964 - DNA, 120 bp, Artificial Sequence
  ENSG00000187109_35 (sequence is synthesized)
aattcagtttttttttaatctgcactgtacatatatacttggtaattatgagcttgattttgtttttggaaatatgtgttcataatttaggtaatttgctacttaaagcactaagtctct

SEQ ID NO: 682965 - DNA, 120 bp, Artificial Sequence
  ENSG00000187109_36 (sequence is synthesized)
gatacctgaaaagtacatgtaaatggtgatggtgaaataatactgcagttaacttaatagatgtatactggtgatttttgtatgctggattaaaactccagatattaaaatataacctgg

SEQ ID NO: 682966 - DNA, 120 bp, Artificial Sequence
  ENSG00000187109_37 (sequence is synthesized)
gatgtatgtggccttgaggataacctgcactgtaatagcctaaacacaactcttatttacttacagccttatgtttttgtattttcttggtagactaggtaatttttttttaaaggacag

SEQ ID NO: 682967 - DNA, 120 bp, Artificial Sequence
  ENSG00000187109_38 (sequence is synthesized)
gaaactgatattttaaagaccaatttgttctacctagcattttaactagtttttctgccagctatgttgaatgcacaaattctgtcacgcatgttcattcattgctacataatttggttc

SEQ ID NO: 682968 - DNA, 120 bp, Artificial Sequence
  ENSG00000187109_39 (sequence is synthesized)
ttctggaatatttttatgtagctcttggagtacagctatgaaaattaacaactgttaaaggaaataccttttttttttttttgtaattttttccttgaagaaccaaagtattttttcagc

SEQ ID NO: 682969 - DNA, 120 bp, Artificial Sequence
  ENSG00000187109_40 (sequence is synthesized)
tggttgttgaatagggttaagtccgcttggattagctgtgcctttcattactttgttacagaaatgcagtgacttatactaagacaatttattgtttaaaaaaaaaattggcaagacaac

SEQ ID NO: 682970 - DNA, 120 bp, Artificial Sequence
  ENSG00000187109_41 (sequence is synthesized)
tatatggttaagaatttccagtatgaccacacccaataactgttattagagtgttaatggattattgtgttttaggtgacatagttaactgtaaagtaacctgactcagtatagttactg

SEQ ID NO: 682971 - DNA, 120 bp, Artificial Sequence
  ENSG00000187109_42 (sequence is synthesized)
gtaccacagtgaggtgaataaaacgggattttcagaagttagcctgaatttaactgtatttttaaatttaacctccattaactaagcatcttttctttgtggtagggtctaccttctgct

SEQ ID NO: 682972 - DNA, 120 bp, Artificial Sequence
  ENSG00000187109_43 (sequence is synthesized)
gaaattattttactcaaggataagtattcataagaaattttgattgatgtatattttcaaaaatacagtatgctttgtatcttgtgtttcttccttttgacatcatattgtcaggttttc

SEQ ID NO: 682973 - DNA, 120 bp, Artificial Sequence
  ENSG00000187109_44 (sequence is synthesized)
cagtttacaaaaattaagttattcactaaaatcttagtacagacagtccctgacttataatggtttgacttaagacttcagctttatgagtttattggagtattaaacacatcttctact

SEQ ID NO: 682974 - DNA, 120 bp, Artificial Sequence
  ENSG00000187109_45 (sequence is synthesized)
tatgatatttttgacttacagtgggcttattgaggcccgaccatgtcatcctcaagccaagagtctgaataaaagaagaaatggggtatttagaaataatagattactggcgggaaataa

SEQ ID NO: 682975 - DNA, 120 bp, Artificial Sequence
  ENSG00000187109_46 (sequence is synthesized)
gtcagtctggttgtttaattttcctatgggaaattgggcattttaagttttgtggatcctagaacaaactgagttttattattttgaaacccaggataaaatattacataaaagcattgc

SEQ ID NO: 682976 - DNA, 88 bp, Artificial Sequence
  ENSG00000187109_47 (sequence is synthesized)
tcactacagctgtcatattccaagtagtcgggattacaggcgtgtgccactgagcccagctgatttttgtacttttagtagagatggg

SEQ ID NO: 682977 - DNA, 78 bp, Artificial Sequence
  ENSG00000187109_48 (sequence is synthesized)
tctcaaagtgctggcctctcgtttcttacatgttttaaacttaaagccaaaaagaaggaactaggaatgtgtgattaa

SEQ ID NO: 682978 - DNA, 120 bp, Artificial Sequence
  ENSG00000187109_49 (sequence is synthesized)
acttaaagccaaaaagaaggaactaggaatgtgtgattaaacgtgagtgccagaagtcgacagatctcatatccagagttgaaggtcttattcataattttatcattcataatgtattag

SEQ ID NO: 682979 - DNA, 120 bp, Artificial Sequence
  ENSG00000187109_50 (sequence is synthesized)
gcaattgcggctctggtaaatttcatgaggttgtaaaatagttgctaccagaaggctcaaaatttgtatgagcttttagctgagattttgagaatctgtaggaatttgtgaagtgagagg

SEQ ID NO: 682980 - DNA, 120 bp, Artificial Sequence
  ENSG00000187109_51 (sequence is synthesized)
aagaacctctgaacggtgagcagttcaggtggaggaacaggaggaaatacaggcaaaggtcccagaacagaacaattgaggctacattcaaggaattgagatacctggaaatacaggtag

SEQ ID NO: 682981 - DNA, 120 bp, Artificial Sequence
  ENSG00000187109_52 (sequence is synthesized)
aaatacaagtggccagtccatagaaagtttagctgtggaagtcctcttaatgggtttaaaacactggaaccacctgttacaagagtatttcaagtgaggatgaggatgaccattccatgt

SEQ ID NO: 682982 - DNA, 88 bp, Artificial Sequence
  ENSG00000187109_53 (sequence is synthesized)
ttttttttttttttctgagacagggtcttacttcatttgcccaggttggagtgtactgctgcaatcagcctctcgagtagctggtatc

SEQ ID NO: 682983 - DNA, 80 bp, Artificial Sequence
  ENSG00000187109_54 (sequence is synthesized)
ttggccaggctggtttcgaactcctggactcaggtacgttagccactgcacctggctgaaagataatttttaaaggaaga

SEQ ID NO: 682984 - DNA, 120 bp, Artificial Sequence
  ENSG00000187109_55 (sequence is synthesized)
catttgaggtaggtgggccccaggggccagtaaaggcttcagggtcatatatatgcaactgaaaaagtaagttaaatgacgtggcagcagcagtgaacaagacgctgttagctgttaaga

SEQ ID NO: 682985 - DNA, 120 bp, Artificial Sequence
  ENSG00000187109_56 (sequence is synthesized)
taatttacttagccaagaacaaaagctttatttaaaaaaattgctgaataaagttttatctgcagtgaatccccttagtcaaactccagattggtgttttggggtaacttatcaatatta

SEQ ID NO: 682986 - DNA, 120 bp, Artificial Sequence
  ENSG00000187109_57 (sequence is synthesized)
cagctttccttcaactctgaaaatagttgaaagaattccggtatattctttactctgatcaacatactttttggctcaaaaagttttctagtcttacaggcgttttctatttcagccctg

SEQ ID NO: 682987 - DNA, 120 bp, Artificial Sequence
  ENSG00000187109_58 (sequence is synthesized)
gaatgggccatttctccaaggattgctggcttcttagaatagggagtattacttagaaacttaagtccagttgctgaatatgctctttacagggtatttctagggcctttcaggtgaaag

SEQ ID NO: 682988 - DNA, 120 bp, Artificial Sequence
  ENSG00000187109_59 (sequence is synthesized)
aaaatttgtacatgtatcataaaaactgaacgcacagtggatactttgaagttgaatcaaacaatgttatttttcctactgctactgccgtccgtatttgtaattattttcaaataagtg

SEQ ID NO: 682989 - DNA, 120 bp, Artificial Sequence
  ENSG00000187109_60 (sequence is synthesized)
gaatcagttgatccaactaggaaagtagatgaggttgctctataggaataagaatccatgaataaaaatggagatctaattttagactaaaacttttcagcccctaaacaaatgtctctg

SEQ ID NO: 682990 - DNA, 120 bp, Artificial Sequence
  ENSG00000187109_61 (sequence is synthesized)
ctaccaaattttaatggatatgtgtgagaatacaagtagtgtctttgggtagtgtctttaaacacaggctttagagtctgtctaccacctgttggttcagcatcagtcttttcatctgta

SEQ ID NO: 682991 - DNA, 120 bp, Artificial Sequence
  ENSG00000187109_62 (sequence is synthesized)
ttgcgaaagatcgtggtgaacattaataaggaaacaaaagtacttagagcctatgagcacttcctaaacataagaaaacctaaaatttgtgattgggattactttttaaattggttttag

SEQ ID NO: 682992 - DNA, 120 bp, Artificial Sequence
  ENSG00000187109_63 (sequence is synthesized)
aactttatttctgaactagttggggttttcttggttcaaaggcaaaattcctcctaggtgtaagggatgcattactcagtgtacataagaacactgagactaagactggataataaaatt

SEQ ID NO: 682993 - DNA, 120 bp, Artificial Sequence
  ENSG00000187109_64 (sequence is synthesized)
aaacatatgcctcgttttgaagattttatgtgtaaaaaacaaaaaaaaaattgaccttaacctaaagtgagctaggtttgaaaatctcatctcattcctttcttgttttattttaataca

SEQ ID NO: 682994 - DNA, 120 bp, Artificial Sequence
  ENSG00000187109_65 (sequence is synthesized)
tgtgttttcatatgctgtttactttctttggcctttggcagaacccagaaatgatctagggtaaaacgaaatgaggtatcgctatatatttggatttctcatgcttcagaatacccaaat

SEQ ID NO: 682995 - DNA, 120 bp, Artificial Sequence
  ENSG00000187109_66 (sequence is synthesized)
tgtcattattcaggttatcccttctatctcccaacatttacctggagccttgacactggtgtggatgtgacatgggtgtctgtcttgagatcagatgtgattttagacttggattaggcc

SEQ ID NO: 682996 - DNA, 120 bp, Artificial Sequence
  ENSG00000187109_67 (sequence is synthesized)
agtcaacaaagttttatttttattatctttgagatgattctcactatgttgcctggactagtgtctaactcctgggctcaagtggttgtctcacctcaacctcctgaggtgctatgctta

SEQ ID NO: 682997 - DNA, 120 bp, Artificial Sequence
  ENSG00000187109_68 (sequence is synthesized)
caagtgggagctgccgcacttaactatggatttcaaaactggaggctggaactgttgtctttgctattcatttggcttggtgagtggacttagccacttcacggcaacttggagatgaat

SEQ ID NO: 682998 - DNA, 120 bp, Artificial Sequence
  ENSG00000187109_69 (sequence is synthesized)
agcccactgtatttaacctgcatttgcactatttcagctctgcttggctgccttttcttttacttctgccactgggcttttgtgcatgtgttttactagttcaacataggatctcctttt

SEQ ID NO: 682999 - DNA, 120 bp, Artificial Sequence
  ENSG00000187109_70 (sequence is synthesized)
catcagtacctactctttggttctataaatctgaactggttttgaaccagttcaaaatactctagaaacacttgcttattaatgagtttcctaatttccagcactgtgcttggaacttgg

SEQ ID NO: 683000 - DNA, 120 bp, Artificial Sequence
  ENSG00000187109_71 (sequence is synthesized)
taagtgtacagaaaagttttggatgtataggtcagttaggatttatctagacccattcaatgtaccaaccataatcctgtgtgggactgtgtagcaagtcgaatgattgattctcagtag

SEQ ID NO: 683001 - DNA, 120 bp, Artificial Sequence
  ENSG00000187109_72 (sequence is synthesized)
ttcagtctctaaggtcttttgtagttgtcatattcctgtagattgagaaaaccaatgaaacaaagctggattgtgtatacagttagctctttcataatgcaggggctaggggccccagct

SEQ ID NO: 683002 - DNA, 120 bp, Artificial Sequence
  ENSG00000187109_73 (sequence is synthesized)
tccttcagtcaaatctatgtataagctgattcccccaaaacttgacagcctactgtggaaactttaccaataagtcatttaacacacactttgtatgttatgtgtattatatactgtaaa

SEQ ID NO: 683003 - DNA, 80 bp, Artificial Sequence
  ENSG00000187109_74 (sequence is synthesized)
aacacacactttgtatgttatgtgtattatatactgtaaaaagtaagctagagaaaatgttaagcaatcggaaatatatt

SEQ ID NO: 683004 - DNA, 86 bp, Artificial Sequence
  ENSG00000187109_75 (sequence is synthesized)
ttgggaggctgaggcgggccagtgacttgaggttacaagttcgagaccagcctggctaatcttagctgtaggtggtagtggtgtgt

SEQ ID NO: 683005 - DNA, 67 bp, Artificial Sequence
  ENSG00000187109_76 (sequence is synthesized)
agaattgacacctgagcaacagaatgaaactgtctgtgtgtgtgtgtgtgtgtatgtatatgtatgt

SEQ ID NO: 683006 - DNA, 120 bp, Artificial Sequence
  ENSG00000187109_77 (sequence is synthesized)
aactgtctgtgtgtgtgtgtgtgtgtatgtatatgtatgtgtatgtatatttactctcaggtggaactggattataacagtctcaatcctcactgccttcatgaatagctgaggaggagg

SEQ ID NO: 683007 - DNA, 120 bp, Artificial Sequence
  ENSG00000187109_78 (sequence is synthesized)
ggggtcttgctgtcacaggggtagtagagacagaagtaaacctgtaagtggaccctcttagttcaaatttgatattcaagagtcaacttagttgttttttaaagtcaagggaaggcatat

SEQ ID NO: 683008 - DNA, 120 bp, Artificial Sequence
  ENSG00000187109_79 (sequence is synthesized)
caatagttgcagttacctagtactgcataacaaaacaacctccaaaacttaatggcttaaaacaagcaaaatttttctgactgggcttagtttgttgcagtcgttttccaaaatgaccaa

SEQ ID NO: 683009 - DNA, 120 bp, Artificial Sequence
  ENSG00000187109_80 (sequence is synthesized)
agacatcaaagcttaaattacatattgtatgcctgttcagggagaaaaacatatgcttttccccatcattttggaatcttttacttgaattatagctggacaattgatttccagctataa

SEQ ID NO: 683010 - DNA, 120 bp, Artificial Sequence
  ENSG00000187109_81 (sequence is synthesized)
ttcaagctataacgtagtgaactccctcagacaaaaatgtcaagcttgattagtaaaggaacctcaagtggtatgtataaggtgacccttaagtacacgtgttttcaaaagttgggtata

SEQ ID NO: 683011 - DNA, 120 bp, Artificial Sequence
  ENSG00000187109_82 (sequence is synthesized)
atgtaactagactgagaggtttcgagaaaaacttcattgctattccatgtatagttttaaactagtgggatttcagtttacagtattaatcagcaatttggggagaactaagtgttcgtt

SEQ ID NO: 683012 - DNA, 120 bp, Artificial Sequence
  ENSG00000187109_83 (sequence is synthesized)
taacattaagataataaaaataatgccttaatcatacttgattgagaatattaattccctttttatgcataaggatggaagttaagtaactttaacaatgacacagttgagttgtgttgg

SEQ ID NO: 683013 - DNA, 120 bp, Artificial Sequence
  ENSG00000187109_84 (sequence is synthesized)
agccagcatttggatggccctacactttgcactgccttgtagatatttctgtcacacaactagtggttaaataagcatgttctttaggctagagctttcagagatgaaatattttagaga

SEQ ID NO: 683014 - DNA, 120 bp, Artificial Sequence
  ENSG00000187109_85 (sequence is synthesized)
ccagagttaatctagatttcattttaaacaatattcagataatctttcctttttctctcccctgccctgaagagtttgtatttattataatgttgtataacacagccccaatacaatgtg

SEQ ID NO: 683015 - DNA, 120 bp, Artificial Sequence
  ENSG00000187109_86 (sequence is synthesized)
gcttatataggtttttctcttaggcttagacagactctgggactgatatgggagcttcatggttctcaggcagactttcattctactttttgtctttggcaagttggtttattatcaagt

SEQ ID NO: 683016 - DNA, 120 bp, Artificial Sequence
  ENSG00000187109_87 (sequence is synthesized)
ggttgctggggctctatacatcatgtccaggttcaaggtacaggatgggctgaaggaggctaaaggctactggcatccaacctctcctgtaaaaagaagaacctatggtttatgctcaca

SEQ ID NO: 683017 - DNA, 120 bp, Artificial Sequence
  ENSG00000187109_88 (sequence is synthesized)
gtgctaaaagtaggatagtaaataaaatagagctgggtgtgaatgccaagggaggttaggatgacagccacattggccacatatgtcgaaataagttgatttagaaaaggattatttgat

SEQ ID NO: 683018 - DNA, 120 bp, Artificial Sequence
  ENSG00000187109_89 (sequence is synthesized)
caaggatatcctggaacataaagcaaataactacattttagaaataagtgaacagggctaagaaaagtaattttctttaaatacggcccaaaaggattaattatgattggagtcctgctt

SEQ ID NO: 683019 - DNA, 120 bp, Artificial Sequence
  ENSG00000187109_90 (sequence is synthesized)
tgcccaaggctttttatttcattttgcatgataacctttctcagaaccatgcatgcacaaattaggttgagacaatgacttaaaagtgtaaatgaaatctcattagaaacaaaaactttc

SEQ ID NO: 683020 - DNA, 120 bp, Artificial Sequence
  ENSG00000187109_91 (sequence is synthesized)
tggtttctgacatgtttaaggggtgctcattgttactcaacaatgatttacttaggtagttattgtgatgggggcggttctaatgggatttctttttctggtaggtttagtggcaacata

SEQ ID NO: 683021 - DNA, 120 bp, Artificial Sequence
  ENSG00000187109_92 (sequence is synthesized)
caagcttgccataaacatttcctgggttttatcttcttgtaaaagtgttattccacctttctgagtctggctaccccacagaattcttttatcccttttactcttagattaccttgtctg

SEQ ID NO: 683022 - DNA, 120 bp, Artificial Sequence
  ENSG00000187109_93 (sequence is synthesized)
taatgaaacttaccctctctgaagcctgagttgttcttctaaagtaacaccactaccaccttctttattctcatgtttttgggaggaattgtctacactcactgctatatgtcctctatc

SEQ ID NO: 683023 - DNA, 120 bp, Artificial Sequence
  ENSG00000187109_94 (sequence is synthesized)
acctaagaaaggtatttgcccattactggatttttttttcttacagagatcaatagtgatcaaattgaacagcctatgtcctcaggctgtgtgttttgtggcaatggaaaaatgacagca

SEQ ID NO: 683024 - DNA, 120 bp, Artificial Sequence
  ENSG00000187109_95 (sequence is synthesized)
aaagagggaaatatccttggaatttagttccttaaatggaggtatttgcccaagtgactgtcagttacatatttgagttgcaaacaacgggttgcatttaccgggtttcagagtagaagc

SEQ ID NO: 683025 - DNA, 120 bp, Artificial Sequence
  ENSG00000187109_96 (sequence is synthesized)
atacttaggaaaggtggtaggtgttcttgggctcttcagtggggacagaggattgcttccactcttagttactggggtatcttgtcaccccagagacccagagccagaatatcaacactt

SEQ ID NO: 683026 - DNA, 120 bp, Artificial Sequence
  ENSG00000187109_97 (sequence is synthesized)
ttgagtgattgcagttttgtgacaacataatactggttctctcagcctccttcattggattaccttcctctctgctccatttcatccagttccatattttcgtttgtcacttcaaagcta

SEQ ID NO: 683027 - DNA, 120 bp, Artificial Sequence
  ENSG00000187109_98 (sequence is synthesized)
atattaccataacaagtttacaaataatcagacttcctggttacttgttaatactcaataagatagcctgcttgcccattttgaataatatcaatacatttccagacaaaacattagtca

SEQ ID NO: 683028 - DNA, 120 bp, Artificial Sequence
  ENSG00000187109_99 (sequence is synthesized)
tttcccctcagtttaagtgctgtcaatcagctctccgttaggtacaatggcgaaaacactcatccaggatcttggatatttagtgaagtagacgtgaaaattggataactactcatcaga

SEQ ID NO: 683029 - DNA, 120 bp, Artificial Sequence
  ENSG00000187109_100 (sequence is synthesized)
gtttgaagtgattaggaaggaattaactcagccagaggaaatctgggatttgaatagggctttgaagaatgaaaggtttacagaggatttgggaaggtaaattggaggctgcgaggacaa

SEQ ID NO: 683030 - DNA, 120 bp, Artificial Sequence
  ENSG00000187109_101 (sequence is synthesized)
ggagatgtatgactggcactcgctcaaggttgagtggaacgagtcaaaataagtaggacccattctgtggagggcttgtcatgcaagggtaaggaattggaatgtatacaattggaggcg

SEQ ID NO: 683031 - DNA, 120 bp, Artificial Sequence
  ENSG00000187109_102 (sequence is synthesized)
aatagaagttttctgtcatgttttaagagtaaaactgaaggccatgtgtatgagtatggatcaggtgattgggccacccaagaacttagatgagagaactgaattaggctgctggcagaa

SEQ ID NO: 683032 - DNA, 120 bp, Artificial Sequence
  ENSG00000187109_103 (sequence is synthesized)
cagaaaggacggagacagctgatggacggtgcttggatccacaattgtgtttgtactacagttaaaaaaaagcgctaagcactcattataaagcacttgctttaagctgttacacagatt

SEQ ID NO: 683033 - DNA, 120 bp, Artificial Sequence
  ENSG00000187109_104 (sequence is synthesized)
ggtcactaggaggcatcagttcatcaactactaaggcgaaaaggaaggcagctctggacacccacctaagaagtctggatagttctgtgttaatacttaacgttttcaactcaaggactt

SEQ ID NO: 683034 - DNA, 120 bp, Artificial Sequence
  ENSG00000187109_105 (sequence is synthesized)
ttggaaactagaatctagaatatttcttctgaatagtacttcaaagatgaaataaggctaagaagtctaaactgcactctgtgagactatttgtttatttatttaattatttattttgag

SEQ ID NO: 683035 - DNA, 65 bp, Artificial Sequence
  ENSG00000187109_106 (sequence is synthesized)
tggcgtgatcttggctcactgtaaccttcacctcccttgggttttttttttttttgtatttttag

SEQ ID NO: 683036 - DNA, 64 bp, Artificial Sequence
  ENSG00000187109_107 (sequence is synthesized)
gagtagctgggattacaggcgctgtgggtgtgtcgagctcctgacctcaggcaatccgcctgcc

SEQ ID NO: 683037 - DNA, 120 bp, Artificial Sequence
  ENSG00000187109_108 (sequence is synthesized)
acaggcgtgagccaccgcgcccagccttggttatcttttataccctgatgagggtaacgtgacatgttcataatttactgggctttaactttttcttgaaagatgtttgacctttggtct

SEQ ID NO: 683038 - DNA, 120 bp, Artificial Sequence
  ENSG00000187109_109 (sequence is synthesized)
tttggtctatccaaatctttaataatgatcattgtcatgagtttctactgtatattgcaaattggtttacagatcagaattttgtaatcattatgaattaaacacttaataactttccaa

SEQ ID NO: 683039 - DNA, 120 bp, Artificial Sequence
  ENSG00000187109_110 (sequence is synthesized)
tggctgcagtaactattttcaataaaagctgtctggatgtctcaagttgtgttgggaaatttttcatattagaagctttcaaattaaattgtattatcatcaaagtctgtaatcatgaaa

SEQ ID NO: 683040 - DNA, 120 bp, Artificial Sequence
  ENSG00000187109_111 (sequence is synthesized)
atctgttgatccgtagagtaacttgtattaaattttccctacattatgagccagtttacctactatgtacatacttcatggatgcattttgaactttaatataggaaggggaagaagaag

SEQ ID NO: 683041 - DNA, 120 bp, Artificial Sequence
  ENSG00000187109_112 (sequence is synthesized)
gagatgaggaaaatgatccagactatgacccaaaggtgagcaaaattagtgctgctttctattaaatttaagatagctaaagtaagagttggtgtttttgaatatcaagtttctctccgt

SEQ ID NO: 683042 - DNA, 120 bp, Artificial Sequence
  ENSG00000187109_113 (sequence is synthesized)
taaagtctttaataaataaagcctattgactggataactttgttttttcagtcccactggcattgtgaacagtacacataatttcagtggacgtttttctaaaaaacattgttttttgtt

SEQ ID NO: 683043 - DNA, 120 bp, Artificial Sequence
  ENSG00000187109_114 (sequence is synthesized)
ataatcattctgtgatttgggataaaaacattttggaaaacatgattttagaattctacagccaaacaatgtatgtataaggtttcaataaataaattgcaaaactcagcaacatttttt

SEQ ID NO: 683044 - DNA, 120 bp, Artificial Sequence
  ENSG00000187109_115 (sequence is synthesized)
gccagttaggaaaacttcatgagattggattgtcctattaaaaaagcataatacattttcataaaatccttctttcgatgcccttttttttttaaagcacgtcagctaactgttcagatg

SEQ ID NO: 683045 - DNA, 120 bp, Artificial Sequence
  ENSG00000187109_116 (sequence is synthesized)
tttggagttcttacaacatggcagacattgacaagtaagtggcagagagttggttctttttcagagatttggcatcactttgtactctgttcttaacagcaagtagtatgaattatatat

SEQ ID NO: 683046 - DNA, 120 bp, Artificial Sequence
  ENSG00000187109_117 (sequence is synthesized)
atagaatatatgatcattagcatatttatgatcatatattcgaaaccatcgtatatactaaaccatttgtcactatttttaagaaaatgctgagcatgataatggattataaatacttgc

SEQ ID NO: 683047 - DNA, 120 bp, Artificial Sequence
  ENSG00000187109_118 (sequence is synthesized)
agaattcatttttattgtatatatttcccaaagatttactgcttgcattgtaatgtaccaaacacccaaaatgtgtataaaatgtatttatatatagagcttaaggaatattcagacaag

SEQ ID NO: 683048 - DNA, 120 bp, Artificial Sequence
  ENSG00000187109_119 (sequence is synthesized)
agatgatgatgatgattatgatgaagaaggtgaagaagcggatgaggtaatgtttaccaaatgagcaaataattctctgtggttaacacattgagaagcaaattgaatgacttatgtatt

SEQ ID NO: 683049 - DNA, 72 bp, Artificial Sequence
  ENSG00000187109_120 (sequence is synthesized)
agagggtagttataagtaccagtctatttttttggacccttgctcattgtcccatttatctactggtccata

SEQ ID NO: 683050 - DNA, 120 bp, Artificial Sequence
  ENSG00000187109_121 (sequence is synthesized)
agtcattgtttgcatcctgcactgttggagtgacttggtgtacttgtgtcaaacagctgcccatgagttttgtctgaatttagaaatgttacaggttgtgatgtggtgcttataacagta

SEQ ID NO: 683051 - DNA, 120 bp, Artificial Sequence
  ENSG00000187109_122 (sequence is synthesized)
gtaaccttttgtggtaccgtctttgtttttttgttttatttgaccccttccacctctcttctgttttttcttctcctcttcttcccctgctgttccttgaccttgacagattccagcttc

SEQ ID NO: 683052 - DNA, 120 bp, Artificial Sequence
  ENSG00000187109_123 (sequence is synthesized)
ttgtttgggtgaattttccacagtaagttttgcatattcatttggaaaattcttctctaatcattgtctacatttagcaacatcaggcatatattcacagtactctattggtaatgaaca

SEQ ID NO: 683053 - DNA, 120 bp, Artificial Sequence
  ENSG00000187109_124 (sequence is synthesized)
gactccacaataaaggactcaaagtaggtaatcagcatctaacttggctctgttccttgggtctcctttgcagtcagccctattggaatcggaaacgtcagcagccatttcacaaaccca

SEQ ID NO: 683054 - DNA, 120 bp, Artificial Sequence
  ENSG00000187109_125 (sequence is synthesized)
ggcagttgcacaggccccgccagctctgctcccgccactgttgccagctgagccgacaaatgcaactcgtttccccggccagggcctccctagagcatcagttgtatttttatacctagg

SEQ ID NO: 683055 - DNA, 120 bp, Artificial Sequence
  ENSG00000187109_126 (sequence is synthesized)
aaatatttttcctttttgtaagaatgataatgcagatgaactgttattcaacctggcaccaccatctgtactcaaaaagtcattatttccttacattttatagtttttttgtttaagaga

SEQ ID NO: 683056 - DNA, 120 bp, Artificial Sequence
  ENSG00000187109_127 (sequence is synthesized)
tagtttttttgtttaagagacagggacttgctgtgttgcccaggctggagtacactggcatgatcttggctcactgcagctcattcctgggcccaagctattctcccacctcagcctccc

SEQ ID NO: 683057 - DNA, 120 bp, Artificial Sequence
  ENSG00000187109_128 (sequence is synthesized)
agctactatgcccagcttaatctacttttttttgtagaggcagagtcttcttgcctaggctggtcttagactcctggcttcaagcaatcttcgcacctcagcctcccaaactgttgggat

SEQ ID NO: 683058 - DNA, 120 bp, Artificial Sequence
  ENSG00000187109_129 (sequence is synthesized)
caagcaatcttcgcacctcagcctcccaaactgttgggattatgggcttgaaccactgagccactgtgcccagcctatttttatagtttttttgagtctctgttgcccaggctggagtgc

SEQ ID NO: 683059 - DNA, 86 bp, Artificial Sequence
  ENSG00000187109_130 (sequence is synthesized)
cttctcccagtaactggataacaggcgtgcgccaccatgcctgactaattttttgtacttttagtaaagatggggtttcgccatgt

SEQ ID NO: 683060 - DNA, 86 bp, Artificial Sequence
  ENSG00000187109_131 (sequence is synthesized)
ttacagtttttagtttgtagattcattatattctttttttttttttaacttcatggtaggctgaggattgttgccattttcaagtg

SEQ ID NO: 683061 - DNA, 120 bp, Artificial Sequence
  ENSG00000187109_132 (sequence is synthesized)
tggcagagctgtgacacacattcagtgctgtgttaagtgttccacctctctagcattgctattttatgttgtttggtaaagagaatataatgttttgattaagaacaccatggggtgagg

SEQ ID NO: 683062 - DNA, 120 bp, Artificial Sequence
  ENSG00000187109_133 (sequence is synthesized)
caatggaccaaattagtatttctgttgcttttcttgtttattatgcttaagtcttcatttttaattagtttttacattttttttttactaaaatggtttttcctacacatcttggtcacc

SEQ ID NO: 683063 - DNA, 120 bp, Artificial Sequence
  ENSG00000187109_134 (sequence is synthesized)
ttagtggttctctttggaggggtgtggtagcagtaattttgatgggattaaggtttgttatgggcaacggcggtgtttacacagatagactagaactttgaaggtaatatctggtgactg

SEQ ID NO: 683064 - DNA, 120 bp, Artificial Sequence
  ENSG00000187109_135 (sequence is synthesized)
gtacaatattatataaccagttgtattttttcattttttaattttacgtctttattacacgtttttctattactttatttttaaaaaacagtcattcaagattgtaatttgcatggcaat

SEQ ID NO: 683065 - DNA, 120 bp, Artificial Sequence
  ENSG00000187109_136 (sequence is synthesized)
ggcggaggctgcgaattccgacgggagggaggggctgtggagggacgagtccccgaggcggggagggggcgggggaggctgcgacgctcccgggctctccgcccattgggggcggccgcg

SEQ ID NO: 683066 - DNA, 120 bp, Artificial Sequence
  ENSG00000187109_137 (sequence is synthesized)
cggggaggggaaacccccggcggcttcgctccacacgtggtaatgggcttcatggccactggctgggcctggttggagacccttgccctcggtctgtgcttactttgaaagttgtagaga

SEQ ID NO: 683067 - DNA, 120 bp, Artificial Sequence
  ENSG00000187116_0 (sequence is synthesized)
gcatttctcctctgtgctcattgccacatgcagctcagcctgggctacacagccaggtgtcagatgtgtctctgctgatctgagtctgcctgtggcatggacctgcatcttccctgaagc

SEQ ID NO: 683068 - DNA, 120 bp, Artificial Sequence
  ENSG00000187116_1 (sequence is synthesized)
atctccagggctgaaaaatcactgaccatggcaccatggtctcatccatctgcacagctgcagccagtgggaggagacgccgtgagccctgccctcatggttctgctctgcctcgggctg

SEQ ID NO: 683069 - DNA, 120 bp, Artificial Sequence
  ENSG00000187116_2 (sequence is synthesized)
agtctgggccccaggacccacgtgcaggcagggaacctctccaaagccaccctctgggctgagccaggctctgtgatcagccgggggaactctgtgaccatccggtgtcaggggaccctg

SEQ ID NO: 683070 - DNA, 120 bp, Artificial Sequence
  ENSG00000187116_3 (sequence is synthesized)
gaggcccaggaataccgtctggttaaagagggaagcccagaaccctgggacacacagaacccactggagcccaagaacaaggccagattctccatcccatccatgacagagcaccatgca

SEQ ID NO: 683071 - DNA, 120 bp, Artificial Sequence
  ENSG00000187116_4 (sequence is synthesized)
gggagataccgctgttactactacagccctgcaggctggtcagagcccagcgaccccctggagctggtggtgacaggattctacaacaaacccaccctctcagccctgcccagtcctgtg

SEQ ID NO: 683072 - DNA, 120 bp, Artificial Sequence
  ENSG00000187116_5 (sequence is synthesized)
aggaaggagaccacaagctctcctggaccttggactcacagctgacccccagtgggcagttccaggccctgttccctgtgggccctgtgacccccagccacaggtggatgctcagatgct

SEQ ID NO: 683073 - DNA, 120 bp, Artificial Sequence
  ENSG00000187116_6 (sequence is synthesized)
atggctctcgcaggcatatcctgcaggtatggtcagaacccagtgacctcctggagattccggtctcaggagcagctgataacctcagtccgtcacaaaacaagtctgactctgggactg

SEQ ID NO: 683074 - DNA, 120 bp, Artificial Sequence
  ENSG00000187116_7 (sequence is synthesized)
cctcacaccttcaggattacgcagtagagaatctcatccgcatgggcatggccggcttgatcctggtggtccttgggattctgatatttcaggattggcacagccagagaagcccccaag

SEQ ID NO: 683075 - DNA, 120 bp, Artificial Sequence
  ENSG00000187116_8 (sequence is synthesized)
ctgcagctggaaggtgaacagaagagagaacaatgcaccattgaatgctggagccttggaagcgaatctgatggtcctaggaggttcgggaagaccatctgaggcctatgccatctggac

SEQ ID NO: 683076 - DNA, 66 bp, Artificial Sequence
  ENSG00000187116_9 (sequence is synthesized)
caatttctagagggaggaatgggtgtttgagtgcagagacactggtctggggtgatccatggagga

SEQ ID NO: 683077 - DNA, 120 bp, Artificial Sequence
  ENSG00000187116_10 (sequence is synthesized)
acagtcttctctagtacaattcagggaagccagacaggttgtggagagctttacaggcagggcagcccctgctaagaaagacaaaaaggggaaggagaacacagaaatcctagggacaca

SEQ ID NO: 683078 - DNA, 120 bp, Artificial Sequence
  ENSG00000187116_11 (sequence is synthesized)
tctgtgacctctttgtccaccatccccagcctcacaccttcaggattacgcagtagagaatctcatccgcatgggcatggccggcttgatcctggtggtccttgggattctgatatttca

SEQ ID NO: 683079 - DNA, 120 bp, Artificial Sequence
  ENSG00000187118_0 (sequence is synthesized)
agcctgggaaggaagagggaacgggtcctggcggtgctttgcaaagggcccgtgtttctgttgcgggaagctcccgggggtcgcacgtgcgtccgagcccaagcccctcccctccactcc

SEQ ID NO: 683080 - DNA, 120 bp, Artificial Sequence
  ENSG00000187118_1 (sequence is synthesized)
ccttcctgcgtgccccggagccgccaagcggctacgttcttctcggcccgccgagatggcgctcgaccccgcagaccagcatctcagacatgtcgaaaaagatgttttgatccctaaaat

SEQ ID NO: 683081 - DNA, 120 bp, Artificial Sequence
  ENSG00000187118_2 (sequence is synthesized)
aatgagagaaaaggccaaagagaggtgttctgaacaagttcaagattttaccaaatgttgcaagaactctggagttcttatggtagtaaaatgccggaaagaaaattctgcattgaaaga

SEQ ID NO: 683082 - DNA, 120 bp, Artificial Sequence
  ENSG00000187118_3 (sequence is synthesized)
atgtctaactgcttactataatgatccagccttttatgaagaatgcaaaatggaatacctgaaggaaagggaagaattcagaaaaactggaattcctacaaagaaaaggctacagaagct

SEQ ID NO: 683083 - DNA, 120 bp, Artificial Sequence
  ENSG00000187118_4 (sequence is synthesized)
tccaacaagcatgtaggcagatactcaaatgacattcaggaactctaatattcatggaagtcattttatagtccttaaataatggactcaagcatatatgtttgctttaccttaattatg

SEQ ID NO: 683084 - DNA, 120 bp, Artificial Sequence
  ENSG00000187118_5 (sequence is synthesized)
gaaatattaactttatctgaaataaatattttatttcaaagttttggtttcttaaatgggaaaggagtagttactgaattgggatatggttttcctggtcattctggaccttttgaaagt

SEQ ID NO: 683085 - DNA, 120 bp, Artificial Sequence
  ENSG00000187118_6 (sequence is synthesized)
tttcccacaactatagttctataacagtgatactgattttttagagttcaatatggtccttatattatttttttccagtgtatatgctaatggctaatcatgggagccaaaactaaagaa

SEQ ID NO: 683086 - DNA, 120 bp, Artificial Sequence
  ENSG00000187118_7 (sequence is synthesized)
aagcaggaatggacaaccttcaaaggtgttaataataactaggcagtatagcagaatggctatgaaccagaatccttcctgattctaccacttattagctatacagctgtggaagtaaat

SEQ ID NO: 683087 - DNA, 120 bp, Artificial Sequence
  ENSG00000187118_8 (sequence is synthesized)
ctaatacagtttgtgaggatgtactgagtattgcatatagcaggtacacgtacagtgtataagacagtgcttcagacctggtacatgctcttatattggtagttactgttagtagtagta

SEQ ID NO: 683088 - DNA, 120 bp, Artificial Sequence
  ENSG00000187118_9 (sequence is synthesized)
gaggcttatttggaaactatcttagtccattttctgttgctatgggagaatacccaagaccaggtaatttataagaaaagtttgtttggctcacagttctggagtttatttgccagcagc

SEQ ID NO: 683089 - DNA, 120 bp, Artificial Sequence
  ENSG00000187118_10 (sequence is synthesized)
ttctggcaagggttttcatactgcatcaaaacataatagggtgtaaaaaatagaaggacaaacaagtgtgggcaaacttttataacagcccgctctcttgagaactaatacctgtaataa

SEQ ID NO: 683090 - DNA, 120 bp, Artificial Sequence
  ENSG00000187118_11 (sequence is synthesized)
tggcataaatccattcacgagggctccagcctcatcaccctattacctcttaaaggctccatttcttagtcctgttaaattagcaactaagtttccaacacatgaactcttgggggacac

SEQ ID NO: 683091 - DNA, 120 bp, Artificial Sequence
  ENSG00000187118_12 (sequence is synthesized)
atcaaaccatagcagaaccatagataaggagatacctacttatatgaattaattttacttacatctttgatgtagaattttctaaaacataatgttcttaacctgataacttgttagtcc

SEQ ID NO: 683092 - DNA, 120 bp, Artificial Sequence
  ENSG00000187118_13 (sequence is synthesized)
tttaatctttcattttgaaaagttatatttctaagtgaattaccattctgtaacatagtaatggactcaggaagtagtataaaaaatttatgtcccaatttaataatttgagcttttata

SEQ ID NO: 683093 - DNA, 120 bp, Artificial Sequence
  ENSG00000187118_14 (sequence is synthesized)
ttaaaagttattttttccccatgagctgttaactcttccacagccattgtaactagtttcaagataagtaaattttacgtatattttcacagtcctcattaaaatcacaaatagaaatta

SEQ ID NO: 683094 - DNA, 120 bp, Artificial Sequence
  ENSG00000187118_15 (sequence is synthesized)
ctacccactaagacaaggtttaactttccctaatcccatgcaatagatctgagagatttttttttaagaaagaatttaaataggacactaaagaatcaattcaagttccacactttactc

SEQ ID NO: 683095 - DNA, 120 bp, Artificial Sequence
  ENSG00000187118_16 (sequence is synthesized)
ttgagtgaaccactcaaaaaactattttacttttatttgaaatacaaagaaaccacattttcccaggccacagatcaaaaggagggagattactagagcagacaaaagcaaagcaaatat

SEQ ID NO: 683096 - DNA, 120 bp, Artificial Sequence
  ENSG00000187118_17 (sequence is synthesized)
agaaatctagagaccacacagcataggggcaaacatgcccatatttccacattgacctttggtattggtgcatttcctagagcacaggaagttaactgtttttagagataaatgaaaatg

SEQ ID NO: 683097 - DNA, 120 bp, Artificial Sequence
  ENSG00000187118_18 (sequence is synthesized)
gaagagttactttaagaagctagtgaaatatacaatctattttatagctttgattaaaatcagaagtagcccacttcatgtagaaaattcacttatgtacatgttgctttccccatagaa

SEQ ID NO: 683098 - DNA, 120 bp, Artificial Sequence
  ENSG00000187118_19 (sequence is synthesized)
gccagattagattacacagtataaataatatgttcatcctccttatgtcaaagactaaaccattcattgtagccttcagaatacccatgtgtatccatactgaagatttttttcacctgg

SEQ ID NO: 683099 - DNA, 120 bp, Artificial Sequence
  ENSG00000187118_20 (sequence is synthesized)
tacatctgtctcagttgtgtcttgcttgcttatgggtgcctctgttgatattattccctgttaatatgtggtaacccacaggttttttaccccttaagatacaccttctccaagtagcct

SEQ ID NO: 683100 - DNA, 120 bp, Artificial Sequence
  ENSG00000187118_21 (sequence is synthesized)
ttctgaattaagatcagtactttgttgtcacatgattcagctcttcaagtctgaattttcccatttattttggttttctaatgtttcacataggcatgttcctgcttttaagaattcagt

SEQ ID NO: 683101 - DNA, 120 bp, Artificial Sequence
  ENSG00000187118_22 (sequence is synthesized)
tccattttggcagcaactcagtaagtcttacagatgtaaattttactttagctaataagggagcaagaggaaggaataggtggctttttgttatgttttcttcattctgtcgatttatgg

SEQ ID NO: 683102 - DNA, 120 bp, Artificial Sequence
  ENSG00000187118_23 (sequence is synthesized)
atgtactgaattgaaccttataaaaagaaatctaaagattccaaaggaagctctttagagcaagtttcagctagtatgaaagaagtcaacataaaatattcaattttaaatagattcata

SEQ ID NO: 683103 - DNA, 120 bp, Artificial Sequence
  ENSG00000187118_24 (sequence is synthesized)
agctacagatgggccactgttttttggttgtttgaattttacctagaacagagatatcaagtgtagatttaaaagcttctagctgggtaaaaaatttttggctaatctttccttactaaa

SEQ ID NO: 683104 - DNA, 120 bp, Artificial Sequence
  ENSG00000187118_25 (sequence is synthesized)
acatcatttgtctaacactttaaactgtcacagtcactgactttttagtatacctgtttgatagctatcatcactgtactgtttaaatggaaaataattttctccactcaaaagctggtt

SEQ ID NO: 683105 - DNA, 120 bp, Artificial Sequence
  ENSG00000187118_26 (sequence is synthesized)
taacaaatgtctattgtatgaatcatattaacaaccaacaattagtactagattttgagatctataggcaaggacaatatttcacatccacttcaatttcaaacaaaaatatttatttta

SEQ ID NO: 683106 - DNA, 120 bp, Artificial Sequence
  ENSG00000187118_27 (sequence is synthesized)
attaaacaatttcttggtattgttcaaaacattaatcaagcaattatctcataagactttttttctttacaaaggaaaatttccaattttggttttaaaaaaggcaaaccagtaagctac

SEQ ID NO: 683107 - DNA, 120 bp, Artificial Sequence
  ENSG00000187118_28 (sequence is synthesized)
attagagatcagatataatatacagcctatgcagccacatgagaaatagtttttgctgctttgttattacacaggtagttgcttccttcagctaaagcctggagtattgtatttctttta

SEQ ID NO: 683108 - DNA, 120 bp, Artificial Sequence
  ENSG00000187118_29 (sequence is synthesized)
tgcatattgggtttggttctattacttggcaggagattgtactcccctgagtcagctgtgttcattggtcagaataaattccagcatctgacaccaattccattaatcacagacaagctt

SEQ ID NO: 683109 - DNA, 120 bp, Artificial Sequence
  ENSG00000187118_30 (sequence is synthesized)
gaataagtgtaagataatagaaaaaaatatctagtgaatggcgaacattgtctatgtatgtatgctattcagtaatacagtagaagagatctgagatattgagttcaagatatatgaaac

SEQ ID NO: 683110 - DNA, 120 bp, Artificial Sequence
  ENSG00000187118_31 (sequence is synthesized)
tgtctatcaaaaaggataaaagtcctcctacatgaaatactttaattcaggcaaaaggtgtatgaaccaagtaaatctccaccctgaaagaacttaaatttccatgtgaagccatcttta

SEQ ID NO: 683111 - DNA, 120 bp, Artificial Sequence
  ENSG00000187118_32 (sequence is synthesized)
tttccttctttatttccaaataattggccacttagaataagtgtggacatttcatgatcgacaatatcaatacagcccaaaccctgatttctatgattaaaaataataattttaaatcac

SEQ ID NO: 683112 - DNA, 120 bp, Artificial Sequence
  ENSG00000187118_33 (sequence is synthesized)
tttctcaataaatagaatattacatttcaacacaaagtctaacaatttagaagctgctctacacaatgtgcagctagctgtagtctctttgaagaaaatgactttttatcattacacaca

SEQ ID NO: 683113 - DNA, 120 bp, Artificial Sequence
  ENSG00000187118_34 (sequence is synthesized)
tttatgtttatattatggcccacagaagggcagattagactgaaatctgtgtgatgctccttctactacttattgaatagtgtgtagggttacaatcatttgtttacaccccagagtttt

SEQ ID NO: 683114 - DNA, 120 bp, Artificial Sequence
  ENSG00000187118_35 (sequence is synthesized)
tcaactatttcatttttttttttttttttcccaattaggacttaaggaatgtgctgggacaaagttggcttcagtgatcaggttgtttcaagtcttagaattcaaacttcaattctaaaa

SEQ ID NO: 683115 - DNA, 120 bp, Artificial Sequence
  ENSG00000187118_36 (sequence is synthesized)
aaattttatcaacaaaacactgtgaccaaaaaatcactttaaatcttaaatattgaaacgcaatagcatataaagatggtataacctaagatgcttttatttcattatattttcaatatc

SEQ ID NO: 683116 - DNA, 120 bp, Artificial Sequence
  ENSG00000187118_37 (sequence is synthesized)
tttacgcattataacaacagaaatgtaacctactcacattgccatttgttccattatgcaatttgaagaaacatgttttccttttatttttatgaacagatatttagacatttcacattt

SEQ ID NO: 683117 - DNA, 120 bp, Artificial Sequence
  ENSG00000187118_38 (sequence is synthesized)
tgtaaaaccacgtctacaatctccaattccattcttctgagaggcaaaattttacaattaatatagaaggcagagttttttaaacaccttaagtttacttattaattagtatagtagcat

SEQ ID NO: 683118 - DNA, 120 bp, Artificial Sequence
  ENSG00000187118_39 (sequence is synthesized)
atttcagattcttagaatatggagctagagggtgctctttcatactagaaaaccaactatgttggtttttgtactattgtacagtgtgttcaaatatagatactgaagacctctgcaaaa

SEQ ID NO: 683119 - DNA, 120 bp, Artificial Sequence
  ENSG00000187118_40 (sequence is synthesized)
ttttaatcaaaatctcctttcagtttgttaaataatttcttgggaggaccactgaaagagataagtgtcctcatggtgaaatcgtgaatctcttccaaattaattcttataaaggcagtt

SEQ ID NO: 683120 - DNA, 120 bp, Artificial Sequence
  ENSG00000187118_41 (sequence is synthesized)
ctgattatgttgatccaagtaatgcagtggtggaaggttgggtaaaggcaaagttttagttttagtttccccaaatgctgtctcacttgatttaggaggacttggaaatacccaggaatt

SEQ ID NO: 683121 - DNA, 120 bp, Artificial Sequence
  ENSG00000187118_42 (sequence is synthesized)
gtcttccagagaatttctgccataagaactgtgttcctgaaagcatgtaccatcattaggaatggatctctcattgtctgtccatgattggaggattgctttctctgataaaacctttac

SEQ ID NO: 683122 - DNA, 120 bp, Artificial Sequence
  ENSG00000187118_43 (sequence is synthesized)
atctcctggtaaaggggaagatgtggtatgacaaagagctttgccatttggtaagagagggggatgtcttgtgtatgttgcagtaaaattcatcaagtgcagttttgtgctgtctcttcc

SEQ ID NO: 683123 - DNA, 120 bp, Artificial Sequence
  ENSG00000187118_44 (sequence is synthesized)
aaggtcttcactgcatcctacaggggcacaggctaaaaagaaaacacagactaaatgtcagttttcattacatttgtgatcataaaattcgataacacttcaccaatttgaattctagaa

SEQ ID NO: 683124 - DNA, 120 bp, Artificial Sequence
  ENSG00000187118_45 (sequence is synthesized)
ctggtgatgaaattaagatttccaagttagtgtgatcattgaggcactgtgactaggagataaatgacagatgatctgagttttaatcctggatcagcaatttactgtgactttagatat

SEQ ID NO: 683125 - DNA, 120 bp, Artificial Sequence
  ENSG00000187118_46 (sequence is synthesized)
ttgtctcttagctgctcctgatgtctctttccttgtctgcagaatggatatagaattcctgtcccaactatgtcatagagcttttaaaagatgaagaactacatatttttaaaagttgga

SEQ ID NO: 683126 - DNA, 120 bp, Artificial Sequence
  ENSG00000187118_47 (sequence is synthesized)
aactaatacagttaaaatacaaataaagatcctgttcttggctcttattgtggctggagaaggattgcagactgttcacatgtcagtggggactgagacagttcttaagttttagcattt

SEQ ID NO: 683127 - DNA, 120 bp, Artificial Sequence
  ENSG00000187118_48 (sequence is synthesized)
tttagttaaatataatattcctttgctcaaactctttgtccacaggcagtccaaaagcaaattttttagaaataattgcatttttaattggtgagacccaaatgaagtttttatatatca

SEQ ID NO: 683128 - DNA, 120 bp, Artificial Sequence
  ENSG00000187118_49 (sequence is synthesized)
aaggcttttatggataaagcagtttaaataaaatttgtgaaatcttgtttcttgtaaaacacagcaaatgttaatgctactgtggtcacaatgtaggtaaagtaaaaaaaaaaaaaaaaa

SEQ ID NO: 683129 - DNA, 120 bp, Artificial Sequence
  ENSG00000187118_50 (sequence is synthesized)
ttacatgtaatatattctgtacctctccataccaaatttatcatattgttggctgagtctaaagttccagtacagtcttaaaaatgcaacatatttatgaaagagtcttttcaaattttc

SEQ ID NO: 683130 - DNA, 120 bp, Artificial Sequence
  ENSG00000187118_51 (sequence is synthesized)
tcagcattgtatctgattaaaaagatgaagtcagcagacaaaaatatatgatttttcactatttaataaatcttttttcatgaacagtttgatctgtaaaatatagtacagactgatttt

SEQ ID NO: 683131 - DNA, 120 bp, Artificial Sequence
  ENSG00000187118_52 (sequence is synthesized)
tgtttattctgttgtaaagataactgaatgaaaatatctctgagacttcctccagccttgtgatttgttggattaatataatttaactcctagaaagttgagataaatcgtatggatgat

SEQ ID NO: 683132 - DNA, 120 bp, Artificial Sequence
  ENSG00000187118_53 (sequence is synthesized)
ttagatttttgaagttaaccaaatttacttttaaaataattttataatatcgtgttcactaatattttgttgtagttccttaaatttaagtaaaaatgtgtgaagttctttgaattcaca

SEQ ID NO: 683133 - DNA, 120 bp, Artificial Sequence
  ENSG00000187118_54 (sequence is synthesized)
tttgaattcacatgctgatttattcacccatgttctattgcccacattattgacagataagattgcagaatactttagtaagtattgttaattgaatgttgagagatcttagttttggta

SEQ ID NO: 683134 - DNA, 120 bp, Artificial Sequence
  ENSG00000187118_55 (sequence is synthesized)
agcctttgtttcctttaatttctgtagcctgtgcagcgtatatgtcagtatggtatgtatcttagaggattaaataaaaatgtaatgaacacccgaaccctacatttttttttaaataaa

SEQ ID NO: 683135 - DNA, 120 bp, Artificial Sequence
  ENSG00000187118_56 (sequence is synthesized)
atatgtacacataaacttatagacctttttttagaatggtggagttggaaaagactttagagattatgtaaactcatctctatatttgctatatttgtaaatgatgaaacataatcaata

SEQ ID NO: 683136 - DNA, 120 bp, Artificial Sequence
  ENSG00000187118_57 (sequence is synthesized)
ttgattttttttcttaagttaataatatcaaagcagcccttatttatggtccaggtattgtactcagtgctttaccatataggagtaaaagttcattctgtgacttaatattctttcagt

SEQ ID NO: 683137 - DNA, 120 bp, Artificial Sequence
  ENSG00000187118_58 (sequence is synthesized)
tctattctcaagtgcttccaagaaatgtttactgagtaaacgaatctcttaaacttttgtatgactgaattattaaattctgtcttatacattgattaaataatttttatatctcagatt

SEQ ID NO: 683138 - DNA, 120 bp, Artificial Sequence
  ENSG00000187118_59 (sequence is synthesized)
cagtcatcataattgttattgctagtttgacatattatccttcactccagttgggggagctctagagcagagtagacaggagtatagactgcagagagggcaacctgggttcagcttctg

SEQ ID NO: 683139 - DNA, 120 bp, Artificial Sequence
  ENSG00000187118_60 (sequence is synthesized)
tatcagtgagagcttagctagtcgtgttaccttaggcaggctcctcattgtaagaaggaataattatatcttatggagtgattgtgaggtactgcatgtaaacacatttaccatgatagg

SEQ ID NO: 683140 - DNA, 120 bp, Artificial Sequence
  ENSG00000187118_61 (sequence is synthesized)
tagtatttgttattatttatctgaatattaatcatttgaatatccttccctctctcaccccctagaaatacaagaagaaaataacagattctagtccatctgaggggaggagaggggcta

SEQ ID NO: 683141 - DNA, 120 bp, Artificial Sequence
  ENSG00000187118_62 (sequence is synthesized)
ggaaggatggctgtttctgcttgtttagaagagataagcagtggatgtgacattaactgaaagtaaatggaaaattattagggaaaattgtacttgactttgagtccccagatacactaa

SEQ ID NO: 683142 - DNA, 120 bp, Artificial Sequence
  ENSG00000187118_63 (sequence is synthesized)
gaaatagtatttattcatctttaaataagaaggtgttctgctttgttaattactattgacatttccatgaaatgaacgtaactgctatcctctctcattttgaaacattgtttttgctcc

SEQ ID NO: 683143 - DNA, 120 bp, Artificial Sequence
  ENSG00000187118_64 (sequence is synthesized)
tttatttctacctcttactttcatttttttccttaatacactatgatctgatttctgtcctcacatcactgaacctgctctttttaaagactctgatgggctgatggtagacaaatccaa

SEQ ID NO: 683144 - DNA, 120 bp, Artificial Sequence
  ENSG00000187118_65 (sequence is synthesized)
caaattgttccttttcttttactggacctgtctctggcaatcccttcttaaaagtctcctctgtcttccctgataatattttttcccattttcccaaaatctctttgtacttctccatgt

SEQ ID NO: 683145 - DNA, 120 bp, Artificial Sequence
  ENSG00000187118_66 (sequence is synthesized)
ttttaatctactccttaatgttggtgattccccaagttctcttctcattcttaaatctgaggaagtttagtttgcacccatgaattcaattacttactatagaaagtaacatttgtttct

SEQ ID NO: 683146 - DNA, 120 bp, Artificial Sequence
  ENSG00000187118_67 (sequence is synthesized)
ttgttcaagtccaaaaatgaactgggctccttttgctcgtcctacaacgtgtctttgtgaattatacagtagtctagtatctacagtcttgtctcctaactctaattggttatttcctat

SEQ ID NO: 683147 - DNA, 120 bp, Artificial Sequence
  ENSG00000187118_68 (sequence is synthesized)
tgatttctgaaatttcctgcacatcatctcttccttttcattcctacagctcctcctttggcctgcgccttccatcatttttgcctggattattttaacagtttattggctatcttgcct

SEQ ID NO: 683148 - DNA, 120 bp, Artificial Sequence
  ENSG00000187118_69 (sequence is synthesized)
ctaaccttgcttgcctccttttgtcctatctgccacatgttgtcagattcatccaagacacaaaactgatcttacaggtgaggtgctctattaattgtgccccattttcttcaggattga

SEQ ID NO: 683149 - DNA, 120 bp, Artificial Sequence
  ENSG00000187118_70 (sequence is synthesized)
ttttaatttctgagtatagcataaatggcacatcatgatttgacttttgcccattccatcttcatttcaggccttttctcctatgtgcataatctgctatagtggtacctatctacttgg

SEQ ID NO: 683150 - DNA, 120 bp, Artificial Sequence
  ENSG00000187118_71 (sequence is synthesized)
caggttttcctgcattaatttttcctcatccatgtgtcttcccacacttgccttctatatggatttctgttggtctttcaaaatacaacgcaagcatttccccttgaaacctctgccctc

SEQ ID NO: 683151 - DNA, 120 bp, Artificial Sequence
  ENSG00000187118_72 (sequence is synthesized)
cccatttcttccttgtttccatggtgcactgggccatacctctgtcacagtattttgtagatttaattttaatccagtctttacttgtcctttacaccgtgggttcccaggacaggagct

SEQ ID NO: 683152 - DNA, 120 bp, Artificial Sequence
  ENSG00000187118_73 (sequence is synthesized)
gtgcttctcattgctctattctgtgacagtgctatataaaaatgaatgatttggtctttagtttggtagcataaagttaacagtgaatttttaaccattactaaaagtgtacttctaaag

SEQ ID NO: 683153 - DNA, 120 bp, Artificial Sequence
  ENSG00000187118_74 (sequence is synthesized)
attgagcctgatgaaccagatgtctgaatattagtaattaaagtaagcttacatttaacacatgcaggattatttacttgaaaatattttcatttccttctcatagctataatgatccag

SEQ ID NO: 683154 - DNA, 120 bp, Artificial Sequence
  ENSG00000187118_75 (sequence is synthesized)
ataaaaaaacattgcaaataggatgagttttaatgactaaaataatcacaatttcataaggttgtaagttttgagtatatttgcataggcttttattttaagtaaaccagagtcttattt

SEQ ID NO: 683155 - DNA, 120 bp, Artificial Sequence
  ENSG00000187118_76 (sequence is synthesized)
ctttggaccacgatgaaattgccaaatgatgcatttctcagaatgtatcctcattgttaagcagcccatgattgtactgtttctctactagaaatcctatctctacatcctgtctctatg

SEQ ID NO: 683156 - DNA, 120 bp, Artificial Sequence
  ENSG00000187118_77 (sequence is synthesized)
aagtctccttgcccttcatctcagaagtcctctctccctcttctcaaatcacatttatttatacaaagtgaatatcactcatcttattctgccttttactggtgtacatgtcttttgttg

SEQ ID NO: 683157 - DNA, 82 bp, Artificial Sequence
  ENSG00000187118_78 (sequence is synthesized)
atcttattctgccttttactggtgtacatgtcttttgttgagcacggtaccatgtgccaagcacaatgtacataatagatgt

SEQ ID NO: 683158 - DNA, 120 bp, Artificial Sequence
  ENSG00000187118_79 (sequence is synthesized)
acatggccaatgcagtgtttttgttaagtagccttcaggaatgtttcctcttttctgtggggttacctttgggttatcttctctattaagtgtggatccctgaaaaatggcataccctgg

SEQ ID NO: 683159 - DNA, 120 bp, Artificial Sequence
  ENSG00000187118_80 (sequence is synthesized)
tggtttttctagcccctgctgaaatcctttgaaggaatgtacttatttgtcaagattcgtctaaaaatgtggtctccagaaatgaacatagatgtgctgtgagctccttgcagttgtgat

SEQ ID NO: 683160 - DNA, 120 bp, Artificial Sequence
  ENSG00000187118_81 (sequence is synthesized)
ttatcaaacgtcattctattctaaaatgtgaaagtatttttaacttaaatgtaggaattcgcatgtatccaggacaagtaaatttttgtgaaacattgcagatgttagatggatttggga

SEQ ID NO: 683161 - DNA, 120 bp, Artificial Sequence
  ENSG00000187118_82 (sequence is synthesized)
gaattttccaaactaagtggacgaacttatatagctacataaataattttaccaaatgttgcaagaactctggagttcttatggtagtaaaatgccggaaagaaaattctgcattgaaag

SEQ ID NO: 683162 - DNA, 120 bp, Artificial Sequence
  ENSG00000187118_83 (sequence is synthesized)
gctccattggagacttcctgagggcaacagacaaactatttgatagctgaatacatatttggtaactcatatggctcattggatatgaattttggaaatctatgcttccagattactttg

SEQ ID NO: 683163 - DNA, 120 bp, Artificial Sequence
  ENSG00000187118_84 (sequence is synthesized)
aactctggagttcttatggtagtaaaatgccggaaagaaaattctgcattgaaagaatgtctaactgcttaataactgaatgaaaatatctctgagacttcctccagccttgtgatttgt

SEQ ID NO: 683164 - DNA, 120 bp, Artificial Sequence
  ENSG00000187118_85 (sequence is synthesized)
ctcttttctgtggggttacctttgggttatcttctctattaagtgtggatccctgaaaaatggcataccctggtggtttttctagcccctgctgaaatcctttgaagattttaccaaatg

SEQ ID NO: 683165 - DNA, 120 bp, Artificial Sequence
  ENSG00000187118_86 (sequence is synthesized)
ttgcaagaactctggagttcttatggtagtaaaatgccggaaagaaaattctgcattgaaagaatgtctaactgcttactcctcctttggcctgcgccttccatcatttttgcctggatt

SEQ ID NO: 683166 - DNA, 120 bp, Artificial Sequence
  ENSG00000187122_0 (sequence is synthesized)
ctcctcgcagcagtcagttgggagctggagggagggagagggagacgcaggcggcgaaacggcagaggagccgagccccctccgcccaaggcgccctccctccgtccgcgcacaggcgcc

SEQ ID NO: 683167 - DNA, 120 bp, Artificial Sequence
  ENSG00000187122_1 (sequence is synthesized)
gtcgcttggaggagcaaggtgcctcccagcccgcaggggcgccgcgcgcaagcccgcgggctcttcggtggctctgccccgggactgcacctggaggcggccccggacggggatggtcag

SEQ ID NO: 683168 - DNA, 120 bp, Artificial Sequence
  ENSG00000187122_2 (sequence is synthesized)
cggctgctgccgtctggctcgcgagcgggacgctgtgagggcaccatggcgctgactcccgggtgggggtcctcggcggggccggtccggccggagctctggctgctgctgtgggcagcc

SEQ ID NO: 683169 - DNA, 120 bp, Artificial Sequence
  ENSG00000187122_3 (sequence is synthesized)
gcgtggcgcctgggtgcctcggcgtgccccgccctctgcacctgcaccggaaccacggtggactgccacggcacggggctgcaggccattcccaagaatatacctcggaacaccgagcgc

SEQ ID NO: 683170 - DNA, 120 bp, Artificial Sequence
  ENSG00000187122_4 (sequence is synthesized)
ctggaactcaatggcaacaacatcactcggatccataagaatgactttgcggggctcaagcagctgcgggtgctgcagctgatggagaaccagattggagcagtggaacgtggtgctttt

SEQ ID NO: 683171 - DNA, 120 bp, Artificial Sequence
  ENSG00000187122_5 (sequence is synthesized)
gatgacatgaaggagctggagcggctgcgactgaaccgaaaccagctgcacatgttaccggaactgctgttccagaacaaccaggctttgtcaagactggacttgagtgagaacgccatc

SEQ ID NO: 683172 - DNA, 120 bp, Artificial Sequence
  ENSG00000187122_6 (sequence is synthesized)
caggccatccccaggaaagcttttcggggagctacggaccttaaaaatttacagctggacaagaaccagatcagctgcattgaggaaggggccttccgtgctctgcgggggctggaggtg

SEQ ID NO: 683173 - DNA, 120 bp, Artificial Sequence
  ENSG00000187122_7 (sequence is synthesized)
ctgaccctgaacaacaacaatatcaccaccatccccgtgtccagcttcaaccatatgcccaagctacggaccttccgcctgcactccaaccacctgttttgcgactgccacctggcctgg

SEQ ID NO: 683174 - DNA, 120 bp, Artificial Sequence
  ENSG00000187122_8 (sequence is synthesized)
ctctcgcagtggctgaggcagcggccaaccatcgggctcttcacccagtgctcgggcccagccagcctgcgtggcctcaatgtggcagaggtccagaagagtgagttcagctgctcaggc

SEQ ID NO: 683175 - DNA, 120 bp, Artificial Sequence
  ENSG00000187122_9 (sequence is synthesized)
cagggagaagcggggcgcgtgcccacctgcaccctgtcctccggctcctgcccggccatgtgcacctgcagcaatggcatcgtggactgtcgtggaaaaggcctcactgccatcccggcc

SEQ ID NO: 683176 - DNA, 120 bp, Artificial Sequence
  ENSG00000187122_10 (sequence is synthesized)
aacctgcccgagaccatgacggagatacgcctggagctgaacggcatcaagtccatccctcctggagccttctcaccctacagaaagctacggaggatagacctgagcaacaatcagatc

SEQ ID NO: 683177 - DNA, 120 bp, Artificial Sequence
  ENSG00000187122_11 (sequence is synthesized)
gctgagattgcacccgacgccttccagggcctccgctccctgaactcgctggtcctctatggaaacaagatcacagacctcccccgtggtgtgtttggaggcctatacaccctacagctc

SEQ ID NO: 683178 - DNA, 120 bp, Artificial Sequence
  ENSG00000187122_12 (sequence is synthesized)
ctgctcctgaatgccaacaagatcaactgcatccggcccgatgccttccaggacctgcagaacctctcactgctctccctgtatgacaacaagatccagagcctcgccaagggcactttc

SEQ ID NO: 683179 - DNA, 120 bp, Artificial Sequence
  ENSG00000187122_13 (sequence is synthesized)
acctccctgcgggccatccagactctgcacctggcgcagaaccctttcatttgcgactgtaacctcaagtggctggcagacttcctgcgcaccaatcccatcgagacgagtggtgcccgc

SEQ ID NO: 683180 - DNA, 120 bp, Artificial Sequence
  ENSG00000187122_14 (sequence is synthesized)
tgtgccagtccccggcgcctcgccaacaagcgcatcgggcagatcaagagcaagaagttccggtgctcagccaaagagcagtacttcattccaggcacggaggattaccagctgaacagc

SEQ ID NO: 683181 - DNA, 120 bp, Artificial Sequence
  ENSG00000187122_15 (sequence is synthesized)
gagtgcaacagcgacgtggtctgtccccacaagtgccgctgtgaggccaacgtggtggagtgctccagcctgaagctcaccaagatccctgagcgcatcccccagtccacggcagaactg

SEQ ID NO: 683182 - DNA, 120 bp, Artificial Sequence
  ENSG00000187122_16 (sequence is synthesized)
cgattgaataacaatgagatttccatcctggaggccactgggatgtttaaaaaacttacacatctgaagaaaatcaatctgagcaacaacaaggtgtcagaaattgaagatggggccttc

SEQ ID NO: 683183 - DNA, 120 bp, Artificial Sequence
  ENSG00000187122_17 (sequence is synthesized)
gagggcgcagcctctgtgagcgagctgcacctaactgccaaccagctggagtccatccggagcggcatgttccggggtctggatggcttgaggaccctaatgctgcggaacaaccgcatc

SEQ ID NO: 683184 - DNA, 120 bp, Artificial Sequence
  ENSG00000187122_18 (sequence is synthesized)
agctgcatccacaacgacagcttcacgggcctgcgcaacgtccggctcctctcgctctacgacaaccagatcaccaccgtatccccaggagccttcgacaccctccagtccctctccaca

SEQ ID NO: 683185 - DNA, 120 bp, Artificial Sequence
  ENSG00000187122_19 (sequence is synthesized)
ctgaatctcctggccaaccctttcaactgcaactgccagctggcctggctaggaggctggctacggaagcgcaagatcgtgacggggaacccgcgatgccagaaccctgactttttgcgg

SEQ ID NO: 683186 - DNA, 120 bp, Artificial Sequence
  ENSG00000187122_20 (sequence is synthesized)
cagattcccctgcaggacgtggccttccctgacttcaggtgtgaggaaggccaggaggaggggggctgcctgccccgcccacagtgcccacaggagtgcgcctgcctggacaccgtggtc

SEQ ID NO: 683187 - DNA, 120 bp, Artificial Sequence
  ENSG00000187122_21 (sequence is synthesized)
cgatgcagcaacaagcacctgcgggccctgcccaagggcattcccaagaatgtcacagaactctatttggacgggaaccagttcacgctggttccgggacagctgtctaccttcaagtac

SEQ ID NO: 683188 - DNA, 120 bp, Artificial Sequence
  ENSG00000187122_22 (sequence is synthesized)
ctgcagctcgtggacctgagcaacaacaagatcagttccttaagcaattcctccttcaccaacatgagccagctgaccactctgatcctcagctacaatgccctgcagtgcatcccgcct

SEQ ID NO: 683189 - DNA, 120 bp, Artificial Sequence
  ENSG00000187122_23 (sequence is synthesized)
ttggccttccagggactccgctccctgcgcctgctgtctctccacggcaatgacatctccaccctccaagagggcatctttgcagacgtgacctccctgtctcacctggccattggtgcc

SEQ ID NO: 683190 - DNA, 120 bp, Artificial Sequence
  ENSG00000187122_24 (sequence is synthesized)
aaccccctatactgtgactgccacctccgctggctgtccagctgggtgaagactggctacaaggaaccgggcattgctcgttgtgctgggccccaggacatggagggcaagctgctcctc

SEQ ID NO: 683191 - DNA, 120 bp, Artificial Sequence
  ENSG00000187122_25 (sequence is synthesized)
accacgcctgccaagaagtttgaatgccaaggtcctccaacgctggctgtccaggccaagtgtgatctctgcttgtccagtccgtgccagaaccagggcacctgccacaacgaccccctt

SEQ ID NO: 683192 - DNA, 120 bp, Artificial Sequence
  ENSG00000187122_26 (sequence is synthesized)
gaggtgtacaggtgcgcctgccccagcggctataagggtcgagactgtgaggtgtccctggacagctgttccagtggcccctgtgaaaatgggggcacctgccatgcacaggagggcgag

SEQ ID NO: 683193 - DNA, 120 bp, Artificial Sequence
  ENSG00000187122_27 (sequence is synthesized)
gatgccccgttcacgtgctcctgtcccaccggctttgaaggaccaacctgtggggtgaacacagatgactgtgtggatcatgcctgtgccaatgggggcgtctgtgtggatggtgtgggc

SEQ ID NO: 683194 - DNA, 120 bp, Artificial Sequence
  ENSG00000187122_28 (sequence is synthesized)
aactacacctgccagtgccccctgcagtatgagggaaaggcctgtgagcagctggtggacttgtgctctccggatctgaacccatgtcaacacgaggcccagtgtgtgggcaccccggat

SEQ ID NO: 683195 - DNA, 120 bp, Artificial Sequence
  ENSG00000187122_29 (sequence is synthesized)
gggcccaggtgtgagtgcatgccaggttatgcaggtgacaactgcagtgagaaccaggatgactgcagggaccaccgctgccagaatggggcccagtgtatggatgaagtcaacagctac

SEQ ID NO: 683196 - DNA, 120 bp, Artificial Sequence
  ENSG00000187122_30 (sequence is synthesized)
tcctgcctctgtgctgagggctacagtggacagctctgtgagatccctccccatctgcctgcccccaagagcccctgtgaggggactgagtgccagaatggggccaactgtgtggaccag

SEQ ID NO: 683197 - DNA, 120 bp, Artificial Sequence
  ENSG00000187122_31 (sequence is synthesized)
ggcaacaggcctgtgtgccagtgcctcccaggcttcggtggccctgagtgtgagaagttgctcagtgtcaactttgtggatcgggacacttacctgcagttcactgacctgcaaaactgg

SEQ ID NO: 683198 - DNA, 120 bp, Artificial Sequence
  ENSG00000187122_32 (sequence is synthesized)
ccacgggccaacatcacgttgcaggtctccacggcagaggacaatgggatccttctgtacaacggggacaacgaccacattgcagttgagctgtaccagggccatgtgcgtgtcagctac

SEQ ID NO: 683199 - DNA, 120 bp, Artificial Sequence
  ENSG00000187122_33 (sequence is synthesized)
gatcaacgatgggcaattccacaccgttgagctggttgcctttgaccagatggtgaatctctccattgatggcgggagccccatgaccatggacaactttggcaaacattacacgctcaa

SEQ ID NO: 683200 - DNA, 120 bp, Artificial Sequence
  ENSG00000187122_34 (sequence is synthesized)
cagcgaggcgccactctatgtgggagggatgcccgtggatgtcaactcagctgccttccgcctgtggcagatcctcaacggcaccggcttccacggttgcatccgaaacctgtacatcaa

SEQ ID NO: 683201 - DNA, 120 bp, Artificial Sequence
  ENSG00000187122_35 (sequence is synthesized)
caacgagctgcaggacttcaccaagacgcagatgaagccaggcgtggtgccaggctgcgaaccctgccgcaagctctactgcctgcatggcatctgccagcccaatgccaccccagggcc

SEQ ID NO: 683202 - DNA, 120 bp, Artificial Sequence
  ENSG00000187122_36 (sequence is synthesized)
catgtgccactgcgaggctggctgggtgggcctgcactgtgaccagcccgctgacggcccctgccatggccacaagtgtgtccatgggcaatgcgtgcccctcgacgctctttcctacag

SEQ ID NO: 683203 - DNA, 120 bp, Artificial Sequence
  ENSG00000187122_37 (sequence is synthesized)
ctgccagtgccaggatgggtactcgggggcactgtgcaaccaggccggggccctggcagagccctgcagaggcctgcagtgcctgcatggccactgccaggcctcaggcaccaagggggc

SEQ ID NO: 683204 - DNA, 120 bp, Artificial Sequence
  ENSG00000187122_38 (sequence is synthesized)
acactgtgtgtgtgaccccggcttttcgggcgagctgtgtgagcaagagtccgagtgccggggggaccctgtccgggactttcaccaggtccagaggggctatgccatctgccagaccac

SEQ ID NO: 683205 - DNA, 120 bp, Artificial Sequence
  ENSG00000187122_39 (sequence is synthesized)
gcgccccctgtcatgggtggagtgccggggctcgtgcccaggccagggctgctgccagggccttcggctgaagcggaggaagttcacctttgagtgcagcgatgggacctcttttgccga

SEQ ID NO: 683206 - DNA, 120 bp, Artificial Sequence
  ENSG00000187122_40 (sequence is synthesized)
ggaggtggaaaagcccaccaagtgtggctgtgccctctgcgcatagcgctgggcgtggacaggccggtgagggcgggcaaggggccccagccgctgcagcagcggagacagtcgccagca

SEQ ID NO: 683207 - DNA, 120 bp, Artificial Sequence
  ENSG00000187122_41 (sequence is synthesized)
gctgggctggggtgcaggtcatcacaggacggctcctgggcagctgggccctcctgggtggggtggtgccagagcagccttttaaaagcaaattgcgccatagctgggggcagcgggggt

SEQ ID NO: 683208 - DNA, 120 bp, Artificial Sequence
  ENSG00000187122_42 (sequence is synthesized)
gggcgaggcctgagctgcgggctgccctctccggaagtgccttgcacaaataggcgcttaataaatatttgttgagtgaatgtgtgcgtgaggtcaggccaagaagtgcagaacgatgac

SEQ ID NO: 683209 - DNA, 120 bp, Artificial Sequence
  ENSG00000187122_43 (sequence is synthesized)
acccctccttacctgctatctgaatctggagaagaaaaatgacagccttccaaaccaacccttccctttggcctgtggcccaggctggcttggaactgggtctgtggccccagaagcctc

SEQ ID NO: 683210 - DNA, 120 bp, Artificial Sequence
  ENSG00000187122_44 (sequence is synthesized)
ttacccctctgcgggcaaccatgaagtactgtcagcctccccgggaagccagcctggttcattctgctgctacagaatctgctggtggtaggccaggctctggagcgggggtgccgcctc

SEQ ID NO: 683211 - DNA, 120 bp, Artificial Sequence
  ENSG00000187122_45 (sequence is synthesized)
ctgctggccagggagggtcggacccttgccccctgggctgactggcagctctgcagccacggcttgggaacgaggctgtgggtggaggtggttcttaggaccaggcctctgaatcctaaa

SEQ ID NO: 683212 - DNA, 120 bp, Artificial Sequence
  ENSG00000187122_46 (sequence is synthesized)
gttctagcatgactactgtagctgcgagggcttatgtggaggaaacagtcacaggggctgctcagggtggcagaccccactaaagagggcagagggttctttgctctagataaacaaaca

SEQ ID NO: 683213 - DNA, 120 bp, Artificial Sequence
  ENSG00000187122_47 (sequence is synthesized)
tcatctgcctccagacactggccacagtaggagtattggtcctgggcttccccagccaccagtcagccacaagctgtcggtgacctattggtagagggactgggtgtgagggtctgggcc

SEQ ID NO: 683214 - DNA, 120 bp, Artificial Sequence
  ENSG00000187122_48 (sequence is synthesized)
agggtgcttgacctgggagcagctggttcagagtccttcacaccgcaggccagtagggagcagtggaagggacagtgctccaggcattgggaagtccctgctggctctatcactcggggc

SEQ ID NO: 683215 - DNA, 120 bp, Artificial Sequence
  ENSG00000187122_49 (sequence is synthesized)
aaacttctccccacctgggccttgggttcttcagctataaaatggccagaggtggggggcgggatgactaaaggaacagtgcagactcccccactgtggtcttgggaggccagaggagtt

SEQ ID NO: 683216 - DNA, 120 bp, Artificial Sequence
  ENSG00000187122_50 (sequence is synthesized)
agaagacctatctatctatctatctatctacattgatcacatcaaaagtatttatgtgcctaacccggggctggggattgtggacgttctggcctaatggacagatgtgaactcatccca

SEQ ID NO: 683217 - DNA, 120 bp, Artificial Sequence
  ENSG00000187122_51 (sequence is synthesized)
gagcatcgcaggaatgaccaggatgcccgggaagagttgagctgagtgggggctccagccacagacagcggcccaggccagggagttgctggcaacgaaggagccagtggtggaagaaga

SEQ ID NO: 683218 - DNA, 120 bp, Artificial Sequence
  ENSG00000187122_52 (sequence is synthesized)
agaggccctgaatatacgattgcctgcccacgttgtcttctcttccatacacagtgaaaatgtagaaagatggtttgtgaggccaaactgtgaatgggctaaagggaggcaaagttgcac

SEQ ID NO: 683219 - DNA, 120 bp, Artificial Sequence
  ENSG00000187122_53 (sequence is synthesized)
tctccttccccagagggctcaccaagagggcacacccccgggggttctggtgggcaacgggggtgagcatgtccctgccctggctccctccatctgtgaccaggaggcatggctgggtgt

SEQ ID NO: 683220 - DNA, 120 bp, Artificial Sequence
  ENSG00000187122_54 (sequence is synthesized)
atgttcaggtgaggctcagagtggcattgtgtccctgtcccctgcccagggcagtgaggggagcccttgatgctgattagaaggctagaactggggtagaggtgcctggcatgtctcatg

SEQ ID NO: 683221 - DNA, 120 bp, Artificial Sequence
  ENSG00000187122_55 (sequence is synthesized)
ccatggggactcaatctagcaactgtgagtcctggggtccctgtgatgggaagagggcagtgccctgcccaatgtggcaggtgtcctcatggcaggatctgcccctcaccagggggctgg

SEQ ID NO: 683222 - DNA, 120 bp, Artificial Sequence
  ENSG00000187122_56 (sequence is synthesized)
gatctacttgcttggagctctgagcaaggccacaatgcccgcccccacccccaagtagactgcagcctgggcctcatggggcttctcccaggcccacatggcatccctctctgagtttcc

SEQ ID NO: 683223 - DNA, 120 bp, Artificial Sequence
  ENSG00000187122_57 (sequence is synthesized)
aggccaccgtgggaccctgcagagcatctgcaccgggctggatagggcagaaaagctcaagggcagctagcttgcctcttccctggaagaaaggtgctctgggactcaccaaccctgaga

SEQ ID NO: 683224 - DNA, 120 bp, Artificial Sequence
  ENSG00000187122_58 (sequence is synthesized)
aagatagctttcctggccaccaccattccccaccaccctggagaagccaattcccaggcttgaagggcactggctggcaggaggcctcttcattctgcaggaggtggaaaggacacctgt

SEQ ID NO: 683225 - DNA, 120 bp, Artificial Sequence
  ENSG00000187122_59 (sequence is synthesized)
agacaggtgatgctcacccctcacctggcgccatggggctgggaggtgagcggctggcatgtttgttcctagggagcaccatgtgagcttaaggctcccctgaccggccccaccacatgg

SEQ ID NO: 683226 - DNA, 120 bp, Artificial Sequence
  ENSG00000187122_60 (sequence is synthesized)
cccagcctcctagcacagcagcgctgacctcagtgcagtctgaggattggaatccaccatgagatgatgtgagagctgtgtgccccaggatcaactttttctccaacttggccatcagcc

SEQ ID NO: 683227 - DNA, 120 bp, Artificial Sequence
  ENSG00000187122_61 (sequence is synthesized)
agcgagttgctaaggacctgagtcagcactcacgttgcctattcacactccgcttgaaagtccggaaggtggctactgcaaaatcacccctctgagaagtcctctctccacatcttgtcc

SEQ ID NO: 683228 - DNA, 120 bp, Artificial Sequence
  ENSG00000187122_62 (sequence is synthesized)
ccctttgtgaagacccctagttcgctctgcattttaggcatgaagagatacagcagggtgcgtccggagggagctgtggccttgcaacaccactggcaacagggccggggctcccggtga

SEQ ID NO: 683229 - DNA, 120 bp, Artificial Sequence
  ENSG00000187122_63 (sequence is synthesized)
aggtgtcaggaagtggaaaaggctggactttgtctcctctttgcctgctggtagcctaaccgcaaaagtatctctttatacagaatacttacagattctaatatatatttgtatttcatt

SEQ ID NO: 683230 - DNA, 120 bp, Artificial Sequence
  ENSG00000187122_64 (sequence is synthesized)
ttgttacagtatttttatatgttaaagtcaacatccagcgtcttgttttgcctttcagatgctatgtggtcgtggcacgttttgttgggggtttctgtagtcgtcttgtttggatcaact

SEQ ID NO: 683231 - DNA, 120 bp, Artificial Sequence
  ENSG00000187122_65 (sequence is synthesized)
cctagaggctggtttagaacaggcccatgagggagctgcacctgccctggaagtattgttttagactatgtcgatattgtctgttgtcttccatgtgaacatgacattgagtcactctgc

SEQ ID NO: 683232 - DNA, 120 bp, Artificial Sequence
  ENSG00000187122_66 (sequence is synthesized)
gactgaatggtccagggcatcaaaggccaggccctttctgtaggaaggtgctgtgcagggtatttctccatggcaagcacttggaagaacccgcagttcatccagatttgtgagctgccg

SEQ ID NO: 683233 - DNA, 120 bp, Artificial Sequence
  ENSG00000187122_67 (sequence is synthesized)
ctgacagtgtgggtacaagggtgttctgcaggcaggcatgcttgtggacggtgatgccagcctttacaggggctcattcttacccatctcactgcgcctttagtaacctgcctggagctg

SEQ ID NO: 683234 - DNA, 120 bp, Artificial Sequence
  ENSG00000187122_68 (sequence is synthesized)
aatatttactcattcaactaagcccttcttgaacctatttctattttcagctctttctaccgtttagggccatgaggtctgtaaggttattaaccatggtataagatcatatttttatgt

SEQ ID NO: 683235 - DNA, 82 bp, Artificial Sequence
  ENSG00000187122_69 (sequence is synthesized)
tctgatggtgtccagagtgagctttggcagtctctaagactggagtgtaaattcaagcgactctcctgcttcagcctcctaa

SEQ ID NO: 683236 - DNA, 120 bp, Artificial Sequence
  ENSG00000187122_70 (sequence is synthesized)
gtagctgggactacaggtcctgattcagtaggttcaggaggagcctgattctgctcgtccaagctgccagggtctgatttcctttgtgtgagcactccgccactaggggttctttggctg

SEQ ID NO: 683237 - DNA, 120 bp, Artificial Sequence
  ENSG00000187122_71 (sequence is synthesized)
tttgcttccaggaggggagagggacttgagtgagaacgccatccaggccatccccaggaaagcttttcggggagctacggaccttaaaaatttttacacatacataaggccgctgcaagt

SEQ ID NO: 683238 - DNA, 120 bp, Artificial Sequence
  ENSG00000187122_72 (sequence is synthesized)
cagtgaacatcgctgagcctcgatatattgttctggaaaatggggatactaagatctacttcacaggcatgttctgaggtttaaatgaaacatggaaataaatacactttgtcaaatgct

SEQ ID NO: 683239 - DNA, 120 bp, Artificial Sequence
  ENSG00000187122_73 (sequence is synthesized)
tgtctcctctttgcctgctgatgctatgtggtcgtggcacgttttgttgggggtttctgtagtcgtcttgtttggatcaactcctagaggctggtttagaacaggcccatgagggagctg

SEQ ID NO: 683240 - DNA, 120 bp, Artificial Sequence
  ENSG00000187122_74 (sequence is synthesized)
actggccccgtcacctgtccacacacgacaggcacacacagctcccactgcagggcctttgctgttgctgtgcctcactccaggaatgaccttgaagccatgtttgaagaggaagtaccc

SEQ ID NO: 683241 - DNA, 120 bp, Artificial Sequence
  ENSG00000187122_75 (sequence is synthesized)
aggattttttactcagcttgaacgtttacgagggtagcttgtggggtccgattatgatattgggaatggcatacaacccccctccccaaacctcctggatgttttcactgtcctcctgaa

SEQ ID NO: 683242 - DNA, 120 bp, Artificial Sequence
  ENSG00000187122_76 (sequence is synthesized)
cccacccatgtctacatgtgtttttttgaacttttgtttttttaaaaaacctatacatggaattcatgctcaatgcagaaaactttgaaaatgctaaagtataaaaaaaaaatgcttgaa

SEQ ID NO: 683243 - DNA, 120 bp, Artificial Sequence
  ENSG00000187123_0 (sequence is synthesized)
ctcgctccttccctgagctcccgggctccggcagcgggctggcggggcgccgcattgcacactctgggggcgccgcagtgttcgtgggatggggcagcgggctgcagctggcggccggaa

SEQ ID NO: 683244 - DNA, 120 bp, Artificial Sequence
  ENSG00000187123_1 (sequence is synthesized)
tccgcgcgcagcccgggtgcaagttctctcctgttgccctgagtgcccactcccaggccctctgtatgagtgacacttcagtctgccatggaacctggccctgctctggcctggctcctg

SEQ ID NO: 683245 - DNA, 120 bp, Artificial Sequence
  ENSG00000187123_2 (sequence is synthesized)
ctcctgagcctgctggcggattgtctgaaagctgctcagtcccgagacttcacagtgaaagacattatctacctccatccttcaaccacaccatatcctggtggatttaaatgtttcacc

SEQ ID NO: 683246 - DNA, 120 bp, Artificial Sequence
  ENSG00000187123_3 (sequence is synthesized)
tgtgaaaaggcagcagacaattatgagtgcaaccgatgggctccagacatctactgccctcgagagaccagatactgctacactcagcacacaatggaagtcacaggaaacagtatctca

SEQ ID NO: 683247 - DNA, 120 bp, Artificial Sequence
  ENSG00000187123_4 (sequence is synthesized)
gtcaccaaacgctgtgtcccactggaagagtgcttatccactggctgcagagactccgagcatgaaggccacaaggtctgcacttcttgttgtgaaggaaatatctgtaacttgccactg

SEQ ID NO: 683248 - DNA, 120 bp, Artificial Sequence
  ENSG00000187123_5 (sequence is synthesized)
ccccgaaatgaaactgatgccacatttgccacgacgtcacctataaatcagacaaatgggcacccacgctgtatgtcagtgatagtgtcctgcttgtggttgtggttagggctcatgtta

SEQ ID NO: 683249 - DNA, 120 bp, Artificial Sequence
  ENSG00000187123_6 (sequence is synthesized)
tagtggctcagtggctccatgtgttaatagcgatccatggggatctcgatggtccacagacctgcatgagtcattggcctgacagtaattacacatgtgagacacaacactcttggaggt

SEQ ID NO: 683250 - DNA, 120 bp, Artificial Sequence
  ENSG00000187123_7 (sequence is synthesized)
catcacagccaagcattgccacttaccatgaggaataaatgttgcttcattgtagccattttgagtctaaccgagactcatcaaagccttctgtcagtacagcccaagttccataccata

SEQ ID NO: 683251 - DNA, 120 bp, Artificial Sequence
  ENSG00000187123_8 (sequence is synthesized)
aacgtttgttttcattccaagaagtagttctgcatttatcgagatctggggttcttaatttggaagaatacatgcatgagatgcagtaggtcctgagactgtaagatattaggagtatgt

SEQ ID NO: 683252 - DNA, 120 bp, Artificial Sequence
  ENSG00000187123_9 (sequence is synthesized)
tataggggcatgtatagatgtgggcttttcaggagaaaagtaaccattggtttaaatataatcatgagttcatttgtagctttagaattttaaaacattgactccaaactgaatggacta

SEQ ID NO: 683253 - DNA, 120 bp, Artificial Sequence
  ENSG00000187123_10 (sequence is synthesized)
tttccttggaaattctgactgagtccctggaagagtagtaattccaacaattccagccatttgttcaattaattttcccaacattcttctcccagtgctgggaatcacatttcctctgtt

SEQ ID NO: 683254 - DNA, 120 bp, Artificial Sequence
  ENSG00000187123_11 (sequence is synthesized)
ctgtgcagaagacaaaaaggcaatcataaaagtttgttatatttgtgggggtgcctggaggaggattttcctcaacttaatggagccactgtccataaagtggctgttatcccttcatat

SEQ ID NO: 683255 - DNA, 120 bp, Artificial Sequence
  ENSG00000187123_12 (sequence is synthesized)
aattggtgagatcagccttctccttgacttggcacctaattatgcttcatgagatcctagattccacctgagtcaattgtgtccagagccccaaaccaggatggagttgttttccccaga

SEQ ID NO: 683256 - DNA, 120 bp, Artificial Sequence
  ENSG00000187123_13 (sequence is synthesized)
tatggggttctattcagccatagataatctagacagaggatttcagaatgaaaggaaaaatgtgtggagattagtcctagttcattctgagggccgactaagtggctcagccagcttctt

SEQ ID NO: 683257 - DNA, 120 bp, Artificial Sequence
  ENSG00000187123_14 (sequence is synthesized)
actccatctgcagttcatactgccaaagagctcccacttccaaatccccagtgactttatggagaagattctgcattaaattgtctttcgaatgatggggaagcaaggcataatatgcga

SEQ ID NO: 683258 - DNA, 120 bp, Artificial Sequence
  ENSG00000187123_15 (sequence is synthesized)
tgatgaggagaaagtagaccagtgaggtgattgcaagactaacaaggagactcaatgggaagtttttctttcttttagatattgcttttgaagtagatggtaaaatttttgtcatccttc

SEQ ID NO: 683259 - DNA, 120 bp, Artificial Sequence
  ENSG00000187123_16 (sequence is synthesized)
ttaaacagtatttatttttgtaaggcataactagaaactaaaatatattctaaaaaattcattattctgaacaaagtgatcaaattagaatacatatttttcaacagtggtagagctttt

SEQ ID NO: 683260 - DNA, 120 bp, Artificial Sequence
  ENSG00000187123_17 (sequence is synthesized)
aatatatgtttattgaaagttatctataatacttgcaccagtgttgaaaaaagttaacatgtaggcaagagcaatatgtttgtctcaaggatttttccatggtttcctcagtgatggtgt

SEQ ID NO: 683261 - DNA, 120 bp, Artificial Sequence
  ENSG00000187123_18 (sequence is synthesized)
cctggaattattcaggtggtgaccatcactggtctaagtttgtgtgcagggttttcagatgtgtttttgtgaaacttggtagaaccatggctaataaagaggacagtgttgtcagggtcc

SEQ ID NO: 683262 - DNA, 120 bp, Artificial Sequence
  ENSG00000187123_19 (sequence is synthesized)
atctgccctccatagaaaaatgtctctggctcataaaatgagactccctcagggactaaatatgaactgacagcagtaactctgatacagaataatctaaattgcatcaaatggccttaa

SEQ ID NO: 683263 - DNA, 120 bp, Artificial Sequence
  ENSG00000187123_20 (sequence is synthesized)
ttcagagtttgttaggcttatcagtatgttgcttttaattggggtgggaaagtagagggagagaaagcaagacatttattaagcacctcgtatgtgccaggcactatgctaagcacttta

SEQ ID NO: 683264 - DNA, 120 bp, Artificial Sequence
  ENSG00000187123_21 (sequence is synthesized)
cataagttaggattaatccctgcaagaatcctataaagaatgttactagcatttacacttcccaaatgaaggtaccaaagctcaaacgcaatgttgtgaagctgtttccttcagatttag

SEQ ID NO: 683265 - DNA, 120 bp, Artificial Sequence
  ENSG00000187123_22 (sequence is synthesized)
gttatgtgggatgatgtgggattgaagaggaaagaaaggtgggattatccccctaggaagactttcaggcctgacttcataggaattcatccatcttatcatgtggagtttatctcaccc

SEQ ID NO: 683266 - DNA, 120 bp, Artificial Sequence
  ENSG00000187123_23 (sequence is synthesized)
tgctgttgcaggatgctatttgcatgtgtccccaggtgatgttttttctttggggagtaggggtttggcttcctcattcatccctcttgctaaaagaggagatagttgatgttgcatcta

SEQ ID NO: 683267 - DNA, 120 bp, Artificial Sequence
  ENSG00000187123_24 (sequence is synthesized)
aagatgctataagacaatgaaagtttgatgttgtacatacctacaagtaccatttttgtgcatgattacactccactgacatcttccaagtactgcatgtgattgaataagaaacaagaa

SEQ ID NO: 683268 - DNA, 120 bp, Artificial Sequence
  ENSG00000187123_25 (sequence is synthesized)
agtgaccacaccaaagcctccctggctggtgtagagggatcaggtccacagtggtgcagattcaaccaccacccagggagtgcttgcagactctgcatagatgttgctgcatgtgtccca

SEQ ID NO: 683269 - DNA, 120 bp, Artificial Sequence
  ENSG00000187123_26 (sequence is synthesized)
tgtgcctgtcagaatggcagtgtttaattctcttgaaagaaagttatttgctcactatccccagcctcaaggagccaaggaagagtcattcacatggaaggtccgggactggtcagccac

SEQ ID NO: 683270 - DNA, 120 bp, Artificial Sequence
  ENSG00000187123_27 (sequence is synthesized)
tctgacttttctaccacattaaattctccattacatctcaatattggtaatggcttaagtgtaaagagccatgatgtgtatattaagctatgtgccacatatttatttttagactctcca

SEQ ID NO: 683271 - DNA, 120 bp, Artificial Sequence
  ENSG00000187123_28 (sequence is synthesized)
cagcattcatgtcaatatgggattaatgcctaaactttgtaaatattgtacagtttgtaaatcaatgaataaaggttttgagtgtatcttaccaggctcctccctgcaaatgcacatgtc

SEQ ID NO: 683272 - DNA, 120 bp, Artificial Sequence
  ENSG00000187123_29 (sequence is synthesized)
aatcaatgattaatgcacccaggttatgtacaaggcactgggcttagcaccacagggaacttccttccagaggcttgctttctagttgtgtagacaagaatacatgcatgagaagataca

SEQ ID NO: 683273 - DNA, 120 bp, Artificial Sequence
  ENSG00000187123_30 (sequence is synthesized)
agacaattcacccatgccaaatgattcatacaggctgtttaagtactgcagaaaataaaagaaggaaaggctaccagacttttcaataaggtctacagcttcccaagagcatgtctttgt

SEQ ID NO: 683274 - DNA, 120 bp, Artificial Sequence
  ENSG00000187123_31 (sequence is synthesized)
taaatcaggaaatataaaaattatgtgtgtatgtgtatgtatatatatataccaccctattaactattttaaaatcgtattctattttgggggttgtgttaatgatgatgaaccagaaaa

SEQ ID NO: 683275 - DNA, 120 bp, Artificial Sequence
  ENSG00000187123_32 (sequence is synthesized)
gattttctcttgatggtttcttcaacaggaaacagatattggaatagtgtacatgtcatttttatctatacaatgaatttattatatttttcttagtaaagtgatagacattgaaagcaa

SEQ ID NO: 683276 - DNA, 120 bp, Artificial Sequence
  ENSG00000187123_33 (sequence is synthesized)
actgcaaacgtcaagtggtctccgccttccctgggttcggagcttcacttgctcttgagctctgcggtccggcggatttcgcggggcccaggggatggcggggagtgagatttggccagg

SEQ ID NO: 683277 - DNA, 120 bp, Artificial Sequence
  ENSG00000187123_34 (sequence is synthesized)
agcactgtgcagggcatgaaagaccaaccactctgtaaatgcacataaagaacaacctccttgagcaatctcaagcaagagaaagaagaggcttccgagctccagcaaaacaatgggaaa

SEQ ID NO: 683278 - DNA, 120 bp, Artificial Sequence
  ENSG00000187123_35 (sequence is synthesized)
aaacatacccttatcttttccttctcattttcaaaggtaccgtgaatataagtagaagaaagacaccgtctcttcctttaaggaacttacagtcttatggaagagacacagatggaagtg

SEQ ID NO: 683279 - DNA, 120 bp, Artificial Sequence
  ENSG00000187123_36 (sequence is synthesized)
cacaattaccgaatatcatcaaaaagcctgagaaaaagttatgcaaaagctactgtgtgagcacagaggctgtaaacctaatcctaagttgcagggtgagcaacaaggcactattttgga

SEQ ID NO: 683280 - DNA, 120 bp, Artificial Sequence
  ENSG00000187123_37 (sequence is synthesized)
agaagaaaagccagatatcccaaatgagaaagttaagaaggactaagacaacatggagaagagagaagattagcattgacctggttgggaggaagatcaggaagatttcacagaatttat

SEQ ID NO: 683281 - DNA, 120 bp, Artificial Sequence
  ENSG00000187123_38 (sequence is synthesized)
cacatttggattgagccttgaagaatatcaggtgtccaggagtagaagataggaaaaaatatgcagaccatgctaaggatgcacatttttcatcgtgcatggtcaaaagttgtggtacta

SEQ ID NO: 683282 - DNA, 120 bp, Artificial Sequence
  ENSG00000187134_0 (sequence is synthesized)
aaacatttgccagccaggctagtgacagaaatggattcgaaatatcagtgtgtgaagctgaatgatggtcacttcatgcctgtcctgggatttggcacctatgcgcctgcagaggttcct

SEQ ID NO: 683283 - DNA, 120 bp, Artificial Sequence
  ENSG00000187134_1 (sequence is synthesized)
aaaagtaaagctttagaggccaccaaattggcaattgaagctggcttccgccatattgattctgctcatttatacaataatgaggagcaggttggactggccatccgaagcaagattgca

SEQ ID NO: 683284 - DNA, 120 bp, Artificial Sequence
  ENSG00000187134_2 (sequence is synthesized)
gatggcagtgtgaagagagaagacatattctacacttcaaagctttggtgcaattcccatcgaccagagttggtccgaccagccttggaaaggtcactgaaaaatcttcaattggattat

SEQ ID NO: 683285 - DNA, 120 bp, Artificial Sequence
  ENSG00000187134_3 (sequence is synthesized)
gttgacctctaccttattcattttccagtgtctgtaaagccaggtgaggaagtgatcccaaaagatgaaaatggaaaaatactatttgacacagtggatctctgtgccacatgggaggcc

SEQ ID NO: 683286 - DNA, 120 bp, Artificial Sequence
  ENSG00000187134_4 (sequence is synthesized)
gtggagaagtgtaaagatgcaggattggccaagtccatcggggtgtccaacttcaaccgcaggcagctggagatgatcctcaacaagccagggctcaagtacaagcctgtctgcaaccag

SEQ ID NO: 683287 - DNA, 120 bp, Artificial Sequence
  ENSG00000187134_5 (sequence is synthesized)
gtggaatgtcatccttacttcaaccagagaaaactgctggatttctgcaagtcaaaagacattgttctggttgcctatagtgctctgggatcccaccgagaagaaccatgggtggacccg

SEQ ID NO: 683288 - DNA, 120 bp, Artificial Sequence
  ENSG00000187134_6 (sequence is synthesized)
aactccccggtgctcttggaggacccagtcctttgtgccttggcaaaaaagcacaagcgaaccccagccctgattgccctgcgctaccagctacagcgtggggttgtggtcctggccaag

SEQ ID NO: 683289 - DNA, 120 bp, Artificial Sequence
  ENSG00000187134_7 (sequence is synthesized)
agctacaatgagcagcgcatcagacagaacgtgcaggtgtttgaattccagttgacttcagaggagatgaaagccatagatggcctaaacagaaatgtgcgatatttgacccttgatatt

SEQ ID NO: 683290 - DNA, 120 bp, Artificial Sequence
  ENSG00000187134_8 (sequence is synthesized)
tttgctggcccccctaattatccattttctgatgaatattaacatggagggcattgcatgaggtctgccagaaggccctgcgtgtggatggtgacacagaggatggctctatgctggtga

SEQ ID NO: 683291 - DNA, 120 bp, Artificial Sequence
  ENSG00000187134_9 (sequence is synthesized)
ctggacacatcgcctctggttaaatctctcctgcttggtgatttcagcaagctacagcaaagcccattggccagaaaggaaagacaataattttgttttttcattttgaaaaaattaaat

SEQ ID NO: 683292 - DNA, 120 bp, Artificial Sequence
  ENSG00000187134_10 (sequence is synthesized)
gctctctcctaaagattcttcacctactttggtctccataacttctatgttttctttccttctgacacactagtgcccctaaattgtgatttgcctatacgtttagggccggggttggaa

SEQ ID NO: 683293 - DNA, 120 bp, Artificial Sequence
  ENSG00000187134_11 (sequence is synthesized)
gatgttaacaaccatttaagattcatttctgcagtgggagtgggtggagtttcaccctctgggaaaggggcaggtgacaggtatttatcagtcagtgcctctctagctcttgtaggaaga

SEQ ID NO: 683294 - DNA, 120 bp, Artificial Sequence
  ENSG00000187134_12 (sequence is synthesized)
agcacacgcaggatggagtctagaggatgagcgatattgactagcaattcatgggctccctccagcagtgcgagggtcagagtttctggagccttgggaggaggcatccctgtgaggggg

SEQ ID NO: 683295 - DNA, 120 bp, Artificial Sequence
  ENSG00000187134_13 (sequence is synthesized)
ggttagggagatgggagggcaccaggaaaagtgattagaagtcaggtatgggaaggctaaataggacagagtcgagtacatctctgcttggaaaaacatatcaacacccttttttttgaa

SEQ ID NO: 683296 - DNA, 120 bp, Artificial Sequence
  ENSG00000187134_14 (sequence is synthesized)
cattatatcttgctcataaaagaaaactttccacattgttttaacaaaccccacagctgagagtcaggcctgaatctttgatgtgtgcccattcacaacgttgaccctattggtttgtgg

SEQ ID NO: 683297 - DNA, 120 bp, Artificial Sequence
  ENSG00000187134_15 (sequence is synthesized)
tggggcagggcatcaaagacatcattgactaatcacattcccctgaatagctcatatttagaaaatattcttagattctaaaaatgtactattaatttgtgatattcagtcttttaaata

SEQ ID NO: 683298 - DNA, 120 bp, Artificial Sequence
  ENSG00000187134_16 (sequence is synthesized)
ttttatacattaaacaggcatagttacaaatataaaacaaaaatatcccaaagccattatgcatggcactcaagattaaaatgggaaataatacatctaataaatcaaatgttccaagac

SEQ ID NO: 683299 - DNA, 120 bp, Artificial Sequence
  ENSG00000187134_17 (sequence is synthesized)
ttcaaaggtcttttggaaacaggctatgtaaaacagcacactggtttcaaactttggtaaattttaagaacaactcttacaaaggcatttaattcttatacataattttcaggggaccta

SEQ ID NO: 683300 - DNA, 120 bp, Artificial Sequence
  ENSG00000187134_18 (sequence is synthesized)
agttaatcagctaatcatgaagacatgattttcattttagaaaacacttttgaaaacttgggataatctcatgccttaatgatcaaagcattatgagaaggacagtggtttttaacctgg

SEQ ID NO: 683301 - DNA, 120 bp, Artificial Sequence
  ENSG00000187134_19 (sequence is synthesized)
gcatatgttctaacacatttactctccactattcgtactctggtagccatgttaaccccatcagagattccttctcaagccatgtctcagagctgagaggcatcccagcaagttttgcag

SEQ ID NO: 683302 - DNA, 120 bp, Artificial Sequence
  ENSG00000187134_20 (sequence is synthesized)
ctcacagttttttccgtaaattacttattctataaaattggagtaggccataaactttggagggccctagaccaattttttggattatttttcgtcttctatcattccgctgatcttaga

SEQ ID NO: 683303 - DNA, 120 bp, Artificial Sequence
  ENSG00000187134_21 (sequence is synthesized)
tattctctgcattaaatattaaatatcacttctaggctgaaaaatccccctaaaaatatttctagctcagatttttcctccaaattctgcaatagaagatcacaatgtgaactctgcatc

SEQ ID NO: 683304 - DNA, 120 bp, Artificial Sequence
  ENSG00000187134_22 (sequence is synthesized)
tccatgttaaagtctaatggacattcacacttagcatgtctcaaagaaatctcatgtaaaccatggccatcctgttctaccttaactttctgagtctatggaatgataatttcacatctc

SEQ ID NO: 683305 - DNA, 120 bp, Artificial Sequence
  ENSG00000187134_23 (sequence is synthesized)
ataaacttgactgatgtaagtgtcaagaaaagattgacattttgttaaaagttagtagtgaagtgtgtaacgcttaagcaaactttcatatttcaaatctctttagcaagtgtaactctt

SEQ ID NO: 683306 - DNA, 120 bp, Artificial Sequence
  ENSG00000187134_24 (sequence is synthesized)
ttttcaagatgtgaaataatcattaggtcagtcatttgtaaatagtacatctgctatggactttttccagttcttcaccatccatttttataaaactcttattgttaaaaaaaaagttac

SEQ ID NO: 683307 - DNA, 120 bp, Artificial Sequence
  ENSG00000187134_25 (sequence is synthesized)
tcagaatttcataaagccaaacacctgatttcaggaacacttgagatgtaagaaaattttatagggacctccaatcactaattttcctattttttctctcaaagaaatgctgaagggagg

SEQ ID NO: 683308 - DNA, 120 bp, Artificial Sequence
  ENSG00000187134_26 (sequence is synthesized)
aattcaggttgaatgaaaggaaatagtaacttacagccatatagagttataaagacttcttgtaaatgtgaacatatggtaaaatataaaaacatgtatttttgaaattttggattctac

SEQ ID NO: 683309 - DNA, 120 bp, Artificial Sequence
  ENSG00000187134_27 (sequence is synthesized)
gtatgcaatgtaggaagctgtaattactgaccaaaactatgtgaagtggagaaaacctggggaagtggatggttttagatgaaactgaagttaaattcatattgatttaaagtaaattgt

SEQ ID NO: 683310 - DNA, 120 bp, Artificial Sequence
  ENSG00000187134_28 (sequence is synthesized)
tataactttataaagtttttcatcatcaccacagcaatcacaaagagaataattatgaatatacgcaagaggaaatgagaagggaatccaaatgtcattaaaaaaaaatcacgccacctc

SEQ ID NO: 683311 - DNA, 120 bp, Artificial Sequence
  ENSG00000187134_29 (sequence is synthesized)
acaaaatggtaacagtggatataaaggatagaaagctataaacctggtaggaaaacattgaaaatggcacaagtgactccttccctgtcaccaatgacagtcatgtgttgcataatgcct

SEQ ID NO: 683312 - DNA, 120 bp, Artificial Sequence
  ENSG00000187134_30 (sequence is synthesized)
gggctatcttctgagaatggctttgttaggcaactgtgtcatggtggggacatgatagcattagagagaattctctcaaacactgtcatggccttatcaactatgcttctgtaatattct

SEQ ID NO: 683313 - DNA, 120 bp, Artificial Sequence
  ENSG00000187134_31 (sequence is synthesized)
gaatccttcgctgcctttccaacagtgtttacaacggtttcctaagaaatgaaatccatttcaccaaaccacttttcttgctcatccataagaaacacttctcctttgttaaaattacat

SEQ ID NO: 683314 - DNA, 120 bp, Artificial Sequence
  ENSG00000187134_32 (sequence is synthesized)
catgagattgcaagcattcagtaacttgcaagctccaatttgaattctagttgtcttgctatttccaccacatctgcaattactttctccactgaaatcttgcattcctccaagtcatcc

SEQ ID NO: 683315 - DNA, 120 bp, Artificial Sequence
  ENSG00000187134_33 (sequence is synthesized)
aggagggttgaattcacttctttcaaactcctgttcaagtaaatgttttgccctcctgtcacgaatcatgaatgtttttaatggcatctagaatagtaaatctttttcagaagattttca

SEQ ID NO: 683316 - DNA, 120 bp, Artificial Sequence
  ENSG00000187134_34 (sequence is synthesized)
attttcttttcccaggttcttcagacaagtcaccatggtagctgtagacttatgaaatgtatttcctgaaccataaaacaagaacatcaaaattactctatgatccatgggaaacagaat

SEQ ID NO: 683317 - DNA, 120 bp, Artificial Sequence
  ENSG00000187134_35 (sequence is synthesized)
gcatgttgtgttagcaggcatggaaagaacagtaatctctttcaacctctgtaagagagttcttggttgattaggtaccttgtcgataggcagttctaatttcaaagaactttttctttt

SEQ ID NO: 683318 - DNA, 120 bp, Artificial Sequence
  ENSG00000187134_36 (sequence is synthesized)
gctgagcagtaagtcttaacagtgggcttaaaatattcagtaaaccattatttaaggagatgtggcttaaatatctaggctttcttgctttatttatagaacacttacagagtagatata

SEQ ID NO: 683319 - DNA, 120 bp, Artificial Sequence
  ENSG00000187134_37 (sequence is synthesized)
gattaaatcttaaggaccctaggattgttagaatagtaaatgaacatcatatgttgtaatatagttagccagggaggggaaagatctctacaagaaataattttaaaaactactcaaaga

SEQ ID NO: 683320 - DNA, 120 bp, Artificial Sequence
  ENSG00000187134_38 (sequence is synthesized)
aatcagagatatcacaaaatgacaaaacaagtacaggggcagcaaaaggtaacagatgtcaactatgagatctcatcaagaactaagaaaatggagaaaagtaccagatggcagatggga

SEQ ID NO: 683321 - DNA, 120 bp, Artificial Sequence
  ENSG00000187134_39 (sequence is synthesized)
ggcagtgtgagcatgcctctcccacttggagattagtgtgtagagatttacattgtgaatttcttttcaagaaccaatgcagagacttaacagatatatgaaaaaatttcacatacactc

SEQ ID NO: 683322 - DNA, 120 bp, Artificial Sequence
  ENSG00000187134_40 (sequence is synthesized)
tgaagaagtctcaggcacaatcctactccatgaaataagaaaaaaccatcacatccccagattctgaggggagagagttcactccagagcatacatccccactggggatctggaaattca

SEQ ID NO: 683323 - DNA, 120 bp, Artificial Sequence
  ENSG00000187134_41 (sequence is synthesized)
ggccacaagagaaggctttgatcctgtgcggacaagtgccttgagcagaatccacaggggagagctggaagtgcatggcagatatgagcacagaagctgggtgtccagccttgtgggcag

SEQ ID NO: 683324 - DNA, 120 bp, Artificial Sequence
  ENSG00000187134_42 (sequence is synthesized)
accgggagggatgtggcctgaaagccatggttattatctcagcgtgtaagctgatgatctgaggctggtcagagttctgtgcgcagactgcctggatgtaaacctggcactgttagcaga

SEQ ID NO: 683325 - DNA, 120 bp, Artificial Sequence
  ENSG00000187134_43 (sequence is synthesized)
gcactgcatgaatgaaaggaatgaaaatagccttgccaactgcataggtgctgggtgaggctcactgtggggggcgcacggcaagctattcaacattacgtacaggcatttgaggtcggg

SEQ ID NO: 683326 - DNA, 120 bp, Artificial Sequence
  ENSG00000187134_44 (sequence is synthesized)
gcatggaaaaatactgaggcagtgtgtgtatgttatttgtgctgagaatgaaactccttgaccttgaaaacaggacagggagtggtgtgtgtgctgtgataaggaatgctgaaaacggtc

SEQ ID NO: 683327 - DNA, 120 bp, Artificial Sequence
  ENSG00000187134_45 (sequence is synthesized)
tcctgagaatgcggtttgagtgcttttacaaggccacaggtgtctcacgacctgacctcataaagccatctagtggatgtttgtggcttaacaagccccttcaataagtacttggcggag

SEQ ID NO: 683328 - DNA, 120 bp, Artificial Sequence
  ENSG00000187134_46 (sequence is synthesized)
ggatgctggggggaccttcttagaagagctgcgccccacccccctccctggacagcccagctacaattgtctgagaactcactgcaagctgtaagcggcccactacttcccactcccttt

SEQ ID NO: 683329 - DNA, 120 bp, Artificial Sequence
  ENSG00000187134_47 (sequence is synthesized)
tttgaactcttctgtgcagcagaggcaattaaactctcctctggaacattaccccagcagcctgagaaccaccccttggcgctcacaggggctgcagcctgccttatccaaggacagtta

SEQ ID NO: 683330 - DNA, 120 bp, Artificial Sequence
  ENSG00000187134_48 (sequence is synthesized)
gagtgcagacccacctaaccctggacccactggtggtacccatccacccatcctggtagcttaacacaaagatacacttttaggagcttcatagcccctcttcccccattgcctgagaaa

SEQ ID NO: 683331 - DNA, 120 bp, Artificial Sequence
  ENSG00000187134_49 (sequence is synthesized)
ccactttccctgggcaacttagggcaagctcaaatcccactgctaccaccacagctggtgctcttttgcaagtgccacctcctagctggagaccaaccagcacagtccacacagcacctc

SEQ ID NO: 683332 - DNA, 120 bp, Artificial Sequence
  ENSG00000187134_50 (sequence is synthesized)
aaggaagaataaatagaactgttcccaggaaggagaaaatgcctgcatgagctcagctgttaccactgcgtaccacaccctgaccagtcagaggtcttgagtcggtccgcatgacaagtt

SEQ ID NO: 683333 - DNA, 120 bp, Artificial Sequence
  ENSG00000187134_51 (sequence is synthesized)
caccgctcgcataaccagcattcaagaaagccagcacactaagcctatctacagccagggagtctcagagtctacgtcactcccctgccacctcaatcagagctggtgctggtatccact

SEQ ID NO: 683334 - DNA, 120 bp, Artificial Sequence
  ENSG00000187134_52 (sequence is synthesized)
gctgggagacttgtgctgaggtgaagcctgggctggatggctggaggatgaagaactgcacggaggagatggaggcacccagacagatgccccatggacatcctgaagcagagctgcctc

SEQ ID NO: 683335 - DNA, 120 bp, Artificial Sequence
  ENSG00000187134_53 (sequence is synthesized)
actgccctgcacacacatgagagcgcagccaggaacagaaggactgggcaacattcaggcggagcccaggccaattttctaaacatggaatatgagttaaataaatggcttcgtattaaa

SEQ ID NO: 683336 - DNA, 120 bp, Artificial Sequence
  ENSG00000187134_54 (sequence is synthesized)
agtcctgactggtgattccaggcctccttgatcaaattgactgtccccaaatgttacacacatttcagcattaaagttactacacttttcccagtaaattacatttttttgttttatttt

SEQ ID NO: 683337 - DNA, 120 bp, Artificial Sequence
  ENSG00000187134_55 (sequence is synthesized)
atgttttaaaacttagagtcaatcagtgaagatctacagtggaaatacatatgtataaaattagtgaatttggtataatgatacggtgctgtgataatttaataaaagcattgagaaatt

SEQ ID NO: 683338 - DNA, 120 bp, Artificial Sequence; identical to SEQ ID NO: 427239
  ENSG00000187134_56 (sequence is synthesized)

SEQ ID NO: 683339 - DNA, 120 bp, Artificial Sequence
  ENSG00000187134_57 (sequence is synthesized)
ctcagcataaatattgtttttatggatatttgaactaagcattttcttaggaggacatagggattataacatagaagaagaatcctaaatctaactcctaattcctttctatgggataca

SEQ ID NO: 683340 - DNA, 120 bp, Artificial Sequence
  ENSG00000187134_58 (sequence is synthesized)
ttttgaatccatacttccgtgattgcatgtctataagaaaagaaagtgcagaactctcaaagcctctgcctcaaaaacttgaggaaatgatagtcatctccttgaaggcacaaggtctta

SEQ ID NO: 683341 - DNA, 120 bp, Artificial Sequence
  ENSG00000187134_59 (sequence is synthesized)
gttatgattcctgatttcacctcttgggatgttcacagacacagagtttcatgaagctgtggtgtccagaaaacctgctgcacatagggtgcacaatgagtttccatcttcttgcctctt

SEQ ID NO: 683342 - DNA, 120 bp, Artificial Sequence
  ENSG00000187134_60 (sequence is synthesized)
tttaaggggcgagaactcagtccgggagtgtcttaaactacagaccttcatgggaaaccttgttgcttctgcttcctctcttttcacactggaggttttatttttgcttagccatgaatt

SEQ ID NO: 683343 - DNA, 120 bp, Artificial Sequence
  ENSG00000187134_61 (sequence is synthesized)
cttgggtcattcataacttttgtcttaaggtactgaaaactagtcaggctagttaatgcaaaagggtatattagatatgataatgggaaatcaaagccagggctacattaagaatttgat

SEQ ID NO: 683344 - DNA, 120 bp, Artificial Sequence
  ENSG00000187134_62 (sequence is synthesized)
aggcccatgttcattaccgtgagctcctgtgcatctcctaatttccaaactagccttgaaaacacctccattgaccatgattggttcatggtcctgtgcatggaacatcatatgttcagg

SEQ ID NO: 683345 - DNA, 120 bp, Artificial Sequence; identical to SEQ ID NO: 427282
  ENSG00000187134_63 (sequence is synthesized)

SEQ ID NO: 683346 - DNA, 120 bp, Artificial Sequence
  ENSG00000187134_64 (sequence is synthesized)
aagtcaatgaaagtcaatgatgacactccattaggaaccagaaagaggtatttatttatacatgtaatagttgtaagagattagagggagcctgtcacctgaagacattccttatacctt

SEQ ID NO: 683347 - DNA, 120 bp, Artificial Sequence
  ENSG00000187134_65 (sequence is synthesized)
catatgtagtacactctgtacataccactctctggagcactgcatcacctacctcatggaggattagtgtccttaaatgtacctcagagcatggctatgtgtggagaaattgacttgtga

SEQ ID NO: 683348 - DNA, 120 bp, Artificial Sequence
  ENSG00000187134_66 (sequence is synthesized)
tgggattacaggtgtgagccgccacgcctggccattccttgtgttaattttaccatactaaaaataattaagattatatctataactataggttgcatcctgttaatttttccaaaaaat

SEQ ID NO: 683349 - DNA, 120 bp, Artificial Sequence
  ENSG00000187134_67 (sequence is synthesized)
tataactataggttgcatcctgttaatttttccaaaaaatgactgaacctgaaattgttttggggacacttccaaactagtggtcaagcagtgatttttctgggactgcagaagttcctg

SEQ ID NO: 683350 - DNA, 120 bp, Artificial Sequence
  ENSG00000187135_0 (sequence is synthesized)
gatccgagcccacgcggccgccgcctctccgctcccgggcccccgccgccaccgcgccccccgcgggagatggaacagcggaaccggctcggtgccctcggatacctgccgcctctgctg

SEQ ID NO: 683351 - DNA, 120 bp, Artificial Sequence
  ENSG00000187135_1 (sequence is synthesized)
cctgccgcctctgctgctgcatgccctgctgctcttcgtggccgacgctgcattcacagaagtccccaaagatgtgacagtacgggagggagacgacatcgaaatgccctgcgcgttccg

SEQ ID NO: 683352 - DNA, 120 bp, Artificial Sequence
  ENSG00000187135_2 (sequence is synthesized)
ggccagcggagccacctcgtattcgctggagattcagtggtggtacctcaaggagccaccccgggagctgctgcacgagctggcgctcagcgtgccgggcgcccggagcaaggtaacaaa

SEQ ID NO: 683353 - DNA, 120 bp, Artificial Sequence
  ENSG00000187135_3 (sequence is synthesized)
taaggatgcaactaaaatcagcaccgtacgcgtccagggcaatgacatctcacaccggcttcggctgtctgccgtgcggctgcaggacgagggcgtgtacgagtgccgcgtgtcggacta

SEQ ID NO: 683354 - DNA, 120 bp, Artificial Sequence
  ENSG00000187135_4 (sequence is synthesized)
cagcgacgacgacacgcaggagcacaaggcccaggcgatgctgcgcgtgctctcgcgcttcgcgccgcccaacatgcaggccgccgaggccgtgtcccacatccagagcagcggcccgcg

SEQ ID NO: 683355 - DNA, 120 bp, Artificial Sequence
  ENSG00000187135_5 (sequence is synthesized)
tgtcccacatccagagcagcggcccgcgtcgccacggcccagccagcgccgccaacgccaacaacgcgggcgccgcgagccgtaccacctccgagcccggccgcggcgacaagagcccgc

SEQ ID NO: 683356 - DNA, 120 bp, Artificial Sequence
  ENSG00000187135_6 (sequence is synthesized)
caccacagtcgcggcagctgctgctgcctcgtcagcgtcgccgccatcgggacaggcggtcctgctgcgccagaggcacggctcgggcaccggccgtagctacaccacagacccactctt

SEQ ID NO: 683357 - DNA, 120 bp, Artificial Sequence
  ENSG00000187135_7 (sequence is synthesized)
gtccctgctcctgttagctctgcataagttcctgcgcctgctcttgggacattgacagacaagaccaacccgagcatctcagaggccgcacatgacctgcccggggccctcggtgaggac

SEQ ID NO: 683358 - DNA, 120 bp, Artificial Sequence
  ENSG00000187135_8 (sequence is synthesized)
catgtcgctggatggacacagagagactgagagacgcatgaaaaagtccacatggaaaataaataaatcatatttttgggaaagttacacaaatgtagaacacctaaaataatgcatcta

SEQ ID NO: 683359 - DNA, 120 bp, Artificial Sequence
  ENSG00000187135_9 (sequence is synthesized)
gtttccaaataatttggagtttggcccatgcagtctgcatgggaatcaatgatttctctacttcaatgtagttttcttttctacactttccctccaagtcttcattttgcacgaactgtt

SEQ ID NO: 683360 - DNA, 120 bp, Artificial Sequence
  ENSG00000187135_10 (sequence is synthesized)
gagcagttatctttaggataatatgtacaaatgttggggtcaaagccttttgacaaagcaaaatatttttagtagattattgtgtttaggatttttttttaatttactttttttctttgg

SEQ ID NO: 683361 - DNA, 120 bp, Artificial Sequence
  ENSG00000187135_11 (sequence is synthesized)
gggcttttcttttttattaaattatttcttttgaggcattttgattaaaaaagacacatcttatcataattaaaattcactgtcaataatatttatttttaaataaagattggaaacaag

SEQ ID NO: 683362 - DNA, 120 bp, Artificial Sequence
  ENSG00000187140_0 (sequence is synthesized)
ccttaaaacgggactttcgactaccggggcttcggcgtccctgacacccagccccctgcccccccgctactgtccctgcccgcgccctcccgagctgctcggcgcccggcgtcccgcgcc

SEQ ID NO: 683363 - DNA, 120 bp, Artificial Sequence
  ENSG00000187140_1 (sequence is synthesized)
cgcctggaccgctcctgcgccccacgccagggccagaggccgaggaaggcgggctaagtgagggggcgcggcgtggagaaccgccggggccgggagcggtagcgagcgcctagtaccgag

SEQ ID NO: 683364 - DNA, 120 bp, Artificial Sequence
  ENSG00000187140_2 (sequence is synthesized)
cctagtaccgagcgccagggacggcaggagttcgcggagcgcggccgctgggggcggacggcagagcccgcgccacgcgatgcggggccgccgagtgtgagctgagcccagcgggcccca

SEQ ID NO: 683365 - DNA, 120 bp, Artificial Sequence
  ENSG00000187140_3 (sequence is synthesized)
ccccctcccctctccctgccccccatctttcgggggcactcaaaccctcttcccctgagctccgtggcagcccccgaacaccctcatcgcccgctgccccctccccgccgccgctaccaa

SEQ ID NO: 683366 - DNA, 120 bp, Artificial Sequence
  ENSG00000187140_4 (sequence is synthesized)
ccccgaggagggatgaccctctccggcggcggcagcgccagcgacatgtccggccagacggtgctgacggccgaggacgtggacatcgatgtggtgggcgagggcgacgacgggctggaa

SEQ ID NO: 683367 - DNA, 120 bp, Artificial Sequence
  ENSG00000187140_5 (sequence is synthesized)
gagaaggacagcgacgcaggttgcgatagccccgcggggccgccggagctgcgcctggacgaggcggacgaggtgcccccggcggcaccccatcacggacagcctcagccgccccaccag

SEQ ID NO: 683368 - DNA, 80 bp, Artificial Sequence
  ENSG00000187140_6 (sequence is synthesized)
cagcccctgacattgcccaaggaggcggccggagccggggccggaccggggggcgacgtgggcgcgccggaggcggacgg

SEQ ID NO: 683369 - DNA, 120 bp, Artificial Sequence
  ENSG00000187140_7 (sequence is synthesized)
ggcggcgggcctggcgcgggcagcggttcggcgggaggcctggccccgagcaagcccaagaacagcctagtgaagccgccttactcgtacatcgcgctcatcaccatggccatcctgcag

SEQ ID NO: 683370 - DNA, 120 bp, Artificial Sequence
  ENSG00000187140_8 (sequence is synthesized)
agcccgcagaagaagctgaccctgagcggcatctgcgagttcatcagcaaccgcttcccctactacagggagaagttccccgcctggcagaacagcatccgccacaacctctcactcaac

SEQ ID NO: 683371 - DNA, 120 bp, Artificial Sequence
  ENSG00000187140_9 (sequence is synthesized)
gactgcttcgtcaagatcccccgcgagccgggcaacccgggcaagggcaactactggaccctggacccgcagtccgaggacatgttcgacaacggcagcttcctgcggcgccggaaacgc

SEQ ID NO: 683372 - DNA, 120 bp, Artificial Sequence
  ENSG00000187140_10 (sequence is synthesized)
ctcatgatgcagagcttcggcgcttacagcctggcggcggcggccggcgccgcgggaccctacggccgcccctacggcctgcaccctgcggcggcggccggtgcctattcgcacccggca

SEQ ID NO: 683373 - DNA, 120 bp, Artificial Sequence
  ENSG00000187140_11 (sequence is synthesized)
ctgctgcggcggcgctccagtacccgtacgcgctgccgccggtggcaccggtgctgcctcccgctgtgccgctgctgccctcgggcgagctgggccgcaaagcggccgccttcggctcac

SEQ ID NO: 683374 - DNA, 120 bp, Artificial Sequence
  ENSG00000187140_12 (sequence is synthesized)
gccgccttcggctcacagctcggcccgggcctgcagctgcagctcaatagcctgggcgccgccgcggccgctgcgggcacagcgggcgccgcgggcaccaccgcgtcgctcatcaagtcc

SEQ ID NO: 683375 - DNA, 120 bp, Artificial Sequence
  ENSG00000187140_13 (sequence is synthesized)
gagccaagcgcgcggccgtcgttcagcatcgagaacatcataggtgggggccccgcggctcctgggggctcggcggtgggcgctggggtcgccggcggcactgggggttcagggggcggc

SEQ ID NO: 683376 - DNA, 120 bp, Artificial Sequence
  ENSG00000187140_14 (sequence is synthesized)
agcacggcgcagtcgtttctgcggccacccgggaccgtgcagtcggcagcgctcatggccacccaccaaccgctgtcgctgagccggacgactgccaccatcgcgcccattcttagcgtg

SEQ ID NO: 683377 - DNA, 120 bp, Artificial Sequence
  ENSG00000187140_15 (sequence is synthesized)
ccactctccggacagtttctgcagcccgcagcctcggccgccgccgctgctgcggccgccgctcaagccaaatggccggcgcaatagggacgcgccaatggccgggacccagggtccggc

SEQ ID NO: 683378 - DNA, 120 bp, Artificial Sequence
  ENSG00000187140_16 (sequence is synthesized)
ggcggcctcgagcaacaaatgcacctccaggctgcgcgccctgtcccaagcccggtcccggtcccgctgcccaatcctggactctgcctctccccaatttcctttcccctgagcccccaa

SEQ ID NO: 683379 - DNA, 120 bp, Artificial Sequence
  ENSG00000187140_17 (sequence is synthesized)
cgcctaccttccgcggcctccatcccctcgcgcacacctaagctggtcgagcaaactcaccgcgcgcccgccggggatagctttccatacaggtaaaaccgaaaaccgaattttccaaaa

SEQ ID NO: 683380 - DNA, 120 bp, Artificial Sequence
  ENSG00000187140_18 (sequence is synthesized)
atgcaccccgacggcgcctgctcttagtaccgtggggatgggagggaaattctttgtatatatttgtaaaaaaattattgactttccttttggggtttttatttttttaagaaaaaacaa

SEQ ID NO: 683381 - DNA, 120 bp, Artificial Sequence
  ENSG00000187140_19 (sequence is synthesized)
attccgtagatttagagctctgaactttcattttttttgaaggttcactctccgaagttttatctgagaaaagaatgtatagagacgttgggagattttaaatataaaaaattttcaaaa

SEQ ID NO: 683382 - DNA, 120 bp, Artificial Sequence
  ENSG00000187140_20 (sequence is synthesized)
aggcaaaaagtgtcattctattataaaagtctgtttatatatgaatgaatatatatggtattctaaatgttattccatcgtgttgtacacaactttgtaaataaatttttaaaatgccca

SEQ ID NO: 683383 - DNA, 120 bp, Artificial Sequence
  ENSG00000187144_0 (sequence is synthesized)
actgaaccagtgacaagctgggggaaatgacactgtccagtagttggaggtcacacagccccttgccttattctcaaaccctaaccacatggctggatattcctgaaatgcattcctaaa

SEQ ID NO: 683384 - DNA, 120 bp, Artificial Sequence
  ENSG00000187144_1 (sequence is synthesized)
cctctgctgctgagaataattggacctgccatctattcccagtttaactgccctgtataccaaacaaatccaattcaagccaacaggcaaagtataggctcagacagagcccatcctatg

SEQ ID NO: 683385 - DNA, 120 bp, Artificial Sequence
  ENSG00000187144_2 (sequence is synthesized)
tgcaaggcggtgagcaggggtggaaaatctcactgtgactcatccagctgatttctgggctgaacccagacttcacagggctgttaggagaatactgtttacaaaggtttccagcacatg

SEQ ID NO: 683386 - DNA, 120 bp, Artificial Sequence
  ENSG00000187144_3 (sequence is synthesized)
gaaggttcctccgtggatgctggcgggcctgccatgatttaaagtggaagaagcaccatcaagatcttcaaggagcacactaggtgatgcccctcacttggcacccgtgttggcgctggc

SEQ ID NO: 683387 - DNA, 120 bp, Artificial Sequence
  ENSG00000187144_4 (sequence is synthesized)
atcatggacaatagaaacacccagatgtacacggaggaggaaaagacagtcaaccccttcctgccatccacgcctggacctaaaaaagcaaaaggagggggtgaggctgtggagacccac

SEQ ID NO: 683388 - DNA, 120 bp, Artificial Sequence
  ENSG00000187144_5 (sequence is synthesized)
ccagcaccggggcctcttcctccaccagaggtgagggacattggagagaggcgggagccagaccgtgcgcagcagcagcctcagaagcccgcggtggctgcagggacacagagcctcggg

SEQ ID NO: 683389 - DNA, 120 bp, Artificial Sequence
  ENSG00000187144_6 (sequence is synthesized)
aacttccggcagggcttcatgaagtgcttgctggaggtggagaaaatggaggcctcccatcggagagcctcgaaggcccggtcccagacagcccagaagtcgcccaggaccctgaccccg

SEQ ID NO: 683390 - DNA, 120 bp, Artificial Sequence
  ENSG00000187144_7 (sequence is synthesized)
gtgcccacctcagctccaagcctgcctcagacccctgcctcggtccctgccagcggcccatcgtgggcccggctgccagctcctgggccagaacctgcccccatgggagccccggtcccc

SEQ ID NO: 683391 - DNA, 120 bp, Artificial Sequence
  ENSG00000187144_8 (sequence is synthesized)
ctacgccaaggcgcggcaggagccggaagagcagagcctccaaaagctttatcaaaaccgggagaagtccgaggagcaactgaccctgaagcaagaggaagccttccgcagctactttga

SEQ ID NO: 683392 - DNA, 120 bp, Artificial Sequence
  ENSG00000187144_9 (sequence is synthesized)
gatcttcaatggtcctggtgaggtggatgcacagagcctgaagaatatcctgctcctaatgggcttctctgtgacgctggcccaggtggaggacgccctgatgagtgctgatgtcaatgg

SEQ ID NO: 683393 - DNA, 120 bp, Artificial Sequence
  ENSG00000187144_10 (sequence is synthesized)
agatggtcgtgtggacttcaaagacttcttggctgtgatgacagacaccaggcgcttcttctgctctgtggaacagaacgccctgtcggacatggctccccacaacccccacactctact

SEQ ID NO: 683394 - DNA, 120 bp, Artificial Sequence
  ENSG00000187144_11 (sequence is synthesized)
ctttgagatcctgtccctgctggtagagatgctggccttaccagaggcagtcttagaggaaatcacaaactactaccagaaaaagctgaaggaaggcacctgcaaggcccaggagatgga

SEQ ID NO: 683395 - DNA, 120 bp, Artificial Sequence
  ENSG00000187144_12 (sequence is synthesized)
agcggccgtaggccggctgcggttgcagaagcttccctacaacccccagcaagaagagagctcagaagttccagaacgaaaggtcctcagtatcctgagccggctgaagcagcagaacta

SEQ ID NO: 683396 - DNA, 120 bp, Artificial Sequence
  ENSG00000187144_13 (sequence is synthesized)
tgctcccaacctgcagagcccctatgcccaggtgccctgcatcctgctctgcccacagctggacaagaagatggtccgtaggcagccgagcaaccactatgcactagaccagtgcacacc

SEQ ID NO: 683397 - DNA, 120 bp, Artificial Sequence
  ENSG00000187144_14 (sequence is synthesized)
ccctggcctggatcctgacatccgcagccccttcttccagtcaggatctcaaggaaacagggaacacaactctgacagcagaaagtggctcagctctgtgccagctcgaacccactgacc

SEQ ID NO: 683398 - DNA, 120 bp, Artificial Sequence
  ENSG00000187144_15 (sequence is synthesized)
ctctggaggcctgactctaggcagctgctcaaggcctgtagacagatgggccaccaggcaggagctgctgctgggatttgcttttgtggcctggtgagctaataaacaccaataacttca

SEQ ID NO: 683399 - DNA, 120 bp, Artificial Sequence
  ENSG00000187144_16 (sequence is synthesized)
cctatgtgcaaggcggtgagcaggggtggaaaatctcactgtgactcatccagctgatttctggaagaaacagccctcttgggtcccccaggaagggtcccaggagctgcaagcaggcca

SEQ ID NO: 683400 - DNA, 120 bp, Artificial Sequence
  ENSG00000187144_17 (sequence is synthesized)
ggatcagagtgagctggggttgctgccttcctgggttcctgaagtacctgaagggctgcagcagctgggctccggaaaggagatcaagggccagcaggggaggcaacggaaccggggaat

SEQ ID NO: 683401 - DNA, 120 bp, Artificial Sequence
  ENSG00000187144_18 (sequence is synthesized)
cggggaggatcagcctcctgagagctgccaggagggcagacaacaggcatgaacaaagccaagtggtgggaccaggagtaactcactcaagaccatggctcagccgggcgcggtggaaca

SEQ ID NO: 683402 - DNA, 120 bp, Artificial Sequence
  ENSG00000187144_19 (sequence is synthesized)
ggtgagcaggggtggaaaatctcactgtgactcatccagctgatttctggagcacactaggtgatgcccctcacttggcacccgtgttggcgctggcatcatggacaatagaaacaccca

SEQ ID NO: 683403 - DNA, 120 bp, Artificial Sequence
  ENSG00000187144_20 (sequence is synthesized)
gatgtacacggagggtagaaccaaggctccagggacgcagccaagtcctggcctgaggatcaccataaagagggctggtgttgagcccatcataccaggagtcagcaaggtcatgtttcc

SEQ ID NO: 683404 - DNA, 120 bp, Artificial Sequence
  ENSG00000187144_21 (sequence is synthesized)
agaaggggcccagactcagagatgcatttgagaaggggccttcagagctcagaatccaggagcaggggcctccagcaagaccagggaagaaacagccctcttgggtcccccaggaagggt

SEQ ID NO: 683405 - DNA, 90 bp, Artificial Sequence
  ENSG00000187144_22 (sequence is synthesized)
tcagcctcctgagagctgccaggccgggcatctggaggccgaaggaggcagatcacctgaggtcaagaccagcctggccaacatggtaaa

SEQ ID NO: 683406 - DNA, 120 bp, Artificial Sequence
  ENSG00000187144_23 (sequence is synthesized)
gcctggatcctgacatccgcagccccttcttccagtcaggatctcaaggaaacagggtttaaggaagatggaccatctgcccagttccagcacaaggagcctgggtggaagaaaagcgct

SEQ ID NO: 683407 - DNA, 120 bp, Artificial Sequence
  ENSG00000187144_24 (sequence is synthesized)
tcaagaggacatcgtaggccatgtctgagtaaatgcgcctctgtccccaaactagaacatgattaacatacttggcatgtaatataatactaatagcttttaaaataataccttatatcg

SEQ ID NO: 683408 - DNA, 120 bp, Artificial Sequence
  ENSG00000187144_25 (sequence is synthesized)
cagacatggtgcagccagcagagccttgctgccgcttggccagccatggccagccactgggaggcaagcaccccaaggaggcaggtgtcccacacatcaggccacaggaggctccgccag

SEQ ID NO: 683409 - DNA, 120 bp, Artificial Sequence
  ENSG00000187144_26 (sequence is synthesized)
agcccagcccagggggacatggggacagctctcaggaagcaatgcccccaatgtccgtcgtggctccagaggaaaagacagtcaaccccttcctgccatccacgcctggacctaaaaaag

SEQ ID NO: 683410 - DNA, 120 bp, Artificial Sequence
  ENSG00000187144_27 (sequence is synthesized)
caggcgtgagccaccgcgcccagcctcgtgctaggtcttctgactcgaagtccagcgctctccctgtgccagagctgcctctctgagagaatgacagatgccctgcacagtgctttagcc

SEQ ID NO: 683411 - DNA, 120 bp, Artificial Sequence
  ENSG00000187144_28 (sequence is synthesized)
caggatctcaaggaaacagggaaccaacgagggagtgagcctgtgagactcagcttgccaccttggccaccacgtgctgccctcatcacaaaaaccacaccaaccactccgaaacgtatc

SEQ ID NO: 683412 - DNA, 120 bp, Artificial Sequence
  ENSG00000187144_29 (sequence is synthesized)
tgctggtcaggagcagggaggctgtctggctggctgagggataaggcgcagtgcaacggaagggatcaggaagcctgagaggagccaggaaatgtaccaggtatagttactgagctgggg

SEQ ID NO: 683413 - DNA, 120 bp, Artificial Sequence
  ENSG00000187144_30 (sequence is synthesized)
ccaccaatggagatggagcactgcagacccctaagagttcaagccatgctggagtgggaagacctatccaccttctgaacatacgaggcagaaggctcagagtcctggaggcagactctc

SEQ ID NO: 683414 - DNA, 120 bp, Artificial Sequence
  ENSG00000187144_31 (sequence is synthesized)
tcctggttttccttgtgctgatggcaaaatactaaacaagtcttctctccgtcacttctaagcccagggatgcaatctcactccctggcactctgctttcttctagaagtagtaagcctg

SEQ ID NO: 683415 - DNA, 120 bp, Artificial Sequence
  ENSG00000187144_32 (sequence is synthesized)
gctggtagggaaccaccctgaggggtatgggaaggggaagtcggttcactttccctatctcccaaaatactagaggtggggttggcaccctccccaggctctccgagcctacagagctag

SEQ ID NO: 683416 - DNA, 120 bp, Artificial Sequence
  ENSG00000187144_33 (sequence is synthesized)
cccagtctccaggcaaggcccagatgccctgggacttagctcggggagggaggtataggcatggggtgctcgtctgtcctggcggctgcagagccctgccccttttctgggcggcagtag

SEQ ID NO: 683417 - DNA, 120 bp, Artificial Sequence
  ENSG00000187144_34 (sequence is synthesized)
gaatacagaagctaagctcaccaaaatcctattggttaatgtttctagtgaatttcccagaaacatttttaagtagactaccaaactaccctttcttaattaaaaattcattaaaccact

SEQ ID NO: 683418 - DNA, 120 bp, Artificial Sequence
  ENSG00000187147_0 (sequence is synthesized)
tgcgtgcgtgtgtgtgtgcgcgcgtgtgtgtgtctccgagtccctgggagagtggaggctcattcactgattagatccagcgctgagaggcagcactgctccttctctcacgccaactga

SEQ ID NO: 683419 - DNA, 120 bp, Artificial Sequence
  ENSG00000187147_1 (sequence is synthesized)
gtctcttgatctgtacatgcaatcccaggcagctcgcgaacacaaacccggggccagccgcctactgctgctgctgctgctgccgctgccgccgccgccgccgccgctgcctccgccggc

SEQ ID NO: 683420 - DNA, 120 bp, Artificial Sequence
  ENSG00000187147_2 (sequence is synthesized)
tctgcgaacccgggacttttcatgcaccacactctccgcctgcttccctccgtgtcctgaaaagtgcgaccgttctcccaaggaatttccacggtcttaggagggaatgattccccagta

SEQ ID NO: 683421 - DNA, 120 bp, Artificial Sequence
  ENSG00000187147_3 (sequence is synthesized)
atattccctgccctgacccaaagtgctggttggcctccctcccagggaagactgcttcttgcgtaacgccggccacagaaagagactccgatggacttacaccgggcagccttcaagatg

SEQ ID NO: 683422 - DNA, 120 bp, Artificial Sequence
  ENSG00000187147_4 (sequence is synthesized)
gagaactcatcctaccttcccaaccctctggcatccccagcactgatggtcctggcatccacggctgaggccagccgtgatgcttccatcccttgtcagcagccacgaccctttggtgta

SEQ ID NO: 683423 - DNA, 120 bp, Artificial Sequence
  ENSG00000187147_5 (sequence is synthesized)
cctgtctcagttgacaaggacgtgcatattcctttcaccaacggttcctatacctttgcctctatgtaccatcggcaaggtggggtgccaggcacttttgccaatcgtgatttcccccct

SEQ ID NO: 683424 - DNA, 120 bp, Artificial Sequence
  ENSG00000187147_6 (sequence is synthesized)
tctctactacacctccaccctcaatttgctcccccaaatctagattgcaccccaatcagtatgctgaatcatagtggtgtgggggctttccggccctttgcctccaccgaggaccgggag

SEQ ID NO: 683425 - DNA, 120 bp, Artificial Sequence
  ENSG00000187147_7 (sequence is synthesized)
agctatcagtcagcctttacgccggccaagcgacttaagaactgccatgacacagagtctccccacttgcgcttctcagatgcagatggcaaggaatatgactttgggacacagctgcca

SEQ ID NO: 683426 - DNA, 120 bp, Artificial Sequence
  ENSG00000187147_8 (sequence is synthesized)
tctagctcccccggttcactaaaggttgatgacactgggaagaagatttttgctgtctctggcctcatttctgatcgggaagcctcatctagcccagaggatcggaatgacagatgtaag

SEQ ID NO: 683427 - DNA, 120 bp, Artificial Sequence
  ENSG00000187147_9 (sequence is synthesized)
aagaaagcagcggcattgttcgacagccaggccccaatttgccccatctgccaggtcctgctgaggcccagtgagctgcaggagcatatggagcaggaactggagcagctagcccaactg

SEQ ID NO: 683428 - DNA, 120 bp, Artificial Sequence
  ENSG00000187147_10 (sequence is synthesized)
ccctcgagcaagaattcccttctgaaggatgccatggctccaggcaccccaaagtccctcctgttgtctgcttccatcaagagggaaggagagtctccaacggcatcaccccactcatct

SEQ ID NO: 683429 - DNA, 120 bp, Artificial Sequence
  ENSG00000187147_11 (sequence is synthesized)
gccaccgatgacctccaccattcagacagataccagacctttctgcgagtacgagccaaccggcagacccgactgaatgctcggattgggaaaatgaaacggaggaagcaagatgaaggg

SEQ ID NO: 683430 - DNA, 120 bp, Artificial Sequence
  ENSG00000187147_12 (sequence is synthesized)
atacgggccaccactctcctggaaggtggcttccgaggctctggcttcatcatgtgcagcggcaaagagaacccggacagtgatgctgacttggatgtggatggggatgacactctggag

SEQ ID NO: 683431 - DNA, 120 bp, Artificial Sequence
  ENSG00000187147_13 (sequence is synthesized)
tatgggaagccacaatacacagaggctgatgtcatcccctgcacaggcgaggagcctggtgaagccaaggagagagaggcacttcggggcgcagtcctaaatggcggccctcccagcacg

SEQ ID NO: 683432 - DNA, 120 bp, Artificial Sequence
  ENSG00000187147_14 (sequence is synthesized)
cgcatcacacctgagttctctaaatgggccagtgatgagatgccatccaccagcaatggtgaaagcagcaagcaggaggccatgcagaagacctgcaagaacagcgacatcgagaaaatc

SEQ ID NO: 683433 - DNA, 120 bp, Artificial Sequence
  ENSG00000187147_15 (sequence is synthesized)
accgaagattcagctgtgaccacgtttgaggctctgaaggctcgggtcagagaacttgaacggcagctatctcgtggggaccgttacaaatgcctcatctgcatggactcgtactcgatg

SEQ ID NO: 683434 - DNA, 120 bp, Artificial Sequence
  ENSG00000187147_16 (sequence is synthesized)
cccctaacgtccatccagtgttggcacgtgcactgcgaggagtgctggctgcggaccctgggtgccaagaagctctgccctcagtgcaacacgatcacagcgcccggagacctgcggagg

SEQ ID NO: 683435 - DNA, 120 bp, Artificial Sequence
  ENSG00000187147_17 (sequence is synthesized)
atctacttgtgagctatctgccccaggcaggcctcgcctccagcagccccacctgcccccagcctctgtgacagtgaccgtctccctttgtacatacttgcacacaggttccccatgtac

SEQ ID NO: 683436 - DNA, 120 bp, Artificial Sequence
  ENSG00000187147_18 (sequence is synthesized)
atacatgcacatactcaaacatgcgtacacacacacacatttacacacgcaggactctggagccagagtagaggctgtggcccaggcactacctgctggctcccacctatggtttggggg

SEQ ID NO: 683437 - DNA, 120 bp, Artificial Sequence
  ENSG00000187147_19 (sequence is synthesized)
ccatacctgttccagctctgttcccagggtggggcagggaggtgggggttgggggagtagtggggcacggctcctaagatccagcccccatactgacagacggacagacagacatgcaaa

SEQ ID NO: 683438 - DNA, 120 bp, Artificial Sequence
  ENSG00000187147_20 (sequence is synthesized)
caccagactgaagcacatgtaatatagaccgtgtatgtttacaatgttgtgtataaatgggacaactcctcgccctctacctgtcccctccccctttggttgtatgattttcttcttttt

SEQ ID NO: 683439 - DNA, 120 bp, Artificial Sequence
  ENSG00000187147_21 (sequence is synthesized)
taagaacccctggaagcagcgcctccttcagggttggctgggagctcggcccatccacctcttggggtacctgcctctctctctcctgtggtgtcccttccctctcccatgtgctcggtg

SEQ ID NO: 683440 - DNA, 120 bp, Artificial Sequence
  ENSG00000187147_22 (sequence is synthesized)
ttcagtggtgtatatttcttctcccagacatggggcacacgccccaagggacatgatcctctccttagtcttagctcatggggctctttataaggagttggggggtagaggcaggaaatg

SEQ ID NO: 683441 - DNA, 120 bp, Artificial Sequence
  ENSG00000187147_23 (sequence is synthesized)
ggaaccgagctgaagcagaggctgagttagggggctagaggacagtgctcctggccacccagcctctgctgagaaccattcctgggattagagctgcctttcccagggaaaaagtgtcgt

SEQ ID NO: 683442 - DNA, 120 bp, Artificial Sequence
  ENSG00000187147_24 (sequence is synthesized)
ctccccgaccctcccgtgggccctgtggtgtgatgctgtgtctgtatattctatacaaaggtacttgtcctttccctttgtaaactacatttgacatggattaaaccagtataaacagtt

SEQ ID NO: 683443 - DNA, 80 bp, Artificial Sequence
  ENSG00000187147_25 (sequence is synthesized)
ccgccgccgcttggagctgaagtgccgccgccgccgggcagccacggggaatccgcccgcatcgccgccctcgccggccg

SEQ ID NO: 683444 - DNA, 120 bp, Artificial Sequence
  ENSG00000187147_26 (sequence is synthesized)
gcggcaccgcgcagcggccacggggtcccgttagagcagcgcccggcggctatgccgagagcccggagcggccggaggagcagaggggccggcgggagggaggaagtagacctttctgcg

SEQ ID NO: 683445 - DNA, 120 bp, Artificial Sequence
  ENSG00000187147_27 (sequence is synthesized)
ccactctcctggaaggtggcttccgaggtacaagcagctgacacgtagacattggcactctggtgccaggcctctgctgggtatccatctgctggaagccaagaggccgaggctggtggc

SEQ ID NO: 683446 - DNA, 120 bp, Artificial Sequence
  ENSG00000187147_28 (sequence is synthesized)
tggtcatccatccgttccaccacgtggggactgctgctggtggggctcctttgtgaccgtgctgcctgcctgtgatgtgcatattaaaatggatgtatttgggtggggaaatggaattgt

SEQ ID NO: 683447 - DNA, 120 bp, Artificial Sequence
  ENSG00000187147_29 (sequence is synthesized)
gaggctgcaagctaggagtgacgaaggggggctctcagcttcgggtgatgcattgaaggtgacagccaagccgcgttagcacctgcataaaatattaaagggacggttatgcatttatca

SEQ ID NO: 683448 - DNA, 120 bp, Artificial Sequence
  ENSG00000187147_30 (sequence is synthesized)
gcctgcccggtgctaactcctcctctcctctgtaggccacaggagaggcctgaactgggtttggttccccctgtgtcccgtgcccctaagtgaactcaggaggcatacgtgtcagggaat

SEQ ID NO: 683449 - DNA, 120 bp, Artificial Sequence
  ENSG00000187147_31 (sequence is synthesized)
aggccttaaatagatggattttagggagagatgccaaggtcacatgggctccatgggctctgagcacctctgaatcattctatccatcaggaagtatcctatggggtttggtttcataag

SEQ ID NO: 683450 - DNA, 120 bp, Artificial Sequence
  ENSG00000187147_32 (sequence is synthesized)
catcaggaagtatcctatggggtttggtttcataagagacccagatacatagcccagaatcacctgaagatttcagacttcaaaagcatgataccggccgggtgcagtggctcatgcctg

SEQ ID NO: 683451 - DNA, 120 bp, Artificial Sequence
  ENSG00000187147_33 (sequence is synthesized)
ggaccctggtgaggtggcatgggggtcggggaatgggaggccgctccgggcactgcccagatgtctgtgcttatgcctgagcctgcctgggggaagtggggagcatggcgcaaaggagaa

SEQ ID NO: 683452 - DNA, 120 bp, Artificial Sequence
  ENSG00000187147_34 (sequence is synthesized)
cagagccaggagccaggatatttacccgcaggatatttacccccaggctcgctgcctctcctccccaactgcaggtttaggaacttctccccctccatgagttcactgcattctcccttc

SEQ ID NO: 683453 - DNA, 120 bp, Artificial Sequence
  ENSG00000187147_35 (sequence is synthesized)
cccgccccggtccccgaaggcccactgcatcacacagactggtgaggcctggggtcaggaggaggctggctgtaggtaaacaggaccagggccttggcccctccccctcccattactaag

SEQ ID NO: 683454 - DNA, 120 bp, Artificial Sequence
  ENSG00000187147_36 (sequence is synthesized)
cctgatcaaaggccgcgtgtaatctcgttagggctgcggctgccacagctggacccagccttgttctcattactggggctcctgctgcggggctggccaggcggtttgatcctggcgtcc

SEQ ID NO: 683455 - DNA, 120 bp, Artificial Sequence
  ENSG00000187147_37 (sequence is synthesized)
ccccaacacaggagcgtgcctgcctgctcacagaagctgcctatgcgtccccagcctgggctgacaggaccaaggtctcagcacacactggtgcagagagacatggctgcaggcccaggt

SEQ ID NO: 683456 - DNA, 120 bp, Artificial Sequence
  ENSG00000187147_38 (sequence is synthesized)
gaatgaggaacgagctacacaattctactcgggagctcagctttgaatttgcaaactgctgggacctcactatacaaacctgcagggcgctgagaatgtttttcttccagtttttaatca

SEQ ID NO: 683457 - DNA, 120 bp, Artificial Sequence
  ENSG00000187147_39 (sequence is synthesized)
gtgcccagtagtgtgaatacagcccctctgctgagacttgacaatacagtgagatctggagttcccacggcaacaggaactaactcatcccagggctctttgagttatcagtcggcccac

SEQ ID NO: 683458 - DNA, 120 bp, Artificial Sequence
  ENSG00000187147_40 (sequence is synthesized)
ggtgaccttttcaggaggaattagattgcctgccaagaccggttagagggagtgataacgccagctgaagaagctgcccagcagacttcagagagaaggaggcagaggcaggatgagcag

SEQ ID NO: 683459 - DNA, 120 bp, Artificial Sequence
  ENSG00000187147_41 (sequence is synthesized)
ggagcaggagatgagtaggcatgtggagcattgcctttctaagagggaaggctcctgcatggctgaggatgatgctgtggacatcgagcatgagaacaacaaccgctttgaggagtatga

SEQ ID NO: 683460 - DNA, 120 bp, Artificial Sequence
  ENSG00000187147_42 (sequence is synthesized)
gcggagcagctttggtcgggggtccggtgctggggcgggggccaggactgcaggccgcgcctgacgctctcttttcttttcttgcatctgcccgcgatcttctcccagacctttctgcga

SEQ ID NO: 683461 - DNA, 120 bp, Artificial Sequence
  ENSG00000187147_43 (sequence is synthesized)
cctgttgtaataagcagaggagtgttgtgtgtgcattttaattgccagcagagccgtagtttggtgggcgccctgagctcggctccgggaaagagccctttgcagctttctttgtggcag

SEQ ID NO: 683462 - DNA, 120 bp, Artificial Sequence
  ENSG00000187147_44 (sequence is synthesized)
gagaaggaaatactctctttgcactgcattaagccaggaggattcatctaccgtttaactgatgtttctctgtttgagggaataccaaagatactccaggtcttaggagggaatgattcc

SEQ ID NO: 683463 - DNA, 120 bp, Artificial Sequence
  ENSG00000187147_45 (sequence is synthesized)
cgggcgatggggcggaaggagccccgcagcgggaggggtcgtggagtggggtggaaggacttcgcagccgctaaagattgggtgggtaggcttcacgggcggtgggagggaccccgggga

SEQ ID NO: 683464 - DNA, 120 bp, Artificial Sequence
  ENSG00000187147_46 (sequence is synthesized)
ggcttctgccggttgctacccgagtacaaacggcagcttcctggtctctgtccggccgcccccgccgcattgtgaactttcacccccagcgcgcgacggcggcagatcacgtgattaggg

SEQ ID NO: 683465 - DNA, 120 bp, Artificial Sequence
  ENSG00000187147_47 (sequence is synthesized)
ttgtaaggtgtaaataagataattatcaatccctcagtacaatctctggcatttagtaagtgcttaataaattttagctattttatttgtattatcattattattccctaaggccagtct

SEQ ID NO: 683466 - DNA, 120 bp, Artificial Sequence
  ENSG00000187147_48 (sequence is synthesized)
cctataccatcttttctacttttccaggaagcattcttctccatctgtgagctcccctggatcctgttcatttgttttaggagggtgggaaggttccttgagagagtcctagctattccc

SEQ ID NO: 683467 - DNA, 120 bp, Artificial Sequence
  ENSG00000187147_49 (sequence is synthesized)
tgttcagcagtgcagcccaaggagtcctggaaatgcaggagggaccttcaggtgcagggcttggcccacacacaggactaccagggcatctgatatatctaggaagtaacaaggagccct

SEQ ID NO: 683468 - DNA, 120 bp, Artificial Sequence
  ENSG00000187147_50 (sequence is synthesized)
ggaggcaggccagggctgtggcaaagagacctagatcatgtgggacacgcctagtccctgcatctgtccccctctccctggagtttggacgggccctttcttcagcaggtgtttgctcac

SEQ ID NO: 683469 - DNA, 120 bp, Artificial Sequence
  ENSG00000187147_51 (sequence is synthesized)
gtcccatgcctgaggtggggctcttggccatagtcagtattggtggagtgagcagcccgccctcagggaacccatactcaggaactttacactgctgtggtggagttcacacggggggct

SEQ ID NO: 683470 - DNA, 120 bp, Artificial Sequence
  ENSG00000187147_52 (sequence is synthesized)
gtgagagccactgtgcagtgctggctcaggggtctggaaaaggcttctgggagggcatgggaacaaaactagatctgaatgatgaggcagagctagtgagtcaggcgagggggtgcagag

SEQ ID NO: 683471 - DNA, 120 bp, Artificial Sequence
  ENSG00000187147_53 (sequence is synthesized)
ggatcacagtgcagaggccaaggcagtgaaaaaggtggcgtggatggtgacacataggagtcgagcataaaatgcgtggcaaggtcctcaggggtacggcgggctggggctggaccaagg

SEQ ID NO: 683472 - DNA, 120 bp, Artificial Sequence
  ENSG00000187147_54 (sequence is synthesized)
agtgtagtggagctctctactccaagggggacattggaatgttggaagtcacaccacgagagatttgctttgagaacataaattcctctaggcgctgggagagtggaatagagatgaggg

SEQ ID NO: 683473 - DNA, 120 bp, Artificial Sequence
  ENSG00000187147_55 (sequence is synthesized)
gcctggaggcagaaaggctgtctggaaaaagttagtggtggaattggtggaagacatctgagagcctggactcatggtggtgaggagagatgccggagatactaggagagatgacagatt

SEQ ID NO: 683474 - DNA, 120 bp, Artificial Sequence
  ENSG00000187147_56 (sequence is synthesized)
tgggtggttgggaagactgcgaaggagtggttgaaaatggttccctggtatctggtgtagaaattcatccgaatgggaatggaggaatagagagggtgaggagtttagttctggaatgtg

SEQ ID NO: 683475 - DNA, 120 bp, Artificial Sequence
  ENSG00000187147_57 (sequence is synthesized)
gaatttgcagattcaggttatcagagaaagggggcaggcagggatgcctaggggacatttatgtatttggttctggaattcaagggaggcgtaggctggaggtacagatgagagatgcca

SEQ ID NO: 683476 - DNA, 120 bp, Artificial Sequence
  ENSG00000187147_58 (sequence is synthesized)
agcccagaggatcggaatgacagatcaagaagaattttctgcgaaagaaccttcttacaccttttccaagaaaagatcctggattgggactacatgttgagcctggagaaatgataggct

SEQ ID NO: 683477 - DNA, 120 bp, Artificial Sequence
  ENSG00000187147_59 (sequence is synthesized)
gtagtatgaatcagaacacctggtagatgctaagtaaacagaaggaatttatcatcttccagccttacccaatggattggacttttctgttatcttaatcacactactttagttttagtg

SEQ ID NO: 683478 - DNA, 120 bp, Artificial Sequence
  ENSG00000187147_60 (sequence is synthesized)
tcatcatcttaccactcttcagcattgcacagaacagcatctgtaagactatgtatgctatcccaaaggcgtagaggtttgaggaaagaaaggaagaacttatttatgccttgaggtttc

SEQ ID NO: 683479 - DNA, 120 bp, Artificial Sequence
  ENSG00000187147_61 (sequence is synthesized)
atgatgatgaaggtagggagggagttttccaagaatttgtgaaatcacctttctcaaatatagacttattttattacttggggtactattaataaaaaatcgtttataacttaacaaaaa

SEQ ID NO: 683480 - DNA, 120 bp, Artificial Sequence
  ENSG00000187147_62 (sequence is synthesized)
cagggagaggtggattgcaggctgtgcctggcatctttccttcccgatgctgcttgcctttgggattggtggtgtctttgtgagaccagagactggtggggtagaagggagaaggatcaa

SEQ ID NO: 683481 - DNA, 120 bp, Artificial Sequence
  ENSG00000187147_63 (sequence is synthesized)
gactcagtgtttttcagggcttgaaaaatggagaacattccagatggagtgaatagcatgagcaggggtcttaagagcagcatatacaggctatgtttgtggtttggtgagcagcctgtg

SEQ ID NO: 683482 - DNA, 120 bp, Artificial Sequence
  ENSG00000187147_64 (sequence is synthesized)
tgtgcacatgcttggggtttacagagtgaattagtagagagcaagagtaaagacataaatggacccagatcttcatggatctggctgaggagcctgggcttggttgtgcatgcagtgggg

SEQ ID NO: 683483 - DNA, 120 bp, Artificial Sequence
  ENSG00000187147_65 (sequence is synthesized)
agccatcaatggttttggagcaggaggaaaggtggtcagaactcagtggtaagcagaatgaaggaacagataagaggcctgaggactccctacaagacataccctaatgagagtataagg

SEQ ID NO: 683484 - DNA, 120 bp, Artificial Sequence
  ENSG00000187147_66 (sequence is synthesized)
acctgagaggaaagagtggacaagcagaaatgtctgaaatcatcaggcagatactaagctgcttcctcacttctttaaggatttccttgctgatcccagtagccacagagtctcacattc

SEQ ID NO: 683485 - DNA, 120 bp, Artificial Sequence
  ENSG00000187147_67 (sequence is synthesized)
ttttgtccctggcagggctgtgctggctagtgaggtgtggtctgagacccactaggaggaagtggggagctggggggaacagctctatagcacttgaccctaggctatcaggaagggtgg

SEQ ID NO: 683486 - DNA, 120 bp, Artificial Sequence
  ENSG00000187147_68 (sequence is synthesized)
tcctggatgtcagagagatcgcctggcaggtgagcaggcctggtgtagccccagcagctcgcccctccctctgagctgagagtccgtctgtggctgtgccagatgcacctcaggggtcag

SEQ ID NO: 683487 - DNA, 120 bp, Artificial Sequence
  ENSG00000187147_69 (sequence is synthesized)
ccacttgcgtggcccatggcctggcctccgctcagcctggttgccttcatggactgctttgagaagtaggtgtgcatgcctgtcctccctcgtctgtcccttcttaatccctttataact

SEQ ID NO: 683488 - DNA, 120 bp, Artificial Sequence
  ENSG00000187147_70 (sequence is synthesized)
gcacttgtccaggaatctgggctgagtgaggtggagatgaataattaatgtcaggcgcttcagacaccaaatatttgaacagctgcctggtgtttttgctggcaaggacctagcggccaa

SEQ ID NO: 683489 - DNA, 120 bp, Artificial Sequence
  ENSG00000187147_71 (sequence is synthesized)
aatcaggatgttggccgggggtcccactctgtggctctgattggccttagccagcctgttctctcctctgatggacttgtcaggctggataatggggcataggggaggccccactctttt

SEQ ID NO: 683490 - DNA, 120 bp, Artificial Sequence
  ENSG00000187147_72 (sequence is synthesized)
cctgtgaaattcctagacctgaatttttctgtcctcttactgttcttcctagacctggaagataggtggacagcaggcctgggctgagtgtccccgaggacgtgacataatatatgaatg

SEQ ID NO: 683491 - DNA, 120 bp, Artificial Sequence
  ENSG00000187147_73 (sequence is synthesized)
ggctagtttatgagcagagaccacttggagcagcatgcagtagcagagaaagatgaggtttgcagagtgaagggcctgaaatgtcagggtcaggggcactgaagtatctggctctataca

SEQ ID NO: 683492 - DNA, 120 bp, Artificial Sequence
  ENSG00000187147_74 (sequence is synthesized)
tcccaggcccaggtttccctctgggccttatcaggtccaaagcctaacccctacctggaggcaacaggaggggcacccttggcctcgtcttgtccccaggccctcctcacaccctgcttc

SEQ ID NO: 683493 - DNA, 120 bp, Artificial Sequence
  ENSG00000187151_0 (sequence is synthesized)
gatgagaggaactagaagcagctattgcaagctaccattttgagaacctgcccaaagaaagaaaagactgaagggatggaagattgcagaaagcatgatcggagaagagatattttactt

SEQ ID NO: 683494 - DNA, 120 bp, Artificial Sequence
  ENSG00000187151_1 (sequence is synthesized)
ttagtgaagctctatacacatttgtcttcctcactagatttgtatccctagaacctagaacagagtcagccaaagagcaggcactcaatacaaattgttgacttgctgctaaaattgtaa

SEQ ID NO: 683495 - DNA, 120 bp, Artificial Sequence
  ENSG00000187151_2 (sequence is synthesized)
cagagtacaaagaacatcctagaaattggagacaaaggggataagaaaacagagttaacttggaaagagaagacactcatctctgacaagactgaagatgattacacaacaccatcattg

SEQ ID NO: 683496 - DNA, 120 bp, Artificial Sequence
  ENSG00000187151_3 (sequence is synthesized)
ccaaccaagtcctttgggaatacaaaggttaaatcctaatcatcacaacagtctctaaaggaataaacctgatttacagattttgataacaaaatacttctcctctttccattttctaca

SEQ ID NO: 683497 - DNA, 120 bp, Artificial Sequence
  ENSG00000187151_4 (sequence is synthesized)
atgcaaccaacagcaacatcaaagaggtttttaactgaagactctatgctctgtagttctttccacaaagagctgactgatatttgaagaagtgttttcatctatccaagaaaaatatga

SEQ ID NO: 683498 - DNA, 120 bp, Artificial Sequence
  ENSG00000187151_5 (sequence is synthesized)
tgtctccatcccaagcctcactcttattcttaaatgtatgtatttttatttgtggagaagctgtacaaggtaactgtgtacatcattctacggactcttcagtagttaacattgtagaag

SEQ ID NO: 683499 - DNA, 120 bp, Artificial Sequence
  ENSG00000187151_6 (sequence is synthesized)
atggatctaatgcaaaagatgaaagtaaaagtaatgatactgtttgtaaggaagactgtgaggaatcatgtgatgttaaaactaaaattacacgagaagaaaaacatttcatgtgtagaa

SEQ ID NO: 683500 - DNA, 120 bp, Artificial Sequence
  ENSG00000187151_7 (sequence is synthesized)
atttgcaaaattctattgtttcctacacaagaagtaccaaaaaactactaaggaatatgatggatgagcaacaagcttccttggattatttatctaatcaggttaacgagctcatgaata

SEQ ID NO: 683501 - DNA, 120 bp, Artificial Sequence
  ENSG00000187151_8 (sequence is synthesized)
gagttctccttttgactacagaagtttttagaaaacagctggatccttttcctcacagacctgttcagtcacatggtttagattgcactgatattaaggataccattggctctgtcacca

SEQ ID NO: 683502 - DNA, 120 bp, Artificial Sequence
  ENSG00000187151_9 (sequence is synthesized)
acggactgtgatacagaaaagaattgatgggataattgatttccagaggttgtggtgtgattatctggatggatttggagatcttctaggagaattttggctaggactgaaaaagatttt

SEQ ID NO: 683503 - DNA, 120 bp, Artificial Sequence
  ENSG00000187151_10 (sequence is synthesized)
ttatatagtaaatcagaaaaataccagttttatgctgtatgtggctttggaatctgaagatgacactcttgcttatgcatcatatgataatttttggctagaggatgaaacgagattttt

SEQ ID NO: 683504 - DNA, 120 bp, Artificial Sequence
  ENSG00000187151_11 (sequence is synthesized)
taaaatgcacttaggacggtattcaggaaatgctggtgatgcattccggggtctcaaaaaagaagataatcaaaatgcaatgccttttagcacatcagatgttgataatgatgggtgtcg

SEQ ID NO: 683505 - DNA, 120 bp, Artificial Sequence
  ENSG00000187151_12 (sequence is synthesized)
ccctgcatgcctggtcaatggtcagtctgtgaagagctgcagtcacctccataacaagaccggctggtggtttaacgagtgtggtctagcaaatctaaatggcattcatcacttctctgg

SEQ ID NO: 683506 - DNA, 120 bp, Artificial Sequence
  ENSG00000187151_13 (sequence is synthesized)
aaaattgcttgcaactggaattcaatggggcacgtggaccaaaaacaactcacctgtcaagattaaatctgtttcaatgaaaattagaagaatgtacaatccatattttaaataatctca

SEQ ID NO: 683507 - DNA, 120 bp, Artificial Sequence
  ENSG00000187151_14 (sequence is synthesized)
tttaacattgtaatgcaagttctacaatgataatatattaaagatttttaaaagtttatcttttcacttagtgtttcaaacatattaggcaaaatttaactgtagatggcatttagatgt

SEQ ID NO: 683508 - DNA, 120 bp, Artificial Sequence
  ENSG00000187151_15 (sequence is synthesized)
tatgagtttaattagaaaacttcaattttgtagtattctataaaagaaaacatggcttattgtatgtttttacttctgactatattaacaatatacaatgaaatttgtttcaagtgaact

SEQ ID NO: 683509 - DNA, 120 bp, Artificial Sequence
  ENSG00000187151_16 (sequence is synthesized)
acaacttgtcttcctaaaatttatagtgattttaaaggattttgccttttctttgaagcatttttaaaccataatatgttgtaaggaaaattgaagggaatattttacttatttttatac

SEQ ID NO: 683510 - DNA, 120 bp, Artificial Sequence
  ENSG00000187151_17 (sequence is synthesized)
tttatatgattatataatctacagataatttctactgaagacagttacaataaataactttatgcagattaatatataagctacacatgatgtaaaaaccttactatttctaggtgatgc

SEQ ID NO: 683511 - DNA, 120 bp, Artificial Sequence
  ENSG00000187151_18 (sequence is synthesized)
cataccattttaaaagtagtaagagtttgctgcccaaatagtttttcttgttttcatatctaatcatggttaactattttgttattgtttgtaataaatatatgtacttttatatcctga

SEQ ID NO: 683512 - DNA, 120 bp, Artificial Sequence
  ENSG00000187164_0 (sequence is synthesized)
aggctggcatagcggctgccgacccgccctcgttcctccaccccctgaacgggactgctgggcccgccccgccccgcctgcaggtgaagcggccgcagccgccgagtaggtgcgtgggga

SEQ ID NO: 683513 - DNA, 120 bp, Artificial Sequence
  ENSG00000187164_1 (sequence is synthesized)
tgatctcactcgcgcgctccgcgccaggaggaggaggagcgggagcggatccaacttccgggtagtggagccgcaagccaccggcatcttgctttttcttccccctcctcctgtgtgccc

SEQ ID NO: 683514 - DNA, 120 bp, Artificial Sequence
  ENSG00000187164_2 (sequence is synthesized)
cgcgccgctccctctttcccttttattcccggccccacccgccaaaatgaacagctcggacgaagagaagcagctgcagctcattaccagtctgaaggagcaagcaataggcgaatatga

SEQ ID NO: 683515 - DNA, 120 bp, Artificial Sequence
  ENSG00000187164_3 (sequence is synthesized)
agaccttagagcagagaaccagaaaacaaaggagaagtgtgacaaaattaggcaagaacgagatgaagccgttaaaaaactggaagaatttcagaaaatttctcacatggtcatagagga

SEQ ID NO: 683516 - DNA, 120 bp, Artificial Sequence
  ENSG00000187164_4 (sequence is synthesized)
agttaatttcatgcagaaccatcttgaaatagagaagacttgtcgagaaagtgctgaagctttggcaacaaagctaaataaagaaaataaaacgttgaaaagaatcagcatgttgtacat

SEQ ID NO: 683517 - DNA, 120 bp, Artificial Sequence
  ENSG00000187164_5 (sequence is synthesized)
ggccaagctgggaccagatgtaataactgaagagataaacattgatgatgaagattcgactacagacacagacggtgccgccgagacttgtgtctcagtacagtgtcagaagcaaattaa

SEQ ID NO: 683518 - DNA, 120 bp, Artificial Sequence
  ENSG00000187164_6 (sequence is synthesized)
agaacttcgagatcaaattgtatctgttcaggaggaaaagaagattttagccattgagctggaaaatctcaagagcaaactcgtagaagtaattgaagaagtaaataaagttaaacaaga

SEQ ID NO: 683519 - DNA, 120 bp, Artificial Sequence
  ENSG00000187164_7 (sequence is synthesized)
aaagactgttttaaattcagaagttcttgaacagagaaaagtcttagaaaaatgcaatagagtgtccatgttagctgtagaagagtatgaggagatgcaagtaaacctggagctggagaa

SEQ ID NO: 683520 - DNA, 120 bp, Artificial Sequence
  ENSG00000187164_8 (sequence is synthesized)
ggaccttcgaaagaaagcagagtcatttgcacaagagatgttcattgagcaaaacaagctaaagagacaaagccaccttctgctgcagagctccatccctgatcagcagcttttgaaagc

SEQ ID NO: 683521 - DNA, 120 bp, Artificial Sequence
  ENSG00000187164_9 (sequence is synthesized)
tttagacgaaaatgcaaaactcacccagcaacttgaagaagagagaattcagcatcaacaaaaggtcaaagaattagaagagcaactagaaaatgaaacactccacaaagaaatacacaa

SEQ ID NO: 683522 - DNA, 120 bp, Artificial Sequence
  ENSG00000187164_10 (sequence is synthesized)
cctcaaacagcaactggagcttctagaggaagataaaaaggaattggaattgaaatatcagaattctgaagagaaagccagaaatttaaagcactctgttgatgaactccagaaacgagt

SEQ ID NO: 683523 - DNA, 120 bp, Artificial Sequence
  ENSG00000187164_11 (sequence is synthesized)
gaaccagtctgagaattcagtacctccaccacctcctcctccaccaccacttccccctccacctcccaatcctatccgatccctcatgtccatgatccggaaacgatcccaccccagtgg

SEQ ID NO: 683524 - DNA, 120 bp, Artificial Sequence
  ENSG00000187164_12 (sequence is synthesized)
cagtggtgctaagaaagaaaaggcaactcaaccagaaacaactgaagaagtcacagatctaaagaggcaagcagttgaagagatgatggatagaattaaaaagggagttcatcttagacc

SEQ ID NO: 683525 - DNA, 120 bp, Artificial Sequence
  ENSG00000187164_13 (sequence is synthesized)
cgttaatcagacagccagaccgaagacaaagccagaatcttcgaaaggctgcgaaagtgcagtggatgaactaaaaggaatactggcctcccagtagcattggatgcaggaaaaaataca

SEQ ID NO: 683526 - DNA, 120 bp, Artificial Sequence
  ENSG00000187164_14 (sequence is synthesized)
ttgacggtgaaaaacaagccgaaccagttgtagttttagatcctgtttctacacatgaaccccaaaccaaagaccaggttgctgaaaaagatccaactcaacacaaggaggatgaaggcg

SEQ ID NO: 683527 - DNA, 120 bp, Artificial Sequence
  ENSG00000187164_15 (sequence is synthesized)
aaattcaaccagaaaacaaagaagacagcattgaaaacgtgagagagacagacagctccaactgctgatccataaaccagaagcctgacatgtttggaagtccttttcaataagcacatg

SEQ ID NO: 683528 - DNA, 120 bp, Artificial Sequence
  ENSG00000187164_16 (sequence is synthesized)
attagtgttgttatattggcaagggctgtagacattctgctctggtcactgtattcagaatacaggttcttttctggtgtcacttttgtaagtagcaactataaacataagtaagctgtt

SEQ ID NO: 683529 - DNA, 120 bp, Artificial Sequence
  ENSG00000187164_17 (sequence is synthesized)
tagcaaaacacacattcctagtaggttttggttttttgatctttataaagatgaggtttttttcctagttactgtattaagtatgacttcttttagaaggttacaaaaaaattcagatgt

SEQ ID NO: 683530 - DNA, 120 bp, Artificial Sequence
  ENSG00000187164_18 (sequence is synthesized)
tgatacctttttaggaaatgtgcataccactcatcaaatggaatgctgaaagtttgaggtgcttgtatataatcggataaacaaaactgatcaacccaatgtgattttaaaagcccccaa

SEQ ID NO: 683531 - DNA, 120 bp, Artificial Sequence
  ENSG00000187164_19 (sequence is synthesized)
agaagcttctgttttgggtctgatcctcttgatggagaaactgcagcagcatggaaattgttgggtactgtggcatacaagttattttctacagtagactgagataaactgaaaactcag

SEQ ID NO: 683532 - DNA, 120 bp, Artificial Sequence
  ENSG00000187164_20 (sequence is synthesized)
gagctggcatcaaactcgtagtcccatagtcagtgttaattacacacattgttaactattggatgaaaaatacatgctattgattgtgtccaaagcctcccgaggacctccgtggggatg

SEQ ID NO: 683533 - DNA, 120 bp, Artificial Sequence
  ENSG00000187164_21 (sequence is synthesized)
ctctggtagcctgaatacagaactgaggtgaaagtccaaaccttgaattttacagtagtaagttggtaaaccatgtgctctgtgctatgagttaattatgttttcccaaatactaatgtg

SEQ ID NO: 683534 - DNA, 120 bp, Artificial Sequence
  ENSG00000187164_22 (sequence is synthesized)
gcacaagtaccatattttatcagagttcttatgtacagtatggtgaagataagtgacaagcacacatttttcttgcttcactgctgttctatattacacaggtttgttgttgtttttttt

SEQ ID NO: 683535 - DNA, 120 bp, Artificial Sequence
  ENSG00000187164_23 (sequence is synthesized)
aaaaaagaaattaagcagtagttagtctctaaaaatacaatgtttcaggctaccacagtgaataaatagaaatgtaatcagggattaaaaaaaaaacttatgcagcttttcaaagttgat

SEQ ID NO: 683536 - DNA, 120 bp, Artificial Sequence
  ENSG00000187164_24 (sequence is synthesized)
tgtttcaaaattggtgtttatttaaaataagtggtaatgtacttgaatgcactttttatgacaatgattcagtaatggtaattttactattaaagaaagtgaaaggtttagttttgttag

SEQ ID NO: 683537 - DNA, 120 bp, Artificial Sequence
  ENSG00000187164_25 (sequence is synthesized)
catggctcagcatgtagctgtcaggtgtttttcacctaagggcaaaagaaaatgatagtaataattgcagtagttgtattgtattgtatttttgcacgtgtggtaagcataggcttgaag

SEQ ID NO: 683538 - DNA, 120 bp, Artificial Sequence
  ENSG00000187164_26 (sequence is synthesized)
aggtgggtaggcaggtacatgtacttcctaaatttggagataattatctttctgtaagttcgttatgcttgactgtttccatgttctcccaataatgattttatagttacttatcacttt

SEQ ID NO: 683539 - DNA, 120 bp, Artificial Sequence
  ENSG00000187164_27 (sequence is synthesized)
actcatggagaattaaaacgtaatgtttttcaactgtatctttctttaactggataatactgctatatgatatgcttactacagactgcattaattcacgaaacgaattctgttatgctg

SEQ ID NO: 683540 - DNA, 120 bp, Artificial Sequence
  ENSG00000187164_28 (sequence is synthesized)
tctcctcaccacaacttattaaaaaggcaccaatagtttcccattaagggtcagttgtggttattattaacgtttctggtttagttccccaagcttgacattctttaatagaaaattgta

SEQ ID NO: 683541 - DNA, 120 bp, Artificial Sequence
  ENSG00000187164_29 (sequence is synthesized)
tatgatttgacaactttagtaatttttaatagtccctaagatggtttattgagttttctttcatgtttctttgtgctgtcttccttcttgcatctgtgatctgtctgccagcatgcaact

SEQ ID NO: 683542 - DNA, 120 bp, Artificial Sequence
  ENSG00000187164_30 (sequence is synthesized)
cacacacatttaggaatataaaaatatgtacactgtctttccatatttcatcacaccatcacagaataatatggttatcaaaataccctcctttctagagtaagaagttgccctttgggt

SEQ ID NO: 683543 - DNA, 120 bp, Artificial Sequence
  ENSG00000187164_31 (sequence is synthesized)
gaaatgtgttagctggactagggaacaattagtaacaggtattttgaaagtattcctgccttttttaagctgcttactttctctcactgtgattacaaagcattttaaattaatttgaca

SEQ ID NO: 683544 - DNA, 120 bp, Artificial Sequence
  ENSG00000187164_32 (sequence is synthesized)
tgaaggtatttgatggaagatattcactcacctttttctgcctacagtttttcccttttcactttggttttgagggggttttgcccctggctggggtgacactgtcaaccaaagcaaggg

SEQ ID NO: 683545 - DNA, 120 bp, Artificial Sequence
  ENSG00000187164_33 (sequence is synthesized)
atcccaaataggaagacataggagaaccgtgcttatatctgcaaggtatgttcatagctattgcacacacaaaacttacatacgtcctgcttacacaattttaagttggaaaagactgca

SEQ ID NO: 683546 - DNA, 120 bp, Artificial Sequence
  ENSG00000187164_34 (sequence is synthesized)
tctttatgtttttgatttctctaaaaggttatttatgcttccttctgtttgggaaagataaattaagtcttgtgcgctatagaggattttttttctttaagaaaaacgaatgttgatgca

SEQ ID NO: 683547 - DNA, 120 bp, Artificial Sequence
  ENSG00000187164_35 (sequence is synthesized)
ttttatagcccgagtgaggaacagagatagaggtactttgtgccattgctattaaagaaaaagaaaatgtctctttttttttctggaagaataagattttaattaaagcacttgcaccct

SEQ ID NO: 683548 - DNA, 120 bp, Artificial Sequence
  ENSG00000187164_36 (sequence is synthesized)
tttgtatgtgagctggtctcaaacaaagtcctcacccacagcagtttcagcagctgaacagtcccatggaagttctgactggcaggcatcaacagggctattagcacccagcatagtttg

SEQ ID NO: 683549 - DNA, 120 bp, Artificial Sequence
  ENSG00000187164_37 (sequence is synthesized)
ccctgagtacggaggatggatgctttggctctaactactcaccaataattgctccttccttaccttctttgttaatggtaaactgctggaaatggagtagtacaggtaacaattattttt

SEQ ID NO: 683550 - DNA, 120 bp, Artificial Sequence
  ENSG00000187164_38 (sequence is synthesized)
aattgtctttccagaccagtttttggttgtgtgttcagtaaatgatagtctgtatcacagccttcaagtctggattatttttctaaatgcatactctacctgttcagttacactcgttgt

SEQ ID NO: 683551 - DNA, 120 bp, Artificial Sequence
  ENSG00000187164_39 (sequence is synthesized)
ggaacaacattagcttatataccagtaagttgtcgagaatggataaccatctgtcattatcactgaccttcaaagactcatcaagcagtccctgcataaggattggagtggtttgaagtt

SEQ ID NO: 683552 - DNA, 120 bp, Artificial Sequence
  ENSG00000187164_40 (sequence is synthesized)
tctcttccaagcactaacatgtccctatcccacagtcattttaatttggtatgtgactgtttctttcatttctttcacagataatattatatatacagttatataaatatatttcatatt

SEQ ID NO: 683553 - DNA, 120 bp, Artificial Sequence
  ENSG00000187164_41 (sequence is synthesized)
aaatgttatataacacaagagagagaaagtataagtagaaagagtgcctagcaccctaagaaatttaaattaaaatgctaattatccattggtgagtgcagtctcgaggataggtgagta

SEQ ID NO: 683554 - DNA, 120 bp, Artificial Sequence
  ENSG00000187164_42 (sequence is synthesized)
aactgctctgtgttgaagtcacactgctgacctggttattgtaataaatcacctctttggttaatttaatttagttattttgttattcattgtacatttttgctctggttttagtaattt

SEQ ID NO: 683555 - DNA, 82 bp, Artificial Sequence
  ENSG00000187164_43 (sequence is synthesized)
caaagggtatgtgaacacccagtcatgtttgttctgcctttcaaatgaattttccttccagtttctcctacccgttgcttgt

SEQ ID NO: 683556 - DNA, 120 bp, Artificial Sequence
  ENSG00000187164_44 (sequence is synthesized)
aaatgaattttccttccagtttctcctacccgttgcttgttgctaagcatcaggagaggcagtagcagccacaaactgtgacacagttcttccaacttagagtgataccaaccaagtctc

SEQ ID NO: 683557 - DNA, 120 bp, Artificial Sequence
  ENSG00000187164_45 (sequence is synthesized)
ctgcatgctctgagagagtctgcgcctgagccagtttcaaatcatagctttgagaataaagagttggctctgttatgaggaaattaaggtcccttgttagtactctttaaaaggagaggt

SEQ ID NO: 683558 - DNA, 120 bp, Artificial Sequence
  ENSG00000187164_46 (sequence is synthesized)
cctcagtgtgcttaataaaaattatagaatttgtcagaagtctaaacttagccaactcccctacaggtcagtacatagcaatttatataatttttaggagaagcaaatggtaaccatttt

SEQ ID NO: 683559 - DNA, 120 bp, Artificial Sequence
  ENSG00000187164_47 (sequence is synthesized)
aacgagaccctaaatcatataaagtggttggatattattatatctatatgtttgtgtctgaatatatttatttctgctactcctctgctataatcccaacactggcttacaaaagagcaa

SEQ ID NO: 683560 - DNA, 120 bp, Artificial Sequence
  ENSG00000187164_48 (sequence is synthesized)
ttcaggcaatggatatgtcacatcattttttttttttttttttatcacttgcggattgctttttaaatgctgtggtatgaataactgggcatttaataaccttgagaatattaattcatt

SEQ ID NO: 683561 - DNA, 120 bp, Artificial Sequence
  ENSG00000187164_49 (sequence is synthesized)
tactgatgtgcttattcatttatactcattcttactccaaaaaggatctaagaagactcgcaaagataaaaataatacaagaaaaactaaaatttaaaaaggagagggaattaggaaaaa

SEQ ID NO: 683562 - DNA, 120 bp, Artificial Sequence
  ENSG00000187164_50 (sequence is synthesized)
aggaatcaagggtaggaaagtgagatgaaattggctcttacaaaaaatggtgatgctctcacacttctacgtgaggttggttacaaaaatgtgtcagtgcttttcagcacagacatgtag

SEQ ID NO: 683563 - DNA, 120 bp, Artificial Sequence
  ENSG00000187164_51 (sequence is synthesized)
aataaacacagaagatggacatctgttcccagcacagagagcttctagggtcattaggtttttgttctcagagatattctgattggtaaaggatggggtgtttgactgagtgtggagttg

SEQ ID NO: 683564 - DNA, 120 bp, Artificial Sequence
  ENSG00000187164_52 (sequence is synthesized)
gcaacaaaaatattggcctcttttactggagcgtgtccctgaaaaatggacaggagagctaatagacaaacaaaatccacatggaagtgtggtggctgcaaaacgaagttcacagaattt

SEQ ID NO: 683565 - DNA, 120 bp, Artificial Sequence
  ENSG00000187164_53 (sequence is synthesized)
caggcaaaaacatcatatatgtaatttaccaaacagtggaattagaagaataaaaaccacaagagttggtgaagttgaagaggaaactccatgtggagacacggcgccgtacttcagacc

SEQ ID NO: 683566 - DNA, 120 bp, Artificial Sequence
  ENSG00000187164_54 (sequence is synthesized)
tcccggtctactaatactgatggtgtggctggaacctggggtgtgtacagccctatccagaggatgctcctgtttcggctgattcctctacaccttgtgtggggaaggtgggcaccagcg

SEQ ID NO: 683567 - DNA, 120 bp, Artificial Sequence
  ENSG00000187164_55 (sequence is synthesized)
gctccctagccgcagcagcctcaagtgcctccgcagccttttcagcttcctcattaaagtaaaaaaaagtgtgttcttctttgaaacctatttaaagtaacaataaagtttactgtctaa

SEQ ID NO: 683568 - DNA, 120 bp, Artificial Sequence
  ENSG00000187164_56 (sequence is synthesized)
attgcgtcccgctctacctctgtggttctttgggagcgacccccgggaagcgtccaaagtggagttcccacacacgctgcgaacccacagccggttttctctgaactcgcgtccctgagt

SEQ ID NO: 683569 - DNA, 120 bp, Artificial Sequence
  ENSG00000187164_57 (sequence is synthesized)
actggggacacttaacaaatccactagttcaagaagcttaaaatcccttgaccctgaaaacagtgaaactgagttagaaaggattttgcgtcgcagaaaggtgacagcagaagcagatag

SEQ ID NO: 683570 - DNA, 120 bp, Artificial Sequence
  ENSG00000187164_58 (sequence is synthesized)
cagtagtccaactgggatattagccacctcagagtccaaatccatgccagtgttgggttctgtatccagtgtaacaaaaacagccttgaacaagaaaactctggaggcagaattcaacag

SEQ ID NO: 683571 - DNA, 120 bp, Artificial Sequence
  ENSG00000187164_59 (sequence is synthesized)
aacacacaatacctagaatttggagaatgctgcaagacagctttgagggcagctaccacttcttttttgcctgtgaaaattggagggaaagaactttgaattggaagaaagaagaacacc

SEQ ID NO: 683572 - DNA, 120 bp, Artificial Sequence
  ENSG00000187164_60 (sequence is synthesized)
aaaagagaaagagagtgaaaggaattccatcctagtgggaatgatttaatgtgttgtattctttagggataagagtgtagaaatccagaaagcacagttctggccagacttacataggtg

SEQ ID NO: 683573 - DNA, 120 bp, Artificial Sequence
  ENSG00000187164_61 (sequence is synthesized)
ccaaagaattgaagtattcttaatcatgggacgatgcgtgggctcctggaatagctgactaatctttgaatgctgagattttttttccccctcattcctagtttctcacatggtcataga

SEQ ID NO: 683574 - DNA, 120 bp, Artificial Sequence
  ENSG00000187164_62 (sequence is synthesized)
ggaggcgaggcgagggccaggtgctagggctagaaaggaggcagggctggcgctctagggactcctggagctctcctcctgtgagcctggacccggcacctcacgcagcccatctcccac

SEQ ID NO: 683575 - DNA, 120 bp, Artificial Sequence
  ENSG00000187164_63 (sequence is synthesized)
agcttccgtcgacggaggccggggcctcaccaggaaagtggtttgccctccaatcagtggtctgccttcattttccagattgatgaagtctgcctcagagaaggggcaataggcgaatat

SEQ ID NO: 683576 - DNA, 120 bp, Artificial Sequence
  ENSG00000187164_64 (sequence is synthesized)
gttacgtttcaataatctgaatcagaaaatactgcaactccttcctccttttgtctgccttttgttctccaaaagtaagtggaaattacatttccaagaaaggaaatgaaataattgcag

SEQ ID NO: 683577 - DNA, 120 bp, Artificial Sequence
  ENSG00000187164_65 (sequence is synthesized)
gcccaaggtctgcaaaatatgtgttgaattgacagtgaaaaggatccatgtgttgacagacacagttgttagatgccataaaggcagatgtgaagctcaatttatttctcatcttgcttg

SEQ ID NO: 683578 - DNA, 120 bp, Artificial Sequence
  ENSG00000187166_0 (sequence is synthesized)
taaggaactgtgggtagatggtttgcaggaccacatacacacacaaaatagccgactaaagaaagcggtggagatcgagatcagtaagtttgatttgggaacaaaaccctggagactcta

SEQ ID NO: 683579 - DNA, 120 bp, Artificial Sequence
  ENSG00000187166_1 (sequence is synthesized)
taggtaggtgactgttgggggtggacaggcgctgaagacttggattggtttagacctagaaggaagtggcatttgattggttattataagtgaaaagggcccctccccgggtgagatatg

SEQ ID NO: 683580 - DNA, 120 bp, Artificial Sequence
  ENSG00000187166_2 (sequence is synthesized)
ccagccccataattaggacctgaaaatctctgccaggcctgcctttgtgacgtggcccagtctacctcagctatggaacaggccttgactggtgaggcccaaagccggtggccccgcaga

SEQ ID NO: 683581 - DNA, 120 bp, Artificial Sequence
  ENSG00000187166_3 (sequence is synthesized)
ggcgggagtggggccatggctgaggcgcctgggcccagtggcgaatcccgaggacactcagccactcagctgccagcggaaaaaactgtcgggggaccatcgaggggctgctcaagctcc

SEQ ID NO: 683582 - DNA, 120 bp, Artificial Sequence
  ENSG00000187166_4 (sequence is synthesized)
gtgctcagagtgtcccagttggtgctccaggccatctccactcacaaagggctgactctggcagctctcaagaaggagctccgaaacgccggctacgaagtgcgcaggaagagcggccgc

SEQ ID NO: 683583 - DNA, 120 bp, Artificial Sequence
  ENSG00000187166_5 (sequence is synthesized)
gaaagccgggacgcgcgaggcaagaggagggcacgcgcgctccctggaggaccccagccgcgccccggagctcccggaggcgccgccagccccttcgcaaggcggccaggaaggccagag

SEQ ID NO: 683584 - DNA, 120 bp, Artificial Sequence
  ENSG00000187166_6 (sequence is synthesized)
aagtgtggagacggaacgcgagggcgaaagccaaggccaatgccagggcgaggaggaccaggagggcaaggccgagagccaaggagccgccgtgtgccagagccaaggaggaagcgggag

SEQ ID NO: 683585 - DNA, 120 bp, Artificial Sequence
  ENSG00000187166_7 (sequence is synthesized)
cgacagcggcagacgaggggcgaggacaggccgtgaaggaagacaccacgccgaggtcagggaaggacaagaggcgaagctccaagcccagggaagagaagcaggagcccaagaagcccg

SEQ ID NO: 683586 - DNA, 120 bp, Artificial Sequence
  ENSG00000187166_8 (sequence is synthesized)
cacagcggaccatccagtagccaacgcgggctaaaaccgaccggacatctagcgggcaggggaagactccactaaagacttccacaaagacctcccctaaatctgaaggtcttcctgatc

SEQ ID NO: 683587 - DNA, 120 bp, Artificial Sequence
  ENSG00000187166_9 (sequence is synthesized)
cagttgggaatgcatcttgtgggagcagcttcactcccaccacggaccaatgcctttcccccataggccccaagaagagcggctgtcacactcattgaaatgaaatggacctctagacca

SEQ ID NO: 683588 - DNA, 120 bp, Artificial Sequence
  ENSG00000187170_0 (sequence is synthesized)
tcattcaggtttatcgaaatcccaccaagatgtcctgccagcagaaccaacagcagtgccagccccctcccaagtgtcctatccccaagtatcccccaaaatgtccctcaaagtgtgcat

SEQ ID NO: 683589 - DNA, 120 bp, Artificial Sequence
  ENSG00000187170_1 (sequence is synthesized)
ctgtggctccagctctgggggctgtggttgctgcagctctgagggaggtggctgctgcctgagccaccacagacaccataggtcccactgccacagacccaagagctccaattgctatgg

SEQ ID NO: 683590 - DNA, 120 bp, Artificial Sequence
  ENSG00000187170_2 (sequence is synthesized)
cagtggcagtggccagcagtctgggggttctggctgctgctctggagggggctgttgctgacctggaccaggagcagcaccaaaggaattagtgggcgaaggacccattgcagcctggtg

SEQ ID NO: 683591 - DNA, 120 bp, Artificial Sequence
  ENSG00000187170_3 (sequence is synthesized)
tgccgaagaggctatctgggaagctcatcatccagctcaggaagagatgaaaccaggaggcaggagaatgtcaggcatgaccccacacttgtgcaacagccacgtcctgctcctgccatt

SEQ ID NO: 683592 - DNA, 120 bp, Artificial Sequence
  ENSG00000187170_4 (sequence is synthesized)
agcatggctcatccgaggcccagccccaggatccatacaaagtgtgttcctgctgctggcttctcatctgctctgcttcctaagggacgtatctgttgctgcgtctgaacccacggttta

SEQ ID NO: 683593 - DNA, 120 bp, Artificial Sequence
  ENSG00000187173_0 (sequence is synthesized)
atctgctctgacttccccaggacgtgtctgtgctcctgtgtgtgaccagggttgaaaaagtcgcactgagatgtcctgccagcaaaaccagcagcagtgccagccccctcccaagtgccc

SEQ ID NO: 683594 - DNA, 120 bp, Artificial Sequence
  ENSG00000187173_1 (sequence is synthesized)
cccaaaatgcccacccaagtgtcctccaaagtgccgacctcagtgcccagccccatgcccacctccagtctcttcctgctgtggtcccagctctgggggctgctgcggctccagctctgg

SEQ ID NO: 683595 - DNA, 120 bp, Artificial Sequence
  ENSG00000187173_2 (sequence is synthesized)
gctctgggggtggcggctgctgcctgagccaccacaggccccgtctcttccaccggcaccggcaccagagccccgattgttgtgagtgtgaaccttctgggggctctggctgctgccaca

SEQ ID NO: 683596 - DNA, 120 bp, Artificial Sequence
  ENSG00000187173_3 (sequence is synthesized)
gctctggggactgctgctgaccagacctcgaacatcacagagcaacccttatggagaaacttgcaaccaggacctgtcccagagtgatgcttctcctgcccctttttctcctttccttgg

SEQ ID NO: 683597 - DNA, 120 bp, Artificial Sequence
  ENSG00000187173_4 (sequence is synthesized)
gctgacacaccttgtgaggtgttttgtctgttgtcatggcccaagagcccatcctggatcctgatcttaccttcccactttacctcatacaacaataaagctcttttgcctcttcgtgaa

SEQ ID NO: 683598 - DNA, 120 bp, Artificial Sequence
  ENSG00000187175_0 (sequence is synthesized)
cactgccctctgcctcgaccttatccagccacacgccaccatgtgccacaccagctgctcctcgggctgccagccagcctgctgcgcgcccagcccctgccaggcatcctgttacatccc

SEQ ID NO: 683599 - DNA, 120 bp, Artificial Sequence
  ENSG00000187175_1 (sequence is synthesized)
cgtgggctgccagtcctccgtgtgcgtgcccgtgagcttcaagccagccgtgtgtgtgcccgtgagatgccagtcctctgtgtgcgtgcccgtgagctgcaggcccgtcgtgtatgcggc

SEQ ID NO: 683600 - DNA, 120 bp, Artificial Sequence
  ENSG00000187175_2 (sequence is synthesized)
cgctgctcccagtgcagatgaggccacacctgtacactccctggatgagtcctcagttggtcttctgcacatggtgcaggtgaaaagcatgctcagtgaaccctctgaattctggatcga

SEQ ID NO: 683601 - DNA, 120 bp, Artificial Sequence
  ENSG00000187175_3 (sequence is synthesized)
gaatataatagaatgatctggagccctggctgaacttgcctatccccccagggaagtctggggtcccagagtcattctctgaccccatgagagtcaaataaaccagctttccccatgcaa

SEQ ID NO: 683602 - DNA, 120 bp, Artificial Sequence
  ENSG00000187180_0 (sequence is synthesized)
cagggacgtgtctgtgctcctgcgtgtgaccagggttgactaaactcctgccagcatgtcttgccagcaaaaccagcagcagtgccagccccctcccaagtgtcctcccaagtgtacccc

SEQ ID NO: 683603 - DNA, 120 bp, Artificial Sequence
  ENSG00000187180_1 (sequence is synthesized)
aaaatgtccacctaagtgtccccccaaatgcccaccacagtgcccagctccatgtttccctgcagtctcttcttgctgtggtcccagctctgggagctgctgtggtcccagctctggggg

SEQ ID NO: 683604 - DNA, 120 bp, Artificial Sequence
  ENSG00000187180_2 (sequence is synthesized)
gggctggtggctgctccctgagccaccacaggccccgtctcttccaccggcgccggcaccagagccccgactgctgtgagagtgaaccttctgggggctctggctgctgccacagctctg

SEQ ID NO: 683605 - DNA, 120 bp, Artificial Sequence
  ENSG00000187180_3 (sequence is synthesized)
ggggctgctgctgacctgggctacagaagagctcttgggactgaatggccaagaacctgctacggcctgatggatactctttccacttcctctcattccattcattggttggcagagacc

SEQ ID NO: 683606 - DNA, 120 bp, Artificial Sequence
  ENSG00000187180_4 (sequence is synthesized)
acaaagactcatggggctttcctggaagaacttcgtgcttgatgtaacaccccaattgcaagtcttcttttcctcctttacctcatgttataataaagctctgatctctgactcactaaa

SEQ ID NO: 683607 - DNA, 120 bp, Artificial Sequence
  ENSG00000187186_0 (sequence is synthesized)
gtttccggggtggagccagggagggcgggagtttaggctgcgctgacccctctcagccccccctccaggtgaccccagcccctgaaaatcctcacccagggccccaaatctcccagcccc

SEQ ID NO: 683608 - DNA, 120 bp, Artificial Sequence
  ENSG00000187186_1 (sequence is synthesized)
atgaccgccaaacctctcgccctggccccctaaatgccccaggccccggagatgaccggcctcctcaccccttaacttccagtgcctcccaaatctccaagcccaccctgtcccgtggtg

SEQ ID NO: 683609 - DNA, 120 bp, Artificial Sequence
  ENSG00000187186_2 (sequence is synthesized)
gcaactgaggcttctcgggggcatcagcctcagattacctgagaactgggcagcctcgtcctgagaatgacggagaaggggacctggggctagggaatccctgattcaatcatgccgctc

SEQ ID NO: 683610 - DNA, 120 bp, Artificial Sequence
  ENSG00000187186_3 (sequence is synthesized)
cccaggagacgttcggagcccaggacatgtcgggaatgaggagatacgaggtggcgctggaggcggaggaggagatctactggggctgtttctactttttcccctggcttcgcatgtggc

SEQ ID NO: 683611 - DNA, 120 bp, Artificial Sequence
  ENSG00000187186_4 (sequence is synthesized)
ggagggagcggagctcggcgcaccccggggagcagaagctggagcctctgcgaggcctgatgagctgtctgtccagcggcctgggtcctactccccagcgctcgggtcgtggcttccccc

SEQ ID NO: 683612 - DNA, 120 bp, Artificial Sequence
  ENSG00000187186_5 (sequence is synthesized)
gccgcagccccaccgccgctgcccagccagccagtgcattaaagatttaaaccgaagcccaccgtactgacctcctgactctgccgccgctgtcgccattcgagccgagcgcccctcccc

SEQ ID NO: 683613 - DNA, 120 bp, Artificial Sequence
  ENSG00000187186_6 (sequence is synthesized)
gcctcctgttactatcaatggctgtctcccccaatcccaacccccaaaaacccatactgtgagtcgcctatatgaagagaactaaataatcctgcctgttactcccttcctcggagcgag

SEQ ID NO: 683614 - DNA, 120 bp, Artificial Sequence
  ENSG00000187186_7 (sequence is synthesized)
gactttgccagctgtctgaagaatcttctctgctgggagtatatctaaaacattttaagcagaggtgtaggatgcaggctgtaaatggtaagagggggagattcctagaagctgcctgcc

SEQ ID NO: 683615 - DNA, 120 bp, Artificial Sequence
  ENSG00000187186_8 (sequence is synthesized)
acagaggagcgacttgggttggcgacctttcctacagttcataccccaacttttggctcctccagtctgatcccaagtttagagatccttggcatcagcctacctagaagttcttgctcc

SEQ ID NO: 683616 - DNA, 120 bp, Artificial Sequence
  ENSG00000187186_9 (sequence is synthesized)
ctccctaggagagtccaagggccactgctctttgccgcccccttctgtcacccaatcagcctgggacccactaactcctcaagtggtgagaatcagggactgctatgtgggcctgccttc

SEQ ID NO: 683617 - DNA, 120 bp, Artificial Sequence
  ENSG00000187186_10 (sequence is synthesized)
agttagggactggacccagcaccagaaagggcaccacaagattaagttaaagaaagagatggcccagtttctggctggggccaaagctacagcagattgtggctggggagaagacttggt

SEQ ID NO: 683618 - DNA, 120 bp, Artificial Sequence
  ENSG00000187186_11 (sequence is synthesized)
cttaaaggggagagatgggtgcacacccaaaagcatttgttttctgccttccgaagacttctggaccgacaagcccagggaagaccagaaagtatgtagcgcacagccaagtgatgaaga

SEQ ID NO: 683619 - DNA, 120 bp, Artificial Sequence
  ENSG00000187186_12 (sequence is synthesized)
ggagccgcttttagaggcggggcggagccttcctcgacggcgaggcaccgcggggcggagtctgtagggtcagctcctccccgccccgccccgccccgcccggctctgccctctctctgc

SEQ ID NO: 683620 - DNA, 120 bp, Artificial Sequence
  ENSG00000187187_0 (sequence is synthesized)
agtgttgcctggaccccaagggccctttacattgcgttcttaacggttcagtcaccttaaccgttattattcacttgcgggcgagaagtccgagctagggatcctgaaaaggagggaaca

SEQ ID NO: 683621 - DNA, 120 bp, Artificial Sequence
  ENSG00000187187_1 (sequence is synthesized)
attgttgtagcaggtctaaaagttcaggtccaggaaatggaaacattgctttgcttttcctgaattgtccagtgacctatcccaggccttcctttccagtgaacaatggaccatgcaggt

SEQ ID NO: 683622 - DNA, 120 bp, Artificial Sequence
  ENSG00000187187_2 (sequence is synthesized)
ggaccctcctcttcacgggcctccaaatgactttctcatttttcaaatcattcctctgcactcactttctataatgccccggtttctctggattctgtgcttctccatggaggaaactca

SEQ ID NO: 683623 - DNA, 120 bp, Artificial Sequence
  ENSG00000187187_3 (sequence is synthesized)
aggagaactgacaagttcttgtggttctaaaaccatggccaatgtatctttggcatttagggatgtgtccatagacctctcccaagaggagtgggagtgcctggacgctgtgcagaggga

SEQ ID NO: 683624 - DNA, 120 bp, Artificial Sequence
  ENSG00000187187_4 (sequence is synthesized)
cttgtacaaggatgtgatgttggagaactacagcaacctggtctcactgggatataccattcctaagccagatgtgattactttattggagcaagagaaagagccctggatagtaatgag

SEQ ID NO: 683625 - DNA, 120 bp, Artificial Sequence
  ENSG00000187187_5 (sequence is synthesized)
ggaagggacaaggaattggttcacagatttggaatacaagtatattaccaagaatttgctttcagaaaagaatgtttgcaaaatctatttatctcaattgcagacaggggaaaaaagtaa

SEQ ID NO: 683626 - DNA, 120 bp, Artificial Sequence
  ENSG00000187187_6 (sequence is synthesized)
aaacaccatccatgaggacaccattttcagaaatggtttgcagtgtaaacatgaatttgagagacaagagagacatcagatgggatgcgttagtcaaatgctaatccaaaaacaaatatc

SEQ ID NO: 683627 - DNA, 120 bp, Artificial Sequence
  ENSG00000187187_7 (sequence is synthesized)
tcatcctctacatccaaaaattcatgctagagagaaatcatatgaatgtaaggaatgtagaaaggcctttagacaacagtcataccttattcaacatctgagaattcacactggtgagag

SEQ ID NO: 683628 - DNA, 120 bp, Artificial Sequence
  ENSG00000187187_8 (sequence is synthesized)
accctataaatgtatggaatgtggaaaggccttttgtcgagtgggagaccttagagtacatcacacaatccatgctggggagagaccctatgaatgtaaagaatgtgggaaggcctttag

SEQ ID NO: 683629 - DNA, 120 bp, Artificial Sequence
  ENSG00000187187_9 (sequence is synthesized)
acttcattatcaccttactgaacatcagagaatacattctggtgtgaaaccctacgagtgtaaggaatgtgggaaagcctttagtcgtgttagagaccttagagtacatcagacaattca

SEQ ID NO: 683630 - DNA, 120 bp, Artificial Sequence
  ENSG00000187187_10 (sequence is synthesized)
tgctggagagagaccttatgaatgtaaagaatgtgggaaggcctttagacttcattatcaactaactgaacatcaaagaattcatactggtgagaggccttatgaatgtaaggtttgtgg

SEQ ID NO: 683631 - DNA, 120 bp, Artificial Sequence
  ENSG00000187187_11 (sequence is synthesized)
caagacctttagggtacaacgacatattagtcaacatcagaaaattcatactggtgtcaaaccctataaatgtaatgaatgtgggaaggcctttagtcatggctcataccttgttcaaca

SEQ ID NO: 683632 - DNA, 120 bp, Artificial Sequence
  ENSG00000187187_12 (sequence is synthesized)
tcagaaaattcatactggtgaaaaaccctacgaatgtaaagaatgtggtaagtcctttagttttcatgcagaacttgctcgacatcgtagaattcatactggtgagaaaccctatgaatg

SEQ ID NO: 683633 - DNA, 90 bp, Artificial Sequence
  ENSG00000187187_13 (sequence is synthesized)
tcgtagaagagaatgtggaaaagcctttcgtcttcaaacggaacttactcggcatcatagaactcatactggtgagaaaccctatgaatg

SEQ ID NO: 683634 - DNA, 120 bp, Artificial Sequence
  ENSG00000187187_14 (sequence is synthesized)
acttactttacatctgagaactcacaccggtgagattccctatgaatgtaaggaatgtggaaaaaccttcagtagtcgctatcatctcactcaacactacagaattcatactggtgagaa

SEQ ID NO: 683635 - DNA, 120 bp, Artificial Sequence
  ENSG00000187187_15 (sequence is synthesized)
ttcatactggtgagaaaccctacatatgtaacgaatgtggaaaagcctttcgtcttcaaggagaacttacccgacatcacagaattcatacatgtgagaaaccctatgaatgtaaggaat

SEQ ID NO: 683636 - DNA, 120 bp, Artificial Sequence
  ENSG00000187187_16 (sequence is synthesized)
tcatagcaatcaatttatttcacaccagcgaattcacaccagtgagagcacctacatatgtaaagaatgtgggaagatttttagtcgtcgctataatcttactcaacattttaaaattca

SEQ ID NO: 683637 - DNA, 120 bp, Artificial Sequence
  ENSG00000187187_17 (sequence is synthesized)
tactggtgaaaaaccctacatatgtaatgaatgtgggaaagcctttcgatttcaaacagaacttactcagcatcacagaattcatactggtgaaaaaccctataaatgtacagaatgtgg

SEQ ID NO: 683638 - DNA, 120 bp, Artificial Sequence
  ENSG00000187187_18 (sequence is synthesized)
gaaggcctttattcgtagcactcatctcacgcaacatcacagaattcatactggtgagaaaccctacgaatgtacggaatgtgggaagacgtttagtcggcactatcatcttactcaaca

SEQ ID NO: 683639 - DNA, 120 bp, Artificial Sequence
  ENSG00000187187_19 (sequence is synthesized)
tcacagaggccatactggtgagaagccctacatatgtaatgaatgtgggaatgcttttatttgcagttatcgacttacattacatcaaagaattcacactggtgagcttccatatgaatg

SEQ ID NO: 683640 - DNA, 120 bp, Artificial Sequence
  ENSG00000187187_20 (sequence is synthesized)
taaggaatgtggaaagacctttagtcgtcggtatcatcttactcaacattttagacttcatactggtgagaaaccttatagctgtaaagaatgtgggaatgcctttcgtcttcaagcaga

SEQ ID NO: 683641 - DNA, 120 bp, Artificial Sequence
  ENSG00000187187_21 (sequence is synthesized)
acttactcgacatcacatagttcacacgggtgagaaaccctataaatgtaaagaatgtgggaaagccttcagtgttaattcagaacttactcgacatcacagaattcatactggtgaaaa

SEQ ID NO: 683642 - DNA, 120 bp, Artificial Sequence
  ENSG00000187187_22 (sequence is synthesized)
accctatcaatgtaaagaatgtggaaaagcctttattcgtagtgatcaacttactttacatcagagaaatcatattagtgaggaagtcctatgcataatgtaaagagaatacgatggcct

SEQ ID NO: 683643 - DNA, 120 bp, Artificial Sequence
  ENSG00000187187_23 (sequence is synthesized)
ttagaaaatgccctttagcagagaatttgtaatttaagaaattttctgtttgttacggaacatgtgggaatcccttttacttcatgctcacaatttatcagaaattatttcgtatgttaa

SEQ ID NO: 683644 - DNA, 120 bp, Artificial Sequence
  ENSG00000187187_24 (sequence is synthesized)
agagtcgaaagactatagcatcactcagtccctgttagactttagaagattgatactgatgcactgcatcccaaaccatcaagggccttttcccctacaaactgttgttgaacagtgctt

SEQ ID NO: 683645 - DNA, 83 bp, Artificial Sequence
  ENSG00000187187_25 (sequence is synthesized)
aagggccttttcccctacaaactgttgttgaacagtgcttctctaaaatgcaataataatgggccaaaagacaggagttcgaa

SEQ ID NO: 683646 - DNA, 87 bp, Artificial Sequence
  ENSG00000187187_26 (sequence is synthesized)
gcctcatggcttttggtgacagagtgagatcctgtctctaaataaataaataaaatgcgggccaggcacagtggctcacacctgtaa

SEQ ID NO: 683647 - DNA, 74 bp, Artificial Sequence
  ENSG00000187187_27 (sequence is synthesized)
gaacctaattgggcaacagagcaagactctgtctcttaaataaataaataaatagattaccagaaaaatgaaaa

SEQ ID NO: 683648 - DNA, 120 bp, Artificial Sequence
  ENSG00000187187_28 (sequence is synthesized)
cttaaataaataaataaatagattaccagaaaaatgaaaagaaaaaaacagacatacaaaataaaagccccagttttttattatggtatttaactgagttaactctgtcagattgctgca

SEQ ID NO: 683649 - DNA, 120 bp, Artificial Sequence
  ENSG00000187187_29 (sequence is synthesized)
aacatttctaaatacttgctcttggtatctataacttttgcagagaccagaagcaaacaatttgtgggccagtgtcaacacatggaccacactttatatagcactgtaacggaaaatgat

SEQ ID NO: 683650 - DNA, 120 bp, Artificial Sequence
  ENSG00000187187_30 (sequence is synthesized)
tctgttaatgtaatgaacatgggaaagaccagccttggcctatctttatgatatatataaataatataattctcataattccacctctgcctatgtggtgtttggcaaaacatgcccctg

SEQ ID NO: 683651 - DNA, 120 bp, Artificial Sequence
  ENSG00000187187_31 (sequence is synthesized)
tgccttggtttttaaaatggtaataacagtaccacctaatagtatttttgtgaggatgaaatgctaataaaagataaaacctttaaaagagtatttggcacacagcattttatcaataaa

SEQ ID NO: 683652 - DNA, 120 bp, Artificial Sequence
  ENSG00000187187_32 (sequence is synthesized)
aaaactgtccattacctttcactccttatttagattggaataattaactggagataatatccagtaaaatagattaaacttccatttataaagtcagaacctatctctgaaaattaatgt

SEQ ID NO: 683653 - DNA, 120 bp, Artificial Sequence
  ENSG00000187187_33 (sequence is synthesized)
gagaaagaaatctctagatttgatgggtgtgaagattatgagagtaaagttttgaagactcagggatagctgtaatgcttttttctttttataacccaaaaagcaggtatgtcagtcgct

SEQ ID NO: 683654 - DNA, 120 bp, Artificial Sequence
  ENSG00000187187_34 (sequence is synthesized)
ttttctgcccacaatgataaattaaaaacagccactatccatttggaaaacttaaaagaataatgaacagttatgttctatctagattcagcaattgttaatatgttgtcacatttggtt

SEQ ID NO: 683655 - DNA, 120 bp, Artificial Sequence
  ENSG00000187187_35 (sequence is synthesized)
tgcttatacataatatttacatattttgctgtagtatttgagtataaattgcagatactataacacatcacatctaagaataaaggctgcctcctacttaattgctatataacaattgtc

SEQ ID NO: 683656 - DNA, 120 bp, Artificial Sequence
  ENSG00000187187_36 (sequence is synthesized)
caacctgtctgtgccccagggcagctttgaatgcagtccaacagaaatttgtaagctgtcttaaaacatgagattttttttgtgattttttttaagctcatccgccattgttagcacatt

SEQ ID NO: 683657 - DNA, 120 bp, Artificial Sequence
  ENSG00000187187_37 (sequence is synthesized)
ttatgtgtagcccaagataattcttcttccagtgtaacccagggaagccaaaagatttgacccccagtaacttcacacctaaggagattagcaataattccataatctgtaatattcagt

SEQ ID NO: 683658 - DNA, 120 bp, Artificial Sequence
  ENSG00000187187_38 (sequence is synthesized)
ctgtgttcatattctcagttgtgttcattcttttcatttgtgtaaacaatgcttttcataggttatttttaaattcaggaaccaaattcatgaattacatttgtgcattgttcgtctctt

SEQ ID NO: 683659 - DNA, 81 bp, Artificial Sequence
  ENSG00000187187_39 (sequence is synthesized)
accaaattcatgaattacatttgtgcattgttcgtctcttttaaagtaagaatggcccttccccccacaactttattgcaa

SEQ ID NO: 683660 - DNA, 120 bp, Artificial Sequence
  ENSG00000187187_40 (sequence is synthesized)
tatttttaaatgtgcttttttatccccagtatttcccattaactggaatttgggattagagacccaattagggacagattaaatattttggcaagaatacttaatgggagaaattttgta

SEQ ID NO: 683661 - DNA, 120 bp, Artificial Sequence
  ENSG00000187187_41 (sequence is synthesized)
tttcaatttgtaacccattaggtggcatacaatgtcattataccactatggtatccttagttcattcacttggtgtagcagaacatacattccaaagatggccacaccaatatatcccat

SEQ ID NO: 683662 - DNA, 120 bp, Artificial Sequence
  ENSG00000187187_42 (sequence is synthesized)
tctgcatgttcatcttacaatgtgataccaacactccccaagaggtagagctcatggtccttccttttgaatctggccaggtgggcctgtgtttatggcaggaataacactgtgatttcc

SEQ ID NO: 683663 - DNA, 120 bp, Artificial Sequence
  ENSG00000187187_43 (sequence is synthesized)
acgactaagtcataaaaggcaatacagcttctgcctgacccacttgggatgaagcccagccaccatgctatgaagatgccaagtaatcacatagaaaagctaagtaaagctgtcctgatt

SEQ ID NO: 683664 - DNA, 120 bp, Artificial Sequence
  ENSG00000187187_44 (sequence is synthesized)
acagctgtaattgaggtaacagccgggatccagcaccaagtgtatgagggtatgagccttcagatgattctaacccttagccttcaggctatcctagctggtgctaagtggagcagagaa

SEQ ID NO: 683665 - DNA, 120 bp, Artificial Sequence
  ENSG00000187187_45 (sequence is synthesized)
aagctttcccccatgagcctgcccaaattgcagatttacgtttaaaatatggcctgttttaagccactaagttttggagtagtttgccacacagcgataggtaactgaaatacttgcttc

SEQ ID NO: 683666 - DNA, 120 bp, Artificial Sequence
  ENSG00000187187_46 (sequence is synthesized)
atatggtaatcaccaggtttctctgttgtagagctaaatatttcttttaatttagtaaacgatctgtagagtagtactttggcatttcggaaatttaaaatctccaataatataatgaca

SEQ ID NO: 683667 - DNA, 120 bp, Artificial Sequence
  ENSG00000187187_47 (sequence is synthesized)
ctagatcaaaaagaaaatgaaaccataaaggacaatttagaaatgaatggtaagatcagaatttgtgaatgtggccaaacctgtgctcagtgaaaaatcagtaacctgttaatatattca

SEQ ID NO: 683668 - DNA, 120 bp, Artificial Sequence
  ENSG00000187187_48 (sequence is synthesized)
ggaaacaaatattgagggccagcactttgtttctcctgctcaccactctactcccagtgacttaatactgtctctttaacatagtaatcacttataaaactgttaaaagaatgaagaagc

SEQ ID NO: 683669 - DNA, 120 bp, Artificial Sequence
  ENSG00000187187_49 (sequence is synthesized)
attaaactcaagaaactaagggaaaaataagtcaatataagaaagaagggaggatcattaaaaggagttaatgaatttgaaaataaaatagacttattaaggctttgtgaaaaaatatta

SEQ ID NO: 683670 - DNA, 120 bp, Artificial Sequence
  ENSG00000187187_50 (sequence is synthesized)
atacttgattttagtatagctaatcaaaggaaaaagataattacagcattgtgaatgagaattggatgtaagtacagatggaggagatattttttgttttattgaaaatttcaaggagga

SEQ ID NO: 683671 - DNA, 120 bp, Artificial Sequence
  ENSG00000187187_51 (sequence is synthesized)
agtaatatcaaaatttcactagctctttctacactgatattataatcctgataatacaacagatgaggatagttcttaaaaggcaaaaatgtaggtgagtcattacgaagaaagcagaaa

SEQ ID NO: 683672 - DNA, 120 bp, Artificial Sequence
  ENSG00000187187_52 (sequence is synthesized)
ttctaaaccatcagcacattcattcaaaaacctagtaaagcaattaagcaaaataatttgtttacttggactgtccagggatagatctgttctagttttccaaattaatgatgggaaagg

SEQ ID NO: 683673 - DNA, 120 bp, Artificial Sequence
  ENSG00000187187_53 (sequence is synthesized)
aagagctgatccagtccaagtatcttcaagatccatgttctcagtttttcttagctttaaatggccaaattgtggcttagattggatatgataatttcctcaatgcttaacactgagcac

SEQ ID NO: 683674 - DNA, 120 bp, Artificial Sequence
  ENSG00000187187_54 (sequence is synthesized)
aatttttcacatatttgaaatcaaggtgtatcttacaatttatggcatctgacaatacttccaaccaggtggcagtcatcaagcagttttgtgaaaagccttcccggtaagaatacaaaa

SEQ ID NO: 683675 - DNA, 120 bp, Artificial Sequence
  ENSG00000187187_55 (sequence is synthesized)
gcatctgcaccaaaatatatagatttaatggcatgtaggggtttgcgtgaatatatacagttgaaattcaattcttccttaaaaataattgtaactcatttctttaagactaccatacta

SEQ ID NO: 683676 - DNA, 120 bp, Artificial Sequence
  ENSG00000187187_56 (sequence is synthesized)
ccactttcctcaacttggactaatgtccattgtcaaccaaaatgtctgtgatctcatggatccattatgatttgcaactccaggtccattttatgcaaataagacagccataatatatca

SEQ ID NO: 683677 - DNA, 120 bp, Artificial Sequence
  ENSG00000187187_57 (sequence is synthesized)
ttgtacaagtcatttactatctaattatatcattgctcaacatttgcaaattatttttacaaataacaataattggatgtaacaaaaagcagagtattttgagacgtatattaatgcaaa

SEQ ID NO: 683678 - DNA, 120 bp, Artificial Sequence
  ENSG00000187187_58 (sequence is synthesized)
atattgttaatgtatcagtggattgttcctccaaagtaccagtgccttaacacaacatatctaaaagaacatctctgggaacagtagtacttaatggcaacttgagaattggtttgtggg

SEQ ID NO: 683679 - DNA, 120 bp, Artificial Sequence
  ENSG00000187187_59 (sequence is synthesized)
cacacagccttgtgaagttttgaatactaaatcccttttttaaaaaagtgcttattatcaggctatcaatcaaaagatttgagtctttcagtaaagaaaatttgcttaattttatctagt

SEQ ID NO: 683680 - DNA, 120 bp, Artificial Sequence
  ENSG00000187187_60 (sequence is synthesized)
gcatgataaactttactaaggaagtctcattcagaatatctaatattttggatgtgagcccacactggaaatgccataaccaaaaaagagtgaccctaaagatagaatattcagatctaa

SEQ ID NO: 683681 - DNA, 120 bp, Artificial Sequence
  ENSG00000187187_61 (sequence is synthesized)
tggcagatgcttagctatgctgggaaaggaagtgaattgtatattgctctgctgctcacatattcctctgcaataaattgctggcccagtttagtttttatatactcactactatactaa

SEQ ID NO: 683682 - DNA, 120 bp, Artificial Sequence
  ENSG00000187187_62 (sequence is synthesized)
tgaggatggctcaattttttatttgaacgtactataatgaatttaaactttcattggtatttatgttttaacaggttttcactatttcaaatatacttcaataaatatccttgtctgtga

SEQ ID NO: 683683 - DNA, 120 bp, Artificial Sequence
  ENSG00000187187_63 (sequence is synthesized)
gagtctaaagttaaaactttgttttattgagattaatgtttaggtagaatcacatcatccatcttctccaatcttctccaaagacctcagttttaaaatatgacaggattagagatgacc

SEQ ID NO: 683684 - DNA, 120 bp, Artificial Sequence
  ENSG00000187187_64 (sequence is synthesized)
atttggtcacggagaggtgaggttttcctcttagtccaattccaagaagtcagcaggggttggccttaggttccctgtctccagactctattctcctgcctcatttggacccctacaatc

SEQ ID NO: 683685 - DNA, 120 bp, Artificial Sequence
  ENSG00000187187_65 (sequence is synthesized)
taattgtgaatgtaaaagggatctacggaagtttgaacttgagagtgatgacctagggtatctggcagaagaaatgcctaaataacaaagcattcaagatatggcctggctgcttgtaac

SEQ ID NO: 683686 - DNA, 120 bp, Artificial Sequence
  ENSG00000187187_66 (sequence is synthesized)
tcactctcttgctcctgctttcaccatgtgatgtgcctgctcccattttgccttccaccatgattggaaacttcctgaggcctgctcaaaagcagatgccactatgcttcccgtacagcc

SEQ ID NO: 683687 - DNA, 120 bp, Artificial Sequence
  ENSG00000187187_67 (sequence is synthesized)
tgcagaactggatcctgaaaaggagggaacaattgttgtagcaggtctaaaagttcaggtccaggaaatggaaacattgctttgcttttcctgaattgtccagtgacctatcccaggcct

SEQ ID NO: 683688 - DNA, 120 bp, Artificial Sequence
  ENSG00000187189_0 (sequence is synthesized)
gggcagagctcggccgctgcggaggacaaggaactctccctctcccactagtctgacttcttccaaaatgagcggcctggatgggggcaacaagctccctctcgcccaaaccggcggcct

SEQ ID NO: 683689 - DNA, 120 bp, Artificial Sequence
  ENSG00000187189_1 (sequence is synthesized)
ggctgctcccgaccatgcctcaggagatccggaccgagaccagtgccaagggctccgtgaagaaaccgaggcgacacaggtgatggcgaacacaggtgggggcagcctggagaccgttgc

SEQ ID NO: 683690 - DNA, 120 bp, Artificial Sequence
  ENSG00000187189_2 (sequence is synthesized)
ggaggggggtgcatcccaggatcctgtcgactgtggccccgcgctccgcgtcccagttgccgggagtcgcggcggtgcagcgaccaaagccgggcaggaggatgctccaccttctacgaa

SEQ ID NO: 683691 - DNA, 120 bp, Artificial Sequence
  ENSG00000187189_3 (sequence is synthesized)
aggtctggaagcagcctctgccgccgaggctgctgacagcagccagaaaaatggctgtcagcttggagagccccgtggccctgctgggcagaaggctctagaagcctgtggcgcaggggg

SEQ ID NO: 683692 - DNA, 120 bp, Artificial Sequence
  ENSG00000187189_4 (sequence is synthesized)
cttggggtctcagatgataccggggaagaaggccaaggaagtgacgactaaaaaacgcgccatctcggcagcagtggaaaaggagggagaagcaggggcggcgatggaggaaaagaaggt

SEQ ID NO: 683693 - DNA, 120 bp, Artificial Sequence
  ENSG00000187189_5 (sequence is synthesized)
agtgcagaaggaaaaaaaggtggcaggaggggtgaaagaggagacacggcccagggccccgaagatcaataactgcatggactcactggaggccatcgatcaagagttgtcaaacgtaaa

SEQ ID NO: 683694 - DNA, 120 bp, Artificial Sequence
  ENSG00000187189_6 (sequence is synthesized)
tgcccaggctgacagggccttccttcagcttgagcgcaagtttggccgcatgcgaaggctccacatgcagcgcagaagtttcattatccagaatatcccaggtttctgggttactgcctt

SEQ ID NO: 683695 - DNA, 120 bp, Artificial Sequence
  ENSG00000187189_7 (sequence is synthesized)
tcgaaaccacccccagctgtcacctatgatcagtggccaagatgaagacatgctgaggtacatgatcaatttggaggtggaggagcttaaacaccccagagcaggctgcaaattcaagtt

SEQ ID NO: 683696 - DNA, 120 bp, Artificial Sequence
  ENSG00000187189_8 (sequence is synthesized)
catctttcagggcaacccctacttccgaaatgaggggcttgtcaaggaatatgaacgcagatcctctggccgggtggtgtctctttccactccaatccgctggcaccgaggccaagaccc

SEQ ID NO: 683697 - DNA, 120 bp, Artificial Sequence
  ENSG00000187189_9 (sequence is synthesized)
ccaggctcatatccacagaaaccgggaagggaacactatccctagtttcttcaactggttttcagaccacagccttctagaattcgacagaattgcagagattatcaaaggagaactgtg

SEQ ID NO: 683698 - DNA, 120 bp, Artificial Sequence
  ENSG00000187189_10 (sequence is synthesized)
gcccaatcccctacaatactacctgatgggtgaagggccccgtagaggaattcgaggcccaccaaggcagccagtggagagcgccagatccttcaggttccagtctggctaatctctgtc

SEQ ID NO: 683699 - DNA, 120 bp, Artificial Sequence
  ENSG00000187189_11 (sequence is synthesized)
ctgtgagaagcttctgcacaagtttccttaccacctcctcttggacctatgcttggccaacagcatgcagtcttccatctgctttctcttcatactgtggattatcttttcctttggttc

SEQ ID NO: 683700 - DNA, 120 bp, Artificial Sequence
  ENSG00000187189_12 (sequence is synthesized)
taaatcttcagtaatcggttgcaagattgttggcttacctgcctgtgccattcttcctctgggccttcatgcttttctgcattgtgttaacatgtttcaagtgcatggccttctacggct

SEQ ID NO: 683701 - DNA, 120 bp, Artificial Sequence
  ENSG00000187189_13 (sequence is synthesized)
tctatgccaagcgtatgatactatagatatagtgtaccatactgcctttctttgcatggcttggaccctatctgtgaccatgctcttctcccaatttaagtggttctgtaccacaaagaa

SEQ ID NO: 683702 - DNA, 120 bp, Artificial Sequence
  ENSG00000187189_14 (sequence is synthesized)
tcttgatacattttcacaaataactgattgggcttcatactttatgctggctgtgtcctgatacccatgtacttatggtaagctatttgggtattaccactgcaagacaaaactgatatc

SEQ ID NO: 683703 - DNA, 120 bp, Artificial Sequence
  ENSG00000187189_15 (sequence is synthesized)
ttaacccggccatcaacccaaattggacattccagactaccaccaactggatcccagctgccttcctgggcttgtgccatccaccctactggttatctgatagaacaagctggtggctga

SEQ ID NO: 683704 - DNA, 120 bp, Artificial Sequence
  ENSG00000187189_16 (sequence is synthesized)
tgggtgactgctaggcgtgactgaggtaatagatgaaaagtgttctatgttatcacattggttttcctgtacctttggttactctacgtcatgaccagctgctggtgagtatgaagcctg

SEQ ID NO: 683705 - DNA, 120 bp, Artificial Sequence
  ENSG00000187189_17 (sequence is synthesized)
ctggttgaactttgcttaggccaccattgtctgcctcatcaggaactatctgtagacgtagctcccagggagctcacagcaacaccccctaccaccaggatgggcagtaatatgtgacag

SEQ ID NO: 683706 - DNA, 120 bp, Artificial Sequence
  ENSG00000187189_18 (sequence is synthesized)
agcccaaagcaaggctggaacgcagtcccttccagcttagtctttctgactcctagccaacaaaccatccttaatgtgagcaacttctttaggcatttcctcttttccccgcctgcaccc

SEQ ID NO: 683707 - DNA, 120 bp, Artificial Sequence
  ENSG00000187189_19 (sequence is synthesized)
actctgaacatgacaaaagttgccagagttggggcattgaggaagagatatttctggaatgtgagacttgttatgcctctgtctctttctctccctcctcctcccctctccctccccctc

SEQ ID NO: 683708 - DNA, 120 bp, Artificial Sequence
  ENSG00000187189_20 (sequence is synthesized)
tccctcccatcccttttcttccctttcactctgaagcagttttagcttattaacagaaaacaaaactggcaaagcaggctttttgtttaatttgctctttccctgattgtgttcagagag

SEQ ID NO: 683709 - DNA, 120 bp, Artificial Sequence
  ENSG00000187189_21 (sequence is synthesized)
aaaggttatgattaaatgggctccagatctcttattgcccttattcctccaccccacttcttttagcaaggtctgaaagtttcaaagggagacctataggttaattgtttagttataggc

SEQ ID NO: 683710 - DNA, 120 bp, Artificial Sequence
  ENSG00000187189_22 (sequence is synthesized)
agtgttaaattaggcagattttgacatatttatctttttaccccatccattctaccaaaacctgtgtatttcttgagtttttagtttgagaagctggaaagagagagaagggcctcacag

SEQ ID NO: 683711 - DNA, 120 bp, Artificial Sequence
  ENSG00000187189_23 (sequence is synthesized)
tgatgggttcaggacgggtcaaaggcaaaggcctttgtgatgtgagcaaaggcaaccaaaacttagcctcactccacttttctaaagatggaaattcttttttgggccttggactgcttc

SEQ ID NO: 683712 - DNA, 120 bp, Artificial Sequence
  ENSG00000187189_24 (sequence is synthesized)
tagggtagcattttgtaggtcactcttctcctttgtactattttgtttctgccctgatgtcccttgggtctccatcctactgcctggctttcttggccctcatttctcagcttctgcatt

SEQ ID NO: 683713 - DNA, 120 bp, Artificial Sequence
  ENSG00000187189_25 (sequence is synthesized)
tccttccctgctcctaacaaatgaagaagcaggctgcagcctgcattgtggaagatctccagcctccttgtaggggataaggggatgtgcagcatctgtgtggattttcacggacaagtt

SEQ ID NO: 683714 - DNA, 120 bp, Artificial Sequence
  ENSG00000187189_26 (sequence is synthesized)
ccagtaggtgggacagtgatgccgtcaaggcttagttatgatcatgtgtggtgataaagaccatccaccatcacccttttcccctttggttttgaaggccttgccctaagctacctgagg

SEQ ID NO: 683715 - DNA, 120 bp, Artificial Sequence
  ENSG00000187189_27 (sequence is synthesized)
gtttaggaggtctgaacacacacagtggagaggttaatctaggttgggaaactgagtaaaagtccagagcaggaatgagcctgctgtggcgtgggtttggaaaggctcacaggaaagaac

SEQ ID NO: 683716 - DNA, 120 bp, Artificial Sequence
  ENSG00000187189_28 (sequence is synthesized)
ctgcaggatcaggggtgggaggggaggcccctgaggtgctctccagggaagaggggctggggtttaaatagcatgcttggaggaagattttccttcaatttttcctaagtccttgaattc

SEQ ID NO: 683717 - DNA, 120 bp, Artificial Sequence
  ENSG00000187189_29 (sequence is synthesized)
accagtagatttttgtaaacaaaatgtaagtcgatgttttctctcaattatcctaggagtgacctttatatgtgtggaagattaatggtatatgctccttatgtcactgtttttgagtaa

SEQ ID NO: 683718 - DNA, 120 bp, Artificial Sequence
  ENSG00000187189_30 (sequence is synthesized)
aatccatttcctttctctgtttcagcctatgacaaaattgatgtttacaggcctgctttttgcttataattgacaacatgtgcaaaaataccaaatttgtgtcctgtgcagtatgaagaa

SEQ ID NO: 683719 - DNA, 120 bp, Artificial Sequence
  ENSG00000187189_31 (sequence is synthesized)
ttcagtgaatattcattaatgtattagcttgttttgctctctgttcatatatggctctattcttagaaatataatttgaatgtgatctttcaatagtctgaatattttacaaattatagc

SEQ ID NO: 683720 - DNA, 120 bp, Artificial Sequence
  ENSG00000187189_32 (sequence is synthesized)
tatgtcttgtgaaaataacctcaaaaagaaaaatacgactctgttgtcttacttgatatttcttgccctagtaatgtacttgacatttatgttcctaagcagtgtaagtaccagtagaat

SEQ ID NO: 683721 - DNA, 120 bp, Artificial Sequence
  ENSG00000187189_33 (sequence is synthesized)
ttctctgtcaaactcaatgatcatttagtacttttgtcttctcccatgtgcttgaaggaaaaataaagtgtcactaccgtatttcttgttttcatcaaaaaataaaaataatttaaaaaa

SEQ ID NO: 683722 - DNA, 120 bp, Artificial Sequence
  ENSG00000187191_0 (sequence is synthesized)
gctgccacccattggctcaggccgataccacgcgccccgatacccggcacaggagccacctcccagagccccgcagtccatgcctcagtcggcctgcgctcctcagcctggcggttctac

SEQ ID NO: 683723 - DNA, 120 bp, Artificial Sequence
  ENSG00000187191_1 (sequence is synthesized)
ctccgagggttcgcccgcccttggttttccttacaccttagcctttggctcctttgaccactcgaagccccacagcgtgttccagcggacttcaccagcagacccagaagtggtgggtga

SEQ ID NO: 683724 - DNA, 120 bp, Artificial Sequence
  ENSG00000187191_2 (sequence is synthesized)
aacactgcctctgttcctccttgagcctgtcgggagctgctgcctgccaccaccatgtctgctgcaaatcctgagactccaaactcaaccatctccagagaggccagcacccagtcttca

SEQ ID NO: 683725 - DNA, 120 bp, Artificial Sequence
  ENSG00000187191_3 (sequence is synthesized)
tcagctgcagctagccaaggctgggtgttaccagaaggcaaaatcgtgccaaacactgtttttgttggtggaattgatgctaggatggatgaaactgagattggaagctgctttggtaga

SEQ ID NO: 683726 - DNA, 120 bp, Artificial Sequence
  ENSG00000187191_4 (sequence is synthesized)
tacggttcagtgaaagaagtgaagataatcacgaatcgaactggtgtgtccaaaggctatggatttgtttcgtttgttaatgacgtggatgtccagaagatagtaggatcacagatacat

SEQ ID NO: 683727 - DNA, 120 bp, Artificial Sequence
  ENSG00000187191_5 (sequence is synthesized)
ctgcaatcaggaaacaaaagttatgtgctcgtcatgtgcagccacgtcctttggtagttaatcctcctcctccaccacagtttcagaacgtctggcggaatccaaacactgaaacctacc

SEQ ID NO: 683728 - DNA, 120 bp, Artificial Sequence
  ENSG00000187191_6 (sequence is synthesized)
tggcggaatccaaacactgaaacctacctgcagccccaaatcacgccgaatcctgtaactcagcacgttcaggcttactctgcttatccacattcaccaggtcaggtcatcactggatgt

SEQ ID NO: 683729 - DNA, 88 bp, Artificial Sequence
  ENSG00000187191_7 (sequence is synthesized)
tgcttatccacattcaccaggtcaggtcatcactggatgtcagttgcttgtatataattatcaggaatatcctacttatcccgattca

SEQ ID NO: 683730 - DNA, 120 bp, Artificial Sequence
  ENSG00000187191_8 (sequence is synthesized)
tgcttatccaaattcagcagttcaggtcaccactggatatcagttccatgtatacaattaccagatgccaccgcagtgccctgttggggagcaaaggagaaatctgtggaccgaagcata

SEQ ID NO: 683731 - DNA, 120 bp, Artificial Sequence
  ENSG00000187191_9 (sequence is synthesized)
gaagcatacaaatggtggtatcttgtctgtttaatccagagaagagactgataaattccgttgttactcaagatgactgcttcaagggtaaaagagtgcatcgctttagaagaagtttgg

SEQ ID NO: 683732 - DNA, 120 bp, Artificial Sequence
  ENSG00000187191_10 (sequence is synthesized)
tctcagctatctagtttcatgggaagttgctggttttgaatattaagctaaaagttttccactattacagaaattctgaattttggtaaatcacactgaaactttctgtataacttgtat

SEQ ID NO: 683733 - DNA, 120 bp, Artificial Sequence
  ENSG00000187191_11 (sequence is synthesized)
tattagactctctagttttatcttaacactgaaactgttcttcattagatgtttatttagaacctggttctgtgtttaatatatagtttaaagtaacaaataatcgagactgaaagaatg

SEQ ID NO: 683734 - DNA, 120 bp, Artificial Sequence
  ENSG00000187191_12 (sequence is synthesized)
ttaagatttatctgcaaggatttttaaaaaattgaaacttgcattttaagtgtttaaaagcaaatactgactttcaaaaaagtttttaaaacctgatttgaaagctaacaattttgatag

SEQ ID NO: 683735 - DNA, 120 bp, Artificial Sequence
  ENSG00000187191_13 (sequence is synthesized)
tctgaacacaagcatttcacttctccaagaagtacctgtgaacagtacaatatttcagtattgagctttgcatttatgatttatctagaaatttacctcaaaagcagaatttttaaaact

SEQ ID NO: 683736 - DNA, 120 bp, Artificial Sequence
  ENSG00000187191_14 (sequence is synthesized)
gcatttttaatcagtggaactcaatgtatagttagctttattgaagtcttatccaaacccagtaaaacagattctaagcaaacagtccaatcagtgagtcataatgtttattcaaagtat

SEQ ID NO: 683737 - DNA, 120 bp, Artificial Sequence
  ENSG00000187191_15 (sequence is synthesized)
tttatcttttatctagaatccacatatgtatgtccaatttgattgggatagtagttaggataactaaaattctgggcctaattttttaaagaatccaagacaaactaaactttactgggt

SEQ ID NO: 683738 - DNA, 120 bp, Artificial Sequence
  ENSG00000187191_16 (sequence is synthesized)
atataaccttctcaatgagttaccattcttttttataaaaaaaattgttccttgaaatgctaaacttaatggctgtatgtgaaatttgcaaaatactggtattaaagaacgctgcagctt

SEQ ID NO: 683739 - DNA, 120 bp, Artificial Sequence
  ENSG00000187191_17 (sequence is synthesized)
ttttatgtcactcaaaggttaatcggagtatctgaaaggaattgtttttataaaaacattgaagtattagttacttgctataaatagatttttatttttgttttttagcctgttatattt

SEQ ID NO: 683740 - DNA, 120 bp, Artificial Sequence
  ENSG00000187191_18 (sequence is synthesized)
ccttctgtaaaataaaatatgtccagaagaggcatgttgtttctagattaggtagtgtcctcattttatattgtgaccacacagctagagcaccagagcccttttgctatactcacagtc

SEQ ID NO: 683741 - DNA, 120 bp, Artificial Sequence
  ENSG00000187191_19 (sequence is synthesized)
ttgttttcccagcctcttttactagtctttcaggaggtttgctcttagaactggtgatgtaaagaatggaagtagctgtatgagcagttcaaaggccaagccgtggaatggtagcaatgg

SEQ ID NO: 683742 - DNA, 120 bp, Artificial Sequence
  ENSG00000187191_20 (sequence is synthesized)
gatataatacctttctaagggaaacatttgtatcagtatcatttgatctgccatggacatgtgtttaaagtggctttctggcccttctttcaatggcttcttccctaaaacgtggagact

SEQ ID NO: 683743 - DNA, 120 bp, Artificial Sequence
  ENSG00000187191_21 (sequence is synthesized)
ctaagttaatgtcgttactatgggccatattactaatgcccactggggtctatgatttctcaaaattttcattcggaatccgaaggatacagtctttaaactttagaattcccaagaagg

SEQ ID NO: 683744 - DNA, 120 bp, Artificial Sequence
  ENSG00000187191_22 (sequence is synthesized)
ctttattacacctcagaaattgaaagcaccatgactttgtccattaaaaaattatccatagtttttttagtgcttttaacattccgacatacatcattctgtgattaaatctccagattt

SEQ ID NO: 683745 - DNA, 120 bp, Artificial Sequence
  ENSG00000187191_23 (sequence is synthesized)
ctgtaaatgatacctacattctaaagagttaattctaattattccgatatgaccttaaggaaaagtaaaggaataaatttttgtctttgttgaagtatttaatagagtaaggtaaagaag

SEQ ID NO: 683746 - DNA, 120 bp, Artificial Sequence
  ENSG00000187191_24 (sequence is synthesized)
atattaagtccctttcaaaatggaaaattaattctaaactgagaaaaatgttcctactacctattgctgatactgtctttgcataaatgaataaaaataaactttttttcttcaaatgtg

SEQ ID NO: 683747 - DNA, 120 bp, Artificial Sequence
  ENSG00000187193_0 (sequence is synthesized)
accacgcttttcatctgtcccgctgcgtgttttcctcttgatcgggaactcctgcttctccttgcctcgaaatggaccccaactgctcctgctcgcctgttggctcctgtgcctgtgccg

SEQ ID NO: 683748 - DNA, 120 bp, Artificial Sequence
  ENSG00000187193_1 (sequence is synthesized)
agctgctgctcctgctgccctgtgggctgtgccaagtgtgcccagggctgcatctgcaaagggacgtcagacaagtgcagctgctgtgcctgatgccaggacagctgtgctctcagatgt

SEQ ID NO: 683749 - DNA, 120 bp, Artificial Sequence
  ENSG00000187193_2 (sequence is synthesized)
aaatagagcaacctatataaacctggattttttttttttttttttttgtacaaccctgacccgtttgctacatctttttttctatgaaatatgtgaatggcaataaattcatctagacta

SEQ ID NO: 683750 - DNA, 120 bp, Artificial Sequence
  ENSG00000187193_3 (sequence is synthesized)
accacgcttttcatctgtcccgctgcgtgttttcctcttgatcgggaactcctgcttctccttgcctcgaaatggaccccaactgctcctgctcgcctggtaagggacacctagctccgc

SEQ ID NO: 683751 - DNA, 120 bp, Artificial Sequence
  ENSG00000187193_4 (sequence is synthesized)
gccttgggatgcccgtttcccagccacagtacagactcttcctgggtttgaagaagtcgcatttaaagttctgagctgaaggggctcctttatttcgttaggtgctttcttcccgatcac

SEQ ID NO: 683752 - DNA, 120 bp, Artificial Sequence
  ENSG00000187193_5 (sequence is synthesized)
gtccctgagaccacttctcgcctccctgtgcctctaagttagagttgagggtactgaggcccaaggctgtcctgctccatgtcacccagttggtcagggggctgctggctgagccccaat

SEQ ID NO: 683753 - DNA, 120 bp, Artificial Sequence
  ENSG00000187193_6 (sequence is synthesized)
gctctgaccaggctctgagcagtcagggtggatgggaagtggggggccattgcctcttcggagttcaggacagaaggttctggcctcctgtcttagccttcctgggctgtgtctggagcc

SEQ ID NO: 683754 - DNA, 120 bp, Artificial Sequence
  ENSG00000187193_7 (sequence is synthesized)
tgggaccttgcttgtggggtaaaagcaacagaacacttgcccttcccaaaatgaagggagaggagatggggcttctcttcctctcccctgagtgggaaaggagctctgggggctggtcct

SEQ ID NO: 683755 - DNA, 120 bp, Artificial Sequence
  ENSG00000187193_8 (sequence is synthesized)
tcagcacagaggaggggtcactgaagcgttattgaccagctgctgtaccttctgcatctcactccacgctcactgcctttttctcttccttgcagttggctcctgtgcctgtgccggctc

SEQ ID NO: 683756 - DNA, 120 bp, Artificial Sequence
  ENSG00000187193_9 (sequence is synthesized)
ctgcaaatgcaaagagtgcaaatgcacctcctgcaagaagagtgagtgcagggccttccctgcgaatctgggggatgggccaagttagagcagggaacccagagctctgcaggcaggggc

SEQ ID NO: 683757 - DNA, 120 bp, Artificial Sequence
  ENSG00000187193_10 (sequence is synthesized)
gaatcagacctcaaattgccttaaaaatgggtgagtcccagcctcttattaccaaactagaaactgaggcccagagaggttaccagatagtgttgggaacaaagctggaatgtgaaccta

SEQ ID NO: 683758 - DNA, 120 bp, Artificial Sequence
  ENSG00000187193_11 (sequence is synthesized)
ggtctcctgcctcctgatgcagccttcttcacccttctgggtcctgaagcacttaaggcccaggatctggaagaccccgggtgatttcaaacctaatgatccagtcctttcctgcagggg

SEQ ID NO: 683759 - DNA, 120 bp, Artificial Sequence
  ENSG00000187193_12 (sequence is synthesized)
tagcccagagcttccctagccttccccagaactgctgtgtcagggatttgccccctgtccggctgtgaagactttcctcatttaagggtaggttttggggaactggcctccttttgttcc

SEQ ID NO: 683760 - DNA, 120 bp, Artificial Sequence
  ENSG00000187193_13 (sequence is synthesized)
tgtacccccaatcactacctgtccagtcttctgtcctgtcccagactcaggtggggctgggcagctttttcatataaaaccctcatcccaaagatctaccagttctcttctgacaaagcc

SEQ ID NO: 683761 - DNA, 120 bp, Artificial Sequence
  ENSG00000187193_14 (sequence is synthesized)
atgccatcctgaaatgatggtcctctggggctggaggcagggctcgagccaggcctctgttggggcagggaggtgcctgattgagtctgctctgacctctcactctccccttcttctcca

SEQ ID NO: 683762 - DNA, 120 bp, Artificial Sequence
  ENSG00000187210_0 (sequence is synthesized)
acgctggtgtgagggctgcaggcgcagctccggagcgcctagagcgcggcgcggggcgggagcttggtggagcaggagcggctgggcatcctcctgagactccggggtcagacgcccact

SEQ ID NO: 683763 - DNA, 120 bp, Artificial Sequence
  ENSG00000187210_1 (sequence is synthesized)
ccagcgctttctgcgcagcacaggcaccctcgcctgtcacgcctccctctcctcttcccgtctcccagcgtggatgagggcgcctgcagatcccggctagggcacggaccgcctaggccg

SEQ ID NO: 683764 - DNA, 120 bp, Artificial Sequence
  ENSG00000187210_2 (sequence is synthesized)
agatttctttaaagactcgtgcagcacatcattatcgctggatgcccggacatgtaatacacctgacagcatgtgaagtgctcagaatggggcaggatgtcacctggaatcagcactaag

SEQ ID NO: 683765 - DNA, 120 bp, Artificial Sequence
  ENSG00000187210_3 (sequence is synthesized)
tgattcagactttccttacttttaaatgtgctgctcttcatttcaagatgccgttgcagctctgataaatgcaaactgacaaccttcaaggccacgacggagggaaaatcattggtgctt

SEQ ID NO: 683766 - DNA, 120 bp, Artificial Sequence
  ENSG00000187210_4 (sequence is synthesized)
ggagcatagaagactgcccttcacaaaggaaatccctgattattgtttgaaatgctgaggacgttgctgcgaaggagacttttttcttatcccaccaaatactactttatggttcttgtt

SEQ ID NO: 683767 - DNA, 120 bp, Artificial Sequence
  ENSG00000187210_5 (sequence is synthesized)
ttatccctaatcaccttctccgttttaaggattcatcaaaagcctgaatttgtaagtgtcagacacttggagcttgctggggagaatcctagtagtgatattaattgcaccaaagtttta

SEQ ID NO: 683768 - DNA, 120 bp, Artificial Sequence
  ENSG00000187210_6 (sequence is synthesized)
cagggtgatgtaaatgaaatccaaaaggtaaagcttgagatcctaacagtgaaatttaaaaagcgccctcggtggacacctgacgactatataaacatgaccagtgactgttcttctttc

SEQ ID NO: 683769 - DNA, 120 bp, Artificial Sequence
  ENSG00000187210_7 (sequence is synthesized)
atcaagagacgcaaatatattgtagaaccccttagtaaagaagaggcggagtttccaatagcatattctatagtggttcatcacaagattgaaatgcttgacaggctgctgagggccatc

SEQ ID NO: 683770 - DNA, 120 bp, Artificial Sequence
  ENSG00000187210_8 (sequence is synthesized)
tatatgcctcagaatttctattgcattcatgtggacacaaaatccgaggattcctatttagctgcagtgatgggcatcgcttcctgttttagtaatgtctttgtggccagccgattggag

SEQ ID NO: 683771 - DNA, 120 bp, Artificial Sequence
  ENSG00000187210_9 (sequence is synthesized)
agtgtggtttatgcatcgtggagccgggttcaggctgacctcaactgcatgaaggatctctatgcaatgagtgcaaactggaagtacttgataaatctttgtggtatggattttcccatt

SEQ ID NO: 683772 - DNA, 120 bp, Artificial Sequence
  ENSG00000187210_10 (sequence is synthesized)
aaaaccaacctagaaattgtcaggaagctcaagttgttaatgggagaaaacaacctggaaacggagaggatgccatcccataaagaagaaaggtggaagaagcggtatgaggtcgttaat

SEQ ID NO: 683773 - DNA, 120 bp, Artificial Sequence
  ENSG00000187210_11 (sequence is synthesized)
ggaaagctgacaaacacagggactgtcaaaatgcttcctccactcgaaacacctctcttttctggcagtgcctacttcgtggtcagtagggagtatgtggggtatgtactacagaatgaa

SEQ ID NO: 683774 - DNA, 120 bp, Artificial Sequence
  ENSG00000187210_12 (sequence is synthesized)
aaaatccaaaagttgatggagtgggcacaagacacatacagccctgatgagtatctctgggccaccatccaaaggattcctgaagtcccgggctcactccctgccagccataagtatgat

SEQ ID NO: 683775 - DNA, 120 bp, Artificial Sequence
  ENSG00000187210_13 (sequence is synthesized)
ctgtctgacatgcaagcagttgccaggtttgtcaagtggcagtactttgagggtgatgtttccaagggtgctccctacccgccctgcgatggagtccatgtgcgctcagtgtgcattttc

SEQ ID NO: 683776 - DNA, 120 bp, Artificial Sequence
  ENSG00000187210_14 (sequence is synthesized)
ggagctggtgacttgaactggatgctgcgcaaacaccacttgtttgccaataagtttgacgtggatgttgacctctttgccatccagtgtttggatgagcatttgagacacaaagctttg

SEQ ID NO: 683777 - DNA, 120 bp, Artificial Sequence
  ENSG00000187210_15 (sequence is synthesized)
gagacattaaaacactgaccattacgggcaattttatgaacaagaagaaggatacacaaaacgtacccttatctgtttccccttccttgtcagcatcgggaagatggtatgaagtcctct

SEQ ID NO: 683778 - DNA, 120 bp, Artificial Sequence
  ENSG00000187210_16 (sequence is synthesized)
ttggggcagggactctagtagatcttcttgtcagagaagctgcatggtttctgcagagcacagttagctagaaaggtgatagcattaaatgttcatctagagttaatagtgggaggagta

SEQ ID NO: 683779 - DNA, 120 bp, Artificial Sequence
  ENSG00000187210_17 (sequence is synthesized)
aaggtagccttgaggccagagcaggtagcaaggcattgtggaaagaggggaccagggtggctggggaagaggccgatgcataaagtcagcctgttcaaagtgctcagggacttagcaaaa

SEQ ID NO: 683780 - DNA, 120 bp, Artificial Sequence
  ENSG00000187210_18 (sequence is synthesized)
tgagaagatgtgacctgtgccaaaactattttgagaattttaaatgtgaccatttttctggtatgaataaacttacagcaacaaataatcaaagatacaattaatctgatattatatttg

SEQ ID NO: 683781 - DNA, 120 bp, Artificial Sequence
  ENSG00000187210_19 (sequence is synthesized)
ttgaaatagaaatttgattgtactataaatgatttttgtaaataatttatattctgctctaatactgtactgtgtagtgtgtctccgtatgtcatctcagggagcttaaaatgggcttga

SEQ ID NO: 683782 - DNA, 120 bp, Artificial Sequence
  ENSG00000187210_20 (sequence is synthesized)
tttaacattgtttttgtgttatttttgcttgaaacaacgcacacattttcaacaaccaaaaaatgacaatttctagtttagttaatttctacaaatcatcttatgttattagcaaggtta

SEQ ID NO: 683783 - DNA, 120 bp, Artificial Sequence
  ENSG00000187210_21 (sequence is synthesized)
agacatcttttttaaaaaaattatagcttctaccaagagaaacactcaatttttctagagatttgcctctatcttcctttcctcagtcttcccagactgctatcaagctgtgtaaaaatt

SEQ ID NO: 683784 - DNA, 120 bp, Artificial Sequence
  ENSG00000187210_22 (sequence is synthesized)
tactttcactggaccctaaattattgtctctgctatctgactgccagtaattagtgcagaaaactaagacaggatgatacaggtttgaggggctggggagtgggaggggggagaaaagga

SEQ ID NO: 683785 - DNA, 120 bp, Artificial Sequence
  ENSG00000187210_23 (sequence is synthesized)
cattgacaccatccccaaaattaaggctgtcgcttattgaatccacttgtgtccaacctcccaggattgttttatcctaatgtcacctgtatattcatttgaaaggacttggccctgttc

SEQ ID NO: 683786 - DNA, 120 bp, Artificial Sequence
  ENSG00000187210_24 (sequence is synthesized)
ttgggtcttcccgttacctgccccctgggtggtaagtttcctcctttctcaaccttccacgaggaggaaagaagtgtgcagtcattccacatggcctgttggaaggcctggggagggaac

SEQ ID NO: 683787 - DNA, 120 bp, Artificial Sequence
  ENSG00000187210_25 (sequence is synthesized)
tttgggtttgggacagatttttttttttgtttttggtatcattcacagcatacgatttttactctctccatcttcaccataagacagataatttggggttgctataatgctgtcacacat

SEQ ID NO: 683788 - DNA, 120 bp, Artificial Sequence
  ENSG00000187210_26 (sequence is synthesized)
ctcaaagtacattcaaatcttaaaaagaaattctcgtacttttgccatgttgatactgttcagcaaacaagctaccaggaactgtgaggctttgtcatttagcattagactttaaacaag

SEQ ID NO: 683789 - DNA, 120 bp, Artificial Sequence
  ENSG00000187210_27 (sequence is synthesized)
aattaaaatcatgtgctgtatttttaaaatctagccaaattaaatagtacatgagaaattcagagtattagacagttttaaggcattcaactgagaaaactttatttgtcaaagtcagaa

SEQ ID NO: 683790 - DNA, 120 bp, Artificial Sequence
  ENSG00000187210_28 (sequence is synthesized)
aacattttcatcttattgagagatatgtttttaaacttttatcatcatttgtaaatgtggaagttggtggattgctgtgtttttgcatgattagcatgggagtctgttggagcaagagga

SEQ ID NO: 683791 - DNA, 120 bp, Artificial Sequence
  ENSG00000187210_29 (sequence is synthesized)
acatgcttgttttgaaaactcgagatgatgagggtggtacatgcagtgtgttctctctttattggcttctaaaccagttttgtcctttaatgcatgtcaaatatttctcccatgcttctc

SEQ ID NO: 683792 - DNA, 120 bp, Artificial Sequence
  ENSG00000187210_30 (sequence is synthesized)
ttagcagaaaagtttttacctataagacagggcaccttttaactctaaaactagtgatactcagtgacatagactttgtcttataaacattttttcattttttattttgaaaaattgcaa

SEQ ID NO: 683793 - DNA, 120 bp, Artificial Sequence
  ENSG00000187210_31 (sequence is synthesized)
atctacagcaaaagtaaaacagtagagtgaacaccatgtaaccctcacctggtgttaacattgtaccctatttgctttaagttgtatgtatttctgaacttggcaaaattggaaattaaa

SEQ ID NO: 683794 - DNA, 120 bp, Artificial Sequence
  ENSG00000187210_32 (sequence is synthesized)
atttttaaaaattacaaatatacaaagttatttatcttagcacatttattatgtgtgactgcatctgatttatatttaaattggcaggttttgagggatttttttcttcatcataaatgt

SEQ ID NO: 683795 - DNA, 120 bp, Artificial Sequence
  ENSG00000187210_33 (sequence is synthesized)
aaacataggattttagagtctatttccccaagcgccacattataactgtaaacttaccatcttctatgtagctgtgatatctcatctttctaaaatggaacttgttaaaaagtgttcaaa

SEQ ID NO: 683796 - DNA, 120 bp, Artificial Sequence
  ENSG00000187210_34 (sequence is synthesized)
cactatccctaatgcctgcggcagaatttatatacgatccattcattggggctcaaagtatcttttagacttttaaggacaatttacagcaaatgaaatttatgatgctgtgacaagaaa

SEQ ID NO: 683797 - DNA, 120 bp, Artificial Sequence
  ENSG00000187210_35 (sequence is synthesized)
tttaaagaatcaaaacgatggtttgaaaaggaaacctatgatacatgcaggagaagcaaaacccaagtgattggtgagaaatatagaaattatttaaattactttatagtaattattaaa

SEQ ID NO: 683798 - DNA, 120 bp, Artificial Sequence
  ENSG00000187210_36 (sequence is synthesized)
tatagtaattattaaacactaatttttgtactgtcattgaaggtgttttatagagaaatctgagaaatcacattcacaaattagaagtcaaacatggccaggcacagtggctcacacctg

SEQ ID NO: 683799 - DNA, 120 bp, Artificial Sequence
  ENSG00000187210_37 (sequence is synthesized)
cctgtaatcttcaggatttcaagaccagcctagccaacatgacgaaaccccatctctactgaaaatagaaaaaaaaaattagccaggcttgcacctgtaatcccagttacctgggaggct

SEQ ID NO: 683800 - DNA, 120 bp, Artificial Sequence
  ENSG00000187210_38 (sequence is synthesized)
ggcggaggttgcagtgagctgagatgccaccaccacaccagcctgggtgacagagtgaaactcgtatctccaaacaaacaaacaaaaagtccttaaacatatgtgaacaaaaattttgtg

SEQ ID NO: 683801 - DNA, 120 bp, Artificial Sequence
  ENSG00000187210_39 (sequence is synthesized)
attttgtgatggaaggattctagttaatgagtattgcatcaagatttacatctttcttactaaggaaaagagttaataaaaattgttctttattttacaggcagttactgaggctcttcc

SEQ ID NO: 683802 - DNA, 120 bp, Artificial Sequence
  ENSG00000187210_40 (sequence is synthesized)
cagatctcagtaaacagccactcagccttgaaaatggagtgttgttgtttctaaacatatatttatgtcatttattaagtacagttcacttaaataacataagtagattttctcttgtag

SEQ ID NO: 683803 - DNA, 120 bp, Artificial Sequence
  ENSG00000187210_41 (sequence is synthesized)
tgatttgggtaggaagaggccatgtttcagttcgttttctctgtagggtcgattgaattggaccttttcagttgttcagaaaaataaaaataatttctcatattaaatacagacgctcct

SEQ ID NO: 683804 - DNA, 120 bp, Artificial Sequence
  ENSG00000187210_42 (sequence is synthesized)
caacttatgatgtgggtaggtcccagtaaacccattataatttgaaaatatcacattgaaaatgcatttaatatctcttacctgaaatcataacttagccaagcctaccttaaatgttct

SEQ ID NO: 683805 - DNA, 120 bp, Artificial Sequence
  ENSG00000187210_43 (sequence is synthesized)
cagaacatttagcctgcagttgggcaaaaccatttaacacaaagcctattttataatgaagtgttgaatagctcatgttatttactgaatactgttgtgaaagtgaaaaacaatgattgt

SEQ ID NO: 683806 - DNA, 120 bp, Artificial Sequence
  ENSG00000187210_44 (sequence is synthesized)
atgggtactcaaagtataatttctactgaatgcatatcacttgtgcactgttgtaaagctgaaaaaccgttaagcctctacgatttttaagtaagttggggaccatcagtttaaaataaa

SEQ ID NO: 683807 - DNA, 120 bp, Artificial Sequence
  ENSG00000187210_45 (sequence is synthesized)
tgcaatactatttcatgataaacatggtcactgtaagttttactcttttgaatgagggtgcgacagaatgcagttagaatcagttcatatcaccattaaaatcatccattcagaaaccaa

SEQ ID NO: 683808 - DNA, 120 bp, Artificial Sequence
  ENSG00000187210_46 (sequence is synthesized)
acagaccataggtgaactgttaaggagggagaagccgcagtgtcaccttccacagtcctgctcccattaagacctatgaagtggaaaatgcagattattctttgaggtttcctgggacca

SEQ ID NO: 683809 - DNA, 120 bp, Artificial Sequence
  ENSG00000187210_47 (sequence is synthesized)
gaaaaggtcagagactcttaatgggtaatgcagacaactggaatgcaatcatcaggtattcatttctgttttaaggttttatgtctgagaaacctgaaacctgaagaagtaaagcaatca

SEQ ID NO: 683810 - DNA, 120 bp, Artificial Sequence
  ENSG00000187210_48 (sequence is synthesized)
tgattttttaaaaacttaataatatggttttggatttaaaaagaaagactgactcagagctggggaaaacactcacttgtgatacggatcaatgtgaaaacagcttaactctgttccatg

SEQ ID NO: 683811 - DNA, 120 bp, Artificial Sequence
  ENSG00000187210_49 (sequence is synthesized)
gcaattcgcacagtgtgactcagagacacctctcttcaccagctctggctcaggggatgtgaagccagaagcagaggtcacagtgacttcatctgagaaggacttaactgaccattgctg

SEQ ID NO: 683812 - DNA, 120 bp, Artificial Sequence
  ENSG00000187210_50 (sequence is synthesized)
gttttgaagccggaggaaggcccacagtcaatgaatgagagaggcttcgagaagctagaaatggcaaggaaatagattttcctctaaagctcccagaaagaaacacggttctgctgacac

SEQ ID NO: 683813 - DNA, 120 bp, Artificial Sequence
  ENSG00000187210_51 (sequence is synthesized)
ctcccaagtaactgggaccacaggcagatgccaccatgcccagtgactccgttcacatgctcccgtcttgtcatcaagccctgttcatctctcaccatctctcacctggaccattgccag

SEQ ID NO: 683814 - DNA, 120 bp, Artificial Sequence
  ENSG00000187210_52 (sequence is synthesized)
tttctgagctgcctgctcttgaataccagcttcctgaaaatatcaccaaaacgatctggtcctcagacaaagcagagtctattgctcactgcagtaacagagagctccgtcttcagagtc

SEQ ID NO: 683815 - DNA, 120 bp, Artificial Sequence
  ENSG00000187210_53 (sequence is synthesized)
ttggtaacatttcgctgagaggacaacccaatcacactgtttaggagattttggattctgactaaggtgcctggagcaaaaatgtgtccagaattggtgggttgttggtctcgctgacct

SEQ ID NO: 683816 - DNA, 120 bp, Artificial Sequence
  ENSG00000187210_54 (sequence is synthesized)
caagaacggagccgtggaccctcgcgggacaaggggagtcagaggcagaagagaaggtgttgtgatgacagaagcagagatctgagtgactcactttgaagatggaggaagaggtcacag

SEQ ID NO: 683817 - DNA, 120 bp, Artificial Sequence
  ENSG00000187210_55 (sequence is synthesized)
gccaagtgatacagatgccaggagaagctgaaaacaggaggaaatggattcttccctcagagcttctggaaaagatcagtcttgctgataacttgactttagcccactgaaactgatttt

SEQ ID NO: 683818 - DNA, 120 bp, Artificial Sequence
  ENSG00000187210_56 (sequence is synthesized)
ttgactttagcccactgaaactgattttgaacttttgacttccagaactacagggtctcattattgttgcccagactcatctcaaactcctggctcaaatgatcctcccacctcagcctc

SEQ ID NO: 683819 - DNA, 120 bp, Artificial Sequence
  ENSG00000187210_57 (sequence is synthesized)
caccatgtccagctttactaaataaatggtcacatatccatctctgagtctgtcactgggagaatgggatgcttttttggaccaggcctgacttacatacccatctgggacaataggact

SEQ ID NO: 683820 - DNA, 120 bp, Artificial Sequence
  ENSG00000187210_58 (sequence is synthesized)
ttctatggggacaacttcatctgtacatggacagagactgaagaatggagtactccagcactttcacagtcatttacggcatctgcagagcagtgaaaaatttgaattgcctgagataca

SEQ ID NO: 683821 - DNA, 120 bp, Artificial Sequence
  ENSG00000187210_59 (sequence is synthesized)
tgctccctgctgaagtcgcacaagctggccaatcctgctaatcctttaaaactcacctggagggaaggcctccttctgcaaagcctctcttgatgcagattatcagctttcactctctac

SEQ ID NO: 683822 - DNA, 120 bp, Artificial Sequence
  ENSG00000187210_60 (sequence is synthesized)
cagatggcaaggatattgctgttggctcataggatgtgaacagtggtgttgagattaccctcatttggctgatgatgtcattgaggcccagagaagattcatgctgagctcgactacctc

SEQ ID NO: 683823 - DNA, 120 bp, Artificial Sequence
  ENSG00000187210_61 (sequence is synthesized)
ctgctcttgttctccaatgaccactgtcctccaaagccggttgtcctcccgttcctcttcggccgtatattctggaatagactctgactcttggccagaatctttgttggctgtgggatc

SEQ ID NO: 683824 - DNA, 120 bp, Artificial Sequence
  ENSG00000187210_62 (sequence is synthesized)
ttctggaaacaaagcacagagcaaggctgaaggagcaagacctccacagtgcagctaaacagccaaatgagtctcccgcaagtcaggaaaactggataaaaagaggcctaaatgtgagca

SEQ ID NO: 683825 - DNA, 120 bp, Artificial Sequence
  ENSG00000187210_63 (sequence is synthesized)
agagctatcatgtttggcttcaagtatgtaagtccaatctggtaacagaccctttcccattcattgttagcatattcactgggaagcagcatgggccaggaactaagggcaacaatgagc

SEQ ID NO: 683826 - DNA, 120 bp, Artificial Sequence
  ENSG00000187210_64 (sequence is synthesized)
gagctgtgtgaccttaggcaaattacttaacttctctgtgcttcattgttctagttataaaatgaaataaattaaatgaaaactatataatgaattatataatataatgaggtatataat

SEQ ID NO: 683827 - DNA, 120 bp, Artificial Sequence
  ENSG00000187210_65 (sequence is synthesized)
aataaattatggcccaaatgtttttgaaaaactataccttaaaaacccctattttgtttagaatgtacattcctggttcaaaatggtcgcgtgagaaacctaagaaacaggctgctttca

SEQ ID NO: 683828 - DNA, 120 bp, Artificial Sequence
  ENSG00000187210_66 (sequence is synthesized)
agcatttatttcatacttcagaactcaaacatatttataatccaaccctcttatacagtcacttatccatgtcctcatgtttacaaaatatagctattcagaggcactttgtgttttcaa

SEQ ID NO: 683829 - DNA, 120 bp, Artificial Sequence
  ENSG00000187210_67 (sequence is synthesized)
agtttcaacctctgactatatatctttcatttgaaaattaaggtagatttaaaaattcaacttagtttacaattctgtcctttgcatttaagacctaaaacagggttgtggccattaaac

SEQ ID NO: 683830 - DNA, 120 bp, Artificial Sequence
  ENSG00000187210_68 (sequence is synthesized)
tggttctttcaacacagctatgttaactacattaaaagagccatgtcagcaagtggcagtgttaattaccagcttgcccagccaccactgctttgctcgacagttttactatgtttaaaa

SEQ ID NO: 683831 - DNA, 120 bp, Artificial Sequence
  ENSG00000187210_69 (sequence is synthesized)
ataaaaggttcagatgtggtgtgacaaagctctcctgacaaaaaggaagcaaatacggaggcaagagaggggccagttgggtcatgccacagtcttctgtgggattttgtcaatatatta

SEQ ID NO: 683832 - DNA, 120 bp, Artificial Sequence
  ENSG00000187210_70 (sequence is synthesized)
gcaggaaaggagcaggagctggtaggggcaactgggatggatagaggagctgctgaagactctctgggatgacaggaaatagtacaaattccagaccttctttcacctcctatttgtgta

SEQ ID NO: 683833 - DNA, 120 bp, Artificial Sequence
  ENSG00000187210_71 (sequence is synthesized)
acctcctatttgtgtatttcaacctacagaatcaactacccagataactacagaaattcacacatgataaaaatgcaatataaaatctctacttacactaaagaacttactcatgtaacc

SEQ ID NO: 683834 - DNA, 120 bp, Artificial Sequence
  ENSG00000187223_0 (sequence is synthesized)
atctgctctgactccccagggacgtgtctgtgcttttgcatgtgaccagggttgactaaactcctgccaggatgtcttgccagcaaaaccagcagcagtgccagccccctcccaaatgtc

SEQ ID NO: 683835 - DNA, 120 bp, Artificial Sequence
  ENSG00000187223_1 (sequence is synthesized)
ctcccaagtgtaccccaaaatgtccacctaagtgtccccccaaatgcccaccacagtgcccagctccatgttcccctgcagtctcttcctgctgtggtcccagctctgggagctgctgtg

SEQ ID NO: 683836 - DNA, 120 bp, Artificial Sequence
  ENSG00000187223_2 (sequence is synthesized)
ctctgggggtggtggctgctgcctgagccaccacaggccccgtctcttccaccggcgccggcaccagagccccgattgctgtgagagtgaaccttctggggcctctggctgctgccacag

SEQ ID NO: 683837 - DNA, 120 bp, Artificial Sequence
  ENSG00000187223_3 (sequence is synthesized)
ctctgggggctgctgctgacctgggctgcagaagagctctggtactgaatggtcaaaaacctgctacagcctgatgcttaactatttccccttcctttcattccactcatgggtggacag

SEQ ID NO: 683838 - DNA, 120 bp, Artificial Sequence
  ENSG00000187223_4 (sequence is synthesized)
ggaccacaaagactcatggggcttccccagaactttgtgcttgatggagcaccccagatggaagccttctttttctcctttacctcatattgtaataaagctctgatttctgactcttta

SEQ ID NO: 683839 - DNA, 80 bp, Artificial Sequence
  ENSG00000187231_0 (sequence is synthesized)
cttcctccttcccgcgccgggcgggttgctgtaccgccgtcacccgggcgcgcgcggggtcgcgcggacgcggctcgggc

SEQ ID NO: 683840 - DNA, 80 bp, Artificial Sequence
  ENSG00000187231_1 (sequence is synthesized)
tccccgcctgacgcacggaggggccgggacgcgatttgccgcgagtgactggagccgcagccgtcgccgctgctgccgcc

SEQ ID NO: 683841 - DNA, 120 bp, Artificial Sequence
  ENSG00000187231_2 (sequence is synthesized)
gccgcgccctccgcctccgcccgcacctcgctagcgttcccctgtcttccccaacgccccggagccgccggccgctagcgtcagcgccagccagaattaaggaagttcactggagtaaaa

SEQ ID NO: 683842 - DNA, 120 bp, Artificial Sequence
  ENSG00000187231_3 (sequence is synthesized)
tggaggcctcagtaatattacccattctgaagaaaaaactagccttcctttcaggaggaaaagacagacggagtggcctcattttgacaattccattatgcctcgaacagacaaatatgg

SEQ ID NO: 683843 - DNA, 120 bp, Artificial Sequence
  ENSG00000187231_4 (sequence is synthesized)
atgagctgagtgtcaccttagactacctactcagcattccaagtgagaagtgtaaggctagaggatttaccgtgattgtggatggcagaaaatcacagtggaatgtggtgaaaacagtag

SEQ ID NO: 683844 - DNA, 120 bp, Artificial Sequence
  ENSG00000187231_5 (sequence is synthesized)
tcgtaatgctacagaatgttgttccagctgaggtgtcccttgtttgtgtggtaaagccagatgaattctgggataagaaagtaacgcatttttgtttttggaaggagaaggatagacttg

SEQ ID NO: 683845 - DNA, 120 bp, Artificial Sequence
  ENSG00000187231_6 (sequence is synthesized)
gctttgaggttattttagtgtccgccaacaaattgactcgttatatagaaccatgccaattaacagaagattttggtgggagtctcacctatgatcacatggactggttaaataagaggc

SEQ ID NO: 683846 - DNA, 120 bp, Artificial Sequence
  ENSG00000187231_7 (sequence is synthesized)
tggtttttgagaagtttacaaaggaatctacatcattattagatgaacttgctttgattaacaatggaagtgataaaggaaatcagcaagagaaagaaaggtctgtggatttaaactttc

SEQ ID NO: 683847 - DNA, 120 bp, Artificial Sequence
  ENSG00000187231_8 (sequence is synthesized)
ttccatcggttgatcctgaaacagttcttcagacagggcatgaattgttgtccgaattacagcagcgtcgatttaatggctcagacggaggggtttcatggtctcctatggatgatgaac

SEQ ID NO: 683848 - DNA, 120 bp, Artificial Sequence
  ENSG00000187231_9 (sequence is synthesized)
ttcttgcacagccacaggttatgaaattattagattcactccgagagcaatatacccgctaccaggaagtttgtaggcaacgtagcaagcgcacacagttagaagagattcaacagaagg

SEQ ID NO: 683849 - DNA, 120 bp, Artificial Sequence
  ENSG00000187231_10 (sequence is synthesized)
taatgcaggtggtgaactggctagaagggcctggatcagaacaactaagagcccagtggggcattggagactccattagggcctcccaggccctacagcagaaacacgaagagattgaga

SEQ ID NO: 683850 - DNA, 120 bp, Artificial Sequence
  ENSG00000187231_11 (sequence is synthesized)
gccagcacagtgaatggtttgcagtgtatgtggaacttaatcagcaaattgcagcactcttgaatgctggcgatgaggaagatcttgtggaactaaagtcactgcagcaacaacttagtg

SEQ ID NO: 683851 - DNA, 120 bp, Artificial Sequence
  ENSG00000187231_12 (sequence is synthesized)
atgtttgttatcgacaggccagtcagctggaatttaggcaaaatctcttacaagcagctcttgaatttcatggtgttgcccaagatttgtctcagcagttggatggcttattagggatgt

SEQ ID NO: 683852 - DNA, 120 bp, Artificial Sequence
  ENSG00000187231_13 (sequence is synthesized)
tgtgcgtagatgtagcaccagctgatggagcatcgattcagcaaactttaaaactgcttgaagagaagctgaaaagtgttgatgtgggattgcaaggtttgcgtgaaaaaggtcaaggtc

SEQ ID NO: 683853 - DNA, 120 bp, Artificial Sequence
  ENSG00000187231_14 (sequence is synthesized)
tcctggatcagatctccaatcaggcatcctgggcctatggaaaggatgtaaccattgaaaataaagaaaatgtggaccacatacaaggagtgatggaagatatgcagcttagaaaacaaa

SEQ ID NO: 683854 - DNA, 120 bp, Artificial Sequence
  ENSG00000187231_15 (sequence is synthesized)
gatgtgaagacatggtagatgtgcgaaggttaaagatgcttcagatggtgcagttgtttaaatgtgaagaagatgctgcccaggcagtagaatggctaagtgaacttctggatgctctgc

SEQ ID NO: 683855 - DNA, 120 bp, Artificial Sequence
  ENSG00000187231_16 (sequence is synthesized)
ttaagactcacatcagattgggcgatgatgctcaagaaacgaaagttttgctggaaaagcatagaaaatttgttgatgttgcacagagcacttatgactatggcaggcagttgctacagg

SEQ ID NO: 683856 - DNA, 120 bp, Artificial Sequence
  ENSG00000187231_17 (sequence is synthesized)
ccacagttgtgttatgccaatctttgcgctgcacttctcggtcatctggggatacacttcctcgactgaacagagtatggaaacaatttacaatagcatctgaagagagagtacatagat

SEQ ID NO: 683857 - DNA, 120 bp, Artificial Sequence
  ENSG00000187231_18 (sequence is synthesized)
tggaaatggctattgcatttcactcaaatgctgaaaagattttgcaggactgtccagaagagcctgaagctattaatgatgaggagcaatttgatgaaattgaagcagttgggaaatcac

SEQ ID NO: 683858 - DNA, 120 bp, Artificial Sequence
  ENSG00000187231_19 (sequence is synthesized)
ttttggatagattaactgttccagtagtttatcctgatggaaccgaacaatattttgggagtccaagtgacatggcttctactgcagaaaacatcagagacaggatgaaactagttaatc

SEQ ID NO: 683859 - DNA, 120 bp, Artificial Sequence
  ENSG00000187231_20 (sequence is synthesized)
tcaaaaggcagcagctgagacatcctgaaatggtgaccacagagagctaatagctaccagctacctacagatttgcagttcataatcccgcatgttgtcaacatactacagcattagcca

SEQ ID NO: 683860 - DNA, 120 bp, Artificial Sequence
  ENSG00000187231_21 (sequence is synthesized)
ccacaccttaagatgcatttcacagccaaaataagtctcatttcttttcatgacacatttctctttacatgttaacaccttgctactaccaaggcataattacttaacatgcttcgaggc

SEQ ID NO: 683861 - DNA, 120 bp, Artificial Sequence
  ENSG00000187231_22 (sequence is synthesized)
tgtagattccaagtatcttaaaagaaggaactataaacattgcactgaaaacttgctttaaagctttacctgacctgtcagtttgtagacaaacaactgataataagctttgaatggtgc

SEQ ID NO: 683862 - DNA, 120 bp, Artificial Sequence
  ENSG00000187231_23 (sequence is synthesized)
taataagagtaggaattctctctattaaaaagaaaaaaaaaagttgcccttcctccacaggtgatttagtaaatttagacagtagttaaactcttgttagtagacagtggtgtcctcaaa

SEQ ID NO: 683863 - DNA, 120 bp, Artificial Sequence
  ENSG00000187231_24 (sequence is synthesized)
attttactttgtaattcttcagaattgattatttttattgtgtcaatacagagaaagcctttcagatctttgatatatcatagtcattaaaagaccttttcctatttgtattgataatgt

SEQ ID NO: 683864 - DNA, 120 bp, Artificial Sequence
  ENSG00000187231_25 (sequence is synthesized)
attaaaagttgtttgtgcttaataaaagacttctttaaacatcttatttaatttagtagttacatcctatttccaaacatgagtgccttatttaaaagggcattcttaggactgtgagga

SEQ ID NO: 683865 - DNA, 120 bp, Artificial Sequence
  ENSG00000187231_26 (sequence is synthesized)
tggtttaatatttgttttttcatggtggttgcatgtattttagacaggaaatacatatgtaagcatgtgtatataataaataagcatgttttatcatgaaaaattattgtgaacaattta

SEQ ID NO: 683866 - DNA, 120 bp, Artificial Sequence
  ENSG00000187231_27 (sequence is synthesized)
gatctttaagaacttattaataatggaatactatttctaatttttctctttttcaacttgaaaaatattctcaaaattattaactaccctgaagatactttgtctttaggggaggagggc

SEQ ID NO: 683867 - DNA, 120 bp, Artificial Sequence
  ENSG00000187231_28 (sequence is synthesized)
tgaggaagaaggcatacataattacttcagtgtaatcctttatatcagagtaatctttcaggaactaaaatagcaattgttaataaaatttagtttctcattatagtctaaaagcaaaat

SEQ ID NO: 683868 - DNA, 120 bp, Artificial Sequence
  ENSG00000187231_29 (sequence is synthesized)
aaattctgaagtagtccaataacagaactgtatgacccctttagaaataaaatttatcatgaaatgctagttcttttaagtttgtattaagtttaaatggtaaaatgcatataatttaaa

SEQ ID NO: 683869 - DNA, 120 bp, Artificial Sequence
  ENSG00000187231_30 (sequence is synthesized)
ttttatgtatttttatttcagaacattttttaaaatattaaaaattattttttagtcttgtagtcattacaaaattataaacgagttgtatactggttcctttttgaggtctacaaacat

SEQ ID NO: 683870 - DNA, 120 bp, Artificial Sequence
  ENSG00000187231_31 (sequence is synthesized)
gctcgtgtatcttccaatgcaaaaaaaaaacccctcccttttaacctgctagtttttccagccttcttcactgactgacagacttcttggagaaatccacatccagtgcccctacatcct

SEQ ID NO: 683871 - DNA, 120 bp, Artificial Sequence
  ENSG00000187231_32 (sequence is synthesized)
catcactcactactcagcaccttgcagtctggttttacacagcactctactgaaactgttcttttgaaagtcagcaatggcctcccagttaccaaactgaatggtttttttctccgtctg

SEQ ID NO: 683872 - DNA, 120 bp, Artificial Sequence
  ENSG00000187231_33 (sequence is synthesized)
aatcccttacccttttctctgcaacatttacaccattgagcaacctttcctagacagtgtctccttccttgaagatgctatcctctgaaataactgtgagtacagtcgcataaccctaat

SEQ ID NO: 683873 - DNA, 120 bp, Artificial Sequence
  ENSG00000187231_34 (sequence is synthesized)
ttaagatgtgcctgctgaacatgtgctctctcagatcctgtcctcagaatgcttttggctcttttctcggtatctcatccttagagtttttattttataccaatgttctggattacatac

SEQ ID NO: 683874 - DNA, 120 bp, Artificial Sequence
  ENSG00000187231_35 (sequence is synthesized)
ctggtccagaaatctagacttgtacttctttttaattgcctagttgacatttcaaccttgattaaagattgacaatatttatcaccttttcctcctggaacaatttaggttaatggtgca

SEQ ID NO: 683875 - DNA, 120 bp, Artificial Sequence
  ENSG00000187231_36 (sequence is synthesized)
gccttttttcctagtcaaacatgccaggaagttcagggcaaagttcaactgctccctcttgtcttatgtggtcactgcttctgagaacatccaggaagttctttctatacttgaatcatc

SEQ ID NO: 683876 - DNA, 120 bp, Artificial Sequence
  ENSG00000187231_37 (sequence is synthesized)
ttctcagtcctttggggctttactgctatgagtatgaacttttgtgattatttatttcagtcttcatgatggtgctatcacattctacagttgtttatgtctgtacccagtaagctcttt

SEQ ID NO: 683877 - DNA, 120 bp, Artificial Sequence
  ENSG00000187231_38 (sequence is synthesized)
tgagggaaggaatcttgtcttctcctattcccagtcttgctcatgcataacagatgcccattcctcctaaatatgaatgctgtattataggcattagtaataatccctgttacattgcag

SEQ ID NO: 683878 - DNA, 120 bp, Artificial Sequence
  ENSG00000187231_39 (sequence is synthesized)
gcagtctgaagtatgttttaaacatacttttttaaagttagaactgacttacaagtgaatctattcttagattcttagatactaactactttagatatttagttatactcaataactaaa

SEQ ID NO: 683879 - DNA, 120 bp, Artificial Sequence
  ENSG00000187231_40 (sequence is synthesized)
aatactcaatatctgtttcttctgaatttcagagtagttagaatgtttttcttaagactttgctagaaaggaactggtttgttagtaattctgccatcaactcatggagttataattgcc

SEQ ID NO: 683880 - DNA, 120 bp, Artificial Sequence
  ENSG00000187231_41 (sequence is synthesized)
aaatgagttaatttttatataccttaagctatcttgcctacaaaaagtaaaataaggcaggattcataaatgttacttgtaaattgagtgtttcacatgaggccaagtatgattttaaca

SEQ ID NO: 683881 - DNA, 120 bp, Artificial Sequence
  ENSG00000187231_42 (sequence is synthesized)
taatgaatatcattgctcctcatctgtaaatttgctgctgctttcatatgtgtatctgtacatagagttatgaatgaaaatccagtaatgccctaaagcaactttcttccatagggtcaa

SEQ ID NO: 683882 - DNA, 120 bp, Artificial Sequence
  ENSG00000187231_43 (sequence is synthesized)
agctcacttaaggtaaacgtgtgaaaaaagtgactgcagtgtgtttgaaaccacaagctgtttctatgtcataaattaacatcagcttgcaagtctctgaaagaaccactcatttgtaat

SEQ ID NO: 683883 - DNA, 120 bp, Artificial Sequence
  ENSG00000187231_44 (sequence is synthesized)
tttgaggattttttttttcttttatcatttgtttgctcctgtgtaagcttaatatataatggcagtttggcatctgttcttcgcacatgtctaacccagcagagttatgcaaaaatgatg

SEQ ID NO: 683884 - DNA, 120 bp, Artificial Sequence
  ENSG00000187231_45 (sequence is synthesized)
acttcattttaggtcaaattggctttgttcccagtcctcattgttggtcactttgttcagttctggtgactcattggtgatgttgatgaaactgctcagcctgccagctgggatattgat

SEQ ID NO: 683885 - DNA, 120 bp, Artificial Sequence
  ENSG00000187231_46 (sequence is synthesized)
ggcaggtctaggcttcattgttaggtagaagattgaatacttctcactttatacaaatttacattggctattgctcccatgtgttagctagtcttaacatgtttgttatttcgttatctt

SEQ ID NO: 683886 - DNA, 120 bp, Artificial Sequence
  ENSG00000187231_47 (sequence is synthesized)
attagctgacatacggagtggtattattagtgtcgtactccttagcgtgagcatgacaattaagttaccttactaacagtgatgagtaaaccatactctgatctaaacccattgttacca

SEQ ID NO: 683887 - DNA, 120 bp, Artificial Sequence
  ENSG00000187231_48 (sequence is synthesized)
atgatgtgattatgaagttagctgaatctatggtctacatttgaagaaatagttcagaattctctactacattgtaagttacttgctaatagagattgggcattattatgtactactccc

SEQ ID NO: 683888 - DNA, 120 bp, Artificial Sequence
  ENSG00000187231_49 (sequence is synthesized)
cttctcacatcctacccaaagtacacaaggccgtagtaaaatactgttgctactaaaaactaaacatactgtggttgctaatgtcctttacatcttcagcctatagggaatggtacaggc

SEQ ID NO: 683889 - DNA, 120 bp, Artificial Sequence
  ENSG00000187231_50 (sequence is synthesized)
agaaacaagcaccattaagtatattatcatcagtagtgagatctgtatgattaggatatctttgcttaagcccccaaaggaaaaattctctagcattaaaaacatggctggaacatagct

SEQ ID NO: 683890 - DNA, 120 bp, Artificial Sequence
  ENSG00000187231_51 (sequence is synthesized)
aagcagttaacctaattagtagacttattgttaacgttcagtcctaaaaatgaaaagcttcagttgggagtagaaaatatactatgctggtatatagagcaacaaataccctgatgagat

SEQ ID NO: 683891 - DNA, 120 bp, Artificial Sequence
  ENSG00000187231_52 (sequence is synthesized)
aaaatgaagtagaaacttaccatttgacattatttgactttcatacatgctactgaaaagtctaggtttagctaagaagcataaataatggcagtacttgtagaggaaagaacataccag

SEQ ID NO: 683892 - DNA, 120 bp, Artificial Sequence
  ENSG00000187231_53 (sequence is synthesized)
ctaaaacaagaactgtaatgaatataatggaaagtgtttggagcttgaatacttggcttcaaaaatctggctttgccatttactgttaaaaaaatatctgagaatttatctcaggctgta

SEQ ID NO: 683893 - DNA, 120 bp, Artificial Sequence
  ENSG00000187231_54 (sequence is synthesized)
aaacagagaagtcataccaatttcaagaataaaatatgatataaagaattgttgaagccaaaatatccagaaataaacagaatggaaggtatcattgctataattatcttttcagaataa

SEQ ID NO: 683894 - DNA, 120 bp, Artificial Sequence
  ENSG00000187231_55 (sequence is synthesized)
aaaatagagtattctttatcctttctgttgtctcacatgacaagcatgggatggtgaggaaatggcatattgcctatgttcgccgccccacccccttagttccaccaccccttcaccgtc

SEQ ID NO: 683895 - DNA, 120 bp, Artificial Sequence
  ENSG00000187231_56 (sequence is synthesized)
acccccagttcactagtgtatcagaatgcatcttcagaattacacactgaagatacaaaaggtccagttggtaagctcatcagtaaataacaaggctttgaaatctgacaaattagctat

SEQ ID NO: 683896 - DNA, 120 bp, Artificial Sequence
  ENSG00000187231_57 (sequence is synthesized)
ttttgtaggaagataatagaacagcaagatggaagacaagtgatgagtatcatctgttttgaggttgacaaggtgtgacataaccctgttaatagacacaagtaaaagaaaatcatacta

SEQ ID NO: 683897 - DNA, 120 bp, Artificial Sequence
  ENSG00000187231_58 (sequence is synthesized)
ggattggatattagtgagcgagcaccgaccagtagaaacaacaacagcataaatctgttatttaagtatcccaataatgaggttaaaaaaaaaaaaaaaacagaacaaagcatgaaaaga

SEQ ID NO: 683898 - DNA, 120 bp, Artificial Sequence
  ENSG00000187231_59 (sequence is synthesized)
ccacaattagtgctggctatgcttagagaggagcagtctcttggtaaactcaggcagtgatgatgaacagaaaatggccgactgatactgtaatagaggcatagaactaaggacactccg

SEQ ID NO: 683899 - DNA, 120 bp, Artificial Sequence
  ENSG00000187231_60 (sequence is synthesized)
tgagctggcataaatacaggggagtctttaagactgaaaaaagttcatgggtatgacacttaatatgactcaacattactgcagaattttaaagcaaacatgaaagcttgagaataaaca

SEQ ID NO: 683900 - DNA, 120 bp, Artificial Sequence
  ENSG00000187231_61 (sequence is synthesized)
ctagtccctctacttcaagaaaaagcagaacctgtactagaacatgaagaacttagagatcaaaagacagccagaactatgatgaaatattttgaaagcagtgggcacatttttaaagat

SEQ ID NO: 683901 - DNA, 120 bp, Artificial Sequence
  ENSG00000187231_62 (sequence is synthesized)
tttttttggagaactttatgaggctgtatgtataattcctatatgtaattttataggaattcttaactgaaagtagttatcaactgctacttatcaggagcagtgttattagggatttta

SEQ ID NO: 683902 - DNA, 120 bp, Artificial Sequence
  ENSG00000187231_63 (sequence is synthesized)
agttaggcatgtagaaaactttctgacaaaagggctattgaactccagccagttcccagtgaatctccaggaggcaccttagaagtcttcacaagctgaataccatgtctttagggtgtc

SEQ ID NO: 683903 - DNA, 120 bp, Artificial Sequence
  ENSG00000187231_64 (sequence is synthesized)
caaatgcttctgtcttgggggagagatgagagatgactgggtgcctttccactcagaacacagtagaccactcactatttatgaccaagcctcacttcttttctattacagttacagatt

SEQ ID NO: 683904 - DNA, 120 bp, Artificial Sequence
  ENSG00000187231_65 (sequence is synthesized)
cttttttagtctggaagttagggtaaataaaatttgtatgtttgatttttctcttaggaatgttttctcatcttaactcttatgttatctttatggccaacagatttgctcagaatatat

SEQ ID NO: 683905 - DNA, 120 bp, Artificial Sequence
  ENSG00000187231_66 (sequence is synthesized)
catcaaaatatatgtattgtattttgtaaaggtgaaaggatcgaaataccactttgacagttataaaccagagtagatttgagaactgattgctcacatcacacttacgaatagtctcag

SEQ ID NO: 683906 - DNA, 120 bp, Artificial Sequence
  ENSG00000187231_67 (sequence is synthesized)
aagcctttaagagaaacttacttctcaatggacacttagaagaatttgatgatcttactgtcataaaatcagtaatgaaattctcagcaaaactatttggtaaacattgcaccctgtatt

SEQ ID NO: 683907 - DNA, 120 bp, Artificial Sequence
  ENSG00000187231_68 (sequence is synthesized)
tttacccaacatcttgttatgaaaattatcaaatacattaaaaagttaaaataattttatagtgtactcactacctagatgctaattagcattacctatgcttgctttgtcacatatcca

SEQ ID NO: 683908 - DNA, 120 bp, Artificial Sequence
  ENSG00000187231_69 (sequence is synthesized)
ttcatcatttcatattattatttgatgcattttaaattgcatatcattaactagagttcattgttggcttttttacataaaattagcatgcaatgaagtgcatagaaatatgtgttcact

SEQ ID NO: 683909 - DNA, 120 bp, Artificial Sequence
  ENSG00000187231_70 (sequence is synthesized)
gaggtttggcaaatgcatatagtgctatggaaataggaaacgttatcaccaccctagaaagtttccacactgccctttccagtcaattcctgtccctacttgaccctcaaaggcaaccac

SEQ ID NO: 683910 - DNA, 120 bp, Artificial Sequence
  ENSG00000187231_71 (sequence is synthesized)
tgttcctttttctaccataagatttttctgttctaaaactttatataaatagagtcacgcaacatgtacgcttttctacaaggcttcatttttttattgctgttcttttttattgctgag

SEQ ID NO: 683911 - DNA, 120 bp, Artificial Sequence
  ENSG00000187231_72 (sequence is synthesized)
tagtattccactgtatgacaatattacagtttgttttcttaatttcctattattgatagatacctgggctgtttccaggattggccattataaataaagctgctatgaccattcttacgt

SEQ ID NO: 683912 - DNA, 120 bp, Artificial Sequence
  ENSG00000187231_73 (sequence is synthesized)
aagtctttgtgaacataggttttcatttctttgcagtaaattccttggattagaattgctgggtcacagggtagttttaaaagaaactgccatacctttttccagttcagttttattgtg

SEQ ID NO: 683913 - DNA, 120 bp, Artificial Sequence
  ENSG00000187231_74 (sequence is synthesized)
ccctgtattttgtattttgatgtgcataaaggtgtaaactatttttatgatccatattgaagtattagaagaagtgagtttggaataacaatggcattgttcatggtcaaggatgacaat

SEQ ID NO: 683914 - DNA, 120 bp, Artificial Sequence
  ENSG00000187231_75 (sequence is synthesized)
tggaactatctgaggaaagcaaagacctgtctgccccagacagctcctcaaggggttcctatgcctgaaactttagcaatatttcactccttgaaaggttaaagcccaaccatggtgata

SEQ ID NO: 683915 - DNA, 120 bp, Artificial Sequence
  ENSG00000187231_76 (sequence is synthesized)
tgttagctagaagaaacagcactggtttgtttatgttactaactttcaccacccgttttcagtaggtaaagtaagactgatcattgaacagaaaaggttatttctgtgatgaggttgagg

SEQ ID NO: 683916 - DNA, 120 bp, Artificial Sequence
  ENSG00000187231_77 (sequence is synthesized)
gggtagtggaaagcatgtattgctagtaagccccaggtacagctatgtgagagagagtcacctggacagggaagtcccccaaatggtggccagaagagcagaaaacggggtgggaaaaat

SEQ ID NO: 683917 - DNA, 120 bp, Artificial Sequence
  ENSG00000187231_78 (sequence is synthesized)
tctacctcacagttttgcataggggatagctatgcttttacgggacattttagcgtttaaaaatattttcaatattgtctctttattcaataccacccagctgtagttttttcacactct

SEQ ID NO: 683918 - DNA, 120 bp, Artificial Sequence
  ENSG00000187231_79 (sequence is synthesized)
gatgactctcttatccactcttttacctctcccagctgttctattacatacagcattcacctgtattagtctatagaattataatcatctgtgtgtttctaatgctcattttcaaaaata

SEQ ID NO: 683919 - DNA, 120 bp, Artificial Sequence
  ENSG00000187231_80 (sequence is synthesized)
tgtatggtttattcgatttttcctattaaaattttaagggctgggaaatttggcttctactgtaaatccttataatgttccacacattgtaaatatgcaataaaaatgttaacaactata

SEQ ID NO: 683920 - DNA, 120 bp, Artificial Sequence
  ENSG00000187231_81 (sequence is synthesized)
atggcagcaggttttggtatgtatttctttgatatattgtcactttggacaataagtttgatttctgttaataaaagttgttcataaaatctagggagaattaagtcacactggtctcta

SEQ ID NO: 683921 - DNA, 120 bp, Artificial Sequence
  ENSG00000187231_82 (sequence is synthesized)
taagataatctgatgaattctgcatctttgaatcaatttgagttattttttgtaaaggtttaaattgtttctaacagtgttacctaaaacctttcattaaatcaaaaatgtaacttgtat

SEQ ID NO: 683922 - DNA, 120 bp, Artificial Sequence
  ENSG00000187231_83 (sequence is synthesized)
attctgaaataacctggagtcttagaagacagaggcttctgcttccctctcccgtgaccccaacaatcccttcccacaggcttggcacagaagttcagtgctttctctacgtctcatgtt

SEQ ID NO: 683923 - DNA, 120 bp, Artificial Sequence
  ENSG00000187231_84 (sequence is synthesized)
gtcagaaataggttctcaccataatagacagtggtgaaatttccattgttcctactgagaagtccatttttaaggcatcaaaggtgaatgtgtatttagggatggaggaggcatattaca

SEQ ID NO: 683924 - DNA, 120 bp, Artificial Sequence
  ENSG00000187231_85 (sequence is synthesized)
acaaagctgtatttaaaataacacaatcatatcatgctataaacaatagcagttccagaatggctactaaggattttggactgccagactttggaaattggcaagccttataccttgtcc

SEQ ID NO: 683925 - DNA, 120 bp, Artificial Sequence
  ENSG00000187231_86 (sequence is synthesized)
aatgaagttaagtacatttgagtgacagttcaacatacaagcaaaaaaatatatagaagacattgtacatttgttattaatggacatgtttactttacatgttagagtatccatccatct

SEQ ID NO: 683926 - DNA, 120 bp, Artificial Sequence
  ENSG00000187231_87 (sequence is synthesized)
ctaggttttccattagatgcttcattgtatccacaaacctgtttcaaaccattgaagtgatcttaccattgtgtttgttcaaaataaaattgggagaaaatgtgaatgagtcaatatcaa

SEQ ID NO: 683927 - DNA, 120 bp, Artificial Sequence
  ENSG00000187231_88 (sequence is synthesized)
ggcccgcagagaccgggccgcgcgcttttccgttcctgagcgcccttgttcatttctgggtgaaagggacccgaattgtgcaacaggtttgggcgttagtccttattttccagcgggtct

SEQ ID NO: 683928 - DNA, 120 bp, Artificial Sequence
  ENSG00000187231_89 (sequence is synthesized)
cttttgccagcgtgcaggaaccagatgtggctccctgctctcgggcgagtcccgcgtccagcgcccgcgactggctcctttgtgtgaccggtgaccggccctgtcggaattaaggaagtt

SEQ ID NO: 683929 - DNA, 120 bp, Artificial Sequence
  ENSG00000187231_90 (sequence is synthesized)
gcaagttacaatgatattatgaacgtgggtaattagtagcatatgtggtactgagtgataagttgctgcaaactttggtatggggcatgaagtacagtttgttaagtgcctagaggtcat

SEQ ID NO: 683930 - DNA, 120 bp, Artificial Sequence
  ENSG00000187231_91 (sequence is synthesized)
aaagtacattttgattacttagtacatgttaattagaaggttgtttttggttttgtctctaatgcagtttaattatatttttatagaagcacaatttgcatgaaattttaaaagctacag

SEQ ID NO: 683931 - DNA, 120 bp, Artificial Sequence
  ENSG00000187231_92 (sequence is synthesized)
agacaaagcgccggaggtgggagccctgcgggccgcctttgcctccgcgccgtctgccgggtgcggccgcggcccgcagagaccgggccgcgcgcttttccgttcctgagcgcccttgtt

SEQ ID NO: 683932 - DNA, 120 bp, Artificial Sequence
  ENSG00000187238_0 (sequence is synthesized)
atgtcctgccagcagaaccagcagcagtgccagcctctgcccaagtgcccctcacccaagtgccccccaaagagctcagcacagtgtctgcctccagcctcctcctgctgtgctccaaga

SEQ ID NO: 683933 - DNA, 120 bp, Artificial Sequence
  ENSG00000187238_1 (sequence is synthesized)
caccacaggtgctgcaggtcccaccgatgccggcgccagagctccaactcctgtgacagaggcagtggtcagcaagatggtgcctccgactgtggctatggctctggaggctgctgctga

SEQ ID NO: 683934 - DNA, 120 bp, Artificial Sequence
  ENSG00000187239_0 (sequence is synthesized)
gcggctgctgcttcctcgggccattttgctgtggagcggcggggaggaggagccgccgaggagaccccgggcgaggagctgcgagccggaggaggccgcgcggactccgggctttccgcc

SEQ ID NO: 683935 - DNA, 120 bp, Artificial Sequence
  ENSG00000187239_1 (sequence is synthesized)
gtcgcggggatctcggggggcaaagggatcgccggggagggggaccagagagccgcgcccgccgcgcggagcgccccttcgcgtcccctgcaccatgagctggggcaccgagctctggga

SEQ ID NO: 683936 - DNA, 120 bp, Artificial Sequence
  ENSG00000187239_2 (sequence is synthesized)
tcagtttgacaacttagaaaaacacacacagtggggaattgatattcttgagaaatatatcaagtttgtgaaagaaaggacagagattgaactcagctatgcaaagcaactcaggaatct

SEQ ID NO: 683937 - DNA, 120 bp, Artificial Sequence
  ENSG00000187239_3 (sequence is synthesized)
ttcaaagaagtaccaacctaaaaagaactcgaaggaggaagaagaatacaagtatacgtcatgtaaagctttcatttccaacctgaacgaaatgaatgattacgcagggcagcatgaagt

SEQ ID NO: 683938 - DNA, 120 bp, Artificial Sequence
  ENSG00000187239_4 (sequence is synthesized)
tatctccgagaacatggcatcacagatcattgtggacttggcacgctatgttcaggaactgaaacaggagaggaaatcaaactttcacgatggccgtaaagcacagcagcacatcgagac

SEQ ID NO: 683939 - DNA, 120 bp, Artificial Sequence
  ENSG00000187239_5 (sequence is synthesized)
ttgctggaagcagcttgaatctagtaaaaggcgatttgaacgcgattgcaaagaggcggacagggcgcagcagtactttgagaaaatggacgctgacatcaatgtcacaaaagcggatgt

SEQ ID NO: 683940 - DNA, 120 bp, Artificial Sequence
  ENSG00000187239_6 (sequence is synthesized)
tgaaaaggcccgacaacaagctcaaatacgtcaccaaatggcagaggacagcaaagcagattactcatccattctccagaaattcaaccatgagcagcatgaatattaccatactcacat

SEQ ID NO: 683941 - DNA, 120 bp, Artificial Sequence
  ENSG00000187239_7 (sequence is synthesized)
ccccaacatcttccagaaaatacaagagatggaggaaaggaggattgtgagaatgggagagtccatgaagacatatgcagaggttgatcggcaggtgatcccaatcattgggaagtgcct

SEQ ID NO: 683942 - DNA, 120 bp, Artificial Sequence
  ENSG00000187239_8 (sequence is synthesized)
ggatggaatagtaaaagcagccgaatcaattgatcagaaaaatgattcacagctggtaatagaagcttataaatcagggtttgagcctcctggagacattgaatttgaggattacactca

SEQ ID NO: 683943 - DNA, 120 bp, Artificial Sequence
  ENSG00000187239_9 (sequence is synthesized)
gccaatgaagcgcactgtgtcagataacagcctttcaaattccagaggagaaggcaaaccagacctcaaatttggtggcaaatccaaaggaaagttatggccgttcatcaaaaaaaataa

SEQ ID NO: 683944 - DNA, 120 bp, Artificial Sequence
  ENSG00000187239_10 (sequence is synthesized)
gcttatgtcccttttaacatccccccatcagcctccccctccccctcctgcctctgcctcaccctctgctgttcccaacggcccccagtctcccaagcagcaaaaggaacccctctccca

SEQ ID NO: 683945 - DNA, 120 bp, Artificial Sequence
  ENSG00000187239_11 (sequence is synthesized)
tcgcttcaacgagttcatgacctccaaacccaaaatccactgcttcaggagcctaaagcgtgggctttctctcaagctgggtgcaacaccggaggatttcagcaacctcccacctgaaca

SEQ ID NO: 683946 - DNA, 120 bp, Artificial Sequence
  ENSG00000187239_12 (sequence is synthesized)
aagaaggaaaaagctgcagcagaaagtcgatgagttaaataaagaaattcagaaggagatggatcaaagagatgccataacaaaaatgaaagatgtctacctaaagaatcctcagatggg

SEQ ID NO: 683947 - DNA, 120 bp, Artificial Sequence
  ENSG00000187239_13 (sequence is synthesized)
agacccagccagtttggatcacaaattagcagaagtcagccaaaatatagagaaactgcgagtagagacccagaaatttgaggcctggctggctgaggttgaaggccggctcccagcacg

SEQ ID NO: 683948 - DNA, 120 bp, Artificial Sequence
  ENSG00000187239_14 (sequence is synthesized)
cagcgagcaggcgcgccggcagagcggactgtacgacagccagaacccacccacagtcaacaactgcgcccaggaccgtgagagcccagatggcagttacacagaggagcagagtcagga

SEQ ID NO: 683949 - DNA, 120 bp, Artificial Sequence
  ENSG00000187239_15 (sequence is synthesized)
gagtgagatgaaggtgctggccacggattttgacgacgagtttgatgatgaggagcccctccctgccatagggacgtgcaaagctctctacacatttgaaggtcagaatgaaggaacgat

SEQ ID NO: 683950 - DNA, 120 bp, Artificial Sequence
  ENSG00000187239_16 (sequence is synthesized)
ttccgtagttgaaggagaaacattgtatgtcatagaggaagacaaaggcgatggctggacccgcattcggagaaatgaagatgaagagggttatgtccccacttcatatgtcgaagtctg

SEQ ID NO: 683951 - DNA, 120 bp, Artificial Sequence
  ENSG00000187239_17 (sequence is synthesized)
tttggacaaaaatgccaaagattcctagaggggagtgcctgcgagcctcgggtgagccttcctggaggagcctccgtctgcttgttcccacaggcctccagcgccctgccctgtggacag

SEQ ID NO: 683952 - DNA, 120 bp, Artificial Sequence
  ENSG00000187239_18 (sequence is synthesized)
cccacccctccgcagccccatccctgcggggcggtctctctctctctccagcatgctccctgcggccctgccctcccgcccagcccgggccacctcgtgggggacaagtctcgccagcgc

SEQ ID NO: 683953 - DNA, 120 bp, Artificial Sequence
  ENSG00000187239_19 (sequence is synthesized)
ccacccccatggctcgggtcagtcctcatcgctccccctccccaccccgcgcaggccactgagacggtgggacacacgcccctacctgctccttcctgggccctcagtccacccgggctc

SEQ ID NO: 683954 - DNA, 120 bp, Artificial Sequence
  ENSG00000187239_20 (sequence is synthesized)
gtcctggcagcccttccgcgcttcacacagtgccttttgtgaaagtgtcatcacgggtcccctgaggagacaaggcaggtccagcgcacatcaggcggactgagcactcgatgtcatccg

SEQ ID NO: 683955 - DNA, 120 bp, Artificial Sequence
  ENSG00000187239_21 (sequence is synthesized)
tgtcgatgtcatccgtgtgtcccagactgtctgctgtagaaaacacttcctcctctcctgagtctgtgaagtcctcagtggtcctttttggattctaggcttgcacctcatactaaacat

SEQ ID NO: 683956 - DNA, 120 bp, Artificial Sequence
  ENSG00000187239_22 (sequence is synthesized)
caacctgggagcatctggcaggcaggggggcaggtacacacacacccacaggcacacccaccagtacacacgcgtgcgcatacacacattttggtttgacgccctgttttcagtggcctg

SEQ ID NO: 683957 - DNA, 120 bp, Artificial Sequence
  ENSG00000187239_23 (sequence is synthesized)
gggaggtccacactggaagtcgaattccagctcgccttgttgactcgcctgtgtccaccggccatgaggagcccacgcctgtcctccccatcactttcctgtccctgagaactgtagatc

SEQ ID NO: 683958 - DNA, 120 bp, Artificial Sequence
  ENSG00000187239_24 (sequence is synthesized)
atgcgcttgtgagcgaggccctcccctctgcaccagctcattgcaaagcgaacatcctctcctttccaggagccccaggattagcatctgaaaagggtagcacttccttttttgttgttg

SEQ ID NO: 683959 - DNA, 120 bp, Artificial Sequence
  ENSG00000187239_25 (sequence is synthesized)
aagtgctgagattacaggtgtgagctaccgcaccccgccgaggttagcactttcatcaccaaagaccccgtgcctctcgtggtcctttgagggatcccgccgccaccacccttgtatttt

SEQ ID NO: 683960 - DNA, 120 bp, Artificial Sequence
  ENSG00000187239_26 (sequence is synthesized)
cgccaccacccttgtattttatcacgtgctcttcagggcatgtggaattcgttgagtttgcttttagagccaagtttctttccctgtgtgggtttttgaggaaaacctgaggtcccctaa

SEQ ID NO: 683961 - DNA, 120 bp, Artificial Sequence
  ENSG00000187239_27 (sequence is synthesized)
tctgtggccaccaccccccccccccgccacgccttagagcagagcagcccctcctctcatttggtgcagaaacagtcaagaggaaccattggcctagagctcctgtgaccgagagcgcca

SEQ ID NO: 683962 - DNA, 120 bp, Artificial Sequence
  ENSG00000187239_28 (sequence is synthesized)
cggaagcctggggatgacgtcgggcagctttattctttgcttggctttggtaactaggtggtcccctcaagcatcctcagttcctcttgctgtttatgaatctaagacaaggaagtccta

SEQ ID NO: 683963 - DNA, 120 bp, Artificial Sequence
  ENSG00000187239_29 (sequence is synthesized)
tagaagccaaagggacagggacggaaaggacaggtcccaagggatggggctgtctttacttgtggaaaccaggaaattgctcctctcagccaaccaaggttgaccacacaccacccttcc

SEQ ID NO: 683964 - DNA, 120 bp, Artificial Sequence
  ENSG00000187239_30 (sequence is synthesized)
ggagcagctcagtcagccctcggggacgagaaaccacaagcgcagagacgctgaggcccaggcaggtgaagaggaagtggctttgggtttttaaagtaggtgagcgtgagcctctctgac

SEQ ID NO: 683965 - DNA, 120 bp, Artificial Sequence
  ENSG00000187239_31 (sequence is synthesized)
tgcttcttccccgggggggactgcaaaccgctcagggttgcggcagagccatggacttccggtccctgcaacgggtgacctaagcgtggtgcacccatcagtcacgcaggaggactgact

SEQ ID NO: 683966 - DNA, 120 bp, Artificial Sequence
  ENSG00000187239_32 (sequence is synthesized)
tgacagacgaaagacaagcccggatgacacagggtgagaagagtcagggccgcacctctgtccctgcaaaccaacaggtgcatggtgagtgtggcagtccccacagctccacaatgggct

SEQ ID NO: 683967 - DNA, 120 bp, Artificial Sequence
  ENSG00000187239_33 (sequence is synthesized)
cccccgccaacggggacgacagggatcttcaggaacttctgacctcaccaagtcaagtggaccactctccactccacgaggatgtgaaacggttctttaaaatgggattttagagcctcg

SEQ ID NO: 683968 - DNA, 120 bp, Artificial Sequence
  ENSG00000187239_34 (sequence is synthesized)
ggaatgcatgtgcgtcacatctttcatattatgggtcaggatagattcatttcttgcaacatagtggaaaagatataagctgcagtaatttgctctttgaatgaccgtcacccccagtat

SEQ ID NO: 683969 - DNA, 120 bp, Artificial Sequence
  ENSG00000187239_35 (sequence is synthesized)
aggatatgcttgtatccccccgtcactcctccgcctgttttttaaacttttccaccacctgcgtccaaaaagaatgttatagcgagtgctcttaaatgttgaacctgggtgttgcttccg

SEQ ID NO: 683970 - DNA, 120 bp, Artificial Sequence
  ENSG00000187239_36 (sequence is synthesized)
ggccagtctgcgtggctccatgaaaagctcactgctgccccagccgggcttcttagaggaggtcagttgtcctatgtatcatcatttactctgggaatcctactgtgaaatcatgtctgt

SEQ ID NO: 683971 - DNA, 120 bp, Artificial Sequence
  ENSG00000187239_37 (sequence is synthesized)
atttttctggagcagttcacatagagtagaatgtggaatttcccgtgaacgtctccttcctcccccgtatctgccgcctgtcacttcgccaccgtgctagaatactgttgtgttgtaaga

SEQ ID NO: 683972 - DNA, 120 bp, Artificial Sequence
  ENSG00000187239_38 (sequence is synthesized)
tgactaattttaaaagaacctgccctgaaaagttcttagaaacgcagtgaaagggaggaacttgtcctttacccagtttttcctttgtaggatgggaaagtataaaaaggcacagaaggt

SEQ ID NO: 683973 - DNA, 120 bp, Artificial Sequence
  ENSG00000187239_39 (sequence is synthesized)
tgtcatgggctgttccttgggggtttttatcctgctcaccgtggagataagcctgcggcttgtctaaccagcgcagcgcaaaggtctcgatgccttttggtaacatccgtcattgcagaa

SEQ ID NO: 683974 - DNA, 120 bp, Artificial Sequence
  ENSG00000187239_40 (sequence is synthesized)
gaaagtttacacgacgtcaaaaagtgacgttcatgctaagtgtttttccagaaatattggtttcatgtttcttattggctctgcctcctgtgcttatatcatccaaaaactttttaaaaa

SEQ ID NO: 683975 - DNA, 120 bp, Artificial Sequence
  ENSG00000187239_41 (sequence is synthesized)
ggtccagaattctattttaacctgatgttgagcacctttaaaatgttcgtatgtgtgttgcactaattctaaactttggaggcattttgctgtgtgaggccgatcgccactgtaaaggtc

SEQ ID NO: 683976 - DNA, 120 bp, Artificial Sequence
  ENSG00000187239_42 (sequence is synthesized)
ctagagttgcctgtttgtctctggagatggaattaaaccaaataaagagcttccactggaggcttgtattgaccttgtaactatatgttaatctcgtgttaaaataaaatataacttgtg

SEQ ID NO: 683977 - DNA, 120 bp, Artificial Sequence
  ENSG00000187239_43 (sequence is synthesized)
cagtaagcaaaactttattctttttcttcctaaaagatggaccaaacacagtgggaatatccctagaagattaaaattaaataaaaccatataagactatgggtcttaaactcatacctt

SEQ ID NO: 683978 - DNA, 120 bp, Artificial Sequence
  ENSG00000187239_44 (sequence is synthesized)
cagaaaccctccttttctatctgatctttggctctggcaatgtggagcctaagaaaaatgttattagggagcagcccttcttgtgaacttttgcacagatctgctacaagtcatttttat

SEQ ID NO: 683979 - DNA, 120 bp, Artificial Sequence
  ENSG00000187239_45 (sequence is synthesized)
aaatcagcgggtagacgtgtgtgttattttaatatggcggaactgaccaagttcctcttcttctgatgtgttgttgtttttttttctctttctctctctctttctctctatttttcccat

SEQ ID NO: 683980 - DNA, 120 bp, Artificial Sequence
  ENSG00000187239_46 (sequence is synthesized)
tcctcaagagactggctggcaagcaccataatgcacgttctcctgtagtctcacgtggacttcagggtctgggcacctgaattgccttgtctagtttgggctgtaatcaagtttcacttg

SEQ ID NO: 683981 - DNA, 120 bp, Artificial Sequence
  ENSG00000187239_47 (sequence is synthesized)
ctgatgaaattttatgtggaaagctgccaaccgccaacttacagctatgtcattcaaaatctgataaacatttcttcttttggcggtatctgtagattaaaaaaaaagttgcattgtagc

SEQ ID NO: 683982 - DNA, 120 bp, Artificial Sequence
  ENSG00000187239_48 (sequence is synthesized)
ttctcatctttctgaatttaaaagccggcacgcatcatgcaggtgccaaagacttccctactcttgtttatatctagtatccaccatacactgagctacattaggtggttacagattgta

SEQ ID NO: 683983 - DNA, 120 bp, Artificial Sequence
  ENSG00000187239_49 (sequence is synthesized)
acttaataaactgaactgtgttagtttgttaaattgtatactcattcacttgggaggaagtcacaagtgaaataacatctccttcttgactaaagcagtaaataagattcttatattggc

SEQ ID NO: 683984 - DNA, 120 bp, Artificial Sequence
  ENSG00000187239_50 (sequence is synthesized)
gcactgtgtcagataacagcctttcaaattccagaggagaaggcaaaccagacctcaaatttggtggcaaatccaaaggaaagttatggccgttcatcaaaaaaaataagactcagtctt

SEQ ID NO: 683985 - DNA, 120 bp, Artificial Sequence
  ENSG00000187239_51 (sequence is synthesized)
caggtcatacagtcatggcacagccactaaccccattcacagcaccaagactggggacccagaggcacttgttatgcttccacactacgaaatgaaattcttaattgagagaactggaca

SEQ ID NO: 683986 - DNA, 120 bp, Artificial Sequence
  ENSG00000187240_0 (sequence is synthesized)
accccttccaatcatggcgaacgggactgcggacgttcggaagctcttcatcttcactactacccagaattacttcgggttgatgtctgaactctgggatcagccactgttgtgcaactg

SEQ ID NO: 683987 - DNA, 120 bp, Artificial Sequence
  ENSG00000187240_1 (sequence is synthesized)
tcttgaaatcaacaacttcttggatgacggcaaccagatgctcctcagggtgcagcgatccgacgcaggaatctccttttccaacacgattgagtttggtgacacaaaagataaagtgct

SEQ ID NO: 683988 - DNA, 120 bp, Artificial Sequence
  ENSG00000187240_2 (sequence is synthesized)
ggtgtttttcaagctgcgacctgaagtaattactgatgagaatctacatgataacattcttgtttcatctatgttagagtcacctattagttctctttaccaagcagtacggcaagtatt

SEQ ID NO: 683989 - DNA, 120 bp, Artificial Sequence
  ENSG00000187240_3 (sequence is synthesized)
cgcaccaatgttgttaaaggatcaggaatggagcagaaactttgatcccaaacttcagaatcttttgagtgaactagaagctgggttgggtatagttctacgaagatcagacactaactt

SEQ ID NO: 683990 - DNA, 120 bp, Artificial Sequence
  ENSG00000187240_4 (sequence is synthesized)
aacaaaattgaaatttaaggaagatgacacacgaggtatccttacaccaagcgatgagttccagttttggatagaacaagctcaccgtggaaataaacagattagtaaagaaagagccaa

SEQ ID NO: 683991 - DNA, 120 bp, Artificial Sequence
  ENSG00000187240_5 (sequence is synthesized)
ttattttaaagaattatttgaaacaattgcaagagagttttataacttggacagtctatccttactagaagttgttgacttggtggagactactcaggatgttgtagatgatgtgtggag

SEQ ID NO: 683992 - DNA, 120 bp, Artificial Sequence
  ENSG00000187240_6 (sequence is synthesized)
acaaacagaacatgatcattatcctgagtcacgaatgttgcatctcttagacatcataggtggttcatttggaaggtttgttcagaaaaagttgggaactttgaacctgtgggaagatcc

SEQ ID NO: 683993 - DNA, 120 bp, Artificial Sequence
  ENSG00000187240_7 (sequence is synthesized)
ttattatcttgtgaaagaaagtctgaaagctggtatttcaatttgtgaacagtgggtgatagtctgtaatcatctaacaggtcaggtgtggcagcgctatgttcctcatccatggaaaaa

SEQ ID NO: 683994 - DNA, 120 bp, Artificial Sequence
  ENSG00000187240_8 (sequence is synthesized)
tgaaaaatattttccagaaacacttgacaaacttggcaaacgccttgaagaggtcttggctattagaacaattcatgagaagtttctctattttctacctgccagtgaagagaaaatcat

SEQ ID NO: 683995 - DNA, 120 bp, Artificial Sequence
  ENSG00000187240_9 (sequence is synthesized)
atgcctcactcgagtatttgaaccttttactggcctgaatcctgtgcaatataatccatatactgagcccttgtggaaagctgcggtgtctcaatatgaaaagattattgcacctgcgga

SEQ ID NO: 683996 - DNA, 120 bp, Artificial Sequence
  ENSG00000187240_10 (sequence is synthesized)
acaaaaaatagcaggaaaattgaaaaattatatttcagaaattcaagacagtccacagcagcttcttcaagcattcctgaaatataaagagttggtaaagcgtccaactataagcaaaga

SEQ ID NO: 683997 - DNA, 120 bp, Artificial Sequence
  ENSG00000187240_11 (sequence is synthesized)
attgatgttagaaagagaaactttactggcaagacttgtggactcaattaaagattttcgattagactttgagaatcggtgccgaggaattcctggtgatgcatctggaccactttctgg

SEQ ID NO: 683998 - DNA, 120 bp, Artificial Sequence
  ENSG00000187240_12 (sequence is synthesized)
caaaaatctttcagaagttgtcaacagtatagtttgggttcgccagttggaattgaaggtagatgatactatcaagattgcagaggctcttttatctgacttgccaggatttcgatgttt

SEQ ID NO: 683999 - DNA, 120 bp, Artificial Sequence
  ENSG00000187240_13 (sequence is synthesized)
ccatcaaagtgccaaagatctcttagaccagcttaaactatatgaacaggaacaatttgatgattggtccagggatattcaatcaggtttatctgattccagatctggtttgtgtattga

SEQ ID NO: 684000 - DNA, 120 bp, Artificial Sequence
  ENSG00000187240_14 (sequence is synthesized)
ggctagtagtcgaattatggaattggattctaatgatggattactaaaagtgcattattcagatcgtttggtgattcttctgagagaagttcgtcagctctctgcacttggctttgttat

SEQ ID NO: 684001 - DNA, 120 bp, Artificial Sequence
  ENSG00000187240_15 (sequence is synthesized)
tcctgccaaaatacagcaagttgcaaacattgcacagaaattctgcaagcaagcaattattcttaaacaagtggcacatttttataattctattgatcaacaaatgattcaaagtcagag

SEQ ID NO: 684002 - DNA, 120 bp, Artificial Sequence
  ENSG00000187240_16 (sequence is synthesized)
gccaatgatgttacaatctgccttagcatttgaacagataattaagaattcaaaagcaggaagtggagggaaatcacagataacttgggataatcctaaagaattagaaggctatatcca

SEQ ID NO: 684003 - DNA, 120 bp, Artificial Sequence
  ENSG00000187240_17 (sequence is synthesized)
aaaactccaaaatgctgctgaacggcttgccactgaaaatagaaaactgagaaaatggcacactacattttgtgaaaaggtggttgttcttatgaatattgatctgcttcggcagcaaca

SEQ ID NO: 684004 - DNA, 120 bp, Artificial Sequence
  ENSG00000187240_18 (sequence is synthesized)
gcgctggaaagatggattacaagaattgagaactggcttagcaactgtagaagcacagggattccaagcaagtgacatgcatgcatggaaacaacactggaatcatcaactgtacaaagc

SEQ ID NO: 684005 - DNA, 120 bp, Artificial Sequence
  ENSG00000187240_19 (sequence is synthesized)
tctggagcatcagtaccagatgggcttagaagcacttaatgagaatttgccagaaataaatatagacttaacttacaaacagggacgattacaattcaggcccccttttgaagaaatccg

SEQ ID NO: 684006 - DNA, 120 bp, Artificial Sequence
  ENSG00000187240_20 (sequence is synthesized)
ggctaaatattatagagaaatgaagagattcatcggcattccaaatcagtttaagggagtgggtgaggcaggagatgaatctattttttctattatgattgatagaaatgcaagtggatt

SEQ ID NO: 684007 - DNA, 120 bp, Artificial Sequence
  ENSG00000187240_21 (sequence is synthesized)
tttgacgattttcagcaaagcagaagatctgtttagaagattgtcagctgttttacaccaacataaggaatggattgtaattgggcaagttgatatggaagctctggtggaaaagcatct

SEQ ID NO: 684008 - DNA, 120 bp, Artificial Sequence
  ENSG00000187240_22 (sequence is synthesized)
ttttactgtacatgattgggagaaaaattttaaagcattaaaaataaaggggaaagaagtagaacgacttccaagtgctgtcaaggtagattgtttaaatattaattgcaaccctgtgaa

SEQ ID NO: 684009 - DNA, 120 bp, Artificial Sequence
  ENSG00000187240_23 (sequence is synthesized)
gactgtgattgatgatctcatccagaagttatttgatctgcttgttctttctttgaagaagtccatacaggctcatttacatgaaattgatacatttgttactgaggctatggaagtctt

SEQ ID NO: 684010 - DNA, 120 bp, Artificial Sequence
  ENSG00000187240_24 (sequence is synthesized)
aacaattatgccccagtctgtggaagaaattggtgatgcaaatctacaatatagtaagttacaagaacggaagccagagattttgcccttatttcaagaagctgaagacaaaaacagact

SEQ ID NO: 684011 - DNA, 120 bp, Artificial Sequence
  ENSG00000187240_25 (sequence is synthesized)
tttacgaactgtggctggtggaggtttagaaacaattagtaatttgaaagccaagtgggataaatttgagttaatgatggaaagtcaccaacttatgattaaagaccagattgaagtgat

SEQ ID NO: 684012 - DNA, 120 bp, Artificial Sequence
  ENSG00000187240_26 (sequence is synthesized)
gaaaggaaatgtgaaatcacgtcttcagatctattatcaagaactggaaaaatttaaagctcgttgggaccaactaaagcctggtgatgatgttattgaaactggccaacataatactct

SEQ ID NO: 684013 - DNA, 120 bp, Artificial Sequence
  ENSG00000187240_27 (sequence is synthesized)
tgataaaagtgcaaagttaataaaagagaaaaaaattgagtttgatgatcttgaagtcacaagaaaaaagctggttgatgattgccatcattttagactggaagagcctaatttctccct

SEQ ID NO: 684014 - DNA, 120 bp, Artificial Sequence
  ENSG00000187240_28 (sequence is synthesized)
ggcaagtagtatctctaaagatatcgagagctgtgcccaaatttgggccttttatgaagagtttcaacaaggatttcaggaaatggccaatgaagactggatcacttttcggactaagac

SEQ ID NO: 684015 - DNA, 120 bp, Artificial Sequence
  ENSG00000187240_29 (sequence is synthesized)
atacctgtttgaggaatttttgatgaactggcatgacagattaaggaaggttgaagaacattcagtgatgacagtgaaattacaatcagaggttgacaaatataaaatcgtaattcctat

SEQ ID NO: 684016 - DNA, 120 bp, Artificial Sequence
  ENSG00000187240_30 (sequence is synthesized)
cttgaaatatgtgagaggggagcatctttctccagatcactggcttgacctttttcgtctccttggacttcctagggggactagtctagagaaactactgtttggtgatttgctcagagt

SEQ ID NO: 684017 - DNA, 120 bp, Artificial Sequence
  ENSG00000187240_31 (sequence is synthesized)
agctgatacaattgtagccaaagctgccgaccttaaagatttaaatagtcgggcacaaggtgaagttacaatcagagaagctttacgtgaacttgatctttggggagttggagcagtgtt

SEQ ID NO: 684018 - DNA, 120 bp, Artificial Sequence
  ENSG00000187240_32 (sequence is synthesized)
tacattaattgattatgaagacagccaaagtcgaactatgaagctgattaaagactggaaagatatagtaaatcaggttggagataatagatgccttctccaatccttaaaggattctcc

SEQ ID NO: 684019 - DNA, 120 bp, Artificial Sequence
  ENSG00000187240_33 (sequence is synthesized)
ttattataaaggatttgaagataaagtatcaatttgggaaagaaaacttgcagagttagatgaatacctgcagaatttaaatcatattcagagaaagtgggtgtatttggaacccatttt

SEQ ID NO: 684020 - DNA, 120 bp, Artificial Sequence
  ENSG00000187240_34 (sequence is synthesized)
cggccgtggagcattgccaaaagaacagacacgcttcaacagagttgatgaagattttagatcaataatgactgatatcaagaaagacaatagagtcacaacattaactactcatgctgg

SEQ ID NO: 684021 - DNA, 120 bp, Artificial Sequence
  ENSG00000187240_35 (sequence is synthesized)
aataagaaattctctactaacaatacttgatcagcttcaaagatgtcagaaatcattaaatgaatttttggaggaaaaacgctcagcattcccaagattttattttattggtgatgatga

SEQ ID NO: 684022 - DNA, 120 bp, Artificial Sequence
  ENSG00000187240_36 (sequence is synthesized)
cttattagaaatattgggccagtctaccaacccatcagtgattcagtctcacctgaagaagctttttgctggtattaacagtgtttgctttgatgagaaatcaaaacatataactgcaat

SEQ ID NO: 684023 - DNA, 120 bp, Artificial Sequence
  ENSG00000187240_37 (sequence is synthesized)
gaaatctttagagggagaagttgtaccttttaaaaataaagttcctctatcaaataatgtagagacatggttgaatgatttggccttagaaatgaagaaaactttggaacagttgttgaa

SEQ ID NO: 684024 - DNA, 120 bp, Artificial Sequence
  ENSG00000187240_38 (sequence is synthesized)
ggaatgtgttactactgggcgaagttctcaaggtgcagttgacccatctctgttcccttcacagattttatgcttggcggagcagattaaattcactgaagatgtagaaaatgctattaa

SEQ ID NO: 684025 - DNA, 120 bp, Artificial Sequence
  ENSG00000187240_39 (sequence is synthesized)
agatcatagtcttcatcagattgaaacacaactggtgaataagttagagcaatatactaacattgatacaagttctgaggatccagggaatactgaatcgggcatcctggagcttaaact

SEQ ID NO: 684026 - DNA, 120 bp, Artificial Sequence
  ENSG00000187240_40 (sequence is synthesized)
taaagccctaattcttgacattatccataatattgatgtggtaaagcagttaaaccaaattcaggttcatacaactgaagactgggcttggaaaaaacaacttagattctatatgaaaag

SEQ ID NO: 684027 - DNA, 120 bp, Artificial Sequence
  ENSG00000187240_41 (sequence is synthesized)
tgatcatacatgttgtgttcaaatggtggattctgaatttcagtatacttatgaatatcagggtaatgcttccaaactggtttatactccactgacagacaagtgctacttaactctcac

SEQ ID NO: 684028 - DNA, 120 bp, Artificial Sequence
  ENSG00000187240_42 (sequence is synthesized)
tcaagccatgaagatgggacttggaggaaatccttatggaccagctggaactgggaaaacggaatcagtaaaggctttaggtggacttcttggaagacaagttttagtctttaattgtga

SEQ ID NO: 684029 - DNA, 120 bp, Artificial Sequence
  ENSG00000187240_43 (sequence is synthesized)
tgagggcatcgatgtgaagtcaatgggacgaatatttgttggtttggtgaagtgtggggcctggggttgttttgatgaatttaataggctggaagaatctgtactgtcagcagtttctat

SEQ ID NO: 684030 - DNA, 120 bp, Artificial Sequence
  ENSG00000187240_44 (sequence is synthesized)
gcaaatccagacaattcaagatgctttgaagaatcatagaactgtatgtgaactgcttggcaaggaggtagaagtaaattctaattctggaatttttatcactatgaatcctgctggaaa

SEQ ID NO: 684031 - DNA, 120 bp, Artificial Sequence
  ENSG00000187240_45 (sequence is synthesized)
aggttatggaggaagacaaaaactgcctgataatcttaaacagcttttcaggcccgtagctatgtctcatccagacaatgagcttattgcagaagttattctctattcggaaggctttaa

SEQ ID NO: 684032 - DNA, 120 bp, Artificial Sequence
  ENSG00000187240_46 (sequence is synthesized)
agacgctaaagtattgagcagaaaattggtagctattttcaatctatctagggaacttttgacacctcagcaacattatgattggggtttgagagctttgaagacagttctgagaggaag

SEQ ID NO: 684033 - DNA, 120 bp, Artificial Sequence
  ENSG00000187240_47 (sequence is synthesized)
tggaaatctccttagacagctaaacaaaagtggcactacacagaatgctaatgaaagtcatattgtggtacaagcactgaggcttaataccatgtcaaagtttacgtttactgattgcac

SEQ ID NO: 684034 - DNA, 120 bp, Artificial Sequence
  ENSG00000187240_48 (sequence is synthesized)
ccggtttgatgcactgataaaagatgtctttccgggaattgaattgaaagaagtggaatatgatgaactaagtgctgcattaaagcaggtctttgaagaggccaattatgaaattatacc

SEQ ID NO: 684035 - DNA, 120 bp, Artificial Sequence
  ENSG00000187240_49 (sequence is synthesized)
caatcagatcaaaaaggctttagaattgtatgaacagttatgccagaggatgggagttgttattgttggtccaagtggtgctggaaaatcaacgctttggagaatgttaagggctgcgct

SEQ ID NO: 684036 - DNA, 120 bp, Artificial Sequence
  ENSG00000187240_50 (sequence is synthesized)
ttgtaaaactggcaaagtagtgaaacaatatactatgaatcccaaagctatgcctcgatatcaattattaggccatattgacatggacacaagagaatggtctgatggtgttttgacaaa

SEQ ID NO: 684037 - DNA, 120 bp, Artificial Sequence
  ENSG00000187240_51 (sequence is synthesized)
tagtgctcgtcaagtggttcgggaacctcaagatgtcagctcatggataatctgtgatggtgatattgaccctgaatggatagaatctctgaattctgttctggatgataatcgactgct

SEQ ID NO: 684038 - DNA, 120 bp, Artificial Sequence
  ENSG00000187240_52 (sequence is synthesized)
gactatgcccagtggagaaaggattcagtttggcccaaatgttaactttgtatttgaaactcatgatttaagttgtgcatcaccagccacaatatctagaatgggaatgatctttcttag

SEQ ID NO: 684039 - DNA, 120 bp, Artificial Sequence
  ENSG00000187240_53 (sequence is synthesized)
tgatgaagagacagatcttaattctctgataaaatcttggttgaggaatcagcctgctgaatatagaaataatcttgaaaattggattggagattattttgaaaaggctttacaatgggt

SEQ ID NO: 684040 - DNA, 120 bp, Artificial Sequence
  ENSG00000187240_54 (sequence is synthesized)
tctaaagcagaatgactatgtggtagaaacaagtttggttgggactgtgatgaatggtttgtcacatctacatggttgcagagatcatgacgaattcattattaatctcataaggggact

SEQ ID NO: 684041 - DNA, 120 bp, Artificial Sequence
  ENSG00000187240_55 (sequence is synthesized)
ctgaatatgaagtcacgtttggaatttaccaaagaggtttttcattgggcacgagaatctcctccagactttcacaaacctatggatacctactatgactctactaggggtcgattagca

SEQ ID NO: 684042 - DNA, 120 bp, Artificial Sequence
  ENSG00000187240_56 (sequence is synthesized)
acatatgtgcttaagaagccagaagacttgactgctgatgatttcagtaacggcttaactcttccagtcattcagactcctgacatgcaacgaggtctagattatttcaaaccatggtta

SEQ ID NO: 684043 - DNA, 120 bp, Artificial Sequence
  ENSG00000187240_57 (sequence is synthesized)
agttctgatactaaacagccctttattctggtaggaccagaaggatgtggcaaagggatgctgctcaggtacgcattttcacaactccggtccactcaaattgctacagttcactgtagt

SEQ ID NO: 684044 - DNA, 120 bp, Artificial Sequence
  ENSG00000187240_58 (sequence is synthesized)
gcacaaaccacttctcgacatctcctgcagaaactgagccagacttgcatggtaatcagtactaatactggtcgtgtatacagaccaaaagactgtgaaagacttgttctgtacttaaaa

SEQ ID NO: 684045 - DNA, 120 bp, Artificial Sequence
  ENSG00000187240_59 (sequence is synthesized)
gatatcaacctacctaaacttgataaatgggggaccagtactttggtagcattcctacaacaggtattgacgtatcaaggattttatgatgaaaatttggaatgggttggtctagaaaat

SEQ ID NO: 684046 - DNA, 120 bp, Artificial Sequence
  ENSG00000187240_60 (sequence is synthesized)
attcaaattgtggcttctatgtcagctggaggaagactgggaagacataaacttactaccagatttacttccatcgttcgtctttgttctatagattacccagaaagagagcagttacaa

SEQ ID NO: 684047 - DNA, 120 bp, Artificial Sequence
  ENSG00000187240_61 (sequence is synthesized)
acgatttatggagcatatttggaaccagttctacataaaaatctgaagaatcattctatttggggttcttcatcaaaaatttatcttttagcaggatctatggtacaagtgtatgaacag

SEQ ID NO: 684048 - DNA, 120 bp, Artificial Sequence
  ENSG00000187240_62 (sequence is synthesized)
gtgcgagccaaatttacagttgatgattatagtcactatttctttactccttgcattcttacccaatgggttcttggcttatttagatatgatttagaaggaggatcctcaaaccatcca

SEQ ID NO: 684049 - DNA, 120 bp, Artificial Sequence
  ENSG00000187240_63 (sequence is synthesized)
ctagattatgtgttagaaattgtagcatatgaggcacggcgcttatttcgtgacaaaattgttggtgcaaaggaacttcatttatttgacatcattttaacatcagtgtttcaaggagat

SEQ ID NO: 684050 - DNA, 120 bp, Artificial Sequence
  ENSG00000187240_64 (sequence is synthesized)
tggggctcagacatattagacaatatgtcagatagtttctacgttacatggggagctcggcataattcaggagcaagggcagccccaggacaaccattacctccacatggaaaaccactt

SEQ ID NO: 684051 - DNA, 120 bp, Artificial Sequence
  ENSG00000187240_65 (sequence is synthesized)
ggaaaactaaactctactgatctcaaggatgttattaaaaagggtcttattcattatggacgagataaccagaatttagacattttacttttccacgaagtcttggagtatatgtctagg

SEQ ID NO: 684052 - DNA, 120 bp, Artificial Sequence
  ENSG00000187240_66 (sequence is synthesized)
atagatagagtgctgagtttccctggaggttcacttctattagcaggacgcagtggtgtaggtcgtcggaccatcacttctttagtcagtcacatgcatggagcggtcctgttttctcca

SEQ ID NO: 684053 - DNA, 120 bp, Artificial Sequence
  ENSG00000187240_67 (sequence is synthesized)
aagatttccagaggatatgaactgaagcagttcaaaaatgatctcaaacatgtgctgcaacttgcaggaattgaagcacaacaggtagttttacttcttgaggattaccagtttgtacat

SEQ ID NO: 684054 - DNA, 120 bp, Artificial Sequence
  ENSG00000187240_68 (sequence is synthesized)
cctacatttttggagatgatcaatagccttttgtcttcaggtgaagttcctggactctatactcttgaagaattagagcccttgctgttaccacttaaggatcaagcttcacaagatggt

SEQ ID NO: 684055 - DNA, 120 bp, Artificial Sequence
  ENSG00000187240_69 (sequence is synthesized)
ttttttggaccagtcttcaattacttcacatatagaattcagcaaaacttgcatattgtcttgataatggattctgcaaattcaaacttcatgataaactgtgagagtaatccagctttg

SEQ ID NO: 684056 - DNA, 120 bp, Artificial Sequence
  ENSG00000187240_70 (sequence is synthesized)
cataagaaatgccaggtgttgtggatggagggttggtccaatagcagtatgaagaaaatacctgaaatgttattcagtgaaacaggtggtggagaaaaatacaatgataaaaaacgaaaa

SEQ ID NO: 684057 - DNA, 120 bp, Artificial Sequence
  ENSG00000187240_71 (sequence is synthesized)
gaagaaaagaaaaaaaattcagttgatcctgattttctaaaatcatttttattaatccatgaatcttgtaaagcatatggtgctacaccaagccgatacatgacctttttacatgtgtat

SEQ ID NO: 684058 - DNA, 120 bp, Artificial Sequence
  ENSG00000187240_72 (sequence is synthesized)
tctgccattagtagtagcaagaaaaaggaattattaaaaagacaaagtcatttgcaggctggtgtatctaaactaaatgaagctaaagctcttgtggatgaactgaacagaaaagctgga

SEQ ID NO: 684059 - DNA, 120 bp, Artificial Sequence
  ENSG00000187240_73 (sequence is synthesized)
gaacaaagtgtgttacttaaaacgaagcaagatgaagcagatgctgcccttcaaatgatcacagtgtcaatgcaggatgctagtgagcaaaaaacagaacttgaaagactgaagcacaga

SEQ ID NO: 684060 - DNA, 120 bp, Artificial Sequence
  ENSG00000187240_74 (sequence is synthesized)
atagcagaagaagttgttaaaattgaagaaagaaaaaataaaattgatgatgaattaaaagaagtacaacctttagtcaatgaagctaaactagcagttggaaacattaagcccgaatca

SEQ ID NO: 684061 - DNA, 120 bp, Artificial Sequence
  ENSG00000187240_75 (sequence is synthesized)
ctttcagaaattcgctcactacgcatgccacctgatgtaattagagatattcttgaaggagttttaaggttgatgggtatctttgatacatcttgggtgagcatgaaaagtttccttgca

SEQ ID NO: 684062 - DNA, 120 bp, Artificial Sequence
  ENSG00000187240_76 (sequence is synthesized)
aaaagaggtgtaagagaagacatagcaacctttgatgcccgaaatatttcaaaggaaataagagagagtgttgaagaacttctttttaaaaataaaggctcttttgatccaaagaatgct

SEQ ID NO: 684063 - DNA, 120 bp, Artificial Sequence
  ENSG00000187240_77 (sequence is synthesized)
aagcgtgccagtactgcagctgcacctttggctgcctgggtgaaagccaatattcagtattcccatgtcttggaacgaattcatcctttggaaactgaacaggcaggattagaatcgaat

SEQ ID NO: 684064 - DNA, 120 bp, Artificial Sequence
  ENSG00000187240_78 (sequence is synthesized)
ctgaagaaaactgaagacagaaaaaggaaactagaggagcttcttaattctgttggtcaaaaggtatcagaactcaaagaaaaatttcagagcaggacttcagaagctgccaaacttgag

SEQ ID NO: 684065 - DNA, 120 bp, Artificial Sequence
  ENSG00000187240_79 (sequence is synthesized)
gctgaagtaagcaaggcacaagaaacaatcaaagctgcagaagtcttaattaatcagcttgacagagaacataagagatggaatgcacaggttgtagagataacagaggaattagctact

SEQ ID NO: 684066 - DNA, 120 bp, Artificial Sequence
  ENSG00000187240_80 (sequence is synthesized)
cttcctaaaagagctcaacttgctgctgcatttattacatatctttctgctgctcctgaatctctgagaaaaacctgtttggaagaatggaccaagtcagctggtcttgagaaatttgat

SEQ ID NO: 684067 - DNA, 120 bp, Artificial Sequence
  ENSG00000187240_81 (sequence is synthesized)
ctgaggagatttctttgtactgaaagtgagcagttaatttggaaaagtgaaggcctaccatcagatgacctttccatagaaaatgctcttgtaatattacagatcattggtttgaaatca

SEQ ID NO: 684068 - DNA, 120 bp, Artificial Sequence
  ENSG00000187240_82 (sequence is synthesized)
tggagtcgagtgtgcccatttcttatagatccttcttcccaagctacagagtggttaaaaacacatttgaaagactcacgtttagaagttatcaatcagcaggatagtaactttatcaca

SEQ ID NO: 684069 - DNA, 120 bp, Artificial Sequence
  ENSG00000187240_83 (sequence is synthesized)
gctcttgaattagcagtacgttttgggaaaacccttattatacaagagatggatggtgtagaacctgttctttatccattattgagacgagatctggttgctcaaggaccacgttatgtg

SEQ ID NO: 684070 - DNA, 120 bp, Artificial Sequence
  ENSG00000187240_84 (sequence is synthesized)
gtacaaataggtgacaaaattattgactacaatgaagaattccgcctctttttgtcaacaagaaacccaaatccttttattccaccggatgcagcttccattgttactgaggttaacttt

SEQ ID NO: 684071 - DNA, 120 bp, Artificial Sequence
  ENSG00000187240_85 (sequence is synthesized)
actacaacaagaagtggattacgagggcagcttttagctttaaccattcagcatgagaaacctgatttagaagaacagaaaacaaaactattacaacaggaagaagataagaaaatacag

SEQ ID NO: 684072 - DNA, 120 bp, Artificial Sequence
  ENSG00000187240_86 (sequence is synthesized)
ctagccaagctcgaagaatctcttctagagacacttgccacatctcaaggcaatattttggaaaataaggatttgattgagtctttgaatcagacaaaagcaagcagtgcacttattcaa

SEQ ID NO: 684073 - DNA, 120 bp, Artificial Sequence
  ENSG00000187240_87 (sequence is synthesized)
gagtcacttaaagaatcttacaaactccaaatttcccttgatcaagaacgggatgcctatctccccctggctgagagtgccagcaagatgtacttcattatttctgatttgtccaaaatt

SEQ ID NO: 684074 - DNA, 120 bp, Artificial Sequence
  ENSG00000187240_88 (sequence is synthesized)
aataacatgtaccgttttagtttggctgcttttctccgacttttccaacgagctctacaaaacaaacaggattctgaaaatacagaacagagaatccagtcacttatcagctcattacaa

SEQ ID NO: 684075 - DNA, 120 bp, Artificial Sequence
  ENSG00000187240_89 (sequence is synthesized)
catatggtatatgaatatatatgtcgttgtctatttaaggctgatcagttgatgttcgctttgcattttgttcgaggcatgcatcctgaactttttcaagaaaatgaatgggatacgttt

SEQ ID NO: 684076 - DNA, 120 bp, Artificial Sequence
  ENSG00000187240_90 (sequence is synthesized)
acaggtgtggttgttggagacatgttacggaaagctgactctcaacaaaaaatacgtgatcagcttccgtcttggatagatcaggaacgaagctgggccgtggcaacattaaagattgct

SEQ ID NO: 684077 - DNA, 120 bp, Artificial Sequence
  ENSG00000187240_91 (sequence is synthesized)
ctccccagtctttatcagaccctctgctttgaagatgcagctctgtggcgtacttattataataattcaatgtgtgagcaagagtttccatctatccttgcaaagaaagtttccttattt

SEQ ID NO: 684078 - DNA, 120 bp, Artificial Sequence
  ENSG00000187240_92 (sequence is synthesized)
cagcagattcttgtagtacaggcgctaagaccggacagattgcaaagtgccatggctctttttgcatgtaaaactctgggactgaaagaggtgtccccactgcctctaaatctcaaacgt

SEQ ID NO: 684079 - DNA, 120 bp, Artificial Sequence
  ENSG00000187240_93 (sequence is synthesized)
ttatacaaagagacactggaaattgaacccatcttgataattatttctccgggtgctgatccttctcaggaacttcaagaactagctaatgctgaaagaagcggagagtgttatcaccag

SEQ ID NO: 684080 - DNA, 120 bp, Artificial Sequence
  ENSG00000187240_94 (sequence is synthesized)
gttgccatgggtcaaggtcaagctgatttagcaattcaaatgctaaaagaatgtgcccgcaatggagactggctctgtttgaagaacttacatcttgtggtatcttggctgccagttctg

SEQ ID NO: 684081 - DNA, 120 bp, Artificial Sequence
  ENSG00000187240_95 (sequence is synthesized)
gaaaaggaattgaatactcttcaacctaaagatacctttcgtctttggctcactgcagaagttcatcccaactttactcctattttactacagtcaagtctgaagataacatatgagtca

SEQ ID NO: 684082 - DNA, 120 bp, Artificial Sequence
  ENSG00000187240_96 (sequence is synthesized)
cctccaggtttaaagaagaatttaatgcgtacttatgagtcttggactcctgagcaaattagcaaaaaagataatacacatcgagctcatgctctcttcagtcttgcatggtttcatgct

SEQ ID NO: 684083 - DNA, 120 bp, Artificial Sequence
  ENSG00000187240_97 (sequence is synthesized)
gcatgtcaagaaagaagaaactatattcctcagggttggacaaagttttatgaattttctttatcagatcttcgggctgggtacaacattattgacagactttttgatggtgccaaagat

SEQ ID NO: 684084 - DNA, 120 bp, Artificial Sequence
  ENSG00000187240_98 (sequence is synthesized)
gtacaatgggaatttgtacatggtttacttgaaaatgctatttatggaggacgtatagacaactattttgaccttagagttcttcagtcatacctgaagcagttttttaattcttcagtt

SEQ ID NO: 684085 - DNA, 120 bp, Artificial Sequence
  ENSG00000187240_99 (sequence is synthesized)
attgatgtattcaaccaaaggaacaagaaaagcatttttccatattccgtatctctaccacaatcctgcagcattttggactatcgtgctgtcattgagaaaattccagaggacgacaaa

SEQ ID NO: 684086 - DNA, 120 bp, Artificial Sequence
  ENSG00000187240_100 (sequence is synthesized)
cctagtttctttggtctgcctgccaatatcgctcgctcatctcagcgcatgatcagttctcaggttatttcacagttgaggattttgggcagatccataacagctggttccaaatttgat

SEQ ID NO: 684087 - DNA, 120 bp, Artificial Sequence
  ENSG00000187240_101 (sequence is synthesized)
agagaaatctggtctaatgaactttctcctgtcctcaatctctggaagaaactaaaccagaattcaaacctaatacatcagaaagtgcctcctcctaacgatcgacaaggatctccaata

SEQ ID NO: 684088 - DNA, 120 bp, Artificial Sequence
  ENSG00000187240_102 (sequence is synthesized)
ctgtcattcatcattcttgaacaatttaatgctattcgtttagtacaaagtgtccaccagtctcttgctgctctcagcaaagtcatcagaggaactactttactgagttcagaagtacaa

SEQ ID NO: 684089 - DNA, 120 bp, Artificial Sequence
  ENSG00000187240_103 (sequence is synthesized)
aaattggcaagtgctttattaaaccaaaagtgtcctctcgcatggcagagcaagtgggaaggcccagaagatcccttacaatacctgagaggtcttgttgcccgtgcccttgcaatacag

SEQ ID NO: 684090 - DNA, 120 bp, Artificial Sequence
  ENSG00000187240_104 (sequence is synthesized)
aactgggtagataaagctgaaaaacaggctcttctctctgaaacacttgacctatcagaacttttccatccagacacatttcttaatgctcttcgccaggaaactgcaagggcagtgggt

SEQ ID NO: 684091 - DNA, 120 bp, Artificial Sequence
  ENSG00000187240_105 (sequence is synthesized)
cgttctgtggatagccttaaatttgtagcctcatggaaaggtcgactgcaagaagcaaagctacaaattaagatcagtggcttgttactagaaggatgtagttttgatggaaatcaactt

SEQ ID NO: 684092 - DNA, 120 bp, Artificial Sequence
  ENSG00000187240_106 (sequence is synthesized)
tctgaaaatcagcttgattctcccagcgtgtcatcagtgctcccttgttttatgggctggattccacaggatgcatgtggtccatattctccggatgagtgcatctctttgcctgtttac

SEQ ID NO: 684093 - DNA, 120 bp, Artificial Sequence
  ENSG00000187240_107 (sequence is synthesized)
acaagtgctgaaagggatcgtgtggttaccaatattgatgttccatgtgggggcaaccaagaccagtggattcagtgtggagcagctctattcctaaaaaatcagtagaatctaatgaca

SEQ ID NO: 684094 - DNA, 120 bp, Artificial Sequence
  ENSG00000187240_108 (sequence is synthesized)
acaaaagccatcttcacaaaagggaacattgattctttaagctttaaatcaaacatgtggtcagtctacatttgaaatgttagttcaaaatattaacatatagttatgttgttgatgtca

SEQ ID NO: 684095 - DNA, 120 bp, Artificial Sequence
  ENSG00000187240_109 (sequence is synthesized)
ctgaaattttaatgtgtaaaagcagcactgtgcatcttttaaagtaataaattaatggagttattgttaaaacagagtattcttttgacaacattaaatatttctgtgagaaagttcact

SEQ ID NO: 684096 - DNA, 120 bp, Artificial Sequence
  ENSG00000187240_110 (sequence is synthesized)
tttccagtggctcaaaaatttgttttaggtcagagattttaagtggtatattaaccaataataaatattttggctgtcatttgtgtcataattatttaataaaagagcattcataatttt

SEQ ID NO: 684097 - DNA, 120 bp, Artificial Sequence
  ENSG00000187240_111 (sequence is synthesized)
atagcgactacccctggcaaccgcgaagctctgcggtcccgcggtcgggctacgggtttgagcaaagctcctctcttcccttcacttccctccggactggtttcttcttccttccccctt

SEQ ID NO: 684098 - DNA, 120 bp, Artificial Sequence
  ENSG00000187240_112 (sequence is synthesized)
taattattgtcataattatatacttataactaatatcttaaggtaattcaaataggaataattcaggtgacataataatggaggataaattctggttattaaacattcagcttttttgtg

SEQ ID NO: 684099 - DNA, 120 bp, Artificial Sequence
  ENSG00000187240_113 (sequence is synthesized)
agaactagaccactgacctgaattatttgtttttaatttacctttcattttatgttagcctgagtttagaaatgttataatgtctcttttattcattctgtttatttatcttccaatctc

SEQ ID NO: 684100 - DNA, 120 bp, Artificial Sequence
  ENSG00000187240_114 (sequence is synthesized)
gttatttcacagttgaggattttgggcagatccataacagctggttccaaatttgatagagaaatctggtctaatgaactttctcctgtcctcaatctctggaagaaactaaaccagtgt

SEQ ID NO: 684101 - DNA, 120 bp, Artificial Sequence
  ENSG00000187240_115 (sequence is synthesized)
tatgaatcacttttataaatatcccataagtctggccttttttaatatacaatattgcttcatattttgtttaaatacaaaaaaagtcttcctttaagggaatcagctttcatcaaaaag

SEQ ID NO: 684102 - DNA, 120 bp, Artificial Sequence
  ENSG00000187240_116 (sequence is synthesized)
taaacaaacacaaatcattttacataaaatacataaaaaattatgtgatatgttacacataaaagctagaggatacacaaatccagagagctaagccaagaatcagtttgctaatcactt

SEQ ID NO: 684103 - DNA, 120 bp, Artificial Sequence
  ENSG00000187240_117 (sequence is synthesized)
ttagaaaagctctcaggtaaaagtaaaagttgtcacaatttattacaagtgacagacttttagtgttgcattctggccgttcaaaattataaggactcttgatatcaaattgttttattt

SEQ ID NO: 684104 - DNA, 120 bp, Artificial Sequence
  ENSG00000187240_118 (sequence is synthesized)
cctatcccagaaataaacctctgtgtttgttaataaccctggaatgtttttaaataatcttgagaagttatgaagcatgactgttgcagaagataactctagtggattgttaatcatttt

SEQ ID NO: 684105 - DNA, 120 bp, Artificial Sequence
  ENSG00000187240_119 (sequence is synthesized)
agatgtatcagaatctacaataagattacagtataatttctgaatttcttttgttccaaatattggccttttggtctgtaaaactttaaataaaccaaactagttttgtcttttgtgatg

SEQ ID NO: 684106 - DNA, 120 bp, Artificial Sequence
  ENSG00000187240_120 (sequence is synthesized)
gaaatcagtctcaaagaagttgacagtgaacactagtccaggccttactgactttattctcaaagtaccataatctttgttttcatatatttggaatcggtgaacacaatggaaagcata

SEQ ID NO: 684107 - DNA, 120 bp, Artificial Sequence
  ENSG00000187240_121 (sequence is synthesized)
gctcttaaggtagaatagagtaacctctgacatttgcgactttaatgcatattttcatgacatatttgtttccatggcagatcagtggcttgttactagaaggatgtagttttgatggaa

SEQ ID NO: 684108 - DNA, 120 bp, Artificial Sequence
  ENSG00000187240_122 (sequence is synthesized)
gatggatattatgccaaattgcaatgccagactttacaatgtaaaatggaaatgttatatatatattttctagctaccatttcagagcatttggaagctgaattactttcttattgaaaa

SEQ ID NO: 684109 - DNA, 120 bp, Artificial Sequence
  ENSG00000187242_0 (sequence is synthesized)
caacttcctctccagttgtggccaccttccccaggccatggatctctccaacaacaccatgtcactctcagtgcgcacccccggactgtcccggcggctctcctcgcagagtgtgatagg

SEQ ID NO: 684110 - DNA, 120 bp, Artificial Sequence
  ENSG00000187242_1 (sequence is synthesized)
cagacccaggggcatgtctgcttccagtgttggaagtggttatgggggaagtgcctttggctttggagccagctgtgggggaggcttttctgctgcttccatgtttggttctagttccgg

SEQ ID NO: 684111 - DNA, 120 bp, Artificial Sequence
  ENSG00000187242_2 (sequence is synthesized)
ctttgggggtggctccggaagttccatggcaggaggactgggtgctggttatgggagagccctgggtggaggtagctttggagggctggggatgggatttgggggcagcccaggaggtgg

SEQ ID NO: 684112 - DNA, 120 bp, Artificial Sequence
  ENSG00000187242_3 (sequence is synthesized)
ctctctaggtattctctcgggcaatgatggaggccttctttctggatcagaaaaagaaactatgcaaaatcttaatgatagattagcttcctacctggataaggtgcgagctctagaaga

SEQ ID NO: 684113 - DNA, 120 bp, Artificial Sequence
  ENSG00000187242_4 (sequence is synthesized)
ggctaatactgagctagaaaataaaattcgagaatggtatgaaacacgaggaactgggactgcagatgcttcacagagcgattacagcaaatattatccactgattgaagacctcaggaa

SEQ ID NO: 684114 - DNA, 120 bp, Artificial Sequence
  ENSG00000187242_5 (sequence is synthesized)
taagatcatttcagccagcattggaaatgcccagctcctcttgcagattgacaatgcgagactagctgctgaggacttcaggatgaagtatgagaatgaactggccctgcgccagggcgt

SEQ ID NO: 684115 - DNA, 120 bp, Artificial Sequence
  ENSG00000187242_6 (sequence is synthesized)
agaggccgacatcaatggcctgcgccgggtgctggacgagctgaccctgaccaggaccgacctggagatgcagatcgagagcctgaacgaggagctggcctacatgaagaagaaccacga

SEQ ID NO: 684116 - DNA, 120 bp, Artificial Sequence
  ENSG00000187242_7 (sequence is synthesized)
ccaggctcctcaatgatatgcgggcgcagtatgaaaccatcgctgagcagaatcggaaggacgctgaagcctggttcattgaaaagagcggggagctccgtaaggagattagcaccaaca

SEQ ID NO: 684117 - DNA, 120 bp, Artificial Sequence
  ENSG00000187242_8 (sequence is synthesized)
ccgagcagcttcagtccagcaagagcgaggtcaccgacctgcgtcgcgcctttcagaacctggagatcgagctacagtcccagctcgccatgaagaaatccctggaggactccttggccg

SEQ ID NO: 684118 - DNA, 120 bp, Artificial Sequence
  ENSG00000187242_9 (sequence is synthesized)
aagccgagggcgattactgcgcgcagctgtcccaggtgcagcagctcatcagcaacctggaggcacagctgctccaggtgcgcgcggacgcagagcgccagaacgtggaccaccagcggc

SEQ ID NO: 684119 - DNA, 120 bp, Artificial Sequence
  ENSG00000187242_10 (sequence is synthesized)
tgctgaatgtcaaggcccgcctggagctggagattgagacctaccgccgcctgctggacggggaggcccaaggtgatggtttggaggaaagtttatttgtgacagactccaaatcacaag

SEQ ID NO: 684120 - DNA, 120 bp, Artificial Sequence
  ENSG00000187242_11 (sequence is synthesized)
cacagtcaactgattcctctaaagacccaaccaaaacccgaaaaatcaagacagttgtgcaggagatggtgaatggtgaggtggtctcatctcaagttcaggaaattgaagaactaatgt

SEQ ID NO: 684121 - DNA, 120 bp, Artificial Sequence
  ENSG00000187242_12 (sequence is synthesized)
aaaatttcacaagatctgccccatgattggttccttaggaacaagaaatttacaagtagaaattattcctttcagagtaacatgctgtattacttcaatccctatttttgtctgttccat

SEQ ID NO: 684122 - DNA, 120 bp, Artificial Sequence
  ENSG00000187242_13 (sequence is synthesized)
tttctttggattccctattcacattgaatcctttttgcccttctgaaacaatattcagtcacaagtcattttggtcatgttggtctttgtaacaaatcaaaattaccttatatccttctg

SEQ ID NO: 684123 - DNA, 120 bp, Artificial Sequence
  ENSG00000187242_14 (sequence is synthesized)
gacctggagtagtcttttaacgaactttcttctggtaacccggaatattttttaatcatagagctttaatcaagtagtattgttttaatagagttaattgtaataaaagatgaatggtaa

SEQ ID NO: 684124 - DNA, 120 bp, Artificial Sequence
  ENSG00000187242_15 (sequence is synthesized)
ggacgctgaagcctggttcattgaaaaggtaacacaaacaacaaaggctttgatacattcacagaaaggcctgcgaacgagctcagcgctcgagccccctggctgtctttgctgttgcag

SEQ ID NO: 684125 - DNA, 120 bp, Artificial Sequence
  ENSG00000187242_16 (sequence is synthesized)
gtgcgcaaacagacgtagcatcctttggacttccaaagaaaatgctgcatccaaattacattagccgttggctaccctcctcttttcggtcccctccatcgttatttctatgccatttcc

SEQ ID NO: 684126 - DNA, 120 bp, Artificial Sequence
  ENSG00000187242_17 (sequence is synthesized)
aaaagagtaacttattttcaacggcttttagaaattccacttagagaggggctgctgctatttacagccacggcagccagccaaagggaaaattattccctgggatgctgtggtattggg

SEQ ID NO: 684127 - DNA, 120 bp, Artificial Sequence
  ENSG00000187242_18 (sequence is synthesized)
attcatcgctggtaggaaagtattgccttataatttattcacttttcttctcctccccaactgaacagtaaacaatggtgggaaaaaaggaaaggaaaaacacaacagcaaaaactgcat

SEQ ID NO: 684128 - DNA, 120 bp, Artificial Sequence
  ENSG00000187242_19 (sequence is synthesized)
tgcacagatttaagcaagaaatagccctgaagatcagtggccttgttcaaatggttgtgttgattccctcaactgctttgcacttggttttcaggtatgagaatgaactggccctgcgcc

SEQ ID NO: 684129 - DNA, 120 bp, Artificial Sequence; identical to SEQ ID NO: 445085
  ENSG00000187243_0 (sequence is synthesized)

SEQ ID NO: 684130 - DNA, 120 bp, Artificial Sequence
  ENSG00000187243_1 (sequence is synthesized)
ctgagctctcatctccctgggacccgcagcatggctgagggaagcttcagcgtgcaatcggaaagctacagtgttgaagacatggatgagggtagcgacgaagtcggggaggaagagatg

SEQ ID NO: 684131 - DNA, 120 bp, Artificial Sequence
  ENSG00000187243_2 (sequence is synthesized)
gttgaaggcaacgactatgaagaattcggtgcgtttggtggctatggcaccctcaccagctttgacatccatatcctcagagccttcggaagcttgggtccaggccttcgcatcttatcg

SEQ ID NO: 684132 - DNA, 120 bp, Artificial Sequence
  ENSG00000187243_3 (sequence is synthesized)
aatgagccctgggaactggaaaaccctgtgctggcccagaccctggtggaggcattgcagctggatccggaaacacttgccaatgagacggccgcccgtgctgccaacgtagcccgcgcc

SEQ ID NO: 684133 - DNA, 120 bp, Artificial Sequence
  ENSG00000187243_4 (sequence is synthesized)
gccgcctccaaccgtgcggctcgggccgctgccgccgctgcccgtaccgccttcagtcaggtggtcgctagccaccgggtggccacgccgcaggtctcaggagaggatacccagcccacg

SEQ ID NO: 684134 - DNA, 120 bp, Artificial Sequence
  ENSG00000187243_5 (sequence is synthesized)
acctacgccgccgaggctcaggggcccacccctgagccaccccttgcttctccgcagacctcccagatgttagtcaccagtaagatggctgcccccgaggctccggcaacctccgcacag

SEQ ID NO: 684135 - DNA, 120 bp, Artificial Sequence
  ENSG00000187243_6 (sequence is synthesized)
tcccagacaggctccccggcccaggaggctgctactgagggccctagtagcgcctgtgctttctctcaggctccgtgtgccagggaggtggacgccaaccggcccagcacagccttcctg

SEQ ID NO: 684136 - DNA, 120 bp, Artificial Sequence
  ENSG00000187243_7 (sequence is synthesized)
ggccagaatgatgtcttcgatttcactcagccggcaggtgtcagtggcatggccttcccgcgccccaagagacctgccccagcccaagaggctgccacagagggccccagtgctgcctct

SEQ ID NO: 684137 - DNA, 120 bp, Artificial Sequence
  ENSG00000187243_8 (sequence is synthesized)
ggtgtgccccagacgggacctggcagggaggtggcagccacccggcccaagaccaccaagtcggggaaggcgctggccaagactcggtgggtggagcctcagaatgttgtggcagcagct

SEQ ID NO: 684138 - DNA, 120 bp, Artificial Sequence
  ENSG00000187243_9 (sequence is synthesized)
gctgccaaggccaagatggccacgagcatccctgagccggagggtgcagctgctgccactgctcagcacagtgctgagccctgggccaggatgggaggcaagaggaccaagaagtccaag

SEQ ID NO: 684139 - DNA, 120 bp, Artificial Sequence
  ENSG00000187243_10 (sequence is synthesized)
ccacctggagagcatcacagccctcattgacggtgcgggctcagttggcccctcggcccccgatggccccgaggtcccagataccctcaaggcacgtactgtgcctgcccccccgcaacg

SEQ ID NO: 684140 - DNA, 120 bp, Artificial Sequence
  ENSG00000187243_11 (sequence is synthesized)
tgacccttctgcaggagagggcaaataagttggtgaaatacctgatgattaaggactacaagaagatccccatcaagcgcgcagacatgctgaaggatgtcatcagagaatatgatgaac

SEQ ID NO: 684141 - DNA, 120 bp, Artificial Sequence
  ENSG00000187243_12 (sequence is synthesized)
atttccctgagatcattgaacgagcaacgtacaccctggaaaagaagtttgggatccacctgaaggagatcgacaaggaagaacacctgtatattcttgtctgcacacgggactcctcag

SEQ ID NO: 684142 - DNA, 120 bp, Artificial Sequence
  ENSG00000187243_13 (sequence is synthesized)
ctcgcctccttggaaaaaccaaggacactcccaggctgagtctcctcttggtgattctgggcgtcatcttcatgaatggcaaccgtgccagcgaggctgtcctctgggaggcactacgca

SEQ ID NO: 684143 - DNA, 120 bp, Artificial Sequence
  ENSG00000187243_14 (sequence is synthesized)
agatgggactgcgccctggggtgaggcacccattcctcggcgatctgaggaagctcatcacagatgactttgtgaagcagaagtacctggaatacaagaagatccccaacagcaacccac

SEQ ID NO: 684144 - DNA, 120 bp, Artificial Sequence
  ENSG00000187243_15 (sequence is synthesized)
ctgagtatgaattcctctggggcctgcgagcccgccatgagaccagcaagatgagggtcctgagattcatcgcccagaatcagaaccgagacccccgggaatggaaggctcatttcttgg

SEQ ID NO: 684145 - DNA, 120 bp, Artificial Sequence
  ENSG00000187243_16 (sequence is synthesized)
aggctgtggatgatgctttcaagacaatggatgtggatatggccgaggaacatgccagggcccagatgagggcccagatgaatatcggggatgaagcgctgattggacggtggagctggg

SEQ ID NO: 684146 - DNA, 120 bp, Artificial Sequence
  ENSG00000187243_17 (sequence is synthesized)
atgacatacaagtcgagctcctgacctgggatgaggacggagattttggcgatgcctgggccaggatcccctttgctttctgggccagataccatcagtacattctgaatagcaaccgtg

SEQ ID NO: 684147 - DNA, 120 bp, Artificial Sequence
  ENSG00000187243_18 (sequence is synthesized)
ccaacaggagggccacgtggagagctggcgtcagcagtggcaccaatggaggggccagcaccagcgtcctagatggccccagcaccagctccaccatccggaccagaaatgctgccagag

SEQ ID NO: 684148 - DNA, 120 bp, Artificial Sequence
  ENSG00000187243_19 (sequence is synthesized)
ctggcgccagcttcttctcctggatccagcaccgttgacgaactgcagcgatcttactggccaagccagagcgcctcctctcagattccttctcgacacagcaccctaggcggcttcttc

SEQ ID NO: 684149 - DNA, 120 bp, Artificial Sequence; identical to SEQ ID NO: 445065
  ENSG00000187243_20 (sequence is synthesized)

SEQ ID NO: 684150 - DNA, 120 bp, Artificial Sequence
  ENSG00000187243_21 (sequence is synthesized)
ggaagctcatcacagatgactttgtgaagcagaagaacccggagctcagagaggagacgcctctgagcatggctcccagctggtacctggaatacaagaagatccccaacagcaacccac

SEQ ID NO: 684151 - DNA, 120 bp, Artificial Sequence
  ENSG00000187243_22 (sequence is synthesized)
cacaagtttgctgagcatgttttcactccacgtagtccctaccctcaggactggtgggagaagaggctggctcagtgcctggcacttagtaagcacgcagcacatgccagccgctgctgg

SEQ ID NO: 684152 - DNA, 120 bp, Artificial Sequence
  ENSG00000187243_23 (sequence is synthesized)
tactgctctcatttccaagagcctgctacgggtgaggtgcgtgccgggtgctttggcacggggagcctggtagccctgggtctctcctctctcaaatgatacagtccaagcacctggatg

SEQ ID NO: 684153 - DNA, 120 bp, Artificial Sequence
  ENSG00000187243_24 (sequence is synthesized)
ggggaagagcgggcatgggggtgcggtgaccctgcagcccctcaaggcccagtctctggagccatctctcacctctccgactctgagcttccactgcactggcagtttgactcgtgcttc

SEQ ID NO: 684154 - DNA, 120 bp, Artificial Sequence
  ENSG00000187243_25 (sequence is synthesized)
ctgccctcggcttctctctctcatgctctctgagtgtctcgccgtctggccaggtgggtctcatcgcctctgccagcgtcagctcccacagcgaaggtcttccgtgtgctgtcttcttct

SEQ ID NO: 684155 - DNA, 120 bp, Artificial Sequence
  ENSG00000187243_26 (sequence is synthesized)
gccctcgctcacgagtttggattccttgctgaggagcagttctaacccggaatcactgtctgccggcaggatgcccagcatggggtttggatctcacactctgttttctcccccacgtag

SEQ ID NO: 684156 - DNA, 120 bp, Artificial Sequence
  ENSG00000187243_27 (sequence is synthesized)
ccctcggtgctatcctctggccaaagaggtcctgggattgcaatagcctggtggtctggcgcaagggcgtggggtgccctgggctcggtagagagcaaaggatctcaccagggcggatgg

SEQ ID NO: 684157 - DNA, 120 bp, Artificial Sequence
  ENSG00000187243_28 (sequence is synthesized)
ggaagcggtgctggacgctgctcagccctctctctgctctgtggccccagatgacatctaagagagacagtcagagtcagggattccatcaaatccctacctggggcgtccctgaccaac

SEQ ID NO: 684158 - DNA, 120 bp, Artificial Sequence
  ENSG00000187243_29 (sequence is synthesized)
agtcctctggcctctgctgcatgcccaggcctccacagcgactccccgggggctgggaagtcatagtcatgctagggagggcccctgccaccgtctctgctcatggattcctttccttgc

SEQ ID NO: 684159 - DNA, 120 bp, Artificial Sequence; identical to SEQ ID NO: 445076
  ENSG00000187243_30 (sequence is synthesized)

SEQ ID NO: 684160 - DNA, 120 bp, Artificial Sequence; identical to SEQ ID NO: 445077
  ENSG00000187243_31 (sequence is synthesized)

SEQ ID NO: 684161 - DNA, 120 bp, Artificial Sequence; identical to SEQ ID NO: 445078
  ENSG00000187243_32 (sequence is synthesized)

SEQ ID NO: 684162 - DNA, 120 bp, Artificial Sequence; identical to SEQ ID NO: 445079
  ENSG00000187243_33 (sequence is synthesized)

SEQ ID NO: 684163 - DNA, 120 bp, Artificial Sequence; identical to SEQ ID NO: 445080
  ENSG00000187243_34 (sequence is synthesized)

SEQ ID NO: 684164 - DNA, 120 bp, Artificial Sequence; identical to SEQ ID NO: 445081
  ENSG00000187243_35 (sequence is synthesized)

SEQ ID NO: 684165 - DNA, 120 bp, Artificial Sequence; identical to SEQ ID NO: 445082
  ENSG00000187243_36 (sequence is synthesized)

SEQ ID NO: 684166 - DNA, 120 bp, Artificial Sequence
  ENSG00000187243_37 (sequence is synthesized)
tgccccctgccacctccacacccccttgctcctgtcctttccttctcctccctttcctgctcctctcctccctctcctctcccccttcttcctctcttctcctctttcccctccttctct

SEQ ID NO: 684167 - DNA, 120 bp, Artificial Sequence
  ENSG00000187243_38 (sequence is synthesized)
gtgtcccttccctgcccacaccccttcagtgaagcaggaagacggggcttgagtgcggcgcaccgctcccacacacagcgagggctgcctggtgactgctggatgaaaggaatgatagcc

SEQ ID NO: 684168 - DNA, 120 bp, Artificial Sequence
  ENSG00000187244_0 (sequence is synthesized)
cagcccgggctcagtctccgccgccgccgtgaacatggagcccccggacgcaccggcccaggcgcgcggggccccgcggctgctgttgctcgcagtcctgctggcggcgcacccagatgc

SEQ ID NO: 684169 - DNA, 120 bp, Artificial Sequence
  ENSG00000187244_1 (sequence is synthesized)
ctcgcagtcctgctggcggcgcacccagatgcccaggcggaggtgcgcttgtctgtacccccgctggtggaggtgatgcgaggaaagtctgtcattctggactgcacccctacgggaacc

SEQ ID NO: 684170 - DNA, 120 bp, Artificial Sequence
  ENSG00000187244_2 (sequence is synthesized)
cacgaccattatatgctggaatggttccttaccgaccgctcgggagctcgcccccgcctagcctcggctgagatgcagggctctgagctccaggtcacaatgcacgacacccggggccgc

SEQ ID NO: 684171 - DNA, 120 bp, Artificial Sequence
  ENSG00000187244_3 (sequence is synthesized)
agtcccccataccagctggactcccaggggcgcctggtgctggctgaggcccaggtgggcgacgagcgagactacgtgtgcgtggtgagggcaggggcggcaggcactgctgaggccact

SEQ ID NO: 684172 - DNA, 120 bp, Artificial Sequence
  ENSG00000187244_4 (sequence is synthesized)
gcgcggctcaacgtgtttgcaaagccagaggccactgaggtctcccccaacaaagggacactgtctgtgatggaggactctgcccaggagatcgccacctgcaacagccggaacgggaac

SEQ ID NO: 684173 - DNA, 120 bp, Artificial Sequence
  ENSG00000187244_5 (sequence is synthesized)
ccggcccccaagatcacgtggtatcgcaacgggcagcgcctggaggtgcccgtagagatgaacccagagggctacatgaccagccgcacggtccgggaggcctcgggcctgctctccctc

SEQ ID NO: 684174 - DNA, 120 bp, Artificial Sequence
  ENSG00000187244_6 (sequence is synthesized)
accagcaccctctacctgcggctccgcaaggatgaccgagacgccagcttccactgcgccgcccactacagcctgcccgagggccgccacggccgcctggacagccccaccttccacctc

SEQ ID NO: 684175 - DNA, 120 bp, Artificial Sequence
  ENSG00000187244_7 (sequence is synthesized)
accctgcactatcccacggagcacgtgcagttctgggtgggcagcccgtccaccccagcaggctgggtacgcgagggtgacactgtccagctgctctgccggggggacggcagccccagc

SEQ ID NO: 684176 - DNA, 120 bp, Artificial Sequence
  ENSG00000187244_8 (sequence is synthesized)
ccggagtatacgcttttccgccttcaggatgagcaggaggaagtgctgaatgtgaatctcgaggggaacttgaccctggagggagtgacccggggccagagcgggacctatggctgcaga

SEQ ID NO: 684177 - DNA, 120 bp, Artificial Sequence
  ENSG00000187244_9 (sequence is synthesized)
gtggaggattacgacgcggcagatgacgtgcagctctccaagacgctggagctgcgcgtggcctatctggaccccctggagctcagcgaggggaaggtgctttccttacctctaaacagc

SEQ ID NO: 684178 - DNA, 120 bp, Artificial Sequence
  ENSG00000187244_10 (sequence is synthesized)
gaccaaggactccactcccctgggcgatggccccatgctgtcgctcagttctatcaccttcgattccaatggcacctacgtatgtgaggcctccctgcccacagtcccggtcctcagccg

SEQ ID NO: 684179 - DNA, 120 bp, Artificial Sequence
  ENSG00000187244_11 (sequence is synthesized)
cacccagaacttcacgctgctggtccaaggctcgccagagctaaagacagcggaaatagagcccaaggcagatggcagctggagggaaggagacgaagtcacactcatctgctctgcccg

SEQ ID NO: 684180 - DNA, 120 bp, Artificial Sequence
  ENSG00000187244_12 (sequence is synthesized)
cggccatccagaccccaaactcagctggagccaattggggggcagccccgcagagccaatccccggacggcagggttgggtgagcagctctctgaccctgaaagtgaccagcgccctgag

SEQ ID NO: 684181 - DNA, 120 bp, Artificial Sequence
  ENSG00000187244_13 (sequence is synthesized)
ccgcgatggcatctcctgtgaagcctccaacccccacgggaacaagcgccatgtcttccacttcggcaccgtgagcccccagacctcccaggctggagtggccgtcatggccgtggccgt

SEQ ID NO: 684182 - DNA, 120 bp, Artificial Sequence
  ENSG00000187244_14 (sequence is synthesized)
cagcgtgggcctcctgctcctcgtcgttgctgtcttctactgcgtgagacgcaaagggggcccctgctgccgccagcggcgggagaagggggctccgccgccaggggagccagggctgag

SEQ ID NO: 684183 - DNA, 120 bp, Artificial Sequence
  ENSG00000187244_15 (sequence is synthesized)
ccactcggggtcggagcaaccagagcagaccggccttctcatgggaggtgcctccggaggagccaggggtggcagcgggggcttcggagacgagtgctgagccaagaacctcctagaggc

SEQ ID NO: 684184 - DNA, 120 bp, Artificial Sequence
  ENSG00000187244_16 (sequence is synthesized)
tgtccctggacctggagctgcaggcatcagagaaccagccctgctcacgccatgcccgcccccgccttccctcttccctcttccctctccctgcccagccctcccttccttcctctgccg

SEQ ID NO: 684185 - DNA, 120 bp, Artificial Sequence
  ENSG00000187244_17 (sequence is synthesized)
gcaaggcagggacccacagtggctgcctgcctccgggagggaaggagagggagggtgggtgggtgggagggggccttcctccagggaatgtgactctcccaggccccagaatagctcctg

SEQ ID NO: 684186 - DNA, 120 bp, Artificial Sequence
  ENSG00000187244_18 (sequence is synthesized)
gacccaagcccaaggcccagcctgggacaaggctccgagggtcggctggccggagctatttttacctcccgcctcccctgctggtccccccacctgacgtcttgctgcagagtctgacac

SEQ ID NO: 684187 - DNA, 120 bp, Artificial Sequence
  ENSG00000187244_19 (sequence is synthesized)
tggattcccccccctcaccccgcccctggtcccactcctgcccccgccctacctccgccccaccccatcatctgtggacactggagtctggaataaatgctgtttgtcacatcaacacca

SEQ ID NO: 684188 - DNA, 120 bp, Artificial Sequence
  ENSG00000187244_20 (sequence is synthesized)
aaccccatccccaccctcaaccccaagctcaacccataacctcaaccacatcttatcctccaccccacatcccaccacatccacctccatccccaacccatcctcatccccaactacagc

SEQ ID NO: 684189 - DNA, 120 bp, Artificial Sequence
  ENSG00000187244_21 (sequence is synthesized)
cccaaacccagccccagactaatccacagccatccccaactcatcctcatccccaactgcagccccaaacccaacccagggccatccccaaacccatccccaagccaaactcaacaccat

SEQ ID NO: 684190 - DNA, 120 bp, Artificial Sequence
  ENSG00000187244_22 (sequence is synthesized)
ccccttccctaatcacctctcctgcccctagctcagcctcatccccaactccatgcctgtctccaatcccaaccctgcccccaatctcccctcaactccaatccataacccccttcaaac

SEQ ID NO: 684191 - DNA, 120 bp, Artificial Sequence
  ENSG00000187244_23 (sequence is synthesized)
catcctcaactaagctcctctccagccctggccacatccccatcctcccccaacctccagccccaacacccatcatccccctgagctcacccttaactccaatttatcctccaagcctat

SEQ ID NO: 684192 - DNA, 120 bp, Artificial Sequence
  ENSG00000187244_24 (sequence is synthesized)
ctctcaccatccagccctcacctagccatttcccaaccctagtcctccaccgtcccgaagccaacttcacccatgtccccatccccaatcttgtccccattcctgactccaaatccaacc

SEQ ID NO: 684193 - DNA, 120 bp, Artificial Sequence
  ENSG00000187244_25 (sequence is synthesized)
cctaagcctccccaagctcctcctcatctaaccttgtctccagccccaaccacatggccgtcctcacctccaatccgtaaccatcccagaccgatcccaaagccaactccagctacattc

SEQ ID NO: 684194 - DNA, 120 bp, Artificial Sequence
  ENSG00000187244_26 (sequence is synthesized)
ccacctccaaccccaatagcatctgcatccccatgcccaaccctaaccccagtgccattaccagcccctaccccatccctatgccatccccacccagcacacccccatcctcacctccat

SEQ ID NO: 684195 - DNA, 120 bp, Artificial Sequence
  ENSG00000187244_27 (sequence is synthesized)
ccccagccgcatcctagtcccacccacccccatcctcagttcctccccctgccgtgtgcacctccaacacgacgcctccgcccgctgcctcctccccccaggccgccaggggagccaggg

SEQ ID NO: 684196 - DNA, 120 bp, Artificial Sequence
  ENSG00000187244_28 (sequence is synthesized)
ggagcccggctcatgagtctgagtggggagaactcctgagagaggagccccgacttcagagtcccagctccaagcccagggccatgcccgtgtctgcctcagatcgccacctgcaacagc

SEQ ID NO: 684197 - DNA, 120 bp, Artificial Sequence
  ENSG00000187244_29 (sequence is synthesized)
gagtcagggcacagcagggcagcaaaggttcattctctcatcagtgcctaaggcctgtagagatccaccaagccacactccttgttacagatggggtcactgagtcccactgaggggaag

SEQ ID NO: 684198 - DNA, 75 bp, Artificial Sequence
  ENSG00000187244_30 (sequence is synthesized)
aagtctagaatgacattgacctgctctggactgcgggctcttgagagagagaacagagacagacatcaagaaagc

SEQ ID NO: 684199 - DNA, 87 bp, Artificial Sequence
  ENSG00000187244_31 (sequence is synthesized)
tgctctccagccagaggaaagaaaatgagagacaatcgggagagggagagaccaagaggagaagggatgggaccggaatgagatgga

SEQ ID NO: 684200 - DNA, 120 bp, Artificial Sequence
  ENSG00000187244_32 (sequence is synthesized)
gagaccaagaggagaagggatgggaccggaatgagatggagaaaaggagacaggaaaaatcaagaactgatagggaatgggggcaggagaaggtggggagggacagagggaccagggaga

SEQ ID NO: 684201 - DNA, 120 bp, Artificial Sequence
  ENSG00000187244_33 (sequence is synthesized)
tcagggggcagggagggggtgggcttggatggggacagtgtggggtgtgggacctggacaaacaggacgagttcctgagtccctggctggggactccatcttctgctcgatgcctctctt

SEQ ID NO: 684202 - DNA, 83 bp, Artificial Sequence
  ENSG00000187244_34 (sequence is synthesized)
cagggtcctggaggaggaggggacagggccccctgggtaataaaggaggaggggtaaggccaggcgaggtggctcatgcctgt

SEQ ID NO: 684203 - DNA, 79 bp, Artificial Sequence
  ENSG00000187244_35 (sequence is synthesized)
acaaaaattagctgggtgtgttggtgtgcaactcgaacccagaaggcagaggctacagtgagctaagatcacaccactg

SEQ ID NO: 684204 - DNA, 120 bp, Artificial Sequence
  ENSG00000187244_36 (sequence is synthesized)
ccctcctttccacttcctgggagactggacgtcgttcacctctgcccttgaccccaccccttgaccccaccagccggggcctgatcggagcctccatagcccgcagagccaatccccgga

SEQ ID NO: 684205 - DNA, 120 bp, Artificial Sequence
  ENSG00000187257_0 (sequence is synthesized)
aggagcgcaaaatggcggaaccgccgagccccgtgcactgtgtcgctgccgcggcccccaccgccaccgtctcggagaaagaaccgtttggcaagctgcaactctcctcccgggaccctc

SEQ ID NO: 684206 - DNA, 120 bp, Artificial Sequence
  ENSG00000187257_1 (sequence is synthesized)
cgggttctctgtccgccaagaaggtccggactgaggagaagaaggcaccgcggagagtgaacggagaagggggcagcggcgggaacagcaggcagctgcagccgccggcagcaccttcgc

SEQ ID NO: 684207 - DNA, 120 bp, Artificial Sequence
  ENSG00000187257_2 (sequence is synthesized)
ctcagagctatggcagccccgcgtcttggagctttgcccctctgtctgctgctccctccccgtcctcttctcggagcagtttctctttctccgctggcacggccgttccctcctcagcct

SEQ ID NO: 684208 - DNA, 120 bp, Artificial Sequence
  ENSG00000187257_3 (sequence is synthesized)
ccgcttccttgtctcagccggtgccgcgcaaactgctggtccctcctacgctgctgcacgctcagcctcaccatctcctcctgcccgccgccgccgccgctgcctcggctaacgccaagt

SEQ ID NO: 684209 - DNA, 120 bp, Artificial Sequence
  ENSG00000187257_4 (sequence is synthesized)
cgcgcagacctaaggagaagcgggagaaggagaggaggaggcacggtctcggtggggcccgagaggccggcggggcctcccgggaggagaacggggaggtgaagccgctgccccgagata

SEQ ID NO: 684210 - DNA, 120 bp, Artificial Sequence
  ENSG00000187257_5 (sequence is synthesized)
aaatcaaagacaaaattaaagagagagacaaagaaaaagaaagagaaaaaaagaaacataaagtaatgaatgagatcaagaaagagaatggagaagtaaagattttgctgaaaagtggga

SEQ ID NO: 684211 - DNA, 120 bp, Artificial Sequence
  ENSG00000187257_6 (sequence is synthesized)
aggagaaaccaaaaacaaatatagaagacttacaaattaaaaaggtaaagaagaaaaagaaaaagaaacacaaagagaatgaaaaacggaagcgtccgaaaatgtatagcaaatctattc

SEQ ID NO: 684212 - DNA, 120 bp, Artificial Sequence
  ENSG00000187257_7 (sequence is synthesized)
agaccatctgctcaggattgctaactgatgttgaagatcaagcagccaaaggcatcctaaatgataacataaaagattacgttgggaagaatttggataccaagaactatgattccaaaa

SEQ ID NO: 684213 - DNA, 120 bp, Artificial Sequence
  ENSG00000187257_8 (sequence is synthesized)
ttccagagaacagtgagtttccatttgtctcattaaaggagccacgagttcagaataacctcaaaaggttggacactttggaatttaaacaactcattcatatagagcaccagcctaatg

SEQ ID NO: 684214 - DNA, 120 bp, Artificial Sequence
  ENSG00000187257_9 (sequence is synthesized)
gaggtgcatcggttatccatgcctacagtaacgaactctcccacctgtctcctatggagatggagaggtttgcagaagagtttgtgggtctagtgttcagtgaaaatgaaaactctgcag

SEQ ID NO: 684215 - DNA, 120 bp, Artificial Sequence
  ENSG00000187257_10 (sequence is synthesized)
ctttctacgtgatgggtattgttcatggggcagctacttatttacctgactttttagactatttttcatttaattttcccaattcaccagtgaaaatggagatattgggaaagaaagata

SEQ ID NO: 684216 - DNA, 120 bp, Artificial Sequence
  ENSG00000187257_11 (sequence is synthesized)
tagagacaacgactatgtccaattttcatgctcaggtaaaaagaacgtattctcatggtacttacagagctggcccaatgagacaaataagcttggtgggagcagttgatgaagaagtag

SEQ ID NO: 684217 - DNA, 120 bp, Artificial Sequence
  ENSG00000187257_12 (sequence is synthesized)
gagattatttccctgagttccttgacatgttggaagagtcaccatttttaaaatgtacactgccatgggggacgctatctagtctaaaattacagagtcgaaaagatagtgatgatggtc

SEQ ID NO: 684218 - DNA, 120 bp, Artificial Sequence
  ENSG00000187257_13 (sequence is synthesized)
ccatcatgtgggttcgtccaggagaacaaatgatccctgtggctgatatgccaaagtcacctttcaaaaggaaaagaactaccaatgaaataaaaaatcttcagtacctacctcgaacaa

SEQ ID NO: 684219 - DNA, 120 bp, Artificial Sequence
  ENSG00000187257_14 (sequence is synthesized)
gtgagccccgtgagatgctctttgaagacaggacaagagctcatgcagatcatataggacaaggttttgaacgacagactacagctgctgttggagtgctgaaggctgtgcactgtggag

SEQ ID NO: 684220 - DNA, 120 bp, Artificial Sequence
  ENSG00000187257_15 (sequence is synthesized)
agtggcctgatcaaccccgtataaccaaagatgtaatttgttttcatgctgaagatttcttagaagtagttcaacgaatgcagttagatttacatgaacctccactgtcccagtgtgtcc

SEQ ID NO: 684221 - DNA, 120 bp, Artificial Sequence
  ENSG00000187257_16 (sequence is synthesized)
aatgggttgatgatgcaaaactgaatcaactgaggagggaaggcattcgctatgccaggattcagctatatgataatgacatttattttattccaaggaatgttgttcatcagttcaaga

SEQ ID NO: 684222 - DNA, 120 bp, Artificial Sequence
  ENSG00000187257_17 (sequence is synthesized)
cagtttcagctgtatgcagtttagcatggcatattcggctcaaattatatcactcagaggaggacacttctcagaatacagctactcatgaaacaggcacatcatcagattccacatcat

SEQ ID NO: 684223 - DNA, 120 bp, Artificial Sequence
  ENSG00000187257_18 (sequence is synthesized)
ctgttcttggacctcacactgacaacatgatttgtgctgtaagcaaagcctccttggattctgttttttcagataaacttcattctaaatatgaattacagcagattaaacatgaaccta

SEQ ID NO: 684224 - DNA, 120 bp, Artificial Sequence
  ENSG00000187257_19 (sequence is synthesized)
ttgcatctgtaagaatcaaggaagaacctgtgaatgttaatattcctgaaaagactacagcactgaataatatggatggcaagaatgttaaagcaaaattggatcatgttcaatttgcag

SEQ ID NO: 684225 - DNA, 120 bp, Artificial Sequence
  ENSG00000187257_20 (sequence is synthesized)
aatttaagattgacatggattctaaatttgaaaatagcaacaaagatttaaaggaagaattgtgccctggaaatctaagtctagttgatacaaggcaacacagttcagcacattcaaatc

SEQ ID NO: 684226 - DNA, 120 bp, Artificial Sequence
  ENSG00000187257_21 (sequence is synthesized)
aagataaaaaagacgatgacattttgtgctaaatttgcatataccatctaaaatccttttttaaaaaaatttaatgtaataaagattcatgaattctgaaagcaagccaaggacttgctc

SEQ ID NO: 684227 - DNA, 120 bp, Artificial Sequence
  ENSG00000187257_22 (sequence is synthesized)
ctatgtctgttacaaaacatagtttatgtagctttgtaacattcctcagtgcctgtccataactgtgaagtattaagcacttagggccagatgcactgtaaacattgcaggtttaaacat

SEQ ID NO: 684228 - DNA, 120 bp, Artificial Sequence
  ENSG00000187257_23 (sequence is synthesized)
gcactgtaaacattgcaggtttaaacataaaggagtctttaaaaaaaaatcatttacgttggaattttaggttttagaatagagctgacattaacatatatatatatatataaatatata

SEQ ID NO: 684229 - DNA, 120 bp, Artificial Sequence
  ENSG00000187257_24 (sequence is synthesized)
ctttttcaacaatttaaagcttttccatagagcttatttatatccttttttttcattttaaatgtgtcagcactgtagtgtaaatagcttttaaatatctttttagtgtgatttatactg

SEQ ID NO: 684230 - DNA, 120 bp, Artificial Sequence
  ENSG00000187257_25 (sequence is synthesized)
aaatgtgagccacttaataaaggttcatatgttcatattaataaatatgttttctgttgagtctgtaaagacaaactgacaattcatttaagtcatttgataatgattctctgctggtat

SEQ ID NO: 684231 - DNA, 82 bp, Artificial Sequence
  ENSG00000187257_26 (sequence is synthesized)
ttagtgtggtattgtagtgcaaatgtacgtaattcaaatctagtaaatatttaagttcctcacactgtgcacggagtttcat

SEQ ID NO: 684232 - DNA, 64 bp, Artificial Sequence
  ENSG00000187257_27 (sequence is synthesized)
agcgcccagcctatgcaggcatttttaacaaccaagactcagttaagaaagtgtgcatctgcgt

SEQ ID NO: 684233 - DNA, 120 bp, Artificial Sequence
  ENSG00000187257_28 (sequence is synthesized)
ttaacaaccaagactcagttaagaaagtgtgcatctgcgtgtgtgtgaatgtgtatatatatgtatatatatatcatattttgcataattttcttaaattgctgaataagatcaatatgt

SEQ ID NO: 684234 - DNA, 120 bp, Artificial Sequence
  ENSG00000187257_29 (sequence is synthesized)
gaaattccttagcccttctccccaaaatacattgaaaaaagttttatattaaactattaagaaagcagtttaggtaatagaaacagttttagaaagttgggagaaacaaggtatgttaat

SEQ ID NO: 684235 - DNA, 120 bp, Artificial Sequence
  ENSG00000187257_30 (sequence is synthesized)
gataacaaaggcttctaactaatagttacgtggccagattacatagcctaccatagattttttttattgtgtatgggatgataagaagtttagagaattttcttactagtaagtaccttt

SEQ ID NO: 684236 - DNA, 120 bp, Artificial Sequence
  ENSG00000187257_31 (sequence is synthesized)
actaagtaatagctaagtataaaatctttagttacagaaagcttgtgagcaattaaaatccttttacatttttcttgcagaatgggagaaaaatatggcaaatacaaaactgtaaaataa

SEQ ID NO: 684237 - DNA, 120 bp, Artificial Sequence
  ENSG00000187257_32 (sequence is synthesized)
gggcaatgacaatgactcaactgccatatagagatataattaacaaaatactttgtggtacctcttatctctcaggatctcctccctaccctagcaaggcaaacaacttggagtacttcc

SEQ ID NO: 684238 - DNA, 120 bp, Artificial Sequence
  ENSG00000187257_33 (sequence is synthesized)
ttttcgaaagaagttctagaaattaaattgaggtaggagacggattgacagtgcctaactaaagatgagtaaaacagacctctttaatgatagactcactatttgacactgcttctacta

SEQ ID NO: 684239 - DNA, 120 bp, Artificial Sequence
  ENSG00000187257_34 (sequence is synthesized)
ttgtaattaaaaatcagaagtctttgatgtatgcgttgctgtaagaaactctgctcattgcaaatctattttgtttgtttttggtattattctgggcacatactttggttgatgactttc

SEQ ID NO: 684240 - DNA, 120 bp, Artificial Sequence
  ENSG00000187257_35 (sequence is synthesized)
aattggggttctttgtgctgccttttgggttactgttggtatttccatttctggcttaatttatggtaaccatcaaaactgcttatatttctggttagggcgaagccatttaggaagaag

SEQ ID NO: 684241 - DNA, 120 bp, Artificial Sequence
  ENSG00000187257_36 (sequence is synthesized)
catttcaccagaacaagtaaaagttaattgcagcaatgatgtcagttttggcccctagtttaataaaaggataggcaaatatcataggaaatcttcatggtttgtaggaaatcagtgttt

SEQ ID NO: 684242 - DNA, 120 bp, Artificial Sequence
  ENSG00000187257_37 (sequence is synthesized)
gcaacgtaggaagtttcatgggatagggaaggtataaatcaagatagtaagggttttgttttatatgtcattgtcttaccatgctccccacctatttaatcttctgttttaagctaaatt

SEQ ID NO: 684243 - DNA, 120 bp, Artificial Sequence
  ENSG00000187257_38 (sequence is synthesized)
tatggatttgcacctacctttttgagtggcagaagttcttaacaaaccagtattgagaaataagaagggatgtagttaaaatggttttctgtttctctttaaagttgaagaatgatatat

SEQ ID NO: 684244 - DNA, 120 bp, Artificial Sequence
  ENSG00000187257_39 (sequence is synthesized)
ttaacaagagttgtgttttatttccagttttccagtagcatatatgtagatgcattgaggtcatactgtgagaaaatgtctttagggtatccctccaaaataggagccttaaacttttta

SEQ ID NO: 684245 - DNA, 120 bp, Artificial Sequence
  ENSG00000187257_40 (sequence is synthesized)
acttaaaggaaggcatatctaaaaaccatagtggttgcttttaggtatagtttcctatataacctatagtcagacttatctataatatgaaaatttaattgttttaaaaatgcatacatc

SEQ ID NO: 684246 - DNA, 120 bp, Artificial Sequence
  ENSG00000187257_41 (sequence is synthesized)
ccactgccctccagcctgggcgacagtctcaaaaaaaaaaaaaaaaaaaagcatacatctctgaaggtaaagtataaatcagtgggctcaagatttgcaggtacagccttgttaatgcct

SEQ ID NO: 684247 - DNA, 120 bp, Artificial Sequence
  ENSG00000187257_42 (sequence is synthesized)
tcaataatgcttacgttccttgtcttatgggttataattttcacatcctcttcagatacaatctgagaacttgttgactacctttgttacatgcaaaaattttctattttaatattgcat

SEQ ID NO: 684248 - DNA, 120 bp, Artificial Sequence
  ENSG00000187257_43 (sequence is synthesized)
tatattaatggtttcatagtacattccagttctttatctgaatacaagcgttttgcttttatttccagtttcttggaccagaacaataaaatacataagacatcgtttctatatggtcat

SEQ ID NO: 684249 - DNA, 120 bp, Artificial Sequence
  ENSG00000187257_44 (sequence is synthesized)
atactatatagaataaagaattgttatgtaaattattaaatgagtatacagacctttacataaaaactaaggtacctcagtggaatctgctacagtgcttccccctccctacccctccat

SEQ ID NO: 684250 - DNA, 120 bp, Artificial Sequence
  ENSG00000187257_45 (sequence is synthesized)
tttgtttataaccttttagctatctaaataatacgtattccatactcaggatagctggttagctagcaaaagaattaacatttgtgatatttacttgcaaactttactgaagccatattc

SEQ ID NO: 684251 - DNA, 120 bp, Artificial Sequence
  ENSG00000187257_46 (sequence is synthesized)
attatcttccttgtcaccaaggctgttgaccttaaataaacattaagttgattttgcacaacactgtatttgtgtgtgtgcatgtgcctgtttttgtgtgtgtatgtttgtgggaaataa

SEQ ID NO: 684252 - DNA, 120 bp, Artificial Sequence
  ENSG00000187257_47 (sequence is synthesized)
ttatgtttgtttccgcatatattcatttttaatgcattctgtaacttttctcgagtggtggtcattgagggtagggaagattttattttttaagttgtcgttaaggtatttcattagtgt

SEQ ID NO: 684253 - DNA, 120 bp, Artificial Sequence
  ENSG00000187257_48 (sequence is synthesized)
tcctgagtgtaaaacagttttttcccaaatacttatggcagataagagcatttttgtaaataataaactagcaccgtttgggtaaatttgcattattttttggacaggttcattgtcatg

SEQ ID NO: 684254 - DNA, 120 bp, Artificial Sequence
  ENSG00000187257_49 (sequence is synthesized)
taaaacaaatatctcaaaattcattttacatttagcaaaggtgcaacatttgtttttggagtttgagagatattttccttgtcttccatcattcaataaatactaaaattgataaccaca

SEQ ID NO: 684255 - DNA, 120 bp, Artificial Sequence
  ENSG00000187257_50 (sequence is synthesized)
cgtgcgccggcctggaggggctgggaggcgtccggttttcagcagaggattttgcagttcccaaggggacaggaaatggagcctgtaatttcggttgcagagagggggatggccgacact

SEQ ID NO: 684256 - DNA, 120 bp, Artificial Sequence
  ENSG00000187257_51 (sequence is synthesized)
accgctattttaatgaaagaatttcttggcttctacaatttttcttggaaaatcttagtaattcctccttactgtgggaaaaaagtttcattttttacccgtatttggatatcttaattg

SEQ ID NO: 684257 - DNA, 120 bp, Artificial Sequence
  ENSG00000187257_52 (sequence is synthesized)
gttaacatcatatgatctatatggtagaaggaagaataacaaatgatgaatatagtgaatcatacctctagcagggtatagggacagaaccatccaagcataattattttcttggtgtgt

SEQ ID NO: 684258 - DNA, 120 bp, Artificial Sequence
  ENSG00000187257_53 (sequence is synthesized)
ttgaaacagttttttgaagcaaagtatatcaatatatagggatatattcaatattatgtatttcagatgcttaagtataaagctgtgtatgaaagtgtgtttgtcaggggaacaatatta

SEQ ID NO: 684259 - DNA, 120 bp, Artificial Sequence
  ENSG00000187257_54 (sequence is synthesized)
cagaattgaatcaacagcttctgctcccacccccctcaattctttggctctaataatgatcctgtttttgtattttcttcacattggtgctgatacaagctaaaaatatctgtatctcca

SEQ ID NO: 684260 - DNA, 120 bp, Artificial Sequence
  ENSG00000187258_0 (sequence is synthesized)
ggtaattgccaaggagagagcagcacgtagatcctccctgtcatcaggcagagctcttcagtgaggtgggctcagggagggctctgtgcctccgttcagcagagctgcagctgctgccca

SEQ ID NO: 684261 - DNA, 120 bp, Artificial Sequence
  ENSG00000187258_1 (sequence is synthesized)
gctctcaggaggcaagctggactccctcactcagctgcaggagcaaggacagtgaggctcaaccccgcctgagccatgccagccaacttcacagagggcagcttcgattccagtgggacc

SEQ ID NO: 684262 - DNA, 120 bp, Artificial Sequence
  ENSG00000187258_2 (sequence is synthesized)
gggcagacgctggattcttccccagtggcttgcactgaaacagtgacttttactgaagtggtggaaggaaaggaatggggttccttctactactcctttaagactgagcaattgataact

SEQ ID NO: 684263 - DNA, 120 bp, Artificial Sequence
  ENSG00000187258_3 (sequence is synthesized)
ctgtgggtcctctttgtttttaccattgttggaaactccgttgtgcttttttccacatggaggagaaagaagaagtcaagaatgaccttctttgtgactcagctggccatcacagattct

SEQ ID NO: 684264 - DNA, 120 bp, Artificial Sequence
  ENSG00000187258_4 (sequence is synthesized)
ttcacaggactggtcaacatcttgacagatattaattggcgattcactggagacttcacggcacctgacctggtttgccgagtggtccgctatttgcaggttgtgctgctctacgcctct

SEQ ID NO: 684265 - DNA, 120 bp, Artificial Sequence
  ENSG00000187258_5 (sequence is synthesized)
acctacgtcctggtgtccctcagcatagacagataccatgccatcgtctaccccatgaagttccttcaaggagaaaagcaagccagggtcctcattgtgatcgcctggagcctgtctttt

SEQ ID NO: 684266 - DNA, 120 bp, Artificial Sequence
  ENSG00000187258_6 (sequence is synthesized)
gtggcctgacgactcctactggaccccatacatgaccatcgtggccttcctggtgtacttcatccctctgacaatcatcagcatcatgtatggcattgtgatccgaactatttggattaa

SEQ ID NO: 684267 - DNA, 120 bp, Artificial Sequence
  ENSG00000187258_7 (sequence is synthesized)
aagcaaaacctacgaaacagtgatttccaactgctcagatgggaaactgtgcagcagctataaccgaggactcatctcaaaggcaaaaatcaaggctatcaagtatagcatcatcatcat

SEQ ID NO: 684268 - DNA, 120 bp, Artificial Sequence
  ENSG00000187258_8 (sequence is synthesized)
tcttgccttcatctgctgttggagtccatacttcctgtttgacattttggacaatttcaacctccttccagacacccaggagcgtttctatgcctctgtgatcattcagaacctgccagc

SEQ ID NO: 684269 - DNA, 120 bp, Artificial Sequence
  ENSG00000187258_9 (sequence is synthesized)
attgaatagtgccatcaaccccctcatctactgtgtcttcagcagctccatctctttcccctgcagggagcaaagatcacaggattccagaatgacgttccgggagagaactgagaggca

SEQ ID NO: 684270 - DNA, 120 bp, Artificial Sequence
  ENSG00000187258_10 (sequence is synthesized)
tgagatgcagattctgtccaagccagaattcatctagaccctagggcagtgccagtgctaggctgagcaccatcagctctcccaggtccttgtcacctgcttgggcacgtgcatggaacc

SEQ ID NO: 684271 - DNA, 120 bp, Artificial Sequence
  ENSG00000187258_11 (sequence is synthesized)
cgagccaacttcaccccaccctcgtcattacctgggagatgcacaagacaaatgttctaatgactgcatgcactgcttaagtattggccaacacgaactccccagttattcatgccagcc

SEQ ID NO: 684272 - DNA, 120 bp, Artificial Sequence
  ENSG00000187258_12 (sequence is synthesized)
aggaaggaaacgccttccttccccaccattcccagccctccttcccactggccagcacctgaacccagtgaacacaggcattagtggtccagggtcctggcttggagccagtgagtagac

SEQ ID NO: 684273 - DNA, 120 bp, Artificial Sequence
  ENSG00000187258_13 (sequence is synthesized)
cttttgtgctctgaatataaccttgaaagtttggtatgtctgaaagagccttttctattatgtacggctagtattttctcaggggaaatttttaaaaacatatttcaatttctttctgag

SEQ ID NO: 684274 - DNA, 120 bp, Artificial Sequence
  ENSG00000187258_14 (sequence is synthesized)
gatatttgcttccttgtaaataaatgctttcaattgcttattatattagcaatcaattgctgatacacaaattatgacaaaacatggtggcttaaaacaataaacatttattatctcaca

SEQ ID NO: 684275 - DNA, 120 bp, Artificial Sequence
  ENSG00000187258_15 (sequence is synthesized)
acatccaaggcaccagtgaaaaatacagagaaggtaaaaggagcaagagttctgaagatggaacctgggatgggggaaagtttcttcaatctttcctaccaacaagaactccaatttttc

SEQ ID NO: 684276 - DNA, 120 bp, Artificial Sequence
  ENSG00000187258_16 (sequence is synthesized)
actcctataaccgtagaagtagaggtaattaggatcatccagcaaatgcttagaggcaaatatccctggatgaggatgccacagcttattttcattatatttcttcgattacagtgtggt

SEQ ID NO: 684277 - DNA, 120 bp, Artificial Sequence
  ENSG00000187258_17 (sequence is synthesized)
aatgcatgttgtatggaactacatattctttcagaatgaaaggatttagaggtggcaagaatatcagcttgaaatttaaagttttttcataaacaataaacaaatgataattgaaaattc

SEQ ID NO: 684278 - DNA, 120 bp, Artificial Sequence
  ENSG00000187258_18 (sequence is synthesized)
agctccaggaggctgcgctaatgctctgccctcaacgagagaactggaagggtacttggccaggtgtaccttcctgggctcttccaaggtgacagctctcaccctgtgctgcaggtggcc

SEQ ID NO: 684279 - DNA, 120 bp, Artificial Sequence
  ENSG00000187258_19 (sequence is synthesized)
ctgtgcctggtgccacttctcactgcttaccagggcacaaggacaccagtggttcccaaaatgggtcacagcaggatggcctgcatcagattcaccagggagggctataagaaggcagac

SEQ ID NO: 684280 - DNA, 120 bp, Artificial Sequence
  ENSG00000187258_20 (sequence is synthesized)
ctgtgtcttcagcagctccatctctttcccctgcagggctaatagcagtgtctacctgttggcctgtgatgtctctgtcctctgggctctggtgctgaccagtgagaaggagagctgtga

SEQ ID NO: 684281 - DNA, 120 bp, Artificial Sequence
  ENSG00000187258_21 (sequence is synthesized)
gtcatggagaaggaagggagcaaagatcacaggattccagaatgacgttccgggagagaactgagaggcatgagatgcagattctgtccaagccagaattcatctagaccctagggcagt

SEQ ID NO: 684282 - DNA, 120 bp, Artificial Sequence
  ENSG00000187260_0 (sequence is synthesized)
cggccggggagggcgcggggcgctcggcttcccgtgttcctctccccgccccagccccgtgggcgcgagaggaggcggggggctccttgtgcaccagagacgcagctgccttgttcgccc

SEQ ID NO: 684283 - DNA, 120 bp, Artificial Sequence
  ENSG00000187260_1 (sequence is synthesized)
ggtggggtgtggatcctccgagcggtgctgggaagggggttctctctgcccgcgcgcccaggactctacccagggcggaggtcccgagtgggccgccccccgcagcgccctgggttcgcg

SEQ ID NO: 684284 - DNA, 120 bp, Artificial Sequence
  ENSG00000187260_2 (sequence is synthesized)
ggcccagaggctggaggcagcggggagctagggtccttcaccctcccctcgccgcgtgcctccgcaggagtcgggctccccgttccccgcgatggccgcgggccgcagtcgtacggagcc

SEQ ID NO: 684285 - DNA, 120 bp, Artificial Sequence
  ENSG00000187260_3 (sequence is synthesized)
gaccccggggcgcccctccctagcggggcgcagctccttcttgttccccgccctgccagcgggatggggggcggcgggtcggccctgagggtctgcgccgaccaccgcgggggcatcaac

SEQ ID NO: 684286 - DNA, 120 bp, Artificial Sequence
  ENSG00000187260_4 (sequence is synthesized)
gcatcaactggctgagcctgagccccgacgggcagcgcctgctgacgggcagcgaggacggcacggcccggctctggagcaccgcggacggccagtgctgcgcgctcctgcaaggacatg

SEQ ID NO: 684287 - DNA, 120 bp, Artificial Sequence
  ENSG00000187260_5 (sequence is synthesized)
aaagctatgtgaccttctgccagctggaggatgaggctgccttcacatgcagcgccgactgcaccatcaggaggtgggacgtgctgaccgggcagtgtctgcaggtgtaccgaggacaca

SEQ ID NO: 684288 - DNA, 120 bp, Artificial Sequence
  ENSG00000187260_6 (sequence is synthesized)
cgtccatcgtgaacaggatcctggttgccaacaaccagctcttcagcagctcctatgaccggacagctcgggtctggagtgtggacaaggggcagatgtcccgggagttccggggccacc

SEQ ID NO: 684289 - DNA, 120 bp, Artificial Sequence
  ENSG00000187260_7 (sequence is synthesized)
gcaactgcgtgctgaccctagcctactctgccccgtgggacctccccagcactccctgcgcggaggaggccgcggccggggggcttctggtgaccggcagcacagatggcacagccaagg

SEQ ID NO: 684290 - DNA, 120 bp, Artificial Sequence
  ENSG00000187260_8 (sequence is synthesized)
cagcaccgacgccaccatccgtgcctgggacatcctgagtggggagcagctgcgggtgttccgggagcaccggggctccgtcatctgtctggagctggtgaaccgactcgtgtactctgg

SEQ ID NO: 684291 - DNA, 120 bp, Artificial Sequence
  ENSG00000187260_9 (sequence is synthesized)
cagcgcggacaggaccgtcaagtgctggctggcagacacaggggagtgtgtgcgcacgttcacggcccacagacgcaacgtgagcgccctcaagtaccacgcgggcaccttgttcacggg

SEQ ID NO: 684292 - DNA, 120 bp, Artificial Sequence
  ENSG00000187260_10 (sequence is synthesized)
cagcggggacgcttgcgcccgggccttcgacgcgcagtctggagagctgcggagggtgttccggggccacacattcatcatcaactgcatccaggtgcacggccaggtgctctacaccgc

SEQ ID NO: 684293 - DNA, 120 bp, Artificial Sequence
  ENSG00000187260_11 (sequence is synthesized)
ctcgcacgacggcgccctgcgcctctgggacgtgcgcgggctccgaggtgccccgcggccccctccgcccatgcgcagcctctcgcggctcttcagcaacaaggtgggctgcgccgccgc

SEQ ID NO: 684294 - DNA, 120 bp, Artificial Sequence
  ENSG00000187260_12 (sequence is synthesized)
ctcttcagcaacaaggtgggctgcgccgccgcgcccctgcagccggcctgatcccgcggggcccctgcagacgccagcccagacacccagcggctcccagagcgccccgccctgctaccc

SEQ ID NO: 684295 - DNA, 120 bp, Artificial Sequence
  ENSG00000187260_13 (sequence is synthesized)
gaggagcgaggaagcccgggcgggaggagagcccgtcgcaggcgtctggtttttctttggtggccaggaggcgctgggagcgggagtgctcgccctggggaccgcccccttttccctttt

SEQ ID NO: 684296 - DNA, 120 bp, Artificial Sequence
  ENSG00000187260_14 (sequence is synthesized)
agggtggctcctgtcctccctccccatccctgacctggcgaaaggcctagtcctggggaccctcccacctcaggggctgcaggcggactgccccagctcccccagccccacgaaactggg

SEQ ID NO: 684297 - DNA, 120 bp, Artificial Sequence
  ENSG00000187260_15 (sequence is synthesized)
cctttcctgctgagaggaagtgactttttacagaagccactgaacctggttattttggcaaatcgtccgtctcgagggccttggggggaactgaaatatacagcctgaacgttaaaagtg

SEQ ID NO: 684298 - DNA, 120 bp, Artificial Sequence
  ENSG00000187260_16 (sequence is synthesized)
ctttgtggccaattgtgctcttctgctggcatttcctgttgacgactctcacagcaacagtagacgcttgttaagggccagcggtgcggagaagtgtgccgtcgtcacactatgttaccc

SEQ ID NO: 684299 - DNA, 120 bp, Artificial Sequence
  ENSG00000187260_17 (sequence is synthesized)
cacatacagacgtggaaacaggctgggagttaagtaattcgcccaggtcgcacagccagtgaggggtagatggcagtctgagccctctcattgctgtaaaccctgcctgcatgcctgttg

SEQ ID NO: 684300 - DNA, 120 bp, Artificial Sequence
  ENSG00000187260_18 (sequence is synthesized)
gtttctatttgtgccctgtactcactcaggaggtcagtgtgcctcgggtgcaccttcccctgggcctgtcccatgcactgtgaggtccctttcagctctggccctcctactgcccaggta

SEQ ID NO: 684301 - DNA, 120 bp, Artificial Sequence
  ENSG00000187260_19 (sequence is synthesized)
gcacacgtagtcccctggatgagccgcgaggctttctgctgtgggtagttctttatcaccgcgggcttttccaccatcatcagtgaactctctgtggcctcgcccaggccttccaactta

SEQ ID NO: 684302 - DNA, 120 bp, Artificial Sequence
  ENSG00000187260_20 (sequence is synthesized)
cccagcgaagtcggcgccggaactgccctaatggaaaccagccgccgggcgctccgggagggctcaggccgaccccggggtccattagaggcgccccaggccgagggagcccgcggcggc

SEQ ID NO: 684303 - DNA, 120 bp, Artificial Sequence
  ENSG00000187260_21 (sequence is synthesized)
tggaaggtgaacttgacatcccggctccaccgaccccgcagcggctcgcacctcatccccactccggccagaccaaagagtcgggctccccgttccccgcgatggccgcgggccgcagtc

SEQ ID NO: 684304 - DNA, 120 bp, Artificial Sequence
  ENSG00000187260_22 (sequence is synthesized)
gggctccgtcatctgtctggagagttgagtcaagatagtcttcctcatgctctggaatgtcttccagtatctcattgacggcctctgtctccatgtcttcgtctgttgaggcactagagg

SEQ ID NO: 684305 - DNA, 120 bp, Artificial Sequence
  ENSG00000187260_23 (sequence is synthesized)
ttcctacaataaaataccgcaggagtaagtgaattatgtgaggattgtcctggggacactgcacgaccacagtcaacctcagactgtgcctcttgctggccacactgtccaggtggccgg

SEQ ID NO: 684306 - DNA, 120 bp, Artificial Sequence
  ENSG00000187260_24 (sequence is synthesized)
cccggtgacgtcaggggacgccccctcagtctccacatctgccgtggcttagggccacatctgttggcttctgaagacactttgctctcaatgcggccctcaaagacctcagacctacct

SEQ ID NO: 684307 - DNA, 120 bp, Artificial Sequence
  ENSG00000187260_25 (sequence is synthesized)
gcggagtcagaaggggacgtggctggcggggacaaagagtcttctggcgacagcggcagctcgggaggcaggcttcctccgttgtgagcaagggtctgggcggccagctggacgttgcct

SEQ ID NO: 684308 - DNA, 120 bp, Artificial Sequence
  ENSG00000187260_26 (sequence is synthesized)
ggagagcgcaggggtcacagcatcagcccctggcgcctcttctgccacccccgtcagccatacgagtggacagccgactctcatgtttaagagctcccggcgtgtgcaccatggcccttt

SEQ ID NO: 684309 - DNA, 120 bp, Artificial Sequence
  ENSG00000187260_27 (sequence is synthesized)
gtgcacaagtcatgcttctgtgcaatgtgagcgtagagcaacctggaagggggcttggaagactcaagtcgggtgcgtcagggagcagccatctcaggacaggcagtgacctcgggctga

SEQ ID NO: 684310 - DNA, 120 bp, Artificial Sequence
  ENSG00000187260_28 (sequence is synthesized)
gagcagggcgccacaccagcctcaccacgagcaccgcgaggtcagtggccacagcatacaggcgtgctaacgcgtgtaggggcacaaatgtggacagagccgtcacttgggatacaaagc

SEQ ID NO: 684311 - DNA, 120 bp, Artificial Sequence
  ENSG00000187260_29 (sequence is synthesized)
tggatgggtttcccaggtcacagtgccatccttttaggtcacaggcagagaaatgaggctgatgcaaacagtggtgcatagacaaaggcagcaaacctaaagagaacttcctgacacttc

SEQ ID NO: 684312 - DNA, 120 bp, Artificial Sequence
  ENSG00000187260_30 (sequence is synthesized)
cccagttttcctgctttccaaggaggcctcccctgccctctgttactgcgtgggtggcctctgaggtgggcaggttacacctggagcctgggagccaaggtttcagcacggactccccca

SEQ ID NO: 684313 - DNA, 120 bp, Artificial Sequence
  ENSG00000187260_31 (sequence is synthesized)
gtcctgctgcctgattcacccgggttaccccaagcaaccccacccgaggctgtccaagctgagggcacaaaggcctgtcactcactcggtcaatgttttcctgggaaggactttcttgac

SEQ ID NO: 684314 - DNA, 120 bp, Artificial Sequence
  ENSG00000187266_0 (sequence is synthesized)
ggtcagctgcgtccggcggaggcagctgctgacccagctgtggactgtgccgggggcgggggacggaggggcaggagccctgggctccccgtggcgggggctgtatcatggaccacctcg

SEQ ID NO: 684315 - DNA, 120 bp, Artificial Sequence
  ENSG00000187266_1 (sequence is synthesized)
gggcgtccctctggccccaggtcggctccctttgtctcctgctcgctggggccgcctgggcgcccccgcctaacctcccggaccccaagttcgagagcaaagcggccttgctggcggccc

SEQ ID NO: 684316 - DNA, 120 bp, Artificial Sequence
  ENSG00000187266_2 (sequence is synthesized)
gggggcccgaagagcttctgtgcttcaccgagcggttggaggacttggtgtgtttctgggaggaagcggcgagcgctggggtgggcccgggcaactacagcttctcctaccagctcgagg

SEQ ID NO: 684317 - DNA, 120 bp, Artificial Sequence
  ENSG00000187266_3 (sequence is synthesized)
atgagccatggaagctgtgtcgcctgcaccaggctcccacggctcgtggtgcggtgcgcttctggtgttcgctgcctacagccgacacgtcgagcttcgtgcccctagagttgcgcgtca

SEQ ID NO: 684318 - DNA, 120 bp, Artificial Sequence
  ENSG00000187266_4 (sequence is synthesized)
cagcagcctccggcgctccgcgatatcaccgtgtcatccacatcaatgaagtagtgctcctagacgcccccgtggggctggtggcgcggttggctgacgagagcggccacgtagtgttgc

SEQ ID NO: 684319 - DNA, 120 bp, Artificial Sequence
  ENSG00000187266_5 (sequence is synthesized)
gctggctcccgccgcctgagacacccatgacgtctcacatccgctacgaggtggacgtctcggccggcaacggcgcagggagcgtacagagggtggagatcctggagggccgcaccgagt

SEQ ID NO: 684320 - DNA, 120 bp, Artificial Sequence
  ENSG00000187266_6 (sequence is synthesized)
gtgtgctgagcaacctgcggggccggacgcgctacaccttcgccgtccgcgcgcgtatggctgagccgagcttcggcggcttctggagcgcctggtcggagcctgtgtcgctgctgacgc

SEQ ID NO: 684321 - DNA, 120 bp, Artificial Sequence
  ENSG00000187266_7 (sequence is synthesized)
ctagcgacctggaccccctcatcctgacgctctccctcatcctcgtggtcatcctggtgctgctgaccgtgctcgcgctgctctcccaccgccgggctctgaagcagaagatctggcctg

SEQ ID NO: 684322 - DNA, 120 bp, Artificial Sequence
  ENSG00000187266_8 (sequence is synthesized)
gcatcccgagcccagagagcgagtttgaaggcctcttcaccacccacaagggtaacttccagctgtggctgtaccagaatgatggctgcctgtggtggagcccctgcacccccttcacgg

SEQ ID NO: 684323 - DNA, 120 bp, Artificial Sequence
  ENSG00000187266_9 (sequence is synthesized)
aggacccacctgcttccctggaagtcctctcagagcgctgctgggggacgatgcaggcagtggagccggggacagatgatgagggccccctgctggagccagtgggcagtgagcatgccc

SEQ ID NO: 684324 - DNA, 120 bp, Artificial Sequence
  ENSG00000187266_10 (sequence is synthesized)
ctggtgctggacaaatggttgctgccccggaacccgcccagtgaggacctcccagggcctggtggcagtgtggacatagtggccatggatgaaggctcagaagcatcctcctgctcatct

SEQ ID NO: 684325 - DNA, 120 bp, Artificial Sequence
  ENSG00000187266_11 (sequence is synthesized)
gctttggcctcgaagcccagcccagagggagcctctgctgccagctttgagtacactatcctggaccccagctcccagctcttgcgtccatggacactgtgccctgagctgccccctacc

SEQ ID NO: 684326 - DNA, 120 bp, Artificial Sequence
  ENSG00000187266_12 (sequence is synthesized)
ccaccccacctaaagtacctgtaccttgtggtatctgactctggcatctcaactgactacagctcaggggactcccagggagcccaagggggcttatccgatggcccctactccaaccct

SEQ ID NO: 684327 - DNA, 120 bp, Artificial Sequence
  ENSG00000187266_13 (sequence is synthesized)
tatgagaacagccttatcccagccgctgagcctctgccccccagctatgtggcttgctcttaggacaccaggctgcagatgatcagggatccaatatgactcagagaaccagtgcagact

SEQ ID NO: 684328 - DNA, 120 bp, Artificial Sequence
  ENSG00000187266_14 (sequence is synthesized)
caagacttatggaacagggatggcgaggcctctctcaggagcaggggcattgctgattttgtctgcccaatccatcctgctcaggaaaccacaaccttgcagtatttttaaatatgtata

SEQ ID NO: 684329 - DNA, 120 bp, Artificial Sequence
  ENSG00000187266_15 (sequence is synthesized)
gtttttttttgtatctatatatatatatacacatatgtatgtaagtttttctaccatgatttctacaaacaccctttaagtcccatcttcccctgggcataggccatagggatagaagtt

SEQ ID NO: 684330 - DNA, 120 bp, Artificial Sequence
  ENSG00000187266_16 (sequence is synthesized)
aaagttcttgagcttattcagaagctggatctgcaatctgaatgctactcataacataacaaaatagtatgttaaacagctcttaaatcttactggcttaccacattaaatgatttctct

SEQ ID NO: 684331 - DNA, 120 bp, Artificial Sequence
  ENSG00000187266_17 (sequence is synthesized)
ctcctaactcagctcaaatgggcagccatccatgggatgagtcagaggttcagactcttccagtctgtagctctaccttctcttagggtacttagatggatcccctgttctacaaactgc

SEQ ID NO: 684332 - DNA, 120 bp, Artificial Sequence
  ENSG00000187266_18 (sequence is synthesized)
cagtcagcaagggaagaaaaagggcagcaatgaccctcaatgggccatttgagggatctggcctggaaatgggcttcctctcttcttctcacacctcactggctggaaacagtcacatga

SEQ ID NO: 684333 - DNA, 120 bp, Artificial Sequence
  ENSG00000187266_19 (sequence is synthesized)
ccccagtcacatgaaaggccaggaaacttagtttagctgtacacccaggaagggcaaagctgtttaagggccactagctagtctctgccactaataataataaaagtaattctgaatcag

SEQ ID NO: 684334 - DNA, 120 bp, Artificial Sequence
  ENSG00000187266_20 (sequence is synthesized)
tcccctgctgtttgaggcccgacggcgcctccagtcgtggtcactggagggaaacctgcgggtccagggctggcacgccctctatgggccggggcgcgaacactcccgcgatcaccgctg

SEQ ID NO: 684335 - DNA, 120 bp, Artificial Sequence
  ENSG00000187266_21 (sequence is synthesized)
agggtaacttccaggtaggtggcctggttgtcccctcagtgcctgggcttccctgcttcttgcagccaaactgcaggcctctctgagcaggttggtgctatttcttcagctgtggctgta

SEQ ID NO: 684336 - DNA, 120 bp, Artificial Sequence
  ENSG00000187268_0 (sequence is synthesized)
gaggagcttcgcggtgccagcctctgcaggtcctctgagggagcaacatcagggctccctcaggttcagaggtcgcctctagcttcccaggccagtcagccacggagcccgtgggcagga

SEQ ID NO: 684337 - DNA, 120 bp, Artificial Sequence
  ENSG00000187268_1 (sequence is synthesized)
agggcagcaggatggctgccaaggaccagttggaggttcaagttatggccgcccaggaaatggagcttgcaggaaaggatccagtaagtcatgagcatgaggaaagaaaacctgttacag

SEQ ID NO: 684338 - DNA, 120 bp, Artificial Sequence
  ENSG00000187268_2 (sequence is synthesized)
agacaaaggagggagatgtaactgatgagcatggggaaagaggatcttttgctgaaacagatgaacacacgggggttgataccaaggagctagaagatattgcagctgacattaaagagc

SEQ ID NO: 684339 - DNA, 120 bp, Artificial Sequence
  ENSG00000187268_3 (sequence is synthesized)
atcttgctgcaaagagaaaaaggattgaaaagattgcaaaagcttgcagcgaaataaagaacagaattaaaaatgttttgagaacaacacaactaaaaaggcagaaacgtgattatagaa

SEQ ID NO: 684340 - DNA, 120 bp, Artificial Sequence
  ENSG00000187268_4 (sequence is synthesized)
tttctctgaagttgccgaatgtccttgaagagttcatcacagatgagcagaaagatgaggaaggagatggagaaaaggaagaacaaattaaaatatttcaagagcaacaaaagaggtggc

SEQ ID NO: 684341 - DNA, 120 bp, Artificial Sequence
  ENSG00000187268_5 (sequence is synthesized)
aacaagatgggaaaggaactgaaagagattgagccaccacacgagcaattcacaaaggtctgttctatttggtaacacaatacgttcttataaaatacaacacatgcataaaaatagaag

SEQ ID NO: 684342 - DNA, 120 bp, Artificial Sequence
  ENSG00000187268_6 (sequence is synthesized)
acaatctgcttgtttctgaatgtatggaaagacattttggttatacattttaaattacttaccattttcactttgaatgtgttgttccagatttaacataagtagtaaataacataaaat

SEQ ID NO: 684343 - DNA, 120 bp, Artificial Sequence
  ENSG00000187268_7 (sequence is synthesized)
aacataaaacagtatttttaggattcatgaatagttttgtaggagttatttagaacaggaaaaggtaaattggaaattttacctagaaatatacatcttgtgtataaaaattgatacctt

SEQ ID NO: 684344 - DNA, 120 bp, Artificial Sequence
  ENSG00000187268_8 (sequence is synthesized)
atgaacacattaatgaagactttattttcagtttttaggagatcagcgacaaatctttagtggaaggcagaaagtccataagtcctttctggatgtcttttttacttgtgttgtttcaag

SEQ ID NO: 684345 - DNA, 120 bp, Artificial Sequence
  ENSG00000187268_9 (sequence is synthesized)
agttttagttaaataggaagtaggcaaatgtaactactgagtatctcttttgttttctgctgtaatgtaggagtgttttatggcatattcactttcaaaattattagtgactagtaatgg

SEQ ID NO: 684346 - DNA, 120 bp, Artificial Sequence
  ENSG00000187268_10 (sequence is synthesized)
ttttacatgacaatttgtaatcataagagatggttcagatgtataacagaatgggaaagccagcagattattaacatgttgtgaattgtgaattatctgctgtcgtacagcacattagca

SEQ ID NO: 684347 - DNA, 120 bp, Artificial Sequence
  ENSG00000187268_11 (sequence is synthesized)
aattgtcatcggacaatgaccgcttcttcatgtagatgtatattatttaggaagcaatggaattcccttctgggaggtaagatattctttttaataaccttgtggaaagacatgttcata

SEQ ID NO: 684348 - DNA, 120 bp, Artificial Sequence
  ENSG00000187268_12 (sequence is synthesized)
tgtcactcctctacactaactgagatgtgttaaataaactgggaaaagagtttgaaaatagaattttcaagcaactcaaagattatctatacacaaaacggttatttatatagaagtcac

SEQ ID NO: 684349 - DNA, 120 bp, Artificial Sequence
  ENSG00000187268_13 (sequence is synthesized)
aagtagagaacatgttgctataatgttccccagaaaccatttattaattggtatgaacatgagactagaaaagttttcctgtcaatgttaatgctacatgttaccacttagggtaggaac

SEQ ID NO: 684350 - DNA, 120 bp, Artificial Sequence
  ENSG00000187268_14 (sequence is synthesized)
tcggtatcatcttggactcttctgagtccattatctttcacatacagttttcatgaggcaagttttactctgcaatggtccttaaatttcttttttttaaattgccactgaggcaaccct

SEQ ID NO: 684351 - DNA, 120 bp, Artificial Sequence
  ENSG00000187268_15 (sequence is synthesized)
agttcaagaactcattcttccttgcttgtactattaaactcttttctgagttctctcttctcttctgagccacccttcattgatcagaaatactatcttcctaaaactcttcccttccta

SEQ ID NO: 684352 - DNA, 120 bp, Artificial Sequence
  ENSG00000187268_16 (sequence is synthesized)
aaatgcttctagcccttcactcttcccagcctatcagtggtatccacatgtcagttcttagatattcagagactctcccctttacatgaccccctcttaggcttgttttactgccttctg

SEQ ID NO: 684353 - DNA, 120 bp, Artificial Sequence
  ENSG00000187268_17 (sequence is synthesized)
tctttcttcccgcctctccaggttgacagccttctctgaacgacctctccattactctcatgctttgctcatgctcttccctcacaatgcttttaaagtccttttttttttttgatcgat

SEQ ID NO: 684354 - DNA, 120 bp, Artificial Sequence
  ENSG00000187268_18 (sequence is synthesized)
tgaaatcttttgccaactaagtggacatcagtctccatttttggctacatgtccgagtgagttgctcttccacagcagttacataagttttgtattattttttttattcgtgcatatttg

SEQ ID NO: 684355 - DNA, 120 bp, Artificial Sequence
  ENSG00000187268_19 (sequence is synthesized)
ctcatgtcacaggaatatggaagagattgtgtattcattttttacatcttcctcagcattaacataccactttttagggagtaggaactgttgaactatttgttgagagaatagtatata

SEQ ID NO: 684356 - DNA, 120 bp, Artificial Sequence
  ENSG00000187268_20 (sequence is synthesized)
tttcaaacatagttatgttttctctaacttgatgaggtcatgtcacagaccattttatcccttcagtggaaaccatgttatgtcgactattagtgataacaaatgggtcactatctggtg

SEQ ID NO: 684357 - DNA, 120 bp, Artificial Sequence
  ENSG00000187268_21 (sequence is synthesized)
aaaaaatatggtatttcatgatctaagactaccagtctttttctgtttttgctccatcttgaccataacatattcatcaaaccattttcttcaagcaaagtacatgactgttggacctgc

SEQ ID NO: 684358 - DNA, 120 bp, Artificial Sequence
  ENSG00000187268_22 (sequence is synthesized)
tataataatatttcactaaaatctggcattaaaaattttaagtatttggagctccatgtactgattacagtttttaaatttgaaataaatgaccagcatcctttgaatattaaaagctgt

SEQ ID NO: 684359 - DNA, 120 bp, Artificial Sequence
  ENSG00000187268_23 (sequence is synthesized)
ttccttttgacatttaatttactctctttaaaatgtgagttgtaaagtgatggtttgtcagtgaactagactttttgttttagagtgtgaggacttggaagagtataatgaaagccctct

SEQ ID NO: 684360 - DNA, 120 bp, Artificial Sequence
  ENSG00000187268_24 (sequence is synthesized)
ttttggtgaagagagtcaacttaaaaaataaattgccatgttccaaaataatattgtggtaattgtaagtagtgcatattttatcttaaaaactcaggattgatgtaagcactggaatat

SEQ ID NO: 684361 - DNA, 120 bp, Artificial Sequence
  ENSG00000187268_25 (sequence is synthesized)
tttatttgtagaaatgtgtatcgcaattacttaaatttatttttttgaaacagctgcagcaagagttggcacttattcagatgtatcttcaacctctgttattctggtgactgacaaaag

SEQ ID NO: 684362 - DNA, 120 bp, Artificial Sequence
  ENSG00000187268_26 (sequence is synthesized)
aacttgaacctatgttatatgatacatgcataacttgagctacactaaaccacatgacagtgtttagttaattcttgtataaattagtatatctcttctattattagtctgtttgttaaa

SEQ ID NO: 684363 - DNA, 120 bp, Artificial Sequence
  ENSG00000187268_27 (sequence is synthesized)
tgccagaccacgtttctatgatctgttgaatgaaccctagacagttctgtgagaaagcagcaattgcacagttacatacacagtcaattaaattttaacattaaagataatttagtttta

SEQ ID NO: 684364 - DNA, 120 bp, Artificial Sequence
  ENSG00000187268_28 (sequence is synthesized)
tacagtaggttatatgaattagtggatgacaagactgtcttaaatgccttcttctcatatatagcatttaatgtaatctgtttaataatttttcttacttacttttttaattgttgatgt

SEQ ID NO: 684365 - DNA, 120 bp, Artificial Sequence
  ENSG00000187268_29 (sequence is synthesized)
ggaatgtgagaatgcttctaataatggtgaagcaagaggggtggcttttctttcatacacgtggaaatttaattgtttgggggatattagaggacattggaggagaaacagctctattcg

SEQ ID NO: 684366 - DNA, 120 bp, Artificial Sequence
  ENSG00000187268_30 (sequence is synthesized)
ttcctttcagtgtacacacattaagtcatatatcaggtttttttttagcttttactttatgtttgggggtacatgtgcaggttcgttatatagataaattgcgtgtcacaggggtttggt

SEQ ID NO: 684367 - DNA, 120 bp, Artificial Sequence
  ENSG00000187268_31 (sequence is synthesized)
atacagattattttgtcacccagattataagcatcgtacctgatgggtggttttccatcctcaccttcctcctaccctccaacctcaagtaggcccaggtgtgtgttgttcacctcttcc

SEQ ID NO: 684368 - DNA, 120 bp, Artificial Sequence
  ENSG00000187268_32 (sequence is synthesized)
tgtccgtatgtactcagtttttaatatgagtttttcatcttcctaatttagctattgtcacaactttctaattttgttttctttaaagtaccagagaaaattgaattctctaaaatgatg

SEQ ID NO: 684369 - DNA, 120 bp, Artificial Sequence
  ENSG00000187268_33 (sequence is synthesized)
attttctattattattccagtaacaagctgtgtagtagaaaaggaaagacaacttttctacccagtgagaagcatacaattggatccaaaaactcataaactttatattgccatgtgaaa

SEQ ID NO: 684370 - DNA, 120 bp, Artificial Sequence
  ENSG00000187268_34 (sequence is synthesized)
tattagttgcactgttatgggaccatattttcaaaaaagtttgagaaaatttctgtagagattatgaagacaatactcttatttttaaaaagcttactttagttttcagctcttctatag

SEQ ID NO: 684371 - DNA, 120 bp, Artificial Sequence
  ENSG00000187268_35 (sequence is synthesized)
cgataattcatataagcagtatatttggaaagctttgctctgcttggtggtgacaaagtgccggttttgtctaatacaatgagcattatagatggatactgtatgtaaaaaaatttgtat

SEQ ID NO: 684372 - DNA, 120 bp, Artificial Sequence
  ENSG00000187268_36 (sequence is synthesized)
tatggtgcagctcttttatgattgctcaaaactattctcagcaattgatggtagatctctcatgtgaaaccatgtttaggaaagcattccttgcagtattacagttttctgaaacactgc

SEQ ID NO: 684373 - DNA, 120 bp, Artificial Sequence
  ENSG00000187268_37 (sequence is synthesized)
actgtggataaaaatgtcatataaaaagctctcagaaaatatttcaaatgtgttttgaatgtatttatctatttaaacctaaatgtttacacccatggacattgcttcttttattaaaat

SEQ ID NO: 684374 - DNA, 120 bp, Artificial Sequence
  ENSG00000187268_38 (sequence is synthesized)
tcagatacttttttgtgctttacataatgagttgtgacagtatttcacggaaacatgtcctttgaattgtaggacattttataaatgtagaaattaaagtctgtggctgggcacggttgc

SEQ ID NO: 684375 - DNA, 120 bp, Artificial Sequence
  ENSG00000187268_39 (sequence is synthesized)
tctgtctcaaaaaaaaaaaaaaagaaattaaagtctgtgtttgtaaccctttctgcacacttaaaaaatagaaacttttaattatttgctttttttcattatctgtcaattaagtgattt

SEQ ID NO: 684376 - DNA, 120 bp, Artificial Sequence
  ENSG00000187268_40 (sequence is synthesized)
gtcaattaagtgatttgctgttataccaactgaaattggaatactaatacctgaaaggttttacataaagtaagtaaatcttgctttttgaaatgatctttgcattttacattttaaatg

SEQ ID NO: 684377 - DNA, 120 bp, Artificial Sequence
  ENSG00000187268_41 (sequence is synthesized)
tccttctgatattgctgaaccatcaagtcccatattgattttaatatatgcaaagaaactacttttcaacatgaacatttaatgcatattcatttactatctagctgacattaaagagca

SEQ ID NO: 684378 - DNA, 120 bp, Artificial Sequence
  ENSG00000187268_42 (sequence is synthesized)
tcttgctgcaaagagaaaaaggattgaaaagattgcaaaagcttgcagcgaaataaagaacagaattaaaaatgttttgagaacaacacaactaaaaaggtatgattgttggcttttttg

SEQ ID NO: 684379 - DNA, 120 bp, Artificial Sequence
  ENSG00000187268_43 (sequence is synthesized)
aataatgatatttatatcatttctttgtattcattggtgcaaataatttccagaactatcctgtacatattggtgtctctagggaacaacatattttacttgattgttccctaaacaggt

SEQ ID NO: 684380 - DNA, 120 bp, Artificial Sequence
  ENSG00000187268_44 (sequence is synthesized)
aagtttctttagttttataacctcaatttaacagaattgagagatattacctagaagccaatgaagatgacctctttttgccttccagataaaaagtcttcctgtaaaattaatgtttat

SEQ ID NO: 684381 - DNA, 120 bp, Artificial Sequence
  ENSG00000187272_0 (sequence is synthesized)
agattctgggaaactcacctctgaacagaactccaccctctacccctgacaccatgacccactgttgttccccttgctgtcagcctacgtgctgcaggaccacctgctggaagcccacca

SEQ ID NO: 684382 - DNA, 120 bp, Artificial Sequence
  ENSG00000187272_1 (sequence is synthesized)
ctgtgaccacctgcagcagcacaccctgctgccagccctcctgctgtgtgtccagctgctgccagccttgctgccgcccaacttgctgtcaaaacacctgctgccagcccatctgtgtga

SEQ ID NO: 684383 - DNA, 120 bp, Artificial Sequence
  ENSG00000187272_2 (sequence is synthesized)
ccagctgctgccagccttcctgctgcagcacaccctgctgtcagcccacctgctgtggccaaaccagctgtgggtccagctgtggtcagagcagctcctgtgcacctgtgtactgcagaa

SEQ ID NO: 684384 - DNA, 120 bp, Artificial Sequence
  ENSG00000187272_3 (sequence is synthesized)
gaacctgctaccaccccacgactgtctgcctgcctggttgcctaaaccagagctgtggctccaactgctgccagccctgctgccgcccagcctgctgtgagaccacctgctgcaggacca

SEQ ID NO: 684385 - DNA, 120 bp, Artificial Sequence
  ENSG00000187272_4 (sequence is synthesized)
ctgctgatcacgttccaagagaaccaccatcctcacacaacaaatttctgctcaactgactcatcttttgggggactaatttaatttgctgctgacagccaccatgctctcacccaaatt

SEQ ID NO: 684386 - DNA, 120 bp, Artificial Sequence
  ENSG00000187272_5 (sequence is synthesized)
tttatgaattctctacatgtttaaaatcttggaaatctgcttgagggagggcagaatacttcatcctgattctctttttccttacaccttgtggatcatgtgccagcttcatctgttctc

SEQ ID NO: 684387 - DNA, 120 bp, Artificial Sequence
  ENSG00000187272_6 (sequence is synthesized)
aagtttgagtcatggtctcagctttgactctaaagtcaagagcttcattccctgcttctaaggaatttaggtttctgcaactgatcgatgatctttgcaatcttttttttgttttcaata

SEQ ID NO: 684388 - DNA, 120 bp, Artificial Sequence
  ENSG00000187272_7 (sequence is synthesized)
tcctcctcatcgttcttgtatccttctttcttcttttcatgataaatttgtgttgtgtccctggtagcagaaatccttacctatatgtttctgaataaattctgaaccatcctcatctca

SEQ ID NO: 684389 - DNA, 120 bp, Artificial Sequence
  ENSG00000187288_0 (sequence is synthesized)
agaatgttcttttggccactgtgaagcctcaggaaggggctcggattgctcaaggacccatgggagagaggaggctttgactgggctgcctgcctgtgaggtctctggactagaggtcca

SEQ ID NO: 684390 - DNA, 120 bp, Artificial Sequence
  ENSG00000187288_1 (sequence is synthesized)
acgcagtccagctgacaaggatggaatacgccatgaagtcccttagccttctctaccccaagtccctctccaggcatgtgtcagtgcgtacctctgtggtgacccagcagctgctgtcgg

SEQ ID NO: 684391 - DNA, 120 bp, Artificial Sequence
  ENSG00000187288_2 (sequence is synthesized)
agcccagccccaaggcccccagggcccggccctgccgcgtaagcacggcggatcgaagcgtgaggaagggcatcatggcttacagtcttgaggacctcctcctcaaggtccgggacactc

SEQ ID NO: 684392 - DNA, 120 bp, Artificial Sequence
  ENSG00000187288_3 (sequence is synthesized)
tgatgctggcagacaagcccttcttcctggtgctggaggaagatggcacaactgtagagacagaagagtacttccaagccctggcaggggatacagtgttcatggtcctccagaaggggc

SEQ ID NO: 684393 - DNA, 120 bp, Artificial Sequence
  ENSG00000187288_4 (sequence is synthesized)
agaaatggcagcccccatcagaacaggggacaaggcacccactgtccctctcccataagcctgccaagaagattgatgtggcccgtgtaacgtttgatctgtacaagctgaacccacagg

SEQ ID NO: 684394 - DNA, 120 bp, Artificial Sequence
  ENSG00000187288_5 (sequence is synthesized)
gccaagcgcatcatgaaggaagctttccgctgggccctcttcagcatgcaggccacaggccacgtactgcttggcacctcctgttacctgcagcagctcctcgatgctacggaggaaggg

SEQ ID NO: 684395 - DNA, 120 bp, Artificial Sequence
  ENSG00000187288_6 (sequence is synthesized)
cagccccccaagggcaaggcctcatcccttatcccgacctgtctgaagatactgcagtgaaagcccaagtccttggaagctttccccagtgaaggactgactgggggcctcacgcttaac

SEQ ID NO: 684396 - DNA, 120 bp, Artificial Sequence
  ENSG00000187288_7 (sequence is synthesized)
tggtagtgcccacaagcctggcagctgtagagccgcgaacctccccacacctccctcaccgcgcaggaccctgagtgaggaggaggagctggaaacctggggtgggttggccaaaggaga

SEQ ID NO: 684397 - DNA, 120 bp, Artificial Sequence
  ENSG00000187288_8 (sequence is synthesized)
acctcaagctcctggcctgatccagctccttcctgcccaaggcagcttagcccatccagactggtcctgaagtctgtccctccattggcatgaagtctgccccttagcaatctggcctcg

SEQ ID NO: 684398 - DNA, 120 bp, Artificial Sequence
  ENSG00000187288_9 (sequence is synthesized)
caggctgtactttcatggtgctctctaccttctggcccccatcccggaacattcctgagtgaattcgcaagcgcactagcatgtgatattagggagtttgcaataaattattgaggctga

SEQ ID NO: 684399 - DNA, 120 bp, Artificial Sequence
  ENSG00000187288_10 (sequence is synthesized)
ggcagtatttccaggaggctgtgagggggaggtccaacgcagtccagctgacaaggatggaatacgccatgaagtcccttagccttctctaccccaagtccctctccaggtgaggaaagt

SEQ ID NO: 684400 - DNA, 120 bp, Artificial Sequence
  ENSG00000187288_11 (sequence is synthesized)
catgggcagaatggaaagagagccacctatgagctgtaagccagaacttctcaaactttaatgggtatacaggtcacaggggaccttgttcaagtgcagattctgattcaggaggtctgg

SEQ ID NO: 684401 - DNA, 120 bp, Artificial Sequence
  ENSG00000187288_12 (sequence is synthesized)
acaccaccaccacaccatgcataaaaaggagtagacactatgcttggtgcttttactcctgatctcatgtaagcctcacaacaactttgggaagtgggggttattataccaaattaatag

SEQ ID NO: 684402 - DNA, 120 bp, Artificial Sequence
  ENSG00000187288_13 (sequence is synthesized)
gtgagagaactgaggcacatagtgggtgctctcaatcacccagcaaatccatgagggagccaagattctaaattgggactgcctgactgtaaaatccaggtcctttcctttcctttggtt

SEQ ID NO: 684403 - DNA, 120 bp, Artificial Sequence
  ENSG00000187288_14 (sequence is synthesized)
ctaaattgagtgcttcagttaaaaaaataccttacattgacttcaggcttcccccacttcatccaactttacaggtgaggagagtgaggccaagacaggtggtaaatggggaatgtgggg

SEQ ID NO: 684404 - DNA, 120 bp, Artificial Sequence
  ENSG00000187323_0 (sequence is synthesized)
gcacaccgctggcggacaccccagtaacaagtgagagcgctccaccccgcagtcccccccgcctctcctccctgggtcccctcggctctcggaagaaaaaccaacagcatctccagctct

SEQ ID NO: 684405 - DNA, 120 bp, Artificial Sequence
  ENSG00000187323_1 (sequence is synthesized)
cgcgcggaattgtctcttcaactttacccaaccgacgacaaggaaccagcctcaaccttttaatgcacagcccggccacaggattgccttccatctcctcttggtccctcctggatgtgg

SEQ ID NO: 684406 - DNA, 120 bp, Artificial Sequence
  ENSG00000187323_2 (sequence is synthesized)
tttattgatgacttgcgagcccctcagagagctgtcttccctcctctggctccctccgtttccttgagttagttttctaaggttttaccggggctcgggatctcttggaccgaatggaac

SEQ ID NO: 684407 - DNA, 120 bp, Artificial Sequence
  ENSG00000187323_3 (sequence is synthesized)
tttttgctgcctgcttttgctgctgattctgtcagtggacaaggaaaaaggcttcgaaggcagcagaggcgcaggggaggtggagaaagaggtggaggaagaggacgaggaggaggagga

SEQ ID NO: 684408 - DNA, 120 bp, Artificial Sequence
  ENSG00000187323_4 (sequence is synthesized)
agccgaaggggctcggcgcgtgtgtgtgcatgtgtgcatgcgtgtgtgagtgcatgtgtgtgagtgctgccgctgcccgcgacccctggccccgaaggtgttggctgaaatatggagaat

SEQ ID NO: 684409 - DNA, 120 bp, Artificial Sequence
  ENSG00000187323_5 (sequence is synthesized)
agtcttagatgtgtttgggtacccaagctggcttttgtactcttcggagcttccttgttcagcgcgcatcttcaagtaaccggttttcaaattaaagctttcacagcactgcgcttcctc

SEQ ID NO: 684410 - DNA, 120 bp, Artificial Sequence
  ENSG00000187323_6 (sequence is synthesized)
tcagaaccttctgatgccgtcacaatgcggggaggaaatgtcctcctcgactgctccgcggagtccgaccgaggagttccagtgatcaagtggaagaaagatggcattcatctggccttg

SEQ ID NO: 684411 - DNA, 120 bp, Artificial Sequence
  ENSG00000187323_7 (sequence is synthesized)
ggaatggatgaaaggaagcagcaactttcaaatgggtctctgctgatacaaaacatacttcattccagacaccacaagccagatgagggactttaccaatgtgaggcatctttaggagat

SEQ ID NO: 684412 - DNA, 120 bp, Artificial Sequence
  ENSG00000187323_8 (sequence is synthesized)
tctggctcaattattagtcggacagcaaaagttgcagtagcaggaccactgaggttcctttcacagacagaatctgtcacagccttcatgggagacacagtgctactcaagtgtgaagtc

SEQ ID NO: 684413 - DNA, 120 bp, Artificial Sequence
  ENSG00000187323_9 (sequence is synthesized)
attggggagcccatgccaacaatccactggcagaagaaccaacaagacctgactccaatcccaggtgactcccgagtggtggtcttgccctctggagcattgcagatcagccgactccaa

SEQ ID NO: 684414 - DNA, 120 bp, Artificial Sequence
  ENSG00000187323_10 (sequence is synthesized)
ccgggggacattggaatttaccgatgctcagctcgaaatccagccagctcaagaacaggaaatgaagcagaagtcagaattttatcagatccaggactgcatagacagctgtattttctg

SEQ ID NO: 684415 - DNA, 120 bp, Artificial Sequence
  ENSG00000187323_11 (sequence is synthesized)
caaagaccatccaatgtagtagccattgaaggaaaagatgctgtcctggaatgttgtgtttctggctatcctccaccaagttttacctggttacgaggcgaggaagtcatccaactcagg

SEQ ID NO: 684416 - DNA, 120 bp, Artificial Sequence
  ENSG00000187323_12 (sequence is synthesized)
tctaaaaagtattctttattgggtggaagcaacttgcttatctccaatgtgacagatgatgacagtggaatgtatacctgtgttgtcacatataaaaatgagaatattagtgcctctgca

SEQ ID NO: 684417 - DNA, 120 bp, Artificial Sequence
  ENSG00000187323_13 (sequence is synthesized)
gagctcacagtcttggttccgccatggtttttaaatcatccttccaacctgtatgcctatgaaagcatggatattgagtttgaatgtacagtctctggaaagcctgtgcccactgtgaat

SEQ ID NO: 684418 - DNA, 120 bp, Artificial Sequence
  ENSG00000187323_14 (sequence is synthesized)
tggatgaagaatggagatgtggtcattcctagtgattattttcagatagtgggaggaagcaacttacggatacttggggtggtgaagtcagatgaaggcttttatcaatgtgtggctgaa

SEQ ID NO: 684419 - DNA, 120 bp, Artificial Sequence
  ENSG00000187323_15 (sequence is synthesized)
aatgaggctggaaatgcccagaccagtgcacagctcattgtccctaagcctgctatcccaagctccagtgtcctcccttcggctcccagagatgtggtccctgtcttggtttccagccga

SEQ ID NO: 684420 - DNA, 120 bp, Artificial Sequence
  ENSG00000187323_16 (sequence is synthesized)
tttgtccgtctcagctggcgcccacctgcagaagcgaaagggaacattcaaactttcacggtctttttctccagagaaggtgacaacagggaacgagcattgaatacaacacagcctggg

SEQ ID NO: 684421 - DNA, 120 bp, Artificial Sequence
  ENSG00000187323_17 (sequence is synthesized)
tcccttcagctcactgtgggaaacctgaagccagaagccatgtacacctttcgagttgtggcttacaatgaatggggaccgggagagagttctcaacccatcaaggtggccacacagcct

SEQ ID NO: 684422 - DNA, 120 bp, Artificial Sequence
  ENSG00000187323_18 (sequence is synthesized)
gagttgcaagttccagggccagtagaaaacctgcaagctgtatctacctcacctacctcaattcttattacctgggaaccccctgcctatgcaaacggtccagtccaaggttacagattg

SEQ ID NO: 684423 - DNA, 120 bp, Artificial Sequence
  ENSG00000187323_19 (sequence is synthesized)
ttctgcactgaggtgtccacaggaaaagaacagaatatagaggttgatggactatcttataaactggaaggcctgaaaaaattcaccgaatatagtcttcgattcttagcttataatcgc

SEQ ID NO: 684424 - DNA, 120 bp, Artificial Sequence
  ENSG00000187323_20 (sequence is synthesized)
tatggtccgggcgtctctactgatgatataacagtggttacactttctgacgtgccaagtgccccgcctcagaacgtctccctggaagtggtcaattcaagaagtatcaaagttagctgg

SEQ ID NO: 684425 - DNA, 120 bp, Artificial Sequence
  ENSG00000187323_21 (sequence is synthesized)
ctgcctcctccatcaggaacacaaaatggatttattaccggctataaaattcgacacagaaagacgacccgcaggggtgagatggaaacactggagccaaacaacctctggtacctattc

SEQ ID NO: 684426 - DNA, 120 bp, Artificial Sequence
  ENSG00000187323_22 (sequence is synthesized)
acaggactggagaaaggaagtcagtacagtttccaggtgtcagccatgacagtcaatggtactggaccaccttccaactggtatactgcagagactccagagaatgatctagatgaatct

SEQ ID NO: 684427 - DNA, 120 bp, Artificial Sequence
  ENSG00000187323_23 (sequence is synthesized)
caagttcctgatcaaccaagctctcttcatgtgaggccccagactaactgcatcatcatgagttggactcctcccttgaacccaaacatcgtggtgcgaggttatattatcggttatggc

SEQ ID NO: 684428 - DNA, 120 bp, Artificial Sequence
  ENSG00000187323_24 (sequence is synthesized)
gttgggagcccttacgctgagacagtgcgtgtggacagcaagcagcgatattattccattgagaggttagagtcaagttcccattatgtaatctccctaaaagcttttaacaatgccgga

SEQ ID NO: 684429 - DNA, 120 bp, Artificial Sequence
  ENSG00000187323_25 (sequence is synthesized)
gaaggagttcctctttatgaaagtgccaccaccaggtctataaccgatcccactgacccagttgattattatcctttgcttgatgatttccccacctcggtcccagatctctccaccccc

SEQ ID NO: 684430 - DNA, 120 bp, Artificial Sequence
  ENSG00000187323_26 (sequence is synthesized)
atgctcccaccagtaggtgtacaggctgtggctcttacccatgatgctgtgagggtcagctgggcagacaactctgtccctaagaaccaaaagacgtctgaggtgcgactttacaccgtc

SEQ ID NO: 684431 - DNA, 120 bp, Artificial Sequence
  ENSG00000187323_27 (sequence is synthesized)
cggtggagaaccagcttttctgcaagtgcaaaatacaagtcagaagacacaacatctctaagttacacagcaacaggcctcaaaccaaacacaatgtatgaattctcggtcatggtaaca

SEQ ID NO: 684432 - DNA, 120 bp, Artificial Sequence
  ENSG00000187323_28 (sequence is synthesized)
aaaaacagaaggtccagtacttggagcatgactgcacatgccaccacgtatgaagcagcccccacctctgctcccaaggacttgacagtcattactagggaagggaagcctcgtgccgtc

SEQ ID NO: 684433 - DNA, 120 bp, Artificial Sequence
  ENSG00000187323_29 (sequence is synthesized)
attgtgagttggcagcctcccttggaagccaatgggaaaattactgcttacatcttattttataccttggacaagaacatcccaattgatgactggattatggaaacaatcagtggtgat

SEQ ID NO: 684434 - DNA, 120 bp, Artificial Sequence
  ENSG00000187323_30 (sequence is synthesized)
aggcttactcatcaaatcatggatctcaaccttgatactatgtattactttcgaattcaagcacgaaattcaaaaggagtggggccactctctgatcctatcctcttcaggactctgaaa

SEQ ID NO: 684435 - DNA, 120 bp, Artificial Sequence
  ENSG00000187323_31 (sequence is synthesized)
gtggaacaccctgacaaaatggctaatgaccaaggtcgtcatggagatggaggttattggccagttgatactaatttgattgatagaagcaccctaaatgagccgccaattggacaaatg

SEQ ID NO: 684436 - DNA, 120 bp, Artificial Sequence
  ENSG00000187323_32 (sequence is synthesized)
caccccccgcatggcagtgtcactcctcagaagaacagcaacctgcttgtgatcattgtggtcaccgttggtgtcatcacagtgctggtagtggtcatcgtggctgtgatttgcacccga

SEQ ID NO: 684437 - DNA, 120 bp, Artificial Sequence
  ENSG00000187323_33 (sequence is synthesized)
cgctcttcagcccagcagagaaagaaacgggccacccacagtgctggcaaaaggaagggcagccagaaggacctccgaccccctgatctttggatccatcatgaagaaatggagatgaaa

SEQ ID NO: 684438 - DNA, 120 bp, Artificial Sequence
  ENSG00000187323_34 (sequence is synthesized)
aatattgaaaagccatctggcactgaccctgcaggaagggactctcccatccaaagttgccaagacctcacaccagtcagccacagccagtcagaaacccaactgggaagcaaaagcacc

SEQ ID NO: 684439 - DNA, 120 bp, Artificial Sequence
  ENSG00000187323_35 (sequence is synthesized)
tctcattcaggtcaagacactgaggaagcagggagctctatgtccactctggagaggtcgctggctgcacgccgagccccccgggccaagctcatgattcccatggatgcccagtccaac

SEQ ID NO: 684440 - DNA, 120 bp, Artificial Sequence
  ENSG00000187323_36 (sequence is synthesized)
aatcctgctgtcgtgagcgccatcccggtgccaacgctagaaagtgcccagtacccaggaatcctcccgtctcccacctgtggatatccccacccgcagttcactctccggcctgtgcca

SEQ ID NO: 684441 - DNA, 120 bp, Artificial Sequence
  ENSG00000187323_37 (sequence is synthesized)
ttcccaacactctcagtggaccgaggtttcggagcaggaagaagtcagtcagtgagtgaaggaccaactacccaacaaccacctatgctgcccccatctcagcctgagcattctagcagc

SEQ ID NO: 684442 - DNA, 120 bp, Artificial Sequence
  ENSG00000187323_38 (sequence is synthesized)
gaggaggcaccaagcagaaccatccccacagcttgtgttcgaccaactcacccactccgcagctttgctaatcctttgctacctccaccaatgagtgcaatagaaccgaaagtcccttac

SEQ ID NO: 684443 - DNA, 120 bp, Artificial Sequence
  ENSG00000187323_39 (sequence is synthesized)
acaccacttttgtctcagccagggcccactcttcctaagacccatgtgaaaacagcctcccttgggttggctggaaaagcaagatcccctttgcttcctgtgtctgtgccaacagcccct

SEQ ID NO: 684444 - DNA, 120 bp, Artificial Sequence
  ENSG00000187323_40 (sequence is synthesized)
gaagtgtctgaggagagccacaaaccaacagaggattcagccaatgtgtatgaacaggatgatctgagtgaacaaatggcaagtttggaaggactcatgaagcagcttaatgccatcaca

SEQ ID NO: 684445 - DNA, 120 bp, Artificial Sequence
  ENSG00000187323_41 (sequence is synthesized)
ggctcagccttttaacatgtatttctgaatggatgaggtgaattttccgggaactttgcagcataccaattacccataaacagcacacctgtgtccaagaactctaaccagtgtacaggt

SEQ ID NO: 684446 - DNA, 120 bp, Artificial Sequence
  ENSG00000187323_42 (sequence is synthesized)
gagttccctaaacaaaagcaaagatgcattttcactgcaatgtcaaagtttaagctgctagaatagtcatgggcctttgtcactgcagtgaccacactgtcataactaatacctatgttt

SEQ ID NO: 684447 - DNA, 120 bp, Artificial Sequence
  ENSG00000187323_43 (sequence is synthesized)
tcctttgtcaaggcctgttgtttaatgtgtaggtctagtcttacaaaatgcaagtgcattatttaagcctgtaccatgccatggcaaaccagtgcaagctcactattttgttttcaactt

SEQ ID NO: 684448 - DNA, 120 bp, Artificial Sequence
  ENSG00000187323_44 (sequence is synthesized)
aaacatacaaagcacccatgggaatctctcatgccatagcaccaaaggattggatgttttccttacagcacaaaaagtaaatagtaaacaaacaaaaggcagagaatgcttatgtttgta

SEQ ID NO: 684449 - DNA, 120 bp, Artificial Sequence
  ENSG00000187323_45 (sequence is synthesized)
actcagtcattcatcttgcacaagtggtggatattagtgagtggctaaaaattcacctattttggcaagtatttgtaaatccacccttggttaatatgtatgtctggagtccaggaatat

SEQ ID NO: 684450 - DNA, 120 bp, Artificial Sequence
  ENSG00000187323_46 (sequence is synthesized)
aaaaatctgcaactagtggcattctgccagcagcagtacatttctggaaagaggatataatatgcaatcttctcagacacatggtaattatatgcttaagcttgtaataggacagttttc

SEQ ID NO: 684451 - DNA, 120 bp, Artificial Sequence
  ENSG00000187323_47 (sequence is synthesized)
aatttgggtggcttttgtgccataccacactgtgatacaatttcaaagcttcactaaggccatcttccttaggagtttggccagaagaatgcccccaccccttcaccccatccctccctg

SEQ ID NO: 684452 - DNA, 120 bp, Artificial Sequence
  ENSG00000187323_48 (sequence is synthesized)
agttctccttggcaactagcgttgggtgaaatggccagctccacatgtcatatggtgcactggccaatgtcgcctgtcttctaatcccgtagaaatggcagactccctgagagcaggaag

SEQ ID NO: 684453 - DNA, 120 bp, Artificial Sequence
  ENSG00000187323_49 (sequence is synthesized)
agaaggaaaataaaaggtagcttctaacagtaccttctcttaaagaatgccaactctgcctacagggtcagtgttggcaagcattggccaccagacccttttgttaagggaaacttttac

SEQ ID NO: 684454 - DNA, 120 bp, Artificial Sequence
  ENSG00000187323_50 (sequence is synthesized)
actacacctgtgtcagagtcagggggaagcagaggggcaggtgccacctgacacttccgacatgtaaatccagcagatacttttcaaagcagcatcttaaactgtggactacagttttaa

SEQ ID NO: 684455 - DNA, 120 bp, Artificial Sequence
  ENSG00000187323_51 (sequence is synthesized)
acttctattgccatgtttatctacagcttggaactagctaaaattaagaacattttgtatgcagcattttagtttctgaattttcagctgcatttggagttaatccctgtttatgcagct

SEQ ID NO: 684456 - DNA, 120 bp, Artificial Sequence
  ENSG00000187323_52 (sequence is synthesized)
gaatcgccaaaagggagctagtttgcatatttatcagttaggtgacttgaaaacccaatgagagagtttcagctgaattattcctttcagctctgcctttgatttcaagcttgagtaggt

SEQ ID NO: 684457 - DNA, 120 bp, Artificial Sequence
  ENSG00000187323_53 (sequence is synthesized)
cataattttaaaagagcatggaagggataggatctttacaacctaatagctccttttattaggtgggtaattatatatgaatccctgaataaaatattttgagcaaaatggcactgtaac

SEQ ID NO: 684458 - DNA, 120 bp, Artificial Sequence
  ENSG00000187323_54 (sequence is synthesized)
agaagtaataattcagtttatttttttacagttttatgtcgggaaggaaatctgatgtcaaagagagggctgttcaaatggttcattagaaagtccggtccatttgcgaatttgttcctt

SEQ ID NO: 684459 - DNA, 120 bp, Artificial Sequence
  ENSG00000187323_55 (sequence is synthesized)
caacaagagtgctcattcaagttactcagattttctggaagtcttttctgaagagctatgtgatgttgttctatgggacagactactcttatttaacatctgggcacttaggtagacaac

SEQ ID NO: 684460 - DNA, 120 bp, Artificial Sequence
  ENSG00000187323_56 (sequence is synthesized)
cttctactgacctggaataaagtgtttcctaacataatattgaattattcagaaataatccattacttcaaaaaagaaaatattcattgggctagcccaaccttctctaggccctaagaa

SEQ ID NO: 684461 - DNA, 120 bp, Artificial Sequence
  ENSG00000187323_57 (sequence is synthesized)
ttattacctcccctttctaattctagcaaacatggaacattctccttaggcacttgacacccacgagggtaatcctgagtgctcagtttggaataggttgcaaatctcagattttaggga

SEQ ID NO: 684462 - DNA, 120 bp, Artificial Sequence
  ENSG00000187323_58 (sequence is synthesized)
ttgagtcacaccttcaatctatagaatgaagttgaccaattaaaaaaaaaaaaaaaacctatcattttcacaaatttctagatccttctagtcaaaaataattatttaggaaataaaatt

SEQ ID NO: 684463 - DNA, 120 bp, Artificial Sequence
  ENSG00000187323_59 (sequence is synthesized)
tttaaaaatccatttaaatacatgttatttgtcttcagtggaagttatatttctgctgcatgcttttgaaactttcttcattaaatagaatggtttgtcttagtaactggcaatgccagt

SEQ ID NO: 684464 - DNA, 120 bp, Artificial Sequence
  ENSG00000187323_60 (sequence is synthesized)
attagcaccatgcatttaatctataatacaatcaatttaaacatcctcaaaaaactctagtatcatttacctggtagtattaatatacaatgatgtcaccacaacttttgtataactctg

SEQ ID NO: 684465 - DNA, 120 bp, Artificial Sequence
  ENSG00000187323_61 (sequence is synthesized)
ttccctttaccctcaaatgattcatatatgtatataattgcctgcccaagttttcaggtaacttattaatttcccagtctcctgatctcttgacaagaagaaacctgtgaatactgcaaa

SEQ ID NO: 684466 - DNA, 120 bp, Artificial Sequence
  ENSG00000187323_62 (sequence is synthesized)
ctagcctctgacttcctcctactgagtctagttcatggtatccaggactctttatgctcataactctctctgattcccattgggtgatacctgacagccaaccagccgctctgccaccag

SEQ ID NO: 684467 - DNA, 120 bp, Artificial Sequence
  ENSG00000187323_63 (sequence is synthesized)
aactcatttctccctgaaaaagaagaaaatcatatttggcagagcattctctggtctgccctgtaatgtgcttaaatgtcaggcaacatcctcttttttttaaaaaaaatggtatttttc

SEQ ID NO: 684468 - DNA, 120 bp, Artificial Sequence
  ENSG00000187323_64 (sequence is synthesized)
tttaaatttcaccctaataagaaagctattttctctcctctgcagaaatttctgcatttgtgaaacttataaaaatttagatagttcaaatgtataaagaatatttggatgatgctctag

SEQ ID NO: 684469 - DNA, 120 bp, Artificial Sequence
  ENSG00000187323_65 (sequence is synthesized)
ccaaaagttaaatatttcgtagtgaatcatagccaataagaaaccagtcatacttgcctctttgaataacagagatataagcttctagaatatttaaataatgaagttttacatttgggt

SEQ ID NO: 684470 - DNA, 120 bp, Artificial Sequence
  ENSG00000187323_66 (sequence is synthesized)
attataaaatgcatactcaattgaatgagctgaaaaaaataccaagccagtgatataagtggagatttattaaggattcctgttgagtatattcttagtttcctcaaaatagggattatt

SEQ ID NO: 684471 - DNA, 120 bp, Artificial Sequence
  ENSG00000187323_67 (sequence is synthesized)
caaaattaggtgtatgttcaatctcctgctttggttccagctacacaaggagagccatcctgtgctagtgtgatgtttcagacaacattctgaaactaaaatgtttggcacttattggct

SEQ ID NO: 684472 - DNA, 120 bp, Artificial Sequence
  ENSG00000187323_68 (sequence is synthesized)
tttccaataaagaatctcttaagtacaggtatttctggaagctgttggtgtctgtgcttgaagatgattgctgatacttatccaccctttgggtacttctgttgactttgtttaaataat

SEQ ID NO: 684473 - DNA, 120 bp, Artificial Sequence
  ENSG00000187323_69 (sequence is synthesized)
catcttatggttgtccccaaatgtaatatggtatctcagatatagcagctggactgtaattacaacaaaaggttacctctaaagataacatcttaccattttagataaaattgtgtccca

SEQ ID NO: 684474 - DNA, 120 bp, Artificial Sequence
  ENSG00000187323_70 (sequence is synthesized)
gaattcttatggtttcggaatgtacatttctagtcaatgaaagaaagaaaaatggaaaaattgtctagtttcaggcatgtttaaagaaaacaaagtcatctgaactttaaaatagatgca

SEQ ID NO: 684475 - DNA, 120 bp, Artificial Sequence
  ENSG00000187323_71 (sequence is synthesized)
gagcagggttactttccctttcactcagttcccttcatgcaaccacaggcagtcctgcaggccagaggttactatcctaacctgctcataaccatatactatacagagcccacaactttc

SEQ ID NO: 684476 - DNA, 120 bp, Artificial Sequence
  ENSG00000187323_72 (sequence is synthesized)
tggagatgcagaagcagccatacactcaagtctctgtttttgtaaatcacattcaaagcaacattttactcataatttgcatttctctggtgactttcagaaatcactttagtattgtac

SEQ ID NO: 684477 - DNA, 120 bp, Artificial Sequence
  ENSG00000187323_73 (sequence is synthesized)
agaaaagctttttatttgagtctagtgtttaaaattaaattggatacttgggaaaatcatagataggtgttttgtatgatattccattccaatgcaaaatatatgtacccatgcctcaat

SEQ ID NO: 684478 - DNA, 120 bp, Artificial Sequence
  ENSG00000187323_74 (sequence is synthesized)
gtatcttgctatctaaatacctgttgccaaaaagtattgatttgggaaaaaaaatgccaatttcctggtcagtgaggttatgtaaaagacaaaataccacacccatatcagcaaatgaat

SEQ ID NO: 684479 - DNA, 120 bp, Artificial Sequence
  ENSG00000187323_75 (sequence is synthesized)
attactactcatctggactcttcgttgccactattgcataacgttcacgtggcagacttccagttgcactctctgaaggacttttttctcttactctcaatagagagcctttgtacattg

SEQ ID NO: 684480 - DNA, 120 bp, Artificial Sequence
  ENSG00000187323_76 (sequence is synthesized)
tcatcctatgattgttgttggtagaagagcaagagcaaaactctgcaagatttaataaacacaggggcatgggccaagggatctcactgtgtgctgaacatgtattttcagatgcaagaa

SEQ ID NO: 684481 - DNA, 120 bp, Artificial Sequence
  ENSG00000187323_77 (sequence is synthesized)
aggaatgatggagaggaggagaaatgctgttttttattattgtagggtaaatctgacaattctgaactttgtgaattgtcagcttgtttgggggaagggtgggcgggtatggggtgtact

SEQ ID NO: 684482 - DNA, 120 bp, Artificial Sequence
  ENSG00000187323_78 (sequence is synthesized)
ttttataagtaatatttaatttattatttagagtggcttctttttggataatttatgataaaaagggagatctggttgggatctagatacggctgttaaagctgcagtgttccatacctc

SEQ ID NO: 684483 - DNA, 120 bp, Artificial Sequence
  ENSG00000187323_79 (sequence is synthesized)
agagggaccactttggaaatgaattgtccattgctgagtatgaagagatgtccagtccaggcaaagccttcactgaagttccatcatcgccacttctccctttttagggtcattcaaaga

SEQ ID NO: 684484 - DNA, 120 bp, Artificial Sequence
  ENSG00000187323_80 (sequence is synthesized)
agataacaccaaacctaaataattctgaaagcattttgcagatcagtgctactcattcaaagggctttgcaactcaaacagattgttagtgtgctagtgataagtttatttggtagaaat

SEQ ID NO: 684485 - DNA, 120 bp, Artificial Sequence
  ENSG00000187323_81 (sequence is synthesized)
gggtatactacagctttaactagccttagtgagaaaagaaattttttgttgttacaaaacaccttttttaacaaaaaggtattttgagcctacaaaaagtttctttaaactgtcagattc

SEQ ID NO: 684486 - DNA, 120 bp, Artificial Sequence
  ENSG00000187323_82 (sequence is synthesized)
tagcattgttaaccaaattagactagtgattgcaatatttaagtgtaaatcttgttctacaagaaaggaaacttgcttacagtttaaaacaatgactgtttctacacatgatcttgtata

SEQ ID NO: 684487 - DNA, 120 bp, Artificial Sequence
  ENSG00000187323_83 (sequence is synthesized)
ctactacacaaggaaaagggggttttgtaaacactgtagaacagtctcatattcatttttttatagaaatgttattccaatggtgcattttttgtttaataaataaagttttgatacaaa

SEQ ID NO: 684488 - DNA, 120 bp, Artificial Sequence
  ENSG00000187323_84 (sequence is synthesized)
gagaaagtttggacaacatagccatggcagtttataactcaaagtatatggatggatgacactcgctagagagttgcaacagccgatgcagctgtccccaggccccaaactcacttatat

SEQ ID NO: 684489 - DNA, 120 bp, Artificial Sequence
  ENSG00000187323_85 (sequence is synthesized)
ttcctgaaacaccaggaaaagcatcttttatttttatatgagagccctaagagattattttcatcttattcaaaaatgaaaagattttatttaattaaaaaatctatttctattatctta

SEQ ID NO: 684490 - DNA, 120 bp, Artificial Sequence
  ENSG00000187323_86 (sequence is synthesized)
aagaagagttactggagcactctctccacccttgcacagagagaaaaggccatgtgagaacagagaaggtgttgtctggaagccagggagaggacccttactagaagccaactttgctgg

SEQ ID NO: 684491 - DNA, 120 bp, Artificial Sequence
  ENSG00000187323_87 (sequence is synthesized)
ccaacagaggattcagccaatgtggagatggagtgggtgaaacaatatgcaatctcttattatccccttttattaccagcatcttcattcagtgtatgaacaggatgatctgagtgaaca

SEQ ID NO: 684492 - DNA, 120 bp, Artificial Sequence
  ENSG00000187323_88 (sequence is synthesized)
cattcattgttttctatttttttcacttgtttttatttcttgaaaaaaaaaaaggttcctgttggagattttttgtgatgtgttaaaaaagttattcaaataaagcaaatgattttctag

SEQ ID NO: 684493 - DNA, 120 bp, Artificial Sequence
  ENSG00000187323_89 (sequence is synthesized)
tcctgtctgttagacatgtcagtcattactttatattcctcttttcacctggaccatacacctgatgaagcagacactggcgtgacgattaatcttgttaatgaagttctgcttggctga

SEQ ID NO: 684494 - DNA, 120 bp, Artificial Sequence
  ENSG00000187323_90 (sequence is synthesized)
ggctgcggctctgataaggaagatgtaaattttcttgagaggaaattgttttgtctccattctgaaggaccaattaaaatgtcaagcttctttgtatgaaataaatttttagtctctgtc

SEQ ID NO: 684495 - DNA, 120 bp, Artificial Sequence
  ENSG00000187323_91 (sequence is synthesized)
tgcacttctgaataattcacattaagtataattaagctcagcataattttcaagctgctcttgcaccctttcctgagctatggattaaagttctgtagctctacagagaaaacccgtaaa

SEQ ID NO: 684496 - DNA, 120 bp, Artificial Sequence
  ENSG00000187323_92 (sequence is synthesized)
gaacacaaactggcaagcctgaattaagttttcaaaaagttaaatctatgggagattttttggcaagcagtgcccaaatcccttggaataaaagattcatttttgaccactggatctact

SEQ ID NO: 684497 - DNA, 120 bp, Artificial Sequence
  ENSG00000187323_93 (sequence is synthesized)
attatgttaatgcaatcaatacagtttgtactgaccagagcaggcgtttgagattgagtgaccttgcaatcatttccaaaacatgtacagggcactcctctcagccttcttaatggcttt

SEQ ID NO: 684498 - DNA, 120 bp, Artificial Sequence
  ENSG00000187323_94 (sequence is synthesized)
ataacaggacaattgggcagaatcaccactccttcatgcactctcctagtgagggtctgagaaagttgaaatctgaaagatgtgattttgtcaggtggtgctataaagaattacatctca

SEQ ID NO: 684499 - DNA, 120 bp, Artificial Sequence
  ENSG00000187323_95 (sequence is synthesized)
attgcactaggttctgggaagactacagaaacatctgaaacctggcttcagtgggcttcgtataattacaattcgtaaaatcagttggcctaatactgtctgaataaacttttatttaaa

SEQ ID NO: 684500 - DNA, 120 bp, Artificial Sequence
  ENSG00000187323_96 (sequence is synthesized)
accaatgagtactgtccattcaccccaggccaccccaggccattgttgttcttattgttgtttgttcctttgttttcctgcacttaaatatgaagaggaaataaaagctatgaaaaaaaa

SEQ ID NO: 684501 - DNA, 120 bp, Artificial Sequence
  ENSG00000187323_97 (sequence is synthesized)
tcttccttgtcacaggtggagatggagtgggtgaaacaatatgcaatctcttattatccccttttattaccagcatcttcattcagtgagtatattccaaggacagccctggctgtggtc

SEQ ID NO: 684502 - DNA, 120 bp, Artificial Sequence
  ENSG00000187323_98 (sequence is synthesized)
ccagggcccttgaatacgctcagaattctatttgggaaggtttggttacagtgcagagctttccattttacatttatagagatattgtttattttcaaatgataagcagaaaattaaatt

SEQ ID NO: 684503 - DNA, 120 bp, Artificial Sequence
  ENSG00000187323_99 (sequence is synthesized)
gctctgactctgtaattcttaatgacttaatgatcttcatttagctaaatgttcccattgttttgtagttaaagcatgagagaaagaaaaaataagaaataaatgtggtcttataagtaa

SEQ ID NO: 684504 - DNA, 120 bp, Artificial Sequence
  ENSG00000187323_100 (sequence is synthesized)
tactgagtacattctggtaaggtcataaggcagttggaaaggcctcaaaggttaactgaaatgatcaaaggaatgaaatattatagtaagaccagatgagaaattttcagcacagaaaaa

SEQ ID NO: 684505 - DNA, 120 bp, Artificial Sequence
  ENSG00000187323_101 (sequence is synthesized)
tgatgggtgaaaagggacacaatcaaattcctgaccatgaaggatattagtaactgaaacatggacttgttcaacaaattcaagaatactgtaggagaactctcctgaagcttgaagttc

SEQ ID NO: 684506 - DNA, 120 bp, Artificial Sequence
  ENSG00000187325_0 (sequence is synthesized)
ctctcctctgtctccgcggatgacgagtggctggataacatggagtcgggcaagatggcgcctcccaagaacgctccgagagatgccttggtgatggcacagatcctgaaggatatggga

SEQ ID NO: 684507 - DNA, 120 bp, Artificial Sequence
  ENSG00000187325_1 (sequence is synthesized)
atcacagagtatgaaccaagggttataaatcaaatgttggaatttgctttccgttatgtgactacaattctggatgatgcaaaaatttattcgagccatgctaagaaacctaatgttgat

SEQ ID NO: 684508 - DNA, 120 bp, Artificial Sequence
  ENSG00000187325_2 (sequence is synthesized)
gcagatgatgtgagactggcaatccagtgtcgtgctgaccaatcttttacctctcctcccccaagagattttttactggatatcgcaaggcagaaaaatcaaacccctttgccactgatt

SEQ ID NO: 684509 - DNA, 120 bp, Artificial Sequence
  ENSG00000187325_3 (sequence is synthesized)
aagccatatgcaggacctagactgccacctgatagatactgcttaacagctccaaactataggctgaagtccttaattaaaaagggacctaaccaagggagactagttccacgattaagt

SEQ ID NO: 684510 - DNA, 120 bp, Artificial Sequence
  ENSG00000187325_4 (sequence is synthesized)
gttggtgctgttagtagcaaacctactactcctactatagcaaccccacaaacggtgtctgtcccaaataaagttgcaactccaatgtcagtgacaagccaaagatttacggtgcagatt

SEQ ID NO: 684511 - DNA, 120 bp, Artificial Sequence
  ENSG00000187325_5 (sequence is synthesized)
ccaccttctcagtccacacctgtcaaaccagttcctgcaacaactgcagttcaaaatgttctgattaatccttcaatgattgggcccaaaaatattcttattaccaccaacatggtttcg

SEQ ID NO: 684512 - DNA, 120 bp, Artificial Sequence
  ENSG00000187325_6 (sequence is synthesized)
tcacagaacacagccaatgaagcaaacccactgaagagaaaacatgaagatgatgatgacaatgatattatgtaaggaatatagtctagtctagatgcatttcaaaaggaaagttggttt

SEQ ID NO: 684513 - DNA, 120 bp, Artificial Sequence
  ENSG00000187325_7 (sequence is synthesized)
tgagcccagtatactgaactagaatattctagatcttgttttaccttaaaagactgaaatgtagctgcagtatttttcgtcagttaaaactgttagatctctttagtaaacatacaaatg

SEQ ID NO: 684514 - DNA, 120 bp, Artificial Sequence
  ENSG00000187325_8 (sequence is synthesized)
tgtttttcagtaggcttcaattacaaacagttaagtacttgtttcttaatagtttcattaatgttgagtcctaatatggcaattctgtttttgagacacttttctgccttctatcactga

SEQ ID NO: 684515 - DNA, 120 bp, Artificial Sequence
  ENSG00000187325_9 (sequence is synthesized)
tagtagcatttaagtttcagattctacagcctagtcagcagatttatctttgacagcataatttctgatctacatttaaatactactttattttataaggtaatatagttacttactgtc

SEQ ID NO: 684516 - DNA, 120 bp, Artificial Sequence
  ENSG00000187325_10 (sequence is synthesized)
actagctaatttttttttttttaccaaatctctcaatataggaaacattttttggaaaggatggatttagaggagagattctaaatccattttggatgtatttgtttctttgacttcctt

SEQ ID NO: 684517 - DNA, 120 bp, Artificial Sequence
  ENSG00000187325_11 (sequence is synthesized)
ccctttctagatcccattcattttctgcacctcccccataggcttgtttctctccattgctattaaatgtagaaggccatacctggaattttaaaaatattattcctggtaatacagctc

SEQ ID NO: 684518 - DNA, 120 bp, Artificial Sequence
  ENSG00000187325_12 (sequence is synthesized)
agtgtcattttcctatttttaaaacatgctctacatgcctaatgttttgtgattcactttaacctgatggtttgcatttgctgtttttcactcttatgtcagagcagttgggttttaccc

SEQ ID NO: 684519 - DNA, 120 bp, Artificial Sequence
  ENSG00000187325_13 (sequence is synthesized)
cttagtttttatgcctgttaagctttactgtgcttttgacaggtagttttgggtcagttatattcagttttagtattgtattccaagttgataactcttccatgtttcacatttctaaat

SEQ ID NO: 684520 - DNA, 120 bp, Artificial Sequence
  ENSG00000187325_14 (sequence is synthesized)
ttaacagagatgctgtagcttaaaacatgttttgataagtaattacactggacctaggcaaaaccactgaagaacaagtgttcctttttaccacatacatattatgttttgatcactgct

SEQ ID NO: 684521 - DNA, 120 bp, Artificial Sequence
  ENSG00000187325_15 (sequence is synthesized)
gcttgagccccgctattggtataattcagatcattttagcttgttgctgaggatgtcacatataagacaggatcaaacctgaaagacactaatggttcatcctctataaggccaacaaag

SEQ ID NO: 684522 - DNA, 120 bp, Artificial Sequence
  ENSG00000187325_16 (sequence is synthesized)
aaaacaaattaatgtgatgtaacttgcatttatgtgcactctgcataggtttcccaataatactgtaatgttgctgaacacctttccctgttttccatttatacacatattaaagtcata

SEQ ID NO: 684523 - DNA, 120 bp, Artificial Sequence
  ENSG00000187325_17 (sequence is synthesized)
ttgggaaagatggcaaagcttttgagaatataaacacacctgttttgtttttcttaagttcaacatacttttgtagaatttgtaaaataaatgttcgtatcataattgagaatttatagc

SEQ ID NO: 684524 - DNA, 120 bp, Artificial Sequence
  ENSG00000187325_18 (sequence is synthesized)
caaggatcctcaaaacagaagtttcatcttaggatagtgtttgatatatctaagaaagtccagtaacagagaagaaatgtctcaaatgtctcgtatcagttttagtgtttttcagtatta

SEQ ID NO: 684525 - DNA, 120 bp, Artificial Sequence
  ENSG00000187325_19 (sequence is synthesized)
gggaaaggtaatataaaaacaggtaaaatgtataaaaatagacctgatcaacatcataggagataaatattcattatatagcataggatattattacttgaatgttctcagggaggcagc

SEQ ID NO: 684526 - DNA, 120 bp, Artificial Sequence
  ENSG00000187325_20 (sequence is synthesized)
aagtcagaaggcctaggttctagtcctagctccatcatttaccaactgtgtgaccttacttcacctcttagccttgttctcctcactagcagtaggaaagtaacacctaccctgcctacc

SEQ ID NO: 684527 - DNA, 120 bp, Artificial Sequence
  ENSG00000187325_21 (sequence is synthesized)
tcacagggctgttgtgagggttcaattggtatatgtgaaaattctttcagaattgtaaaatgctatatgactgtaaggaattattgcatttgttccaaggttaataaaaatttgagctta

SEQ ID NO: 684528 - DNA, 120 bp, Artificial Sequence
  ENSG00000187325_22 (sequence is synthesized)
gtcgtgctgaccaatcttttacctctcctcccccaagagatgtgagcaaactttgatttgaagttatttttacttacaatttttaaaactgtagttctaataaggattttttttttaagt

SEQ ID NO: 684529 - DNA, 120 bp, Artificial Sequence
  ENSG00000187372_0 (sequence is synthesized)
gcagctccattaaccggcaaaaagcagcagaacctggaagtccacggggagcttggatgccaaagggaggacggctgggtcctctggagaggactactcactggcatatttctgaggtat

SEQ ID NO: 684530 - DNA, 120 bp, Artificial Sequence
  ENSG00000187372_1 (sequence is synthesized)
ctgtagaataaccacagcctcagatactggggactttacagtcccacagaaccgtcctcccaggaagctgaatccagcaagaacaatggaggccagcgggaagctcatttgcagacaaag

SEQ ID NO: 684531 - DNA, 120 bp, Artificial Sequence
  ENSG00000187372_2 (sequence is synthesized)
gcaagtccttttttcctttctccttttgggcttatctctggcgggcgcggcggaacctagaagctattctgtggtggaggaaactgagggcagctcctttgtcaccaatttagcaaagga

SEQ ID NO: 684532 - DNA, 120 bp, Artificial Sequence
  ENSG00000187372_3 (sequence is synthesized)
cctgggtctggagcagagggaattctccaggcggggggttagggttgtttccagagggaacaaactacatttgcagctcaatcaggagaccgcggatttgttgctaaatgagaaattgga

SEQ ID NO: 684533 - DNA, 120 bp, Artificial Sequence
  ENSG00000187372_4 (sequence is synthesized)
ccgtgaggatctgtgcggtcacacagagccctgtgtgctacgtttccaagtgttgctagagagtcccttcgagttttttcaagctgagctgcaagtaatagacataaacgaccactctcc

SEQ ID NO: 684534 - DNA, 120 bp, Artificial Sequence
  ENSG00000187372_5 (sequence is synthesized)
agtatttctggacaaacaaatgttggtgaaagtatcagagagcagtcctcctgggactacgtttcctctgaagaatgccgaagacttagatgtaggccaaaacaatattgagaactatat

SEQ ID NO: 684535 - DNA, 120 bp, Artificial Sequence
  ENSG00000187372_6 (sequence is synthesized)
aatcagccccaactcctattttcgggtcctcacccgcaaacgcagtgatggcaggaaatacccagagctggtgctggacaaagcgctggaccgagaggaagaagctgagctcaggttaac

SEQ ID NO: 684536 - DNA, 120 bp, Artificial Sequence
  ENSG00000187372_7 (sequence is synthesized)
actcacagcactggatggtggctctccgcccagatctggcactgctcaggtctacatcgaagtcctggatgtcaacgataatgcccctgaatttgagcagcctttctatagagtgcagat

SEQ ID NO: 684537 - DNA, 120 bp, Artificial Sequence
  ENSG00000187372_8 (sequence is synthesized)
ctctgaggacagtccggtaggcttcctggttgtgaaggtctctgccacggatgtagacacaggagtcaacggagagatttcctattcacttttccaagcttcagaagagattggcaaaac

SEQ ID NO: 684538 - DNA, 120 bp, Artificial Sequence
  ENSG00000187372_9 (sequence is synthesized)
ctttaagatcaatcccttgacaggagaaattgaactaaaaaaacaactcgatttcgaaaaacttcagtcctatgaagtcaatattgaggcaagagatgctggaaccttttctggaaaatg

SEQ ID NO: 684539 - DNA, 120 bp, Artificial Sequence
  ENSG00000187372_10 (sequence is synthesized)
caccgttctgattcaagtgatagatgtgaacgaccatgccccagaagttaccatgtctgcatttaccagcccaatacctgagaacgcgcctgaaactgtggttgcacttttcagtgtttc

SEQ ID NO: 684540 - DNA, 120 bp, Artificial Sequence
  ENSG00000187372_11 (sequence is synthesized)
agatcttgattcaggagaaaatgggaaaattagttgctccattcaggaggatctacccttcctcctgaaatccgcggaaaacttttacaccctactaacggagagaccactagacagaga

SEQ ID NO: 684541 - DNA, 120 bp, Artificial Sequence
  ENSG00000187372_12 (sequence is synthesized)
aagcagagcggaatacaacatcactatcactgtcactgacttggggacccctatgctgataacacagctcaatatgaccgtgctgatcgccgatgtcaatgacaacgctcccgccttcac

SEQ ID NO: 684542 - DNA, 120 bp, Artificial Sequence
  ENSG00000187372_13 (sequence is synthesized)
gagaacaacagccccgccctgcacatccgcagcgtcagcgctacagacagagactcaggcaccaacgcccaggtcacctactcgctgctgccgccccaggacccgcacctgcccctcaca

SEQ ID NO: 684543 - DNA, 120 bp, Artificial Sequence
  ENSG00000187372_14 (sequence is synthesized)
gccccaggacccgcacctgcccctcacatccctggtctccatcaacgcggacaacggccacctgttcgccctcaggtctctggactacgaggccctgcaggggttccagttccgcgtggg

SEQ ID NO: 684544 - DNA, 120 bp, Artificial Sequence
  ENSG00000187372_15 (sequence is synthesized)
tggactacgaggccctgcaggggttccagttccgcgtgggcgcttcagaccacggctccccggcgctgagcagcgaggcgctggtgcgcgtggtggtgctggacgccaacgacaactcgc

SEQ ID NO: 684545 - DNA, 68 bp, Artificial Sequence
  ENSG00000187372_16 (sequence is synthesized)
tcaaggccacggagctcggtctgttcgggacgcggccaagcacaggctggtggtgctggtcaaggaca

SEQ ID NO: 684546 - DNA, 120 bp, Artificial Sequence
  ENSG00000187372_17 (sequence is synthesized)
ctggtggacggcttctcccagccctacctgcctctcccggaggcggccccgacccaggcccaggccgacttgctcaccgtctacctggtggtggcgttggcctcggtgtcttcgctcttc

SEQ ID NO: 684547 - DNA, 120 bp, Artificial Sequence
  ENSG00000187372_18 (sequence is synthesized)
ctcctgttcgtggcggtgcggctgtgtaggaggagcagggcggcctcggtgggtcgctgcttggtgcccgagggcccccttccagggcatcttgtggacatgagcggcaccaggacccta

SEQ ID NO: 684548 - DNA, 120 bp, Artificial Sequence
  ENSG00000187372_19 (sequence is synthesized)
tccagggcatcttgtggacatgagcggcaccaggaccctatcccagagctaccagtatgaggtgtgtctggcaggaggctcagggaccaatgagttcaagttcctgaagccgattatccc

SEQ ID NO: 684549 - DNA, 120 bp, Artificial Sequence
  ENSG00000187372_20 (sequence is synthesized)
tgggaaagaaatacaaggaaattctaccttccccaataactttgggttcaatattcagtgaccatagttgacttttacattccataggtattttattttgtggcatttccatgccaatgt

SEQ ID NO: 684550 - DNA, 120 bp, Artificial Sequence
  ENSG00000187372_21 (sequence is synthesized)
ttatttcccccaatttgtgtgtatgtaatattgtacggatttactcttgatttttctcatgttctttctccctttgttttaaagtgaacatttacctttattcctggttcttaaaaggtg

SEQ ID NO: 684551 - DNA, 120 bp, Artificial Sequence
  ENSG00000187372_22 (sequence is synthesized)
acaattcattctttaacccagatggtcttaatttgtaattaatttgcctccctaaagagcaataccaaatcacatttttttcatgcccctatctttagctgaacttcacccactattatg

SEQ ID NO: 684552 - DNA, 120 bp, Artificial Sequence
  ENSG00000187372_23 (sequence is synthesized)
cttatggtaaaattaaatagagcaatttggaagtgattccaattttccagcatttcttcatttgattctctttttttagtcttaaaataatgactcctattcagacatatcatttttctt

SEQ ID NO: 684553 - DNA, 120 bp, Artificial Sequence
  ENSG00000187372_24 (sequence is synthesized)
ttttgtaaatccagtgcgtttttagttaacctttaaatatgctttttgctttcaaaaataaaccagaaaacctatatcctatgatacaactctaagtgttatcacttgattcgaaagggt

SEQ ID NO: 684554 - DNA, 120 bp, Artificial Sequence
  ENSG00000187372_25 (sequence is synthesized)
cagaagaccagttttttagtatcctttcctcattcatcctggagaggattgtgcaggcacattaatattgtgaccaatcacagaatctgggaatatgaagctataattttttaattaatg

SEQ ID NO: 684555 - DNA, 120 bp, Artificial Sequence
  ENSG00000187372_26 (sequence is synthesized)
tcacaaagctctagtgcaatctagttgaatgcagatgcctgtgcccaaataataattcatatagcataaattggagttgtgtgttaatgtgtaaaaatttttgcctgtactatcatataa

SEQ ID NO: 684556 - DNA, 120 bp, Artificial Sequence
  ENSG00000187372_27 (sequence is synthesized)
tttaatgtatatacaccagaaactatttttcaaactttttttactgcaaccaatagttaagattatattttacatattttgaaacacacaagcttaatagaaataaatgcttgtgaacaa

SEQ ID NO: 684557 - DNA, 120 bp, Artificial Sequence
  ENSG00000187372_28 (sequence is synthesized)
tgcttagtctttttatgacataatttgaaattacctatatatttcattctattcaattttcaaatgtggtcatgatccactaaatttatttcatggtatactagtgggtagtaacccaaa

SEQ ID NO: 684558 - DNA, 120 bp, Artificial Sequence
  ENSG00000187372_29 (sequence is synthesized)
gtttgaaaaccacttttctcagacatataaaagcataccagatgttgaacattgatagtatcaaaagatagtcccttagggttctaattttaaaaaaattttcaaagcattgtaggggag

SEQ ID NO: 684559 - DNA, 120 bp, Artificial Sequence
  ENSG00000187372_30 (sequence is synthesized)
tagctttgtctcatgttaaatcactcttacctttaaggatctgacacactatgtaagaaaaagacttcaaggttggaggaggagattttccatgacttttatcaaagtctacagtctatg

SEQ ID NO: 684560 - DNA, 120 bp, Artificial Sequence
  ENSG00000187372_31 (sequence is synthesized)
ttgtgggagaaaaatgtagaataacaaaatgagtaaaagtatagaggcaaaacaagcatgtgtatgagagagagagagaaagcatggaaaagaggaaattcatggggatgagcaaaatga

SEQ ID NO: 684561 - DNA, 120 bp, Artificial Sequence
  ENSG00000187372_32 (sequence is synthesized)
aggaaattcatggggatgagcaaaatgactacttccagtgccacagactagactcagttgcttctcttatgttattttttgagacaaggtcctgttctgtcacccaggctggagtgcagt

SEQ ID NO: 684562 - DNA, 120 bp, Artificial Sequence
  ENSG00000187372_33 (sequence is synthesized)
tgatcctcccacctcagcctccctagtacccaggactacaggcccaggccaccacacccactaatttttgcatatttagtagagacgaggtttcatcatattgcccagactggtctcgaa

SEQ ID NO: 684563 - DNA, 88 bp, Artificial Sequence
  ENSG00000187372_34 (sequence is synthesized)
ccaccacacccactaatttttgcatatttagtagagacgaggtttcatcatattgcccagactggtctcgaattcctgagctcaagtg

SEQ ID NO: 684564 - DNA, 120 bp, Artificial Sequence
  ENSG00000187372_35 (sequence is synthesized)
atattttaaaactttatcttaacattgtagagggactgggtattagtcagttgataatgccaagaagtgcaatctcttttaatagcatatctaagacaacctaatgtttatacttctgac

SEQ ID NO: 684565 - DNA, 120 bp, Artificial Sequence
  ENSG00000187372_36 (sequence is synthesized)
tcagatttcactactggttctgttgagctttgtcaactgagtaattattcttttcttttttctttctttgtttatgttttagagacagggtcttagtcacctaggctggagtgcagtggt

SEQ ID NO: 684566 - DNA, 120 bp, Artificial Sequence
  ENSG00000187372_37 (sequence is synthesized)
gacctcctgggctcaagcaatcctcctgacgcagcatcccaagtagccgggaccacaggcacatgccaccccccacagctatttttgtttgtttgtttgttttttgttttgttttgtttt

SEQ ID NO: 684567 - DNA, 120 bp, Artificial Sequence
  ENSG00000187372_38 (sequence is synthesized)
cctcagtctcccgagtagcacccccagctattttaaaaaaaatttttgtagagatgggttctcatcatgtcgcccaggctgttgaacttctggcctccaaaggtgggagttattctagca

SEQ ID NO: 684568 - DNA, 120 bp, Artificial Sequence
  ENSG00000187372_39 (sequence is synthesized)
gcttccctgtgatcttctcatatctactggtggagtgggaaagagtagttcaaacaactcagacagaaaatctcgctggtgcaacagtggagagaagggccaagtacttgtcctgttact

SEQ ID NO: 684569 - DNA, 120 bp, Artificial Sequence
  ENSG00000187391_0 (sequence is synthesized)
acacccgctcaccagctcggctactgctcgctccggctgccgccgccgccgccgccgacgccaccaccactgcttcctctgctgcggggccacagccttgagtgtcattcaagggacagc

SEQ ID NO: 684570 - DNA, 120 bp, Artificial Sequence
  ENSG00000187391_1 (sequence is synthesized)
acaacctcatccaagctctcctacctctgcccagccgtccctctcatcctccccattcctcgtccacactccatccaaagaagagggaaagcaccgaatagaggggggcgaaggcaaagt

SEQ ID NO: 684571 - DNA, 120 bp, Artificial Sequence
  ENSG00000187391_2 (sequence is synthesized)
ctgctgttcttccccctgggcccccttgctcctccatcctcattctctcaccaccagcccccctaaccccaaggagcccaggaactgaggcgactcgccccactgccatgtccaaaagct

SEQ ID NO: 684572 - DNA, 120 bp, Artificial Sequence
  ENSG00000187391_3 (sequence is synthesized)
tgaaaaagaaaagccactggactagcaaagtccatgagagtgtcattggcaggaacccggagggccagctgggctttgaactgaaggggggcgccgagaatggacagttcccctacctgg

SEQ ID NO: 684573 - DNA, 120 bp, Artificial Sequence
  ENSG00000187391_4 (sequence is synthesized)
gggaggtgaagcccggcaaggtggcctatgagagcggcagcaaattggtgtcggaggagctgctgctggaggtgaacgagacccccgtggcggggctcaccatcagggacgtgctggccg

SEQ ID NO: 684574 - DNA, 120 bp, Artificial Sequence
  ENSG00000187391_5 (sequence is synthesized)
tgatcaaacactgcaaggaccccctccggctcaagtgtgtcaagcaaggaggaattgttgataaagaccttcgtcactacctcaacttacgatttcaaaagggttctgtggaccatgagc

SEQ ID NO: 684575 - DNA, 120 bp, Artificial Sequence
  ENSG00000187391_6 (sequence is synthesized)
ttcagcaaatcattcgtgacaacctctacctccgcacggtgccatgcaccacaaggccacataaggagggtgaggtccctggagtggattatattttcatcactgttgaagattttatgg

SEQ ID NO: 684576 - DNA, 120 bp, Artificial Sequence
  ENSG00000187391_7 (sequence is synthesized)
aattggagaaaagtggtgctctcctagaaagtgggacttatgaagacaattactacggtaccccaaagccgccagcagaaccagcaccattattgttaaatgtaacagaccagatacttc

SEQ ID NO: 684577 - DNA, 120 bp, Artificial Sequence
  ENSG00000187391_8 (sequence is synthesized)
caggagccactccaagtgctgaaggaaaacggaagaggaataaatcagtgagcaacatggagaaagccagtatagagcctcctgaggaggaagaggaagagaggcctgtggtcaatggaa

SEQ ID NO: 684578 - DNA, 120 bp, Artificial Sequence
  ENSG00000187391_9 (sequence is synthesized)
atggagtagtagtaacaccagaatccagtgaacatgaagacaaaagtgcaggtgcctcaggggagatgccctcccagccttatcctgcaccagtgtacagtcagcctgaggagctgaagg

SEQ ID NO: 684579 - DNA, 120 bp, Artificial Sequence
  ENSG00000187391_10 (sequence is synthesized)
agcagatggatgacacaaagccaactaaacctgaagacaatgaggaaccagacccattgcctgataactgggaaatggcctatacagagaagggcgaagtctacttcattgaccataaca

SEQ ID NO: 684580 - DNA, 120 bp, Artificial Sequence
  ENSG00000187391_11 (sequence is synthesized)
caaagacaacatcatggctggatccacgacttgcgaaaaaggctaaacctccagaagagtgcaaagaaaatgagcttccatatggctgggaaaaaatcgatgatcccatttatggcactt

SEQ ID NO: 684581 - DNA, 120 bp, Artificial Sequence
  ENSG00000187391_12 (sequence is synthesized)
attatgttgaccacataaatagaagaacacagtttgaaaatcctgtcctggaagcaaaaaggaagctacagcaacataacatgccccacacagaacttggaacaaagcccctgcaggccc

SEQ ID NO: 684582 - DNA, 120 bp, Artificial Sequence
  ENSG00000187391_13 (sequence is synthesized)
caggtttccgagaaaaaccactcttcacccgggatgcatcccagttgaagggaacattcctcagcaccaccctaaaaaagagcaacatgggctttggatttaccatcattggtggagacg

SEQ ID NO: 684583 - DNA, 120 bp, Artificial Sequence
  ENSG00000187391_14 (sequence is synthesized)
agcctgatgagtttctgcaggtgaaaagtgtgattccggatgggcctgcagcacaggatggaaaaatggaaacaggtgatgtcattgtctatattaatgaagtttgtgtccttggacaca

SEQ ID NO: 684584 - DNA, 120 bp, Artificial Sequence
  ENSG00000187391_15 (sequence is synthesized)
ctcatgcagatgttgtcaaacttttccagtctgttcctattggtcagagtgtcaacctggtgttgtgtcgtggctaccctttgccctttgatcctgaagaccctgctaacagcatggtgc

SEQ ID NO: 684585 - DNA, 120 bp, Artificial Sequence
  ENSG00000187391_16 (sequence is synthesized)
caccccttgcaataatggagaggccacctccagtgatggtcaatggaagacacaactatgaaacatatttggagtacatttctcggacctcacagtcagttccagatataacagatcggc

SEQ ID NO: 684586 - DNA, 120 bp, Artificial Sequence
  ENSG00000187391_17 (sequence is synthesized)
cgcctcattctctgcactccatgccaactgatggtcagctagacggcacgtatccaccgcccgtccatgatgacaatgtgtctatggcttcatctggggccacccaagctgaacttatga

SEQ ID NO: 684587 - DNA, 120 bp, Artificial Sequence
  ENSG00000187391_18 (sequence is synthesized)
ccttaaccattgtgaaaggtgcccagggcttcggcttcactattgccgacagtcctacaggacagcgggtgaaacaaatacttgacattcagggatgccctggcctgtgtgaaggcgacc

SEQ ID NO: 684588 - DNA, 120 bp, Artificial Sequence
  ENSG00000187391_19 (sequence is synthesized)
tcattgttgagatcaaccagcagaatgtacagaacctgagccatacagaagtagtggatatacttaaggactgtcccattggaagtgaaacttctttgattatccatcgaggaggtttct

SEQ ID NO: 684589 - DNA, 120 bp, Artificial Sequence
  ENSG00000187391_20 (sequence is synthesized)
tttctccatggaaaactccaaagcctataatggaccgatgggagaatcaaggcagtcctcaaacgagtttatctgctccggccataccgcagaacctgcccttcccacctgcccttcaca

SEQ ID NO: 684590 - DNA, 120 bp, Artificial Sequence
  ENSG00000187391_21 (sequence is synthesized)
ggagctcctttcctgactcaacagaggcctttgacccacggaagcctgatccatatgagctctacgagaaatctagggccatttatgaaagtaggcaacaagtgccacccaggaccagtt

SEQ ID NO: 684591 - DNA, 120 bp, Artificial Sequence
  ENSG00000187391_22 (sequence is synthesized)
ttcgaatggattcctctggtccagattataaggaattggatgttcatcttcggaggatggagtctggatttggcttcagaatcctcgggggagatgagcctggacagcctattttgattg

SEQ ID NO: 684592 - DNA, 120 bp, Artificial Sequence
  ENSG00000187391_23 (sequence is synthesized)
gagctgtcattgccatgggctcagccgacagagatggccgccttcacccaggagatgagcttgtgtatgttgatgggattccagtagccggcaaaacccaccgctatgtcatcgacctca

SEQ ID NO: 684593 - DNA, 120 bp, Artificial Sequence
  ENSG00000187391_24 (sequence is synthesized)
tgcaccacgcagcccgcaatgggcaggtcaacctcactgtgagaagaaaggtgctatgtggaggggagccctgcccagagaacgggagaagtccaggctctgtatccacccaccacagct

SEQ ID NO: 684594 - DNA, 120 bp, Artificial Sequence
  ENSG00000187391_25 (sequence is synthesized)
ctccacgcagtgactacgcaacctacaccaacagcaaccacgctgcccccagtagcaatgcctctccccctgaaggcttcgcctcccacagcctgcagaccagtgatgtggtcattcacc

SEQ ID NO: 684595 - DNA, 120 bp, Artificial Sequence
  ENSG00000187391_26 (sequence is synthesized)
gcaaagagaatgagggcttcggctttgtcatcatcagctccctgaacaggcctgagtctggatccactataactgtgccccataaaatcggacgcatcattgatgggagtcctgcagatc

SEQ ID NO: 684596 - DNA, 120 bp, Artificial Sequence
  ENSG00000187391_27 (sequence is synthesized)
gctgtgcaaaactaaaagtgggagaccggatcctagcagtgaatggccagtctatcatcaacatgcctcacgctgacatcgtgaagctcatcaaggatgcaggtcttagtgtcacccttc

SEQ ID NO: 684597 - DNA, 120 bp, Artificial Sequence
  ENSG00000187391_28 (sequence is synthesized)
gcatcattcctcaggaggagctcaacagccccacctcggcacccagctcagagaagcagagtcccatggcgcagcagagtcccctggcacagcagagtcccctggcccagccaagcccag

SEQ ID NO: 684598 - DNA, 120 bp, Artificial Sequence
  ENSG00000187391_29 (sequence is synthesized)
ccatcgcccagccagcaccacctcaaccacttcagctgcaaggacacgaaaatagttacaggtcggaagtgaaagcaaggcaagatgtgaaaccagacatccgacagcctccattcacag

SEQ ID NO: 684599 - DNA, 120 bp, Artificial Sequence
  ENSG00000187391_30 (sequence is synthesized)
actacaggcagcccccgctggattacaggcaacccccaggaggggactaccagcagcccccacccttggactacaggcagcctcccctactggactacaggcagcactcccccgacacca

SEQ ID NO: 684600 - DNA, 120 bp, Artificial Sequence
  ENSG00000187391_31 (sequence is synthesized)
ggcagtaccctctgtcggactacagacaaccccaggattttgattatttcactgtggacatggagaaaggagccaaaggatttggattcagcattcgtggaggaagggaatacaaaatgg

SEQ ID NO: 684601 - DNA, 120 bp, Artificial Sequence
  ENSG00000187391_32 (sequence is synthesized)
atttgtatgtgttgagactggcagaagatggaccagcaataaggaatgggaggatgagggtaggagatcaaatcattgaaatcaatggggaaagcacaagggacatgacacatgccagag

SEQ ID NO: 684602 - DNA, 120 bp, Artificial Sequence
  ENSG00000187391_33 (sequence is synthesized)
caatagaactcatcaaatctggaggaagacgagtgaggctgctgctcaagagaggcacgggacaggtcccagaatatgacgaacccgccccctggagttctcccgctgccgccgccccag

SEQ ID NO: 684603 - DNA, 120 bp, Artificial Sequence
  ENSG00000187391_34 (sequence is synthesized)
gtctgccggaagtaggcgtctccctggacgacggcctcgctccattctctccatcacatccagccccaccctccgacccttcccaccagataagcccaggcccaacttgggatatcaaac

SEQ ID NO: 684604 - DNA, 120 bp, Artificial Sequence
  ENSG00000187391_35 (sequence is synthesized)
gggaacacgacgttaggaaaccaaaggagctttcagcctgcggccagaagaagcagcgcctcggggagcagagggagcgctcggcgagtccgcagagggccgcgcggccgaggctcgagg

SEQ ID NO: 684605 - DNA, 120 bp, Artificial Sequence
  ENSG00000187391_36 (sequence is synthesized)
ggcgcgcaaggccgccgtcgcgccggggccctggaaggtgccgggttctgacaagctgcccagcgtcctcaaacccggcgcctcggccgccagcagatgagccgcgcggccacggccaac

SEQ ID NO: 684606 - DNA, 120 bp, Artificial Sequence
  ENSG00000187391_37 (sequence is synthesized)
cctcggccgccagcagatgagccgcgcggccacggccaacccgcccgccccggcgcaggcagttcttcttaggttccgtctcacggcgttttaatttattttcactgtcacacgcataga

SEQ ID NO: 684607 - DNA, 120 bp, Artificial Sequence
  ENSG00000187391_38 (sequence is synthesized)
tccacgaggcaccaaggcctgggagcatcgacgtgaagtcccacgtgtccggtgtgcttgggcggcatcgcatcaacgcgcagacctaaactgatcctaaagcccccggttcccttgtgg

SEQ ID NO: 684608 - DNA, 120 bp, Artificial Sequence
  ENSG00000187391_39 (sequence is synthesized)
gggctttggcagctatggaagaaccaaaataacgtgaagaacatcacagagagacagtgcagtgtagctttagtttaagaaaaaaaaatattcctccccactgcatgaaggacttggatg

SEQ ID NO: 684609 - DNA, 120 bp, Artificial Sequence
  ENSG00000187391_40 (sequence is synthesized)
tcatccaaactttatatcaagaaacaggacaaagttaagagcaatcacaaactggaatatcgccttaaaaatcaaactgcacggagcaagctgaaactgagacaagattatatcttttaa

SEQ ID NO: 684610 - DNA, 120 bp, Artificial Sequence
  ENSG00000187391_41 (sequence is synthesized)
ttgatctaaagcgttgtaaataaattgttctcgacatatctagacaggggttaaagggtttctttgacacattcggaaccgttcacccatgacatgtttccatggctcacccttggcatc

SEQ ID NO: 684611 - DNA, 120 bp, Artificial Sequence
  ENSG00000187391_42 (sequence is synthesized)
catcctcggtgttagcagcagcgttccctgcctcctgcaggatgacttagaaatctagtgagtttcttggtgtgatgccatttttattgccctttctgtgatcaaatcatatttctgtac

SEQ ID NO: 684612 - DNA, 120 bp, Artificial Sequence
  ENSG00000187391_43 (sequence is synthesized)
attttcagtggtagaaaaaaaaggttttaaaaattgtatcctagggaacagtttgccataagtcagaattttgcagtttagctcatagatcttaattggtttttctctaaaatatgaatt

SEQ ID NO: 684613 - DNA, 120 bp, Artificial Sequence
  ENSG00000187391_44 (sequence is synthesized)
ttataattgaaggaccacaatttgtttaatcaagataggcaacgctgcagttcctttatgaagaggcttttctgtcgtcccaggctagcagagatggatagcttctttgtcagcaatgtg

SEQ ID NO: 684614 - DNA, 120 bp, Artificial Sequence
  ENSG00000187391_45 (sequence is synthesized)
atttcacttattttattgtcttattttaaaccctgtctccatgacttcatttgcactttgacagagcagaggcagagtatttgtcttatatttctcagattataatattaaaaaattaca

SEQ ID NO: 684615 - DNA, 120 bp, Artificial Sequence
  ENSG00000187391_46 (sequence is synthesized)
atcaatttattttcattaaagaacgtgagtctttttagcattcctttctgcttatccttctttccttaccctttgtccttttgtttccattagttttctttcgtcttgtattccttgcca

SEQ ID NO: 684616 - DNA, 120 bp, Artificial Sequence
  ENSG00000187391_47 (sequence is synthesized)
ctttattttgttagcaacttctagatgtttatcttcatggatctatgattgacctcctagtaaaattctaagtcttgcctttcttccctgctgttttagcatttctttgtaaaatgttag

SEQ ID NO: 684617 - DNA, 120 bp, Artificial Sequence
  ENSG00000187391_48 (sequence is synthesized)
cttcaattaattagccattggtacttactgtagctacacatattaaaaggcaaagtgtttctgaaggcaatttctttttaatatgcccgaatgaatgaggcttcatcctttccatattct

SEQ ID NO: 684618 - DNA, 120 bp, Artificial Sequence
  ENSG00000187391_49 (sequence is synthesized)
tactctttacaggagttcaaatgcaaataagctccacctccctgcacttgtagtctaaaaagtaaaaggggcgatcaggtccatctcaaaggtcacacgtaatagcctccctgggctgat

SEQ ID NO: 684619 - DNA, 120 bp, Artificial Sequence
  ENSG00000187391_50 (sequence is synthesized)
cattccctctccttgtaattgcagtatcctgagtagcagtttaattttcatcaaacatcggagtagtttagttgtttgacaggaggagaataaggctgaaagcctcaagtgaaggatctt

SEQ ID NO: 684620 - DNA, 120 bp, Artificial Sequence
  ENSG00000187391_51 (sequence is synthesized)
gcagcttgtaaaagcaatttccaaaaatgaaacccattcatcgtaaacaaaagcacaaacacttgtagcagtttataatgcttttggtttaatctcaattagtctttctcccctggacta

SEQ ID NO: 684621 - DNA, 120 bp, Artificial Sequence
  ENSG00000187391_52 (sequence is synthesized)
gaaatccagtatagtttgccattaatttattgaatctggttttggacaatgcttctgtagtgtagctgcacgtcctggtactgtatcctctgactttattttccatgtattacaaaagga

SEQ ID NO: 684622 - DNA, 120 bp, Artificial Sequence
  ENSG00000187391_53 (sequence is synthesized)
aaaaaaaattgagattacactggcataaactctagtttgcacagttcacagctactacttgtgcagtaattgctttatgcggctgtaatccataacctgtgaagacagcacatcatctaa

SEQ ID NO: 684623 - DNA, 120 bp, Artificial Sequence
  ENSG00000187391_54 (sequence is synthesized)
atcccattccaaataatatttgtgtagtgttagctgtgaatttaccctgtacagctgtatctctataaatataattccatgtattaatagtcacagaaagactgtaagtgagcaactatt

SEQ ID NO: 684624 - DNA, 120 bp, Artificial Sequence
  ENSG00000187391_55 (sequence is synthesized)
tttatgaaacgtaccactatggataaattaacttttacagaaatcttgtttactgtatgatattctaaaacactgtcaaataaaatatatatccaaaaatcttttctttttccaactata

SEQ ID NO: 684625 - DNA, 120 bp, Artificial Sequence
  ENSG00000187391_56 (sequence is synthesized)
aagacacggaaagatccaaactggctagaactgacaataggaaggacgaacccgccccctggagttctcccgctgccgccgccccaggtctgccggaagtaggcgtctccctggacgacg

SEQ ID NO: 684626 - DNA, 120 bp, Artificial Sequence
  ENSG00000187391_57 (sequence is synthesized)
catgatgcttactcagtaggtgtgataaattagcaagggtaagcaagtattgctgactggaaaaaaagaagaagaagaaaaagagaatttcaggatttctaaactattagctattttagt

SEQ ID NO: 684627 - DNA, 120 bp, Artificial Sequence
  ENSG00000187391_58 (sequence is synthesized)
tttctaaacatgttgtaagaagggagagtgacatcaacctgtggattagatcaccaaaaaagcaatcatcttattccaatggaaagaaattccctgagttaaaaatgatcaaaaatgaat

SEQ ID NO: 684628 - DNA, 120 bp, Artificial Sequence
  ENSG00000187391_59 (sequence is synthesized)
atgatggccaggaaaatctggacgatgtgttttcacctagatggatttttagaatcccacttcaatcaataaagataagagtcaagaacaaattcctttgggtgatggaattttcttcaa

SEQ ID NO: 684629 - DNA, 120 bp, Artificial Sequence
  ENSG00000187391_60 (sequence is synthesized)
tacataaaaatatattttttaactgaagacccaatataaacagatgaattacaagtcaaatattttgttttgtgtcaaaggcattctaacactataaaattgacatgtggaattttgaaa

SEQ ID NO: 684630 - DNA, 120 bp, Artificial Sequence
  ENSG00000187391_61 (sequence is synthesized)
ctaaagaccaatcctcagatttaaacatttagaacttaaacatttagagtttggagagaagagaagaagccagaaaaagaaaccaaaaaggattaacaagtgaagtaagaagacaaggag

SEQ ID NO: 684631 - DNA, 120 bp, Artificial Sequence
  ENSG00000187391_62 (sequence is synthesized)
tgtgtgcgtttgtagaaattaactgaagaaagtgttttaagaaacttaccagctgtttcaaatgctgttcacagctcagctaagacgaagactgagaaaggacccctggatttgcaatgt

SEQ ID NO: 684632 - DNA, 120 bp, Artificial Sequence
  ENSG00000187391_63 (sequence is synthesized)
tagtaacaccagcacagtgtctctgccctgccttcgtgttcttcacattcttcacattcaccagacaccagatttcaaagaagactgagaaacatgttcctagccaggtgcggaggctca

SEQ ID NO: 684633 - DNA, 67 bp, Artificial Sequence
  ENSG00000187391_64 (sequence is synthesized)
gcaggcagatcactttccacacaaacacaaaaattagccaggcatggtagcacacacctgtagtccc

SEQ ID NO: 684634 - DNA, 68 bp, Artificial Sequence
  ENSG00000187391_65 (sequence is synthesized)
tagcacacaaggaggtcaaggttgcaatgagccgtgatggtgccactgcacttcagcctgggcaacag

SEQ ID NO: 684635 - DNA, 120 bp, Artificial Sequence
  ENSG00000187391_66 (sequence is synthesized)
cctgggcaacagagtgagacctcgtctaagacaaacaaaaagagagagagagaaacatgtcacttaaattttagttaacactgccctatatcaactaactatagtaataattaatatcaa

SEQ ID NO: 684636 - DNA, 120 bp, Artificial Sequence
  ENSG00000187391_67 (sequence is synthesized)
gaagtgctgcatgcttcatctttgagaggagggaaaacaaaagagctcagcggcagttttgtgttgctgtgtctggcttaaagaggaaaattctagacatccatgttgaaaaatcaaagc

SEQ ID NO: 684637 - DNA, 120 bp, Artificial Sequence
  ENSG00000187391_68 (sequence is synthesized)
tcagctgagactacttctatcaagaaaattatttttatctgcgaatgggttggatcagtacaggtggtttgagaagacactgactgaggaccatggaaaggtgggagaggacgtgcggct

SEQ ID NO: 684638 - DNA, 120 bp, Artificial Sequence
  ENSG00000187391_69 (sequence is synthesized)
cttccttctgtgaaccataaatgcttatggttatttataaaactacatcagttctccacttctacctaaatatatatttagctatcaataggtatatatatacacacacacacacacaca

SEQ ID NO: 684639 - DNA, 120 bp, Artificial Sequence
  ENSG00000187391_70 (sequence is synthesized)
cacgtatgtttatgcccaggaaataaatgtgtgtgaactctttcttttgctccctccattaaggaatgtttaaaatatgaaatgtaggacctttcagggcatctgtgagtgtgcgaggag

SEQ ID NO: 684640 - DNA, 120 bp, Artificial Sequence
  ENSG00000187391_71 (sequence is synthesized)
atctagcaccacttaaatattagaactgttacaatttgactgatagtccactgttcatttgagtacacagtaatttatcaattatttcctaacattgtttatgcatcagactatctcaaa

SEQ ID NO: 684641 - DNA, 120 bp, Artificial Sequence
  ENSG00000187391_72 (sequence is synthesized)
ggatttgtaactggggccagagacaagcaacatatcttcagggtgtgaagtttaaaatgtaaacttcagttcacgcaatggttgcatttctttgacatttaggaattattctgaaaattc

SEQ ID NO: 684642 - DNA, 120 bp, Artificial Sequence
  ENSG00000187391_73 (sequence is synthesized)
actcctgtgttgtgtttctgtatgcttttgaggaaggctttaaagcatgttttgattcatggatttgtcttcaaacatctttaaagttgttgtttcccagcagcccattatagacactac

SEQ ID NO: 684643 - DNA, 120 bp, Artificial Sequence
  ENSG00000187391_74 (sequence is synthesized)
tgacagcatagctctagtgtatccaaaacagctgagtggtcattacatgaaaagcaccaaaacttgaggtggcctttaaagataatctcagtgagtgacagacagaaacagacgggcata

SEQ ID NO: 684644 - DNA, 120 bp, Artificial Sequence
  ENSG00000187391_75 (sequence is synthesized)
cagacacatcagactagtgcagataatacctgttcagattaggaaaacaagatctaactgctgacctgaataatgagctctaagttgattaagataaattgactcactttcatccttcta

SEQ ID NO: 684645 - DNA, 120 bp, Artificial Sequence
  ENSG00000187391_76 (sequence is synthesized)
taatattgttaaaatgcagatttccttggagttgaatgaaattatactttaaaaaataaagcttaaagagtgagagagaaaaacatgaattaaaggaaactttgtttttgaattcagaat

SEQ ID NO: 684646 - DNA, 120 bp, Artificial Sequence
  ENSG00000187391_77 (sequence is synthesized)
atgtctttttctattttgtattaaacacaataataatagttctttcagtcttacagacatattgatagaaagttggagggtaaagattaaatccccaactatgaatgtattttgtttcaa

SEQ ID NO: 684647 - DNA, 120 bp, Artificial Sequence
  ENSG00000187391_78 (sequence is synthesized)
aaattcattcatgtatcggtcatggagaactcaaactggtttcccattgatttaattaagaaacctgcttttacgatggaagcaacgcttttaatcgtgcttaggtttccaggctagcag

SEQ ID NO: 684648 - DNA, 120 bp, Artificial Sequence
  ENSG00000187391_79 (sequence is synthesized)
gtggaagccagttcaacccctactaagcccaagcacagtcttgacaatactcagaaggaccatgaactgtgagagctgtgggagctgtgctgctgtagaaaaatcttttcacagtttgga

SEQ ID NO: 684649 - DNA, 120 bp, Artificial Sequence
  ENSG00000187391_80 (sequence is synthesized)
atgatgctgttcaggacacttctgctactacaggaactgcactagcaacaattacccatagtgcctcccatgatctgggaagaaagttacagaacagggtgagggctgaagttctggcct

SEQ ID NO: 684650 - DNA, 120 bp, Artificial Sequence
  ENSG00000187391_81 (sequence is synthesized)
gagtgtcccgggcaaagtatggaaataggaacagtgccaagtgtggtagaagctctgagccctgaatgtttcttcccctctaccttttctgtggggaagggaatggggtaaagcacaggg

SEQ ID NO: 684651 - DNA, 120 bp, Artificial Sequence
  ENSG00000187391_82 (sequence is synthesized)
ccccttctccacacctctgctgctttgctctggatgaccagtgaacctagagagagaagggagggaaggggccatagataaagaggatactatctcgaaaaaagagtgtaaaggaaaagg

SEQ ID NO: 684652 - DNA, 120 bp, Artificial Sequence
  ENSG00000187391_83 (sequence is synthesized)
atcaggctaagccctggttttcccatttgccaatttgtggacttaggacactgaaagtcaatgagcctcagccatgtcatctgttacaatgggataatactactacctaacccagtggta

SEQ ID NO: 684653 - DNA, 120 bp, Artificial Sequence
  ENSG00000187391_84 (sequence is synthesized)
gtgttgtagcccaacatctgctcactaaatgtctggcgagtgtaaacatcgaagcttcagcatgggtgggtcagaaggaacaggacaatgaggaactcatgcatgaaggacacacgtgtg

SEQ ID NO: 684654 - DNA, 120 bp, Artificial Sequence
  ENSG00000187391_85 (sequence is synthesized)
acaaacatgtggttgcctattcaaagcactcaaaacagcctgaaactctcagtttgaaatgcaagtgaaggctgtcaaagctgaaagaaagaagcaccttttatgatttatttggccctg

SEQ ID NO: 684655 - DNA, 120 bp, Artificial Sequence
  ENSG00000187391_86 (sequence is synthesized)
tctgcaggtgtttttccttcaaggaagtatcacattgttgattccttgtttggaaacggacagcaaacaccaggcatttgtgagcagcactctacaaagtcttaggttcccggtactaaa

SEQ ID NO: 684656 - DNA, 120 bp, Artificial Sequence
  ENSG00000187391_87 (sequence is synthesized)
agggaaattcatatgatagccaaacaatcttaaatttgaccttctcaaggcattgttacaaaatagcacttgaattctcataattaaatgttggcaaggtattttaatttcttgcattgc

SEQ ID NO: 684657 - DNA, 120 bp, Artificial Sequence
  ENSG00000187391_88 (sequence is synthesized)
ttaagattaaaataaacattgctaattaaatagccatatcttcatagtgtccaaatgaaaatcaaatatttggaccaagttcttgatattaaatggtatcacaaactcactgtgcagtat

SEQ ID NO: 684658 - DNA, 120 bp, Artificial Sequence
  ENSG00000187391_89 (sequence is synthesized)
tgcattttttatatacagcttcttctaaaagcatgacatagcagaaaaaaggtactttgaaatccctaatttacattatggtaatttgtacttttctgaaaatattcgttgtgtgcctgc

SEQ ID NO: 684659 - DNA, 120 bp, Artificial Sequence
  ENSG00000187391_90 (sequence is synthesized)
tatcagcttggctaccccattctcacttttcctttgccccccatttactccacaagtaatcaaagtggtctttgcatttggtttgtgtttggggatgagggaattggtttttgttttttg

SEQ ID NO: 684660 - DNA, 120 bp, Artificial Sequence
  ENSG00000187391_91 (sequence is synthesized)
cctagcatagcaaaatgcagaatgctgtgatgcttaaagtacttctagtcgaaaacctcttgagtttaccctaattcccacaatttatactcatctctctgaaattaataggaactagca

SEQ ID NO: 684661 - DNA, 120 bp, Artificial Sequence
  ENSG00000187391_92 (sequence is synthesized)
ccatgcttatgtggtgaaattcactttatcttattatgggctaccagaagtgcctatgacctctttgagataagcagactcaagagctgagtcgcaggcctgggtccttatatcaggacc

SEQ ID NO: 684662 - DNA, 120 bp, Artificial Sequence
  ENSG00000187391_93 (sequence is synthesized)
atgggtggtcggctgtttttaattatttactagagtttttaatttataaagtaataatgtacatggtttaacttttttaaagcaaataatgtcaacaagtataaaatgaaagtaattgtc

SEQ ID NO: 684663 - DNA, 120 bp, Artificial Sequence
  ENSG00000187391_94 (sequence is synthesized)
tgtcctatcccagactttcagtcctttctcccagaagcaaatatattgtttgtatgtatagtcacagaaagtttatggtctactagcacgtgtatgaatatatatagtatgtttaatata

SEQ ID NO: 684664 - DNA, 120 bp, Artificial Sequence
  ENSG00000187391_95 (sequence is synthesized)
gatgggataagtgtgtgctactttaaaatacctaggttatttggtgttttacatacaccatgtgatataatttacataccacaacactcaccaatgtaagtgtatgctcagtaagttgct

SEQ ID NO: 684665 - DNA, 120 bp, Artificial Sequence
  ENSG00000187391_96 (sequence is synthesized)
aaaatgatatagttgtgcaacaatcatcataatccttagaacatccatcatcccgaattctcccaaaccccaggtaaccactaatatgctttctgaatcgttttgtctttctataatttt

SEQ ID NO: 684666 - DNA, 120 bp, Artificial Sequence
  ENSG00000187391_97 (sequence is synthesized)
ttcataaatggaatcatacagtatataatattttacttagcttaatgctggtgagagttacctatgtcggtgaggtttaagtgtttgtttcttttatggctgcatagtattccattgtac

SEQ ID NO: 684667 - DNA, 120 bp, Artificial Sequence
  ENSG00000187391_98 (sequence is synthesized)
agatacactccattttcctgtccattcattagtgtatggacatttgagttgttttcagtttttgacatttatgaatcatgttgttatgaacatttggatacacatgtttgtgttgcttat

SEQ ID NO: 684668 - DNA, 120 bp, Artificial Sequence
  ENSG00000187391_99 (sequence is synthesized)
gttttcatttttcttgggtagatacctaggagtagtattgctcagctgtaagaagaatatatatttaaattgttaagaagtagaatgttttctaaaatggctgttgtacaaggtttccaa

SEQ ID NO: 684669 - DNA, 86 bp, Artificial Sequence
  ENSG00000187391_100 (sequence is synthesized)
caagtttttttttttcttatatggatcattcttttggtgttatatctaagaaatctttgcctgacctgagatttcttgtgttttct

SEQ ID NO: 684670 - DNA, 120 bp, Artificial Sequence
  ENSG00000187391_101 (sequence is synthesized)
taagaaatctttgcctgacctgagatttcttgtgttttcttctaaaaattgtatacctttagctcttttatttaggtctgtaaacatgtcaagataatttttgtgtatactgtgaattaa

SEQ ID NO: 684671 - DNA, 120 bp, Artificial Sequence
  ENSG00000187391_102 (sequence is synthesized)
gggcctaacttcattttttttttttttgcttatgtacatccaatcattctagcaccatttgttgaaaaagctaattttttattgaattcccttgacacttttgtcaaaaatgaattagca

SEQ ID NO: 684672 - DNA, 120 bp, Artificial Sequence
  ENSG00000187391_103 (sequence is synthesized)
taaatgtggaggtttatttctagatgccctattctgttccattgatctgtttgtctattcttgtgctactaccacaccctctaggttactttagctttctattaagtcttgaaaccagag

SEQ ID NO: 684673 - DNA, 120 bp, Artificial Sequence
  ENSG00000187391_104 (sequence is synthesized)
agtgttagtcctccaactttttctgctttttcaaaataatgtggctattctaggtcctttgcatttccatagacattctaggattgcattgttcctttttttttttttttttttaataga

SEQ ID NO: 684674 - DNA, 71 bp, Artificial Sequence
  ENSG00000187391_105 (sequence is synthesized)
acctcagcttctccagtaggtaggactacaggcacatgccactgtacctggctttttaaattttcttttag

SEQ ID NO: 684675 - DNA, 120 bp, Artificial Sequence
  ENSG00000187391_106 (sequence is synthesized)
gcacatgccactgtacctggctttttaaattttcttttagtgatgaagcctcactgtgtttcccaggggtgtctagagctcctgggctcacgcaatcctcctgcctctacccgccaaagt

SEQ ID NO: 684676 - DNA, 120 bp, Artificial Sequence
  ENSG00000187391_107 (sequence is synthesized)
tgggattacaggaatgagtcactgtgcctggcctaggattgcctttttaattattttgttacataaaaggcctgctgagatttgggtgtttcattgcatctatagagctatttgtggaaa

SEQ ID NO: 684677 - DNA, 120 bp, Artificial Sequence
  ENSG00000187391_108 (sequence is synthesized)
attgccaacattgaaccttttaattcataaagatagtatatctcttcacttatttggatctttaatttctctcagaaacagtttgtagttttcaatgtacagatcttgtacttttgttca

SEQ ID NO: 684678 - DNA, 120 bp, Artificial Sequence
  ENSG00000187391_109 (sequence is synthesized)
atttatttctagctattttattcttgttgatgttattgtcaatggaattgttttatgtcttttcaggttgtttattgctaatatatagaaatgcatttgtttttcattttttatttcgta

SEQ ID NO: 684679 - DNA, 120 bp, Artificial Sequence
  ENSG00000187391_110 (sequence is synthesized)
cactgcaattttattaaactgactctttaagtctggaggctttttgtagactccataatatattctatgtagttattataccatctggtaataaagacagttttacttcttcctttccaa

SEQ ID NO: 684680 - DNA, 120 bp, Artificial Sequence
  ENSG00000187391_111 (sequence is synthesized)
tagatcaccagaaccgattcctccttctaactgaaactttgtaccctttgaccaacatttccccttgatgtgtctaccctccgtcctttacagcttctggtaaccaccactctactctct

SEQ ID NO: 684681 - DNA, 120 bp, Artificial Sequence
  ENSG00000187391_112 (sequence is synthesized)
ccttctatgaatttgactttttttgattccagatgtaagtgaaatcatgtcgtatttgtctctctgtgcctggcttaaatcactcaatataatgtcctctaggtccatccatgttgttgc

SEQ ID NO: 684682 - DNA, 120 bp, Artificial Sequence
  ENSG00000187391_113 (sequence is synthesized)
aaatgacagaattttctgctttttaaaggctgaatagtattctattgtatataccacaatataaaaatccattatctaatgattgacacttcagttgtctccattttaatctgaaacacg

SEQ ID NO: 684683 - DNA, 120 bp, Artificial Sequence
  ENSG00000187391_114 (sequence is synthesized)
tcaaaaattcacccagaaaaaaatcatgtcctttgagtgggaagaagaaaaatcatgacttcaaaaattttacttatatttctccctactgctttaacaaacagaacctatttaccttga

SEQ ID NO: 684684 - DNA, 120 bp, Artificial Sequence
  ENSG00000187391_115 (sequence is synthesized)
ataattaggtgcatattttcaaaccctctgtgttgtttttctgagtggaaaaaaattggataacaaaactgataatatatcataatttaatgagtgtattgctgcagctatgaatatata

SEQ ID NO: 684685 - DNA, 120 bp, Artificial Sequence
  ENSG00000187391_116 (sequence is synthesized)
ttgtaatatattcactggatctgacaactccatgactttcaaatacagtaaatttcctcattctataagaggcacacaagagaatcttgatgaaattgattccaaccgtttttaacttaa

SEQ ID NO: 684686 - DNA, 120 bp, Artificial Sequence
  ENSG00000187391_117 (sequence is synthesized)
gagtccatgtttctctgaaatatccccatagatataagcagtggctcttgcatgttaagtcttggatttaacacatagaccttaataaagcaaatgttttatttaccctagtctttctca

SEQ ID NO: 684687 - DNA, 120 bp, Artificial Sequence
  ENSG00000187391_118 (sequence is synthesized)
atggtgccctaatgtgatgacagaggtttttcagagatttgttctatgcattaatgatttgaaagctataacctgatgtcctattatataaaagtcatttttgtatttgaatttaaaatc

SEQ ID NO: 684688 - DNA, 120 bp, Artificial Sequence
  ENSG00000187391_119 (sequence is synthesized)
tgaaaaagaaaaccgcagacattctttccttatatcttctatattcctaatctgggggacaaaggagagtaaaatctagttgacctcaggtctgttatttctctcaggggaaatagaaac

SEQ ID NO: 684689 - DNA, 120 bp, Artificial Sequence
  ENSG00000187391_120 (sequence is synthesized)
catcaatactggaaaaaccaatgccctcatttttattgctaagtagctactttatttaaatcattgatatccaaccaagttacgacagatgtagatggttttatgaattattttataaac

SEQ ID NO: 684690 - DNA, 120 bp, Artificial Sequence
  ENSG00000187391_121 (sequence is synthesized)
tgcaacttttattcagactgcacaaaaacaatatctgaaactttgaggcctctattgaccatgctgtaaacagaaatactgagcagcttgattaaaatttataaagtaatatttgtcaaa

SEQ ID NO: 684691 - DNA, 120 bp, Artificial Sequence
  ENSG00000187391_122 (sequence is synthesized)
atactccgctgcttatgtttaaaagcaatcatgttatagaatattcacactgtatgaaagcttctccttattgaaggcttggaaaccctcatgattatggcaaatcattcataacactag

SEQ ID NO: 684692 - DNA, 120 bp, Artificial Sequence
  ENSG00000187391_123 (sequence is synthesized)
actaaaatttagtatcagtacttccttgactaatagttctcttagatccgttataggttgtatctatatgtagcaaccagacaaaatcaggatcaattgtccacataagatggctgcaga

SEQ ID NO: 684693 - DNA, 120 bp, Artificial Sequence
  ENSG00000187391_124 (sequence is synthesized)
gaactgattccatgaaaggaaattctgaaacactctacaaatatgaatttttcgggaccagcagaaagcacaaatttaaattataagttacaacaaaatggaaagtttgacttacactgt

SEQ ID NO: 684694 - DNA, 120 bp, Artificial Sequence
  ENSG00000187391_125 (sequence is synthesized)
cttcaacctatttattttagctatactggcctgctttctgtttctcaaataaccagcacattcctacccacacaggatcttgaatttgtcattttcctggactacttttcttcctaatat

SEQ ID NO: 684695 - DNA, 120 bp, Artificial Sequence
  ENSG00000187391_126 (sequence is synthesized)
ccatctgttcctttttgtcactttatgatattcatccaaaaatcaggtcttcagggagctcctacctgactaccttatccaaaattggacttgccctcattttctattctgttccaatta

SEQ ID NO: 684696 - DNA, 120 bp, Artificial Sequence
  ENSG00000187391_127 (sequence is synthesized)
tttattttttattgcacttataattgaccatttattctgtatccatttatttgtttattgtcagtgtacctcactagaaagtaaactcagagagtcagaaaatttgtttgaatcacagtt

SEQ ID NO: 684697 - DNA, 120 bp, Artificial Sequence
  ENSG00000187391_128 (sequence is synthesized)
acctaagcagtgctcaataaaggtgggttgaatgaatggatgaatacctaagtttcttcttctaacccaacaatgagaacccttctacccctacttagagatttagcctgacccaagact

SEQ ID NO: 684698 - DNA, 120 bp, Artificial Sequence
  ENSG00000187391_129 (sequence is synthesized)
ctggggcatatccactttcttggctctaggccaatactttgaagctgcagcatccatttggccttagaatctagtcctaagttaaccacatgtcctaagtgtgataattttgtctttatc

SEQ ID NO: 684699 - DNA, 120 bp, Artificial Sequence
  ENSG00000187391_130 (sequence is synthesized)
ttaattctcatcattaacattgtgagtctctttctctcacatgtttccctctcactttatctgggatgtagttcttatcttgctatggccattcccatagtgtggttttccctacactaa

SEQ ID NO: 684700 - DNA, 120 bp, Artificial Sequence
  ENSG00000187391_131 (sequence is synthesized)
ttcatagtatatcaaatcgctaaaactcaaaacagtacatttggtcaacaaaactataccttcaatcactccttccacacacacacacaccccaaagttctatgtattttactacctatg

SEQ ID NO: 684701 - DNA, 120 bp, Artificial Sequence
  ENSG00000187391_132 (sequence is synthesized)
aattaatgataattacccttccctaaaatttctgtcttttttcatgttctctttttctcccaaatattatgaaggcttccttgatttctctgctttcaatacagaaagtcagtggagagt

SEQ ID NO: 684702 - DNA, 120 bp, Artificial Sequence
  ENSG00000187391_133 (sequence is synthesized)
tagagaaaaaaagtaatgaggttaaacgtatgaaagaggtagaaaggtcctgcaatatattgcaaaatatacaaattccaaaacttattttaaaacaaaggaactagaatgtgtgttttc

SEQ ID NO: 684703 - DNA, 120 bp, Artificial Sequence
  ENSG00000187391_134 (sequence is synthesized)
tcattaaagaaatgtaaaggctttgtaaatatgtggacatgtgggacttgggatttattagctaattcactaacattttctggctgctttttgataaactataaggaaggataggtttgt

SEQ ID NO: 684704 - DNA, 120 bp, Artificial Sequence
  ENSG00000187391_135 (sequence is synthesized)
ttattattcctttattctaaggataattaatggaaaaactgaaaatatatttttatcaattagtaattgttccgtgctaagatttccacctcaccttacccttctcttttttccttttat

SEQ ID NO: 684705 - DNA, 120 bp, Artificial Sequence
  ENSG00000187391_136 (sequence is synthesized)
gttagagtgactttaaattattttataatatgtgaaagtttgattcctttcactgattaatgggtaaaattataaacctgaaaatgtgtattttaagtatgaatactaatagtaacccaa

SEQ ID NO: 684706 - DNA, 120 bp, Artificial Sequence
  ENSG00000187391_137 (sequence is synthesized)
attaacacaatgtgtggtgtcaataaacaaaaagttttaaacgatatacaataggcccaaaatgacgtaatcctgacaatgatgggtagataaaaggaacatatttgagttaaaattttc

SEQ ID NO: 684707 - DNA, 120 bp, Artificial Sequence
  ENSG00000187391_138 (sequence is synthesized)
caatgagttttcttctcttttacctccatgccatatgtaaacaaggggcatgtatttggcgagagaaacctgccctttggcactgggatctggcattggaggatgccatttcccaaaggg

SEQ ID NO: 684708 - DNA, 120 bp, Artificial Sequence
  ENSG00000187391_139 (sequence is synthesized)
atctgttcccttttggctggtccataggaacagaaagatttctccatgccaggtcccccaggatcaattctagacagattaaatacttgctatttctgcccctgctctctaaggatgaga

SEQ ID NO: 684709 - DNA, 120 bp, Artificial Sequence
  ENSG00000187391_140 (sequence is synthesized)
gtaaatggtctccatgaaacttccagagaacacctttttgatgcagccatctggtttccctggagatgaaacaagttttattatacctgggatgaaatgtaacacattgcaacaagggca

SEQ ID NO: 684710 - DNA, 120 bp, Artificial Sequence
  ENSG00000187391_141 (sequence is synthesized)
gttggtagcatttctaacttcaaggatatctaggaatactaattttcaaagagtgtatacaggttagataattttaacttctcccttctcccctattccccttcaatttaataggggtct

SEQ ID NO: 684711 - DNA, 120 bp, Artificial Sequence
  ENSG00000187391_142 (sequence is synthesized)
catttatggtaaagtgtagcagcaaaccattaaaagaaaatgtgtataatggtgtatgcaggttagggagatgtggggatggagactcctggagacaggcacattgacagcctgacagtg

SEQ ID NO: 684712 - DNA, 120 bp, Artificial Sequence
  ENSG00000187391_143 (sequence is synthesized)
aaggaggacagagagaaagtacagaaagttgacagaggaatgcgaaaattgagtcatccatggtcattcttacagtggaagtgcttatcagtctggcagaggtaatcaaaatattgcaac

SEQ ID NO: 684713 - DNA, 120 bp, Artificial Sequence
  ENSG00000187391_144 (sequence is synthesized)
cccgcatagctattgattctcctaataatgaccctgagctatccagaaaacgttatgtgcagaaaggtaatatttaagaaagatttcttttaaagataattaaaattcaaaagtttggac

SEQ ID NO: 684714 - DNA, 120 bp, Artificial Sequence
  ENSG00000187391_145 (sequence is synthesized)
ttctgaaagggaaaggctagaatattcacctaattagaatactacattccttgaaaatgccagacaaatgtaatgcaactcttggtataaaatattttaactaccttctatttggaaaca

SEQ ID NO: 684715 - DNA, 120 bp, Artificial Sequence
  ENSG00000187391_146 (sequence is synthesized)
atttattatatatattcaaatttatactcaaattaagatttgactaaattgtctcaacaattatatcagaaatgcattctataaatgcaaacaaacctgacaatgttcttacatgcctaa

SEQ ID NO: 684716 - DNA, 120 bp, Artificial Sequence
  ENSG00000187391_147 (sequence is synthesized)
atatataaatatacatttaaaaagtgattagatattttacaattataataaagttaaaaactgcatattcttttgccccaataatgttttttatgaagtcagaaatcttgtatgtggcat

SEQ ID NO: 684717 - DNA, 120 bp, Artificial Sequence
  ENSG00000187391_148 (sequence is synthesized)
tgtatgtggcatatttgtaaagcaactaatgaatgtgctggatttaaaatagatgtgtaaaactattggtgcattaccaaattgttaaaattgatgtattaataaaatgtgaatttacaa

SEQ ID NO: 684718 - DNA, 120 bp, Artificial Sequence
  ENSG00000187391_149 (sequence is synthesized)
cttatgaagggagggtacctcttgaatgagggtcctatgacctgcttcaggggaaggttagaaaattcttcctgggatttatggccgccttccggggagatgggcgagaagaagacaatt

SEQ ID NO: 684719 - DNA, 120 bp, Artificial Sequence
  ENSG00000187391_150 (sequence is synthesized)
gagagtgacatcaacctgtggattagatcaccaaaaaagcaatcatcttattccaatggaaagaaattccctgagttaaaaatgatcaaaaatgaatcagattatgtcattgtctgagaa

SEQ ID NO: 684720 - DNA, 120 bp, Artificial Sequence
  ENSG00000187391_151 (sequence is synthesized)
cttgggaaggtgtagtggagctgcagccactggctgagcactgatgaatctgcctgtacttctttgaatcagctgtcccacctattacaagccccaaatgaatttctcatgtggatatga

SEQ ID NO: 684721 - DNA, 120 bp, Artificial Sequence
  ENSG00000187391_152 (sequence is synthesized)
tgagggaagaaacattagcttcattattgcttattaacaatgatgatataatgataataacattggatagcatctatttccaaacttcttagcagctatcatcggtaccgtggagggaaa

SEQ ID NO: 684722 - DNA, 120 bp, Artificial Sequence
  ENSG00000187391_153 (sequence is synthesized)
ttttattttttaaatcattctatcacacacttgcattcattacatttcatatattgagctctctgtaatattgtctgctttataaacaataagcttattaaaaagaaaattgttaaataa

SEQ ID NO: 684723 - DNA, 120 bp, Artificial Sequence
  ENSG00000187391_154 (sequence is synthesized)
ccagaatactcaaacaattgcggaaaatagtgttttataatagtagcactatttcagggctgtgggctcacagcacacatctccagagtgtttccatgatgacagctcattatccatctc

SEQ ID NO: 684724 - DNA, 120 bp, Artificial Sequence
  ENSG00000187391_155 (sequence is synthesized)
agcatgttctaacaccccttgaagaatatatgtgcctgagatcatttcattctgtccagattataaggaattggatgttcatcttcggaggatggagtctggatttggcttcagaatcct

SEQ ID NO: 684725 - DNA, 120 bp, Artificial Sequence
  ENSG00000187391_156 (sequence is synthesized)
aaaagtgagagacaggcgcgtagataacacaggttcttgtgctgagagatgtaaatgcccctgactgaccgggaagcgagcgaggttgctggtgggggttggggaaagggaaacggaggg

SEQ ID NO: 684726 - DNA, 120 bp, Artificial Sequence
  ENSG00000187391_157 (sequence is synthesized)
gtattgttcagtactcacagttctgtgaacaaaacgtcttccattttgtgtaacaaatcattcttctgatagtatcagtttcctagtatataatcgctgtgctactttagtcacctacat

SEQ ID NO: 684727 - DNA, 120 bp, Artificial Sequence
  ENSG00000187391_158 (sequence is synthesized)
ttgattaaaagaaagtgaaattgcacttattttttatagtgggcttttggaacagaaaacttatttgagatgtggcaattttaagtgcaaatgcttataactgcagtagtatggtttatg

SEQ ID NO: 684728 - DNA, 120 bp, Artificial Sequence
  ENSG00000187391_159 (sequence is synthesized)
atgaagttgtagccagaagaaacttgtgattttcaagctataaaatctaacttacatttctgaagttagtattgagaaatattgattctagtccagactgttggtgattccgaatgaatt

SEQ ID NO: 684729 - DNA, 120 bp, Artificial Sequence
  ENSG00000187391_160 (sequence is synthesized)
atgatggagatagaactccacattgggagacaggagaatgcaaatttaatttattagttgaaacagctattctgtgagtagaatcttcacagtgactcccaacctcatctcttgtttgca

SEQ ID NO: 684730 - DNA, 120 bp, Artificial Sequence
  ENSG00000187391_161 (sequence is synthesized)
tgcaagcagtagaacagaagagaggataggaaaatttgtgcatttttcatgttgaagtgatttggcccaaaatgttgggtatggaaacacgaaaataaaggagcactaagagaaagtaaa

SEQ ID NO: 684731 - DNA, 120 bp, Artificial Sequence
  ENSG00000187391_162 (sequence is synthesized)
aagtgtgtcaagcaagatgccaaagtccttgctatttctctcctgaagcccttttgagggattttctgtgatttttcaccattggaaacttccaactgtaggtctttgcctgggaactta

SEQ ID NO: 684732 - DNA, 120 bp, Artificial Sequence
  ENSG00000187391_163 (sequence is synthesized)
cagtttcctctcagcccttgtcttcccagaaatactttctgttgggactttcttatcattctaaggcagctatctgggaaggagtgcctttgaactctcaagaacacttcttttcagaaa

SEQ ID NO: 684733 - DNA, 120 bp, Artificial Sequence
  ENSG00000187391_164 (sequence is synthesized)
tccaccaggccaatgagaaaacgcatacctgcttgatgggtccatcagtggaagtgcaagccattcccaatatagaccggtctcaagactgtgctatttccagccagtctcacagagagg

SEQ ID NO: 684734 - DNA, 120 bp, Artificial Sequence
  ENSG00000187391_165 (sequence is synthesized)
gcttcataggagtacagcctccctcaactctaagagacatacaattagcctgaattcaggaagaaaactttgactagggtgaagaaagaagaatgacacagcacttcagaaactatctaa

SEQ ID NO: 684735 - DNA, 120 bp, Artificial Sequence
  ENSG00000187391_166 (sequence is synthesized)
ctagaaactcactaccattttttcacatctcatgaattcatagctttttcttatgtaggctagaggtgagtaatgagcaaaactggattcatattctctgatcctattcttagcagatgt

SEQ ID NO: 684736 - DNA, 120 bp, Artificial Sequence
  ENSG00000187391_167 (sequence is synthesized)
gtttactattgttctccacatctggggcttataaaaaggaaaagacacagcccatgtccttgaaatcttggccacatcatttaaacttactggatctatttcctcaactgtaaaatccag

SEQ ID NO: 684737 - DNA, 120 bp, Artificial Sequence
  ENSG00000187391_168 (sequence is synthesized)
gctttggagagaagttaatgtagtatagtccctcccttcaaggaactggcagtttactaaaggagatgaatctcaaaataattacactactaaaaattagattggaaatattacagaagt

SEQ ID NO: 684738 - DNA, 120 bp, Artificial Sequence
  ENSG00000187391_169 (sequence is synthesized)
aagcaggatgggctatctcatggaaagacgtaaagaggagaaacaggttttcccaacaaagggaaggacactcttcagttttgtattccccacaactcttgtcaaggtagtaaatgttca

SEQ ID NO: 684739 - DNA, 120 bp, Artificial Sequence
  ENSG00000187391_170 (sequence is synthesized)
acagatacatttatatataaataaatgcccaaagaggtaaatattaaggaactatttcacttatgggactgaggagatagagttttttgtacttacttaatgataaggcaccaaatatga

SEQ ID NO: 684740 - DNA, 120 bp, Artificial Sequence
  ENSG00000187391_171 (sequence is synthesized)
acctgagattgtcatattctgccatctggaatatttttaaacaaatagatccatttgcaaaatggctggaaggtttcagaaatgccacctctgatcatgtatgactgtaaaactgacacc

SEQ ID NO: 684741 - DNA, 120 bp, Artificial Sequence
  ENSG00000187391_172 (sequence is synthesized)
agcacgggtcacatttatgaactctaactttgaccaaattgtgtacagtctgaactaaataaatggaattcaccagttactgtctttataacccaccttagtagagatgaaccctctgcc

SEQ ID NO: 684742 - DNA, 120 bp, Artificial Sequence
  ENSG00000187391_173 (sequence is synthesized)
aagcagtaaaaacaaaataggtacttgaagaaaaaagagagatcaaagaagaaaggacaacttgagagaggaaggtcaagtgcaaccaaagccagcctgtacctctgccataagaacatg

SEQ ID NO: 684743 - DNA, 120 bp, Artificial Sequence
  ENSG00000187391_174 (sequence is synthesized)
atccatcagtgaaatatgtgtgtttattgaatgcctacaatttattcattatttgcaaggcatcatacagaagatataatgacctttaagacacggtgattgtttatttgaaatttgtac

SEQ ID NO: 684744 - DNA, 120 bp, Artificial Sequence
  ENSG00000187391_175 (sequence is synthesized)
cataaattatttaaggcagtgtatcatgtagtatcctaccaatgcctttgccaactgttggagtagtgatagccattctctcctctgatgtcctggaatactttacttgttctatcataa

SEQ ID NO: 684745 - DNA, 120 bp, Artificial Sequence
  ENSG00000187391_176 (sequence is synthesized)
tgcattctcacacaggatttctctccctgggtttccttgattataagccatatattttatagcctttgtatcaccaatggcaaaaacatcagagatcagcaaatggaataaacagatgaa

SEQ ID NO: 684746 - DNA, 120 bp, Artificial Sequence
  ENSG00000187391_177 (sequence is synthesized)
taatggacaaaggagtggtatagatgcagacccggagtatttcaaatattgaacagaatagatgttgaagggtaagtgtttcaacatggagaaaattggcaaagagatgttagctgagga

SEQ ID NO: 684747 - DNA, 120 bp, Artificial Sequence
  ENSG00000187391_178 (sequence is synthesized)
acggtagggcaggtaggaagaaatttatataaaaaggaataagaaagaaagcagaagcagggaaacttatagaccagcaccactttgagagaggatgaaagaagaaataacagacacaaa

SEQ ID NO: 684748 - DNA, 120 bp, Artificial Sequence
  ENSG00000187391_179 (sequence is synthesized)
ggacctggtcctgagccagcccacattaggggctcaggcagtgcagttggctcttttctcattatgtgcacttctgaggtataattaaaggagtggtgggtccccagcagtcagttcagc

SEQ ID NO: 684749 - DNA, 120 bp, Artificial Sequence
  ENSG00000187391_180 (sequence is synthesized)
tgttaaaaggggtgtttgtgccactagcagaactcagcactgtatggttctgttttctgtgatagttttggtggggtgaaaaggggctcagatgaatcagtaaagtcttctgattcacag

SEQ ID NO: 684750 - DNA, 120 bp, Artificial Sequence
  ENSG00000187391_181 (sequence is synthesized)
tgcttcttggcttggctatcaaaattcctgccacttttatatgagtgggcaggactttccattgcacttgctagtgagcatatagaaaaatctccctctttatttaaaggatagaatagg

SEQ ID NO: 684751 - DNA, 120 bp, Artificial Sequence
  ENSG00000187391_182 (sequence is synthesized)
aagtaggaattactgaggaactggatttatttgtgtggggatgtacattattggcctcataagatcaaagctgcaatataacatctaagctgtctgtaaaatatttttaaatgtaaactc

SEQ ID NO: 684752 - DNA, 120 bp, Artificial Sequence
  ENSG00000187391_183 (sequence is synthesized)
aactgtccttatccatattcatcctttgcatgagcatgaaagatcggattgttcaatagtgaaattgctttgtcttccgagttgttcatgagcattgacaataggcagcactatgcttat

SEQ ID NO: 684753 - DNA, 120 bp, Artificial Sequence
  ENSG00000187391_184 (sequence is synthesized)
tttccaagtggtggcttcagagagaaaacaccaaaaatcttacactgtattctgacattcttttattagagattcattaattcattagaagatttgaggatattttctccctcaaaaggc

SEQ ID NO: 684754 - DNA, 120 bp, Artificial Sequence
  ENSG00000187391_185 (sequence is synthesized)
ccttagggccacacacctgaagggtaaactggatacgtatcttagagctcagaaaatcatagcatttcagattctgaaacactgaacccattgttttcaacatacagatgaggaggctga

SEQ ID NO: 684755 - DNA, 120 bp, Artificial Sequence
  ENSG00000187391_186 (sequence is synthesized)
gtcctggagtggtaaagtgttgtacacaaatgtgaaattattgtgttacaaatccaaaacaaaccagtaccgtatctcttgactctcaccactagtctttcctctatgccacaccttgtt

SEQ ID NO: 684756 - DNA, 120 bp, Artificial Sequence
  ENSG00000187391_187 (sequence is synthesized)
caggatcagccctctgtcaagagtacaaagagaggacaaagaaagggagcttcaaggaggaagaacaacctgagaaaggtgaaggacaacaaaaatgagctcttgtctctgctgtgatgc

SEQ ID NO: 684757 - DNA, 120 bp, Artificial Sequence
  ENSG00000187391_188 (sequence is synthesized)
ttggggacaagcttgtgtgggagcttagccacgacacaatgggacctagcatcacagcaaaatatagccctacatttctgcagcatcaggacagtaatgcagattttacacttaatgata

SEQ ID NO: 684758 - DNA, 120 bp, Artificial Sequence
  ENSG00000187391_189 (sequence is synthesized)
gctctttcaattctgttgtagaaaacaggagctctccagctctcaagctgtatttctaattttaaatacttatatatttacattgcagtgaaattgctccatacgacccttggaaatact

SEQ ID NO: 684759 - DNA, 120 bp, Artificial Sequence
  ENSG00000187391_190 (sequence is synthesized)
actgtacaacatcaacttagggtgcttttttaactcatttgagtgaaaaatggtgatcacaagtctgtattttcttataactgttaatatttcagtgaggtaagaaaaaatacagggcta

SEQ ID NO: 684760 - DNA, 120 bp, Artificial Sequence
  ENSG00000187391_191 (sequence is synthesized)
atttatgaaatgagtgagcttttttctaagtagtgtttgccaggtgtgtagattggtagtttaggaaataaaacaactttccagaatgaaaaagtgatgaaatcttttattttaaaagta

SEQ ID NO: 684761 - DNA, 120 bp, Artificial Sequence
  ENSG00000187391_192 (sequence is synthesized)
tgcttacttttaattttaaatgaccctgattaactgaaagtataaacatatatagtattcaatttttcctttcatgtcaaaaattgaatatatagtattcaatttttcaattgaatttca

SEQ ID NO: 684762 - DNA, 120 bp, Artificial Sequence
  ENSG00000187391_193 (sequence is synthesized)
gaatttcaattgaatttcagtattcaattgaatatatagtattcaatttttcctttcatgtcaataggtatttatacaccatttatgtattttcagttgaagagctaaaaatggttatgg

SEQ ID NO: 684763 - DNA, 120 bp, Artificial Sequence
  ENSG00000187391_194 (sequence is synthesized)
gaataaaagacttcaatcacgattctattgttccctttaaagaaaggggtgttattttcctacctactattcatggaacaggaggttgtgttaactttgtaatgctgctgtaacaaatta

SEQ ID NO: 684764 - DNA, 120 bp, Artificial Sequence
  ENSG00000187391_195 (sequence is synthesized)
ccacagacttagaggtgtaaaacaaggcaaacttattatcttatagttctggaaatcagaagtctgaactctctctcactgggctaaaatcaaggtgttgacagggccatgtagctttgt

SEQ ID NO: 684765 - DNA, 120 bp, Artificial Sequence
  ENSG00000187391_196 (sequence is synthesized)
gaaagctccagaggagaatcagtttccttgcctttccagcttctggagaacacctgtttgccttggctcatgcccccttccaccattgtccaaaccagcaacatcaggacaagtttttat

SEQ ID NO: 684766 - DNA, 120 bp, Artificial Sequence
  ENSG00000187391_197 (sequence is synthesized)
tgttgtcgttgttttcacattgccatgtttcagactctctcttcagtctctcttccattttcaaagacccttgtgattaaattgggctcacctgtgtagctagggtaatctccctattta

SEQ ID NO: 684767 - DNA, 120 bp, Artificial Sequence
  ENSG00000187391_198 (sequence is synthesized)
aaggtcagctgattagcaaccttaattcttctttgtaccctaattacgttcacaaattttggagattaagacctagacgtctttgggagccattattctgcctaccacaaagctcaagaa

SEQ ID NO: 684768 - DNA, 120 bp, Artificial Sequence
  ENSG00000187391_199 (sequence is synthesized)
ggttaagatgaaaagctgttactgccacttgatgacaggtggttgaggatatcattgcatccctgctgaaaacttcatgctggagtgtgtgtgattagtgggccgaatgcaatatttctc

SEQ ID NO: 684769 - DNA, 120 bp, Artificial Sequence
  ENSG00000187391_200 (sequence is synthesized)
taaggcatagaatgagactcagtactttcccctcacctcgctacaggctaggatgcctagcagctaagtctgtgctgaatgttattaatgagttaactactaattatatgagctgattcc

SEQ ID NO: 684770 - DNA, 120 bp, Artificial Sequence
  ENSG00000187391_201 (sequence is synthesized)
atcagaatatacctgaatgtatataagtagtaggcagctaatatattcagataaaaatcattttgaacaaaactgaaaatatagccaaattcaaaatatagtttatgtaaataccatatc

SEQ ID NO: 684771 - DNA, 120 bp, Artificial Sequence
  ENSG00000187391_202 (sequence is synthesized)
catttttttcctttcaacaccttgatatctgcattcaaaaattttacttttggcaatcactatagtagttaagttggaaagtaatttttttacagaataaaatatactgatggaactcct

SEQ ID NO: 684772 - DNA, 120 bp, Artificial Sequence
  ENSG00000187391_203 (sequence is synthesized)
atgaaactgacaaataaacctatttgagtgggcatatgaggtaatactaaatatcttttttttgcttttatagaaagctagtcaattaattgtttcctttacacaggttttcatgacaaa

SEQ ID NO: 684773 - DNA, 120 bp, Artificial Sequence
  ENSG00000187391_204 (sequence is synthesized)
tcattgagattagtcatgccaactgttgagcaggtggctctcctccttggcatccctgttccttatgtacttccacccatgtcattctttactcaagagagagaattctttggcagtgaa

SEQ ID NO: 684774 - DNA, 120 bp, Artificial Sequence
  ENSG00000187391_205 (sequence is synthesized)
acaccatgtggcttctcaatatttgtgtggattaagcatccacaatgtacacataatgtgaaacacactgttggatggatataaatgcccattttaccttttatcttttcaatttcttcc

SEQ ID NO: 684775 - DNA, 120 bp, Artificial Sequence
  ENSG00000187391_206 (sequence is synthesized)
cactcctaaattatccctcacctgccaaacatagccccggattcaaaaataattaggattcagattctgaaaatcatagcttctataatttagccttaccagattttcagctttcactaa

SEQ ID NO: 684776 - DNA, 120 bp, Artificial Sequence
  ENSG00000187391_207 (sequence is synthesized)
gtataaatacattctaatttaaatgaacactaaatttcatcaaaattggtggaaaacactctggaaaaactatggaaaacacttagaatgtcgcctgtacagagtaagcattacatagag

SEQ ID NO: 684777 - DNA, 120 bp, Artificial Sequence
  ENSG00000187391_208 (sequence is synthesized)
agagctagtagtagtagtagtagaaaattaacactttaatattattttgataatataataactcctgaattcctatatgtgtttctatttatttgtacttcctttgaaaaattgtgattt

SEQ ID NO: 684778 - DNA, 120 bp, Artificial Sequence
  ENSG00000187391_209 (sequence is synthesized)
ccatgcctccaggaccacatgttgttccacttgaggggaggataaaaattgcctcttgattttccaaagcccagtctttcccttccctgtgcagccttagaaactccgtagcaatgctat

SEQ ID NO: 684779 - DNA, 120 bp, Artificial Sequence
  ENSG00000187391_210 (sequence is synthesized)
ttggtattttggcttttttttttttttttccccatcctgctgcagctacttcctgtcaactagaggtggaaggtgtcccgggaagcagttagatgagttaagtgtgatacacaggagaac

SEQ ID NO: 684780 - DNA, 120 bp, Artificial Sequence
  ENSG00000187391_211 (sequence is synthesized)
aggaccgtagcctatcaaaagtccctctgccctgcctcagtgtattggtccttcgttggttacatttctctttgtgctggaataccctcttctgaatcagatcagggatttccactgcca

SEQ ID NO: 684781 - DNA, 120 bp, Artificial Sequence
  ENSG00000187391_212 (sequence is synthesized)
gccatggacccggccccagagccatgaaatgagctagttcaaatttgggtacgttcctggcccacaaagatttgaaatgatctgtcaggcaattgtgccacctctgtacatctttgctgt

SEQ ID NO: 684782 - DNA, 120 bp, Artificial Sequence
  ENSG00000187391_213 (sequence is synthesized)
ctttctgtcgagctcagggacagcaatttctagggcagtagtaagatacatgataggaatttcaaacttgacgtcaaactcacattgcaggaggccatggatataccaacattttccaaa

SEQ ID NO: 684783 - DNA, 120 bp, Artificial Sequence
  ENSG00000187391_214 (sequence is synthesized)
ccaccgagtccctaccttgctggactccagttggaaccatcgttgtcgccattgttgttgttctccacataccagataagggactgatattcctccttcaatcactgcacccacaactcc

SEQ ID NO: 684784 - DNA, 120 bp, Artificial Sequence
  ENSG00000187391_215 (sequence is synthesized)
caatctcggggtcctgcattagtcttcagtgccagagtctcagacacaacatgtcaggtggcctcatctgccatcttgggccagggcgagttttgtatactttcacataacaaaatattc

SEQ ID NO: 684785 - DNA, 120 bp, Artificial Sequence
  ENSG00000187391_216 (sequence is synthesized)
ttcttcttttgatttttcctcaactactcgaaaatgtgtaaactgttcttagcccattggccacacaaaaattggggcgggctgaatttgatccacaggacaaaccctatcctaccatgt

SEQ ID NO: 684786 - DNA, 120 bp, Artificial Sequence
  ENSG00000187391_217 (sequence is synthesized)
ttgtgtgggactctactcttggcaggtcttgaacaccaatatttttaaatatttttcttctcaggactgccagactcccaaaaatcggaggtggttttcaggagatttagcttaactctt

SEQ ID NO: 684787 - DNA, 120 bp, Artificial Sequence
  ENSG00000187391_218 (sequence is synthesized)
ttgcctctagatcctgcagctccagaattgacaaatgtcaggagataactgactgactgtttgaaatctctcacatctatgtttgtcactccagtccctcaagattcctcactcttctgg

SEQ ID NO: 684788 - DNA, 120 bp, Artificial Sequence
  ENSG00000187391_219 (sequence is synthesized)
tttctttaatgtccagcagcggccttcttcccaggccaagtctatactgttctaagagcccagacacaacaagagcagctgcaaattcttccttcacctctccagggttcccttttgaga

SEQ ID NO: 684789 - DNA, 120 bp, Artificial Sequence
  ENSG00000187391_220 (sequence is synthesized)
atcttagaccttctagaccacgctgcttcagctagtttctgatttctttaaactgcttatttttttacattttatctaggctttctgttttctcatgtctaataagctactccatcctat

SEQ ID NO: 684790 - DNA, 120 bp, Artificial Sequence
  ENSG00000187391_221 (sequence is synthesized)
tcataaaatcttcactgttatcctaatttatattttaataactgaagattatatattattttgtcatatatgtgtgcttactatttatgaatgtatggaggtatgtagtgtatgtgtaga

SEQ ID NO: 684791 - DNA, 120 bp, Artificial Sequence
  ENSG00000187391_222 (sequence is synthesized)
tatgtatctggaaatgtttgcaccttcagatctgtttacataaatgagtaaagttaattcctgttaaattaatataagaggaatacaagtgaaagagagatgagaggggatactaactag

SEQ ID NO: 684792 - DNA, 120 bp, Artificial Sequence
  ENSG00000187391_223 (sequence is synthesized)
actagagaaaaaactaacaaaagttttctcattggtattaaggagaaacaggacatggatggctcagtacaaatatatattaaacaagcacttattctactgacagtaaagcaatcattt

SEQ ID NO: 684793 - DNA, 120 bp, Artificial Sequence
  ENSG00000187391_224 (sequence is synthesized)
tgcctttttacttaaaggataatactgctactaaacataaaaacatacttccttctctcacaatagggttggaaatactgaagtcattatgttctgtgcatttgtcatagctctgtacac

SEQ ID NO: 684794 - DNA, 120 bp, Artificial Sequence
  ENSG00000187391_225 (sequence is synthesized)
ttttggagttttagcagcagtctacatggcagaaaaaaatgtctccacctactactggattctaatattagtatttgggggagtgctgtttagcaagccaatatagtcttttttaaaatg

SEQ ID NO: 684795 - DNA, 120 bp, Artificial Sequence
  ENSG00000187391_226 (sequence is synthesized)
ccacagaaacagcagttaaccactaaataccttggatgcaagattggttaaagtgtgtataaagccccatcatatttctcctctcagagtcggtaatatgggatcctcctgagatatttt

SEQ ID NO: 684796 - DNA, 120 bp, Artificial Sequence
  ENSG00000187391_227 (sequence is synthesized)
caatcacaaccatttctgtgctgacatcccatgagcattgctgggttagaatccatatcaaaagtgaattaagccttgtaggaccattcttttcttaacgttgaaatgttattaaaccca

SEQ ID NO: 684797 - DNA, 120 bp, Artificial Sequence
  ENSG00000187391_228 (sequence is synthesized)
gtaggatcacactataatgtacaggagaagaaatagaaattgtttaagatttggagtcaggaaaagctgttccaaaccctaatctgtgggttcttgggcaaggtacttaatctttgggag

SEQ ID NO: 684798 - DNA, 120 bp, Artificial Sequence
  ENSG00000187391_229 (sequence is synthesized)
cccagattttcttacctgtaaatgggagttgtacctctttcatgcagatttaccttcacatgttggaagcacaatgactagcaccataaattctaaataactgctcattttctttccttc

SEQ ID NO: 684799 - DNA, 120 bp, Artificial Sequence
  ENSG00000187391_230 (sequence is synthesized)
aggtaaaactctgagacagtaaatgagccctatagaagatgactgggaaaaaattcagaatagttatcctaccttaacaactttgaattactatagaatgtccttgcaaaatggaaatga

SEQ ID NO: 684800 - DNA, 120 bp, Artificial Sequence
  ENSG00000187391_231 (sequence is synthesized)
acaaatccatataggctaaaattatccatctagcttattccagcctgagagtaatacactggggggtttcccccttcaacctgttaagttgtctctaaattttcatgaagttatatctgc

SEQ ID NO: 684801 - DNA, 120 bp, Artificial Sequence
  ENSG00000187391_232 (sequence is synthesized)
atgaactgggtggctttgtttctgtattcaatatgtatgaattttaagtgagttttcttatgttactacaggaaaaaaaattacataatcttaacccattcacctgcatgagtagtgcat

SEQ ID NO: 684802 - DNA, 120 bp, Artificial Sequence
  ENSG00000187391_233 (sequence is synthesized)
ttcaattagaattaactaatgctttgaactaattaattaatctatctttttaaaaaagtgtccaaaatgtgcatgaacaaagacagcatacgccatgctttacaatacatattaaacagg

SEQ ID NO: 684803 - DNA, 120 bp, Artificial Sequence
  ENSG00000187391_234 (sequence is synthesized)
atgtttttcaggagaaggaagttgcctttctgaaatagtagaaaacgctaattagtttcaattcatttcttaaatgagttttataaaactgacacacagattaaaagattcatacttttg

SEQ ID NO: 684804 - DNA, 120 bp, Artificial Sequence
  ENSG00000187391_235 (sequence is synthesized)
gccccggagaggtcgcgcagcgtgaatgacttgtcttactatcagcgcgacccagcagggaggccctggctgttcgaaaaaccactcttcacccgggatgcatcccagttgaagggaaca

SEQ ID NO: 684805 - DNA, 120 bp, Artificial Sequence
  ENSG00000187391_236 (sequence is synthesized)
agaaccagtaagcaaattaagtgtatcgattgcaattttgttggactaaccctgctttttttttcttaaggaataaacttgattccttttagtatgtgtctgttcagagtgatctctttt

SEQ ID NO: 684806 - DNA, 120 bp, Artificial Sequence
  ENSG00000187391_237 (sequence is synthesized)
ggccaaggcaggaggactgcttgagcctaggagttcaacagaagaggcaacatagggagaccttgtctctacaaaaaaattagccaagcgtggtggcatactcctgtggtcccagctact

SEQ ID NO: 684807 - DNA, 120 bp, Artificial Sequence
  ENSG00000187391_238 (sequence is synthesized)
tactcaggaggatcacttaagcacaggaagttgagaatgcaatgagccatgatcgtgccactgcacaccagcctgggcgacagagcaagaccccaactcaaaagaaagaaaaaatattgc

SEQ ID NO: 684808 - DNA, 120 bp, Artificial Sequence
  ENSG00000187391_239 (sequence is synthesized)
caagtaaatgttataagtatgccattataatcttttttgctattatctgctgagtacatcctttcttccctctaatgatacaaaaataaactccagacaatatattcctaccaagtactc

SEQ ID NO: 684809 - DNA, 120 bp, Artificial Sequence
  ENSG00000187391_240 (sequence is synthesized)
acattcaggtgtggatctgcagctggatacatgaatctggagtccagtgcagagcttggagctagggacataaatttgaaagctgttagattctagatggtatttaaatccataagactg

SEQ ID NO: 684810 - DNA, 120 bp, Artificial Sequence
  ENSG00000187391_241 (sequence is synthesized)
aatgacttcatataggaaatgagtatagatagagaagtgaagtagtctaaagaccaatcctcagatttaaacatttagaacttaaacatttagagtttggagagaagagaagaagccaga

SEQ ID NO: 684811 - DNA, 120 bp, Artificial Sequence
  ENSG00000187391_242 (sequence is synthesized)
taaaataattcacttcttttgaatgcttaccatgctttaggagtggcctaacctcattataggtattagttcatttaactatcttaactgtcccatcaactaggtactgctttacagatt

SEQ ID NO: 684812 - DNA, 120 bp, Artificial Sequence
  ENSG00000187391_243 (sequence is synthesized)
aggaaactgagatactttgcctagtaactggagttcatatgtaggaaaacttggtccacaatccatatgtgtggctgccatgctatcctgagtcttatataaccaaatacaagcataaat

SEQ ID NO: 684813 - DNA, 120 bp, Artificial Sequence
  ENSG00000187391_244 (sequence is synthesized)
atatttcttagtgatatataaacatataaccactattttacctgtatatctttcaaagtggcattataaatttctagttaccaaaaacttcatattgcttttatttcctgaaatcatgta

SEQ ID NO: 684814 - DNA, 120 bp, Artificial Sequence
  ENSG00000187391_245 (sequence is synthesized)
cagtgaacttacatccttctctgtgtataaaaaattcctagtttttaaaattctgtgcatgtataagcattaaatctaccaatatttggctttatatatatttaaccaaaactttgctct

SEQ ID NO: 684815 - DNA, 120 bp, Artificial Sequence
  ENSG00000187391_246 (sequence is synthesized)
aggtcccagaatatggaatggtaccttccagtctctccatgtgcatgaaaagtgacaagcatgggtccccatatttctacttattgggccaccctaaagacacgacgaacccgccccctg

SEQ ID NO: 684816 - DNA, 120 bp, Artificial Sequence
  ENSG00000187391_247 (sequence is synthesized)
tggatccactataagtaagtgctgaaatttgcctgcatttgaataaggggtcttgttttgatttgttccagtgatacagataccggacaagtatatcagaagactgtcacggacatactg

SEQ ID NO: 684817 - DNA, 120 bp, Artificial Sequence
  ENSG00000187391_248 (sequence is synthesized)
tatagcctgaaagccacaggctgtgggcacaaataaggcatccataccactgactagcagacagttactgacctctggctcaagaagaaggcaagaacacaactaatgccctcaactcct

SEQ ID NO: 684818 - DNA, 120 bp, Artificial Sequence
  ENSG00000187398_0 (sequence is synthesized)
actcctgaagatactcctcgctcccagcgcctgccttccccaggcgtccgttcgtgtgcccgtctccgcctttccgcctcggaagagcgctcatcactggctggggacagagccgggcac

SEQ ID NO: 684819 - DNA, 120 bp, Artificial Sequence
  ENSG00000187398_1 (sequence is synthesized)
caaggagcgacaggatcccgaagagagagagagaaggcagcgagggaaggaggaccccggcaggcagcagcatgaaattcagcccagcgcactacctgctgcctctcctgcctgcgctgg

SEQ ID NO: 684820 - DNA, 120 bp, Artificial Sequence
  ENSG00000187398_2 (sequence is synthesized)
tcctcagcaccagacaggactatgaagagctagaaaagcagctgaaagaagtctttaaggagcgaagcaccattcttcgtcagctgacaaagacatcaagagaacttgatggaattaaag

SEQ ID NO: 684821 - DNA, 120 bp, Artificial Sequence
  ENSG00000187398_3 (sequence is synthesized)
tcaatcttcagtccttaaaaaacgatgagcagtctgccaaaactgatgttcagaaacttctggaattaggacagaaacaaagagaagaaatgaagtctcttcaggaggccctgcaaaatc

SEQ ID NO: 684822 - DNA, 120 bp, Artificial Sequence
  ENSG00000187398_4 (sequence is synthesized)
agcttaaggagacatcagagaaagcagaaaaacaccaggctactattaattttttaaagactgaagttgaaagaaagagcaaaatgatccgagacctccagaatgagaataaaagcttga

SEQ ID NO: 684823 - DNA, 120 bp, Artificial Sequence
  ENSG00000187398_5 (sequence is synthesized)
aaaacaaactcttgtcaggaaacaagctctgtggcattcacgcagaagagtcaaaaaaaatccaagcccagctgaaggagcttcgttatgggaagaaggatttattatttaaggcgcagc

SEQ ID NO: 684824 - DNA, 120 bp, Artificial Sequence
  ENSG00000187398_6 (sequence is synthesized)
agcttactgatctggaacaaaaattagctgtagccaaaaatgaactggagaaagcagctcttgacagggagtcacagatgaaagcaatgaaagagactgtgcagctctgcttgacatctg

SEQ ID NO: 684825 - DNA, 120 bp, Artificial Sequence
  ENSG00000187398_7 (sequence is synthesized)
ttttccgtgatcagcctcctccccctttgagtttaatcacatcaaatccaactcggatgttactcccacccaggaatattgcctctaagcttccagatgcagcggccaaaagcaagcctc

SEQ ID NO: 684826 - DNA, 120 bp, Artificial Sequence
  ENSG00000187398_8 (sequence is synthesized)
aacaaagtgcttctggaaacaatgagagctctcaagttgagtcaacaaaggaaggaaatccaagtaccactgcctgtgactctcaagatgagggcagaccgtgttccatgaagcacaaag

SEQ ID NO: 684827 - DNA, 120 bp, Artificial Sequence
  ENSG00000187398_9 (sequence is synthesized)
aaagtcccccaagtaatgccactgcagaaaccgagcctatcccacagaaattgcaaatgcctccttgctctgaatgtgaggtgaaaaaagccccagaaaaaccattgaccagctttgaag

SEQ ID NO: 684828 - DNA, 120 bp, Artificial Sequence
  ENSG00000187398_10 (sequence is synthesized)
ggatggcagctagagaagaaaaaatactgtaaatactaagaaactgtgttaaaaacgtccatttgctattgtcttcatattctttttagaccacaagcttgatggaaatactgtttctaa

SEQ ID NO: 684829 - DNA, 120 bp, Artificial Sequence
  ENSG00000187398_11 (sequence is synthesized)
agcatgcaactttttcacaattttatgtaactttataaagtagcctacacattttcaaagattccagaccaattatgatccttaagcaataacctcattgaattgaatacccacagtcag

SEQ ID NO: 684830 - DNA, 120 bp, Artificial Sequence
  ENSG00000187398_12 (sequence is synthesized)
aaatattttgttgtcaacagtaaattgtcccatataaattggtctggtttaactcaaatgctatctaacatgtaattctcccggttcatttggatatctagtacttctatgatatagttg

SEQ ID NO: 684831 - DNA, 120 bp, Artificial Sequence
  ENSG00000187398_13 (sequence is synthesized)
tcaaaatcaactggaggataataaaatattgtgggttctcagcattcttagaatccaaattacaaccatatcagtaagggtttggtccacatgagccaactgaagtcattttcctcaagg

SEQ ID NO: 684832 - DNA, 120 bp, Artificial Sequence
  ENSG00000187398_14 (sequence is synthesized)
ttggaatttgtgccaacctaaatacgttgtttctttgatggtgtttattgctattggtattattttgaactaataacaattattttgtctaaataatgctaagacaattctgttaagaat

SEQ ID NO: 684833 - DNA, 120 bp, Artificial Sequence
  ENSG00000187398_15 (sequence is synthesized)
tttgtcagctaacataattcattaagtatgtttggcatcatatggacaaaatatttggatgaatgactaaatttctgacacaattaaatattttggcattctatagacacatctcctatg

SEQ ID NO: 684834 - DNA, 120 bp, Artificial Sequence
  ENSG00000187398_16 (sequence is synthesized)
tatgtctactgtaattaatccaagttaataaccaagttttctgaaatacttggcaggatttttggtatgaagttgggtagtggaatagggaatgaagagtgagttctaaaatacaaatat

SEQ ID NO: 684835 - DNA, 120 bp, Artificial Sequence
  ENSG00000187398_17 (sequence is synthesized)
gaaagcaggtaatatatatcacaaaacaggggtctgatgaaagtacaatagccatgttgattcaataaacccagatgcatattttttgaaaaccaatgtgttattgaaacaaatcaatgg

SEQ ID NO: 684836 - DNA, 120 bp, Artificial Sequence
  ENSG00000187398_18 (sequence is synthesized)
cagtgttaatccataagagttctgattttctataggaatatcactaatcaaaaaaatgcactcatgaataattggaagatagctcacaagcaagaggaattgacccttgaataattatct

SEQ ID NO: 684837 - DNA, 120 bp, Artificial Sequence
  ENSG00000187398_19 (sequence is synthesized)
gattaataggtttcatagggcattcaaagttgcagactcagttaatgactacagttaagttgtctggactgaaaagtcatttcttttgtttagaacctttttgcaaccgtagaaagcata

SEQ ID NO: 684838 - DNA, 120 bp, Artificial Sequence
  ENSG00000187398_20 (sequence is synthesized)
ttaaaccattggttttgcaggatggatctgtcaaaccacaatatatacatttggatcagtgtatcctaggagacagttaataaaaatgtattaaaggaaatctttaatcaataaatgaac

SEQ ID NO: 684839 - DNA, 120 bp, Artificial Sequence
  ENSG00000187398_21 (sequence is synthesized)
aaatttaaagatttggagaattggaaaatatcgttagctgtaaaagtaatattatgacatatttatgtagcacttctattttcagaatagttcagtgtcattcattagcacaggcaggtc

SEQ ID NO: 684840 - DNA, 120 bp, Artificial Sequence
  ENSG00000187398_22 (sequence is synthesized)
ccaaccacaatggttcaacttaacggttttttcatgattctgtgaaagcttcataatttctacatgctttgaattttgaattttgttattttttggagggctagtgatacatggtccatg

SEQ ID NO: 684841 - DNA, 120 bp, Artificial Sequence
  ENSG00000187398_23 (sequence is synthesized)
aaatattcaacactttattataaaatagggtttgtgttagacaatttgcccaactgtaggatgaggtatatgttctgagcacgtttaagcaggtttaagttagggtgggctatgattttc

SEQ ID NO: 684842 - DNA, 120 bp, Artificial Sequence
  ENSG00000187398_24 (sequence is synthesized)
catttaggtatctgaaatgcatttcagacttacaatgttttcaacctttgacttctttatctgtatgtaatcctattgttaaatcaaggagcattcatatttttcataaaaccggctacc

SEQ ID NO: 684843 - DNA, 120 bp, Artificial Sequence
  ENSG00000187398_25 (sequence is synthesized)
caaggaaaaaaataattagctttatggatgatccatagagctttcagatgaagtgactaggataaaataaaagatgaaggtctgaggtttcttctgactccttcatatttctaaaaataa

SEQ ID NO: 684844 - DNA, 120 bp, Artificial Sequence
  ENSG00000187398_26 (sequence is synthesized)
tcatacaaactagaatactgctagtctcccaagtcctgttccttgtaattctcccactgttctcagtggccctaaccatctctataggttcctgacagggaagcagatcatttagtttta

SEQ ID NO: 684845 - DNA, 120 bp, Artificial Sequence
  ENSG00000187398_27 (sequence is synthesized)
atttatgttcagtctcccacctccaccctggggcccaacttcccttgcaggccttgtgggtcctatagaaagttattcaccatgtaatctagcacagcatgttttgaagcatctttggaa

SEQ ID NO: 684846 - DNA, 120 bp, Artificial Sequence
  ENSG00000187398_28 (sequence is synthesized)
tgaaaaaaaagaagaatcaggctgttatttcctgaaattgttatgagagataacatgttgaaaggtaagaactcaggttgatattaatcatgtttttatcaatcttcattttaaagttgt

SEQ ID NO: 684847 - DNA, 120 bp, Artificial Sequence
  ENSG00000187398_29 (sequence is synthesized)
ttttgttctgtatattctaaattccttttattaattcctggcttgatcaagtgggctttggatccatatgatttttttttttttttttttttgagatgaaatctcgctcttgttgcccag

SEQ ID NO: 684848 - DNA, 120 bp, Artificial Sequence
  ENSG00000187398_30 (sequence is synthesized)
gagccaccgtgcctggccagtgtgtttttttcctttaaatatatatggcattatacatccagcaaagtttactgtgttatactcattgcatcatttgtttaaaaaaaaaaaagaaacttg

SEQ ID NO: 684849 - DNA, 120 bp, Artificial Sequence
  ENSG00000187398_31 (sequence is synthesized)
tagcaggagacatttaaaaatatatttaggagttccttttaataactaagttagagactctctttcagtaagttctatgactgtaccttaatgaatgcattttatttatctcaattttta

SEQ ID NO: 684850 - DNA, 120 bp, Artificial Sequence
  ENSG00000187398_32 (sequence is synthesized)
tttgcttcaaaatagaatcggataagtttaaaatgttcctcttacatttgtgaatgtgtctatgagagaggggccatttctcacatattttaattaacaactaaataaacagacgttgtt

SEQ ID NO: 684851 - DNA, 120 bp, Artificial Sequence
  ENSG00000187398_33 (sequence is synthesized)
ttaaaggaattaacacttaaatcccaaccatcctcatatagaataaaatatcaacctaaatctttactatagatagtataattctattatgtacctgtaatgataagcattgaaagatta

SEQ ID NO: 684852 - DNA, 120 bp, Artificial Sequence
  ENSG00000187398_34 (sequence is synthesized)
tttacattttgaaaaacatggaattgattcttattaagaaaaaagatattttccaatggagtaacttgttttaatagaggtacaaccagaaccaacaattgtatttctctatagttattt

SEQ ID NO: 684853 - DNA, 120 bp, Artificial Sequence
  ENSG00000187398_35 (sequence is synthesized)
taaaatagtaatcaatgctatgtatttgatgtatatgtttctaaattagaaatttcttttggctttgtgtttttttaatgtgcgttaaatatgtaaactgaacctgttcctaaaatgcat

SEQ ID NO: 684854 - DNA, 120 bp, Artificial Sequence
  ENSG00000187398_36 (sequence is synthesized)
taaacttgaatgctgtgtctatccaatgccaaaatgctcagaagaaaagtgaataattcagtcattcatctggatgtagttttctgtgtaatctcaaatatctgaatattgaaaaaacta

SEQ ID NO: 684855 - DNA, 120 bp, Artificial Sequence
  ENSG00000187398_37 (sequence is synthesized)
ggttgctaacttttttcattccttatgcaaatgtttagcatcatagtgctgtttcagatacagatctgtttcatcaaatatcctcaattacaagtctaagacagttatatgtaaagaaaa

SEQ ID NO: 684856 - DNA, 120 bp, Artificial Sequence
  ENSG00000187398_38 (sequence is synthesized)
tgtattattttagatgaacaatgtggataactgaactaaaacgatatttgtgaactttgctataatgaaatcttttatttttatagctcaggtattgtaattagcactaattgcagcaga

SEQ ID NO: 684857 - DNA, 120 bp, Artificial Sequence
  ENSG00000187398_39 (sequence is synthesized)
gactgaaataattattgacaccgtagagtaccatagagtaggttgaactggccagacctagacaatgaagaaaacacatactgtttacttaggagacattttcttagtcgtgtgtatagt

SEQ ID NO: 684858 - DNA, 120 bp, Artificial Sequence
  ENSG00000187398_40 (sequence is synthesized)
cctaaatttccccaaactatgtgttcatttggattgtgttatataataacagtcgaatgatgaagaataaaagatgctgaaagatggcctatttttgttcaataaagattgttacaagaa

SEQ ID NO: 684859 - DNA, 120 bp, Artificial Sequence
  ENSG00000187398_41 (sequence is synthesized)
gagtctccatagatcatacaaagagagaacagagaaacaaggcaacaaattgggatacgctgcaacactctgcactgaacatctgacttcaattagccaaccctcaatttccaatacaaa

SEQ ID NO: 684860 - DNA, 120 bp, Artificial Sequence
  ENSG00000187398_42 (sequence is synthesized)
aaggagcacctgaagacttgttggctgaagttctctgtctggcctcgaaagacattcaaattagccaccactggagtagatgacctaaaagttcttacaactctcaattatacccagtga

SEQ ID NO: 684861 - DNA, 120 bp, Artificial Sequence
  ENSG00000187398_43 (sequence is synthesized)
cccagtgatgtctcgattagcacttattataaaaattaaaatttataattcaacatttataccatccagaaaaagttaaaatatattaatagcctatttctcttcaataaagcgtatata

SEQ ID NO: 684862 - DNA, 120 bp, Artificial Sequence
  ENSG00000187398_44 (sequence is synthesized)
ccagtggaagatagtctccatgaggaccatgtcaatatacttattgatgtatctctagtacctagaatagtggagatttatattagatacaaaataaatatgtgtggaattaattaataa

SEQ ID NO: 684863 - DNA, 120 bp, Artificial Sequence
  ENSG00000187398_45 (sequence is synthesized)
aggagacatcagagaaagcagaaaaacaccaggctactaaatcaatggcaacagctcaggcctctcctgtcatcaaggtaacatcagtgcagtacaaaagccctgctagaatgagaagta

SEQ ID NO: 684864 - DNA, 120 bp, Artificial Sequence
  ENSG00000187398_46 (sequence is synthesized)
atgggaatgaaaagttccaggcttcaagaggctatgctgactctgggaaattgctctgtttctccctaaaaatactttgttccaaattggcagcagttataactagcaggaactatagat

SEQ ID NO: 684865 - DNA, 120 bp, Artificial Sequence
  ENSG00000187398_47 (sequence is synthesized)
ttacaagcttcacatttgacccttcaagtggtacccagagttggggcaccgagtacatcaatgtattaactcatctttgctggtgggcacatttttcatcggctggcacctggtatatga

SEQ ID NO: 684866 - DNA, 120 bp, Artificial Sequence
  ENSG00000187398_48 (sequence is synthesized)
ctgtatttttaatttaggccctcacaaatccctcaaagttatgaaggcgttgtaaaatatatgtctcagggaaacctaaaaccaagaagcatattatatattttataattttatattttt

SEQ ID NO: 684867 - DNA, 120 bp, Artificial Sequence
  ENSG00000187398_49 (sequence is synthesized)
aggttaacttaatttcccatcgtaattgcatgcatgcatgtttgatataaaaattataaaatacaggaacatagaaaatagtatgttttattattttaccacgggaaaaaagtagtcaga

SEQ ID NO: 684868 - DNA, 120 bp, Artificial Sequence
  ENSG00000187398_50 (sequence is synthesized)
attcatgggcatatctaataaatacattcctgacccttctatataaataatatgggatgtttttctttccacttagtatacatatgcaatttttcatggtaccaaaaattctgcgtaaat

SEQ ID NO: 684869 - DNA, 120 bp, Artificial Sequence
  ENSG00000187398_51 (sequence is synthesized)
gcgtaaatatcatattaacgactgcctatttgtaacaccttcccctaatgtgaagaataaaatatgtgtatatttgtatatacacaaatatataatatataaacaggtgtatataattat

SEQ ID NO: 684870 - DNA, 120 bp, Artificial Sequence
  ENSG00000187398_52 (sequence is synthesized)
gaaatggcaagcatctcttcagttacactgctttacattatcactctacgtttattcatggaaggaactcaaatgttaaaaagttataaatagctgagaaacgttcaaaaatgaggttgg

SEQ ID NO: 684871 - DNA, 120 bp, Artificial Sequence
  ENSG00000187398_53 (sequence is synthesized)
ctaatgcagtgagaaaagaaatacaaattagaacaaaagaatactatttcccctaaaattgacaaaagtctacttaaccgacagtatctaatgtgagctagagtgtgatgaagcataccc

SEQ ID NO: 684872 - DNA, 120 bp, Artificial Sequence
  ENSG00000187398_54 (sequence is synthesized)
ttgtcaactttggtgataaggcaatttagcatttccacaaaaattttaagtgaaaatatcattagtcatagcaattctacttctctaatacaattataaggaagccatatcacaaacata

SEQ ID NO: 684873 - DNA, 120 bp, Artificial Sequence
  ENSG00000187398_55 (sequence is synthesized)
tggagatatatacatactgacatgtacatatacacatacacatatatacactatgttacatacacccacattcattatatcattatgaaattaaagaacaactggaaaacaccttttggt

SEQ ID NO: 684874 - DNA, 120 bp, Artificial Sequence
  ENSG00000187398_56 (sequence is synthesized)
tcctaataagggaagatttaaatactttactataaagctatattattatactttatgcgaaaatcaaaaggaagatatattctatatttctagcaagaaaagaaagttcacatatgttgt

SEQ ID NO: 684875 - DNA, 120 bp, Artificial Sequence
  ENSG00000187398_57 (sequence is synthesized)
tgattgaagaaaaagaagttccagactaataaaggtgacgggcttccctctttgataagtcctatgtgtcctatctatctcgacagaattctatcaggaataacactgtacttgttccac

SEQ ID NO: 684876 - DNA, 120 bp, Artificial Sequence
  ENSG00000187398_58 (sequence is synthesized)
ttactaagggagaatttataatggaaaagaggtgaaaaatggcttatttgctttgattatcagcagggtgtccagtacagtaggtatagctggcatgggactggtagtgcaggctggctc

SEQ ID NO: 684877 - DNA, 120 bp, Artificial Sequence
  ENSG00000187398_59 (sequence is synthesized)
ttggaaaggagtatgtattccaggctggttggctgctgttccactgggagctgaagccagggctcatggtcactcgtgacttactagtttgataggctctcactgtggagctagactcgt

SEQ ID NO: 684878 - DNA, 120 bp, Artificial Sequence
  ENSG00000187398_60 (sequence is synthesized)
ttgcttgttatttcttaagaatctctgtatctttctccttttttaccttctgtggttgtgatctgtgaggaaaaatgtgtatttctcccagattcagcctatatttatcctgatgtggct

SEQ ID NO: 684879 - DNA, 120 bp, Artificial Sequence
  ENSG00000187398_61 (sequence is synthesized)
gtagtcaactactagatgtatcctgaaaaacaagtaatgtgtatatttcatttattttatacataagagctacagactgatgtcacaatcttttcaagggctattaaattcattatttta

SEQ ID NO: 684880 - DNA, 120 bp, Artificial Sequence
  ENSG00000187398_62 (sequence is synthesized)
actaacatttttgaacatctatcttatgttgttaattgaggacatttctgaatgtataacaacataagaataatagtttttaaacttcaaagagatgacaggttaatgagtaaaggagaa

SEQ ID NO: 684881 - DNA, 120 bp, Artificial Sequence
  ENSG00000187398_63 (sequence is synthesized)
atatgaaatatcacagaattccttgacactaaatgatgttttgcaaatactgaacagaatgatgtttgtaaactttccactggttttcaagagtcccaaaacattaggaaaatgtacatc

SEQ ID NO: 684882 - DNA, 120 bp, Artificial Sequence
  ENSG00000187398_64 (sequence is synthesized)
acctaactttgtcacatatttataattgtttttcctttttgtttccaagaagcacaatgtagaccaagaggtagaaaaaatatttttaaagatacatgtctaagatgttcagcttttgtc

SEQ ID NO: 684883 - DNA, 120 bp, Artificial Sequence
  ENSG00000187398_65 (sequence is synthesized)
aaatgaagcaatagtcacaataatgtcacagagacaatggattgccagcttaatcctcagcaataacataatactcattatcaggcatttattcatttattcgttcatgaatgctattca

SEQ ID NO: 684884 - DNA, 120 bp, Artificial Sequence
  ENSG00000187398_66 (sequence is synthesized)
ttcacattcattaaataataactacaagttgaataatgttttcagcactggacacacagaaaaatcagacagattcgattttttgtttagatgaagaagaaggaacagaatataaacagc

SEQ ID NO: 684885 - DNA, 120 bp, Artificial Sequence
  ENSG00000187416_0 (sequence is synthesized)
gccgccgccgctgccgccgccgccgccgccgcgatgctcccggctcaggaggctgccaagctgtaccacaccaactatgtgcggaactcgcgggccatcggcgtgctgtgggccatcttc

SEQ ID NO: 684886 - DNA, 120 bp, Artificial Sequence
  ENSG00000187416_1 (sequence is synthesized)
accatctgctttgccatcgtcaacgtggtgtgcttcatccagccctactggataggcgacggcgtggacaccccgcaagccggctatttcgggctcttccactactgcatcggcaacggc

SEQ ID NO: 684887 - DNA, 120 bp, Artificial Sequence
  ENSG00000187416_2 (sequence is synthesized)
ttctcccgggagctgacctgcaggggcagcttcacggacttctccacgctgccctcgggcgccttcaaagccgcctccttctttatcggcctctccatgatgctcatcattgcctgcatc

SEQ ID NO: 684888 - DNA, 120 bp, Artificial Sequence
  ENSG00000187416_3 (sequence is synthesized)
atttgctttaccctcttcttcttctgcaacacggccactgtgtacaagatatgtgcctggatgcagctcacctccgctgcctgccttgtgcttggctgtatgattttccctgatggctgg

SEQ ID NO: 684889 - DNA, 120 bp, Artificial Sequence
  ENSG00000187416_4 (sequence is synthesized)
gactcagatgaagtaaaacggatgtgtggagaaaagacagacaagtacactcttggggcttgctcagtccgctgggcatacatcctggctattattggaattttggatgccctgatcctc

SEQ ID NO: 684890 - DNA, 120 bp, Artificial Sequence
  ENSG00000187416_5 (sequence is synthesized)
tcatttctagcatttgtgcttggtaatcgacaagacagcttgatggcagaggaactgaaggcagaaaacaaagttctgctaagccaatattctctagaatgagcacaaaacaaatcgaat

SEQ ID NO: 684891 - DNA, 120 bp, Artificial Sequence
  ENSG00000187416_6 (sequence is synthesized)
aacagctaaacaaatcgaataacagctaaacgaatcgaataacagcttttgtacatcaacatcaagaaggaatacgcctgagagagatcagagtatatagatgaatatgaacaagaatgg

SEQ ID NO: 684892 - DNA, 120 bp, Artificial Sequence
  ENSG00000187416_7 (sequence is synthesized)
cagagatgggagtgattttctggaaagagatgtgatcatggattaaacaccagctcattggaaactcattggatgagatcagaaaacgttcatgaaaaatcatattcaggaaataaggaa

SEQ ID NO: 684893 - DNA, 120 bp, Artificial Sequence
  ENSG00000187416_8 (sequence is synthesized)
gaggaatataaatgctctagagttaacatgtaaaatatatacgtactgaggtttgtaaactgtcctttttaaatcaaactgaaaacaaaaagctttaacctttcaacagaatttttaaaa

SEQ ID NO: 684894 - DNA, 120 bp, Artificial Sequence
  ENSG00000187416_9 (sequence is synthesized)
aggcagttagttctaaattattcctatctcaatagccaagaggctgatcaagcgtcatttattgaggaagcatcttagaaaatgcctctgaatgttttcataggagccgtgacctttggt

SEQ ID NO: 684895 - DNA, 120 bp, Artificial Sequence
  ENSG00000187416_10 (sequence is synthesized)
tcttcatctctaccattcatttacttcactgtgtaattagttacaaccactcagttattaagagacgtaacgcttcaaactttttaccaagtctgtgttctgtttaatctgtccatacaa

SEQ ID NO: 684896 - DNA, 120 bp, Artificial Sequence
  ENSG00000187416_11 (sequence is synthesized)
gttattactgagaaagtgtttatgccatatactattactccatcaagctgtatattacaggaagtacatctttacatcataggttcccaagcaacatagatttccctatctttcaggaaa

SEQ ID NO: 684897 - DNA, 120 bp, Artificial Sequence
  ENSG00000187416_12 (sequence is synthesized)
cagcatcaaggaactctgaaaaatatagaaaaagttcattttcaccttggaagctcacgtgtaatattataggctactatcaaataaacactttttttctaattctccctagtatatgca

SEQ ID NO: 684898 - DNA, 120 bp, Artificial Sequence
  ENSG00000187416_13 (sequence is synthesized)
taggaatttaatatactttataaataagtatctaaaatgtctcctacttttttcctatttctttgccatacatgttatcagaaatccatgtcttctatttcccttactgatgggcactca

SEQ ID NO: 684899 - DNA, 120 bp, Artificial Sequence
  ENSG00000187446_0 (sequence is synthesized)
agtggaaacactgccctctcccttcttgacccctagcccttccttccctccctccttccctcctgtcgccgtctcttctggcgccgctgctcccggaggagctcccggcacggcgatggg

SEQ ID NO: 684900 - DNA, 120 bp, Artificial Sequence
  ENSG00000187446_1 (sequence is synthesized)
ttctcgggcctccacgttactgcgggacgaagagctcgaggagatcaagaaggagaccggcttttcccacagtcaaatcactcgcctctacagccggttcaccagcctggacaaaggaga

SEQ ID NO: 684901 - DNA, 120 bp, Artificial Sequence
  ENSG00000187446_2 (sequence is synthesized)
gaatgggactctcagccgggaagatttccagaggattccagaacttgccatcaacccactgggggaccggatcatcaatgccttctttccagagggagaggaccaggtaaacttccgtgg

SEQ ID NO: 684902 - DNA, 120 bp, Artificial Sequence
  ENSG00000187446_3 (sequence is synthesized)
attcatgcgaactttggctcatttccgccccattgaggataatgaaaagagcaaagatgtgaatggacccgaaccactcaacagccgaagcaacaaactgcactttgcttttcgactata

SEQ ID NO: 684903 - DNA, 120 bp, Artificial Sequence
  ENSG00000187446_4 (sequence is synthesized)
tgatttggataaagatgaaaagatctcccgtgatgagctgttacaggtgctacgcatgatggtcggagtaaatatctcagatgagcagctgggcagcatcgcagacaggaccattcagga

SEQ ID NO: 684904 - DNA, 120 bp, Artificial Sequence
  ENSG00000187446_5 (sequence is synthesized)
ggctgatcaggatggggacagtgccatatctttcacagaatttgttaaggttttggagaaggtggatgtagaacagaaaatgagcatccgatttcttcactaaaggagaccaaactgttc

SEQ ID NO: 684905 - DNA, 120 bp, Artificial Sequence
  ENSG00000187446_6 (sequence is synthesized)
cttgcggtctagtatttaagaactggaacttgaaagtcctccttctaccaactccacctccaccccctcattccccttctcccaaagtactactgctgttgcatgacaaccccaaatatg

SEQ ID NO: 684906 - DNA, 120 bp, Artificial Sequence
  ENSG00000187446_7 (sequence is synthesized)
ttctgtcaacacaaacctgcctttggtgtataaacagggcattacagaatggtacaccctatatatttctgttcagtatccattcactagttcttcatttataaatatcatcttccccat

SEQ ID NO: 684907 - DNA, 120 bp, Artificial Sequence
  ENSG00000187446_8 (sequence is synthesized)
tctgctgctgaatgccacacatccatccagtctgagaaagtgagagaggcaatcatgccaagaacaagccagcaaagctctttcaccagatgtagactgtagccctgctgccttccctcc

SEQ ID NO: 684908 - DNA, 120 bp, Artificial Sequence
  ENSG00000187446_9 (sequence is synthesized)
agcgagtctgccagcatgcttcttcatcctttttatatgttctttgcttcctacttccctgtcttccaacatactgttcacttactctggcagtctttctgcttttcattaagcctcaaa

SEQ ID NO: 684909 - DNA, 120 bp, Artificial Sequence
  ENSG00000187446_10 (sequence is synthesized)
atctcctctgttctacttggcaccacaagctatgtcctatatatgtatttctgacttggcaggatagttcaggggtctggcagtttttatttaccttcattattaaatgggcctctggga

SEQ ID NO: 684910 - DNA, 120 bp, Artificial Sequence
  ENSG00000187446_11 (sequence is synthesized)
tgttgcctcttcaggagctttttggtaatcaatacttctctcagaagtatgagaccatcctctgcactctgctctgtcatcaaaggctgctgggtggagataccctttttgaaaggtggc

SEQ ID NO: 684911 - DNA, 120 bp, Artificial Sequence
  ENSG00000187446_12 (sequence is synthesized)
cttggtgagaggtatggagccaagtcttctaggttgcttgcccacatcactctatctctggcctctgattctcaactttgtacctgtgtggctcctcttgttagtgcaatgttgactgtt

SEQ ID NO: 684912 - DNA, 120 bp, Artificial Sequence
  ENSG00000187446_13 (sequence is synthesized)
agggactttctcatggcttttatttaataaggaggctgggcaccctataaagcctcatgcattcacacctttgcagcatggtttatgcctcagtgttatgtgcactggaatgttttccac

SEQ ID NO: 684913 - DNA, 120 bp, Artificial Sequence
  ENSG00000187446_14 (sequence is synthesized)
gtttatgcctcagtgttatgtgcactggaatgttttccacttcacatttccaagtagaaatattagtgttacggaagtgcctaatatcccagtccaaatttttttttttttttttttttt

SEQ ID NO: 684914 - DNA, 78 bp, Artificial Sequence
  ENSG00000187446_15 (sequence is synthesized)
gtccaaaatatttaaagattgtttccttagtgtcttgaagttttgcacaaaattcttttttttgagatggagtctcac

SEQ ID NO: 684915 - DNA, 61 bp, Artificial Sequence
  ENSG00000187446_16 (sequence is synthesized)
tacctgggtaatttttgcatttttagtggagagggagtttcaccatgttggccaggttggt

SEQ ID NO: 684916 - DNA, 120 bp, Artificial Sequence
  ENSG00000187446_17 (sequence is synthesized)
tttatgaattttacacttggcaaatgttaatgacggaagccatagtctgctcctaatacatgtccaaagcattgactgttgtgtcattagctgcctggttacattagctccctggcttct

SEQ ID NO: 684917 - DNA, 120 bp, Artificial Sequence
  ENSG00000187446_18 (sequence is synthesized)
tgtttagaccactgctaatcccttaaaaacaagaggtctggcactagtagcacaacctaaggtggcattacagatctttgagcgagccacagcaacttttctgccaagtcagcttagttt

SEQ ID NO: 684918 - DNA, 120 bp, Artificial Sequence
  ENSG00000187446_19 (sequence is synthesized)
agacttcagtgaatcaggctattgctatcctaatgtatgtctctatgagtgtatttagccacacatctgcccttggttgactttctgactcattgcttgcttgcttgtttccttgctttg

SEQ ID NO: 684919 - DNA, 120 bp, Artificial Sequence
  ENSG00000187446_20 (sequence is synthesized)
gaaaactattgaagattgctaaaaaataccactgcaaagtgatggaaaagggtggagaacaggggagtagccaggctggatggctcaaatataaatgaatgaggaattctttatgaagta

SEQ ID NO: 684920 - DNA, 120 bp, Artificial Sequence
  ENSG00000187446_21 (sequence is synthesized)
tcagtcagattttatgattaagtgatgtaatataggaattatgtaaaagggaagaatgtctgatactgatctattagagaggtactttagaggcttcttgattggcataaagttcctaag

SEQ ID NO: 684921 - DNA, 120 bp, Artificial Sequence
  ENSG00000187446_22 (sequence is synthesized)
gttatagattttccccccttttggctgtatagcaaagtgttttaatccacggttgtgccttattgttccattaaaattgtatcttcgatccatcaataaatacttgtggttgaaacaaaa

SEQ ID NO: 684922 - DNA, 90 bp, Artificial Sequence
  ENSG00000187446_23 (sequence is synthesized)
agccgaagcaacaaactgcactttgcttttcgactatatgatttggataaagatgaaaagatctcccgtgatgagctgttacggctggtc

SEQ ID NO: 684923 - DNA, 120 bp, Artificial Sequence
  ENSG00000187446_24 (sequence is synthesized)
ccaaagtgctgggagtacaagcacgagccatcatgcctggccccaactgtccattttaaatatgtacagcttattgtatattatttatacttcaataaagatagttactcttctccccaa

SEQ ID NO: 684924 - DNA, 120 bp, Artificial Sequence
  ENSG00000187446_25 (sequence is synthesized)
attcattcggggctggaactcgaacgctgacgttggctcctgagccgggcgctgcctcgcgcctgattggcgggtcctcggggccgccctccccagcgcaccacccctgggttccctccc

SEQ ID NO: 684925 - DNA, 120 bp, Artificial Sequence
  ENSG00000187446_26 (sequence is synthesized)
ggaaagatgaagagcgcgtgcagtccccgaagggtacaccctagggttcccccccacgcgaagtttctctccgcaatccgtgccacctatcgagtaggattcctagtgttcgattcctgt

SEQ ID NO: 684926 - DNA, 120 bp, Artificial Sequence
  ENSG00000187446_27 (sequence is synthesized)
ggaatgtggcgtaatcaaatctggctccttccacttctgagttggtgcaagaaacacttggcagctattaaagtgctattctttgcagttatttggtataatttgccacagaagtaaatt

SEQ ID NO: 684927 - DNA, 120 bp, Artificial Sequence
  ENSG00000187474_0 (sequence is synthesized)
caaaacactcattttgttttatagcatgacaggctgtctgattccatctttataaccaaagccaattaagatcttaaaaccaaacatataacttcatctttttacaagtacttagagcct

SEQ ID NO: 684928 - DNA, 120 bp, Artificial Sequence
  ENSG00000187474_1 (sequence is synthesized)
gagttgctccacaggaatccaggaactgggcacaggaaaaggatctaagctggtggtgtgggaagatggaaaccaacttctccattcctctgaatgaaactgaggaggtgctccctgagc

SEQ ID NO: 684929 - DNA, 120 bp, Artificial Sequence
  ENSG00000187474_2 (sequence is synthesized)
ctgctggccacaccgttctgtggatcttctcattgctagtccacggagtcacctttgtcttcggggtcctgggcaatgggcttgtgatctgggtggctggattccggatgacacgcacag

SEQ ID NO: 684930 - DNA, 120 bp, Artificial Sequence
  ENSG00000187474_3 (sequence is synthesized)
tcaacaccatctgttacctgaacctggccctagctgacttctctttcagtgccatcctaccattccgaatggtctcagtcgccatgagagaaaaatggccttttggctcattcctatgta

SEQ ID NO: 684931 - DNA, 120 bp, Artificial Sequence
  ENSG00000187474_4 (sequence is synthesized)
agttagttcatgttatgatagacatcaacctgtttgtcagtgtctacctgatcaccatcattgctctggaccgctgtatttgtgtcctgcatccagcctgggcccagaaccatcgcacca

SEQ ID NO: 684932 - DNA, 120 bp, Artificial Sequence
  ENSG00000187474_5 (sequence is synthesized)
tgagtctggccaagagggtgatgacgggactctggattttcaccatagtccttaccttaccaaatttcatcttctggactacaataagtactacgaatggggacacatactgtattttca

SEQ ID NO: 684933 - DNA, 120 bp, Artificial Sequence
  ENSG00000187474_6 (sequence is synthesized)
actttgcattctggggtgacactgctgtagagaggttgaacgtgttcattaccatggccaaggtctttctgatcctccacttcattattggcttcagcgtgcctatgtccatcatcacag

SEQ ID NO: 684934 - DNA, 120 bp, Artificial Sequence
  ENSG00000187474_7 (sequence is synthesized)
tctgctatgggatcatcgctgccaaaattcacagaaaccacatgattaaatccagccgtcccttacgtgtcttcgctgctgtggtggcttctttcttcatctgttggttcccttatgaac

SEQ ID NO: 684935 - DNA, 120 bp, Artificial Sequence
  ENSG00000187474_8 (sequence is synthesized)
taattggcattctaatggcagtctggctcaaagagatgttgttaaatggcaaatacaaaatcattcttgtcctgattaacccaacaagctccttggccttttttaacagctgcctcaacc

SEQ ID NO: 684936 - DNA, 120 bp, Artificial Sequence
  ENSG00000187474_9 (sequence is synthesized)
caattctctacgtctttatgggtcgtaacttccaagaaagactgattcgctctttgcccactagtttggagagggccctgactgaggtccctgactcagcccagaccagcaacacagaca

SEQ ID NO: 684937 - DNA, 120 bp, Artificial Sequence
  ENSG00000187474_10 (sequence is synthesized)
tctgacagtgtttttcttcctctttcataccaccaccaccacaatcatcaacataaaggaagtctgtaccaaatctgtagggggtttttcccacaaccaagcaatagacaccagctgggt

SEQ ID NO: 684938 - DNA, 120 bp, Artificial Sequence
  ENSG00000187474_11 (sequence is synthesized)
gtcctacaattaaattccaacactatctacctggagctactgtcagatcccacaggtttaagggctcattccccaagtctgctcctccagttgagacacaagtcacaaatccaggcttct

SEQ ID NO: 684939 - DNA, 120 bp, Artificial Sequence
  ENSG00000187474_12 (sequence is synthesized)
gaaacttcggaccaaccagcttcaatcagggttcccactaccccctctttgggggtagagtggctcatggaactcagagaaacatttatttcggcttgctggtttattataaaagcaagg

SEQ ID NO: 684940 - DNA, 120 bp, Artificial Sequence
  ENSG00000187474_13 (sequence is synthesized)
tttattataaaagatactacaaaggatacagatgaagaggcacatagggcaaggtacggggttccacgccctccctgagtgcatcaccctctgggaacctccgtgtgttcacgtctcatg

SEQ ID NO: 684941 - DNA, 120 bp, Artificial Sequence
  ENSG00000187474_14 (sequence is synthesized)
aagctctccaaatccagtcctcttgggtttttatggaagcttcatgatgtcagcattctttcctccagtgtataggatgggatcctctctggggagggtcttaagacccacaattagaaa

SEQ ID NO: 684942 - DNA, 120 bp, Artificial Sequence
  ENSG00000187474_15 (sequence is synthesized)
ggcaagggaagattagagtcctgctttggggtagatgaaaggaaaggagagagattctgtttcctgaggcttaatacacccaacattataacaaaggactgtagcaagggctatgggagt

SEQ ID NO: 684943 - DNA, 120 bp, Artificial Sequence
  ENSG00000187474_16 (sequence is synthesized)
tctgaagcagaaaccatgggctaaaaccaacatacatcttaataccagataccctaatcccagtcctaacttcatttaaccttggtcacattgagtcattccaggatgagtggctcaagt

SEQ ID NO: 684944 - DNA, 120 bp, Artificial Sequence
  ENSG00000187474_17 (sequence is synthesized)
atttcctcagggaaaatacttctgtgccccctgatttgagggtaagaagtagataatgaggccactgtgggtgttattttttcatgtctggacctcagcctatatcctgagactaagtgg

SEQ ID NO: 684945 - DNA, 120 bp, Artificial Sequence
  ENSG00000187474_18 (sequence is synthesized)
aagtgggaaaagagtacaagagaagagacaaagtggggatatttgtaaggcttagatgagatagtgtttttttagaaaaaaactttatcttaccattaagtaaaatgtttgccataggct

SEQ ID NO: 684946 - DNA, 120 bp, Artificial Sequence
  ENSG00000187474_19 (sequence is synthesized)
ttctggggctttctctttttaaagtcagactgttgaaggtttcttctattcttatttgttaagagttttcttttattgtttaaatcatgaatgaatgttgaattttattaaatgcagttt

SEQ ID NO: 684947 - DNA, 120 bp, Artificial Sequence
  ENSG00000187474_20 (sequence is synthesized)
ctgtaaatattaacgtgatcatattatttttattctttcatttacataattataaattagattaagttttcaatgttaagctacccttgcatttatgaaataaaccacgcttgctcatga

SEQ ID NO: 684948 - DNA, 120 bp, Artificial Sequence
  ENSG00000187474_21 (sequence is synthesized)
atgaggtgttgtctgattctagaattatgaataaagccaataaaaactttacactaaattagttgtaattttgtcttttgacaaatccttggagcttgtgttgctcgacaggaagccagg

SEQ ID NO: 684949 - DNA, 120 bp, Artificial Sequence
  ENSG00000187475_0 (sequence is synthesized)
catgcttttcgctggttattacatcttgcgtttctctgttgttatgtctgaaaccgtgcctgcagcttctgccagtgctggtgtagccgctatggagaaacttccaaccaagaagcgagg

SEQ ID NO: 684950 - DNA, 120 bp, Artificial Sequence
  ENSG00000187475_1 (sequence is synthesized)
gaggaagccggctggcttgataagtgcaagtcgcaaagtgccgaacctctctgtgtccaagttgatcaccgaggccctttcagtgtcacaggaacgagtaggtatgtctttggttgcgct

SEQ ID NO: 684951 - DNA, 120 bp, Artificial Sequence
  ENSG00000187475_2 (sequence is synthesized)
tccggttcctttaagcttagtaagaaggtgattcctaaatctaccagaagcaaggctaaaaagtcagtttctgccaagaccaagaagctggttttatccagggactccaagtcaccaaag

SEQ ID NO: 684952 - DNA, 120 bp, Artificial Sequence
  ENSG00000187475_3 (sequence is synthesized)
actgctaaaaccaataagagagccaagaagccgagagcgacaactcctaaaactgttaggagcgggagaaaggctaaaggagccaagggtaagcaacagcagaagagcccagtgaaggca

SEQ ID NO: 684953 - DNA, 120 bp, Artificial Sequence
  ENSG00000187475_4 (sequence is synthesized)
agggcttcgaagtcaaaattgacccaacatcatgaagttaatgttagaaaggccacatctaagaagtaaagagctttccgggaggccaatttggaaagaacccaaaggctcttttaagag

SEQ ID NO: 684954 - DNA, 80 bp, Artificial Sequence
  ENSG00000187479_0 (sequence is synthesized)
agacggcgacagcagcggcggcgagcgcctcggagcgcggcggaacagcgccccccgagccccgtgccccccgacgggtc

SEQ ID NO: 684955 - DNA, 120 bp, Artificial Sequence
  ENSG00000187479_1 (sequence is synthesized)
gcccggccccgcagacgccggaggcgccatggccgccaagcccggcgagctgatgggcatctgctccagttaccaggcggtgatgccgcacttcgtgtgcctggccgacgagttcccgca

SEQ ID NO: 684956 - DNA, 120 bp, Artificial Sequence
  ENSG00000187479_2 (sequence is synthesized)
gcccgtgcggcccgccaagctgcccaagggccggggccggctgcggcggccgcgccagtctcgcttcaagacgcagccggtgaccttcgacgagatccaggaggtggaggaggagggggt

SEQ ID NO: 684957 - DNA, 120 bp, Artificial Sequence
  ENSG00000187479_3 (sequence is synthesized)
gtcccccatggaggaggagaaggccaagaagtcgttcctgcagagcctggagtgcctgcgccgcagcacgcagagcctgtcgctgcagcgggagcagctcagcagctgcaaactgaggaa

SEQ ID NO: 684958 - DNA, 80 bp, Artificial Sequence
  ENSG00000187479_4 (sequence is synthesized)
gggaccggcgtgtgaaccccgagagtgcccgcgccctgctcccgggggacccgcaaggacccgggaccgccgctcctcgc

SEQ ID NO: 684959 - DNA, 120 bp, Artificial Sequence
  ENSG00000187479_5 (sequence is synthesized)
gcgctcggactcccgccccgctgcgaaccggtcggtgcgcccctcgccgcgctcgccctggcccgggagcgccgggagcggggccgctttcctcgtccttgtaaatgtttattttttaac

SEQ ID NO: 684960 - DNA, 120 bp, Artificial Sequence
  ENSG00000187479_6 (sequence is synthesized)
tcttcccagtgcgaactctgctgtgagtgtgtgcggggaggcgcgcccgcgctgagtcggcggcgggtagccactccatgcccttgtccgatggtttgcaactccgattttgcacaccgc

SEQ ID NO: 684961 - DNA, 120 bp, Artificial Sequence
  ENSG00000187479_7 (sequence is synthesized)
tccaccgtgccccccagcgcacacccattcacactcacgccaacactctcgctgaacacttttataattgttaggcgtggccgttgggactttgggcgcagcgcggctgctactgcgtct

SEQ ID NO: 684962 - DNA, 120 bp, Artificial Sequence
  ENSG00000187479_8 (sequence is synthesized)
ggaggattgatatttatttttgcattgcgatggctgaaggcatttatttaacgatctttttacctggatatgtctgtgaggctcctgaaaggagacaaataaagtcaatatatttgcaca

SEQ ID NO: 684963 - DNA, 120 bp, Artificial Sequence
  ENSG00000187479_9 (sequence is synthesized)
atgggaaacaagcagccccagaaggtcacggtgcctactgggacagccctccaaggagtggtattgatcgtctccacgctgcaccagccaggtggctggatatgtggcaaggatccctgc

SEQ ID NO: 684964 - DNA, 120 bp, Artificial Sequence
  ENSG00000187479_10 (sequence is synthesized)
tgcagcttgaggccactttcaaactctgtacagaacgccttggcctgcaagagtaaacaagattaccaggctggaattctgttcaagaccagggcttttatatccagagattgtgggtca

SEQ ID NO: 684965 - DNA, 120 bp, Artificial Sequence
  ENSG00000187479_11 (sequence is synthesized)
gatgcggcagaagactctgcttccaagggagagacttatactttaaccttggagcataagggggcgggggagggggacctgcggccccgcggccaacccggttggtgcagacttggggat

SEQ ID NO: 684966 - DNA, 120 bp, Artificial Sequence
  ENSG00000187479_12 (sequence is synthesized)
ggatcccagaagggacagtgcccgcccagtcgcggcgattgagggtccctgtccgggcgcagctcgggccagccgcgtgctccggggccgcggcttctcccggaacccccgcgggcgggg

SEQ ID NO: 684967 - DNA, 120 bp, Artificial Sequence
  ENSG00000187479_13 (sequence is synthesized)
ccttccggagccggttggcggggggcgggcggcgccggggaaggggccgttactttcccagagcggcggggcgacgtcaggcggaagggcgcggggcgcgcacgctttaaatggcattcg

SEQ ID NO: 684968 - DNA, 63 bp, Artificial Sequence
  ENSG00000187486_0 (sequence is synthesized)
ggcagggttgggggctccctaggcgccaggcaggtgggctcaagggtgaggctgttttttttg

SEQ ID NO: 684969 - DNA, 78 bp, Artificial Sequence
  ENSG00000187486_1 (sequence is synthesized)
ggtctcgaactcctgacctagtgatctgccctcctcagcctcccaacctggtattaagaagtgaagtgggacccaggt

SEQ ID NO: 684970 - DNA, 120 bp, Artificial Sequence
  ENSG00000187486_2 (sequence is synthesized)
tgaggctggtattaagaagtgaagtgggacccaggtggaggtaaggaagagtctggtggggagttatctcagaagtgaggccagcacaggctgagtgcagccccagggtgagaaggtgcc

SEQ ID NO: 684971 - DNA, 120 bp, Artificial Sequence
  ENSG00000187486_3 (sequence is synthesized)
caccgagaggactctgcagtgaggccctaggccacgtccgaggggtgcctccgatgggggaagcccctccctgggggtcaccggagccatgctgtcccgcaagggcatcatccccgagga

SEQ ID NO: 684972 - DNA, 120 bp, Artificial Sequence
  ENSG00000187486_4 (sequence is synthesized)
atacgtgctgacacgcctggcagaggaccctgccaagcccaggtaccgtgcccgccagcggagggcccgctttgtgtccaagaaaggcaactgcaacgtggcccacaagaacatccggga

SEQ ID NO: 684973 - DNA, 120 bp, Artificial Sequence
  ENSG00000187486_5 (sequence is synthesized)
gcagggccgcttcctgcaggacgtgttcaccacgctggtggacctcaagtggccacacacattgctcatcttcaccatgtccttcctgtgcagctggctgctcttcgccatggcctggtg

SEQ ID NO: 684974 - DNA, 120 bp, Artificial Sequence
  ENSG00000187486_6 (sequence is synthesized)
gctcatcgccttcgcccacggtgacctggcccccagcgagggcactgctgagccctgtgtcaccagcatccactccttctcgtctgccttccttttctccattgaggtccaagtgactat

SEQ ID NO: 684975 - DNA, 120 bp, Artificial Sequence
  ENSG00000187486_7 (sequence is synthesized)
tggctttggggggcgcatggtgactgaggagtgcccactggccatcctgatcctcatcgtgcagaacatcgtggggctcatgatcaacgccatcatgcttggctgcatcttcatgaagac

SEQ ID NO: 684976 - DNA, 120 bp, Artificial Sequence
  ENSG00000187486_8 (sequence is synthesized)
tgcccaagcccaccgcagggctgagaccctcatcttcagcaagcatgcggtgatcgccctgcgccacggccgcctctgcttcatgctacgtgtgggtgacctccgcaagagcatgatcat

SEQ ID NO: 684977 - DNA, 120 bp, Artificial Sequence
  ENSG00000187486_9 (sequence is synthesized)
cagcgccaccatccacatgcaggtggtacgcaagaccaccagccccgagggcgaggtggtgcccctccaccaggtggacatccccatggagaacggcgtgggtggcaacagcatcttcct

SEQ ID NO: 684978 - DNA, 120 bp, Artificial Sequence
  ENSG00000187486_10 (sequence is synthesized)
gcccactctacgacctggcacccagcgacctgcaccaccaccaggacctcgagatcatcgtcatcctggaaggcgtggtggaaaccacgggcatcaccacccaggcccgcacctcctacc

SEQ ID NO: 684979 - DNA, 120 bp, Artificial Sequence
  ENSG00000187486_11 (sequence is synthesized)
tggccgatgagatcctgtggggccagcgctttgtgcccattgtagctgaggaggacggacgttactctgtggactactccaagtttggcaacaccgtcaaagtgcccacaccactctgca

SEQ ID NO: 684980 - DNA, 120 bp, Artificial Sequence
  ENSG00000187486_12 (sequence is synthesized)
cggcccgccagcttgatgaggaccacagcctactggaagctctgaccctcgcctcagcccgcgggcccctgcgcaagcgcagcgtgcccatggccaaggccaagcccaagttcagcatct

SEQ ID NO: 684981 - DNA, 120 bp, Artificial Sequence
  ENSG00000187486_13 (sequence is synthesized)
ctccagattccctgtcctgagccatggtctctcgggccccccacacgcgtgtgtacacacggaccatgtggtatgtagcccggccagggcctggtgtgaggctgggccagcctcagctca

SEQ ID NO: 684982 - DNA, 120 bp, Artificial Sequence
  ENSG00000187486_14 (sequence is synthesized)
gcctccccctgctgctcatccagggtgttacaaggcacttgtcactatgctatttctggcctcagcaggaacctgtactgggttatttttgtccctgctcctcccaacccaattcaggac

SEQ ID NO: 684983 - DNA, 120 bp, Artificial Sequence
  ENSG00000187486_15 (sequence is synthesized)
tggctcacccctctcccccgcccaaggctgcagaggctgtgggaggtactgggccctagagctgtgcgtccagccagtcctgggtccccacgattgaccagccacactctgggccggtgg

SEQ ID NO: 684984 - DNA, 120 bp, Artificial Sequence
  ENSG00000187486_16 (sequence is synthesized)
ctggggaagaacaatccccgagggctgctgctttgcgtctgtggctccaagaagtgcctgtggtcaggccccagctctacttggtccctgaaaaagcacctggctaagggctgggcctgg

SEQ ID NO: 684985 - DNA, 120 bp, Artificial Sequence
  ENSG00000187486_17 (sequence is synthesized)
ccagcagggagggcagttgatgagagagggtgttcccgctggagggttggtgctgtggagcctacaccggcagggacagcctggggctgacagggctcccctccgagggccagtttcagg

SEQ ID NO: 684986 - DNA, 120 bp, Artificial Sequence
  ENSG00000187486_18 (sequence is synthesized)
tctggaaggggaggaagcaggggaaggtgacctgaggaggctcggctttgtagagccccgctcaggcacagggaggaggagatgccagggctcctgccttttgccacatcggcctcgtgc

SEQ ID NO: 684987 - DNA, 120 bp, Artificial Sequence
  ENSG00000187486_19 (sequence is synthesized)
agtgagggctctgtgggctggggctgctgcccctgcctacctcctgcctgtccccagaggctgaggagagggggtactgtgcccaccacacatgattaggcctcagacccaactctggtc

SEQ ID NO: 684988 - DNA, 120 bp, Artificial Sequence
  ENSG00000187486_20 (sequence is synthesized)
ctggctccacaacagtggctgccactcactttgtccagaaggtggcttgggggtggatatctttgggttgctggaaaaggtgtgggaaggttcaggatggtgggagggactgaggtccct

SEQ ID NO: 684989 - DNA, 120 bp, Artificial Sequence
  ENSG00000187486_21 (sequence is synthesized)
gaggtgaagaggcccttggtcctgacgggtttgacccgtgcctggacccttggagcagtgttgtgtgaacttgcctagaactctgccttctccgttgtcaataaagcctccccctcatga

SEQ ID NO: 684990 - DNA, 120 bp, Artificial Sequence
  ENSG00000187486_22 (sequence is synthesized)
tcggagtcagccccgccgggtcgcgcgcaggtccggggagccgcggttgagccgggtggggtggtgactccagagaacgcaggatcccaaggagacagagaggacgagagctggaggggg

SEQ ID NO: 684991 - DNA, 120 bp, Artificial Sequence
  ENSG00000187486_23 (sequence is synthesized)
atccggaaagcggcgggggcgctccgggaggggtggagtaggacatagggggcgcacctggaggagagacggggcgggggtggccaggacctgagctggagcctgggagcccgaaggcca

SEQ ID NO: 684992 - DNA, 120 bp, Artificial Sequence
  ENSG00000187486_24 (sequence is synthesized)
gtgcgcccccctcccgccgtcctagacccctgcctagcccaggtcggtctccgcggacccacggacggacagacagacgggaggacggccagccgcgagcgcccgggcggcgggaggggg

SEQ ID NO: 684993 - DNA, 120 bp, Artificial Sequence
  ENSG00000187492_0 (sequence is synthesized)
gagtcagacaaacagcctagctttctgaagcctcctctgctgtctgtgtcttcaggtcatcatggtgctgctcaggctcctcgtgttcctctttgctccggtggtctctgacctctgcag

SEQ ID NO: 684994 - DNA, 120 bp, Artificial Sequence
  ENSG00000187492_1 (sequence is synthesized)
cctgccctgctttataaatgtctctgagagccagggccctggcacagtccttcagtttttatccttcaactgctcctcctacacgcccacacccaccctggagttgctcaatgtccagcc

SEQ ID NO: 684995 - DNA, 120 bp, Artificial Sequence
  ENSG00000187492_2 (sequence is synthesized)
acccaccaccttcttcaacccacccagcttggccaggtggcaagggacctatgtgggcaagttgaccttgagcagctctgctcagttggatgccctgatggtgaaccactacaaggtgca

SEQ ID NO: 684996 - DNA, 120 bp, Artificial Sequence
  ENSG00000187492_3 (sequence is synthesized)
gctgaagttcacatgtggcaaccatgtgatggagggctcactctctgtggatgtgcagcgggaccttagccatatccagtgtgctggtcaatttgccagcccagctggggaaatgattca

SEQ ID NO: 684997 - DNA, 120 bp, Artificial Sequence
  ENSG00000187492_4 (sequence is synthesized)
ggtgccagagacagtcacacctggggctcggctgtacactctgctcctcccaggcctagaactccacggagcgcagatgagcattatcagtgcccaggacctgccacacttccctggacc

SEQ ID NO: 684998 - DNA, 120 bp, Artificial Sequence
  ENSG00000187492_5 (sequence is synthesized)
tttctccatcaatgagcaaggttggctgcaggcaccatcccagggcctcctaggccaggctcaaaaggtcttccagctgcaaatctcagtgtcctttggacaaaggcaaagctgccaagg

SEQ ID NO: 684999 - DNA, 120 bp, Artificial Sequence
  ENSG00000187492_6 (sequence is synthesized)
gatggtgatagtgaaggttttgcctgttccctccagccaggtctccttcctcgagcaggctcagaatatcaccatccctgagaatctggcccccggtagtgaggtggttcaggtccaggc

SEQ ID NO: 685000 - DNA, 120 bp, Artificial Sequence
  ENSG00000187492_7 (sequence is synthesized)
ccggggtgtcgacctgcgctatgaaatcctgtctccggtgcccagcccactcttctccattggtcgtgcagacggtgtggtccggaccaccacgcccctagagttagctcgcacctcagg

SEQ ID NO: 685001 - DNA, 120 bp, Artificial Sequence
  ENSG00000187492_8 (sequence is synthesized)
caccgcggtctccaggctgcaggtgaaggcctttgagcagggccagctgtgggccagtgccaagctcaatctcaccatgaatgtgcagctggtcaacctctggcctccacgctgcctccc

SEQ ID NO: 685002 - DNA, 120 bp, Artificial Sequence
  ENSG00000187492_9 (sequence is synthesized)
agcgcttctggtgtcccaaatcccggagactgcacccgtgggcaccgtgctgaatactctcacttgcgaagatccggactctgttggtgccaccctggactacaagctgtggttccgcag

SEQ ID NO: 685003 - DNA, 120 bp, Artificial Sequence
  ENSG00000187492_10 (sequence is synthesized)
accctgccagcctctgcctttatgacagagtccttgaggtgaatgccacactggactgtgacactcctggagcctgcttccagcatgcagcctccatcctggtgctcgatggtggccagc

SEQ ID NO: 685004 - DNA, 120 bp, Artificial Sequence
  ENSG00000187492_11 (sequence is synthesized)
cccagatgaccactgaggtgccggtactggtgatggtgacacccatcaacgagttctccccagcctgtgcccctcgcacgttccgggttcaggaggatgcggcgccccacactctactgg

SEQ ID NO: 685005 - DNA, 120 bp, Artificial Sequence
  ENSG00000187492_12 (sequence is synthesized)
gctccgtggtgggcacggatatggattaccctcatgacaacattgagtactacacctctggtggtcctaccacctttgctgtggaccgtctcagcggggaagttcacctcctgggacctt

SEQ ID NO: 685006 - DNA, 120 bp, Artificial Sequence
  ENSG00000187492_13 (sequence is synthesized)
tggactatgagcagcagaggctgtacaggctcactgtccttgtgattgaccatggccaagaccagaaccccaaccatcacctctcaggctcctgtaccattaccatcgaggttgaggatg

SEQ ID NO: 685007 - DNA, 120 bp, Artificial Sequence
  ENSG00000187492_14 (sequence is synthesized)
tgaatgaccatgcccccgagtgtgagcccccatttcaggaactcaccatctatgctcctctgggccgtagcgtggaggtgaccaagatgtcatgccagatccctcaggagccacagcgcc

SEQ ID NO: 685008 - DNA, 120 bp, Artificial Sequence
  ENSG00000187492_15 (sequence is synthesized)
tgatctactcctatagcatcgtgggagggaatagccagaaccgattcatcctgcaaggggccatcctggtgcacagtgaccttgtgttggggccgttctggccagagcagccccgtacct

SEQ ID NO: 685009 - DNA, 120 bp, Artificial Sequence
  ENSG00000187492_16 (sequence is synthesized)
atgagctactgatctgtgtggccgatgcaggcccctccaccccccacctcagcaccacagccaccattattgtgcatctagttccccggagggccagcacagtggccaccagcacccaca

SEQ ID NO: 685010 - DNA, 120 bp, Artificial Sequence
  ENSG00000187492_17 (sequence is synthesized)
gaaccacagtgccctcaacgatgacacccatgctcgtgacagacacagaggctttctggcagccacagccctggtttgtggtggtgttgacagcaactggtgctcttctcctcttggccc

SEQ ID NO: 685011 - DNA, 120 bp, Artificial Sequence
  ENSG00000187492_18 (sequence is synthesized)
taggctggcttcttggcaggctcctccaggggttggcccagctgctgcaagcacccagcaaaccagcccaggctttgctgctaaacagcatccagggaactgagggatccatcgagggtt

SEQ ID NO: 685012 - DNA, 120 bp, Artificial Sequence
  ENSG00000187492_19 (sequence is synthesized)
tcctggaggcaccgaagatggagatgtcccaggcacccagcagtgtcatgagtctgcattttgatggcagagcacaggactcccgtaccggaagagactacctgtttaacacacacacag

SEQ ID NO: 685013 - DNA, 120 bp, Artificial Sequence
  ENSG00000187492_20 (sequence is synthesized)
gagcccggcgctggctctgaggccaagtagctgtcttactatgtgtggaatttctttttcacaccatcatgggctgtattttcaagttgattcataataaacaaaattacaaaaagaaaa

SEQ ID NO: 685014 - DNA, 120 bp, Artificial Sequence
  ENSG00000187492_21 (sequence is synthesized)
gcgcaggtaagcccagaacatgggacggtgggtgacaggatgggggtggggggatggagagaataaattaacccccacctggccaggcacagcctgaagaggaaccttgcagcagaggca

SEQ ID NO: 685015 - DNA, 120 bp, Artificial Sequence
  ENSG00000187492_22 (sequence is synthesized)
tagatgagcctctacatgatgtatgttcttggagagagctgctgagggctgctcactccccagtgaccatggctgttcccacagggacatctcaggggctgagttctttttttttttttt

SEQ ID NO: 685016 - DNA, 72 bp, Artificial Sequence
  ENSG00000187492_23 (sequence is synthesized)
ggggctgagttctttcaagatctgctatgtgttctcagttctttatgacaattctgtatcatttctgtaatc

SEQ ID NO: 685017 - DNA, 120 bp, Artificial Sequence
  ENSG00000187498_0 (sequence is synthesized)
aggtctccgcttggagccgccgcacccgggacggtgcgtagcgctggaagtccggccttccgagagctagctgtccgccgcggcccccgcacgccgggcagccgtccctcgccgcctcgg

SEQ ID NO: 685018 - DNA, 120 bp, Artificial Sequence
  ENSG00000187498_1 (sequence is synthesized)
gcgcgccaccatggggccccggctcagcgtctggctgctgctgctgcccgccgcccttctgctccacgaggagcacagccgggccgctgcgaagggtggctgtgctggctctggctgtgg

SEQ ID NO: 685019 - DNA, 120 bp, Artificial Sequence
  ENSG00000187498_2 (sequence is synthesized)
caaatgtgactgccatggagtgaagggacaaaagggtgaaagaggcctcccggggttacaaggtgtcattgggtttcctggaatgcaaggacctgaggggccacagggaccaccaggaca

SEQ ID NO: 685020 - DNA, 120 bp, Artificial Sequence
  ENSG00000187498_3 (sequence is synthesized)
aaagggtgatactggagaaccaggactacctggaacaaaagggacaagaggacctccgggagcatctggctaccctggaaacccaggacttcccggaattcctggccaagacggcccgcc

SEQ ID NO: 685021 - DNA, 120 bp, Artificial Sequence
  ENSG00000187498_4 (sequence is synthesized)
aggccccccaggtattccaggatgcaatggcacaaagggggagagagggccgctcgggcctcctggcttgcctggtttcgctggaaatcccggaccaccaggcttaccagggatgaaggg

SEQ ID NO: 685022 - DNA, 120 bp, Artificial Sequence
  ENSG00000187498_5 (sequence is synthesized)
tgatccaggtgagatacttggccatgtgcccgggatgctgttgaaaggtgaaagaggatttcccggaatcccagggactccaggcccaccaggactgccagggcttcaaggtcctgttgg

SEQ ID NO: 685023 - DNA, 120 bp, Artificial Sequence
  ENSG00000187498_6 (sequence is synthesized)
gcctccaggatttaccggaccaccaggtcccccaggccctcccggccctccaggtgaaaagggacaaatgggcttaagttttcaaggaccaaaaggtgacaagggtgaccaaggggtcag

SEQ ID NO: 685024 - DNA, 120 bp, Artificial Sequence
  ENSG00000187498_7 (sequence is synthesized)
tgggcctccaggagtaccaggacaagctcaagttcaagaaaaaggagacttcgccaccaagggagaaaagggccaaaaaggtgaacctggatttcaggggatgccaggggtcggagagaa

SEQ ID NO: 685025 - DNA, 120 bp, Artificial Sequence
  ENSG00000187498_8 (sequence is synthesized)
aggtgaacccggaaaaccaggacccagaggcaaacccggaaaagatggtgacaaaggggaaaaagggagtcccggttttcctggtgaacccgggtacccaggactcataggccgccaggg

SEQ ID NO: 685026 - DNA, 120 bp, Artificial Sequence
  ENSG00000187498_9 (sequence is synthesized)
cccgcagggagaaaagggtgaagcaggtcctcctggcccacctggaattgttataggcacaggacctttgggagaaaaaggagagaggggctaccctggaactccggggccaagaggaga

SEQ ID NO: 685027 - DNA, 120 bp, Artificial Sequence
  ENSG00000187498_10 (sequence is synthesized)
gccaggcccaaaaggtttcccaggactaccaggccaacccggacctccaggcctccctgtacctgggcaggctggtgcccctggcttccctggtgaaagaggagaaaaaggtgaccgagg

SEQ ID NO: 685028 - DNA, 120 bp, Artificial Sequence
  ENSG00000187498_11 (sequence is synthesized)
atttcctggtacatctctgccaggaccaagtggaagagatgggctcccgggtcctcctggttcccctgggccccctgggcagcctggctacacaaatggaattgtggaatgtcagcccgg

SEQ ID NO: 685029 - DNA, 120 bp, Artificial Sequence
  ENSG00000187498_12 (sequence is synthesized)
acctccaggtgaccagggtcctcctggaattccagggcagccaggatttataggcgaaattggagagaaaggtcaaaaaggagagagttgcctcatctgtgatatagacggatatcgggg

SEQ ID NO: 685030 - DNA, 120 bp, Artificial Sequence
  ENSG00000187498_13 (sequence is synthesized)
gcctcccgggccacagggacccccgggagaaataggtttcccagggcagccaggggccaagggcgacagaggtttgcctggcagagatggtgttgcaggagtgccaggccctcaaggtac

SEQ ID NO: 685031 - DNA, 120 bp, Artificial Sequence
  ENSG00000187498_14 (sequence is synthesized)
accagggctgataggccagccaggagccaagggggagcctggtgagttttatttcgacttgcggctcaaaggtgacaaaggagacccaggctttccaggacagcccggcatgccagggag

SEQ ID NO: 685032 - DNA, 120 bp, Artificial Sequence
  ENSG00000187498_15 (sequence is synthesized)
agcgggttctcctggaagagatggccatccgggtcttcctggccccaagggctcgccgggttctgtaggattgaaaggagagcgtggcccccctggaggagttggattcccaggcagtcg

SEQ ID NO: 685033 - DNA, 120 bp, Artificial Sequence
  ENSG00000187498_16 (sequence is synthesized)
tggtgacaccggcccccctgggcctccaggatatggtcctgctggtcccattggtgacaaaggacaagcaggctttcctggaggccctggatccccaggcctgccaggtccaaagggtga

SEQ ID NO: 685034 - DNA, 120 bp, Artificial Sequence
  ENSG00000187498_17 (sequence is synthesized)
accaggaaaaattgttcctttaccaggcccccctggagcagaaggactgccggggtccccaggcttcccaggtccccaaggagaccgaggctttcccggaaccccaggaaggccaggcct

SEQ ID NO: 685035 - DNA, 120 bp, Artificial Sequence
  ENSG00000187498_18 (sequence is synthesized)
gccaggagagaagggcgctgtgggccagccaggcattggatttccagggccccccggccccaaaggtgttgacggcttacctggagacatggggccaccggggactccaggtcgcccggg

SEQ ID NO: 685036 - DNA, 120 bp, Artificial Sequence
  ENSG00000187498_19 (sequence is synthesized)
atttaatggcttacctgggaacccaggtgtgcagggccagaagggagagcctggagttggtctaccgggactcaaaggtttgccaggtcttcccggcattcctggcacacccggggagaa

SEQ ID NO: 685037 - DNA, 120 bp, Artificial Sequence
  ENSG00000187498_20 (sequence is synthesized)
ggggagcattggggtaccaggcgttcctggagaacatggagcgatcggaccccctgggcttcaggggatcagaggtgaaccgggacctcctggattgccaggctccgtggggtctccagg

SEQ ID NO: 685038 - DNA, 120 bp, Artificial Sequence
  ENSG00000187498_21 (sequence is synthesized)
agttccaggaataggcccccctggagctaggggtccccctggaggacagggaccaccggggttgtcaggccctcctggaataaaaggagagaagggtttccccggattccctggactgga

SEQ ID NO: 685039 - DNA, 120 bp, Artificial Sequence
  ENSG00000187498_22 (sequence is synthesized)
catgccgggccctaaaggagataaaggggctcaaggactccctggcataacgggacagtcggggctccctggccttcctggacagcagggggctcctgggattcctgggtttccaggttc

SEQ ID NO: 685040 - DNA, 120 bp, Artificial Sequence
  ENSG00000187498_23 (sequence is synthesized)
caagggagaaatgggcgtcatggggacccccgggcagccgggctcaccaggaccagtgggtgctcctggattaccgggtgaaaaaggggaccatggctttccgggctcctcaggacccag

SEQ ID NO: 685041 - DNA, 120 bp, Artificial Sequence
  ENSG00000187498_24 (sequence is synthesized)
gggagaccctggcttgaaaggtgataagggggatgtcggtctccctggcaagcctggctccatggataaggtggacatgggcagcatgaagggccagaaaggagaccaaggagagaaagg

SEQ ID NO: 685042 - DNA, 120 bp, Artificial Sequence
  ENSG00000187498_25 (sequence is synthesized)
acaaattggaccaattggtgagaagggatcccgaggagaccctgggaccccaggagtgcctggaaaggacgggcaggcaggacagcctgggcagccaggacctaaaggtgatccaggtat

SEQ ID NO: 685043 - DNA, 120 bp, Artificial Sequence
  ENSG00000187498_26 (sequence is synthesized)
aagtggaaccccaggtgctccaggacttccgggaccaaaaggatctgttggtggaatgggcttgccaggaacacctggagagaaaggtgtgcctggcatccctggcccacaaggttcacc

SEQ ID NO: 685044 - DNA, 120 bp, Artificial Sequence
  ENSG00000187498_27 (sequence is synthesized)
aggcatcccagggctgcgaggtgaaaagggagatcaagggatagcgggtttcccaggaagccctggagagaagggagaaaaaggaagcattgggatcccaggaatgccagggtccccagg

SEQ ID NO: 685045 - DNA, 120 bp, Artificial Sequence
  ENSG00000187498_28 (sequence is synthesized)
ccttaaagggtctcccgggagtgttggctatccaggaagtcctgggctacctggagaaaaaggtgacaaaggcctcccaggattggatggcatccctggtgtcaaaggagaagcaggtct

SEQ ID NO: 685046 - DNA, 120 bp, Artificial Sequence
  ENSG00000187498_29 (sequence is synthesized)
tcctgggactcctggccccacaggcccagctggccagaaaggggagccaggcagtgatggaatcccggggtcagcaggagagaagggtgaaccaggtctaccaggaagaggattcccagg

SEQ ID NO: 685047 - DNA, 120 bp, Artificial Sequence
  ENSG00000187498_30 (sequence is synthesized)
gtttccaggggccaaaggagacaaaggttcaaagggtgaggtgggtttcccaggattagccgggagcccaggaattcctggatccaaaggagagcaaggattcatgggtcctccggggcc

SEQ ID NO: 685048 - DNA, 120 bp, Artificial Sequence
  ENSG00000187498_31 (sequence is synthesized)
ccagggacagccggggttaccgggatccccaggccatgccacggaggggcccaaaggagaccgcggacctcagggccagcctggcctgccaggacttccgggacccatggggcctccagg

SEQ ID NO: 685049 - DNA, 120 bp, Artificial Sequence
  ENSG00000187498_32 (sequence is synthesized)
gcttcctgggattgatggagttaaaggtgacaaaggaaatccaggctggccaggagcacccggtgtcccagggcccaagggagaccctggattccagggcatgcctggtattggtggctc

SEQ ID NO: 685050 - DNA, 120 bp, Artificial Sequence
  ENSG00000187498_33 (sequence is synthesized)
tccaggaatcacaggctctaagggtgatatggggcctccaggagttccaggatttcaaggtccaaaaggtcttcctggcctccagggaattaaaggtgatcaaggcgatcaaggcgtccc

SEQ ID NO: 685051 - DNA, 120 bp, Artificial Sequence
  ENSG00000187498_34 (sequence is synthesized)
gggagctaaaggtctcccgggtcctcctggccccccaggtccttacgacatcatcaaaggggagcccgggctccctggtcctgagggccccccagggctgaaagggcttcagggactgcc

SEQ ID NO: 685052 - DNA, 120 bp, Artificial Sequence
  ENSG00000187498_35 (sequence is synthesized)
aggcccgaaaggccagcaaggtgttacaggattggtgggtatacctggacctccaggtattcctgggtttgacggtgcccctggccagaaaggagagatgggacctgccgggcctactgg

SEQ ID NO: 685053 - DNA, 120 bp, Artificial Sequence
  ENSG00000187498_36 (sequence is synthesized)
tccaagaggatttccaggtccaccaggccccgatgggttgccaggatccatggggcccccaggcaccccatctgttgatcacggcttccttgtgaccaggcatagtcaaacaatagatga

SEQ ID NO: 685054 - DNA, 120 bp, Artificial Sequence
  ENSG00000187498_37 (sequence is synthesized)
cccacagtgtccttctgggaccaaaattctttaccacgggtactctttgctctacgtgcaaggcaatgaacgggcccatggccaggacttgggcacggccggcagctgcctgcgcaagtt

SEQ ID NO: 685055 - DNA, 120 bp, Artificial Sequence
  ENSG00000187498_38 (sequence is synthesized)
cagcacaatgcccttcctgttctgcaatattaacaacgtgtgcaactttgcatcacgaaatgactactcgtactggctgtccacccctgagcccatgcccatgtcaatggcacccatcac

SEQ ID NO: 685056 - DNA, 120 bp, Artificial Sequence
  ENSG00000187498_39 (sequence is synthesized)
gggggaaaacataagaccatttattagtaggtgtgctgtgtgtgaggcgcctgccatggtgatggccgtgcacagccagaccattcagatcccaccgtgccccagcgggtggtcctcgct

SEQ ID NO: 685057 - DNA, 120 bp, Artificial Sequence
  ENSG00000187498_40 (sequence is synthesized)
gtggatcggctactcttttgtgatgcacaccagcgctggtgcagaaggctctggccaagccctggcgtcccccggctcctgcctggaggagtttagaagtgcgccattcatcgagtgtca

SEQ ID NO: 685058 - DNA, 120 bp, Artificial Sequence
  ENSG00000187498_41 (sequence is synthesized)
cggccgtgggacctgcaattactacgcaaacgcttacagcttttggctcgccaccatagagaggagcgagatgttcaagaagcctacgccgtccaccttgaaggcaggggagctgcgcac

SEQ ID NO: 685059 - DNA, 120 bp, Artificial Sequence
  ENSG00000187498_42 (sequence is synthesized)
gcacgtcagccgctgccaagtctgtatgagaagaacataatgaagcctgactcagctaatgtcacaacatggtgctacttcttcttctttttgttaacagcaacgaaccctagaaatata

SEQ ID NO: 685060 - DNA, 120 bp, Artificial Sequence
  ENSG00000187498_43 (sequence is synthesized)
tcctgtgtacctcactgtccaatatgaaaaccgtaaagtgccttataggaatttgcgtaactaacacaccctgcttcattgacctctacttgctgaaggagaaaaagacagcgataagct

SEQ ID NO: 685061 - DNA, 120 bp, Artificial Sequence
  ENSG00000187498_44 (sequence is synthesized)
ttcaatagtggcataccaaatggcacttttgatgaaataaaatatcaatattttctgcaatccaatgcactgatgtgtgaagtgagaactccatcagaaaaccaaagggtgctaggaggt

SEQ ID NO: 685062 - DNA, 120 bp, Artificial Sequence
  ENSG00000187498_45 (sequence is synthesized)
gtgggtgccttccatactgtttgcccattttcattcttgtattataattaattttctacccccagagataaatgtttgtttatatcactgtctagctgtttcaaaatttaggtcccttgg

SEQ ID NO: 685063 - DNA, 120 bp, Artificial Sequence
  ENSG00000187498_46 (sequence is synthesized)
tctgtacaaataatagcaatgtaaaaatggttttttgaacctccaaatggaattacagactcagtagccatatcttccaaccccccagtataaatttctgtctttctgctatgtgtggta

SEQ ID NO: 685064 - DNA, 120 bp, Artificial Sequence
  ENSG00000187498_47 (sequence is synthesized)
ctttgcagctgcttttgcagaaatcacaattttcctgtggaataaagatggtccaaaaatagtcaaaaattaaatatatatatatattagtaatttatatagatgtcagcaattaggcag

SEQ ID NO: 685065 - DNA, 120 bp, Artificial Sequence
  ENSG00000187498_48 (sequence is synthesized)
atcaaggtttagtttaacttccactgttaaaataaagcttacatagttttcttcctttgaaagactgtgctgtcctttaacataggtttttaaagactaggatattgaatgtgaaacatc

SEQ ID NO: 685066 - DNA, 120 bp, Artificial Sequence
  ENSG00000187498_49 (sequence is synthesized)
cgttttcattgttcacttctaaaccaaaaattatgtgttgccaaaaccaaacccaggttcatgaatatggtgtctattatagtgaaacatgtactttgagcttattgtttttattctgta

SEQ ID NO: 685067 - DNA, 120 bp, Artificial Sequence
  ENSG00000187498_50 (sequence is synthesized)
ttaaatattttcagggttttaaacactaatcacaaactgaatgacttgacttcaaaagcaacaaccttaaaggccgtcatttcattagtattcctcattctgcatcctggcttgaaaaac

SEQ ID NO: 685068 - DNA, 120 bp, Artificial Sequence
  ENSG00000187498_51 (sequence is synthesized)
agctctgttgaatcacagtatcagtattttcacacgtaagcacattcgggccatttccgtggtttctcatgagctgtgttcacagacctcagcagggcatcgcatggaccgcaggagggc

SEQ ID NO: 685069 - DNA, 120 bp, Artificial Sequence
  ENSG00000187498_52 (sequence is synthesized)
agattcggaccactaggcctgaaatgacatttcactaaaagtctccaaaacatttctaagactactaaggccttttatgtaatttctttaaatgtgtatttcttaagaattcaaatttgt

SEQ ID NO: 685070 - DNA, 120 bp, Artificial Sequence
  ENSG00000187498_53 (sequence is synthesized)
aataaaactatttgtataaaaattaagcttttattaatttgttgctagtattgccacagacgcattaaaagaaacttactgcacaagctgctaataaatttgtaagctttgcatacctta

SEQ ID NO: 685071 - DNA, 120 bp, Artificial Sequence
  ENSG00000187498_54 (sequence is synthesized)
gtaagcatttgctgaatcattatgaacatgtgccacctcaccctcccagttcgcatctgaactcatttctttctcatgcattctagggcccaccaggactgccagggcttcaaggtcctg

SEQ ID NO: 685072 - DNA, 120 bp, Artificial Sequence
  ENSG00000187498_55 (sequence is synthesized)
ggttaaataataaagatgtgcagattggacatgttttgtgaagatctgattacctgggttttgataatgactttacctttgagaagtacgttccatttggatagcttcacccgggattct

SEQ ID NO: 685073 - DNA, 120 bp, Artificial Sequence
  ENSG00000187498_56 (sequence is synthesized)
tctggacaagcatatgttttctatttttctccaaaacgttgaatccattgccatttagcttattatttgtgatattcgagttttgtaatggaaatctaccataaaaattatttgacataa

SEQ ID NO: 685074 - DNA, 120 bp, Artificial Sequence
  ENSG00000187498_57 (sequence is synthesized)
cagccagagtgtaatagaaaggcgtggattcttctaatcatccatattcctctaagggaatcttcagagaatgaaccatgctacaaaaagcaatagttaaaatttcaaaataaagctggt

SEQ ID NO: 685075 - DNA, 120 bp, Artificial Sequence
  ENSG00000187498_58 (sequence is synthesized)
ttaacggagtaaataacacgttaaccacctctgagactcctggcatctaaagttaaaaagcaaaactgttgagttatgtaatttttattgaaaacagaatgcattcttcttcatctagag

SEQ ID NO: 685076 - DNA, 120 bp, Artificial Sequence
  ENSG00000187498_59 (sequence is synthesized)
acacacacacacacacacacaccccagaaacaaggaagacaggattacatgggtaaagattacattagtaaagtccagaaaagccagcttttattccagaaaaggtgaacatgtaacatg

SEQ ID NO: 685077 - DNA, 120 bp, Artificial Sequence
  ENSG00000187498_60 (sequence is synthesized)
cagcttttattccagaaaaggtgaacatgtaacatggaagtcttgactcaattaagatggccgtgtggtcccaatacaataccaaagcaaattcgaagaaaatctccaaggatttaagcc

SEQ ID NO: 685078 - DNA, 120 bp, Artificial Sequence
  ENSG00000187498_61 (sequence is synthesized)
aacctgtgcaatgggagtgtgttcagatacctggagccagcctttggaacctgctggatcaaaaccaacgtgtgctctgtggggcccctgaaacacgaatcctctgtggggttgattgag

SEQ ID NO: 685079 - DNA, 120 bp, Artificial Sequence
  ENSG00000187498_62 (sequence is synthesized)
aaaggattcacaggcttcaagtcccagcaagatttatttgctagaattcaagcaaatctttacgaaagggagttctcatggatgaggccactgttgggggctgggccaggactagatgga

SEQ ID NO: 685080 - DNA, 120 bp, Artificial Sequence
  ENSG00000187498_63 (sequence is synthesized)
gccatggattccagcctggcagcttcgatggggaatgtgatctacatgaatttgggtaggagaaagaacagatcatgtgtgactttggggaacttttctcctctgctcttgtgattgtgt

SEQ ID NO: 685081 - DNA, 120 bp, Artificial Sequence
  ENSG00000187498_64 (sequence is synthesized)
gtattccaggatgcaatggcacaaaggtaaatccagaaccgagaccctcctttttgtgtgtgtttacgtaatttttgcatattaaggagtcaggtagtgtgattctgttaatagagtttt

SEQ ID NO: 685082 - DNA, 120 bp, Artificial Sequence
  ENSG00000187498_65 (sequence is synthesized)
atttgccacaattggaaagttgcttgtcttaaagtttgctttatttagtaaggaaatacagttttcccatatttagtgtaccagaaagatataattgttcctttcttttttgtagacttt

SEQ ID NO: 685083 - DNA, 120 bp, Artificial Sequence
  ENSG00000187498_66 (sequence is synthesized)
tatcctaaaattgcatttaagcacgaaagttattacctataatcatttactacatcacgtaagaaaatgccattatgggcctttgtccctattaatgatactatcaagtctatttcttct

SEQ ID NO: 685084 - DNA, 120 bp, Artificial Sequence
  ENSG00000187498_67 (sequence is synthesized)
tgattttaaccaacaaatgaagggtagggcagagtgatgcatgcgatgtcagggctgatgtgtctgccacacacagtgcgtatgaatgatgctctgctgtctccccagggggagagaggg

SEQ ID NO: 685085 - DNA, 120 bp, Artificial Sequence
  ENSG00000187498_68 (sequence is synthesized)
gcttatgttttaataacttatattttatatataatattacatgataacaattttaatgctaatgatattttgagaaaaacaaaactaacaccaaaactttcttttttagggaccaccagg

SEQ ID NO: 685086 - DNA, 120 bp, Artificial Sequence
  ENSG00000187498_69 (sequence is synthesized)
taataatttagtaaaaactttacacagttgtggtcgctcttaatttggacatggcggaatcagcttccctcttactaaacgtttggctggcatcccggtacccatatacccagagctgtg

SEQ ID NO: 685087 - DNA, 120 bp, Artificial Sequence
  ENSG00000187498_70 (sequence is synthesized)
tgccatggagtgaagggacaaaagtttctactccttcagataagcagaccctaatctgagggagtcgggccagctgaagacacggctcagaatatccgaagtcttgagcaagttcctttc

SEQ ID NO: 685088 - DNA, 120 bp, Artificial Sequence
  ENSG00000187498_71 (sequence is synthesized)
ctcttactgactctgtggcggacccactgcgccccaggccacctgccaaggacagcaagccttctgaagcctttctctaacgggtcgggacggggaggactgctggaggaccacaaagaa

SEQ ID NO: 685089 - DNA, 120 bp, Artificial Sequence
  ENSG00000187498_72 (sequence is synthesized)
atgagcctactcctctggggccctgggcagacctcccagttcctgttctacaggagtcaacgtgggcctccagcccggttcaacaactaacccacagcgagcccctgtgtgtgacaaggg

SEQ ID NO: 685090 - DNA, 120 bp, Artificial Sequence
  ENSG00000187498_73 (sequence is synthesized)
gcaggtcagccagtcagcagccactcctgccccattgtcccctcctgagacaggttaggggtgcccagcccatcaaaatatgcatcccaccccattctggattgcttttccctgtgcatt

SEQ ID NO: 685091 - DNA, 120 bp, Artificial Sequence
  ENSG00000187498_74 (sequence is synthesized)
aggaataaaacctctctaaggggaaggcattttgaagtaagcctgtttcaggcctgtgagaggtctgcagaaacacccccagcgtgagcactgggtcaccccacagcccctgcctttcgg

SEQ ID NO: 685092 - DNA, 120 bp, Artificial Sequence
  ENSG00000187498_75 (sequence is synthesized)
aaatcctggtgtagagtccgctccacaaggagctccttcctctgtttgaaggctggtcgtcttcactgtgtctccgcgattacccaggacgtgggcatggccatgcttctcacacgtcct

SEQ ID NO: 685093 - DNA, 120 bp, Artificial Sequence
  ENSG00000187498_76 (sequence is synthesized)
cctccacatctggaagaggcatcttcttttcccttttcacaggctacttagagctggagagggattgtgtctgtcaatccttagatacatgattaattaatcaacgcatgtttttcagtt

SEQ ID NO: 685094 - DNA, 120 bp, Artificial Sequence
  ENSG00000187498_77 (sequence is synthesized)
gttactttgctgggcactttgagagatgcaaaatgagcactcttagtatatttctctcaaggacatacaaaataagaagaaaaatattatctgtaaggaataccataaatctaataccta

SEQ ID NO: 685095 - DNA, 120 bp, Artificial Sequence
  ENSG00000187498_78 (sequence is synthesized)
aatacaagaagagaagaggacagattttccagtctgttgaattagatgtgccattttacattgattgttttttattagctcccattgccagagacattgcaatgtctacgtgataaggag

SEQ ID NO: 685096 - DNA, 120 bp, Artificial Sequence
  ENSG00000187498_79 (sequence is synthesized)
tttaggcttgagcttgcatgctggttttaaacacatcatctacaacattctagtcgtttttgtgctatattgtaacaattgtcaaagtgccttagaatctaacattacctttaaggtatg

SEQ ID NO: 685097 - DNA, 120 bp, Artificial Sequence
  ENSG00000187498_80 (sequence is synthesized)
ggactcactttttcctaagatcataaatttagggtattttcatagttgtaattaaatcttagatgaaattcctttttgagacagggactgtactttatttgtatttttggagaattcaat

SEQ ID NO: 685098 - DNA, 120 bp, Artificial Sequence
  ENSG00000187498_81 (sequence is synthesized)
aatcttcaatttataaatatatttatttccatgatctttcctctaatttacacatgggtaacaatagacatagttttagccatgttttcattatgaaattaaaatatacaaggacagagt

SEQ ID NO: 685099 - DNA, 120 bp, Artificial Sequence
  ENSG00000187498_82 (sequence is synthesized)
gctttaaatattccaccatatagatagatggactggctcttctcctgttattccttgttattcctagtatctgtgtagaatatatttgcatctccagtaattattaaagaataataatta

SEQ ID NO: 685100 - DNA, 120 bp, Artificial Sequence
  ENSG00000187498_83 (sequence is synthesized)
gtgtaggtgtgttgagtgccttcggtgtgcagtgctggactcgcctctgctgctgcagtgagggcagtagcgagtgaaacactgcgccatgagggcggtagccagtgaaaaagcagcccg

SEQ ID NO: 685101 - DNA, 120 bp, Artificial Sequence
  ENSG00000187498_84 (sequence is synthesized)
gccccatttccctccattgattacaaataatcggttcaacagctgctgtattactaatggcaagccaagaaatgtggagactgaatcttcgaaaatctttaaattaataaaactttagat

SEQ ID NO: 685102 - DNA, 120 bp, Artificial Sequence
  ENSG00000187498_85 (sequence is synthesized)
accagcttcttagcttttgtagtttgttttaaaagaatccactaaatagaagagcataataataatcttgaattttgaaggacattattttcttgcatataatgacttctgtttctgaag

SEQ ID NO: 685103 - DNA, 120 bp, Artificial Sequence
  ENSG00000187498_86 (sequence is synthesized)
ttttgaaatctcaaggcattgttcctctcgtattttctttgttcttctgagctttgcgagcatggactggtttccacaattcctttcattcctttttttctttttgtaagatattgaaag

SEQ ID NO: 685104 - DNA, 120 bp, Artificial Sequence
  ENSG00000187498_87 (sequence is synthesized)
tcaaatttcagaattattcatttctgatgtagcccttcaaattttttaatttttaaagatattgctggaagcttctacaaaagaaaaccagggcaaaagcgagttgaaatagcaatgacc

SEQ ID NO: 685105 - DNA, 120 bp, Artificial Sequence
  ENSG00000187498_88 (sequence is synthesized)
cagctggaattcagcaatcattttctgcttttgaagttagatcttgggcttttgctctccagaacttccctggtgcctggggagctgagttagaagttgcaattgtttaagatatatcta

SEQ ID NO: 685106 - DNA, 120 bp, Artificial Sequence
  ENSG00000187498_89 (sequence is synthesized)
aataaattagaagttcaaataactgggtagccctgactgtagtggggatcaaagacagaagaactttgaaggaagcagaaaaggacgtttttaacctctatgcaccgcttcatctcctgg

SEQ ID NO: 685107 - DNA, 120 bp, Artificial Sequence
  ENSG00000187498_90 (sequence is synthesized)
gctttcctggtggacttcctgcctcaactctggctgaaactcagtctagacatatctaataaaagacggaaaaagaggaaagaggtgagaaagaaggaatattgaggaaagatcataata

SEQ ID NO: 685108 - DNA, 120 bp, Artificial Sequence
  ENSG00000187498_91 (sequence is synthesized)
tagaagaaaagaaagaaaacatacaaccccaattctactccttatgccttcatcaggagctcctttctttccggagttggaaaaagtctctaaaaataaatttatgggtaaataattcaa

SEQ ID NO: 685109 - DNA, 120 bp, Artificial Sequence
  ENSG00000187498_92 (sequence is synthesized)
aatcatttatgcttcttctgggtaaaaacacaatttagtggtttcctttatgttcatgattttttacaaaataaaaatatatgaaatgtgccattcattcaaatttttatatcttttttt

SEQ ID NO: 685110 - DNA, 120 bp, Artificial Sequence
  ENSG00000187498_93 (sequence is synthesized)
ggtagtagattatttttttcctgatcataaagcaatagaaaatacagaaagatatcacgaggtaaagaaagcttacctaattttttctgttacctgttcagaagtggccagagttcgcct

SEQ ID NO: 685111 - DNA, 120 bp, Artificial Sequence
  ENSG00000187498_94 (sequence is synthesized)
tgttcctatgtgcatacacaagcaggcagtttttaaaggtgatagtgaacaagacatcttgctttttcacgtaatgatagaaggaggatctatttcaatggccgtcagtgtaattatgat

SEQ ID NO: 685112 - DNA, 120 bp, Artificial Sequence
  ENSG00000187498_95 (sequence is synthesized)
gtgaacatccatgccttttgttgcgtggtatttaggccatttccaaatttgtatgcttacaagtatttttgctcacttgtctggtcatttctctgtcaaattcctaaaagcgtaatattg

SEQ ID NO: 685113 - DNA, 120 bp, Artificial Sequence
  ENSG00000187498_96 (sequence is synthesized)
gggtccacagtcagacacttgttttgaaatttttgccacatgcaaccaaattgccccagaaagtccttctgccagaccagggcccttttagttggggaactaactaaaaaaaaaaaaaaa

SEQ ID NO: 685114 - DNA, 120 bp, Artificial Sequence
  ENSG00000187498_97 (sequence is synthesized)
tctcccctcttcgggagcctggcgtgggtgtctcagaactgatctgctttcagtctgagttttgccatcctctgcggcgagcctgcgagcttgcacacttgggcaggatgcgctcagcgc

SEQ ID NO: 685115 - DNA, 120 bp, Artificial Sequence
  ENSG00000187498_98 (sequence is synthesized)
cctagctcagaggccgacccagggcagagccagtcagcgggcgctgggacgcaggactctgaacatgggtcctctgcctccctcccacctcctccaggcccggccactcggcttcctggt

SEQ ID NO: 685116 - DNA, 120 bp, Artificial Sequence
  ENSG00000187498_99 (sequence is synthesized)
gccatggagtgaagggacaaaaggtgagttgccgaaatttaaatcacaacatttctttgtgaattggacagtaagtactacattaacagtaaccgaataatcagcaattcaggtgaaagc

SEQ ID NO: 685117 - DNA, 120 bp, Artificial Sequence
  ENSG00000187498_100 (sequence is synthesized)
cttattactgttttgataatttccccagagcaatacaaatgaagccaaaccaggcttgacattacttctgagtagtaatattattataatagctcttctccaaagaatgtaatagtatgt

SEQ ID NO: 685118 - DNA, 120 bp, Artificial Sequence
  ENSG00000187498_101 (sequence is synthesized)
ggcaattaatgtagaaaaacatatttggtttattttcctttttgactcttggtagaaaatctgttgaatctatcgtactttttcgaattgatgtataagaactaattttaacatttttcc

SEQ ID NO: 685119 - DNA, 120 bp, Artificial Sequence
  ENSG00000187498_102 (sequence is synthesized)
ggaaaaagaaactagttcctattctacttgaggaccttctcttcaaattagtatttttaaaccatcttttaatccatcacatgcttgtctagatttatttataaaaatattgcttgggaa

SEQ ID NO: 685120 - DNA, 120 bp, Artificial Sequence
  ENSG00000187498_103 (sequence is synthesized)
acttagtgtttcccaaatgtaaaattaaaatgtatttctttgcaagcaaactgttcccctccctttcatttaagaaccagggctccagataaagataagtttctctggaaggcaagttga

SEQ ID NO: 685121 - DNA, 120 bp, Artificial Sequence
  ENSG00000187498_104 (sequence is synthesized)
atctgtgcatttcagttggttggaaagagggtgcctggctgtttttttatccagaaaacagtgcagcatcctggtactgtctgtgggtcaccgtggaaaccaggtgtggctgtgaggaaa

SEQ ID NO: 685122 - DNA, 120 bp, Artificial Sequence
  ENSG00000187498_105 (sequence is synthesized)
tgccaccaccttaagccactcagcctttggtgcaggtgcgcacagcaggttgggaccctgtagaatggagtggatactctgtaggatactgtttccagaaagctgaaggtgtcattctgg

SEQ ID NO: 685123 - DNA, 120 bp, Artificial Sequence
  ENSG00000187498_106 (sequence is synthesized)
aaattctagtttacagaaaattctgtggtttctttttgactatttgctgaaatgccaacattattattttaaaaaatatgcctgataggtgatggcactagtgttacctggatagttttt

SEQ ID NO: 685124 - DNA, 120 bp, Artificial Sequence
  ENSG00000187498_107 (sequence is synthesized)
gaatgaatggagtatgtaaggaaagtttcacatcttttcatatcaactctaatttatcttcatgctctgctctcttactttggatttttctagcgatttccagtgtgcatgctcaagagt

SEQ ID NO: 685125 - DNA, 120 bp, Artificial Sequence
  ENSG00000187498_108 (sequence is synthesized)
tattttaaagtagacgcaagtgtttctcatgccacagacattttgttaaaaacctaacttgaaatatacaagtgagttcaccaaactcataaaaatgtccttaaaatgataaaatggaga

SEQ ID NO: 685126 - DNA, 120 bp, Artificial Sequence
  ENSG00000187498_109 (sequence is synthesized)
actttggggtcccaacaaagaggaattaaggcctggatcatgattacctctgttttccatgtgactttgaaagcagcagggctggagccaagttggccctgctccctcctagggacagca

SEQ ID NO: 685127 - DNA, 120 bp, Artificial Sequence
  ENSG00000187498_110 (sequence is synthesized)
gggttgatgtccacctccatttccatttgcttctgtccagccggcaggccttggcggcccctcctggctctggagctttacatactttcttattctatccgcatctataaacttatatat

SEQ ID NO: 685128 - DNA, 71 bp, Artificial Sequence
  ENSG00000187498_111 (sequence is synthesized)
catactttcttattctatccgcatctataaacttatatatattttttaggccaggcatggtgggggaagtc

SEQ ID NO: 685129 - DNA, 120 bp, Artificial Sequence
  ENSG00000187498_112 (sequence is synthesized)
cctggccaacacggtgaaactcagtctctactaaaagtacaaaaattagcccagcgtggtggcacacacctctagtcccagctgctcaggaggttgagacaggagaattgcttgaaccca

SEQ ID NO: 685130 - DNA, 120 bp, Artificial Sequence
  ENSG00000187498_113 (sequence is synthesized)
agaacacaccattgcactctagcctaggcgacagagcaaggctctaactcaaaaccaaaaaccaaaaaccaaaaaacttgtaacttttttaacgtaatttatttcagtttttcccaaaaa

SEQ ID NO: 685131 - DNA, 120 bp, Artificial Sequence
  ENSG00000187498_114 (sequence is synthesized)
tatatctccagctgttgctgaatgtctcctggcggggggtggggggtgcagactcaccctggatggaataccgctgaactaaccccatcttctatagctaataaaagacaaataacagga

SEQ ID NO: 685132 - DNA, 120 bp, Artificial Sequence
  ENSG00000187510_0 (sequence is synthesized)
atgcaataacctgcttgacattctcctctggaaaaggaaaagaactacgagaggaagcatggcacttggatgcagaaattgagcaccctccatgtgatccagagaacagcaactcatacg

SEQ ID NO: 685133 - DNA, 120 bp, Artificial Sequence
  ENSG00000187510_1 (sequence is synthesized)
tcttctggaaccttctaccaacagtagaacctcttagctttatggagaaaacagagtcattctgtccagaggtgccaccccaagactgtggagcctctcctcggccctcgctgaggagcc

SEQ ID NO: 685134 - DNA, 120 bp, Artificial Sequence
  ENSG00000187510_2 (sequence is synthesized)
tgccaaagaaccaggggagtctcctccagtttgaccggcaagccccaggccgcatctccacctcgcccactttgaggagattaaggacccgtggctgtgggacaaggcaggatgcctggc

SEQ ID NO: 685135 - DNA, 120 bp, Artificial Sequence
  ENSG00000187510_3 (sequence is synthesized)
aggtgaccacctggggaagctggggagctcctgtgggcttcccatgttacctttcgaagagcctgccaggaagcccaaaggattcttcacacttgctgtcacccttgagactccactcaa

SEQ ID NO: 685136 - DNA, 120 bp, Artificial Sequence
  ENSG00000187510_4 (sequence is synthesized)
gattgacctctgaacctgaaagggccctgaatgcagctgactcactggagccccaaacccggcccactgacaagtatctccctcctgagcttcagcctgtcaatgaagggtcccttcacc

SEQ ID NO: 685137 - DNA, 120 bp, Artificial Sequence
  ENSG00000187510_5 (sequence is synthesized)
aggcctctcttcggcagcaagaaggccacttcctgcccagccccaccctacgacaccctagtcctcagggagaagaattgcacccatccaggttctacgagcacaggcggagttctgtgg

SEQ ID NO: 685138 - DNA, 120 bp, Artificial Sequence
  ENSG00000187510_6 (sequence is synthesized)
tgctgaacttacctggacttgaggtgttccccggggaccttctggtgtcagatggagctgctgattacctatgccatccacttctgctgctgaattcagaatccaaaaagccaagatggc

SEQ ID NO: 685139 - DNA, 120 bp, Artificial Sequence
  ENSG00000187510_7 (sequence is synthesized)
ctttctccaaaagaggagtgggcaaagacaaacacaagcacatatctgatctggaaaactgcctgtcctctgtgaaaattaccagcttcaggggctatgacttctacggtcttaaggata

SEQ ID NO: 685140 - DNA, 120 bp, Artificial Sequence
  ENSG00000187510_8 (sequence is synthesized)
agacctgggatgaagtcttggaaacacatcacaaactcccgaccgatcaattagacctgaaaaagcagcaagaggccgtgtgggaacttttcacaagtgaatgcacctattttttggacc

SEQ ID NO: 685141 - DNA, 120 bp, Artificial Sequence
  ENSG00000187510_9 (sequence is synthesized)
atttattagttcttaagatgatctttatgaatacactaagatatctgcaaactcatgaatatctcctagatgtggatttatggagactttttgcaaacctggaggagttaactcagacaa

SEQ ID NO: 685142 - DNA, 120 bp, Artificial Sequence
  ENSG00000187510_10 (sequence is synthesized)
gccttggttttgtgaacagtctctttggcatcatcaaggactatgtagacgcttctgagatttcctcatcactggattttatttccgtgctcacaaagtatttccgagggagtctctgtc

SEQ ID NO: 685143 - DNA, 120 bp, Artificial Sequence
  ENSG00000187510_11 (sequence is synthesized)
agagccaccagacctactgcctgaactattcagctgctatcttttatcttgagagcctgaggcagagagatgactttggaatttatttaaaatggtgtgagcagaatgaacaatgcagac

SEQ ID NO: 685144 - DNA, 120 bp, Artificial Sequence
  ENSG00000187510_12 (sequence is synthesized)
ggctccacgtgccagagctgctagtggccccactacagaggctcactcgatatccgttgttgctgaagaatatctggaaaaggagcatggactctgctgagaaaatcatgatctactcca

SEQ ID NO: 685145 - DNA, 120 bp, Artificial Sequence
  ENSG00000187510_13 (sequence is synthesized)
tcaaggaaaaggtggaaaagtccatccgggaccttgaaggaaaagtgaagtggctggacaatttccaaaaatttagatatctacaggagattatagtgtggccaccgctttgggatagag

SEQ ID NO: 685146 - DNA, 120 bp, Artificial Sequence
  ENSG00000187510_14 (sequence is synthesized)
ataaaaggtttttcattccagagtgtttgaaacacatttttaaagaacacatggcagaaaacatcttgtcaccaaccagcagacaccttctctatgaaggaaaattaactcttgcagaaa

SEQ ID NO: 685147 - DNA, 120 bp, Artificial Sequence
  ENSG00000187510_15 (sequence is synthesized)
gcacgagattcctagatgtttatctgtttctcttcaatgatttcctcttagttacgaaaactaagtgcaacaaaaagaaacttggaggctcagaccctggtttaatgtgtccttctctta

SEQ ID NO: 685148 - DNA, 120 bp, Artificial Sequence
  ENSG00000187510_16 (sequence is synthesized)
ctcctgagttgcaagcagtaataaaagagggtggttcgtgtacagtactcgatcagcctattccactagatagattggtagtcaaaagtattgaaccactccatgtgtcagtctttgggc

SEQ ID NO: 685149 - DNA, 120 bp, Artificial Sequence
  ENSG00000187510_17 (sequence is synthesized)
tgagaaatgcttttcttatacaacacgaaaacagatatcgacagtgtatagcagcattcttattacaagcccaaacggaaaacatcaaaaaaacatggatggcacaaataacaactgcaa

SEQ ID NO: 685150 - DNA, 120 bp, Artificial Sequence
  ENSG00000187510_18 (sequence is synthesized)
cagaatcctctgaaatttagggacctaaaacaagtggcatgtctttttagaagattatggtttaaggtataatttcattcaaagttttgtaacacttagctagtgataagctagaaggaa

SEQ ID NO: 685151 - DNA, 120 bp, Artificial Sequence
  ENSG00000187510_19 (sequence is synthesized)
atttgcattttaaagaagtttcagaatttgaaattttgagctaggaaaatcctcagtatagaggaataatgactgcaacaaatttgaactctgaggaatttcttgacaaatatatactga

SEQ ID NO: 685152 - DNA, 120 bp, Artificial Sequence
  ENSG00000187510_20 (sequence is synthesized)
catccagattaccttctaatgcttccgtcaggtttgtaagaggtgtgagtgaagaaaggtgctaatttgtaaagggtgaatgatcagataaatggagtatcagaaggaaaacaatgtcca

SEQ ID NO: 685153 - DNA, 120 bp, Artificial Sequence
  ENSG00000187510_21 (sequence is synthesized)
ctgcttatgtccaatatgaactccagcatcttactctgtatccataaaataatgaaaccaattttccttcatggcctgtcaatcagtcttaaccgctttatagtcctacctcaaacataa

SEQ ID NO: 685154 - DNA, 120 bp, Artificial Sequence
  ENSG00000187510_22 (sequence is synthesized)
tgataaatctttagatacaaagcttgattgttcttttaatatacaaagcaataaatagggactacatttaagtagcagttttaaaattcctattctcaaactcatctcaggtatatagta

SEQ ID NO: 685155 - DNA, 120 bp, Artificial Sequence
  ENSG00000187510_23 (sequence is synthesized)
ctctaacgtggaagtagaaaatcccaaagactaaattccattactttaagataggaagaaaaaaaaaatctggctttcaccagttaacacttttgcatggcttttcttggcctgttgtga

SEQ ID NO: 685156 - DNA, 120 bp, Artificial Sequence
  ENSG00000187510_24 (sequence is synthesized)
agtgtacagattttcatagacatagtaaggtatctgtctcttaactttattttttgaagaatgatggtgtttgccataaaaatactttctggttttgattggtgtgtgtgtgtgtgtgtg

SEQ ID NO: 685157 - DNA, 120 bp, Artificial Sequence
  ENSG00000187510_25 (sequence is synthesized)
tgtgtgttagcacagtacagtcacttaattttatttggcaggacttcaaatttcttcagaatttttatcatgaaaggcagtttgaataattattatcatggcaggatatatactattaac

SEQ ID NO: 685158 - DNA, 120 bp, Artificial Sequence
  ENSG00000187510_26 (sequence is synthesized)
tacattcaaggaactagttcttagggtcagattattgcatcaaagggaagtccacaaacttccatttcagaatcgtaccttttgcaatttgcaaagtgaaagtagtaaatttatcaaatt

SEQ ID NO: 685159 - DNA, 120 bp, Artificial Sequence
  ENSG00000187510_27 (sequence is synthesized)
tggctgcaagacaactgaagccttagctgattttgttaagctgaagaatggggtagagaggataatgtttgggcaagtcatgtgcccagtaattccttgaggaaggtgaaatttcactat

SEQ ID NO: 685160 - DNA, 120 bp, Artificial Sequence
  ENSG00000187510_28 (sequence is synthesized)
gcaaacaaagcagtaaagacaagtgcagcagaaaggcttttgtacaaggcaagcactattagaatggagactaataacctctttataataatgtcagaaatttaatagaagaaaaaaagg

SEQ ID NO: 685161 - DNA, 120 bp, Artificial Sequence
  ENSG00000187510_29 (sequence is synthesized)
aaaatctggaggacagtaactattgttaatagctaagaataaatgaggtggaggggagaaaaaggggagaatagacttcaagcttcaagtgaattcctagagatggcatctggatgggac

SEQ ID NO: 685162 - DNA, 120 bp, Artificial Sequence
  ENSG00000187510_30 (sequence is synthesized)
tgaaagcagttatgtccaggagaatacaatatagattatgcaagagaagattttataaagaaatttctggttaaaaaaaatttttacattaacaatcatcttgcaaatgtttagatataa

SEQ ID NO: 685163 - DNA, 120 bp, Artificial Sequence
  ENSG00000187510_31 (sequence is synthesized)
actaacctcggaggtgagcagtggactaggatgaggtggcctctcaaattcctttagtcccatgaatccagcaaccacagacttacatgtataaaggtagttttctccctctgaatctca

SEQ ID NO: 685164 - DNA, 120 bp, Artificial Sequence
  ENSG00000187510_32 (sequence is synthesized)
ttaaagggagagacagactgactaaattaacaaaatatataaaacagctcaagaatatgctgtacataaactggaattctataaagctcacaaagtaacatgtctaatatacaatatatt

SEQ ID NO: 685165 - DNA, 120 bp, Artificial Sequence
  ENSG00000187510_33 (sequence is synthesized)
agatgtttgaggatatgcacattaaactctttggagggtttagaatgaagcacattcgaatgaagggatcacgggggtcagaacaaaaaccattctagaaccgtggctcccaggaagaaa

SEQ ID NO: 685166 - DNA, 120 bp, Artificial Sequence
  ENSG00000187510_34 (sequence is synthesized)
ttctagaaccgtggctcccaggaagaaaaaatagcaaaaaacaatggcacattgggccttccaaaaagtatctttggggaggggagggagaaaaataaataaataaataaataaataatg

SEQ ID NO: 685167 - DNA, 120 bp, Artificial Sequence
  ENSG00000187510_35 (sequence is synthesized)
gtattaaatgcagacacacaatgaaataaggggttaattacatattttttatatttgtttttagttttgttaattctctacaatattaaatggaatgtctaaggcaaaatggcattaata

SEQ ID NO: 685168 - DNA, 120 bp, Artificial Sequence
  ENSG00000187510_36 (sequence is synthesized)
atttctcttgagatcaggaatttaattactattcgaaattgaacaacattaaaacaccactgtctatatccaagtgcaaagtcctaatattctgtaaataaattaatgcaaaatggttaa

SEQ ID NO: 685169 - DNA, 120 bp, Artificial Sequence
  ENSG00000187510_37 (sequence is synthesized)
gtggcacaactaacaatggctaagaactctagctgccatggactgagtgtttgagatgtgccaggctctgttctaagcactttgtgagaattatctcattaaaacctctcaccaacctaa

SEQ ID NO: 685170 - DNA, 120 bp, Artificial Sequence
  ENSG00000187510_38 (sequence is synthesized)
agccgttgtttacctgacttgttcttaggctgccttagattctgagctggcttccctttaggctttttcataaacaaataactggaaatgtctctaaggaggggagagaccagttcctca

SEQ ID NO: 685171 - DNA, 120 bp, Artificial Sequence
  ENSG00000187510_39 (sequence is synthesized)
ttgcagctggtagcaaggttgctttcactcagccaggaggacgcattgttacaggtgtggaacttgttgctccgagccctcgcctggcagctcactctggatctgcgggttctgaggagc

SEQ ID NO: 685172 - DNA, 120 bp, Artificial Sequence
  ENSG00000187510_40 (sequence is synthesized)
tctgttgactatttactattagatttttatttctgtcctgacataacaaagctgacggtgtgttaaccagtgcactttgttttatagcactcaagtcactcttcgcatttataggtgcac

SEQ ID NO: 685173 - DNA, 120 bp, Artificial Sequence
  ENSG00000187510_41 (sequence is synthesized)
gagttttcatttcaagagtctccctttaagagcacagcatttgggggcaggatacaatgccatatgcagtcatagttttcattttgaattgtcaatgtcttggccctgtggcttaattaa

SEQ ID NO: 685174 - DNA, 120 bp, Artificial Sequence
  ENSG00000187510_42 (sequence is synthesized)
catccacttagtaataggttttgtctggtagagaaaatagaaaggccagagatatgcaacagcttttcaaagaaaaatttggaggataaaagaaaggaacaagatgtcctggttaaatct

SEQ ID NO: 685175 - DNA, 120 bp, Artificial Sequence
  ENSG00000187510_43 (sequence is synthesized)
agggtgacctttaaaataacctgttatgacagactgtgcccttatccagaatgaagtagactgtgtcatttccaaaaccagctctgaactttcagcacggccccctggttgtagcaatgg

SEQ ID NO: 685176 - DNA, 120 bp, Artificial Sequence
  ENSG00000187510_44 (sequence is synthesized)
atctgccatctctgacagggatgaagagtttctgcagcagcaagggaaagatccatgcccaattttatcttcctgacttgtgggattggcaggaaagccctcatttcatttgaaaagtca

SEQ ID NO: 685177 - DNA, 120 bp, Artificial Sequence
  ENSG00000187510_45 (sequence is synthesized)
cagaggatttttttggagaaatagctgctgttttattactggacctcaatcctcaagcaatagtttgatattcatagcagtaaggataacatccatgtacacattctttgttgattttaa

SEQ ID NO: 685178 - DNA, 120 bp, Artificial Sequence
  ENSG00000187510_46 (sequence is synthesized)
tccttgttggcctaattgtaccaacaaaggtagaagatacttaccaagccatagggaaatgcaaattgttatgtctgtgtatcagctagctgttgctagataaaaaaccacttaaagtaa

SEQ ID NO: 685179 - DNA, 120 bp, Artificial Sequence
  ENSG00000187510_47 (sequence is synthesized)
ggagaagaattgcacccatccagcccacaccatggaccttcagatcttcagcagagcatagaataaggagacgttctggtaccagaagggagacgagactattccagcagccatgggact

SEQ ID NO: 685180 - DNA, 120 bp, Artificial Sequence
  ENSG00000187510_48 (sequence is synthesized)
cttagttcccccaagggccagtagatcctaaaaaggagacagcacaggaagtcacactgaggggacacattctctttaggaagcattggctcttaagtgaaaggagggcagcaatctggg

SEQ ID NO: 685181 - DNA, 120 bp, Artificial Sequence
  ENSG00000187510_49 (sequence is synthesized)
gaggaaagaaaatgatctcgctcactttcttctgtccttagaggcactttgagaaaggatgcaccaaggccaggcttaccgatggtctgtcaggtacccgagagcaatgggggccctctt

SEQ ID NO: 685182 - DNA, 120 bp, Artificial Sequence
  ENSG00000187510_50 (sequence is synthesized)
acgtcgtgtcactgatttaaaaggggagaaagagccagttattcaaatttccaatcccaccaaaatgtaaaacatgttttaactaggagggctcattgtttctcctttcaacatgtttgc

SEQ ID NO: 685183 - DNA, 120 bp, Artificial Sequence
  ENSG00000187513_0 (sequence is synthesized)
agcagggctcccgcgggcgtcactccggccatcgtccccacctccacctgggccgcccggcaggcaggcgacggaggcccgggagccatgggtgactggggcttcctggagaagttgctg

SEQ ID NO: 685184 - DNA, 120 bp, Artificial Sequence
  ENSG00000187513_1 (sequence is synthesized)
gaccaggtccaggagcactcgaccgtggtgggtaagatctggctgacggtgctcttcatcttccgcatcctcatcctgggcctggccggcgagtcagtgtggggtgacgagcaatcagat

SEQ ID NO: 685185 - DNA, 120 bp, Artificial Sequence
  ENSG00000187513_2 (sequence is synthesized)
ttcgagtgtaacacggcccagccaggctgcaccaacgtctgctatgaccaggccttccccatctcccacatccgctactgggtgctgcagttcctcttcgtcagcacacccaccctggtc

SEQ ID NO: 685186 - DNA, 120 bp, Artificial Sequence
  ENSG00000187513_3 (sequence is synthesized)
tacctgggccatgtcatttacctgtctcggcgagaagagcggctgcggcagaaggagggggagctgcgggcactgccggccaaggacccacaggtggagcgggcgctggcggccgtagag

SEQ ID NO: 685187 - DNA, 120 bp, Artificial Sequence
  ENSG00000187513_4 (sequence is synthesized)
cgtcagatggccaagatctcggtggcagaagatggtcgcctgcgcatccgcggagcactgatgggcacctatgtcgccagtgtgctctgcaagagtgtgctagaggcaggcttcctctat

SEQ ID NO: 685188 - DNA, 120 bp, Artificial Sequence
  ENSG00000187513_5 (sequence is synthesized)
ggccagtggcgcctgtacggctggaccatggagcccgtgtttgtgtgccagcgagcaccctgcccctacctcgtggactgctttgtctctcgccccacggagaagaccatcttcatcatc

SEQ ID NO: 685189 - DNA, 120 bp, Artificial Sequence
  ENSG00000187513_6 (sequence is synthesized)
tgtgtcgctgcctcagccgggggatgagggcacggcaaggccaagacgcacccccgacccagggcacctcctcagacccttacacggaccaggtcttcttctacctccccgtgggccagg

SEQ ID NO: 685190 - DNA, 120 bp, Artificial Sequence
  ENSG00000187513_7 (sequence is synthesized)
ggccctcatccccaccatgccccacctacaatgggctctcatccagtgagcagaactgggccaacctgaccacagaggagaggctggcgtcttccaggccccctctcttcctggacccac

SEQ ID NO: 685191 - DNA, 120 bp, Artificial Sequence
  ENSG00000187513_8 (sequence is synthesized)
cccctcagaatggccaaaaacccccaagtcgtcccagcagctctgcttctaagaagcagtatgtatagaggcctgtggcttatgtcacccaacagaggggtcctgagaagtctggctgcc

SEQ ID NO: 685192 - DNA, 120 bp, Artificial Sequence
  ENSG00000187513_9 (sequence is synthesized)
tgggatgccccctgccccctcctggaaggctctgcagagatgactgggctggggaagcaggtgcttgctggccatggagcctcattgcaagttgttcttgaacacctgaggccttcctgg

SEQ ID NO: 685193 - DNA, 120 bp, Artificial Sequence
  ENSG00000187513_10 (sequence is synthesized)
tgcccaccaggcactacggcttcctctccagaatgtggctttgcctgagcacagacagagtcagcatggaatgctcttggccaagggtactgggggccctctggccttttgcagctgatc

SEQ ID NO: 685194 - DNA, 120 bp, Artificial Sequence
  ENSG00000187513_11 (sequence is synthesized)
cagaggaacccagagccaacttaccccaacctcaccctatggaacagtcacctgtgcgcaggttgtcctcaaaccctctcctcacaggaaaaggcggattgaggctgctgggtcagcctt

SEQ ID NO: 685195 - DNA, 120 bp, Artificial Sequence
  ENSG00000187513_12 (sequence is synthesized)
gatcgcacagacagagcttgtgccggatttggccctgtcaaggggactggtgccttgttttcatcactccttcctagttctactgttcaagcttctgaaataaacaggacttgatcacaa

SEQ ID NO: 685196 - DNA, 120 bp, Artificial Sequence
  ENSG00000187513_13 (sequence is synthesized)
agcagggctcccgcgggcgtcactccggccatcgtccccacctccacctgggccgcccggcaggcaggcggtagaacgggcgtggcagacctccctgcaggcttgttgctgggcgaacga

SEQ ID NO: 685197 - DNA, 120 bp, Artificial Sequence
  ENSG00000187514_0 (sequence is synthesized)
cgcgtgagtcccccactggctgctctgaaaagccatctttgcattgttcctcatccgcctccttgctcgccgcagccgcctccgccgcgcgcctcctccgccgccgcggactccggcagc

SEQ ID NO: 685198 - DNA, 120 bp, Artificial Sequence
  ENSG00000187514_1 (sequence is synthesized)
tttatcgccagagtccctgaactctcgctttctttttaatcccctgcatcggatcaccggcgtgccccaccatgtcagacgcagccgtagacaccagctccgaaatcaccaccaaggact

SEQ ID NO: 685199 - DNA, 120 bp, Artificial Sequence
  ENSG00000187514_2 (sequence is synthesized)
taaaggagaagaaggaagttgtggaagaggcagaaaatggaagagacgcccctgctaacgggaatgctgagaatgaggaaaatggggagcaggaggctgacaatgaggtagacgaagaag

SEQ ID NO: 685200 - DNA, 120 bp, Artificial Sequence
  ENSG00000187514_3 (sequence is synthesized)
aggaagaaggtggggaggaagaggaggaggaagaagaaggtgatggtgaggaagaggatggagatgaagatgaggaagctgagtcagctacgggcaagcgggcagctgaagatgatgagg

SEQ ID NO: 685201 - DNA, 120 bp, Artificial Sequence
  ENSG00000187514_4 (sequence is synthesized)
atgacgatgtcgataccaagaagcagaagaccgacgaggatgactagacagcaaaaaaggaaaagttaaactaaaaaaaaaaaggccgccgtgacctattcaccctccacttcccgtctc

SEQ ID NO: 685202 - DNA, 120 bp, Artificial Sequence
  ENSG00000187514_5 (sequence is synthesized)
tggtcaccttcgagtagagaggcccgcccgcccaccgtgggcagtgccacccgcagatgacacgcgctctccaccacccaacccaaaccatgagaatttgcaacaggggaggaaaaaaga

SEQ ID NO: 685203 - DNA, 120 bp, Artificial Sequence
  ENSG00000187514_6 (sequence is synthesized)
accaaaacttccaaggccctgctttttttcttaaaagtactttaaaaaggaaatttgtttgtattttttatttacattttatatttttgtacatattgttagggtcagccatttttaatg

SEQ ID NO: 685204 - DNA, 120 bp, Artificial Sequence
  ENSG00000187514_7 (sequence is synthesized)
atctcggatgaccaaaccagccttcggagcgttctctgtcctacttctgactttacttgtggtgtgaccatgttcattataatctcaaaggagaaaaaaaaccttgtaaaaaaagcaaaa

SEQ ID NO: 685205 - DNA, 120 bp, Artificial Sequence
  ENSG00000187514_8 (sequence is synthesized)
atgacaacagaaaaacaatcttattccgagcattccagtaacttttttgtgtatgtacttagctgtactataagtagttggtttgtatgagatggttaaaaaggccaaagataaaaggtt

SEQ ID NO: 685206 - DNA, 120 bp, Artificial Sequence
  ENSG00000187514_9 (sequence is synthesized)
tctttttttttccttttttgtctatgaagttgctgtttattttttttggcctgtttgatgtatgtgtgaaacaatgttgtccaacaataaacaggaattttattttgctgagttgttcta

SEQ ID NO: 685207 - DNA, 120 bp, Artificial Sequence
  ENSG00000187514_10 (sequence is synthesized)
gggaccgctatgccgtgcggggcccgcgggctgtcccactcgagggctggagccggcatcgcgcatcgagtccgcttgatacatgaatccgtgtgtgcttgggacggtgcccgcttgtcg

SEQ ID NO: 685208 - DNA, 80 bp, Artificial Sequence
  ENSG00000187514_11 (sequence is synthesized)
gagccggggtccgcggagcggagcggggcgggccggactgagagggccgacaggtggcccggagccgctcgccggacagc

SEQ ID NO: 685209 - DNA, 120 bp, Artificial Sequence
  ENSG00000187514_12 (sequence is synthesized)
ggccgaggggttcccgcaggcccggacgccggacctctgacttaaaggagaagaaggaagttgtggaagaggcagaaaatggaagagacgcccctgctaacgggaatgctaatgaggaaa

SEQ ID NO: 685210 - DNA, 120 bp, Artificial Sequence
  ENSG00000187514_13 (sequence is synthesized)
tggtggccgtgtcgtgtggaaaaagttaccgggcgcccggggccgcgctgccttttggatcccgggcggagtcccacccccgaggacttaaaggagaagaaggaagttgtggaagaggca

SEQ ID NO: 685211 - DNA, 120 bp, Artificial Sequence
  ENSG00000187514_14 (sequence is synthesized)
tgtggagacggagccatgtcgcccattacctaatgaaactgagaagggagactcagtctctcttctagccccgagcgcaagctctgctggacttggcatcgtccgccctccacgatccca

SEQ ID NO: 685212 - DNA, 120 bp, Artificial Sequence
  ENSG00000187514_15 (sequence is synthesized)
cactccgggttttccccattcccagctcggctgcaaccgagagacagacggaagaaactgccaatggaaggacgcaaagcgtcaactttgtgttcgcccgccactctcggccaatgtgcg

SEQ ID NO: 685213 - DNA, 120 bp, Artificial Sequence
  ENSG00000187514_16 (sequence is synthesized)
ctcgtgtctccggagtcccgccttccgtgtcgggcgcccccttttggcagcacagggacgaaccctacgtctcgccatcttgtgtgtggcacaggacttaaaggagaagaaggaagttgt

SEQ ID NO: 685214 - DNA, 120 bp, Artificial Sequence
  ENSG00000187514_17 (sequence is synthesized)
agactgactggctctttcttaatatttcggccctcgtccgcgcccgtcgtgcccctgcagggattggcgcgagtcaccttggcgtctccttaacccttgtgtccctggcgtcatctctga

SEQ ID NO: 685215 - DNA, 120 bp, Artificial Sequence
  ENSG00000187514_18 (sequence is synthesized)
ctctcccaggggcgacttcttggcagagcggagctcggggcccggatctccacaggggctctcagtgaccccttctggactcagtccgggaatgagtttgtggggtgagaacaccgtccc

SEQ ID NO: 685216 - DNA, 120 bp, Artificial Sequence
  ENSG00000187514_19 (sequence is synthesized)
cagtgcggggcctggctgttcgattttctccgaagcaccaaaaggtgacttcccgcgagggcgatgagtagtagcccgagaggcgcatccccgacagtctcggacctacgcagcccggtg

SEQ ID NO: 685217 - DNA, 120 bp, Artificial Sequence
  ENSG00000187514_20 (sequence is synthesized)
aaggatgggaaaccttgatcacagatgccccccgccggccttccttccaccagaccagtgggagagggaccgcaggggcatcaggcctttctcaacatgcgactcttaatttgggacgga

SEQ ID NO: 685218 - DNA, 120 bp, Artificial Sequence
  ENSG00000187514_21 (sequence is synthesized)
taaacatacctatatatgtgtgtgtatgtgtatatgtatagctttgcacagtggcagtatcgtagccaatgagctttacccgaggcgcgattattgctagttaaatatttataaaaacct

SEQ ID NO: 685219 - DNA, 120 bp, Artificial Sequence
  ENSG00000187514_22 (sequence is synthesized)
ttcgagcagcgcctgaacaagaataggttcagaggagactccggtagtctgagtttgggcttggcccagggtggggaaaagcccttgtcctggggcagttaatgtgcaggtttcatgatg

SEQ ID NO: 685220 - DNA, 120 bp, Artificial Sequence
  ENSG00000187514_23 (sequence is synthesized)
gagcctggagggtgttgactggagaagggtctctggggtgggcttggcttggctgggctgtagatgcagccgccagcctctggtgggaggccgggcatcaggagcaacgctctgtccagc

SEQ ID NO: 685221 - DNA, 120 bp, Artificial Sequence
  ENSG00000187514_24 (sequence is synthesized)
ggtctccccacctgcctttagctgaggtgctcaagctgcggagggactgtttctgactttgtaggtggccactgtgtggtcctgaatcttaagaacaggaaggaaacagggctgggctca

SEQ ID NO: 685222 - DNA, 120 bp, Artificial Sequence
  ENSG00000187516_0 (sequence is synthesized)
agagacctacttgagctagagaatcaagcagagctgatgagagccaaacccagcaaacatcatgtcagagaaaaagaactgtaagaactcgtctacaaataacaaccagactcaagaccc

SEQ ID NO: 685223 - DNA, 120 bp, Artificial Sequence
  ENSG00000187516_1 (sequence is synthesized)
ttctagaaatgagctacaggtccctaggagcttcgtggaccgcgttgtgcaagatgaacgagacgtccaaagccagagttcctccacaataaataccctccttaccttgctcgattgcct

SEQ ID NO: 685224 - DNA, 120 bp, Artificial Sequence
  ENSG00000187516_2 (sequence is synthesized)
gcaacacttcacaagatagggagagagaagtggacaacaaccgtgagccccacagcgctgagagtgatgtgactcgctttttgtttgatgagatgcccaaatccaggaagaatgactgaa

SEQ ID NO: 685225 - DNA, 120 bp, Artificial Sequence
  ENSG00000187516_3 (sequence is synthesized)
gactgggtcccagagccttgaagggaacctcacaggcttagccagggcaaaaatgtgtcacagctgaggaatatctgctgttgtcatcaacaagtgctattaaaggatgtaaatccatga

SEQ ID NO: 685226 - DNA, 120 bp, Artificial Sequence
  ENSG00000187522_0 (sequence is synthesized)
gtgaagctccgcggtgcctgatggggccgttgggcggccggtagctgttgctgttgggggaccccctcattcctgccgctgccgtccctgctgcctcatggcggccatcggagttcacct

SEQ ID NO: 685227 - DNA, 120 bp, Artificial Sequence
  ENSG00000187522_1 (sequence is synthesized)
gggctgcacctcagcctgtgtggccgtctataaggatggccgggctggtgtggttgcaaatgatgccggtgaccgagttactccagctgttgttgcttactcagaaaatgaagagattgt

SEQ ID NO: 685228 - DNA, 120 bp, Artificial Sequence
  ENSG00000187522_2 (sequence is synthesized)
tggattggcagcaaaacaaagtagaataagaaatatttcaaatacagtaatgaaagtaaagcagatcctgggcagaagctccagtgatccacaagctcagaaatacatcgcggaaagtaa

SEQ ID NO: 685229 - DNA, 120 bp, Artificial Sequence
  ENSG00000187522_3 (sequence is synthesized)
atgtttagtcattgaaaaaaatgggaaattacgatatgaaatagatactggagaagaaacaaaatttgttaacccagaagatgttgccagactgatatttagtaaaatgaaagaaacggc

SEQ ID NO: 685230 - DNA, 120 bp, Artificial Sequence
  ENSG00000187522_4 (sequence is synthesized)
acattctgtattgggctcagatgcaaatgatgtagttattactgtcccgtttgattttggagaaaagcaaaaaaatgctcttggagaagcagctagagctgctggatttaatgttttgcg

SEQ ID NO: 685231 - DNA, 120 bp, Artificial Sequence
  ENSG00000187522_5 (sequence is synthesized)
attaattcacgaaccgtctgcagctcttcttgcttatggaattggacaagactcccctactggaaaaagcaatattttggtgtttaagcttggaggaacatccttatctctcagcgtcat

SEQ ID NO: 685232 - DNA, 120 bp, Artificial Sequence
  ENSG00000187522_6 (sequence is synthesized)
ggaagttaacagtggaatatatcgggttctttcaacaaacactgatgataacatcggtggtgcacatttcacagaaaccttagcacagtatctagcttctgagttccaaagatccttcaa

SEQ ID NO: 685233 - DNA, 120 bp, Artificial Sequence
  ENSG00000187522_7 (sequence is synthesized)
ggaagtgccaactgttttcttgactcattatatgaaggtcaagattttgattgcaatgtgtccagagcaagatttgaacttctttgttctccactttttaataagtgtatagaagcaatc

SEQ ID NO: 685234 - DNA, 120 bp, Artificial Sequence
  ENSG00000187522_8 (sequence is synthesized)
agaggactcttagatcaaaatggatttacagcagatgatatcaacaaggttgtcctttgtggagggtcttctcgaatcccaaagctacagcaactgattaaagatcttttcccagctgtt

SEQ ID NO: 685235 - DNA, 120 bp, Artificial Sequence
  ENSG00000187522_9 (sequence is synthesized)
gagcttctcaattctatccctcctgatgaagtgatccctattggtgcagctatagaagcaggaattcttattgggaaagaaaacctgttggtggaagactctcttatgatagagtgttca

SEQ ID NO: 685236 - DNA, 120 bp, Artificial Sequence
  ENSG00000187522_10 (sequence is synthesized)
gccagagatattttagttaagggtgtggacgaatcaggagccagtagattcacagtgctgtttccatcagggactcctttgccagctcgaagacaacacacattgcaagcccctggaagc

SEQ ID NO: 685237 - DNA, 120 bp, Artificial Sequence
  ENSG00000187522_11 (sequence is synthesized)
atatcttcagtgtgccttgaactctatgagtctgatgggaagaactctgccaaagaggaaaccaagtttgcacaggttgtactccaggatttagataaaaaagaaaatggattacgtgat

SEQ ID NO: 685238 - DNA, 120 bp, Artificial Sequence
  ENSG00000187522_12 (sequence is synthesized)
atattagctgttcttactatgaaaagggatggatctttacatgtgacatgcacagatcaagaaactggaaaatgtgaagcaatctctattgagatagcatcttagtgttttagagaaatc

SEQ ID NO: 685239 - DNA, 120 bp, Artificial Sequence
  ENSG00000187522_13 (sequence is synthesized)
aagaatttttaaaaacaagaatatcaacatttggttttgtgtataagtggtgtttgtattaaaatactttttcaatgaactgtataaactatgttttattaaactacaatatatcagtaa

SEQ ID NO: 685240 - DNA, 120 bp, Artificial Sequence
  ENSG00000187522_14 (sequence is synthesized)
aaaggagcttattctccatggagtcagtctaattcagaagatggttgatactgaagcctaagagccaggctgtttggaaagctaattctgtgtccaaatatatcaccaaaaccacaagaa

SEQ ID NO: 685241 - DNA, 120 bp, Artificial Sequence
  ENSG00000187522_15 (sequence is synthesized)
gtgctgcatgatttcagagcgcagagaagaaaattgacacgggggcggggtgggcaagcaagtgtattgggaaatatgttaagtgagatctttgtcataaattaataaacctcagaaagt

SEQ ID NO: 685242 - DNA, 120 bp, Artificial Sequence
  ENSG00000187522_16 (sequence is synthesized)
aaatgtgtattgattactgtttaagccacactgtattgaaggttgaataaatagagataaataagacatggtttctgatgtcacagaattaacaagataattacgttaaaatgtggcaag

SEQ ID NO: 685243 - DNA, 120 bp, Artificial Sequence
  ENSG00000187522_17 (sequence is synthesized)
tactttgaatggggaagttctggatagcatgaagacaggacacctgtcctagactctcagagccccaaaagactctcatcttttgaacttttttttttaaacatggatatttttgagagc

SEQ ID NO: 685244 - DNA, 120 bp, Artificial Sequence
  ENSG00000187522_18 (sequence is synthesized)
tttatttctcttattcagtacgtgtgctttttgctttctttgtgaagaatatgggctctgaacattacaattttaaacagaaagtgatctcttatagtcattcatttcttgttttctata

SEQ ID NO: 685245 - DNA, 120 bp, Artificial Sequence
  ENSG00000187522_19 (sequence is synthesized)
gatcattatacttcatgttctacttatgaaattttagtagcttttgtataaaatctttagcagatcatttctaaaaatgtagaattgaacatgtgataaattaaattcattgaaagcaaa

SEQ ID NO: 685246 - DNA, 120 bp, Artificial Sequence
  ENSG00000187527_0 (sequence is synthesized)
agaagagatcctcgccggttgagttcagatggaagagaacagtaagaaggaccatcgggctttgctcaaccagggagaggaggatgaactggaggtgtttggttaccgggaccacaatgt

SEQ ID NO: 685247 - DNA, 120 bp, Artificial Sequence
  ENSG00000187527_1 (sequence is synthesized)
acggaaagccttctgccttgtcgcatccgtgctgacctgtgggggccttctgctggtgttctactggagaccccagtggagagtgtgggccaactgcatcccatgccccttgcaagaagc

SEQ ID NO: 685248 - DNA, 120 bp, Artificial Sequence
  ENSG00000187527_2 (sequence is synthesized)
agacactgttttgctgaggacaacagacgaatttcaaagatatatgaggaagaaggtattctgcctctacttatccacactgaagtttcctgtaagcaagaagtgggaagaatccctggt

SEQ ID NO: 685249 - DNA, 120 bp, Artificial Sequence
  ENSG00000187527_3 (sequence is synthesized)
ggctgaccgccactctgtcataaaccaagccttaataaagccagaattaaaactgcggtgcatggaagtgcagaaaatcaggtatgtttggaacgacctggagaagcggtttcagaaagt

SEQ ID NO: 685250 - DNA, 120 bp, Artificial Sequence
  ENSG00000187527_4 (sequence is synthesized)
tgggttgctagaagacagcaattcctgctctgacatccatcagacatttggattgggtctgaccagtgaagagcaagaggtcagaagattagtgtgtgggcccaacgccattgaggttga

SEQ ID NO: 685251 - DNA, 120 bp, Artificial Sequence
  ENSG00000187527_5 (sequence is synthesized)
aatccaacccatatggaagctgcttgttaaacaggttttaaatccattctatgtgttccaagccttcaccctaactttgtggctgtctcaaggttacatagaatactctgtggccatcat

SEQ ID NO: 685252 - DNA, 120 bp, Artificial Sequence
  ENSG00000187527_6 (sequence is synthesized)
cattttgactgttatctccattgtcttaagtgtgtatgatttgcgacagcaatcagttaagctgcataacctcgtggaggaccacaacaaagtccaggttacaatcattgtaaaagacaa

SEQ ID NO: 685253 - DNA, 120 bp, Artificial Sequence
  ENSG00000187527_7 (sequence is synthesized)
aggtttggaggagctggaatcccgtctcttggttcccggagacattcttattcttccaggaaaattttcattgccatgtgatgctgttttgattgatggaagctgcgtggtgaatgaagg

SEQ ID NO: 685254 - DNA, 120 bp, Artificial Sequence
  ENSG00000187527_8 (sequence is synthesized)
catgcttacaggagaaagtatacctgttacaaagacaccattgccccagatggagaacactatgccttggaaatgtcacagtttggaggattataggaaacacgtccttttctgtggaac

SEQ ID NO: 685255 - DNA, 120 bp, Artificial Sequence
  ENSG00000187527_9 (sequence is synthesized)
agaagttatccaggtcaagccctctgggcaggggcctgtacgagcagtcgttttgcaaacaggttacaatacagccaaaggggacttagtgagatccatcctgtacccccggcctctgaa

SEQ ID NO: 685256 - DNA, 120 bp, Artificial Sequence
  ENSG00000187527_10 (sequence is synthesized)
cttcaaactatacagcgatgccttcaagttcatcgtgttcctggcctgccttggtgtcatgggttttttctatgccctaggggtatatatgtaccatggagttcctccaaaagatactgt

SEQ ID NO: 685257 - DNA, 120 bp, Artificial Sequence
  ENSG00000187527_11 (sequence is synthesized)
gaccatggccctgatcctcctcaccgtgactgtccctccagtgctgccagctgccctgaccataggcaacgtgtatgctcagaagagactgaagaaaaagaaaatcttctgtatctcccc

SEQ ID NO: 685258 - DNA, 120 bp, Artificial Sequence
  ENSG00000187527_12 (sequence is synthesized)
acagagaatcaacatgtgtgggcaaataaacctcgtgtgctttgacaaaactggcactctcactgaagatgggctggacctctgggggactgtccctactgctgacaactgcttccagga

SEQ ID NO: 685259 - DNA, 120 bp, Artificial Sequence
  ENSG00000187527_13 (sequence is synthesized)
agcccacagctttgcctcaggccaggctgtgccatggagcccactgtgtgcggccatggccagctgccactctctgatccttctcaatgggaccatccagggagaccctctggacctcaa

SEQ ID NO: 685260 - DNA, 120 bp, Artificial Sequence
  ENSG00000187527_14 (sequence is synthesized)
aatgtttgagggcactgcctggaaaatggaagattgcattgtagactcctgcaaatttgggacgtcagtttcaaacatcataaaaccaggaccaaaagccagtaagagtccagtggaagc

SEQ ID NO: 685261 - DNA, 120 bp, Artificial Sequence
  ENSG00000187527_15 (sequence is synthesized)
catcatcaccttgtgccagtttccattttcctcgagcctgcagaggatgtccgtgatcgctcagctagctggggagaatcatttccatgtctacatgaaaggtgccccagaaatggtggc

SEQ ID NO: 685262 - DNA, 120 bp, Artificial Sequence
  ENSG00000187527_16 (sequence is synthesized)
ccttaaagatggggaatctttcagaagtcgagcacttagccagagaaaaagtggagtcagagttaacatttctgggacttctcatcatggagaatcgcttgaaaaaagaaaccaaactgg

SEQ ID NO: 685263 - DNA, 120 bp, Artificial Sequence
  ENSG00000187527_17 (sequence is synthesized)
tcttgaaggaactgagtgaggcccgtatcaggactgtgatgattacaggtgataaccttcaaacggccattactgttgcaaagaattctgaaatgatccctccaggcagccaagtgatca

SEQ ID NO: 685264 - DNA, 120 bp, Artificial Sequence
  ENSG00000187527_18 (sequence is synthesized)
ttgttgaggccgatgaaccagaagaatttgttcctgcctctgtgacctggcagctggtggagaaccaagagactggacctgggaagaaagaaatctacatgcatactggaaacagttcaa

SEQ ID NO: 685265 - DNA, 120 bp, Artificial Sequence
  ENSG00000187527_19 (sequence is synthesized)
cccctcgtggggaaggaggaagctgttaccattttgcaatgagtgggaaatcataccaagtgatatttcagcatttcaacagcttgcttccaaaaattctggtgaatggaacagtttttg

SEQ ID NO: 685266 - DNA, 120 bp, Artificial Sequence
  ENSG00000187527_20 (sequence is synthesized)
caagaatgtctcctgggcagaaatcaagccttattgaagaatttcagaaattaaattattatgtgggcatgtgtggagatggagctaacgactgtggggctttgaaagcggctcatgcag

SEQ ID NO: 685267 - DNA, 120 bp, Artificial Sequence
  ENSG00000187527_21 (sequence is synthesized)
gcatttcattatcagagcaggaagcatctgtggcatccccttttacctctaaaacaaccaacatccagtgtgtgcctcatctcatcagagaaggccgagctgctctggtttcatcctttg

SEQ ID NO: 685268 - DNA, 120 bp, Artificial Sequence
  ENSG00000187527_22 (sequence is synthesized)
gagtatttaaatacttgaccatgtacggcataatccagtttatcagtgcattactgctctattggcaactacaactctttggaaattaccagtatctcatgcaagatgtagccattactt

SEQ ID NO: 685269 - DNA, 120 bp, Artificial Sequence
  ENSG00000187527_23 (sequence is synthesized)
tgatggtctgtttaacaatgagttcaactcatgcctacccaaagctggctccatatagaccagcaggacagctcctttctccccctttactgctttcaatatttttgaattcctgtttct

SEQ ID NO: 685270 - DNA, 120 bp, Artificial Sequence
  ENSG00000187527_24 (sequence is synthesized)
cctgcattgtgcagatcagtgcatttctctatgtgaagcagcagccttggtattgtgaggtctaccaatacagtgagtgttttctggccaaccaaagtaatttttcaacaaatgtgagtt

SEQ ID NO: 685271 - DNA, 120 bp, Artificial Sequence
  ENSG00000187527_25 (sequence is synthesized)
tggaaagaaactggactggaaatgcaactctgattcctggttcaattttaagttttgagaccaccacactgtggcccatcaccaccatcaactatatcacagtagcattcatcttttcta

SEQ ID NO: 685272 - DNA, 120 bp, Artificial Sequence
  ENSG00000187527_26 (sequence is synthesized)
agggaaagccatttcgaaaacccatctatacaaactatatattttcatttctgctgctagctgccttgggcctcacaattttcattctgttttctgactttcaagttatataccgtggaa

SEQ ID NO: 685273 - DNA, 120 bp, Artificial Sequence
  ENSG00000187527_27 (sequence is synthesized)
tggagttgatcccaaccataacatcgtggagggttttaattttggtggtagccctcacccaattctgtgtggctttctttgtagaggattccatccttcaaaatcatgaactctggctgt

SEQ ID NO: 685274 - DNA, 120 bp, Artificial Sequence
  ENSG00000187527_28 (sequence is synthesized)
tgatcaaaagagaatttggattctactctaaaagtcaatataggacttggcaaaagaagctagcagaagactcaacctggcctcccataaacaggacagattattcaggtgatggcaaaa

SEQ ID NO: 685275 - DNA, 120 bp, Artificial Sequence
  ENSG00000187527_29 (sequence is synthesized)
atggattctacatcaacggaggctatgaaagccatgaacagattccaaaaagaaaactcaaattgggaggccaacccacagaacagcatttctgggccaggctgtaatcagaattgtcgt

SEQ ID NO: 685276 - DNA, 120 bp, Artificial Sequence
  ENSG00000187527_30 (sequence is synthesized)
cgtacatgctcaacagcattgcttttttccccaaaattaacacattgtggagaagtgatgatactctccccttacctttcctctctccattcaagcattcaaagtatattttcaatgaat

SEQ ID NO: 685277 - DNA, 120 bp, Artificial Sequence
  ENSG00000187527_31 (sequence is synthesized)
taaaccttgcagcaagggaccttagataggcttattctgactgtatgctttaccaatgagagaaaaaaatgcatttcctgtatcatccttttcaataaactgtattcattttgcatagca

SEQ ID NO: 685278 - DNA, 120 bp, Artificial Sequence
  ENSG00000187527_32 (sequence is synthesized)
acaaaaatgctgccttcctccaggctgaccagcctttcagattgttaagtatagagcgggcctttgtgcagtcaggagtctttctgcagcacacaaactgcacagctatacagaatggcc

SEQ ID NO: 685279 - DNA, 120 bp, Artificial Sequence
  ENSG00000187527_33 (sequence is synthesized)
agagccaaacaagtagagggtgttcactaattaactggttagttaattacaccctgttgcctccgaagaacatcctaaagctgtgtccaatgatgtataaaatacagtacagcagttaaa

SEQ ID NO: 685280 - DNA, 120 bp, Artificial Sequence
  ENSG00000187527_34 (sequence is synthesized)
catagctgcaaaagaatgggaacaaatgattgcagggaaacaaagcacacctaacaaagaagctaatacaaagacatataatagggaaattttagctttctagagggcaaatcaatgaaa

SEQ ID NO: 685281 - DNA, 120 bp, Artificial Sequence
  ENSG00000187527_35 (sequence is synthesized)
gaggaaacctggtaaaaagggaaacttctgataccagcaagttaaaatagagcatttgctgtggaaaaacatttgacatagtgaccaattctctggatctcaatggagaggaatcggtgt

SEQ ID NO: 685282 - DNA, 120 bp, Artificial Sequence
  ENSG00000187527_36 (sequence is synthesized)
atttactataagcagtgtccttaacagaatcattgggataaacacggtgatgagttgtgcagggtcattttatatctggctttggtcctggccctaactacatccccctctccattatag

SEQ ID NO: 685283 - DNA, 120 bp, Artificial Sequence
  ENSG00000187527_37 (sequence is synthesized)
gagggctgatctgtctttacaaataacatacttggttgggaatataaatctttagtattagctctgtaagaaccatctgttaagaatagttgtatccatcccaaacaaagcataaaaatg

SEQ ID NO: 685284 - DNA, 120 bp, Artificial Sequence
  ENSG00000187527_38 (sequence is synthesized)
catgatttttcactgagtttagagctgtgtcagaagctgtcttgagtatcttttggtaactgggaaccttccactccacatacagaggagggaaactgtccttttagactgtcaagaatt

SEQ ID NO: 685285 - DNA, 120 bp, Artificial Sequence
  ENSG00000187527_39 (sequence is synthesized)
ttagcatttgatgggatgtcagaatatttttcagaagaaattgagatctacagaaataaagtggtgtccccaagattaaacagaaaatggaagattgcattgtagactcctgcaaatttg

SEQ ID NO: 685286 - DNA, 120 bp, Artificial Sequence
  ENSG00000187527_40 (sequence is synthesized)
tgcaaagcatttctgccagctctggttgcctaggaaaatcacctgggggagtttctaagcttccagtgcaggctgcaccaattaaatcagaacccctggggtaggaactggcatcaggtg

SEQ ID NO: 685287 - DNA, 120 bp, Artificial Sequence
  ENSG00000187527_41 (sequence is synthesized)
cttttcccagcaattccagtgtgcagtcatggctgagaactactgatttatactcatattttccacttggtcattaaaataaccctatgcaattgggcaaaccattaatttttacagatg

SEQ ID NO: 685288 - DNA, 120 bp, Artificial Sequence
  ENSG00000187527_42 (sequence is synthesized)
agaaaactgaggctcagagcagtaagattgcccaatacaaaaactggtgagttgcagagcaggaaagcagacttaggcctatttgattccacacagatccacgggcatttagattgtact

SEQ ID NO: 685289 - DNA, 120 bp, Artificial Sequence
  ENSG00000187527_43 (sequence is synthesized)
atacctatgacatgaagctaacagaggctgggcttttctagatagaaagctccctatgctcttgtgacagaatagctttttcataagacaatgggctgtagccttacattccatcactaa

SEQ ID NO: 685290 - DNA, 120 bp, Artificial Sequence
  ENSG00000187527_44 (sequence is synthesized)
agatgacagctctccctctgctctcagcagatttctggtgcttatttccttgtgaacctacttgcttctccatcggtgcatgctgcctgaatttcactgcatgctgtaacccaggtcctt

SEQ ID NO: 685291 - DNA, 120 bp, Artificial Sequence
  ENSG00000187527_45 (sequence is synthesized)
tgtgaattttaactaacagtccactcacactactcattcatgaatttaatgcctctgctgaaattttagtccccaccaggagaagctgtatcacagtttcaggccttcctcctctctggg

SEQ ID NO: 685292 - DNA, 120 bp, Artificial Sequence
  ENSG00000187527_46 (sequence is synthesized)
tccctccaccatacttcctctccccacattcccagtgcaagcaaaaggaattcctgcccttgtctcaggagggatgctttagaacatgtcttttgttggttattttgcaattggagatag

SEQ ID NO: 685293 - DNA, 120 bp, Artificial Sequence
  ENSG00000187527_47 (sequence is synthesized)
aaagggaggggtgtgtcatcttgcctcccaattcagcacagcaatttttttttctttcaactacaatgctttccctgagatgaagtcatctgatgaataaaattttctcacctcctgcaa

SEQ ID NO: 685294 - DNA, 120 bp, Artificial Sequence
  ENSG00000187527_48 (sequence is synthesized)
acaagttgtgacgattccaagttcacagaagcccaagggattttgacatttctccaaggagttagccagaagagatcctcgccggttgagttcagatggaagagaacagtaagaaggacc

SEQ ID NO: 685295 - DNA, 120 bp, Artificial Sequence
  ENSG00000187527_49 (sequence is synthesized)
cagatggaagagaacagtaagaaggaccatcgggctttgctcaaccagggagaggaggatgaactggtggagtcttgcccaggctggagtgaaatggcacgatctcggctcactgcaacg

SEQ ID NO: 685296 - DNA, 120 bp, Artificial Sequence
  ENSG00000187531_0 (sequence is synthesized)
ctgccgtgtgaggcggaagcggaagagcaggtctccaggggagcgatggcagccgggggtctgagccgctccgagcgcaaagcggcggagcgggtccggaggttgcgggaggagcagcag

SEQ ID NO: 685297 - DNA, 120 bp, Artificial Sequence
  ENSG00000187531_1 (sequence is synthesized)
agggagcgcctccgccaggtgtcgcgcatcctgaggaaggcggcggcggagcgcagcgccgaggagggccggctgctggccgagagcgcggacctggtaacggagctgcagggccggagc

SEQ ID NO: 685298 - DNA, 120 bp, Artificial Sequence
  ENSG00000187531_2 (sequence is synthesized)
cggcggcgcgagggcctgaagcggcggcaggaggaggtgtgcgacgacccggaggagctgcgggggaaggtccgggagctggccagcgccgtccggaacgccaaatacttggtcgtctac

SEQ ID NO: 685299 - DNA, 120 bp, Artificial Sequence
  ENSG00000187531_3 (sequence is synthesized)
acaggcgcgggaatcagcacggcagcgtctatcccagactaccggggccctaatggagtgtggacactgcttcagaaagggagaagcgttagtgctgccgacctgagcgaggccgagcca

SEQ ID NO: 685300 - DNA, 120 bp, Artificial Sequence
  ENSG00000187531_4 (sequence is synthesized)
accctcacccacatgagcatcacccgtctgcatgagcagaagctggtgcagcatgtggtgtctcagaactgtgacgggctccacctgaggagtgggctgccgcgcacggccatctccgag

SEQ ID NO: 685301 - DNA, 120 bp, Artificial Sequence
  ENSG00000187531_5 (sequence is synthesized)
ctccacgggaacatgtacattgaagtctgtacctcctgcgttcccaacagggagtacgtgcgggtgttcgatgtgacggagcgcactgccctccacagacaccagacaggccggacctgc

SEQ ID NO: 685302 - DNA, 120 bp, Artificial Sequence
  ENSG00000187531_6 (sequence is synthesized)
cacaagtgtgggacccagctgcgggacaccattgtgcactttggggagagggggacgttggggcagcctttgaactgggaagcggcgaccgaggctgccagcagagcagacaccatcctg

SEQ ID NO: 685303 - DNA, 120 bp, Artificial Sequence
  ENSG00000187531_7 (sequence is synthesized)
tggtgcatgaccaagccccctagccggcggccgaagctttacatcgtgaacctgcagtggaccccgaaggatgactgggctgccctgaagctacatgggaagtgtgatgacgtcatgcgg

SEQ ID NO: 685304 - DNA, 120 bp, Artificial Sequence
  ENSG00000187531_8 (sequence is synthesized)
ctcctcatggccgagctgggcttggagatccccgcctatagcaggtggcaggatcccattttctcactggcgactcccctgcgtgctggtgaagaaggcagccacagtcggaagtcgctg

SEQ ID NO: 685305 - DNA, 120 bp, Artificial Sequence
  ENSG00000187531_9 (sequence is synthesized)
tgcagaagcagagaggaggccccgcctggggaccggggtgcaccgcttagctcggcccccatcctagggggctggtttggcaggggctgcacaaaacgcacaaaaaggaagaaagtgacg

SEQ ID NO: 685306 - DNA, 120 bp, Artificial Sequence
  ENSG00000187531_10 (sequence is synthesized)
taatcacgtgctcgatgaagaacagttggcactttgcagatggccagtgtcacggtgaaggctgggttgcccccacgggtctagggagaacgaactctttggggatgacattttcaccgt

SEQ ID NO: 685307 - DNA, 120 bp, Artificial Sequence
  ENSG00000187531_11 (sequence is synthesized)
gacatttttagccatttgtccttgaggaagccccttgcactgctgcggttgtaccctgatacggcctggccatcgaggacacctgcccatccggcctctgtgtcaagaggtggcagccgc

SEQ ID NO: 685308 - DNA, 120 bp, Artificial Sequence
  ENSG00000187531_12 (sequence is synthesized)
acctttctgtgagaacggaactcgggttatttcagccccggcctgcagagtggaagcgcccagcggcctttcctcgctcaccaggccagtctcagggcctcaccgtatttctactactac

SEQ ID NO: 685309 - DNA, 120 bp, Artificial Sequence
  ENSG00000187531_13 (sequence is synthesized)
ttaatgaaaaagtgtgaactttatagaatcctctctgtactggatgtgcggcagaggggtggctccgagcctcggctctatgcagacctttttatttctattaaacgtttctgcactggc

SEQ ID NO: 685310 - DNA, 120 bp, Artificial Sequence
  ENSG00000187531_14 (sequence is synthesized)
gcaactaactgcacccgccctctgtctgccagttgactcccatgatgagcacccaccaagcgggttaggccgcgggtttgatcctcctgtgcttgactctccaggacagaaggggagctc

SEQ ID NO: 685311 - DNA, 120 bp, Artificial Sequence
  ENSG00000187531_15 (sequence is synthesized)
aggtctccaggggagcgatggcagccgggggtctgagccgctccgagcgcaaagcggcggagcgggtccggaggttgcgggaggagcagcagagggagcgcctccgccaggtgtgcgacg

SEQ ID NO: 685312 - DNA, 120 bp, Artificial Sequence
  ENSG00000187531_16 (sequence is synthesized)
aggcggaggcgtaccccaggacggagtatgagctccagtaatcgcgaaaaactcgcctttaaagcagctctaaggttttttctcttaaagaaacgaaatgaccaaaacttacctaaggta

SEQ ID NO: 685313 - DNA, 120 bp, Artificial Sequence
  ENSG00000187531_17 (sequence is synthesized)
aacgctttttaaacgcttggcctctgtgttacagccagttaaaaaaaacaaggagtagagatacgaatggggtgtagtagccgactgctcgcaggcacccccaggttatgtggacagagc

SEQ ID NO: 685314 - DNA, 120 bp, Artificial Sequence
  ENSG00000187531_18 (sequence is synthesized)
tcctcatggccgagctgggcttggagatccccgcctatagcaggtgagtgagccgctgcagcagcctgcttccccgcacctctgtgtgctgggccttgtctgtcttctctcgtgagctga

SEQ ID NO: 685315 - DNA, 120 bp, Artificial Sequence
  ENSG00000187531_19 (sequence is synthesized)
gtgtggaggaagctctgaggtgtttgcagtggtgcctgaggcatgactgaagcgtggtggtctccagagggcctgacctcggtggttggcggagaccctgcgtgtgccactcctgccctg

SEQ ID NO: 685316 - DNA, 120 bp, Artificial Sequence
  ENSG00000187531_20 (sequence is synthesized)
ctgcgtgcagcctggaaggatgagccaggccaggcgggaaacggaagtccaggtagaagggaggagccgaattggggtacactccatatgggctcaggcaggtcagcctgtggaatgaat

SEQ ID NO: 685317 - DNA, 120 bp, Artificial Sequence
  ENSG00000187531_21 (sequence is synthesized)
agaggccaacatgcaggccagcccggaatgcggcaggagtgacagtggctttccgtttctgggaattctgccagtacctacagtggtgccttttgacttggcttaccttttttctcgaca

SEQ ID NO: 685318 - DNA, 120 bp, Artificial Sequence
  ENSG00000187531_22 (sequence is synthesized)
tggcctttcccctttgtgattcccttgcatttttctgtggacctcagaagccatcctagtcacaggggaggcttataggacatctctggggaccttctgctgaacaccctcaaccaatgg

SEQ ID NO: 685319 - DNA, 120 bp, Artificial Sequence
  ENSG00000187531_23 (sequence is synthesized)
ggtgtagtggttgatctgcctaggtccccagggacctgaaatgtcatgacccaagagagcatggatctggggcagagtggcccttgccaaaccccgagccacttcccaaccttgccggga

SEQ ID NO: 685320 - DNA, 120 bp, Artificial Sequence
  ENSG00000187531_24 (sequence is synthesized)
tgtgtgttttactttctaaggctctctggggggacggagctgcccctggttttgggagccatcggcggggctcagaacagcctcgctgtggccgggtactgacctccccaccaccactgg

SEQ ID NO: 685321 - DNA, 120 bp, Artificial Sequence
  ENSG00000187531_25 (sequence is synthesized)
ccaagccccctagccggcggccgaagctttacatcgtgaacctgcaggtaactcgggtgctgagagccacgtccttagatctgggtcttagaacgcacagccagagacaccccacaccca

SEQ ID NO: 685322 - DNA, 120 bp, Artificial Sequence
  ENSG00000187531_26 (sequence is synthesized)
tgcaccagggcggtctgatagggcccccgtgggtgctcagggagcaccgactgagcccgtaggggccaaggctgacaggccaccgggaagggttgggctgctgttactctcactcggctt

SEQ ID NO: 685323 - DNA, 120 bp, Artificial Sequence
  ENSG00000187531_27 (sequence is synthesized)
tccctgtcctcagtggaccccgaaggatgactgggctgccctgaagctacatgggaagtgtgatgacgtcatgcggctcctcatggccgagctgggcttggagatccccgcctatagcag

SEQ ID NO: 685324 - DNA, 120 bp, Artificial Sequence
  ENSG00000187531_28 (sequence is synthesized)
atgtaattatgtaacagtcacgtgacctgttatggaacttccaatggcaactaaaagcacatgcagctagtggatttcatcggagtgtttgaggttcccgtcttgaatgtgactgtcgga

SEQ ID NO: 685325 - DNA, 120 bp, Artificial Sequence
  ENSG00000187531_29 (sequence is synthesized)
actactgtccgggggggtggtgcatttttctgagtttaagcaggagtcgggagtccccaaaagggaacacaagacaccttgatcctggcatatcttgtgtgccctctgtgggcctcagtt

SEQ ID NO: 685326 - DNA, 120 bp, Artificial Sequence
  ENSG00000187531_30 (sequence is synthesized)
tgtttcacaggattgaaaacctgggaagttagatgctcatctcatctgaagaagttgttctgcctttgttaaggtggagcgggaatagtcagcactgggacatgagaatggacagtcgcc

SEQ ID NO: 685327 - DNA, 120 bp, Artificial Sequence
  ENSG00000187531_31 (sequence is synthesized)
tggacccacctagggattcaccatttgctaaatgtgtgagctgtgggctcggccctgggggcactttaggaacatgactagtcttcccctgcagtgtggaggacacatgtgccacagagc

SEQ ID NO: 685328 - DNA, 120 bp, Artificial Sequence
  ENSG00000187531_32 (sequence is synthesized)
aggtaagcgggccaggcatggcctcccacataggctgggcagcggcagcacgggcctgagctccagctctcctcaccttgccttcctttctgcctggcagtgctgccgacctgagcgagg

SEQ ID NO: 685329 - DNA, 120 bp, Artificial Sequence
  ENSG00000187531_33 (sequence is synthesized)
ctccgagatgcctggtgggaagcatctggaggggacgagcactcggcagctctggtcagacagaatctgtgtgcttggttttgggagttggcgtactttgggaaagcttaaacaaactgt

SEQ ID NO: 685330 - DNA, 120 bp, Artificial Sequence
  ENSG00000187531_34 (sequence is synthesized)
gccttaatacagaatttgtgataatttagacttggtgtatgtattgagtaaaaagtttacactctctttctctgtgaattttcagggtcttataggggaaatcaataacttcttttaatc

SEQ ID NO: 685331 - DNA, 120 bp, Artificial Sequence
  ENSG00000187531_35 (sequence is synthesized)
aaagggttcaagaaattaaggatcccttcaccttctgggcctggcacttcttgtatgttatgtgtgtggtgttctgtgatgtgggctatcgtgtactgtattttttttttacattaactt

SEQ ID NO: 685332 - DNA, 120 bp, Artificial Sequence
  ENSG00000187531_36 (sequence is synthesized)
agctcattttccttatcagtgcgtatctgtatcttaagttatgatctgtggttctgcatctccgtcagacacatgctttcttcacggggtcgtctgtaggccacgcctccctagtcagct

SEQ ID NO: 685333 - DNA, 120 bp, Artificial Sequence
  ENSG00000187531_37 (sequence is synthesized)
gggaagggggagagggtctggtccacctgccccagcggtacaagtggaaggtggggcccagagttgctagtgactcatccctggagacggaggcagccctggggccactgctgccccacc

SEQ ID NO: 685334 - DNA, 120 bp, Artificial Sequence
  ENSG00000187531_38 (sequence is synthesized)
ctgtgtgtgcacgccgctcagtggtggacaaggacacggagttttgaggagaccgagctagtgtgggtgccgacctttgagtcaccacctaagaggtgacctctcccacatccgttctgc

SEQ ID NO: 685335 - DNA, 120 bp, Artificial Sequence
  ENSG00000187531_39 (sequence is synthesized)
agcttggtaacaatgaagctgccgccaaccagagccccgccgcagttgacacgggagggaaggggatgggaaggcagggaccgcagacagctttcccgagctggggcaggtgtgactgcg

SEQ ID NO: 685336 - DNA, 120 bp, Artificial Sequence
  ENSG00000187531_40 (sequence is synthesized)
cccccggtttcgggagcagctggggcgacgggcggtcccgggtggggcggcccggggcggtgaccaccctggcgtcttggcaggtgtgcgacgacccggaggagctgcgggggaaggtcc

SEQ ID NO: 685337 - DNA, 120 bp, Artificial Sequence
  ENSG00000187531_41 (sequence is synthesized)
gtggggtgttgggcacgcgtcggcctagcagatctgaacccaggtgatttctgttctcaggaagcttttaggtgacaaggatcaggcatgtgaacaaataaccatactgtaaagctggct

SEQ ID NO: 685338 - DNA, 120 bp, Artificial Sequence
  ENSG00000187531_42 (sequence is synthesized)
gtgctgggtcgctagagcaaactcagacacacactctgcgctcttggagttgggaaacccacctgcgttggctttttgtgggaggtggccttgattgggccttgaaggatgggtgagatt

SEQ ID NO: 685339 - DNA, 120 bp, Artificial Sequence
  ENSG00000187531_43 (sequence is synthesized)
tacagaaggttggaatgaggcactccaagcaaagaacagcagaggctcagcagcaagaatgcaaaaagggagttcactactgactcaaatacccggagccctggggtttagtctcctccc

SEQ ID NO: 685340 - DNA, 70 bp, Artificial Sequence
  ENSG00000187531_44 (sequence is synthesized)
tgactcaaatacccggagccctggggtttagtctcctccctccacaagtcacatgtaaaagtccagtcat

SEQ ID NO: 685341 - DNA, 120 bp, Artificial Sequence
  ENSG00000187531_45 (sequence is synthesized)
agcccctgcccgcccgagggtgtccagctctgcggcccagcactgtacagacttgtcccttgtgtgtgtgcggtgtctgtctgtctgcttccacaggttctaaagaagtacccacgcctc

SEQ ID NO: 685342 - DNA, 120 bp, Artificial Sequence
  ENSG00000187533_0 (sequence is synthesized)
aagggtcttcctagacagactaaaaaagccatgtattctttcgtttctctctaaaagaagaaaaatataatttaaaaatacattgcgtattttctaaaacaataaatttatagtgttaat

SEQ ID NO: 685343 - DNA, 120 bp, Artificial Sequence
  ENSG00000187533_1 (sequence is synthesized)
attcatagggtcaatcaaaatgaagcttctcctttgggcctgcattgtatgtgttgcttttgcaaggaagagacggttccccttcattggtgaggatgacaatgacgatggtcacccact

SEQ ID NO: 685344 - DNA, 120 bp, Artificial Sequence
  ENSG00000187533_2 (sequence is synthesized)
tcatccatctctgaatattccttatggcatacggaatttaccacctcctctttattatcgcccagtgaatacagtccccagttaccctgggaatacttacactgacacagggttaccttc

SEQ ID NO: 685345 - DNA, 120 bp, Artificial Sequence
  ENSG00000187533_3 (sequence is synthesized)
gtatccctggattctaacttctcctggattcccctatgtctatcacatccgtggttttcccttagctactcagttgaatgttcctcctctccctcctaggggtttcccgtttgtccctcc

SEQ ID NO: 685346 - DNA, 120 bp, Artificial Sequence
  ENSG00000187533_4 (sequence is synthesized)
ttcaaggtttttttcagcagctgcagcacccgctgccccacctattgcagctgagcctgctgcagctgcacctcttacagccacacctgtagcagctgagcctgctgcaggggcccctgt

SEQ ID NO: 685347 - DNA, 120 bp, Artificial Sequence
  ENSG00000187533_5 (sequence is synthesized)
tgcagctgagcctgctgcagaggcacctgttggagctgagcctgctgcagaggcacctgttgcagctgagcctgctgcagaggcacctgttggagtggagccagctgcagaggaaccttc

SEQ ID NO: 685348 - DNA, 120 bp, Artificial Sequence
  ENSG00000187533_6 (sequence is synthesized)
accagctgagcctgctacagccaagcctgctgccccagaacctcacccttctccctctcttgaacaggcaaatcagtgaaattctctagaagagtaccatgggttcatttctatactgat

SEQ ID NO: 685349 - DNA, 120 bp, Artificial Sequence
  ENSG00000187533_7 (sequence is synthesized)
gcagaaataagtgaaatctacaaaagttttctttcttttccaaagactatttcattctgttgtattcagagtattcatctcactacattgatttgtttgtggtagtttttccttggactt

SEQ ID NO: 685350 - DNA, 120 bp, Artificial Sequence
  ENSG00000187533_8 (sequence is synthesized)
aatttatattgaaaaaacattgataattaaataaataaaatagataatttagaccaatggtgataaggtctggatgaaaactacgctatggaggactgaaatggcaatcattcagcctag

SEQ ID NO: 685351 - DNA, 120 bp, Artificial Sequence
  ENSG00000187533_9 (sequence is synthesized)
cctggagtctgattatacagctactataggatgatgttagtattggttttgagtgcaataggttttttcctaaacaaacatattttgtagtcaatgaactttttgtcacaaaacagtaaa

SEQ ID NO: 685352 - DNA, 120 bp, Artificial Sequence
  ENSG00000187533_10 (sequence is synthesized)
acatctgtgtttaacctatggtaaacaacatgttaatgaactatgctatccatgacttaatggacagttcaaatgtgacatctacagtttttcatttctcttttatgccagcacacaatc

SEQ ID NO: 685353 - DNA, 120 bp, Artificial Sequence
  ENSG00000187533_11 (sequence is synthesized)
aattcatcaccaattgtcatttgatttacttcaaaaaatatacccccaaatcctaatacttctaaccttctccactgcatctagccaactctagctattgtcatccctaacagaaatgga

SEQ ID NO: 685354 - DNA, 85 bp, Artificial Sequence
  ENSG00000187533_12 (sequence is synthesized)
ccctaacagaaatggaggaatagcctactgttgcacggctgtagtgcaatggtgccaactcagctcactgcaacttccacctccc

SEQ ID NO: 685355 - DNA, 120 bp, Artificial Sequence
  ENSG00000187533_13 (sequence is synthesized)
tgggaatacaggcgtgagccaccgtgccctgccagaatagcctattaaccagtctacctgcttccacttttcctccaccctgatcacatacacacatgcattatccactgagcagtcaca

SEQ ID NO: 685356 - DNA, 120 bp, Artificial Sequence
  ENSG00000187533_14 (sequence is synthesized)
cacatacacacatgcattatccactgagcagtcacaatcagatgttaaaccaaacattattcagataagatctctgaaaagcctctgatactttctcttttaaaatggaatatattctaa

SEQ ID NO: 685357 - DNA, 120 bp, Artificial Sequence
  ENSG00000187533_15 (sequence is synthesized)
acacctctccaaggacacaagacttaccttgtctaactaatgacttttctaacttcattccctatcattctccatcttgccccatgctcctcatgcagcagcttttttttttttttcctt

SEQ ID NO: 685358 - DNA, 120 bp, Artificial Sequence
  ENSG00000187533_16 (sequence is synthesized)
tttcaaatatgttggttttgatcttatccaagaacctttgccctgatgtatgaatgactaactgcttttctacttcgggggtctcatatagaaatcctgcttcagaatactcttccctga

SEQ ID NO: 685359 - DNA, 120 bp, Artificial Sequence
  ENSG00000187533_17 (sequence is synthesized)
gcactctatctaaataaatccctcttctgcaacccagtgctttttgttctattactgacttcttttccttgtagaagttactattactgctttttacctttttatttatttgtgtattgt

SEQ ID NO: 685360 - DNA, 120 bp, Artificial Sequence
  ENSG00000187533_18 (sequence is synthesized)
ttattcagcactttatcagggcctataacaatgcctgggacatattcagtgaccagtgaatatttttggaaggaaagaaaagaagaaagaatgaagtaacaaacaaagaatgaaggaaga

SEQ ID NO: 685361 - DNA, 120 bp, Artificial Sequence
  ENSG00000187533_19 (sequence is synthesized)
aaaaatttttacaaacattcaacatatttttattttgaaataattttgtatttttccctatatcctacattggatcagaatattactgttatgtatagccatgaggacatggtctcaaaa

SEQ ID NO: 685362 - DNA, 120 bp, Artificial Sequence
  ENSG00000187533_20 (sequence is synthesized)
aatgagaaactttcttagacagtaaaattgttaacttgagatgtttgcttccatcttctagagccaagtaggatctaactttaatttgacttagccaataatctgaaactattatagtat

SEQ ID NO: 685363 - DNA, 120 bp, Artificial Sequence
  ENSG00000187533_21 (sequence is synthesized)
ctgtctttcacagatacatgcaatattcacttctaaatatttaatgataaatttgtaatcatacatgatagtcaattttaatgattatgttgtcaaaattcaggctttttgtgtgaattg

SEQ ID NO: 685364 - DNA, 120 bp, Artificial Sequence
  ENSG00000187533_22 (sequence is synthesized)
aagacttaaagaagaatttgtaaatatgactgtataagaaacaacagaaagatgaagatgaaccgaaatagaaatatcaagaggctacaaagtcttagcaaattataattgctaatggta

SEQ ID NO: 685365 - DNA, 120 bp, Artificial Sequence
  ENSG00000187533_23 (sequence is synthesized)
cattatgtggtgtttagtatcacatttagaatgtagtcatttgttaagtttttcatggggtaaaagaaagaatttattccaagaaaattttggaattttaaaaataaacatgacatctta

SEQ ID NO: 685366 - DNA, 120 bp, Artificial Sequence
  ENSG00000187533_24 (sequence is synthesized)
tcatgagaaacatttacagtttttgcttttactacaagatactgtgaaatgttctgctctgtcagttgtgaaagtatgaaatttaagtctatcactacaataatattttgtttttagtgt

SEQ ID NO: 685367 - DNA, 120 bp, Artificial Sequence
  ENSG00000187533_25 (sequence is synthesized)
tcatttttttcctcctgactacattgagatgagttagattgagtgaaaggtaaacactaacatttgaattgaggtaatttccactgtggaaaacaaactgttgttagtaaacaggcatca

SEQ ID NO: 685368 - DNA, 120 bp, Artificial Sequence
  ENSG00000187533_26 (sequence is synthesized)
gctttgagacacagaaaagtcatccaaaccagaagattgggaacttcctcaattactttgtcttccatttattgcattcaattagtcaaaaatgttgttaattatacattttaaagacta

SEQ ID NO: 685369 - DNA, 120 bp, Artificial Sequence
  ENSG00000187533_27 (sequence is synthesized)
tttttggtaaggtctatgacacattcaaaatactacatacaagtttgtattatcataaataatccaaaagaaaacatacatgtaaccaccaccatctggaaatttcacactaaattataa

SEQ ID NO: 685370 - DNA, 120 bp, Artificial Sequence
  ENSG00000187533_28 (sequence is synthesized)
aacatttccatcactgcatgtattgtttaatgtcgctttatgaatccaccttcttccttatctgtagagttaaaaactacttagtggattagggtaattcattctacttttaaaaatgat

SEQ ID NO: 685371 - DNA, 120 bp, Artificial Sequence
  ENSG00000187533_29 (sequence is synthesized)
ttttccacctctaatgtattctataaaataatattgttcacttttgcctatttttgagctttttatagaaaaatgctactgcgaaattattttgagtcatatcttttgatcgatattaag

SEQ ID NO: 685372 - DNA, 120 bp, Artificial Sequence
  ENSG00000187533_30 (sequence is synthesized)
atacatttgcagagttttgtatgtgtgtttatatccatcttacataattctttactgtatagcgttccctttagccactggaaaatgatataatgtcattgcttacagaaggtgactgat

SEQ ID NO: 685373 - DNA, 120 bp, Artificial Sequence
  ENSG00000187533_31 (sequence is synthesized)
tcttattcagtgctactttctacagacaggtaactattcgcatttacgattaagaaatgttcacaccttcacactggtatcaactgcaacaaccactatacttctccagtgattgccaga

SEQ ID NO: 685374 - DNA, 120 bp, Artificial Sequence
  ENSG00000187533_32 (sequence is synthesized)
tggcccactatacatcctttcttctatttctttcttttgtggccagaaagtcaggacctcaaagaggtataagtttgtgtgtataattccctggcttttttctaaaattttagtatgcat

SEQ ID NO: 685375 - DNA, 120 bp, Artificial Sequence
  ENSG00000187533_33 (sequence is synthesized)
aaaagagttttatgagttttaaaaatgtatataaacaagacatataataaatggtatgtcatttcacaatttactatttttactcaacatttatatttctgagacttttcacatttttga

SEQ ID NO: 685376 - DNA, 120 bp, Artificial Sequence
  ENSG00000187533_34 (sequence is synthesized)
gagacttttcacatttttgaatgtattcatagtttcactttaattgatgtttgccatgaaagatcaaatatatcacattttatttgactaaaaagtaaactatatttcctacattatgct

SEQ ID NO: 685377 - DNA, 120 bp, Artificial Sequence
  ENSG00000187533_35 (sequence is synthesized)
atagaacttatagactaatttaagttaattataggccttatctcagacctttgcaagtagcctgaataaaacttttcattatttatattatcacatgcatatatgtgtgtatgtatatat

SEQ ID NO: 685378 - DNA, 120 bp, Artificial Sequence
  ENSG00000187533_36 (sequence is synthesized)
gtgtgcatgtgcatgcatagtaaaaatcttaacccaaaactgaaataaaaaattataagagaaaatactattttccaccaatatcacaatggataatcttttttaaatgactacatatgt

SEQ ID NO: 685379 - DNA, 120 bp, Artificial Sequence
  ENSG00000187533_37 (sequence is synthesized)
cgataagttacaaaatccatatatgagtatgacaccaataagaacattttctctaaccattttgaatacgaataaccatggattctaatagcaaacattattaaaatattattgaaataa

SEQ ID NO: 685380 - DNA, 120 bp, Artificial Sequence
  ENSG00000187533_38 (sequence is synthesized)
ggtaccggtccttggcctgttaggaaccacgcaggacagcaggaggaaaactgccggcatctctcagaaagaaacaccaaaaaagactgttgatatggaatcaactgaagtattcaccaa

SEQ ID NO: 685381 - DNA, 120 bp, Artificial Sequence
  ENSG00000187533_39 (sequence is synthesized)
gaaaactgagctgactgaagaagaaaagaatgaccaaaaacatctgaacaaaatcaaccagtattatcagttcaccttgccccaatatgtaaaagctgtttatcaatatcacaaaattat

SEQ ID NO: 685382 - DNA, 120 bp, Artificial Sequence
  ENSG00000187533_40 (sequence is synthesized)
ttgaattaactgctcctactttactttgggtcaatcaaaatgaagcttctcctttgggcctgcattgtatgtgttgcttttgcaaggaagaatgctggattgggcttcctatggctgtga

SEQ ID NO: 685383 - DNA, 120 bp, Artificial Sequence
  ENSG00000187533_41 (sequence is synthesized)
agtgctactttctacagacagtggggagatgtttgatgcaactgtgattcattcagtgaagagcatttaaatgaccatgaatatgatcaaaacaacgttcatattaaacacctaactata

SEQ ID NO: 685384 - DNA, 120 bp, Artificial Sequence
  ENSG00000187535_0 (sequence is synthesized)
gcagcagtgttgacggatacgtgagaagaaaacggcgtggtagctcggagtgtggaatcgggcgcgaacctgagttctgagaagtgtggaagcacgtctgaggcaagcggaataacctgg

SEQ ID NO: 685385 - DNA, 120 bp, Artificial Sequence
  ENSG00000187535_1 (sequence is synthesized)
cccccgacgctcgggcctcggagctgcacgtgcgtgcccgatcgccttcggctctttccggccgctcggggcgcttcgggagtcctcggggccgcctcgctcaccttcggctatttccgc

SEQ ID NO: 685386 - DNA, 120 bp, Artificial Sequence
  ENSG00000187535_2 (sequence is synthesized)
gttcctggcgcgccgttgtcccggcaacgcgcggcggctcagcggcctggcagaggtttcagcgctgaggaggcctgagttccgtcatggccctctattatgaccaccagatagaagccc

SEQ ID NO: 685387 - DNA, 120 bp, Artificial Sequence
  ENSG00000187535_3 (sequence is synthesized)
cggatgcagcagggtcaccctcatttatcagctggcaccctgtccatccattcttggcagttgcttacatcagcacaacctcaacaggcagcgtggatatttacctggagcaaggggagt

SEQ ID NO: 685388 - DNA, 120 bp, Artificial Sequence
  ENSG00000187535_4 (sequence is synthesized)
gcgtgccagatacacacgtcgagaggccgttccgggttgcttccctgtgctggcacccgacgcggctggtgctggctgtgggctgggagactggagaagtgacggtgtttaacaagcagg

SEQ ID NO: 685389 - DNA, 120 bp, Artificial Sequence
  ENSG00000187535_5 (sequence is synthesized)
acaaggagcagcacacgatgcccctgacacacacagccgacatcaccgtgctccgttggagccccagtggaaactgcctgctgtctggggacaggcttggtgtcttgctcttgtggaggt

SEQ ID NO: 685390 - DNA, 120 bp, Artificial Sequence
  ENSG00000187535_6 (sequence is synthesized)
tggaccaaaggggccgagtgcaagggacgcctctgctgaaacacgagtatgggaaacacctcacgcactgcatcttccggctcccccctcctggcgaggacctggttcagttggcaaagg

SEQ ID NO: 685391 - DNA, 120 bp, Artificial Sequence
  ENSG00000187535_7 (sequence is synthesized)
cagctgtgagcggtgatgagaaagccctggacatgtttaactggaagaagagcagttctggaagtttgctgaagatggggtctcacgaggggctgttgttctttgtcagtctgatggacg

SEQ ID NO: 685392 - DNA, 120 bp, Artificial Sequence
  ENSG00000187535_8 (sequence is synthesized)
ggacagtgcactatgtggatgagaagggcaagaccactcaggtggtgtccgcagacagcacgattcagatgctgttctacatggagaagagggaggcactggtggtggtcacagagaacc

SEQ ID NO: 685393 - DNA, 120 bp, Artificial Sequence
  ENSG00000187535_9 (sequence is synthesized)
tccggctgtccctgtacacggtgcctcctgagggcaaagcagaagaagtgatgaaggtcaagctgagcgggaaaaccggccgccgggcagacatcgctttgattgaaggcagccttctcg

SEQ ID NO: 685394 - DNA, 120 bp, Artificial Sequence
  ENSG00000187535_10 (sequence is synthesized)
tgatggccgtcggggaggctgccctcagattctgggacatagaacgaggagagaattatatactgagtccagatgagaagtttggctttgagaaaggagagaatatgaactgtgtgtgtt

SEQ ID NO: 685395 - DNA, 120 bp, Artificial Sequence
  ENSG00000187535_11 (sequence is synthesized)
actgtaaagtcaaaggtcttctggccgctggtaccgacagagggcgagtagccatgtggaggaaagtaccagacttcctgggcagccccggggcagagggcaaggacaggtgggcccttc

SEQ ID NO: 685396 - DNA, 120 bp, Artificial Sequence
  ENSG00000187535_12 (sequence is synthesized)
agacccctaccgagctccaaggaaacatcacgcaaatccagtggggttccaggaagaacctgctggcagtgaacagcgtcatctccgtggccatcctcagcgagcgggccatgtcgtcac

SEQ ID NO: 685397 - DNA, 120 bp, Artificial Sequence
  ENSG00000187535_13 (sequence is synthesized)
acttccaccagcaagtggccgccatgcaggtctccccgagtctgctgaatgtgtgcttcctgtccacgggggtcgcacacagcctgcgcaccgacatgcacatcagtggagtgtttgcca

SEQ ID NO: 685398 - DNA, 120 bp, Artificial Sequence
  ENSG00000187535_14 (sequence is synthesized)
ccaaggatgctgtcgcagtctggaacggaaggcaggtggcgatcttcgagctttctggagccgcgatacggagtgcagggaccttcttgtgtgagacgcctgtgttagcaatgcatgaag

SEQ ID NO: 685399 - DNA, 120 bp, Artificial Sequence
  ENSG00000187535_15 (sequence is synthesized)
aaaacgtttacacggtggagtcaaaccgagttcaagttcgaacctggcaggggactgtcaaacaactcctccttttctcggagactgaggggaatccctgcttcttggacatctgtggga

SEQ ID NO: 685400 - DNA, 120 bp, Artificial Sequence
  ENSG00000187535_16 (sequence is synthesized)
atttcctggttgtagggacagacttggctcactttaaaagctttgatctttcccgaagagaggccaaagcacactgtagctgcaggagcctggcggagctggtccctggggtggggggca

SEQ ID NO: 685401 - DNA, 120 bp, Artificial Sequence
  ENSG00000187535_17 (sequence is synthesized)
tcgcttctctgcggtgcagcagcagcgggagcaccatcagcatcctccccagcaaggctgacaacagccctgattccaaaatctgcttctacgatgttgaaatggacacagtgaccgtct

SEQ ID NO: 685402 - DNA, 120 bp, Artificial Sequence
  ENSG00000187535_18 (sequence is synthesized)
ttgacttcaagactggacaaattgatcggagagagacgctgtcctttaatgagcaagagactaataagagccacctctttgtggatgagggactgaaaaattatgttcccgtgaaccact

SEQ ID NO: 685403 - DNA, 120 bp, Artificial Sequence
  ENSG00000187535_19 (sequence is synthesized)
tctgggaccagagtgagccccggctgtttgtatgcgaagccgtgcaggagacgccgcgctcccagcctcagtctgcaaacgggcagccccaagatgggcgcgctggccctgcggcagatg

SEQ ID NO: 685404 - DNA, 120 bp, Artificial Sequence
  ENSG00000187535_20 (sequence is synthesized)
ttttgatcctgtccttcttcatttccgaagagcacggcttcctgcttcatgagagcttcccccggcctgccacctcccacagtctcctggggatggaagtgccttattactacttcacaa

SEQ ID NO: 685405 - DNA, 120 bp, Artificial Sequence
  ENSG00000187535_21 (sequence is synthesized)
ggagacccctgcgagactttgtggggctggaggactgcgacaaggccacccgggacgccatgctccacttcagcttctttgtcaccataggagacatggacgaagccttcaaatccatca

SEQ ID NO: 685406 - DNA, 120 bp, Artificial Sequence
  ENSG00000187535_22 (sequence is synthesized)
agctcatcaaaagtgaggccgtctgggagaacatggcgcgcatgtgcgtgaagacccagcggctggacgtggccaaggtgtgcctggggaacatgggccatgcccgcggggcccgagcgc

SEQ ID NO: 685407 - DNA, 120 bp, Artificial Sequence
  ENSG00000187535_23 (sequence is synthesized)
tgcgtgaggcggagcaggagccggagctagaggcccgcgtggccgtgctggccacgcagctgggcatgctggaggacgccgagcagctgtacaggaagtgcaagcgccacgacctcctga

SEQ ID NO: 685408 - DNA, 120 bp, Artificial Sequence
  ENSG00000187535_24 (sequence is synthesized)
acaagttctaccaggctgcgggccggtggcaggaggccctccaggtagccgagcaccacgatcgcgtgcacctgcgcagcacctaccaccgctatgccgggcacctggaggccagcgccg

SEQ ID NO: 685409 - DNA, 120 bp, Artificial Sequence
  ENSG00000187535_25 (sequence is synthesized)
actgcagccgggccctcagttactacgagaagtcggacacgcaccgcttcgaggtgcccaggatgctgtcggaggacctgccgtccctggagctctacgtgaataaaatgaaggataaga

SEQ ID NO: 685410 - DNA, 120 bp, Artificial Sequence
  ENSG00000187535_26 (sequence is synthesized)
ccctgtggcggtggtgggcgcagtacctggagagccagggcgagatggacgccgcgctgcactactacgagctggcccgggaccacttctccctggtccgcatccactgcttccagggca

SEQ ID NO: 685411 - DNA, 120 bp, Artificial Sequence
  ENSG00000187535_27 (sequence is synthesized)
atgtccagaaggctgcgcaaatagccaacgagacaggaaacctggcggcctcctaccacctcgcccgccagtacgagagccaggaggaggtcgggcaggcggtgcacttctacacccggg

SEQ ID NO: 685412 - DNA, 120 bp, Artificial Sequence
  ENSG00000187535_28 (sequence is synthesized)
cacaggccttcaagaatgccatccgcctgtgcaaggagaacggcctggacgaccagctcatgaacttggccctgctgagctcccccgaggacatgatcgaggcggcccgatactacgagg

SEQ ID NO: 685413 - DNA, 120 bp, Artificial Sequence
  ENSG00000187535_29 (sequence is synthesized)
agaagggcgtgcagatggacagggcggtcatgctgtaccacaaggctggccacttctccaaggccctggagctggcctttgccacccagcagtttgtggccctacagctcatagcagagg

SEQ ID NO: 685414 - DNA, 120 bp, Artificial Sequence
  ENSG00000187535_30 (sequence is synthesized)
acctggatgagacgtcagaccctgcgctcctggcccgctgctccgacttcttcatcgagcacagtcagtacgagagggcggtagagctgctgctggctgccaggaagtatcaggaagccc

SEQ ID NO: 685415 - DNA, 120 bp, Artificial Sequence
  ENSG00000187535_31 (sequence is synthesized)
tgcagctgtgcctggggcagaacatgagcatcaccgaggagatggcggaaaagatgaccgtggccaaggactcctcggacctgcctgaggagtcgcggcgggagctgctggagcagatag

SEQ ID NO: 685416 - DNA, 120 bp, Artificial Sequence
  ENSG00000187535_32 (sequence is synthesized)
cagactgctgcatgcgccagggcagctaccacctggccaccaagaagtacacgcaggccggcaacaagctgaaggccatgagggcgctgctcaaatccggagacacggagaaaatcacgt

SEQ ID NO: 685417 - DNA, 120 bp, Artificial Sequence
  ENSG00000187535_33 (sequence is synthesized)
tcttcgcgagcgtgtccaggcagaaggaaatctacatcatggctgctaactacctgcagtccctggactggcggaaggagccggagatcatgaagaacatcatcggcttctacaccaagg

SEQ ID NO: 685418 - DNA, 120 bp, Artificial Sequence
  ENSG00000187535_34 (sequence is synthesized)
ggcgggccctggacctcctggctggcttttatgacgcttgtgcccaggtggagattgatgaataccagaactacgacaaagcccacggggcgctgaccgaggcctacaagtgcctggcca

SEQ ID NO: 685419 - DNA, 120 bp, Artificial Sequence
  ENSG00000187535_35 (sequence is synthesized)
aggccaaggccaagagccccctggaccaggagaccaggctggcgcagctgcagagcaggatggcactggtgaagaggttcatccaggcccgcaggacgtacacagaggaccccaaggagt

SEQ ID NO: 685420 - DNA, 120 bp, Artificial Sequence
  ENSG00000187535_36 (sequence is synthesized)
ccatcaagcagtgtgagctgctcctggaggaaccagacctggacagcaccatccgcatcggggacgtctatggcttcctggtggagcactacgtgcggaaggaggaataccagacggcct

SEQ ID NO: 685421 - DNA, 120 bp, Artificial Sequence
  ENSG00000187535_37 (sequence is synthesized)
acagattcctggaggagatgcggcggcggcttcccttggccaacatgtcctactacgtgagcccgcaggccgtggacgccgtgcaccgggggctgggtctcccactgccacgcaccgtcc

SEQ ID NO: 685422 - DNA, 120 bp, Artificial Sequence
  ENSG00000187535_38 (sequence is synthesized)
ccgagcaggtccgccacaacagcatggaggacgccagggagctggacgaggaggtggtggaagaggcagatgacgacccctgaggggcctgggccccaggaccagcgtgctgctgcagaa

SEQ ID NO: 685423 - DNA, 120 bp, Artificial Sequence
  ENSG00000187535_39 (sequence is synthesized)
aggcatcttctggaatttttttgtcagctgtggcaaagccagcatttttgctgggaaaaaacatgtctgtgttggaatacgcgacagagctgggcgagaacgcagcggcccgggccggcg

SEQ ID NO: 685424 - DNA, 120 bp, Artificial Sequence
  ENSG00000187535_40 (sequence is synthesized)
gagggtgtgacccgtctgcaccttgctctgtcccacctgcctctgggtgcccggcagctccactagatttttggattcattcctttgaagggagtcgggttcacccttccatcgtattct

SEQ ID NO: 685425 - DNA, 120 bp, Artificial Sequence
  ENSG00000187535_41 (sequence is synthesized)
cccaactacacattgtaaagcctgagaaacttctagaacctcaggaagctgcagctggagggctggggcacctgcccccctgctccccacacatcatatcctccccatactcctgcaggg

SEQ ID NO: 685426 - DNA, 120 bp, Artificial Sequence
  ENSG00000187535_42 (sequence is synthesized)
cccacggctcctgagcaacagctgggacacccgggccttggcggctgcaccccctgctaggctctgcccaccggccaccaacactcctgtaattccaataaagcagtttattttctgaga

SEQ ID NO: 685427 - DNA, 120 bp, Artificial Sequence
  ENSG00000187535_43 (sequence is synthesized)
ggccccctggggaaggaggaggcacgcccaccggcctgagcctgcactgatgtgggcagagccgagaggcatgacccaggagagctgggcagacagcggcggtggaggtgaggtgggtgg

SEQ ID NO: 685428 - DNA, 120 bp, Artificial Sequence
  ENSG00000187535_44 (sequence is synthesized)
aggctaggcgaccgccggctctccagggtgtgtgcctgtcaggtgtgtgggcctggaacagagcgcccgagagacccccaggtcagcagggctgagcacgggacttctggggaggctgtg

SEQ ID NO: 685429 - DNA, 120 bp, Artificial Sequence
  ENSG00000187535_45 (sequence is synthesized)
ggagggggggctgtgggaggggggctgtgggaggtggggtaccccttggtggtgcatctcactctccagccgtgggacggggatgccccgtgggtgtgtggcgtttgctgtgcccacagc

SEQ ID NO: 685430 - DNA, 120 bp, Artificial Sequence
  ENSG00000187535_46 (sequence is synthesized)
ggccccgtgtgtcagtgtgcttggcggtgtgggaaggtgcggtgaccggtggcctggcgtggaacagtgtgtttgagacgtgggtgtgtggaggctgcacgacacctgcccatcctcatt

SEQ ID NO: 685431 - DNA, 120 bp, Artificial Sequence
  ENSG00000187535_47 (sequence is synthesized)
gagaatcgtgtcagtgacacgtggtccggccagtgtctgccactcactgctcaccccgtctgcctcacccgcccacccctctgcccacccctggccgcttccatctgacattgtttgcaa

SEQ ID NO: 685432 - DNA, 120 bp, Artificial Sequence
  ENSG00000187535_48 (sequence is synthesized)
agcactgaattgtccccagatgtttcccaggctccagggctcctgagtgggtggtgaggctgctcacggcctatggccttgcagacggcagacccttcctagatagctgttgggcgttct

SEQ ID NO: 685433 - DNA, 120 bp, Artificial Sequence
  ENSG00000187535_49 (sequence is synthesized)
gcaccacacaaatgtcccaacctgggctctcgcttccagaagcatctcccgtgtcaggtatttcttgcagtgctctgtgaaatagaacccagagcatcggaaaatccttgtagacaaacc

SEQ ID NO: 685434 - DNA, 120 bp, Artificial Sequence
  ENSG00000187535_50 (sequence is synthesized)
cagtaagtcatcagctccttaaaacccatcaccgcagagatcgctgagcagtgtgtcaaagtgaaggggcgggttcgcacccggccacattccagaatctcagcggacctggggaagcca

SEQ ID NO: 685435 - DNA, 120 bp, Artificial Sequence
  ENSG00000187535_51 (sequence is synthesized)
agcctgaaaccagagaaggagaggtgggccgtgagcaacccttggttggcgcagcttgttcccgtctagttagtcgctgatgctacagtttcacttacagttttatctttgaggagctcc

SEQ ID NO: 685436 - DNA, 120 bp, Artificial Sequence
  ENSG00000187535_52 (sequence is synthesized)
gtcccagaggagaggccagggatgccgggtgcgggacagatccctcgtctcgcctgttgcttttaagcctggtggcccccggggcctggaggctggtactgagcgactattgcctgccct

SEQ ID NO: 685437 - DNA, 120 bp, Artificial Sequence
  ENSG00000187535_53 (sequence is synthesized)
ggggacttcacaccccccagccatccagttgcccccaggaccataggtacccccaggaccataggaaccacaagcctccccccgcccgtgtgttccaggcctgcccccgccacgggaatg

SEQ ID NO: 685438 - DNA, 120 bp, Artificial Sequence
  ENSG00000187535_54 (sequence is synthesized)
ctgccctcaaaaggggggcagatatcacaggattgctgggaaggggagagacccgtgtgcctggagggagcaagttcacccagacctgcagggccagggacctgtacttggaggacctcg

SEQ ID NO: 685439 - DNA, 120 bp, Artificial Sequence
  ENSG00000187535_55 (sequence is synthesized)
gggccagggacctgtacttggagggccttggggccagggacctgtacttggaggacctcggggccagggacctgtacttggaggacctcgaggccaggtcattcttaggtggcaagaagg

SEQ ID NO: 685440 - DNA, 120 bp, Artificial Sequence
  ENSG00000187535_56 (sequence is synthesized)
tgctgtctggggacagggtgagtcaacacgcgcaagacgctgttttcagaccttgaccctttctgaccatgctcgagagtatgaaagatcaaaatatgggaaccgtgctgttgccaaatt

SEQ ID NO: 685441 - DNA, 120 bp, Artificial Sequence
  ENSG00000187535_57 (sequence is synthesized)
atgggcttaacagattctttcccaaaagctggtttgatggaggcacttgtagaggctctggagacgctggacgcctgaaagtttcagcgctgaggaggcctgagttccgtcatggccctc

SEQ ID NO: 685442 - DNA, 120 bp, Artificial Sequence
  ENSG00000187535_58 (sequence is synthesized)
gaggtgagtggccttagggctagggcggccgacccaggtccttaggagccaggccggggtttggggccgaggatgtgaccggtggcgggcgtcgggaccctcccgtctcctcccacgatc

SEQ ID NO: 685443 - DNA, 120 bp, Artificial Sequence
  ENSG00000187535_59 (sequence is synthesized)
ccggcgccgccgagtccccgcggcccctcgcgagtcccatcgaggctggggcgggcttggcgcggggtccaggtcgctcgtcggactatggctgtcgcccccgcccggcctcgaatcgcg

SEQ ID NO: 685444 - DNA, 120 bp, Artificial Sequence
  ENSG00000187535_60 (sequence is synthesized)
gatgttgggagatagcgcgtgctcacggctctttcctttctccctgtttgccttcttggttcgcctgttgaaatatttgactcctcatgactgcgtcatggtgtatttcatggtcttccc

SEQ ID NO: 685445 - DNA, 120 bp, Artificial Sequence
  ENSG00000187535_61 (sequence is synthesized)
actcgatgaaatgctgcccagcttgcagatgccacgtgggaagctctcagcctctctggtgctgggagcctctcgggctgtttagctgcttcctagtggaaagttctgccgttcctaaac

SEQ ID NO: 685446 - DNA, 120 bp, Artificial Sequence
  ENSG00000187535_62 (sequence is synthesized)
atctataatacccatccctctgggaataattgctcctaaacagaagtttggacaagtaaacactaaaaacagccaggtggaaacacaattaaaaatgctctgaaagagggtatcaatcaa

SEQ ID NO: 685447 - DNA, 120 bp, Artificial Sequence
  ENSG00000187535_63 (sequence is synthesized)
ggacccggcccctgcctcttggggttaggaaggccgtgggactcgtgacgggcacctctctgcatggcctgcagtcttgcccaggggcggagccgatgggtgaaggcccctcctcatgcc

SEQ ID NO: 685448 - DNA, 120 bp, Artificial Sequence
  ENSG00000187535_64 (sequence is synthesized)
cgtttggcagctgtgcctgatgactacttgccccaggagaaggggccgtagggccagggggccctgaggtgctgggcaggagcctcacagacccccgtctgcccacagtgaggccgtctg

SEQ ID NO: 685449 - DNA, 120 bp, Artificial Sequence
  ENSG00000187537_0 (sequence is synthesized)
ggtagacgcgatctgctggctactaccggcctcccctggctgttaaaagcagatggtggctgaggctggttcaatgccggctgcctcctctgtgaagaagccatttggtctcagaagcaa

SEQ ID NO: 685450 - DNA, 90 bp, Artificial Sequence
  ENSG00000187537_1 (sequence is synthesized)
ctgcctcctctgtgaagaagccatttggtctcagaagcaagatgggcaagtggtgccgccactgcttcccctggacttctggagaccacg

SEQ ID NO: 685451 - DNA, 120 bp, Artificial Sequence
  ENSG00000187537_2 (sequence is synthesized)
caagatgggcaagtggtgccgccactgcttcccctggtgcagggggagcagcaagagcaacgtgggcacttctggagaccacgacgactctgctatgaagacactcaggagcaagatggg

SEQ ID NO: 685452 - DNA, 81 bp, Artificial Sequence
  ENSG00000187537_3 (sequence is synthesized)
gctgagtgggcccttggggagactacgacgacagcgctttcatggagccgaggtaccacgtccgtcgagaagatctggaca

SEQ ID NO: 685453 - DNA, 120 bp, Artificial Sequence
  ENSG00000187537_4 (sequence is synthesized)
cccagaaaggatctcatcgtcatgctcaaggacactgacatgaacaagaaggacaagcaaaagaggactgctctacatctggcctctgccaatggaaattcagaagtagtaaaactcctg

SEQ ID NO: 685454 - DNA, 120 bp, Artificial Sequence
  ENSG00000187537_5 (sequence is synthesized)
tggaaattcagaagtagtaaaactcctgctggacagacgatgtcaacttaatatccttgacaacaaaaagaggacagctctgacaaaggccgtacaatgccgggaagatgaatgtgcgtt

SEQ ID NO: 685455 - DNA, 120 bp, Artificial Sequence
  ENSG00000187537_6 (sequence is synthesized)
tacaatgccgggaagatgaatgtgcgttaatgttgctggaacatggcactgatccgaatattccagatgagtatggaaataccgctctacactatgctatctacaatgaagataaattaa

SEQ ID NO: 685456 - DNA, 120 bp, Artificial Sequence
  ENSG00000187537_7 (sequence is synthesized)
tgatatcgaatcaaaaaacaagcatggcctcacaccactgttacttggtgtacatgagcaaaaacagcaagtggtgaaattcttaatcaagaaaaaagcaaatttaaatgcactggatag

SEQ ID NO: 685457 - DNA, 120 bp, Artificial Sequence
  ENSG00000187537_8 (sequence is synthesized)
taaatgcactggatagatatggaagaactgctctcatacttgctgtatgttgtggatcggcaagtatagtcagccttctacttgagcaaaacattgatgtatcttctcaagatctatctg

SEQ ID NO: 685458 - DNA, 69 bp, Artificial Sequence
  ENSG00000187537_9 (sequence is synthesized)
gctgtttctagtcatcataatgtaatttgccagttactttctgactacaaagaaaaacagatgctaaaa

SEQ ID NO: 685459 - DNA, 120 bp, Artificial Sequence
  ENSG00000187537_10 (sequence is synthesized)
atgtctcaagaaccagaaataaataagggtggtgatagaaaggttgaagaagaaatgaagaagcacggaagtactcatatgggattcccagaaaacctgcctaacggtgccactgctgac

SEQ ID NO: 685460 - DNA, 120 bp, Artificial Sequence
  ENSG00000187537_11 (sequence is synthesized)
ctgctgacaatggtgatgatggattaattccaccaaggaaaagcagaacacctgaaagccagcaatttcctgacactgagaatgaacagtatcacagtgatgaacaaaatgatactcaga

SEQ ID NO: 685461 - DNA, 120 bp, Artificial Sequence
  ENSG00000187537_12 (sequence is synthesized)
agcaactttctgaagaacagaacactggaatattacaagatgagattctgattcatgaagaaaagcagatagaagtggctgaaaatgaattctgagctttctcttagttataagaaagaa

SEQ ID NO: 685462 - DNA, 120 bp, Artificial Sequence
  ENSG00000187537_13 (sequence is synthesized)
aaagacctcttgcatgaaaatagtacgttgcaggaagaaattgtcatgctaagactggaactagacgtaatgaaacatcagagccagctaagagaaaagaaatatttggaggaaattgaa

SEQ ID NO: 685463 - DNA, 120 bp, Artificial Sequence
  ENSG00000187537_14 (sequence is synthesized)
agtgtggaaaaaaagaatgataatcttttaaagggtctacaactgaatgagctcaccatggatgatgatactgccgtgctcgtcattgacaacggctctggcatgtgcaaggccggcttt

SEQ ID NO: 685464 - DNA, 120 bp, Artificial Sequence
  ENSG00000187537_15 (sequence is synthesized)
gcaggtgacgatgccccccgggctgtcttcccttccatcgtggggtgccccaggcaccagaacatgatggggggcatgcgtcagatggagtcctatgtgggcaatgaggcccagagcaag

SEQ ID NO: 685465 - DNA, 86 bp, Artificial Sequence
  ENSG00000187537_16 (sequence is synthesized)
tcatcaccaactgggacatgagctgcgtgtggctcccgaggagcaccccatcctgctgaccgaggcacccctgaaccccaaggcca

SEQ ID NO: 685466 - DNA, 120 bp, Artificial Sequence
  ENSG00000187537_17 (sequence is synthesized)
acaatgagctgcgtgtggctcccgaggagcaccccatcctgctgaccgaggcacccctgaaccccaaggccaaccgtgagaagatgacccggatcatgtttgagaccttcaacaccccag

SEQ ID NO: 685467 - DNA, 70 bp, Artificial Sequence
  ENSG00000187537_18 (sequence is synthesized)
gacctcccgaagctcagatggtcctccaacctcaacctcagttgtttttttctttctttctttttatttt

SEQ ID NO: 685468 - DNA, 69 bp, Artificial Sequence
  ENSG00000187537_19 (sequence is synthesized)
ttttatttttatttttatttttttttagtagagatgaggatccccctcagcctcccaaagtgctaggat

SEQ ID NO: 685469 - DNA, 120 bp, Artificial Sequence
  ENSG00000187545_0 (sequence is synthesized)
ttcctgcttagttcttcctgaggtctgagcaccctccaaactgagtccagatctgagttttccctcggagatttgtcagaatgagcctccaggccccatccagactgctggagctggcag

SEQ ID NO: 685470 - DNA, 120 bp, Artificial Sequence
  ENSG00000187545_1 (sequence is synthesized)
ggcagagcctgctgaggaaccagttcttgaccatcttcaccctggatgagctgcccagggaggtcttccctctgatgttcatggaggccttcagcatgagacgttttgaggccctgaagc

SEQ ID NO: 685471 - DNA, 120 bp, Artificial Sequence
  ENSG00000187545_2 (sequence is synthesized)
tgatggtgcaggcctggcccttcctccgcctccctctgggatccctgatgaagacacctcatctggagaccttgcaagctgtcctgaggggacttgatacactggtggcccagaaggttc

SEQ ID NO: 685472 - DNA, 120 bp, Artificial Sequence
  ENSG00000187545_3 (sequence is synthesized)
aggtggaaacttcaagtgctggatttgagggatgttgatgagaatttctggaccatatggtctggagccagggtcctctcctgctccccagaggccatgagtaagaggcagacagtggag

SEQ ID NO: 685473 - DNA, 120 bp, Artificial Sequence
  ENSG00000187545_4 (sequence is synthesized)
cagtggaggactgtccaaggatgggagagcgccagcccttgaaggtgttcatagacctctgcctaaaggaaagtacactggatgaatgcctgagctacctttttgggtggatccactaca

SEQ ID NO: 685474 - DNA, 120 bp, Artificial Sequence
  ENSG00000187545_5 (sequence is synthesized)
agaattactcaatgcccacttcaagtttcagaaatctattggaaaggatatacccagacagtatccaggagttggaagtctggaaaaagtgctctctcaataaaacgggaaagtttgccc

SEQ ID NO: 685475 - DNA, 120 bp, Artificial Sequence
  ENSG00000187545_6 (sequence is synthesized)
ttatgagcgtgagttgtacgtgagcgtccagtggccgtgcattcctgacttggactctccattcctctgcctgtactacccccagatgctttatataaaaaagatcagtaatatcaaaga

SEQ ID NO: 685476 - DNA, 120 bp, Artificial Sequence
  ENSG00000187545_7 (sequence is synthesized)
gcacctggagcacctgctcaggtacctcaagaaccccttgggggcctttatattcagtgatgcttacctaactgatcgggacatggagtgtctgtctcagtacccaagcctcagtcagct

SEQ ID NO: 685477 - DNA, 120 bp, Artificial Sequence
  ENSG00000187545_8 (sequence is synthesized)
aaaggagctgcgtctgattcatatcctaatgtggaccaccaatcttgagccccttggagttctgctggagaaagttgctgctactctcaagaccctcgtcttaaaggactgtcggatcca

SEQ ID NO: 685478 - DNA, 120 bp, Artificial Sequence
  ENSG00000187545_9 (sequence is synthesized)
ggacccccaactcagggtcctcctgcctgccctgagccactgttcccagctcaccaccttcaactttcatggaaatgagacctccatgaatgctctgaaagacctgctgcgtcacacacg

SEQ ID NO: 685479 - DNA, 120 bp, Artificial Sequence
  ENSG00000187545_10 (sequence is synthesized)
tgggctgagcaagttaggcctggagttgtatcctgcccctctggagagtcttgactacaagggtcatgtcaattgggagatcctcaccccaattcgggctgagctgatgcgtacactcag

SEQ ID NO: 685480 - DNA, 120 bp, Artificial Sequence
  ENSG00000187545_11 (sequence is synthesized)
ggaagtcaggcagcccaagaggatcttctttggtcccgtcccttgccctaactgtggctcatggccatctgagaaagtggacttccatctttgctcctagggaaggcctggttcgtggga

SEQ ID NO: 685481 - DNA, 120 bp, Artificial Sequence
  ENSG00000187546_0 (sequence is synthesized)
ctctctacacagaatcggctgttgagtgtgctctcagtggagctttggttttagctgttctctgacaaagagcttgttctgagctgcacatctcgtcctctttgttcagcctcaggcttc

SEQ ID NO: 685482 - DNA, 120 bp, Artificial Sequence
  ENSG00000187546_1 (sequence is synthesized)
aagcattgaatcctaaatattctccagctgggaatcagacaagggcagaaatgaagaacccagaagcccagcaggatgtttcagtttcccagggatttcgcatgttgttttacacgatga

SEQ ID NO: 685483 - DNA, 120 bp, Artificial Sequence
  ENSG00000187546_2 (sequence is synthesized)
aacccagtgaaacttcattccaaacattagaagaggtgcctgattatgtaaaaaaggcaactccatttttcatttctttgatgctgcttgaacttgttgtcagctggattctcaaaggaa

SEQ ID NO: 685484 - DNA, 120 bp, Artificial Sequence
  ENSG00000187546_3 (sequence is synthesized)
agccaccaggtcgcctggatgatgctttaacgtcaatctcagctggtgttctgtctcgacttccaagtctatttttcaggagcattgaactgaccagttatatttatatctgggagaact

SEQ ID NO: 685485 - DNA, 120 bp, Artificial Sequence
  ENSG00000187546_4 (sequence is synthesized)
acaggctgttcaatttgccttgggattctccatggacttggtattcagccttcttaggagttgactttggctactactggttccatcgtatggctcatgaagttaatattatgtgggccg

SEQ ID NO: 685486 - DNA, 120 bp, Artificial Sequence
  ENSG00000187546_5 (sequence is synthesized)
gacaccaaacacatcatagttctgaagactataacttatccacagcactgagacagtctgtcctccagatatatacttcctggattttctactctcccctggccctcttcataccccctt

SEQ ID NO: 685487 - DNA, 120 bp, Artificial Sequence
  ENSG00000187546_6 (sequence is synthesized)
cagtatatgctgttcatcttcaattcaatcttctttaccaattttggatccatacagaggtcatcaataaccttggtcctttggaactgattcttaatactcctagccatcatagggttc

SEQ ID NO: 685488 - DNA, 120 bp, Artificial Sequence
  ENSG00000187546_7 (sequence is synthesized)
atcatggcagaaatcgttattgcatagacaaaaattatgctggtgttcttattatttgggataaaatttttgggacatttgaagcagaaaatgaaaaagttgtatatggcttaacacatc

SEQ ID NO: 685489 - DNA, 120 bp, Artificial Sequence
  ENSG00000187546_8 (sequence is synthesized)
ccattaatacatttgaaccaatcaaagtgcagttccatcacttattttccatatggactacattctgggccacacctggattcttcaataagttttctgtcatatttaagggaccgggat

SEQ ID NO: 685490 - DNA, 120 bp, Artificial Sequence
  ENSG00000187546_9 (sequence is synthesized)
ggggtccaggtaaaccaagacttggtctcagtgaagaaattccagaggtcaccggcaaagaagttcccttctcatcatcttcatctcagctattaaagatatatacagttgtacagtttg

SEQ ID NO: 685491 - DNA, 120 bp, Artificial Sequence
  ENSG00000187546_10 (sequence is synthesized)
ttgcttcattatcctgaccttgacttccattggatttcttctggatcaaagacccaaggcagctattatggaaactctccgttgcttgatgttcttaatgctgtaccgatttggtcacct

SEQ ID NO: 685492 - DNA, 120 bp, Artificial Sequence
  ENSG00000187546_11 (sequence is synthesized)
gaagcctcttgtcccttcattgtcatctgcttttgagattgttttttccatttgcattgctttctggggagttagaagcatgaaacaactcacctctcacccttggaaataacctgaatt

SEQ ID NO: 685493 - DNA, 120 bp, Artificial Sequence
  ENSG00000187546_12 (sequence is synthesized)
tgtacataattctcttcttttaatgagttgtccacacgcatattatgactgcatattaaaatgtaattattttatgtaatgcttatatgaactatttcttcaatgaaaagtaaaattact

SEQ ID NO: 685494 - DNA, 120 bp, Artificial Sequence
  ENSG00000187546_13 (sequence is synthesized)
tatttactattgtttgcctttcacatttgttattttctattaaaaattaaagtcagttttggttacttcccccctttactacaattaaaaaaagatttcaaatataatgatgttatatta

SEQ ID NO: 685495 - DNA, 120 bp, Artificial Sequence
  ENSG00000187546_14 (sequence is synthesized)
actgatagccttatatgacaagtataaaaagaagggatgaaacttaaaaacagtaaaaacaagaaggaatattgcctttacatcaatttgaaaacaatgtttcctttgatgtttgctaaa

SEQ ID NO: 685496 - DNA, 120 bp, Artificial Sequence
  ENSG00000187546_15 (sequence is synthesized)
attatgcatagatacatgtttgtagtcataaaaatgtattacattggttgtcttcctaaggccacagttacctttgcaatccatataacctaagaagctgcattccagaaaaagacatca

SEQ ID NO: 685497 - DNA, 87 bp, Artificial Sequence
  ENSG00000187546_16 (sequence is synthesized)
tcacccctgtaatcccagcactttgtggggctgaggtgggcggatcatgaggtccgtcctgtctctactaaaaatataaaaatttag

SEQ ID NO: 685498 - DNA, 65 bp, Artificial Sequence
  ENSG00000187546_17 (sequence is synthesized)
tagagaccatcctggccaacatggtgaagtcctgtctctactaaaaatataaaaatttagctgga

SEQ ID NO: 685499 - DNA, 120 bp, Artificial Sequence
  ENSG00000187546_18 (sequence is synthesized)
gagcgagactccgtctcaaagaaaaaagacatcactgaaagaaaaatgaacagaatttgtcagaattagttttttcaacaggttactttgtcatacatttctctaatatgcttggtcaat

SEQ ID NO: 685500 - DNA, 120 bp, Artificial Sequence
  ENSG00000187546_19 (sequence is synthesized)
atacatttctctaatatgcttggtcaatttgttttggcagactgggcagcatgcagcaattctgcattatttaaagttatcagaacaatgttaattctctaaataaaattacccaaggtg

SEQ ID NO: 685501 - DNA, 120 bp, Artificial Sequence
  ENSG00000187546_20 (sequence is synthesized)
ggcgatccaagcaaggagcggcaagctgttgtccttttcctcgttgtggtagctttgttcttttgctctttgcaatgtatgtattgctgctgctcgttctttgggtccctgccacgttta

SEQ ID NO: 685502 - DNA, 120 bp, Artificial Sequence
  ENSG00000187546_21 (sequence is synthesized)
tgagctgtaatgctcacccggaaggtgtgcagcttcacttctcaagccagcaaggttactgaaccaaggaaactcaggacgagtcacttttacgaactgtaacactcactgtgaagatct

SEQ ID NO: 685503 - DNA, 120 bp, Artificial Sequence
  ENSG00000187546_22 (sequence is synthesized)
agccagcgagaccaggaacacacctggaggaagaaactgcagacatgtgtgaagaacaactccggagaagctgcccttaagaactgtagcactcactgcgagggtccgtggggcttcttt

SEQ ID NO: 685504 - DNA, 120 bp, Artificial Sequence
  ENSG00000187546_23 (sequence is synthesized)
cttgaagtcagcgaggccaagaacccaccatttctggacgagggagggctaaattgacatataaaacaaggtttacagtcttttgcatgcaaatatttctgtccgttctgaaatggaaag

SEQ ID NO: 685505 - DNA, 120 bp, Artificial Sequence
  ENSG00000187546_24 (sequence is synthesized)
tggaaatcccttagcagctgggcaacagggagagagacaagaactcttttcaggtcatcaataaccttggtcctttggaactgattcttaatactcctagccatcatagggttcatcatg

SEQ ID NO: 685506 - DNA, 120 bp, Artificial Sequence
  ENSG00000187546_25 (sequence is synthesized)
cttttgaggaaacaccctacttgtcttccaactctgcaatctaattattatgccttcttattatcctttccacgttatcatctcgtctgggcagctcttttgaaaaagcattaacccaag

SEQ ID NO: 685507 - DNA, 120 bp, Artificial Sequence
  ENSG00000187546_26 (sequence is synthesized)
gttaacaatttgctgcctcagccattttatgtgcagaagaaaccaatactcaaagcagcaaccttaagactcttcaatttttattgatctattcaataaatattaaatgtgcactgacaa

SEQ ID NO: 685508 - DNA, 120 bp, Artificial Sequence
  ENSG00000187546_27 (sequence is synthesized)
gcctcttgtcccttcattgtcatctgcttttgagtcatattctgttataagtgaaattgggctccaggccaaggagaactttggagaacttttaagtttgagtgactgtctcacagctgg

SEQ ID NO: 685509 - DNA, 120 bp, Artificial Sequence
  ENSG00000187546_28 (sequence is synthesized)
accccaaagtgcattgattgcagaagaatatgtttcctattatccagttctctaccaaactatttttttgtagcttgaaaataataaagattttgtaagccccaaggggtctttttgatc

SEQ ID NO: 685510 - DNA, 120 bp, Artificial Sequence
  ENSG00000187546_29 (sequence is synthesized)
catgaatgaagttaccctggattcatataactaaaatctgacttcctttcagccattgaaattcaaaaccctttccatttattagtatgaaataaaaaaagaccttcaaaaatgtcaaaa

SEQ ID NO: 685511 - DNA, 120 bp, Artificial Sequence
  ENSG00000187550_0 (sequence is synthesized)
ctcgcagagatgcccggcaaacagtctgaggaagggccggcggaggcaggggcttcggaggacagcgaggaggagggtctgggcggcctgacattagaggagctccagcagggccaggag

SEQ ID NO: 685512 - DNA, 120 bp, Artificial Sequence
  ENSG00000187550_1 (sequence is synthesized)
gctgcccgcgcgctggaggacatgatgacgctgagtgctcagaccctggtccgagccgaggtggacgagctctacgaggaagtgcgtcccctgggccagggttgctatggccgcgtcctt

SEQ ID NO: 685513 - DNA, 120 bp, Artificial Sequence
  ENSG00000187550_2 (sequence is synthesized)
ctggtcacccatcgtcagaaaggcacacccctggcactgaagcagctcccgaaaccccgcacgtccctccgtggcttcctgtacgagttctgtgtggggctctcgctgggcgcgcactca

SEQ ID NO: 685514 - DNA, 120 bp, Artificial Sequence
  ENSG00000187550_3 (sequence is synthesized)
gccatcgtgacggcctacggcattggcatcgagtcggcacactcctacagcttcctgacggagcccgtcctgcacggggacctcatggccttcatccagcccaaggtgggcctcccgcag

SEQ ID NO: 685515 - DNA, 120 bp, Artificial Sequence
  ENSG00000187550_4 (sequence is synthesized)
ctggtgtgcgacccggcctgccggcgcttcaagctgaccgacttcggccacacgaggcctcgcgggacgctgctgcgcctggccgggccgcccatcccctacacggcccccgagctctgc

SEQ ID NO: 685516 - DNA, 120 bp, Artificial Sequence
  ENSG00000187550_5 (sequence is synthesized)
gcgcccccgccgctccccgagggcctgcccattcagcccgccctggacgcctgggcgctgggcgtcctgctcttctgcctcctcacgggctacttcccctgggaccggcccctggccgag

SEQ ID NO: 685517 - DNA, 120 bp, Artificial Sequence
  ENSG00000187550_6 (sequence is synthesized)
gccgaccccttctacgaggacttcctcatctggcaggcgtcgggccagccccgggaccgccctcagccctggttcggcctggccgccgcggccgacgcgcttctgcgggggctgctggac

SEQ ID NO: 685518 - DNA, 120 bp, Artificial Sequence
  ENSG00000187550_7 (sequence is synthesized)
cctcacccccgaaggaggagcgctgtgatcgccatcagggagcacctggggcgcccctggaggcagcgggagggcgaggcggaggcagtgggagcggtggaagaggaggctgggcagtga

SEQ ID NO: 685519 - DNA, 120 bp, Artificial Sequence
  ENSG00000187553_0 (sequence is synthesized)
agggttaaacgactggaggagggacaggtggggcgggggtctgcagaccaggttggcaacactggtgagttgctcttctttcgccctccttcccttcttctatccaaagggtgctgagcc

SEQ ID NO: 685520 - DNA, 120 bp, Artificial Sequence
  ENSG00000187553_1 (sequence is synthesized)
cgggaggaggtgggaggtgccccgcggagccgggagtgagcgttcccgaggcagcaggcaccttcgagagggactggcatttgggcccaggagccaggaaaaagtcctgagcgtgccggc

SEQ ID NO: 685521 - DNA, 120 bp, Artificial Sequence
  ENSG00000187553_2 (sequence is synthesized)
ctcgaggaaggcacgttccctaagggcgcacggtcactgcagtctttcaccgtccgtctgtttttagaacagagttctggcctgagcttataaatctcgggctttgcccccaaaccccag

SEQ ID NO: 685522 - DNA, 120 bp, Artificial Sequence
  ENSG00000187553_3 (sequence is synthesized)
gccttttgcggacggaacaggtgagcactgcgcactgctcgcgccccggttcttgcgtcccctgctctccctgcgctctgagcggcctggcccccgcgggctcatcatgttcccttgggg

SEQ ID NO: 685523 - DNA, 120 bp, Artificial Sequence
  ENSG00000187553_4 (sequence is synthesized)
gctgagctgcctgtcagtgctgggggcggcgggcactgctctcctgtgcgcgggcctgctgctcagcctggcccagcacctctggaccctccgctggatgctgagccgggaccgggcctc

SEQ ID NO: 685524 - DNA, 120 bp, Artificial Sequence
  ENSG00000187553_5 (sequence is synthesized)
caccctgcctctgcccaagggctccatggggtggcccttcttcggcgaaacgctgcactggttagttcagggctcgcgcttccacagttctcgccgagagcgctatgggacagtgttcaa

SEQ ID NO: 685525 - DNA, 120 bp, Artificial Sequence
  ENSG00000187553_6 (sequence is synthesized)
gacgcacctgctgggcaggccagtgatccgcgtgagcggcgcggagaacgtgcgcaccatcctgctgggcgagcaccgcctggtgcgcagccagtggccgcagagtgcgcacatcctgct

SEQ ID NO: 685526 - DNA, 120 bp, Artificial Sequence
  ENSG00000187553_7 (sequence is synthesized)
gggctcgcacacactgctaggtgcggtcggcgagccgcaccggcggcggcgcaaggtcctggcgcgcgtgttcagccgcgccgcgctggagcgctacgtgccgcgcctgcagggggcgct

SEQ ID NO: 685527 - DNA, 120 bp, Artificial Sequence
  ENSG00000187553_8 (sequence is synthesized)
gcggcatgaggtgcgctcctggtgcgcggcgggcgggccggtctcagtctacgacgcctccaaagcgctcaccttccgcatggccgcgcgcatcctgctggggttgcggctggacgaggc

SEQ ID NO: 685528 - DNA, 120 bp, Artificial Sequence
  ENSG00000187553_9 (sequence is synthesized)
gcagtgcgccacgctggcccggaccttcgagcagctcgtggagaacctcttctcactgcctctggacgttcccttcagtggcctacgcaagggcatccgggcaagggaccagctgcatcg

SEQ ID NO: 685529 - DNA, 120 bp, Artificial Sequence
  ENSG00000187553_10 (sequence is synthesized)
gcacctggagggggccatttctgagaagcttcacgaggacaaggctgcagagccgggtgatgccctcgacctaatcattcacagtgcaagggagctgggccatgagccctccatgcagga

SEQ ID NO: 685530 - DNA, 120 bp, Artificial Sequence
  ENSG00000187553_11 (sequence is synthesized)
cgcccggggccgctgggggcagcgaggggcccccgcccgactgcggctgcgagcccgacctcagcctcgcggcgctgggccgtctgcgctacgtcgactgcgtggtcaaggaggtgctgc

SEQ ID NO: 685531 - DNA, 120 bp, Artificial Sequence
  ENSG00000187553_12 (sequence is synthesized)
cgtctgcgctacgtcgactgcgtggtcaaggaggtgctgcgcctcctgccgccagtgtccgggggctaccgcaccgccctgcgcaccttcgagctcgacggctaccagatccccaagggc

SEQ ID NO: 685532 - DNA, 120 bp, Artificial Sequence
  ENSG00000187553_13 (sequence is synthesized)
tggagcgtgatgtatagcatccgggacacgcacgagacggctgcggtgtaccgcagccctcccgaaggcttcgatccagagcgcttcggcgcagcgcgcgaagattcccggggcgcctcc

SEQ ID NO: 685533 - DNA, 120 bp, Artificial Sequence
  ENSG00000187553_14 (sequence is synthesized)
agccgcttccattacatcccgttcggcggcggtgcgcgcagctgcctcggccaggagctggcgcaagccgtgctccagctgctagctgtggagctagtgcgcaccgcgcgctgggaactg

SEQ ID NO: 685534 - DNA, 120 bp, Artificial Sequence
  ENSG00000187553_15 (sequence is synthesized)
gccacacccgccttccccgccatgcagacggtgcccatcgtgcacccagtggacgggctgcggctctttttccaccccctcacgccttcggttgcggggaatgggctatgcctctgacat

SEQ ID NO: 685535 - DNA, 120 bp, Artificial Sequence
  ENSG00000187553_16 (sequence is synthesized)
gcttgcgctctaggacacggcttggccggtggctatggcgcgcacgcagcgccacccatctgccgctccccattgtagcgtcgcgcgcccactctttcactcgttcaacaatctttcaac

SEQ ID NO: 685536 - DNA, 120 bp, Artificial Sequence
  ENSG00000187553_17 (sequence is synthesized)
aaatgttcgccaaacgcggatgtgtgccggactcgaggaaggaggagggcgagccaccgctgccgcgccagagaagcatctaagcccatgggaagatgccttctgcgctccgcgcccaga

SEQ ID NO: 685537 - DNA, 120 bp, Artificial Sequence
  ENSG00000187553_18 (sequence is synthesized)
ggaaggaaaatgtcgtgggccaagcaggaatggagggaatagatagatccccacgaggtgctgcttggcttccccttcccgagccaatccagggagggtgcatggatgggggaaggcgag

SEQ ID NO: 685538 - DNA, 120 bp, Artificial Sequence
  ENSG00000187553_19 (sequence is synthesized)
gtaggggtggcaggggagtgggaatattgcaactcggggacattgcagagacccgacgcacgcggtgggacctgcaacccttgtaaggaagcgggcacgccgtgggcgcaaccctggcct

SEQ ID NO: 685539 - DNA, 120 bp, Artificial Sequence
  ENSG00000187553_20 (sequence is synthesized)
ggctttgggccatagaaaaaacacgcagaggatgcctgacggaaggccctctggcagctggcgtctggcttcgtgcgccttggccactctgccggtctcggcggaaactagcaactgtgg

SEQ ID NO: 685540 - DNA, 120 bp, Artificial Sequence
  ENSG00000187553_21 (sequence is synthesized)
gcacttccaggctcgaaagggctcaaggtcaccggattctgctggccacttcttaaaaggaaaaattcctaccttaagaaggcatttactcttgtcatgtatacagaggagaataggcac

SEQ ID NO: 685541 - DNA, 120 bp, Artificial Sequence
  ENSG00000187553_22 (sequence is synthesized)
accaacacgtctccaacgctggattattttcatgggaggttgagacataattagagaggtttgagatatttgtaccaaaaataggaaggccaagaaataaagtgtcttgggagcggttga

SEQ ID NO: 685542 - DNA, 120 bp, Artificial Sequence
  ENSG00000187553_23 (sequence is synthesized)
gacgccctcggcgcaccccgcgcgtccgtcacctctgctgggaacggcggcagggcccgggggtgggaggcgttgtggcggtggcgtggcggtgggctctgggcctggcctctgtgctgg

SEQ ID NO: 685543 - DNA, 120 bp, Artificial Sequence
  ENSG00000187553_24 (sequence is synthesized)
gcggtgggctctgggcctggcctctgtgctggttcgctggtgtgacctggggctggccacacgacctccgtgggacgcgcctgccgcgacgcgctccagcctgagcaagcgcgggccgcc

SEQ ID NO: 685544 - DNA, 120 bp, Artificial Sequence
  ENSG00000187553_25 (sequence is synthesized)
agagtttggggtctcggtggcaggcgtcctgccagtcggtcggactccttcccacagcggcgcccctggggccggcctccatcacctcttcggaagcccagatggctgcggaaccgagga

SEQ ID NO: 685545 - DNA, 120 bp, Artificial Sequence
  ENSG00000187553_26 (sequence is synthesized)
gagcgtgagggctgcagatgagccccggtccagcccagcgccagccccggacccaggggtgtgggcgtcagctccaccagccctggacccgctaggtttcgggatcagagaactgctgct

SEQ ID NO: 685546 - DNA, 120 bp, Artificial Sequence
  ENSG00000187553_27 (sequence is synthesized)
tctccagacttcagaacaatgggcaggacccggagagcagctaggatgccccatcccgccttttggtccccctattctgggacttcccactgtttgattccctggttttcagtcacctgc

SEQ ID NO: 685547 - DNA, 120 bp, Artificial Sequence
  ENSG00000187553_28 (sequence is synthesized)
ataaaaataatatgtgtaaaggatcatgctataggctgatcaccgtggatacgttttctgatctaatcctcgcagcctgcaaagtgttatgattctcattttattggccaaacttatttt

SEQ ID NO: 685548 - DNA, 120 bp, Artificial Sequence
  ENSG00000187553_29 (sequence is synthesized)
attgacttacccaagatcacaccgttagtaggggcacgaacaggactttaacctcatctcctccgactatggaactcaagtgctgaattacagtgctttccccgggggaatgcttttgct

SEQ ID NO: 685549 - DNA, 120 bp, Artificial Sequence
  ENSG00000187553_30 (sequence is synthesized)
tccctgaactctggagaggcatcccctattgcccacgctcttacagaggctaatgcttacaaatccaatagtgtcctctaagtcagagctttgctgggtgcatcaaggtaccccagcctg

SEQ ID NO: 685550 - DNA, 120 bp, Artificial Sequence
  ENSG00000187553_31 (sequence is synthesized)
agcctagtacagggaaagggcaatgggctgaccctagccgcactgggctctgtgccaggcatggacatggacagctgtgtgactctgggcaattgcttgacctctctgaacttcagcatc

SEQ ID NO: 685551 - DNA, 120 bp, Artificial Sequence
  ENSG00000187553_32 (sequence is synthesized)
ctctcctcaggatgacagtaactctgctgtggctcagagggggattgtgataatcaagacagaatgatgtttgtggacagtggacatatccccgaccatttactgagcccagccatatgc

SEQ ID NO: 685552 - DNA, 120 bp, Artificial Sequence
  ENSG00000187553_33 (sequence is synthesized)
caggccaggagctaagctgggaagctgttaacacaaggatgttggcagagccagtgctgagaaggttttctggcaggtccctacaccaatgctgcatccccagagccacatcttgtgtgg

SEQ ID NO: 685553 - DNA, 120 bp, Artificial Sequence
  ENSG00000187553_34 (sequence is synthesized)
ccccactttgaggcacaggcagtcctcaagatgaggggcaagaggagacctgggttccagtaatgactcagccacactcactacctctgcagccttcagcctccagccagccttgtcagt

SEQ ID NO: 685554 - DNA, 120 bp, Artificial Sequence
  ENSG00000187553_35 (sequence is synthesized)
aggagaactgaaggagtcggctgtggagctcctcttcgccgccttcttcaccacggccagtgccagcacctcgctcgtcctgctgctactgcagcatccggcggccatcgccaagattcg

SEQ ID NO: 685555 - DNA, 120 bp, Artificial Sequence
  ENSG00000187554_0 (sequence is synthesized)
aagtaagtttgtattttaccatagattgatgttcatgttcctgacactactacaagattcatactcctgatgctactgacaacgtggcttctccacagtcaccaaaccagggatgctata

SEQ ID NO: 685556 - DNA, 120 bp, Artificial Sequence
  ENSG00000187554_1 (sequence is synthesized)
ctggacttccctactctcatctgctccagccccctgaccttatagttgcccagctttcctggcaattgactttgcccatcaatacacaggatttagcatccagggaagatgtcggagcct

SEQ ID NO: 685557 - DNA, 120 bp, Artificial Sequence
  ENSG00000187554_2 (sequence is synthesized)
cagatgttaattttctaattgagaatgttggcgctgtccgaacctggagacaggaaaacaaaaagtcctttctcctgattcaccaaaaaataaaatactgactaccatcactgtgatgag

SEQ ID NO: 685558 - DNA, 120 bp, Artificial Sequence
  ENSG00000187554_3 (sequence is synthesized)
attcctatagtctcaggaactgaagtctttaaacaaccagggaccctctgcccctagaataagaacatactagaagtcccttctgctaggacaacgaggatcatgggagaccacctggac

SEQ ID NO: 685559 - DNA, 120 bp, Artificial Sequence
  ENSG00000187554_4 (sequence is synthesized)
cttctcctaggagtggtgctcatggccggtcctgtgtttggaattccttcctgctcctttgatggccgaatagccttttatcgtttctgcaacctcacccaggtcccccaggtcctcaac

SEQ ID NO: 685560 - DNA, 120 bp, Artificial Sequence
  ENSG00000187554_5 (sequence is synthesized)
accactgagaggctcctgctgagcttcaactatatcaggacagtcactgcttcatccttcccctttctggaacagctgcagctgctggagctcgggagccagtatacccccttgactatt

SEQ ID NO: 685561 - DNA, 120 bp, Artificial Sequence
  ENSG00000187554_6 (sequence is synthesized)
gacaaggaggccttcagaaacctgcccaaccttagaatcttggacctgggaagtagtaagatatacttcttgcatccagatgcttttcagggactgttccatctgtttgaacttagactg

SEQ ID NO: 685562 - DNA, 120 bp, Artificial Sequence
  ENSG00000187554_7 (sequence is synthesized)
tatttctgtggtctctctgatgctgtattgaaagatggttatttcagaaatttaaaggctttaactcgcttggatctatccaaaaatcagattcgtagcctttaccttcatccttcattt

SEQ ID NO: 685563 - DNA, 120 bp, Artificial Sequence
  ENSG00000187554_8 (sequence is synthesized)
gggaagttgaattccttaaagtccatagatttttcctccaaccaaatattccttgtatgtgaacatgagctcgagcccctacaagggaaaacgctctccttttttagcctcgcagctaat

SEQ ID NO: 685564 - DNA, 120 bp, Artificial Sequence
  ENSG00000187554_9 (sequence is synthesized)
agcttgtatagcagagtctcagtggactggggaaaatgtatgaacccattcagaaacatggtgctggagatactagatgtttctggaaatggctggacagtggacatcacaggaaacttt

SEQ ID NO: 685565 - DNA, 120 bp, Artificial Sequence
  ENSG00000187554_10 (sequence is synthesized)
agcaatgccatcagcaaaagccaggccttctctttgattcttgcccaccacatcatgggtgccgggtttggcttccataacatcaaagatcctgaccagaacacatttgctggcctggcc

SEQ ID NO: 685566 - DNA, 120 bp, Artificial Sequence
  ENSG00000187554_11 (sequence is synthesized)
agaagttcagtgagacacctggatctttcacatgggtttgtcttctccctgaactcacgagtctttgagacactcaaggatttgaaggttctgaaccttgcctacaacaagataaataag

SEQ ID NO: 685567 - DNA, 120 bp, Artificial Sequence
  ENSG00000187554_12 (sequence is synthesized)
attgcagatgaagcattttacggacttgacaacctccaagttctcaatttgtcatataaccttctgggggaactttacagttcgaatttctatggactacctaaggtagcctacattgat

SEQ ID NO: 685568 - DNA, 120 bp, Artificial Sequence
  ENSG00000187554_13 (sequence is synthesized)
ttgcaaaagaatcacattgcaataattcaagaccaaacattcaaattcctggaaaaattacagaccttggatctccgagacaatgctcttacaaccattcattttattccaagcataccc

SEQ ID NO: 685569 - DNA, 120 bp, Artificial Sequence
  ENSG00000187554_14 (sequence is synthesized)
gatatcttcttgagtggcaataaactagtgactttgccaaagatcaaccttacagcgaacctcatccacttatcagaaaacaggctagaaaatctagatattctctactttctcctacgg

SEQ ID NO: 685570 - DNA, 120 bp, Artificial Sequence
  ENSG00000187554_15 (sequence is synthesized)
gtacctcatctccagattctcattttaaatcaaaatcgcttctcctcctgtagtggagatcaaaccccttcagagaatcccagcttagaacagcttttccttggagaaaatatgttgcaa

SEQ ID NO: 685571 - DNA, 120 bp, Artificial Sequence
  ENSG00000187554_16 (sequence is synthesized)
cttgcctgggaaactgagctctgttgggatgtttttgagggactttctcatcttcaagttctgtatttgaatcataactatcttaattcccttccaccaggagtatttagccatctgact

SEQ ID NO: 685572 - DNA, 120 bp, Artificial Sequence
  ENSG00000187554_17 (sequence is synthesized)
gggactaagcctcaactccaacaggctgacagttctttctcacaatgatttacctgctaatttagagatcctggacatatccaggaaccagctcctagctcctaatcctgatgtatttgt

SEQ ID NO: 685573 - DNA, 120 bp, Artificial Sequence
  ENSG00000187554_18 (sequence is synthesized)
atcacttagtgtcttggatataactcataacaagttcatttgtgaatgtgaacttagcacttttatcaattggcttaatcacaccaatgtcactatagctgggcctcctgcagacatata

SEQ ID NO: 685574 - DNA, 120 bp, Artificial Sequence
  ENSG00000187554_19 (sequence is synthesized)
ttgtgtgtaccctgactcgttctctggggtttccctcttctctctttccacggaaggttgtgatgaagaggaagtcttaaagtccctaaagttctcccttttcattgtatgcactgtcac

SEQ ID NO: 685575 - DNA, 120 bp, Artificial Sequence
  ENSG00000187554_20 (sequence is synthesized)
tctgactctgttcctcatgaccatcctcacagtcacaaagttccggggcttctgttttatctgttataagacagcccagagactggtgttcaaggaccatccccagggcacagaacctga

SEQ ID NO: 685576 - DNA, 120 bp, Artificial Sequence
  ENSG00000187554_21 (sequence is synthesized)
tatgtacaaatatgatgcctatttgtgcttcagcagcaaagacttcacatgggtgcagaatgctttgctcaaacacctggacactcaatacagtgaccaaaacagattcaacctgtgctt

SEQ ID NO: 685577 - DNA, 120 bp, Artificial Sequence
  ENSG00000187554_22 (sequence is synthesized)
tgaagaaagagactttgtcccaggagaaaaccgcattgccaatatccaggatgccatctggaacagtagaaagatcgtttgtcttgtgagcagacacttccttagagatggctggtgcct

SEQ ID NO: 685578 - DNA, 120 bp, Artificial Sequence
  ENSG00000187554_23 (sequence is synthesized)
tgaagccttcagttatgcccagggcaggtgcttatctgaccttaacagtgctctcatcatggtggtggttgggtccttgtcccagtaccagttgatgaaacatcaatccatcagaggctt

SEQ ID NO: 685579 - DNA, 120 bp, Artificial Sequence
  ENSG00000187554_24 (sequence is synthesized)
tgtacagaaacagcagtatttgaggtggcctgaggatctccaggatgttggctggtttcttcataaactctctcaacagatactaaagaaagaaaaagaaaagaagaaagacaataacat

SEQ ID NO: 685580 - DNA, 120 bp, Artificial Sequence
  ENSG00000187554_25 (sequence is synthesized)
tccgttgcaaactgtagcaaccatctcctaatcaaaggagcaatttccaacttatctcaagccacaaataactcttcactttgtatttgcaccaagttatcattttggggtcctctctgg

SEQ ID NO: 685581 - DNA, 120 bp, Artificial Sequence
  ENSG00000187554_26 (sequence is synthesized)
aggttttttttttctttttgctactatgaaaacaacataaatctctcaattttcgtatcaacaccatgttctgtctcactaacctccaaatggaaaataatagatctagaaaattgcaac

SEQ ID NO: 685582 - DNA, 120 bp, Artificial Sequence
  ENSG00000187554_27 (sequence is synthesized)
tgcccttagaggtttccagtctccattgattttctttcagatccaataataccgttctgtcctgctgtgttgattatggaatgtatcctaatcatgggaagggcaccttgggagaagttg

SEQ ID NO: 685583 - DNA, 120 bp, Artificial Sequence
  ENSG00000187554_28 (sequence is synthesized)
cagatggctgacgtgctttctctagcattcagctaaaaaatgggatggtccatgattctgcgttctctgtgttctgcaaaacaacattaagtagaaaacaaacagaagcagaggcacatt

SEQ ID NO: 685584 - DNA, 120 bp, Artificial Sequence
  ENSG00000187554_29 (sequence is synthesized)
tccttcttttgccacagaaacaatgccactgttgagtgcaagtcacactttgtctcatagataagaggtggccccaaagaagctgggatgaatgagtcactacctgtcttgtgactgtac

SEQ ID NO: 685585 - DNA, 120 bp, Artificial Sequence
  ENSG00000187554_30 (sequence is synthesized)
tgcacttcatgttcttaccttcggcttctccaggtctcgccctagtgagccaagaactttctctcacatgctgcctttatttaagcctggccttcaagaccttccatgatttatcaccaa

SEQ ID NO: 685586 - DNA, 120 bp, Artificial Sequence
  ENSG00000187554_31 (sequence is synthesized)
cctaccttttcagctttgtttcctagcacacctcattgatcagctgctcaggctgttgcatgaagaacatggactttgcacacagatcctgggttgagttctgagtcagctgtgtattag

SEQ ID NO: 685587 - DNA, 120 bp, Artificial Sequence
  ENSG00000187554_32 (sequence is synthesized)
ccatgtaaccttggccttggtatgcccttgctggacctacattttctcacgtaacagcatctatgtcatagaattcctgtgaaaattaaattggccaaggatgtcagggcttctcagatc

SEQ ID NO: 685588 - DNA, 120 bp, Artificial Sequence
  ENSG00000187554_33 (sequence is synthesized)
ttttccttcgttgccctaatgaccacaagagaacacatacactgaaggcctcctggggggcagttgcaatttcactgaagttgtatttttttatcttaaatgaaatctatgtgtattttc

SEQ ID NO: 685589 - DNA, 120 bp, Artificial Sequence
  ENSG00000187554_34 (sequence is synthesized)
gcgtccgggaggagccaaccgtggcgcaggcggcgcggggaggcgtcccagagtctcactctgccgcccaggctggactgcagtgacacaatctcggctgactgcaaccactgcctccag

SEQ ID NO: 685590 - DNA, 120 bp, Artificial Sequence
  ENSG00000187554_35 (sequence is synthesized)
tgatgagattcctatagtctcaggaactgaagtctttaaacaaccagggaccctctgcccctagaataagaacatactagaagtcccttctgctaggacaacgagatggcgcactcctcc

SEQ ID NO: 685591 - DNA, 120 bp, Artificial Sequence
  ENSG00000187554_36 (sequence is synthesized)
gctggggtcgggcgcctttgcagcggcaacctcaacagcgtggacgccgttcttgaactctcgtctcactgaggtttgattgggtctggaacaacttcacagcctggttctcctctttag

SEQ ID NO: 685592 - DNA, 120 bp, Artificial Sequence
  ENSG00000187554_37 (sequence is synthesized)
aagatttacttccgcccactttagctctggcttctttttggatggtacttcttcccaggctatctgcaggaactgcctcgctgcacacacctctgctcacctgctcacctggttcctctg

SEQ ID NO: 685593 - DNA, 120 bp, Artificial Sequence
  ENSG00000187554_38 (sequence is synthesized)
ctcacctgtcctgccatttaacccacagagatctacttcagagacaaaaatctcgttatttcatgcctttctgtacttcataaagaaatctgtctgcgtggtatctttgtaatacgacat

SEQ ID NO: 685594 - DNA, 68 bp, Artificial Sequence
  ENSG00000187554_39 (sequence is synthesized)
cagtgctggcattacaggtgtgagccactgtgctgggccaaaaataatctaaatttcaacaatcagca

SEQ ID NO: 685595 - DNA, 120 bp, Artificial Sequence
  ENSG00000187554_40 (sequence is synthesized)
tgtgctgggccaaaaataatctaaatttcaacaatcagcatgaccatgcctgtgcgtatgaccctaattatcagtctgactgattcttccttccaaaatgatggcagaggatcacctctt

SEQ ID NO: 685596 - DNA, 120 bp, Artificial Sequence
  ENSG00000187554_41 (sequence is synthesized)
tccccgggactgcggcagagccctcctcgcgggcctgacacggtgtccggccgcacggatgaccggtagagggcagcagcgcgctccgggtcggtcgggagcagggccttcctagtccag

SEQ ID NO: 685597 - DNA, 120 bp, Artificial Sequence
  ENSG00000187554_42 (sequence is synthesized)
aaaccgcggcaggtccgctgctgagggccagggcctggtgggctaggggcaagagcaacgtggtgaaccggtgggctcactctgcaggaagaagagaaagaggagacgtggagaagtcgt

SEQ ID NO: 685598 - DNA, 120 bp, Artificial Sequence
  ENSG00000187554_43 (sequence is synthesized)
gctgaccacatggcgtatcggacactgcacatttatgtgggccccaatgtgcctggcgcatggtttctgcgacaggagcccagccgtcaggtgtagacgtgcaggaggctggcagatggg

SEQ ID NO: 685599 - DNA, 120 bp, Artificial Sequence
  ENSG00000187554_44 (sequence is synthesized)
ctagaaaagcaaggaggctcagcacttggaggtgtcgaaagagggtttgaagagaaagcccggagtgcctggaatggtggggaggcatgaagaggctgacaccatgaaaggcaaggacag

SEQ ID NO: 685600 - DNA, 120 bp, Artificial Sequence
  ENSG00000187554_45 (sequence is synthesized)
ttcaagggcactttcaaggccttcagggaatggtgcagagaagtgagcgcgcgcaacagctggagagggcggttgtgaggaaggtcggagagaaggccctcctgtcactggcagagggtc

SEQ ID NO: 685601 - DNA, 120 bp, Artificial Sequence
  ENSG00000187554_46 (sequence is synthesized)
gttttgaacaaagaattggacaaaatacccagcaaagcaaaaagcaaccaatcggaggctaggaagaagctacagttatattcctatgcaaatgaagactcgacaggccatcagtctgat

SEQ ID NO: 685602 - DNA, 120 bp, Artificial Sequence
  ENSG00000187554_47 (sequence is synthesized)
tgaagactcgacaggccatcagtctgatgggttgtggacagcagtcattcagaggctggagtgaacttacaaagttgcaaatgaagactcacctgcagtcagtctgattggttgcggaca

SEQ ID NO: 685603 - DNA, 120 bp, Artificial Sequence
  ENSG00000187554_48 (sequence is synthesized)
gccaatttcccatctgccacacagaaaaggacaaagggagtagcgtctggtccttttgttacttatgcatggaaagttaggattttcctttcaatttagttctgggaagtcggtgtgaaa

SEQ ID NO: 685604 - DNA, 120 bp, Artificial Sequence
  ENSG00000187554_49 (sequence is synthesized)
attgttccattgtcaggaataaacgactctgggggtaaggtggacctccagatgacgacgaaggtagaaggggaggagaggctgagaggctaacctgccactgggacccagggccaaggc

SEQ ID NO: 685605 - DNA, 120 bp, Artificial Sequence
  ENSG00000187554_50 (sequence is synthesized)
cctttgtgattgaggggaagtgaccacagatcagcagatgatgactgagagatgggctggagcaggaccgtggtccggtcctgaacaacacatgcagccatgcccagagatgctaggctt

SEQ ID NO: 685606 - DNA, 120 bp, Artificial Sequence
  ENSG00000187554_51 (sequence is synthesized)
agaggctaacatgcagtagacagctgcgtggccttaagttacttaacatctccgggcttcagtttcctcatccgtaaaatggtacctacagtaatggtacccagtaatagtacctacaaa

SEQ ID NO: 685607 - DNA, 120 bp, Artificial Sequence
  ENSG00000187554_52 (sequence is synthesized)
agactgggaggatgagggaagggagggagctcccagctgtgtggggaggagcatacgggcgagggtaaccccccatatggtattatagggatttgcgtctatttctgtcctccctccaga

SEQ ID NO: 685608 - DNA, 120 bp, Artificial Sequence
  ENSG00000187554_53 (sequence is synthesized)
ctctagcctcatggttctcagacatgggtatgcatcagaatgacccagatgcattaaaaacactgccaggtcccagccccagagcttctgattcagcggggctggggtaaggcccagtaa

SEQ ID NO: 685609 - DNA, 120 bp, Artificial Sequence
  ENSG00000187554_54 (sequence is synthesized)
tttgcattgctcgctaagcccaggtgctgctgctgctgcttgttcccggactgcactgtgggcaccactgctctggagtctgcagagctccagcagggactcctgttgaggagagacggg

SEQ ID NO: 685610 - DNA, 120 bp, Artificial Sequence
  ENSG00000187554_55 (sequence is synthesized)
catatagtgggagcccaggcctaggacgagtaactctaggacaaacaaaaattccagatacagtgcaagaagaggtagtgatgaatgaaaaagcgatcactccagcagagctttcaagtc

SEQ ID NO: 685611 - DNA, 120 bp, Artificial Sequence
  ENSG00000187554_56 (sequence is synthesized)
atggtggtttatgaagggagttagaattgcacctggggagcaagtgctgaggttaatggcagtgcaattccccgtctgttttattggaactgttgtcagaggcagaatgctgggctggag

SEQ ID NO: 685612 - DNA, 120 bp, Artificial Sequence
  ENSG00000187554_57 (sequence is synthesized)
ggactgtggccctagcaatgttttggacttgacaatgcccatttgttgggcatggttccggtgggatgctgtattatgcagctagagaatgtatttgtcctggaagagttcactttgttc

SEQ ID NO: 685613 - DNA, 120 bp, Artificial Sequence
  ENSG00000187554_58 (sequence is synthesized)
actgccctcgagcctttatccaaggctaaacccacatgctgtacctacttttggaattggtccaggaattttatacctgtgtgaatttggagaaactctctcagacacccatttggaaat

SEQ ID NO: 685614 - DNA, 120 bp, Artificial Sequence
  ENSG00000187554_59 (sequence is synthesized)
gcattagtgtttttctcagtgagtcctccatgcttgctgttccaatggccctccaggtttgggcccagcacctgccaggagaagcattccctctatagcttccacctgaccacagccagc

SEQ ID NO: 685615 - DNA, 120 bp, Artificial Sequence
  ENSG00000187554_60 (sequence is synthesized)
ccaagccctgctcagaaccccaggcctgccagcgagcctgtgactggaattatctattagggatcaagcattaacttgacacaggagcagccctggctcagctggaggcatccgcatgct

SEQ ID NO: 685616 - DNA, 120 bp, Artificial Sequence
  ENSG00000187554_61 (sequence is synthesized)
gtggtgccccaggaacagaggcacccctgaaatgcaagctgtgtgtttgctgcagagacaccatggcccataactccccaagcataagtgagcagctctgctgtccaggcaatgaagtca

SEQ ID NO: 685617 - DNA, 120 bp, Artificial Sequence
  ENSG00000187554_62 (sequence is synthesized)
agaaagggaaccaacccagctaatggctgggattaaagctaaatgaattcagctcaaatgaaagggatactgacccttctccctctggcctcattaacttaattaacagtgcttggcagg

SEQ ID NO: 685618 - DNA, 120 bp, Artificial Sequence
  ENSG00000187555_0 (sequence is synthesized)
gacatttcacgccgccgccattttgagagcgagccgagccgagctgccgggcgccgcgtccgctgccggagccccgacgacgacgccgaggaggcggaggccgcggctctcggaacgcgg

SEQ ID NO: 685619 - DNA, 80 bp, Artificial Sequence
  ENSG00000187555_1 (sequence is synthesized)
cccggcccggcccgccggccgcccgcccgcctcggcgccgagattgggcgaatcgcgagcaagtacgtgcgcgtctccct

SEQ ID NO: 685620 - DNA, 120 bp, Artificial Sequence
  ENSG00000187555_2 (sequence is synthesized)
gaggcccaggccgcggccgacatgaaccaccagcagcagcagcagcagcagaaagcgggcgagcagcagttgagcgagcccgaggacatggagatggaagcgggagatacagatgaccca

SEQ ID NO: 685621 - DNA, 120 bp, Artificial Sequence
  ENSG00000187555_3 (sequence is synthesized)
ccaagaattactcagaaccctgtgatcaatgggaatgtggccctgagtgatggacacaacaccgcggaggaggacatggaggatgacaccagttggcgctccgaggcaacctttcagttc

SEQ ID NO: 685622 - DNA, 120 bp, Artificial Sequence
  ENSG00000187555_4 (sequence is synthesized)
actgtggagcgcttcagcagactgagtgagtcggtccttagccctccgtgttttgtgcgaaatctgccatggaagattatggtgatgccacgcttttatccagacagaccacaccaaaaa

SEQ ID NO: 685623 - DNA, 120 bp, Artificial Sequence
  ENSG00000187555_5 (sequence is synthesized)
agcgtaggattctttctccagtgcaatgctgaatctgattccacgtcatggtcttgccatgcacaagcagtgctgaagataataaattacagagatgatgaaaagtcgttcagtcgtcgt

SEQ ID NO: 685624 - DNA, 120 bp, Artificial Sequence
  ENSG00000187555_6 (sequence is synthesized)
attagtcatttgttcttccataaagaaaatgattggggattttccaattttatggcctggagtgaagtgaccgatcctgagaaaggatttatagatgatgacaaagttacctttgaagtc

SEQ ID NO: 685625 - DNA, 120 bp, Artificial Sequence
  ENSG00000187555_7 (sequence is synthesized)
tttgtacaggcggatgctccccatggagttgcgtgggattcaaagaagcacacaggctacgtcggcttaaagaatcagggagcgacttgttacatgaacagcctgctacagacgttattt

SEQ ID NO: 685626 - DNA, 120 bp, Artificial Sequence
  ENSG00000187555_8 (sequence is synthesized)
ttcacgaatcagctacgaaaggctgtgtacatgatgccaaccgagggggatgattcgtctaaaagcgtccctttagcattacaaagagtgttctatgaattacagcatagtgataaacct

SEQ ID NO: 685627 - DNA, 120 bp, Artificial Sequence
  ENSG00000187555_9 (sequence is synthesized)
gtaggaacaaaaaagttaacaaagtcatttgggtgggaaactttagatagcttcatgcaacatgatgttcaggagctttgtcgagtgttgctcgataatgtggaaaataagatgaaaggc

SEQ ID NO: 685628 - DNA, 120 bp, Artificial Sequence
  ENSG00000187555_10 (sequence is synthesized)
acctgtgtagagggcaccatacccaaattattccgcggcaaaatggtgtcctatatccagtgtaaagaagtagactatcggtctgatagaagagaagattattatgatatccagctaagt

SEQ ID NO: 685629 - DNA, 120 bp, Artificial Sequence
  ENSG00000187555_11 (sequence is synthesized)
atcaaaggaaagaaaaatatatttgaatcatttgtggattatgtggcagtagaacagctcgatggggacaataaatacgacgctggggaacatggcttacaggaagcagagaaaggtgtg

SEQ ID NO: 685630 - DNA, 120 bp, Artificial Sequence
  ENSG00000187555_12 (sequence is synthesized)
aaattcctaacattgccaccagtgttacatctacaactgatgagatttatgtatgaccctcagacggaccaaaatatcaagatcaatgataggtttgaattcccagagcagttaccactt

SEQ ID NO: 685631 - DNA, 120 bp, Artificial Sequence
  ENSG00000187555_13 (sequence is synthesized)
gatgaatttttgcaaaaaacagatcctaaggaccctgcaaattatattcttcatgcagtcctggttcatagtggagataatcatggtggacattatgtggtttatctaaaccccaaaggg

SEQ ID NO: 685632 - DNA, 120 bp, Artificial Sequence
  ENSG00000187555_14 (sequence is synthesized)
gatggcaaatggtgtaaatttgatgacgacgtggtgtcaaggtgtactaaagaggaagcaattgagcacaattatgggggtcacgatgacgacctgtctgttcgacactgcactaatgct

SEQ ID NO: 685633 - DNA, 120 bp, Artificial Sequence
  ENSG00000187555_15 (sequence is synthesized)
tacatgttagtctacatcagggaatcaaaactgagtgaagttttacaggcggtcaccgaccatgatattcctcagcagttggtggagcgattacaagaagagaaaaggatcgaggctcag

SEQ ID NO: 685634 - DNA, 120 bp, Artificial Sequence
  ENSG00000187555_16 (sequence is synthesized)
aagcggaaggagcggcaggaagcccatctctatatgcaagtgcagatagtcgcagaggaccagttttgtggccaccaagggaatgacatgtacgatgaagaaaaagtgaaatacactgtg

SEQ ID NO: 685635 - DNA, 120 bp, Artificial Sequence
  ENSG00000187555_17 (sequence is synthesized)
ttcaaagtattgaagaactcctcgcttgctgagtttgttcagagcctctctcagaccatgggatttccacaagatcaaattcgattgtggcccatgcaagcaaggagtaatggaacaaaa

SEQ ID NO: 685636 - DNA, 120 bp, Artificial Sequence
  ENSG00000187555_18 (sequence is synthesized)
cgaccagcaatgttagataatgaagccgacggcaataaaacaatgattgagctcagtgataatgaaaacccttggacaatattcctggaaacagttgatcccgagctggctgctagtgga

SEQ ID NO: 685637 - DNA, 120 bp, Artificial Sequence
  ENSG00000187555_19 (sequence is synthesized)
gcgaccttacccaagtttgataaagatcatgatgtaatgttatttttgaagatgtatgatcccaaaacgcggagcttgaattactgtgggcatatctacacaccaatatcctgtaaaata

SEQ ID NO: 685638 - DNA, 120 bp, Artificial Sequence
  ENSG00000187555_20 (sequence is synthesized)
cgtgacttgctcccagttatgtgtgacagagcaggatttattcaagatactagccttatcctctatgaggaagttaaaccgaatttaacagagagaattcaggactatgacgtgtctctt

SEQ ID NO: 685639 - DNA, 120 bp, Artificial Sequence
  ENSG00000187555_21 (sequence is synthesized)
cagtgaattacccaccgcaaaggagtatttccgagatctctaccaccgcgttgatgtcattttctgtgataaaacaatccctaatgatcctggatttgtggttacgttatcaaatagaat

SEQ ID NO: 685640 - DNA, 120 bp, Artificial Sequence
  ENSG00000187555_22 (sequence is synthesized)
gaattattttcaggttgcaaagacagttgcacagaggctcaacacagatccaatgttgctgcagtttttcaagtctcaaggttatagggatggcccaggtaatcctcttagacataatta

SEQ ID NO: 685641 - DNA, 120 bp, Artificial Sequence
  ENSG00000187555_23 (sequence is synthesized)
tgaaggtactttaagagatcttctacagttcttcaagcctagacaacctaagaaactttactatcagcagcttaagatgaaaatcacagactttgagaacaggcgaagttttaaatgtat

SEQ ID NO: 685642 - DNA, 120 bp, Artificial Sequence
  ENSG00000187555_24 (sequence is synthesized)
atggttaaacagccaatttagggaagaggaaataacactatatccagacaagcatgggtgtgtccgggacctgttagaagaatgtaaaaaggccgtggagcttggggagaaagcatcagg

SEQ ID NO: 685643 - DNA, 120 bp, Artificial Sequence
  ENSG00000187555_25 (sequence is synthesized)
gaaacttaggctgctagaaattgtaagctacaaaatcattggtgttcatcaagaagatgaactattagaatgtttatctcctgcaacgagccggacgtttcgaatagaggaaatcccttt

SEQ ID NO: 685644 - DNA, 120 bp, Artificial Sequence
  ENSG00000187555_26 (sequence is synthesized)
ggaccaggtggacatagacaaagagaatgagatgcttgtcacagtggcgcatttccacaaagaggtcttcggaacgttcggaatcccgtttttgctgaggatacaccagggcgagcattt

SEQ ID NO: 685645 - DNA, 120 bp, Artificial Sequence
  ENSG00000187555_27 (sequence is synthesized)
tcgagaagtgatgaagcgaatccagagcctgctggacatccaggagaaggagtttgagaagtttaaatttgcaattgtaatgatgggccgacaccagtacataaatgaagacgagtatga

SEQ ID NO: 685646 - DNA, 120 bp, Artificial Sequence
  ENSG00000187555_28 (sequence is synthesized)
agtaaatttgaaagactttgagccacagcccggtaatatgtctcatcctcggccttggctagggctcgaccacttcaacaaagccccaaagaggagtcgctacacttaccttgaaaaggc

SEQ ID NO: 685647 - DNA, 120 bp, Artificial Sequence
  ENSG00000187555_29 (sequence is synthesized)
cattaaaatccataactgatttccaagctggtgtgttcaaggcgaggacggtgtgtgggtggccccttaacagcctagaactttggtgcacgtgccctctagccgaagtcttcagcaaga

SEQ ID NO: 685648 - DNA, 120 bp, Artificial Sequence
  ENSG00000187555_30 (sequence is synthesized)
ggattcgctgctggtgttaattttattttattgaggctgttcagtttggcttctctgtatctattgactgccctttttgagcaaaatgaagatgtttttataaagcttggatgccaatga

SEQ ID NO: 685649 - DNA, 120 bp, Artificial Sequence
  ENSG00000187555_31 (sequence is synthesized)
gagttattttatggtaaccacagtgcaaggcaactgtcagcgcaatgggggagaagaggttagtggatcgggggtccctggctcaaggtctctgggctgtccctagtgggcacgagtggc

SEQ ID NO: 685650 - DNA, 120 bp, Artificial Sequence
  ENSG00000187555_32 (sequence is synthesized)
tcggctgccttcctggggtcccgtgcaccagccctgcagctagcaagtcttgtgtttaggctcgtctgacctatttccttcagttatactttcaatgaccttttgtgcatctgttaaggc

SEQ ID NO: 685651 - DNA, 120 bp, Artificial Sequence
  ENSG00000187555_33 (sequence is synthesized)
aaaacagagaaactcacaacctaataaatagcgctcttcccttcattgtgtgcattgtcggcccttcctcgggttctcctcctccagctgcctgggggctttttaataaacttgtctcac

SEQ ID NO: 685652 - DNA, 120 bp, Artificial Sequence
  ENSG00000187555_34 (sequence is synthesized)
ctcgtcagccactactgtctgcagcccctttgcaaagtggatgcactgaatacagtccggacagacattgtgggggtctttttattaaatcaagaacattgttaaattcaattaaggttt

SEQ ID NO: 685653 - DNA, 120 bp, Artificial Sequence
  ENSG00000187555_35 (sequence is synthesized)
actctgctgccttggcagacttacgatctcaacagttcatacgagcaggtgaaaggattataaatagaatttcgttaaagtggaacagacgacaagaaagccttttagcaagagggcatg

SEQ ID NO: 685654 - DNA, 120 bp, Artificial Sequence
  ENSG00000187555_36 (sequence is synthesized)
ctcactagtggttagtaagctgtcgactttgtaaaaaagttaaaaatgaaaaaaaaaggaaaaatgaattgtatatttaatgaatgaacatgtacaatttgccactgggaggaggttcct

SEQ ID NO: 685655 - DNA, 120 bp, Artificial Sequence
  ENSG00000187555_37 (sequence is synthesized)
ttttgttgggtgagtctgcaagtgaatttcactgatgttgatattcattgtgtgtagttttatttcggtcccagccccgtttccttttattttggagctaatgccagctgcgtgtctagt

SEQ ID NO: 685656 - DNA, 120 bp, Artificial Sequence
  ENSG00000187555_38 (sequence is synthesized)
tttgagtgcagtaaaatagaatcagcaaatcactcttatttttcatccttttccggtattttttgggttgtttctgtgggagcagtgtacaccaactcttcctgtatattgcctttttgc

SEQ ID NO: 685657 - DNA, 120 bp, Artificial Sequence
  ENSG00000187555_39 (sequence is synthesized)
tggaaaatgttgtatgttgaataaaattttctataaaaattataattcagtgagttacgtggaagtggaggaagatttctactctccctggaaacaggcctgggaaaccttggcatttgt

SEQ ID NO: 685658 - DNA, 120 bp, Artificial Sequence
  ENSG00000187555_40 (sequence is synthesized)
tccctggaaacaggcctgggaaaccttggcatttgtaacaaggtttcactgagatgtacttttccttctaattccgttttgcgggggcagggtctcttgtttcttttttttttttttttt

SEQ ID NO: 685659 - DNA, 120 bp, Artificial Sequence
  ENSG00000187555_41 (sequence is synthesized)
aaatgaaaggttttccaggagagaactgtgtacaaataaggtgactggagatgtgacctgatgtgtcacgaggcccttcggggcggcaggcgctatcgtgggcgtggtccttgcaccgtc

SEQ ID NO: 685660 - DNA, 120 bp, Artificial Sequence
  ENSG00000187555_42 (sequence is synthesized)
ccatcggccttgccttccagctccgtggcacggtttcctggtctttgggccagtgtgtaccttggagtgacttcctttctcaacttccactgcagtgtgtgtgccttctgctctgagagc

SEQ ID NO: 685661 - DNA, 120 bp, Artificial Sequence
  ENSG00000187555_43 (sequence is synthesized)
tgccttgtgacccgtgtgatagaaagcagggagtgagggtccccgcggacctggcccttccctccttcctcccccagaaagaggagttagagcaggggtgcgagagccgttcgctgtggg

SEQ ID NO: 685662 - DNA, 120 bp, Artificial Sequence
  ENSG00000187555_44 (sequence is synthesized)
tttgtctttgaacaaacattaaggtgtcttgtttttgttctgggctgggggttggctgtagtcttaggtaactgaaagttcctactctcccttaaggtattaaatgactctttttccaaa

SEQ ID NO: 685663 - DNA, 120 bp, Artificial Sequence
  ENSG00000187555_45 (sequence is synthesized)
aaaaaataaaaaagaatgctgaggtagagctcctagagattctatgcagtcactctgatgtgggtgagagaacctcccccatcccccagcagaggccactgcagagccatgcagagatgg

SEQ ID NO: 685664 - DNA, 120 bp, Artificial Sequence
  ENSG00000187555_46 (sequence is synthesized)
tgtttcaaaaacatattttctgccttttcatatacatattgcgttaaaaggcctagcaatcaccaataatggagactgtcttctatttctgagtgggatatgcgtattatgggatgcggg

SEQ ID NO: 685665 - DNA, 120 bp, Artificial Sequence
  ENSG00000187555_47 (sequence is synthesized)
gcaccaccagaaggactgctgttcagacctcctgccaaaagttcagcctccatgagaaactgcagccgtagttgagagttctctcacagtgcggtttacccctggcagctggctgaggca

SEQ ID NO: 685666 - DNA, 120 bp, Artificial Sequence
  ENSG00000187555_48 (sequence is synthesized)
tttactatcagcaggtatgagtccaaattaatgtaactatgggtcataaagagaaggctcggggttttggtgacggtatctgatgtgaatctttcttttcttaatagcttaagatgaaaa

SEQ ID NO: 685667 - DNA, 120 bp, Artificial Sequence
  ENSG00000187555_49 (sequence is synthesized)
tcttaaaatgcttgttgaagaagctatctcatggttttggttcagaaggggctatgcccgaggaaatctcccactgatggattcaggctctctgccttgggagctagaataatcgccatc

SEQ ID NO: 685668 - DNA, 120 bp, Artificial Sequence
  ENSG00000187555_50 (sequence is synthesized)
agaaaagaacctgtagacctcaccattaaaagtgaaaaccctttccaaagttatcttcatcagatatgctactcccatggtgattcattaaggaataatatagtttattcctgtttaata

SEQ ID NO: 685669 - DNA, 120 bp, Artificial Sequence
  ENSG00000187555_51 (sequence is synthesized)
agctgcgccccgcctggggttgctcttgaggagccaaactttgccagattaggctgacagtgagaaaataaattcttccacggtagatactgggtgaaaaagtgcacgtcagcgggcaag

SEQ ID NO: 685670 - DNA, 120 bp, Artificial Sequence
  ENSG00000187555_52 (sequence is synthesized)
aaatattgttaatagcgtatctggtttggaaccgtgcagaaggcgttagtcctctgcacttagtgcagcttgtttcccttttggtccacttaactagaattggacgttttcttcaatact

SEQ ID NO: 685671 - DNA, 120 bp, Artificial Sequence
  ENSG00000187555_53 (sequence is synthesized)
tgactgtagtttttcgctctgtcacctaagccattagactcttctaaaatcagcgtctcttttggaaatagatgattgagctcagtgataatgaaaacccttggacaatattcctggaaa

SEQ ID NO: 685672 - DNA, 120 bp, Artificial Sequence
  ENSG00000187555_54 (sequence is synthesized)
tttgcttttatgctcactcacagatatttgtttttaggcaaataaacaagtcatttatttatatgctgttttcttgtgtagttatagggatggcccaggtaatcctcttagacataatta

SEQ ID NO: 685673 - DNA, 120 bp, Artificial Sequence
  ENSG00000187555_55 (sequence is synthesized)
acagatgagggagttggggtgggaatgagagcaagaacatgggggccagctggggacagttgagaacaatgatgcaactttctcctctcttcctttgtggtagcagaccttttatgcttt

SEQ ID NO: 685674 - DNA, 120 bp, Artificial Sequence
  ENSG00000187555_56 (sequence is synthesized)
acacgaaagcccagatttcctgactcacggtcagagactgggctccaccacctgtcaggtctgtgggcaagacactgcgtctgggtctgctcctgtagaggagagcaggtgctgttacct

SEQ ID NO: 685675 - DNA, 120 bp, Artificial Sequence
  ENSG00000187555_57 (sequence is synthesized)
aagggggttttgttttgtagtgggatgagaatgtaaagccactacattgcgcctggctcagtgcatccccatgcatacttgcctcgcttacagagggagctcaggcagatgcctggcccc

SEQ ID NO: 685676 - DNA, 120 bp, Artificial Sequence
  ENSG00000187555_58 (sequence is synthesized)
aagaacaagattgcactctgagagaaggaaggcatggtgaagaggtggtgttgtggtgggccttaaagtaggcttaggacttgagctcggggatttggagcgggagatacagatgaccca

SEQ ID NO: 685677 - DNA, 120 bp, Artificial Sequence
  ENSG00000187555_59 (sequence is synthesized)
gaatccacctgtttttcggggagtttgtacttggcagtgtgtggtgcagccagcatccggccaggtgtgcgcttgcaaccgtgcgaaagccctgccgcacatggctgcctgcatcagaat

SEQ ID NO: 685678 - DNA, 120 bp, Artificial Sequence
  ENSG00000187555_60 (sequence is synthesized)
ttaccccgaatttgttacagtgttaggtctaccagctaactcagggcctcagatgatcttgagaatgacatatttagatttgtgaattttttttttttacctgttgtagaatcaaatctg

SEQ ID NO: 685679 - DNA, 120 bp, Artificial Sequence
  ENSG00000187555_61 (sequence is synthesized)
attgttacatatttgtggatttattcatttagcttttcctgttaacattttaacttaaaaggtggatagaattgggtgtagagaaaatacttaagtacatggaagactatctggccatat

SEQ ID NO: 685680 - DNA, 120 bp, Artificial Sequence
  ENSG00000187555_62 (sequence is synthesized)
ttagagcagtagcgttggattcctggattgttgttctaaacacacagggttaagccttcttcccttgcagaaagatgtgttgatcaattccacaaaagctcactagacttcctgatgaag

SEQ ID NO: 685681 - DNA, 120 bp, Artificial Sequence
  ENSG00000187556_0 (sequence is synthesized)
ctatggggacctttgacctgtggacagattacctgggtttggcacacctggttagggctctgagtgggaaagagggtcctgaaaccaggctgagcccccagccagagccagagccaatgc

SEQ ID NO: 685682 - DNA, 120 bp, Artificial Sequence
  ENSG00000187556_1 (sequence is synthesized)
tggagccggtgtcagccctggagccgatgccagcgccggagtcggtgccagtgccgggacccaaggatcagaagcgcagcctggagtcctcgccagctcccgaacgcctgtgctctttct

SEQ ID NO: 685683 - DNA, 120 bp, Artificial Sequence
  ENSG00000187556_2 (sequence is synthesized)
cagtgcggcgccacacgtgagcgcgcccacacccgacgcttctgcccacttactggccagggctacacctccgtctacagccacaccacccgaaactcggcaggcaagaagctggtccgg

SEQ ID NO: 685684 - DNA, 120 bp, Artificial Sequence
  ENSG00000187556_3 (sequence is synthesized)
cctgacaaggcgaagacacaggacacaggccaccgccgaggaggaggaggaggagcaggtttcagaggtgccgggaagtctgagccttcgccctcctgctctccctccatgtccacctag

SEQ ID NO: 685685 - DNA, 120 bp, Artificial Sequence
  ENSG00000187556_4 (sequence is synthesized)
cctacacctgggcaagggcacccgggctcggctggatttccaggaagacccaccctatgacgactgcccccactcccagaccctccccccagcctgggattgagccctggggatgacccg

SEQ ID NO: 685686 - DNA, 120 bp, Artificial Sequence
  ENSG00000187556_5 (sequence is synthesized)
gggttggcaagggaagagctgaaatcgccctgtccttggggaccccaccctttgtgccatctgccgtttccctagtgctgggcatccagtcagccctcaataaatgcttatgaatggatc

SEQ ID NO: 685687 - DNA, 120 bp, Artificial Sequence
  ENSG00000187556_6 (sequence is synthesized)
gggcggattggccactgggccaggatccaggaatcctctctcctggtctgacccagttcaggaatgcagaggccgcccgccccggcaaatgcgttgcagcaagaaggagagttagacgta

SEQ ID NO: 685688 - DNA, 120 bp, Artificial Sequence
  ENSG00000187559_0 (sequence is synthesized)
cattcatcccaggcttccagctcagcccgccccaggccaggtgatcggccgccacatcccctgcgactgaagcacctgctcctccatgaacctgccaagagctgagcgccttcgctccac

SEQ ID NO: 685689 - DNA, 120 bp, Artificial Sequence
  ENSG00000187559_1 (sequence is synthesized)
accgcagcgcagcctccgggactccgatggggaagacggtaaaatcgatgtcctgggagaggaggaagatgaagacgaggtggaagacgaggaggaggcggcgagccagcagttcctaga

SEQ ID NO: 685690 - DNA, 120 bp, Artificial Sequence
  ENSG00000187559_2 (sequence is synthesized)
gcagtcgctccagccggggctgcaggtggcccggtggggcggggttgcgcttccccgagagcacatcgagggcggcggcggcccgagcgacccctcagagtttggcaccaagttcagggc

SEQ ID NO: 685691 - DNA, 120 bp, Artificial Sequence
  ENSG00000187559_3 (sequence is synthesized)
accgccaaggtctgcggcggcctctgaagatgcccggcagccggcaaagcccccctactcgtacatcgcgctcatcaccatggccatcctgcaaaacccgcacaagcgcctcacgctcag

SEQ ID NO: 685692 - DNA, 120 bp, Artificial Sequence
  ENSG00000187559_4 (sequence is synthesized)
cggcatctgcgccttcattagtggccgcttcccctactaccgccgcaagttccccgcctggcagaacagcatccgccacaacctctcgctgaacgactgcttcgttaagatcccccgcga

SEQ ID NO: 685693 - DNA, 120 bp, Artificial Sequence
  ENSG00000187559_5 (sequence is synthesized)
gccgggccacccaggcaagggcaactactggagcctggaccccgcctcccaagacatgttcgacaatggcagctttctccggcgtaggaagcgtttcaagcgccaccaactgaccccggg

SEQ ID NO: 685694 - DNA, 120 bp, Artificial Sequence
  ENSG00000187559_6 (sequence is synthesized)
cgggagcccacctgccccaccccttccctctacctgctgcacacgccgccctgcacaacccccgcccaggccctctgcttggggcccctgccccgccgcagccagtcccgggggcctacc

SEQ ID NO: 685695 - DNA, 120 bp, Artificial Sequence
  ENSG00000187559_7 (sequence is synthesized)
caccgcccccgggagacgcccttacgctctgctgcacccgcatcctcttcgctacctactgctctcggcccccgtctatgccggggcaccgaagaaagcagaaggcgcggccctggcgac

SEQ ID NO: 685696 - DNA, 120 bp, Artificial Sequence
  ENSG00000187559_8 (sequence is synthesized)
cccggcacccttcccgtgctgcagccctcacttggtcctcagccttgggaggagggcaagggtctggcgtcgccaccgggaggcggatgcatctctttcagcattgagagtattatgcaa

SEQ ID NO: 685697 - DNA, 120 bp, Artificial Sequence
  ENSG00000187559_9 (sequence is synthesized)
actgccacctgctccagcgaccatcaagcctgttgcatccccagaccgctgcccctttgctgcaagtgtccgccgccgccgctgctcggacaattttgcagcaatagcagcagcatcagg

SEQ ID NO: 685698 - DNA, 120 bp, Artificial Sequence
  ENSG00000187559_10 (sequence is synthesized)
aggaggactgcgccaacggctgcgctcccaccaagggcgcggtgctgggcgggcacctgtcggcctcgtcggccctgctgaggtatcaggcagtggcagagggctctaggctgacatcgc

SEQ ID NO: 685699 - DNA, 120 bp, Artificial Sequence
  ENSG00000187559_11 (sequence is synthesized)
tggctgcccctttgggcggagaggggacctcaccagtttttttagtatcgcccacgcccagttccctggccaactccgcagggccctcctagagccaggtgggagtggggagcgacccgc

SEQ ID NO: 685700 - DNA, 120 bp, Artificial Sequence
  ENSG00000187559_12 (sequence is synthesized)
agctgctcactccaccttgcgcggcccatactgggcgtgtgcatctgaatcccgctggagagcaaacacgaacttctgttcgctgcaaaatggttagaaagaaacagctggattacgttc

SEQ ID NO: 685701 - DNA, 120 bp, Artificial Sequence
  ENSG00000187559_13 (sequence is synthesized)
ctctaaaaaccacctgaacgtaaccttcgcagggcgtcaagtcatcttttcttgccttcggttgtggcttctatggctgtcccgatttgcgcatttcctggggtactatgaacgtgagtg

SEQ ID NO: 685702 - DNA, 120 bp, Artificial Sequence
  ENSG00000187559_14 (sequence is synthesized)
gggtattttgttctggcattaaaagaaaaacaagcaagcaaacaaaaacacagcctccgatgccaaacatgttcccccttcttcacttccttggagctggaagtattattcctaagtcta

SEQ ID NO: 685703 - DNA, 120 bp, Artificial Sequence
  ENSG00000187559_15 (sequence is synthesized)
gtgcaaaatgcttctactctctgtgtcttcctgatagggatgtttaatgtaagtaggatattaatttcagaacattgatttcttatctgtgtgtctgacgtgccatctttaatgttaaaa

SEQ ID NO: 685704 - DNA, 120 bp, Artificial Sequence
  ENSG00000187559_16 (sequence is synthesized)
ttaaggtgttaaaattaagcctagttatatagacgaaataaaatgctaagtcactacactacatcgtttattttctattacatctcattcttccctttctaaatggaactttttaaaacc

SEQ ID NO: 685705 - DNA, 120 bp, Artificial Sequence
  ENSG00000187559_17 (sequence is synthesized)
tacgttattttccctcaaacaatttattttcacaattcatatttattatagatagcagaagtaatccattttaatatggcctttaaaaattccaaatatttgaggttgaaaatgtcctgg

SEQ ID NO: 685706 - DNA, 120 bp, Artificial Sequence
  ENSG00000187566_0 (sequence is synthesized)
gactgtgaccgtgaccgagagcgtcgctggggcacggccaggcggcgcggcgggagtgcacaggacgcgccatggcggccgaagcctcggagagcgggccagcgctgcatgagctcatgc

SEQ ID NO: 685707 - DNA, 120 bp, Artificial Sequence
  ENSG00000187566_1 (sequence is synthesized)
gcgaggcggagatcagcctgctcgagtgcaaggtgtgctttgagaagtttggccaccggcagcagcggcgcccgcgcaacctgtcctgcggccacgtggtctgcctggcctgcgtggccg

SEQ ID NO: 685708 - DNA, 120 bp, Artificial Sequence
  ENSG00000187566_2 (sequence is synthesized)
ccctggcgcacccgcgcactctggccctcgagtgcccattctgcaggcgagcttgccggggctgcgacaccagcgactgcctgccggtgctgcacctcatagagctcctgggctcagcgc

SEQ ID NO: 685709 - DNA, 120 bp, Artificial Sequence
  ENSG00000187566_3 (sequence is synthesized)
ttcgccagtccccggccgcccatcgcgccgcccccagcgcccccggagccctcacctgccaccacaccttcggcggctgggggaccctggtcaaccccaccggactggcgctttgtccca

SEQ ID NO: 685710 - DNA, 120 bp, Artificial Sequence
  ENSG00000187566_4 (sequence is synthesized)
agacggggcgtgtcgtggtggtgcacgacggcaggaggcgtgtcaagatttttgactcagggggaggatgcgcgcatcagtttggagagaagggggacgctgcccaagacattaggtacc

SEQ ID NO: 685711 - DNA, 120 bp, Artificial Sequence
  ENSG00000187566_5 (sequence is synthesized)
ctgtggatgtcaccatcaccaacgactgccatgtggttgtcactgacgccggcgatcgctccatcaaagtgtttgatttttttggccagatcaagcttgtcattggaggccaattctcct

SEQ ID NO: 685712 - DNA, 120 bp, Artificial Sequence
  ENSG00000187566_6 (sequence is synthesized)
taccttggggtgtggagaccacccctcagaatgggattgtggtaactgatgcggaggcagggtccctgcacctcctggacgtcgacttcgcggaaggggtccttcggagaactgaaaggt

SEQ ID NO: 685713 - DNA, 120 bp, Artificial Sequence
  ENSG00000187566_7 (sequence is synthesized)
tgcaagctcatctgtgcaatccccgaggggtggcagtgtcttggctcaccggggccattgcggtcctggagcaccccctggccctggggactggggtttgcagcaccagggtgaaagtgt

SEQ ID NO: 685714 - DNA, 120 bp, Artificial Sequence
  ENSG00000187566_8 (sequence is synthesized)
ttagctcaagtatgcagcttgtcggccaagtggatacctttgggctgagcctctactttccctccaaaataactgcctccgctgtgacctttgatcaccagggaaatgtgattgttgcag

SEQ ID NO: 685715 - DNA, 120 bp, Artificial Sequence
  ENSG00000187566_9 (sequence is synthesized)
tttcgcatcctgtggctcttaccttcaccaaggagaattctcttcttgtgctggacacagcatctcattctataaaagtctataaagttgactgggggtgatgggctggggtgggtccct

SEQ ID NO: 685716 - DNA, 120 bp, Artificial Sequence
  ENSG00000187566_10 (sequence is synthesized)
ggaatcagaagcactagtgctgccattaatgaattgtttaaccctggataagtcacttaaactcatctatccaggcagggataattaaaaccatctggcagacttacaaagcttgggaca

SEQ ID NO: 685717 - DNA, 120 bp, Artificial Sequence
  ENSG00000187566_11 (sequence is synthesized)
gttattggagattaatctaccatttattgaatgcatactctgtgcaaggaaatttgcaaatattagcttatttaatctgtactatccagtgaggtaatttcttcccccccaagatagagt

SEQ ID NO: 685718 - DNA, 120 bp, Artificial Sequence
  ENSG00000187566_12 (sequence is synthesized)
ccccccaagatagagtcaagctctgtcacccaggctggagtgcagaagcatgatcacagctcactacagtttcaacgtcccccgctcaggtggtccttccacctcagcctcccaagtagc

SEQ ID NO: 685719 - DNA, 66 bp, Artificial Sequence
  ENSG00000187566_13 (sequence is synthesized)
accttcctcggcctcccaaagtactaggagtacaggcatagccacttgctcagccataatttttat

SEQ ID NO: 685720 - DNA, 120 bp, Artificial Sequence
  ENSG00000187566_14 (sequence is synthesized)
ggagtacaggcatagccacttgctcagccataatttttattattaatctcattgtacaagtgagaaaactgagacccagagagcttaagtgacttcctcgaggtcatagttacttactgc

SEQ ID NO: 685721 - DNA, 120 bp, Artificial Sequence
  ENSG00000187566_15 (sequence is synthesized)
cttagtcccaatttgaattcaattctgattccaaataagttgcgcttaaataagacaacagatgtgggaaaaatatgtgaatgtgtagtgttgctatgtgtactgtctttacaagtagct

SEQ ID NO: 685722 - DNA, 120 bp, Artificial Sequence
  ENSG00000187566_16 (sequence is synthesized)
aattattttagcacaaagatgtgcaaagaaaggagactttatggagagttcaggagaaaaaggattttgtggtggccatcactttcattcaatttgcgactgctctgatggcacattaga

SEQ ID NO: 685723 - DNA, 120 bp, Artificial Sequence
  ENSG00000187566_17 (sequence is synthesized)
tgaagttactgttgatcctgagttacgtgaataagaaaaacaattgaactgcttattaaaaaagtaaacatgtcttttaacgcctatatcttctccactatacaaactcagaaaatacca

SEQ ID NO: 685724 - DNA, 120 bp, Artificial Sequence
  ENSG00000187569_0 (sequence is synthesized)
gtcagttctttgaccattcgttggagctccggttttcagcctctttccgggctacctggtagcaatttgaggctctgtcatcagtttctgctacgtttcaaagatcctggagaagcctag

SEQ ID NO: 685725 - DNA, 120 bp, Artificial Sequence
  ENSG00000187569_1 (sequence is synthesized)
tgttgtgtcaagacgccgatggacccatcacagtttaatccaacctacatcccagggtctccacaaatgctcaccgaagaaaattcccgggacgattcaggggcctctcaaatctcctcc

SEQ ID NO: 685726 - DNA, 120 bp, Artificial Sequence
  ENSG00000187569_2 (sequence is synthesized)
gagacgttgataaagaaccttagtaacttgactatcaacgctagtagcgaatctgtttcccctctatcggaagctttactccgtcgagagtctgtaggagcagcagtcctcagggaaatc

SEQ ID NO: 685727 - DNA, 120 bp, Artificial Sequence
  ENSG00000187569_3 (sequence is synthesized)
gaagatgagtggctttacagcaggagaggagtaagaacattgctgtctgtgcagagagaaaagatggcaagattgagatacatgttactcggcggagttcgtacgcatgaaagaagacca

SEQ ID NO: 685728 - DNA, 120 bp, Artificial Sequence
  ENSG00000187569_4 (sequence is synthesized)
agttaagaaggaatcaagaccattcaaatgtccctgcagtttctgcgtgtctaatggatgggatccttctgagaatgctagaatagggaatcaagacaccaagccacttcagccataaat

SEQ ID NO: 685729 - DNA, 120 bp, Artificial Sequence
  ENSG00000187569_5 (sequence is synthesized)
cttattcttgcacctttttttcttggtagtaattttatatagcaggttgagaaagctactctatgctagtatagactatacaccaataattttgataatgagttctaggatgtatttttc

SEQ ID NO: 685730 - DNA, 120 bp, Artificial Sequence
  ENSG00000187569_6 (sequence is synthesized)
ttgtatctttttcttcctactatgatactagtaattcataagggatctgtgtaatctgaatgtatttgaataactttagctctactgtttgatttgacccaaagaagccaagatgatata

SEQ ID NO: 685731 - DNA, 120 bp, Artificial Sequence
  ENSG00000187569_7 (sequence is synthesized)
agtattcccatgtgtcttagaagcccaaagtcagtgagatgaaacccaacatcaagaaattgaagcaaagttacttatggataaagaaagcattaggtagttgggctatagcataattag

SEQ ID NO: 685732 - DNA, 120 bp, Artificial Sequence
  ENSG00000187569_8 (sequence is synthesized)
attttctggctttcaaaaatttggattgcaatcacagcaaactttgttatttttacagttttcagtacaaaagtgtttatatagaaacaataaagttgacatttgagtaccttttaaaaa

SEQ ID NO: 685733 - DNA, 120 bp, Artificial Sequence
  ENSG00000187581_0 (sequence is synthesized)
agctgcctcacgagcactggagcttgcgttacttggcctcacctcacctgtgctgtccacgcctggctttgtctcacctgacgcgatatgcctctcctgcgtgggcgctgtcctgcccgc

SEQ ID NO: 685734 - DNA, 120 bp, Artificial Sequence
  ENSG00000187581_1 (sequence is synthesized)
cgccactaccgccgcttggccctgctcggcctgcagcccgctccccgcttcgcccactcggggcccccgcgccagcggcccctgtctgccgcggaaatggctgttggacttgtggtgttt

SEQ ID NO: 685735 - DNA, 120 bp, Artificial Sequence
  ENSG00000187581_2 (sequence is synthesized)
ttagatggaagatgatgttgaacagctgttaacgtccaaaaaactttcagaaaaagctgtgtttttgttaacgagcaaaattgcctagttgagttgatgcaaccattgtggtattcactt

SEQ ID NO: 685736 - DNA, 120 bp, Artificial Sequence
  ENSG00000187581_3 (sequence is synthesized)
tcctcatgtttatgatgaatattttgcacttttttagtactgtgcattatatagatgtatagtcaaaaatgttctgcttaagtgttaaataaaacggaaacacttattcgtgcttggtaa

SEQ ID NO: 685737 - DNA, 120 bp, Artificial Sequence
  ENSG00000187583_0 (sequence is synthesized)
aggaggctgtggacagggacccagacttgccgacctgtacgactctggccatggggaacagccactgtgtccctcaggcccccaggaggctccgggcctccttctccagaaagccctcgc

SEQ ID NO: 685738 - DNA, 120 bp, Artificial Sequence
  ENSG00000187583_1 (sequence is synthesized)
tgaagggaaacagagaggacagcgcgcggatgtcggccggcctgccgggccccgaggctgctcgaagcggggacgccgccgccaacaagctcttccactacatcccgggcacggacatcc

SEQ ID NO: 685739 - DNA, 120 bp, Artificial Sequence
  ENSG00000187583_2 (sequence is synthesized)
tggacctggagaaccagcgagaaaacctggagcagccattcctgagtgtgttcaagaaggggcggcggagggtgcctgtgaggaacctgggaaaagttgtgcattacgccaaggtccagc

SEQ ID NO: 685740 - DNA, 120 bp, Artificial Sequence
  ENSG00000187583_3 (sequence is synthesized)
tgcggttccagcacagccaggatgtcagcgactgctacctggagctattccccgcccacctgtacttccaggcccacggctcggaaggactcacatttcaggggctgttaccgctgacgg

SEQ ID NO: 685741 - DNA, 120 bp, Artificial Sequence
  ENSG00000187583_4 (sequence is synthesized)
agctgagtgtctgcccgctcgaggggtcccgagagcacgccttccagatcacaggcccactgcccgcacccctcctggtgctctgccccagccgggccgagctggaccgctggctttacc

SEQ ID NO: 685742 - DNA, 120 bp, Artificial Sequence
  ENSG00000187583_5 (sequence is synthesized)
acctggagaagcagacggccctcctcggggggccgcggcgctgccactcggcacccccacagcgccgtctaacccggctgcggacggcgtcagggcacgaacccggcggcagtgctgtct

SEQ ID NO: 685743 - DNA, 120 bp, Artificial Sequence
  ENSG00000187583_6 (sequence is synthesized)
gtgcctcgagggtcaagctgcagcacctgcccgcacaggagcagtgggaccggctcttggtcctgtacccaacgtccttggccattttctccgaggagctggacgggctttgcttcaagg

SEQ ID NO: 685744 - DNA, 120 bp, Artificial Sequence
  ENSG00000187583_7 (sequence is synthesized)
gggagctcccactccgtgccgtccacatcaacctggaggagaaggagaagcagatccgctccttcctgattgaaggccccctcatcaacaccatccgcgtggtgtgcgccagctacgagg

SEQ ID NO: 685745 - DNA, 120 bp, Artificial Sequence
  ENSG00000187583_8 (sequence is synthesized)
actacggtcactggctgctgtgccttcgcgctgtcacccacagggagggggccccgccgctgcctggtgccgagagcttcccagggtcgcaggttatgggcagtggccgaggctcactct

SEQ ID NO: 685746 - DNA, 120 bp, Artificial Sequence
  ENSG00000187583_9 (sequence is synthesized)
cctcaggcggacagaccagctgggactcggggtgcttggcgcccccctccacccgcaccagccactccctgcctgagtcctcagtgccatccaccgtgggctgctcctcccagcacacac

SEQ ID NO: 685747 - DNA, 120 bp, Artificial Sequence
  ENSG00000187583_10 (sequence is synthesized)
cggaccaggccaactctgaccgtgccagcattggccgacggaggaccgagctgagacgcagtggcagcagccggtcacccgggagcaaggcccgggcagagggccgcggccctgtcaccc

SEQ ID NO: 685748 - DNA, 120 bp, Artificial Sequence
  ENSG00000187583_11 (sequence is synthesized)
cactgcacctggacctgacccagctgcacaggctgagcctggagagcagcccagatgcccctgaccacacttcggaaacatcacactcgcccctctatgccgacccctacacaccacccg

SEQ ID NO: 685749 - DNA, 120 bp, Artificial Sequence
  ENSG00000187583_12 (sequence is synthesized)
ccacctcccaccgcagggtcacagatgtccggggcctggaggagttcctcagtgccatgcagagtgcacgtggacccacgccctcgagcccactcccctcggtgcctgtgtctgtgcctg

SEQ ID NO: 685750 - DNA, 120 bp, Artificial Sequence
  ENSG00000187583_13 (sequence is synthesized)
aagggagccctgcagtccagagccgctcagagacaccggggctcagccaaggatggggggccgcagcccccagacgcccctcagcttgtctcctctgccagggaaggttcgcccgaaccc

SEQ ID NO: 685751 - DNA, 120 bp, Artificial Sequence
  ENSG00000187583_14 (sequence is synthesized)
tggctgcctctgacagatggtcggtcccccaggaggagccgggaccccggctacgaccacctctgggacgagactttgtcttcctcccaccagaagtgcccccagcttggagggcctgag

SEQ ID NO: 685752 - DNA, 120 bp, Artificial Sequence
  ENSG00000187583_15 (sequence is synthesized)
gccagtggggggcttgtgcagtggatctgatggccgcggtgaggtgggttctcaggaccaccctcgccaagctccagggtacctgcccctctaacccacttcaaattacaagtcagggtc

SEQ ID NO: 685753 - DNA, 120 bp, Artificial Sequence
  ENSG00000187583_16 (sequence is synthesized)
tgaacccagtgtgatggggggagtctctggggccctgagttcagagcccgtccctcagctcctgttccttggtgccagcagctggggcagggaagggtgggaggggccccatccaaagga

SEQ ID NO: 685754 - DNA, 120 bp, Artificial Sequence
  ENSG00000187583_17 (sequence is synthesized)
tgccctggccagcgaggctgggtcacaggtcagggaggtcctggccgtccacagggtcggccctcagctcagcccgccaggagtcagggaggagactcgctgggagtgggagggcagcac

SEQ ID NO: 685755 - DNA, 120 bp, Artificial Sequence
  ENSG00000187583_18 (sequence is synthesized)
gggcgtgaaggtcggaggacagagaaaggtcagcagggtcagagtatgtgaggtcagagggcatgagggtcacaggtcagcaaggtgtgaggagcacaagccagggtgccccgaggagga

SEQ ID NO: 685756 - DNA, 120 bp, Artificial Sequence
  ENSG00000187583_19 (sequence is synthesized)
gggtgggtgggtccttgtgtggcctggcgcgcaccacagggcagcacgggagacgttgacaccaccggacgagaaagaaaaaagagagaagagagagaggagaagagagaaaagaagaga

SEQ ID NO: 685757 - DNA, 120 bp, Artificial Sequence
  ENSG00000187583_20 (sequence is synthesized)
agagagaagagaagagaaggaaagagagagagagaataagaaaaggaagaaagaaaaagaaaagatagaattttattggtgctgcatccatgtgttctctgctcagcagccagggtctcc

SEQ ID NO: 685758 - DNA, 120 bp, Artificial Sequence
  ENSG00000187583_21 (sequence is synthesized)
cacagtcttgaggacccccacccagcacccagccaggcagcccccttcctctgccacctcgggcccctcaccgaccttcccacctcatctctgactcctcttggctgtgggtccccagct

SEQ ID NO: 685759 - DNA, 120 bp, Artificial Sequence
  ENSG00000187583_22 (sequence is synthesized)
gccccacaggagcccccgggacaaccccaggagcccagccctccatctgaggccaccgaattctccctctgcacctgcacccagggctcccggggaggggctcgcggctctgccacagac

SEQ ID NO: 685760 - DNA, 120 bp, Artificial Sequence
  ENSG00000187583_23 (sequence is synthesized)
ccccaccctgcaggggctgctgcactggggaggggcaggcagagccttcgctgtctcaggccagagcccgcagaggccttggccacagtcctttgaggatcaagagtgatgggccttgga

SEQ ID NO: 685761 - DNA, 120 bp, Artificial Sequence
  ENSG00000187583_24 (sequence is synthesized)
gcccttgccagcccagcccacctgtgaggaggctgcccatcccctctttgaggccaccctgtgtcctctcccctgcctctgcccagagctccagccggagtgtcttgctgctcagacccc

SEQ ID NO: 685762 - DNA, 120 bp, Artificial Sequence
  ENSG00000187583_25 (sequence is synthesized)
tccgaggtccaagtcctgtcctgccactcagctccccctgcaccccagaagaaacgcagggtgcggttgcatttgatttcagataaacaacaacttcttagtaaaatgacctccccacta

SEQ ID NO: 685763 - DNA, 120 bp, Artificial Sequence
  ENSG00000187583_26 (sequence is synthesized)
ctcctcggggggccgcggcgctgccactcggcacccccacaggggtcctgcggagacgaactcccctggactttgcagcgccgtctaacccggctgcggacggcgtcagggcacgaaccc

SEQ ID NO: 685764 - DNA, 120 bp, Artificial Sequence
  ENSG00000187583_27 (sequence is synthesized)
gaggggtcccgagagcacgccttccagatcacaggtgtttgggatgcttcccgggcccccagaggcactcctgacccaggacttggagaggggcctgccctgtggctgcggagcacgtgt

SEQ ID NO: 685765 - DNA, 120 bp, Artificial Sequence
  ENSG00000187595_0 (sequence is synthesized)
agccccacacgcagcgttcccagccaggcgagagcaggtggccgcggcgggctccgtctctgccccgcagatatgaagcggccactgagcccacccccaccggctgagaaggagaccccc

SEQ ID NO: 685766 - DNA, 120 bp, Artificial Sequence
  ENSG00000187595_1 (sequence is synthesized)
atatctggagctgctgagtgcctccctcggcccccagaaccacctaagcccaagcgagaaagaaagcggccatcgtacacgctctgtgatgtctgcaacatccagctgaactcggcggcc

SEQ ID NO: 685767 - DNA, 120 bp, Artificial Sequence
  ENSG00000187595_2 (sequence is synthesized)
gctgaactcggcggcccaggcccaggtgcactgtggggggcgggcccaccagaggcggcttcggcagctcagcttggggaagagcccctcagggccagcaggcccggcctccggcgcccc

SEQ ID NO: 685768 - DNA, 120 bp, Artificial Sequence
  ENSG00000187595_3 (sequence is synthesized)
tccctgcccctgcccacccggcctctgcagcccccgctggacttcaagcacttgctcgccttccacttcaatggcgctgccccgctcagtctcttccccaacttcagcacgatggacccg

SEQ ID NO: 685769 - DNA, 120 bp, Artificial Sequence
  ENSG00000187595_4 (sequence is synthesized)
gtccagaaagctgtcatcagccacacgtttggtgtcccctcccctctgaagaagaagctgttcatttcctgtaacatctgtcacctgaggttcaactcagcgaaccaggccgaggcacat

SEQ ID NO: 685770 - DNA, 120 bp, Artificial Sequence
  ENSG00000187595_5 (sequence is synthesized)
tataaaggccacaaacacgccagaaaactcaaggctgtcgaggctgccaagagcaagcagaggccacacacccaggcccaggatggggctgtagtgtccccaatcccaacgctggccagt

SEQ ID NO: 685771 - DNA, 120 bp, Artificial Sequence
  ENSG00000187595_6 (sequence is synthesized)
gagccacagagtaaagcagttcctgcagcccctcctcttgggcctccactccagccaccaccaactccagaccctacatgcagggagccagcccactcagagctcttggatgctgcctcc

SEQ ID NO: 685772 - DNA, 120 bp, Artificial Sequence
  ENSG00000187595_7 (sequence is synthesized)
tcatcctcttcttcctcctgcccaccttgctccccagagcctgggagagaggcaccggggcctgagccagcggcagctgccgtgggaagcagcatgagtggggaaggcaggagtgagaag

SEQ ID NO: 685773 - DNA, 120 bp, Artificial Sequence
  ENSG00000187595_8 (sequence is synthesized)
gggcacctctactgccccacgtgtaaggtgacagtgaactcggcctcccagcttcaggctcacaacacaggagccaagcaccggtggatgatggaaggtcagcgaggggctccccggagg

SEQ ID NO: 685774 - DNA, 120 bp, Artificial Sequence
  ENSG00000187595_9 (sequence is synthesized)
agccggggccgcccggtgtccaggggaggtgccggacacaaagccaagagagtcacagggggccggggcggccggcaggggcccagccctgccttccactgtgctctctgtcagctccag

SEQ ID NO: 685775 - DNA, 120 bp, Artificial Sequence
  ENSG00000187595_10 (sequence is synthesized)
gtcaattcagagacccaactgaagcagcacatgagcagcaggaggcacaaagaccgcctggccgggaagacccccaagccctccagccagcacagcaagctgcagaagcacgcagcgctg

SEQ ID NO: 685776 - DNA, 120 bp, Artificial Sequence
  ENSG00000187595_11 (sequence is synthesized)
gcttctaaactggccttgcagaagcaactcaccaagacgttggcagcccgcttcctgcccagcccgctccccaccgcagccactgccatctgtgctctgccagggcccctggccctccgc

SEQ ID NO: 685777 - DNA, 120 bp, Artificial Sequence
  ENSG00000187595_12 (sequence is synthesized)
cctgcccctacagcagccactaccctcttcccggctcccatcctgggcccagctctgtttcgcaccccagcaggagctgtccgccctgccacaggacctatcgtccttgccccttattag

SEQ ID NO: 685778 - DNA, 120 bp, Artificial Sequence
  ENSG00000187595_13 (sequence is synthesized)
cctcatggggaggccagagctgatttcccaatagccactccttgtctcctcctgtcctgagacaccttggtttcctacatgccacagggactgtgaacagcttcaggggtcctgcccgat

SEQ ID NO: 685779 - DNA, 120 bp, Artificial Sequence
  ENSG00000187595_14 (sequence is synthesized)
ccagaaagagctgggctagttttaagggcagctgccttccaaggactgtccccaccctcctttcgcaggccttccagggttaatcctaggcttgcctgcatttcccaccctgacagaccc

SEQ ID NO: 685780 - DNA, 120 bp, Artificial Sequence
  ENSG00000187595_15 (sequence is synthesized)
caaagatctatgcaaaatctcagccccagccatgtggtgctctcactttcctccacccaagacccacatggccagactctaggaatcttagcttctacaagccatcctctcctagccagg

SEQ ID NO: 685781 - DNA, 120 bp, Artificial Sequence
  ENSG00000187595_16 (sequence is synthesized)
ggacgactctctgacctctattcctaggctttggggcttcactggagatagggatggggtctctagctgcagcaggctcaaggctgtcaggacaaggtgaccatgggagtgtgacagagg

SEQ ID NO: 685782 - DNA, 120 bp, Artificial Sequence
  ENSG00000187595_17 (sequence is synthesized)
accatggaggagaaagggggacccaaaagtccttcgatcagcagtgctaaggtggggcagagccaaggaggtagtggggctggttctgaaagcttttgggggcttcatctgctctgaagg

SEQ ID NO: 685783 - DNA, 120 bp, Artificial Sequence
  ENSG00000187595_18 (sequence is synthesized)
ggtgggactaagagaggaggtgatgttctggttgggcccagggttttgttttaatcttaagtcttctgggcattcatgggcccagtctttttttctgtctgagagtatcattctgttgcc

SEQ ID NO: 685784 - DNA, 120 bp, Artificial Sequence
  ENSG00000187595_19 (sequence is synthesized)
cagtggtgcaatcttggctcactgcatgcagcctctgcctccctggttcaagtgatacttgctgataagcccagtcttaatattgagggagtaactcatccctcagaagctcttcttctt

SEQ ID NO: 685785 - DNA, 120 bp, Artificial Sequence
  ENSG00000187595_20 (sequence is synthesized)
gctcttcttcttagcctttctctgacttcctgaaccccaactcttggagggcgggtgtgggtctccctcagactatggactcagctaacaccgaaccccccgcagagctcccaaaggaag

SEQ ID NO: 685786 - DNA, 120 bp, Artificial Sequence
  ENSG00000187595_21 (sequence is synthesized)
agctttcccctacagcttcccactccaaactggtcctagcactaaattcagctttcccttctcccaaccagcccctgccactgtgaagctgagtgttgggaggcagtctcacatgcactg

SEQ ID NO: 685787 - DNA, 120 bp, Artificial Sequence
  ENSG00000187595_22 (sequence is synthesized)
gcaagacccattttcatgctgtcaatgtcaatgtcacaaactcctttccactgcagcactgccccctccccaccccacaatatgggaccctgccagtatccccctgtatcttttttttgt

SEQ ID NO: 685788 - DNA, 120 bp, Artificial Sequence
  ENSG00000187595_23 (sequence is synthesized)
tttttaaagacatttccaatgggagaaccagaaaaagggggaggggagggaaactttttgataacaattgtggttttattgtgtccaaccaatgcatcaataaatgaacttgaagcccaa

SEQ ID NO: 685789 - DNA, 120 bp, Artificial Sequence
  ENSG00000187595_24 (sequence is synthesized)
gggcggccggcaggggcccagccctgccttccactgtgctctctgtcagctccaggtcaattcagagacccaactgaagcaggtgggagaagtgaggctgtgactggggttggagccagg

SEQ ID NO: 685790 - DNA, 120 bp, Artificial Sequence
  ENSG00000187595_25 (sequence is synthesized)
ggagggggttggggggcagggcagcagagggagggaccctgaagagagcaggcagggcacagcagagcaggctggagaagcgaggccagcaggccagtgggccaattaagggcaaaggcc

SEQ ID NO: 685791 - DNA, 120 bp, Artificial Sequence
  ENSG00000187595_26 (sequence is synthesized)
aagactcacctccccttcccagggcctaccccagggtgaggacccagtctgtgtgctttggatgtatgagctgtggatagaggaaggggaagagtcgaggatgatggtcttggggtcctt

SEQ ID NO: 685792 - DNA, 80 bp, Artificial Sequence
  ENSG00000187595_27 (sequence is synthesized)
gtctgctcaggttgccataacaaagtaccacagactcagtggcttcgacagtggagatgtaagtcaggagggttcatttc

SEQ ID NO: 685793 - DNA, 120 bp, Artificial Sequence
  ENSG00000187595_28 (sequence is synthesized)
ttcaaaggcctctcttcttggcttgaagatggtcttccctctataactatctgtgtctaaatttcctcttcttataaagacaccagtcatatgagacccagcgcggtggctcacacctga

SEQ ID NO: 685794 - DNA, 120 bp, Artificial Sequence
  ENSG00000187595_29 (sequence is synthesized)
cggcagctcagcttggggaagagcccctcagggccaggtcagtgtagaggggacgctgctcccacaaatttggtttggggagtatctctgtctgggcccctctgaggggctctgggtctg

SEQ ID NO: 685795 - DNA, 120 bp, Artificial Sequence
  ENSG00000187595_30 (sequence is synthesized)
tggcctccctccatgggggtctttgcgtctggggtgccctcaatggggtcttagggtctgaagcctccccgatgccagcaagttttattctgcatctggacaacccttctgtaggacctc

SEQ ID NO: 685796 - DNA, 120 bp, Artificial Sequence
  ENSG00000187595_31 (sequence is synthesized)
tcggaatctgtgggtccttaggccgcctcttgggtctttgtttctagggaactctccctgtgggatcttttgggatcaggactcctaagcagcacttctccagcctggagcctcctggta

SEQ ID NO: 685797 - DNA, 120 bp, Artificial Sequence
  ENSG00000187595_32 (sequence is synthesized)
gccacaggctttcagacaagggcctcatctgcggggtgggggtcccaggctccagctcaggtctgtggtctctgaaggccaaggtcagcaaggtacacagcactccaacccagggacaag

SEQ ID NO: 685798 - DNA, 120 bp, Artificial Sequence
  ENSG00000187595_33 (sequence is synthesized)
ctccctagctggggtgactttgcagaggtttggctatgagcttggaaggggcagctggctgcaaggcagatttctgggggaaatgggtgaatgcctccatgagggtgattctagctgaca

SEQ ID NO: 685799 - DNA, 120 bp, Artificial Sequence
  ENSG00000187595_34 (sequence is synthesized)
ggtgcacaggggccatagggaaagtaagaaccacccaggctgctgttggcagagcaaacagattcacattcaggctcagtgtggggaggtgggaaaggcaggaacttacccctggctcct

SEQ ID NO: 685800 - DNA, 120 bp, Artificial Sequence
  ENSG00000187595_35 (sequence is synthesized)
gggggaggccaacagaaacctaccttgcagcccaggctggcagttttgccggaggctacactctgacctcagacaccctcttgagggctgtcttctcttttggtgatattcatggggcac

SEQ ID NO: 685801 - DNA, 120 bp, Artificial Sequence
  ENSG00000187595_36 (sequence is synthesized)
ccactgtgtcccccgctccacacacacaatcctgtaggccagagacaagtaagatccaatctctctgcttaccaccctccccaagattgagtgggtcttttgggtggagacacatgtgaa

SEQ ID NO: 685802 - DNA, 120 bp, Artificial Sequence
  ENSG00000187595_37 (sequence is synthesized)
aagggataagggttgtggttgccacatgggacataccctcagggcacaaaggcaaagctgcagtccctgggggcagcaggaaagtctcctgaaggaagagggggctgagcctcggaacat

SEQ ID NO: 685803 - DNA, 120 bp, Artificial Sequence
  ENSG00000187595_38 (sequence is synthesized)
ggatgaggggagtaggggcattacaggcagaggtcacggcataagcaaaggccagggtgctctggtgactgggaccagctcctccccacccaattatttcaggctggacaccaaaagcat

SEQ ID NO: 685804 - DNA, 120 bp, Artificial Sequence
  ENSG00000187595_39 (sequence is synthesized)
tggacaccaaaagcatgactctgagcaagagagtatctgactgatgggtgtttctggagcatatgtgtctgtctggattcgaaagtcactcattggctgggcatggtggctcatgcctgt

SEQ ID NO: 685805 - DNA, 120 bp, Artificial Sequence
  ENSG00000187595_40 (sequence is synthesized)
ctcaagggttggatggcggaggctttgtgcttgtgtgttactgaacggacgtttctgggtcctcccattactccttggggaaggagaattgggaagagaagtctgaggcagcaagaactg

SEQ ID NO: 685806 - DNA, 120 bp, Artificial Sequence
  ENSG00000187601_0 (sequence is synthesized)
aattttgctgagctttctcgcgggcttgcagctgcggcaagtgctggcggcggctgctcgcgcaagtcagctggcgtgggaactaccctttgtagctgagaacggcttgtttattgctac

SEQ ID NO: 685807 - DNA, 120 bp, Artificial Sequence
  ENSG00000187601_1 (sequence is synthesized)
aaagactctattgacattggtagcttcagcggcagcagcttcttacggtataaagctgttgcttcctgaagaggctacaagcatccttccctaggactgctgtaagctttgagcctctag

SEQ ID NO: 685808 - DNA, 120 bp, Artificial Sequence
  ENSG00000187601_2 (sequence is synthesized)
caggagacatgcctcggggacgaaagagtcggcgccgccgtaatgcgagagccgcagaagagaaccgcaacaatcgcaaaatccaggcctcagaggcctccgagacccctatggccgcct

SEQ ID NO: 685809 - DNA, 120 bp, Artificial Sequence
  ENSG00000187601_3 (sequence is synthesized)
ctgtggtagcgagcacccccgaagacgacctgagcggccccgaggaagacccgagcactccagaggaggcctctaccacccctgaagaagcctcgagcactgcccaagcacaaaagcctt

SEQ ID NO: 685810 - DNA, 120 bp, Artificial Sequence
  ENSG00000187601_4 (sequence is synthesized)
cagtgccccggagcaattttcagggcaccaagaaaagtctcctgatgtctatattagcgctcatcttcatcatgggcaacagcgccaaggaagctctggtctggaaagtgctggggaagt

SEQ ID NO: 685811 - DNA, 120 bp, Artificial Sequence
  ENSG00000187601_5 (sequence is synthesized)
taggaatgcagcctggacgtcagcacagcatctttggagatccgaagaagatcgtcacagaagagtttgtgcgcagagggtacctgatttataaaccggtgccccgtagcagtccggtgg

SEQ ID NO: 685812 - DNA, 120 bp, Artificial Sequence
  ENSG00000187601_6 (sequence is synthesized)
agtatgagttcttctgggggccccgagcacacgtggaatcgagcaaactgaaagtcatgcattttgtggcaagggttcgtaaccgatgctctaaagactggccttgtaattatgactggg

SEQ ID NO: 685813 - DNA, 120 bp, Artificial Sequence
  ENSG00000187601_7 (sequence is synthesized)
attcggacgatgatgcagaggttgaggctatcctcaattcaggtgctaggggttattccgccccttaagtagatctgaggcagacccttgggggtgtaaaagagagtcacaggtacccca

SEQ ID NO: 685814 - DNA, 120 bp, Artificial Sequence
  ENSG00000187601_8 (sequence is synthesized)
aggagtagatgccagggtcctaagttgaaaatgatgtcgattgggggcgggggacactgtatttgatatttgtgatcagtgatcattgttcaactgcgaaatagagtgtttgcttttgat

SEQ ID NO: 685815 - DNA, 120 bp, Artificial Sequence
  ENSG00000187601_9 (sequence is synthesized)
aatggaaaattgtattcgttttaaaattccgtttgttgagaataacaatatgtttaaaaatataattgaacaaatttttttctttgtttcctgtcattgacatttagtataacagttttg

SEQ ID NO: 685816 - DNA, 120 bp, Artificial Sequence
  ENSG00000187601_10 (sequence is synthesized)
ctaacgttctaaaatgaagtcgttccatcataatctatgatcttgtacagcacttatagaaataagctgttcttttgaagttgaaatacccagtaaaatgttgaagaaggatggaggatt

SEQ ID NO: 685817 - DNA, 120 bp, Artificial Sequence
  ENSG00000187601_11 (sequence is synthesized)
tcttcatatctgacgtttctgaaaccctttgtgtctgctgttgtgtgaagattgacatttaccatgattttccttagttactgcagaacatagagaaaaataaaagcctaacgaatagta

SEQ ID NO: 685818 - DNA, 120 bp, Artificial Sequence
  ENSG00000187605_0 (sequence is synthesized)
atgagccagtttcaggtgcccctggccgtccagccggacctgccaggcctttatgacttccctcagcgccaggtgatggtagggagcttcccggggtctgggctctccatggctgggagt

SEQ ID NO: 685819 - DNA, 120 bp, Artificial Sequence
  ENSG00000187605_1 (sequence is synthesized)
gagtcccaactccgagggggtggagatggtcgaaagaaacggaaacggtgtggtacttgtgagccctgccggcggctggaaaactgtggcgcttgcactagctgtaccaaccgccgcacg

SEQ ID NO: 685820 - DNA, 120 bp, Artificial Sequence
  ENSG00000187605_2 (sequence is synthesized)
caccagatctgcaaactgcgaaaatgtgaggtgctgaagaaaaaagtagggcttctcaaggaggtggaaataaaggctggtgaaggagccgggccgtggggacaaggagcggctgtcaag

SEQ ID NO: 685821 - DNA, 120 bp, Artificial Sequence
  ENSG00000187605_3 (sequence is synthesized)
acaggctcagagctcagcccagttgatggacctgttccaggtcagatggactcagggccagtgtaccatggggactcacggcagctaagcgcctcaggggtgccggtcaatggtgctaga

SEQ ID NO: 685822 - DNA, 120 bp, Artificial Sequence
  ENSG00000187605_4 (sequence is synthesized)
gagcccgctggacccagtctgctggggactgggggtccttggcgggtagaccaaaagcccgactgggaggctgccccaggcccagctcatactgctcgcctggaagatgcccacgatctg

SEQ ID NO: 685823 - DNA, 120 bp, Artificial Sequence
  ENSG00000187605_5 (sequence is synthesized)
gtggccttttcggctgtggccgaagctgtgtcctcttatggggcccttagcacccggctctatgaaaccttcaaccgtgagatgagtcgtgaggctgggaacaacagcaggggaccccgg

SEQ ID NO: 685824 - DNA, 120 bp, Artificial Sequence
  ENSG00000187605_6 (sequence is synthesized)
ccagggcctgagggctgctctgctggcagcgaagaccttgacacactgcagacggccctggccctcgcgcggcatggtatgaaaccacccaactgcaactgcgatggcccagaatgccct

SEQ ID NO: 685825 - DNA, 120 bp, Artificial Sequence
  ENSG00000187605_7 (sequence is synthesized)
gactacctcgagtggctggaggggaagatcaagtctgtggtcatggaaggaggggaggagcggcccaggctcccagggcctctgcctcctggtgaggccggcctcccagcaccaagcacc

SEQ ID NO: 685826 - DNA, 120 bp, Artificial Sequence
  ENSG00000187605_8 (sequence is synthesized)
aggccactcctcagctcagaggtgccccagatctctccccaagagggcctgcccctgtcccagagtgccctgagcattgccaaggaaaaaaacatcagcttgcagaccgccattgccatt

SEQ ID NO: 685827 - DNA, 120 bp, Artificial Sequence
  ENSG00000187605_9 (sequence is synthesized)
gaggccctcacacagctctcctctgccctcccgcagccttctcattccaccccccaggcttcttgcccccttcctgaggccttgtcacctcctgcccctttcagatctccccagtcttac

SEQ ID NO: 685828 - DNA, 120 bp, Artificial Sequence
  ENSG00000187605_10 (sequence is synthesized)
ctccgggctccctcatggcctgtggttcctcctgaagagcactcatcttttgctcctgatagctctgccttccctccagcaactcctagaactgagttccctgaagcctggggcactgac

SEQ ID NO: 685829 - DNA, 120 bp, Artificial Sequence
  ENSG00000187605_11 (sequence is synthesized)
acccctccagcaacgccccggagctcctggcccatgcctcgcccaagccccgatcccatggctgaactggagcagttgttgggcagcgccagtgattacatccagtcagtattcaagcgg

SEQ ID NO: 685830 - DNA, 120 bp, Artificial Sequence
  ENSG00000187605_12 (sequence is synthesized)
cctgaggccctgcctaccaagcccaaggtcaaggtggaggcaccctcttcctccccggccccggccccatcccctgtacttcagagggaggctcccacgccatcctcggagcccgacacc

SEQ ID NO: 685831 - DNA, 120 bp, Artificial Sequence
  ENSG00000187605_13 (sequence is synthesized)
caccagaaggcccagaccgccctgcagcagcacctccaccacaagcgcagcctcttcctagaacaggtgcacgacacctccttccctgctccttcagagccttctgctcctggctggtgg

SEQ ID NO: 685832 - DNA, 120 bp, Artificial Sequence
  ENSG00000187605_14 (sequence is synthesized)
cccccaccaagttcacctgtcccacggcttccagacagaccacccaaggagaagaagaagaagctcccaacaccagctggaggtcccgtgggaacggagaaagctgcccctgggatcaag

SEQ ID NO: 685833 - DNA, 120 bp, Artificial Sequence
  ENSG00000187605_15 (sequence is synthesized)
cccagtgtccgaaagcccattcagatcaagaagtccaggccccgggaagcacagcccctcttcccacctgtccgacagattgtcctggaagggcttaggtccccagcctcccaggaagtg

SEQ ID NO: 685834 - DNA, 120 bp, Artificial Sequence
  ENSG00000187605_16 (sequence is synthesized)
caggctcatccaccggcccctctgcctgcctcacagggctctgctgtgcccctgcccccagaaccttctcttgcgctatttgcacctagtccctccagggacagcctgctgccccctact

SEQ ID NO: 685835 - DNA, 120 bp, Artificial Sequence
  ENSG00000187605_17 (sequence is synthesized)
caggaaatgaggtcccccagccccatgacagccttgcagccaggctccactggccctcttccccctgccgatgacaagctggaagagctcatccggcagtttgaggctgaatttggagat

SEQ ID NO: 685836 - DNA, 120 bp, Artificial Sequence
  ENSG00000187605_18 (sequence is synthesized)
agctttgggcttcccggccccccttctgtgcccattcaggaccccgagaaccagcaaacatgtctcccagcccctgagagcccctttgctacccgttcccccaagcaaatcaagattgag

SEQ ID NO: 685837 - DNA, 120 bp, Artificial Sequence
  ENSG00000187605_19 (sequence is synthesized)
tcttcgggggctgtgactgtgctctcaaccacctgcttccattcagaggagggaggacaggaggccacacccaccaaggctgagaacccactcacacccaccctcagtggcttcttggag

SEQ ID NO: 685838 - DNA, 120 bp, Artificial Sequence
  ENSG00000187605_20 (sequence is synthesized)
tcacctcttaagtacctggacacacccaccaagagtctgctggacacacctgccaagagagcccaggccgagttccccacctgcgattgcgtcgaacaaatagtggagaaagatgaaggt

SEQ ID NO: 685839 - DNA, 120 bp, Artificial Sequence
  ENSG00000187605_21 (sequence is synthesized)
ccatattatactcacttgggatctggccccacggtcgcctctatccgggaactcatggaggagcggtatggagagaaggggaaagccatccggatcgagaaggtcatctacacggggaag

SEQ ID NO: 685840 - DNA, 120 bp, Artificial Sequence
  ENSG00000187605_22 (sequence is synthesized)
gagggaaagagctcccgcggttgccccattgcaaagtgggtgatccgcaggcacacgctggaggagaagctactctgcctggtgcggcaccgggcaggccaccactgccagaacgctgtg

SEQ ID NO: 685841 - DNA, 120 bp, Artificial Sequence
  ENSG00000187605_23 (sequence is synthesized)
atcgtcatcctcatcctggcctgggagggcattccccgtagcctcggagacaccctctaccaggagctcaccgacaccctccggaagtatgggaaccccaccagccggagatgcggcctc

SEQ ID NO: 685842 - DNA, 120 bp, Artificial Sequence
  ENSG00000187605_24 (sequence is synthesized)
aacgatgaccggacctgcgcttgccaaggcaaagaccccaacacctgtggtgcctccttctcctttggttgttcctggagcatgtacttcaacggctgcaagtatgctcggagcaagaca

SEQ ID NO: 685843 - DNA, 120 bp, Artificial Sequence
  ENSG00000187605_25 (sequence is synthesized)
cctcgcaagttccgcctcgcaggggacaatcccaaagaggaagaagtgctccggaagagtttccaggacctggccaccgaagtcgctcccctgtacaagcgactggcccctcaggcctat

SEQ ID NO: 685844 - DNA, 120 bp, Artificial Sequence
  ENSG00000187605_26 (sequence is synthesized)
cagaaccaggtgaccaacgaggaaatagcgattgactgccgtctggggctgaaggaaggacggcccttcgcgggggtcacggcctgcatggacttctgtgcccacgcccacaaggaccag

SEQ ID NO: 685845 - DNA, 120 bp, Artificial Sequence
  ENSG00000187605_27 (sequence is synthesized)
cataacctctacaatgggtgcaccgtggtctgcaccctgaccaaggaagacaatcgctgcgtgggcaagattcccgaggatgagcagctgcatgttctccccctgtacaagatggccaac

SEQ ID NO: 685846 - DNA, 120 bp, Artificial Sequence
  ENSG00000187605_28 (sequence is synthesized)
acggatgagtttggtagcgaggagaaccagaatgcaaaggtgggcagcggagccatccaggtgctcaccgccttcccccgcgaggtccgacgcctgcccgagcctgccaagtcctgccgc

SEQ ID NO: 685847 - DNA, 120 bp, Artificial Sequence
  ENSG00000187605_29 (sequence is synthesized)
cagcggcagctggaagccagaaaggcagcagccgagaagaagaagattcagaaggagaagctgagcactccggagaagatcaagcaggaggccctggagctggcgggcattacgtcggac

SEQ ID NO: 685848 - DNA, 120 bp, Artificial Sequence
  ENSG00000187605_30 (sequence is synthesized)
ccaggcctgtctctgaagggtggattgtcccagcaaggcctgaagccctccctcaaggtggagccgcagaaccacttcagctccttcaagtacagcggcaacgcggtggtggagagctac

SEQ ID NO: 685849 - DNA, 120 bp, Artificial Sequence
  ENSG00000187605_31 (sequence is synthesized)
tcggtgctgggcaactgccggccctccgacccttacagcatgaacagcgtgtactcctaccactcctactatgcacagcccagcctgacctccgtcaatggcttccactccaagtacgct

SEQ ID NO: 685850 - DNA, 120 bp, Artificial Sequence
  ENSG00000187605_32 (sequence is synthesized)
ctcccgtcttttagctactatggctttccatccagcaaccccgtcttcccctctcagttcctgggtcctggtgcctgggggcacagtggcagcagtggcagttttgagaagaagccagac

SEQ ID NO: 685851 - DNA, 120 bp, Artificial Sequence
  ENSG00000187605_33 (sequence is synthesized)
ctccacgctctgcacaacagcctgagcccggcctacggtggtgctgagtttgccgagctgcccagccaggctgttcccacagacgcccaccaccccactcctcaccaccagcagcctgcg

SEQ ID NO: 685852 - DNA, 120 bp, Artificial Sequence
  ENSG00000187605_34 (sequence is synthesized)
tacccaggccccaaggagtatctgcttcccaaggcccccctactccactcagtgtccagggacccctccccctttgcccagagctccaactgctacaacagatccatcaagcaagagcca

SEQ ID NO: 685853 - DNA, 120 bp, Artificial Sequence
  ENSG00000187605_35 (sequence is synthesized)
gtagacccgctgacccaggctgagcctgtgcccagagacgctggcaagatgggcaagacacctctgtccgaggtgtctcagaatggaggacccagtcacctttggggacagtactcagga

SEQ ID NO: 685854 - DNA, 120 bp, Artificial Sequence
  ENSG00000187605_36 (sequence is synthesized)
ggcccaagcatgtcccccaagaggactaacggtgtgggtggcagctggggtgtgttctcgtctggggagagtcctgccatcgtccctgacaagctcagttcctttggggccagctgcctg

SEQ ID NO: 685855 - DNA, 120 bp, Artificial Sequence
  ENSG00000187605_37 (sequence is synthesized)
gccccttcccacttcacagatggccagtgggggctgttccccggtgaggggcagcaggcagcttcccactctggaggacggctgcgaggcaaaccgtggagcccctgcaagtttgggaac

SEQ ID NO: 685856 - DNA, 120 bp, Artificial Sequence
  ENSG00000187605_38 (sequence is synthesized)
agcacctcggccttggctgggcccagcctgactgagaagccgtgggcgctgggggcaggggatttcaactcggccctgaaaggtagtcctgggttccaagacaagctgtggaaccccatg

SEQ ID NO: 685857 - DNA, 120 bp, Artificial Sequence
  ENSG00000187605_39 (sequence is synthesized)
aaaggagaggagggcaggattccagccgcaggggccagccagctggacagggcctggcagtcctttggtctgcccctgggatccagcgagaagctgtttggggctctgaagtcagaggag

SEQ ID NO: 685858 - DNA, 120 bp, Artificial Sequence
  ENSG00000187605_40 (sequence is synthesized)
aagctgtgggaccccttcagcctggaggaggggccggctgaggagccccccagcaagggagcggtgaaggaggagaagggcggtggtggtgcggaggaggaagaggaggagctgtggtcg

SEQ ID NO: 685859 - DNA, 120 bp, Artificial Sequence
  ENSG00000187605_41 (sequence is synthesized)
gacagtgaacacaacttcctggacgagaacatcggcggcgtggccgtggccccagcccacggctccatcctcatcgagtgtgcccggcgggagctgcacgccaccacgccgcttaagaag

SEQ ID NO: 685860 - DNA, 120 bp, Artificial Sequence
  ENSG00000187605_42 (sequence is synthesized)
cccaaccgctgccaccccacccgcatctcgctggtcttctaccagcacaagaacctcaaccagcccaaccacgggctggccctctgggaagccaagatgaagcagctggcggagagggca

SEQ ID NO: 685861 - DNA, 120 bp, Artificial Sequence
  ENSG00000187605_43 (sequence is synthesized)
cgggcacggcaggaggaggctgcccggctgggcctgggccagcaggaggccaagctctacgggaagaagcgcaagtgggggggcactgtggttgctgagccccagcagaaagagaagaag

SEQ ID NO: 685862 - DNA, 120 bp, Artificial Sequence
  ENSG00000187605_44 (sequence is synthesized)
ggggtcgtccccacccggcaggcactggctgtgcccacagactcggcggtcaccgtgtcctcctatgcctacacgaaggtcactggcccctacagccgctggatctaggtgccagggagc

SEQ ID NO: 685863 - DNA, 120 bp, Artificial Sequence
  ENSG00000187605_45 (sequence is synthesized)
cagcgtacctcagcgtcgggcctggcccgagctgtctctgtggtgcttttgccctcatacctgggggcgggttgggggtgcagaagtctttttatctctatatacatatatagatgcgca

SEQ ID NO: 685864 - DNA, 120 bp, Artificial Sequence
  ENSG00000187605_46 (sequence is synthesized)
tatcatatatatgtatttatggtccaaacctcagaactgacccgcccctcccttacccccacttccccagcactttgaagaagaaactacggctgtcgggtgatttttccgtgatcttaa

SEQ ID NO: 685865 - DNA, 120 bp, Artificial Sequence
  ENSG00000187605_47 (sequence is synthesized)
tttatagtatcctttcacaaaggagtagttttaaattccatttaaaatgtgtatttattggattttttaaaagcgacaatagtaatggtaaaggatgggcaggaaaggccagtagtgctc

SEQ ID NO: 685866 - DNA, 120 bp, Artificial Sequence
  ENSG00000187605_48 (sequence is synthesized)
ccccgcccagtctcgctgggtctggcgagccaagcccctcgggcgctggcgaggtcctcagccatctgcccctcgagagccaagcgcggacggtagccacccagttcatccctcccgaca

SEQ ID NO: 685867 - DNA, 120 bp, Artificial Sequence
  ENSG00000187605_49 (sequence is synthesized)
tacaccccttccctttggggaagggagcctcaggacagcttctgtcctctctgataggatgggagagtctgcagaaaaccatctggggtcccttttccagtccccggcttggagtcgaag

SEQ ID NO: 685868 - DNA, 120 bp, Artificial Sequence
  ENSG00000187605_50 (sequence is synthesized)
ggcagatgcaccccaggccagccccacgagatgctggcatagctttccccagaaaccaggttggaagtagatggcttcaagcttgctagtctccacactgaatcctctgtccgttattta

SEQ ID NO: 685869 - DNA, 120 bp, Artificial Sequence
  ENSG00000187605_51 (sequence is synthesized)
tggagtcacacgatgtcatggttcactaggcagcacctcacgctggagctggagtgcgaggttcttaggggccgtgcccaccatgttgccaagccaatgcatgctgagctgaaggaattt

SEQ ID NO: 685870 - DNA, 120 bp, Artificial Sequence
  ENSG00000187605_52 (sequence is synthesized)
gtcttagtggcagttttttaaaaaatgcccccaaagtctatgctgatactgaaaaagggctactgtatctttaaaaacaggaagttgaacccaagctgtgaaaagccagtggtgctctgt

SEQ ID NO: 685871 - DNA, 120 bp, Artificial Sequence
  ENSG00000187605_53 (sequence is synthesized)
gcatggtgctgtgcggagcctggtgctgtagtgttgtgctgggactttcttgactcttgggcaggtcacatcctacaggagctcagcagaccagtgtaacaacagttaatgcatctatcc

SEQ ID NO: 685872 - DNA, 120 bp, Artificial Sequence
  ENSG00000187605_54 (sequence is synthesized)
tgatccctgaatttccacattggacaatggtgcatgcctcacacctgagcctgcttcctccatgctgtcattgggttcgggggcctacacttaacaattttaaagtgcaagagtcaaaca

SEQ ID NO: 685873 - DNA, 120 bp, Artificial Sequence
  ENSG00000187605_55 (sequence is synthesized)
ttttcaacaggttgctataattttcctccctaattggtgccatttctccatttgatcattttctttttttcctttctcccctcttcatccactttaatatagctgttctgaaattctggt

SEQ ID NO: 685874 - DNA, 120 bp, Artificial Sequence
  ENSG00000187605_56 (sequence is synthesized)
gcattcattcggttctttgaaatgagaatgtggtgcttaatttttgtgacgttgtcgagagaggttgggcctgatgggagcaacactcatcatcaccaagtcaaactttgttggagtgtt

SEQ ID NO: 685875 - DNA, 120 bp, Artificial Sequence
  ENSG00000187605_57 (sequence is synthesized)
ggtttttcttgtgatattagcagaaatgatctcatgctagccatgtggatgtgtgtgtggtgaatggggggcttcatcaggacacacagaggggaatgtggccacacggtggatgaccac

SEQ ID NO: 685876 - DNA, 120 bp, Artificial Sequence
  ENSG00000187605_58 (sequence is synthesized)
caagccctgagatgaacaggtatttactgagcagttgtattcagatatgggtcttcatgaatcatgtttaacaatcagatgaccgctataggcaagttcctgagcttccgggtgccttga

SEQ ID NO: 685877 - DNA, 120 bp, Artificial Sequence
  ENSG00000187605_59 (sequence is synthesized)
gtaagagctgagaaccggcctgctgggtgtttactgtatctgtttggaagcactggcggagggtcgttgtaagatgtcctgagcatttatgtggtctggttttaactgtaaatagtgaaa

SEQ ID NO: 685878 - DNA, 120 bp, Artificial Sequence
  ENSG00000187605_60 (sequence is synthesized)
gatttttttaagcacttttgcctagatttaaacagcaacttgaaaaaaaaagtatgttttaacatgtaattgtgggagaaattgtaaatagtagccgaatatttaatgtgctttgtctat

SEQ ID NO: 685879 - DNA, 120 bp, Artificial Sequence
  ENSG00000187605_61 (sequence is synthesized)
cctccacttttaccatattctgtaaagttgcatttattttacaggacaaaaaaatgaaatattattgcttttgaaataaatacccaagagcttatcaggacttagaattattcagaactc

SEQ ID NO: 685880 - DNA, 120 bp, Artificial Sequence
  ENSG00000187605_62 (sequence is synthesized)
agatttataggaaaacctctgaccttcagtttgacaagctaaaggaagcagagtctttaatgagcatgctaattttctagttttgaggaaaaattgggtcctttaaatgctattttgctt

SEQ ID NO: 685881 - DNA, 120 bp, Artificial Sequence
  ENSG00000187605_63 (sequence is synthesized)
atcgcatcagtacttttatgcaggtctcatttgactccgtgcttaggtagatgcgggggtgccttgaaaacttcattttaaatgatcttaagcaagaaatacaatattttacgaaacatt

SEQ ID NO: 685882 - DNA, 120 bp, Artificial Sequence
  ENSG00000187605_64 (sequence is synthesized)
tggagaatgtgaccgtctgtatgacccgtggaagccccaggttggctgttggtttggaaggtcccgagtgtaacccaggtgattctgatacttggcatgtgtgaatcttcctgatgtatg

SEQ ID NO: 685883 - DNA, 120 bp, Artificial Sequence
  ENSG00000187605_65 (sequence is synthesized)
ttaaataaactcttcccctcatcaccctttggtaggaaagccattagatgaaaggagaaaccaatacaagctaaaagcatgcgacgtctgtcccccagcccaaacagccttggttcatca

SEQ ID NO: 685884 - DNA, 120 bp, Artificial Sequence
  ENSG00000187605_66 (sequence is synthesized)
gtttctgcagtaggagataggctgctgagaggtgagtcaagaggcagtctccattggatgtccccactccccgcagaatggcgtttccagagttaggcggtgtggttgccgtgctcaagc

SEQ ID NO: 685885 - DNA, 120 bp, Artificial Sequence
  ENSG00000187605_67 (sequence is synthesized)
ccatgctgatttgtacactacatgtctaacctacctcaaatctcagtcattaaaattagcatgctttagacatatatttaaaaagtaactatgcacagctctttatcccccccttgctgc

SEQ ID NO: 685886 - DNA, 120 bp, Artificial Sequence
  ENSG00000187605_68 (sequence is synthesized)
tgaagctttcttaaagagaaaaatcaaatttttattttttactggcactatcattttttaagtcctaaagatgattaacagacatttttatcatgagaagaaaaataaagccattgcaac

SEQ ID NO: 685887 - DNA, 120 bp, Artificial Sequence
  ENSG00000187605_69 (sequence is synthesized)
taaagaacctaacagcatgaccaagttcgaagagtcatattatagcaacggaaatcgatggcgtcttagtcatctccccagtgtgccctgtccacggacaccatccacgtgcagtgcaaa

SEQ ID NO: 685888 - DNA, 120 bp, Artificial Sequence
  ENSG00000187605_70 (sequence is synthesized)
catttggttccttttctgctctgttttgttttccctgcctgttgcgtgcaagggaagtgcttgtaaagttctgtgctacgagatttttaaaataaaaatcgcttcgcagcaggttctcac

SEQ ID NO: 685889 - DNA, 120 bp, Artificial Sequence
  ENSG00000187605_71 (sequence is synthesized)
aaaataactggtgctagctcaagaaatcatcatctgaccatcagaaatcttgactaaaggtgttgcatggatttgggggtctttcggtttttggttttgggtctggcttttagcagggcc

SEQ ID NO: 685890 - DNA, 120 bp, Artificial Sequence
  ENSG00000187605_72 (sequence is synthesized)
aatgtttcccacaccccggcttcatgggtactgctttgccttctcaccaaggtgacgatggtgtgcgtggaaagagatgataccccaccgccccctcttggtccttccaccagcctcttt

SEQ ID NO: 685891 - DNA, 120 bp, Artificial Sequence
  ENSG00000187605_73 (sequence is synthesized)
tgggaacagtagtttgcagagcaagggatttttaaagcgctaaagcaaggaaagaagtagcagagcttaactgctttgtaccacacagcagtagatgtgcaaggacggttgacaatgagt

SEQ ID NO: 685892 - DNA, 120 bp, Artificial Sequence
  ENSG00000187605_74 (sequence is synthesized)
cgatgataacctaatttcattgagagaaacccagccagacttgcttctagaggtttaatcaccatgagatctcaaaccaaggcaaagctggtggaaaactatatgatatccctgacgtgc

SEQ ID NO: 685893 - DNA, 120 bp, Artificial Sequence
  ENSG00000187605_75 (sequence is synthesized)
ctcaaccagtatctctttccttttgttactgaagtgtgttttatggactaggaagcatttttatgaattgaaatagtctaaataaaatggtgctatggtgttttaatgtgactgtccctg

SEQ ID NO: 685894 - DNA, 120 bp, Artificial Sequence
  ENSG00000187605_76 (sequence is synthesized)
atcctgtcttgctgaggtgctatcaacgttctgaaaccacaaccaaccaaaaacaaggtgggctccagtctcttggcttttttttttccctcccctcttttggtgctgtcttagacccgt

SEQ ID NO: 685895 - DNA, 120 bp, Artificial Sequence
  ENSG00000187605_77 (sequence is synthesized)
ttaccgtgctataatctgctctgagcagtgttgtgttgtgttgtattgttcttcccttggtggccaaacaaagcaagtcgagaaggcagctatctccctttctgtgatcgggagtgggcc

SEQ ID NO: 685896 - DNA, 120 bp, Artificial Sequence
  ENSG00000187605_78 (sequence is synthesized)
tgcctggcttggcaggtgctttttggttccacacctgtcttctcaggcttgatgtgaaagaaagggcgaagggttttttgagtttttgtttttgaggaaggggagttgggtacttctgcc

SEQ ID NO: 685897 - DNA, 120 bp, Artificial Sequence
  ENSG00000187605_79 (sequence is synthesized)
tctcctagcatgataggcattctcatagccagggacagattttctcctgcagcccagggtgctaagcagacatctctgggagtcccaagggcacaccaagggagaccagatggatctcct

SEQ ID NO: 685898 - DNA, 120 bp, Artificial Sequence
  ENSG00000187605_80 (sequence is synthesized)
tcctcccctggcactggctgggaccatggtgggcaggggcttcattctctgacccagcgttgcttctgcctctcattggtaaccccttatgttcggactaaaggaaggagctttctttgc

SEQ ID NO: 685899 - DNA, 120 bp, Artificial Sequence
  ENSG00000187605_81 (sequence is synthesized)
tcactcgatgccactgaggctgctttttagttggtgctaacctaaatttcttcttgggtccacagaagttgatgttttaaaaactcaccaggaagctccattttgtgtcatccactgtca

SEQ ID NO: 685900 - DNA, 120 bp, Artificial Sequence
  ENSG00000187605_82 (sequence is synthesized)
caataatttttttaaatacctcaaaaacaggacatcatgacaacttcagtaaagtagattccatgagggtctgatacctgcaggttgtccgtctgatgacatacttgaccttgaaaaatc

SEQ ID NO: 685901 - DNA, 120 bp, Artificial Sequence
  ENSG00000187605_83 (sequence is synthesized)
tggggtcattttgtttttcattcttcagcagttaagatagcggaacgccgaaaggaaggagcgtagttggctgtatttcatgtttaagttttgcttttgaataaaatgtgaatttcctat

SEQ ID NO: 685902 - DNA, 120 bp, Artificial Sequence
  ENSG00000187605_84 (sequence is synthesized)
gcccatctcattgagctttctcagtcattgttgctgtcatttgaaatgactccctcaaaacctagttttattagccagctgcctctgctgtagtacatggccaacttcaacataccctgg

SEQ ID NO: 685903 - DNA, 120 bp, Artificial Sequence
  ENSG00000187605_85 (sequence is synthesized)
accaaaacatttttgaggtgcatacccccaacataagttacacagtcccacatccaggtgcacagagtgcgagtgcactccgcgagtgcggggggaggggcggccccctctggtgctccc

SEQ ID NO: 685904 - DNA, 120 bp, Artificial Sequence
  ENSG00000187605_86 (sequence is synthesized)
agcccttcctcctgcagagctgcaggcaagagcagagcaataggcttctcccctgagcagagaccgcagcacagaaatgcaaggtctaaagttgctttttgcctaagaatcagcgagcga

SEQ ID NO: 685905 - DNA, 120 bp, Artificial Sequence
  ENSG00000187605_87 (sequence is synthesized)
tttggcctacttcctcattggcttctattctgatatcagggatgctttttgtagtggtattgtttgctccctcttcgcgttttgactacccgtcattcaggggtaactcatcactcttca

SEQ ID NO: 685906 - DNA, 120 bp, Artificial Sequence
  ENSG00000187605_88 (sequence is synthesized)
cacggggatttaaattaagaaactaattggctcatgtgaacattccaaattttcttggtttcaatacccttttttttcttttgaggggaaaagaggggagaaaaacaggagtgatgtcat

SEQ ID NO: 685907 - DNA, 120 bp, Artificial Sequence
  ENSG00000187605_89 (sequence is synthesized)
ttctttttcatgtattccaattaaagaaacaagggcaggtcgtataatggcatattaatacattagacttaatctagaacccctgtagctttttgatgtgttttatttcttatctctttg

SEQ ID NO: 685908 - DNA, 120 bp, Artificial Sequence
  ENSG00000187605_90 (sequence is synthesized)
aattcctgtttggttacttggcttccaatggaggtgaacttaacaaccatacttgaatattccgtcttgactttgtaaactgtggctacttgaaatgaagtttatctggggttgatggat

SEQ ID NO: 685909 - DNA, 120 bp, Artificial Sequence
  ENSG00000187605_91 (sequence is synthesized)
gaatggtagatttttgcaatgtctcaaggcaataggatgtgtattaaactgtagatattcttagtacagtaaatttatgctgataattttattttgtataatttttacctttttgttaat

SEQ ID NO: 685910 - DNA, 120 bp, Artificial Sequence
  ENSG00000187605_92 (sequence is synthesized)
attttttccttccactttattggtttgcctcctgagctacccctccttaccctcccttctccctcagtgtttcagtaaatttaatttagggtgcctagaaattgcaagtatgtatccttt

SEQ ID NO: 685911 - DNA, 120 bp, Artificial Sequence
  ENSG00000187605_93 (sequence is synthesized)
ttgatttgtattttattataatttacacaaacaactgggtttgtgaactgtattactcctggtatctttaaaatattgtgggtgttttaataaattttatatttattttttgcactcaaa

SEQ ID NO: 685912 - DNA, 120 bp, Artificial Sequence
  ENSG00000187605_94 (sequence is synthesized)
cctcctctgcagtgcctccctccgtgcgctccctccggcggggataatgggaggcccgccggccgatgcaccagaggaggccggccgaggtggaaataaaggctggtgaaggagccgggc

SEQ ID NO: 685913 - DNA, 120 bp, Artificial Sequence
  ENSG00000187605_95 (sequence is synthesized)
cctaccccagacctgctgaattgaaatctgcactttaaccagatccccaggtgatttgtatgtccatgaaagtttgaggagctgtctacaacatctctatgaccagaagggaatgggaca

SEQ ID NO: 685914 - DNA, 120 bp, Artificial Sequence
  ENSG00000187605_96 (sequence is synthesized)
cggagccagtggggtggagggcgggggcagtgacaaataagctgtgatgaacaggcaaagaattccaagtgccagcagggtaaagaggatgacccaacccatttcctgaccctctaagcc

SEQ ID NO: 685915 - DNA, 120 bp, Artificial Sequence
  ENSG00000187605_97 (sequence is synthesized)
ggggagacaaggacctcttgagatttactgcatgtttctgcttgttcttctggcatttgtttccttgtagtttagtgagttatcagtaaaacctatcaataaaactgatctacaaagtta

SEQ ID NO: 685916 - DNA, 120 bp, Artificial Sequence
  ENSG00000187605_98 (sequence is synthesized)
agaaatggatgtgctgttaatggaatacggatattaagcgcctctcatttttctttgccttgtaacagacaatatacagaaaggaaaccctgataacgggcttagggaaggtttactgtg

SEQ ID NO: 685917 - DNA, 120 bp, Artificial Sequence
  ENSG00000187605_99 (sequence is synthesized)
ggatcctcacttccattgtttctgggtttctttcattctgtaggtctgcccaattcatgtccccctgcttctctctgtcttgaaatgtttttatggttatatggctctatgtcctgtaga

SEQ ID NO: 685918 - DNA, 120 bp, Artificial Sequence
  ENSG00000187607_0 (sequence is synthesized)
cttcgatcgtccgattctcccagccgcaccacgggtgctcccacctgcggagaaccggagtctggcgatgccaaggcgcttctgggaattgtagttccgggcgggatgagggcagcacgc

SEQ ID NO: 685919 - DNA, 120 bp, Artificial Sequence
  ENSG00000187607_1 (sequence is synthesized)
ctggctccgctccttcttacgcatgcgcgactccgagctggccaaagaagttcgtcccctttgtgaggcccgggatgggaggtgcccggttcccccagggacagcttcaagcggtaggga

SEQ ID NO: 685920 - DNA, 120 bp, Artificial Sequence
  ENSG00000187607_2 (sequence is synthesized)
cagacatctgaggacccagcctcagggatgctgtccccgggcttccaggctccagcgccgtaggactgaggcagactccacggtgagaaagagacccgatctaacccaggcctttcatca

SEQ ID NO: 685921 - DNA, 120 bp, Artificial Sequence
  ENSG00000187607_3 (sequence is synthesized)
gagcccaggagggaaggcaggaagtgggaccacgaggcccggggggcttctaactcgtctggccagggagatctgaattggggtgaagagcagaatctccagaacaaggaggaggtggtg

SEQ ID NO: 685922 - DNA, 120 bp, Artificial Sequence
  ENSG00000187607_4 (sequence is synthesized)
atcatggagacagatttggctgaaatgcctgagaaaggagctctgtcttcccaggattctccccatttccaagagaagagcacagaagagggagaagtggctgctctgcgcctcacggcc

SEQ ID NO: 685923 - DNA, 120 bp, Artificial Sequence
  ENSG00000187607_5 (sequence is synthesized)
agatcccaggaaacagtgacattcaaggatgtggccatggactttacaccagaggagtgggggaagctggatcctgcacaaagggatgtgatgctggagaactataggaacctagtctca

SEQ ID NO: 685924 - DNA, 120 bp, Artificial Sequence
  ENSG00000187607_6 (sequence is synthesized)
ctttggcttccagtttccaaacctgagagctacaacttggagaatggaaaagaaccattgaagcttgagagaaaagcccccaaaagcagctattcagacatggagactagaccacagagc

SEQ ID NO: 685925 - DNA, 120 bp, Artificial Sequence
  ENSG00000187607_7 (sequence is synthesized)
aaggattcaacttcagtgcaagatttttccaaagcagaatcatgcaaagttgcaataatagacagactgacacggaatagtgtctatgactctaacttggaagcagcccttgaatgtgaa

SEQ ID NO: 685926 - DNA, 120 bp, Artificial Sequence
  ENSG00000187607_8 (sequence is synthesized)
aattggttagagaatcagcaaggaaatcaggagagacatttgagagaaatgttcactcacatgaattcactctctgaggaaacagaccataagcatgatgtatactggaaaagcttcaat

SEQ ID NO: 685927 - DNA, 120 bp, Artificial Sequence
  ENSG00000187607_9 (sequence is synthesized)
cagaaatctgtccttatcactgaagacagagttcccaaaggatcttatgccttccatacacttgaaaaaagcttgaaacaaaaatcaaacttaatgaaaaagcagagaacttataaagag

SEQ ID NO: 685928 - DNA, 120 bp, Artificial Sequence
  ENSG00000187607_10 (sequence is synthesized)
aaaaaacctcataaatgtaatgattgtggtgaactcttcacctaccattcagtgcttattcgacaccagagagtccatactggagagaaaccctatacctgcaatgaatgtgggaaatct

SEQ ID NO: 685929 - DNA, 120 bp, Artificial Sequence
  ENSG00000187607_11 (sequence is synthesized)
tttagccacagagctaatttaactaaacaccagagaactcatactagaattctctttgaatgcagtgaatgcaagaaaaccttcacagaaagctcatcccttgcaacacatcagagaatt

SEQ ID NO: 685930 - DNA, 120 bp, Artificial Sequence
  ENSG00000187607_12 (sequence is synthesized)
cacgttggagagagaccttatgaatgcaatgaatgtgggaaaggttttaatcgaagtacacatcttgtgcagcatcagttgattcatactggagtgaagccttatgaatgtaatgaatgt

SEQ ID NO: 685931 - DNA, 120 bp, Artificial Sequence
  ENSG00000187607_13 (sequence is synthesized)
gataaagcttttattcattcatcagcactcattaaacatcaaagaactcatactggagagaaaccttataaatgtcaagaatgtgggaaagcctttagccattgctcatccctaactaag

SEQ ID NO: 685932 - DNA, 120 bp, Artificial Sequence
  ENSG00000187607_14 (sequence is synthesized)
catcagagagttcatactggagaaaagccatatgaatgcagtgaatgtggaaaaacttttagtcagagcacacatcttgttcaacatcagagaattcacactggagagaaaccctatgag

SEQ ID NO: 685933 - DNA, 120 bp, Artificial Sequence
  ENSG00000187607_15 (sequence is synthesized)
tgtaatgaatgtgggaaaaccttcagccggagctccaattttgctaaacatcaaagaattcatattggaaagaaaccgtacaaatgtagcgagtgtggaaaagccttcattcattcatca

SEQ ID NO: 685934 - DNA, 120 bp, Artificial Sequence
  ENSG00000187607_16 (sequence is synthesized)
gctctcattcaacatcagagaactcataccggagagaaaccctttagatgtaatgagtgtgggaaaagctttaagtgcagttcatctctcatcagacatcaaagagttcacactgaagag

SEQ ID NO: 685935 - DNA, 120 bp, Artificial Sequence
  ENSG00000187607_17 (sequence is synthesized)
caaccctgaaaaattactgaatgtgaagaaatgtaagttggttttatcactgtattaaatacttgagtgtttaggtggaaggcgcatccataatatgcatgtgaggaccaattctgtatg

SEQ ID NO: 685936 - DNA, 120 bp, Artificial Sequence
  ENSG00000187607_18 (sequence is synthesized)
catctaatttcatttgcgtaatacatagttttgagccataagcaggttctttatgtccgttaatttgataattatgaaatctagccagcgatttcaaaattttaatctccaacgtcccaa

SEQ ID NO: 685937 - DNA, 120 bp, Artificial Sequence
  ENSG00000187607_19 (sequence is synthesized)
atagctatctgtggaaattcaagaagtccctgagagtaggtagcagtacgaacattgtgaaatccagttttcccctctcttgtttatgtcagagctttgttgtaagcctctcactttgta

SEQ ID NO: 685938 - DNA, 120 bp, Artificial Sequence
  ENSG00000187607_20 (sequence is synthesized)
aggaaattcttattgggtaggttaggctgagggcttacatccttatcatcaggaagacacaatgttgttatttattactccttgagatctagatacacatatggtataattcatctagag

SEQ ID NO: 685939 - DNA, 120 bp, Artificial Sequence
  ENSG00000187607_21 (sequence is synthesized)
tgtaatttcttttatattagccttaaaaaccaaaaatgctgggttcaaagtccttagaattcccttcctccctcaacaagctgctgtctatgttgatgaccataactgggatgtataata

SEQ ID NO: 685940 - DNA, 85 bp, Artificial Sequence
  ENSG00000187607_22 (sequence is synthesized)
ctgctgtctatgttgatgaccataactgggatgtataatatttacagacaactctaagttacgttcacatggattatgtacatca

SEQ ID NO: 685941 - DNA, 67 bp, Artificial Sequence
  ENSG00000187607_23 (sequence is synthesized)
catcattgatttatgtcattgttatccctctaccgcggagaccttctttcattttccatttccctgg

SEQ ID NO: 685942 - DNA, 120 bp, Artificial Sequence
  ENSG00000187607_24 (sequence is synthesized)
ctctaccgcggagaccttctttcattttccatttccctgggagttcacgtgaagtagtgaatgggtcaaaatcttaacagtggttgttgatcaagtccttcctttcttatccttggcact

SEQ ID NO: 685943 - DNA, 120 bp, Artificial Sequence
  ENSG00000187607_25 (sequence is synthesized)
gaataaatctttggttttccataatcaaagggtgagggagacttcttttgtctacattattcagctttctgaaagctatgctgtgtccatttgagaaaaagccccagggatattgaaggt

SEQ ID NO: 685944 - DNA, 120 bp, Artificial Sequence
  ENSG00000187607_26 (sequence is synthesized)
ctgagaagttgagtggttcagtgtgttattatatttagggtcccagtaaagaagaactgaagcaactgtgagacaccagggcatacttccctgtatgagtggaaaacaaggcacggaaaa

SEQ ID NO: 685945 - DNA, 120 bp, Artificial Sequence
  ENSG00000187607_27 (sequence is synthesized)
tagctcacaggatagtcctcaactgacttgcttgaggataagcagcttcccttcgtgaagaagttgccatttctctggccttcatatttatctactttttgttattgttgtctgtatcgg

SEQ ID NO: 685946 - DNA, 120 bp, Artificial Sequence
  ENSG00000187607_28 (sequence is synthesized)
ttcaatctcacactgctataaagaaatgcctgagactgggtaacttataaagaaaaaaggtttaattggctcatggttccatgggctgtacaggaagtatgactggggaggtctcaggga

SEQ ID NO: 685947 - DNA, 120 bp, Artificial Sequence
  ENSG00000187607_29 (sequence is synthesized)
gcttttactcatggcaaaaggcaaagccagagcaggtatcttcacagggctagagcaagaggaaaagagagaggggaggtgctacacactttttatgcaaccaaatctcatgagaactct

SEQ ID NO: 685948 - DNA, 120 bp, Artificial Sequence
  ENSG00000187607_30 (sequence is synthesized)
atcacgagacagcagtagggggacagtgctaaatcattcatgagaaactacctgcgtggtccagtcaccttgcaccaggccccacctcccacattggggattacaattaaacatgagatt

SEQ ID NO: 685949 - DNA, 89 bp, Artificial Sequence
  ENSG00000187607_31 (sequence is synthesized)
ggaaaaggaactcacctcttttatcatcttagtatttagtactaatggtttagagcaggaattgacaaactgtggcctggactcatgga

SEQ ID NO: 685950 - DNA, 120 bp, Artificial Sequence
  ENSG00000187607_32 (sequence is synthesized)
ttagagcaggaattgacaaactgtggcctggactcatggaccaactctggcccaccacctgtttctcagaagaaaattttattggaactcagccacacttactcatttacatgttgtcct

SEQ ID NO: 685951 - DNA, 120 bp, Artificial Sequence
  ENSG00000187607_33 (sequence is synthesized)
tgactgcctttgtgtccagtgtcagaactgagtagctgcagcggaggttgtgcctctgggctttaatatcacaaacagagcagcttataagcaacagaaacttacttctcacagttttgg

SEQ ID NO: 685952 - DNA, 120 bp, Artificial Sequence
  ENSG00000187607_34 (sequence is synthesized)
aggctgggaagtccaagatcaaggtgtcaacatatttagggtctagggaaggtctgcttcttggttaatagaaagcacctttcactgtgtcttcacatggtagaaggggagagctctggt

SEQ ID NO: 685953 - DNA, 120 bp, Artificial Sequence
  ENSG00000187607_35 (sequence is synthesized)
atcttcagccccttataagggcactaatcccattcatgagagctccaccctcacgacctaatcacctccaaaaggccccatttcgtaataccgtcagttaagtttcattatatgactttg

SEQ ID NO: 685954 - DNA, 120 bp, Artificial Sequence
  ENSG00000187607_36 (sequence is synthesized)
atggggatatagcccatagtaggttgtatgtccctgaaagcctaaaatatttactgtttggctctttacagaaaatattttcttggcccctgttccagagcattcatcaagtcagataaa

SEQ ID NO: 685955 - DNA, 120 bp, Artificial Sequence
  ENSG00000187607_37 (sequence is synthesized)
gggtttaaaccagtcagagaaactaggtggaatggaaaagtactgagagataattggggacagaaaaataaaagagatgggaaatgctgcatcaaaatactcctacctctaggatgttac

SEQ ID NO: 685956 - DNA, 120 bp, Artificial Sequence
  ENSG00000187607_38 (sequence is synthesized)
tatatattgttaggagaattcaagttattgaaacttgccaaattcttgagtgaagaggaattcatttgagagccaaaatttgactaaggaaagaagaccaacatgggctttccaaagttg

SEQ ID NO: 685957 - DNA, 120 bp, Artificial Sequence
  ENSG00000187607_39 (sequence is synthesized)
agtttgaattctgccatccccactaagcagtcatgtgaccttggaaaaactccctactctgagtctcagtttctttatctgtattaggtttcaacaaagggaataaatcattggcttctc

SEQ ID NO: 685958 - DNA, 120 bp, Artificial Sequence
  ENSG00000187607_40 (sequence is synthesized)
atgaggttgtcataaggattaaataagacaatgcatataaaagaactggcagacaataaatatagagtcccccactcctgcttggtgctctctttctctctccttctctacatagagaag

SEQ ID NO: 685959 - DNA, 120 bp, Artificial Sequence
  ENSG00000187607_41 (sequence is synthesized)
tgccagagcatccgtcagtagaagttacttaaggttggctgtgtcttccacatcttttgtttacccatgaagaactgtgaccatcttgttctgtgtcttgtcataaagatgggacgtgac

SEQ ID NO: 685960 - DNA, 120 bp, Artificial Sequence
  ENSG00000187607_42 (sequence is synthesized)
ttctttctgctcttgcttccatctggtgctgttttctgcacagcctccttgagaccttccagaaccttcttttttcctacttcatatcacttaaccagtagctatctgggatggttccag

SEQ ID NO: 685961 - DNA, 120 bp, Artificial Sequence
  ENSG00000187607_43 (sequence is synthesized)
aggctgaagtttgcagttgaataacattttaaatagtgttaagcgacttgggatctctggccctttgcgtttcagtatttgtcctttttatgcctgatgtttaacctgccacatgtttgt

SEQ ID NO: 685962 - DNA, 120 bp, Artificial Sequence
  ENSG00000187607_44 (sequence is synthesized)
actgcaacatgaatcttggaaattttaatgttatgcatttcaaatgtttttggttatctgtaaactaaatgtgcccttattggctcacttgtcaataaagatgtttgtatatgtattgtc

SEQ ID NO: 685963 - DNA, 120 bp, Artificial Sequence
  ENSG00000187607_45 (sequence is synthesized)
ggtgagttgcttgtggtgatgtcgctcgtctcggctcggcctcggcggtggttccccgggtcgttctgtgccgagtcggggctagagtgcgcgtttgttaaaggggcctcgagggcagac

SEQ ID NO: 685964 - DNA, 120 bp, Artificial Sequence
  ENSG00000187607_46 (sequence is synthesized)
catgagccctgtcccttctcactctggcctgatcctctcctcgggggacgcggttgtgccacgggcggggtggtcgcggggttctgggccagtgccccgagcgcggcagaatttgtccaa

SEQ ID NO: 685965 - DNA, 120 bp, Artificial Sequence
  ENSG00000187607_47 (sequence is synthesized)
ttgcagtgatcatcctttttttgattccttatgttcatcttgagagctggtttagggagataactggaagaagaattagtaggtcttaaatcatcacatgtttagctttactaggaactg

SEQ ID NO: 685966 - DNA, 120 bp, Artificial Sequence
  ENSG00000187607_48 (sequence is synthesized)
ggctcaggggaggtggctcttggctggctgtctccattgtcttggggatggatgggctttttaagtgagactgaagggcttggtatgggagcaccgccctttccatggcagctgggcaca

SEQ ID NO: 685967 - DNA, 120 bp, Artificial Sequence
  ENSG00000187607_49 (sequence is synthesized)
cagtggacccttcaaagctacccccaaaatgtgagtgaaatgttaacttctatggcaagaattcacctctttggttgtcaaaaatgttttgttttacataggagaaaacaggcgtagtag

SEQ ID NO: 685968 - DNA, 120 bp, Artificial Sequence
  ENSG00000187607_50 (sequence is synthesized)
tacttttcagtgcttaagaaagtgcctgtgtgcccttatttttaaatttttttaaaattctaaagcatttaaaatatatacagaagtccagaaaataaaataacattcatgtatccatca

SEQ ID NO: 685969 - DNA, 120 bp, Artificial Sequence
  ENSG00000187608_0 (sequence is synthesized)
ggcggctgagaggcagcgaactcatctttgccagtacaggagcttgtgccgtggcccacagcccacagcccacagccatgggctgggacctgacggtgaagatgctggcgggcaacgaat

SEQ ID NO: 685970 - DNA, 120 bp, Artificial Sequence
  ENSG00000187608_1 (sequence is synthesized)
tccaggtgtccctgagcagctccatgtcggtgtcagagctgaaggcgcagatcacccagaagatcggcgtgcacgccttccagcagcgtctggctgtccacccgagcggtgtggcgctgc

SEQ ID NO: 685971 - DNA, 120 bp, Artificial Sequence
  ENSG00000187608_2 (sequence is synthesized)
cggcagcacggtcctgctggtggtggacaaatgcgacgaacctctgagcatcctggtgaggaataacaagggccgcagcagcacctacgaggtacggctgacgcagaccgtggcccacct

SEQ ID NO: 685972 - DNA, 120 bp, Artificial Sequence
  ENSG00000187608_3 (sequence is synthesized)
gaagcagcaagtgagcgggctggagggtgtgcaggacgacctgttctggctgaccttcgaggggaagcccctggaggaccagctcccgctgggggagtacggcctcaagcccctgagcac

SEQ ID NO: 685973 - DNA, 120 bp, Artificial Sequence
  ENSG00000187608_4 (sequence is synthesized)
cgtgttcatgaatctgcgcctgcggggaggcggcacagagcctggcgggcggagctaagggcctccaccagcatccgagcaggatcaagggccggaaataaaggctgttgtaaagagaaa

SEQ ID NO: 685974 - DNA, 120 bp, Artificial Sequence
  ENSG00000187608_5 (sequence is synthesized)
cggcctcacgcgtccgtgcagcggaggcttcctgagccccctggagagcctggcctgggcccgggtgtggagaccctcccgggctttcaatccgggcaggaggcagatggcagactcagc

SEQ ID NO: 685975 - DNA, 120 bp, Artificial Sequence
  ENSG00000187608_6 (sequence is synthesized)
agtcacgtaagagaaccgaattaggaatcgcttaattctgaaagtctggtgagaagacacggcgagaatcggggtccagcacagatgatggcgacagcggagaagggaagggctgggacc

SEQ ID NO: 685976 - DNA, 120 bp, Artificial Sequence
  ENSG00000187609_0 (sequence is synthesized)
aaggttccgcgccgggcgtggacggtgtggggcggtcccggccccgcagatcctcgttcctagctgcctgccagcgtcctcggcccggccctgaggatggacccaggagatcccgctggt

SEQ ID NO: 685977 - DNA, 120 bp, Artificial Sequence
  ENSG00000187609_1 (sequence is synthesized)
gaccctgccgctggcgagcgccaccgcatgggccgggaccccctcctgctcctgcaggccctgcagaccctgtggtccacgcgggagcggaagcagctccgggaggaagcctggcggggg

SEQ ID NO: 685978 - DNA, 120 bp, Artificial Sequence
  ENSG00000187609_2 (sequence is synthesized)
tttgctgccttggacgaccccctggccgggcttctggacatgctggagagctgccggggccagcggggagagggcccctccctggcggcctggatctcccaccagctgcagtgctggcta

SEQ ID NO: 685979 - DNA, 120 bp, Artificial Sequence
  ENSG00000187609_3 (sequence is synthesized)
caggcacagccatgcccgagcctggcccagcacagcctgaggctgaagcagctgcaggcccgagcggtcaaagtcctcactgagagcccccccagccttgcggcaccactggccagcatc

SEQ ID NO: 685980 - DNA, 120 bp, Artificial Sequence
  ENSG00000187609_4 (sequence is synthesized)
ttccagctgcaggatgcagacaggagctgcctgctggcacacgtccaccgcctccaccacgagggcaggttcagagaagcagccacgctgggcgcgacgttgaagctgcagtcggagctt

SEQ ID NO: 685981 - DNA, 120 bp, Artificial Sequence
  ENSG00000187609_5 (sequence is synthesized)
ggcgttgaaaagatgagcatcccactgctcctccaggacaaggtggccctcgtggagcgctatgtggccggcttcccggacctccagaggaggctgctggtcctcatggattcctggtgc

SEQ ID NO: 685982 - DNA, 120 bp, Artificial Sequence
  ENSG00000187609_6 (sequence is synthesized)
cagcccggctttgacatcaaggacgttgccagacggtaccctgaggtgacctccttgagcctggagaagctgagtccgaaggcgctgagcaggcaggtcttgcgtctgcaggagcggtac

SEQ ID NO: 685983 - DNA, 120 bp, Artificial Sequence
  ENSG00000187609_7 (sequence is synthesized)
ggcgtagccccagcgctgtgtcccaacgcggccattcagcagcgcctggcggccctgcggcacctgtgccacaagcggtttgtggagaagagcctgtcacaggagaactggaccgaccat

SEQ ID NO: 685984 - DNA, 120 bp, Artificial Sequence
  ENSG00000187609_8 (sequence is synthesized)
gtgcagggcctggtggggcagagcccgtggcttcaggagcagctgtctcagctgctggtctcccacagtgacccagtcacggccgcccagtgtgccatggaactcttgctgcccgaggag

SEQ ID NO: 685985 - DNA, 120 bp, Artificial Sequence
  ENSG00000187609_9 (sequence is synthesized)
cggctgccggctgcggtggctgtggaactccgccggttcaggctccaggggagggcgactgaggctgactcgaggctggaggtgaaggacatgaaggaccgttactaccagctgcccatc

SEQ ID NO: 685986 - DNA, 120 bp, Artificial Sequence
  ENSG00000187609_10 (sequence is synthesized)
cccagggagaacgtccacctcctggcctcgtgggaagacctgaccagacacgagggtgcactcctgcagtgccaccaagtggttggtgtagacgtggagtggacacctgtgtttgttgct

SEQ ID NO: 685987 - DNA, 120 bp, Artificial Sequence
  ENSG00000187609_11 (sequence is synthesized)
ctcctgcaggtggccgtggagggccacgtgttccttctggacgtcctggcactctcgcagccaccaacagggcagggagcccaggccttttcccggctggtggcccagctcctctcggac

SEQ ID NO: 685988 - DNA, 120 bp, Artificial Sequence
  ENSG00000187609_12 (sequence is synthesized)
ccctctatcaccaagctgggctacgggatggtgggggacctgcaaaaactgggcacgtcctgccccgccctggcccatgtggagaagcagattctgggcggcatggacctgctgctggtg

SEQ ID NO: 685989 - DNA, 120 bp, Artificial Sequence
  ENSG00000187609_13 (sequence is synthesized)
cacagacagatgcgggtggcgagcgtgccagccccagccgtggacagggccagggagctgaggggcctgagcctcctggtgcagcaggtgctgggcacagccctggacaagacgcagcag

SEQ ID NO: 685990 - DNA, 120 bp, Artificial Sequence
  ENSG00000187609_14 (sequence is synthesized)
ctgtccaactgggaccggaggccgctctgcgaggagcaggtcatctacgcagctgccgacgcctactgcctgctggaggtgcaccaagccctgtgcagagagcccgcccgcttccacctg

SEQ ID NO: 685991 - DNA, 120 bp, Artificial Sequence
  ENSG00000187609_15 (sequence is synthesized)
tcggaggacctggctgggagccggaggcccaggcacagagagagaccaggggcacggaagccacccggcctgcagaaagcgtcagcaccggccgcacccaggcaggtccctgtggctgtg

SEQ ID NO: 685992 - DNA, 120 bp, Artificial Sequence
  ENSG00000187609_16 (sequence is synthesized)
gctgtgtctgagggcgctgcccctcagattccggccagggccttccgtgtggtgtgtgacaacatgctgcaggggctggcacggagcctccgctgtctcggtgtggatgcacgcatgctg

SEQ ID NO: 685993 - DNA, 120 bp, Artificial Sequence
  ENSG00000187609_17 (sequence is synthesized)
ggcaatggtgaagaccaccgcagggcggccgaggttgccaggcaggaggggaggatcattctgacgtcggggcagccattccacaagctccgggcccaggtcggggctgggcgctgcctc

SEQ ID NO: 685994 - DNA, 120 bp, Artificial Sequence
  ENSG00000187609_18 (sequence is synthesized)
tcggtcgactgctccctgaaggcccagcagcaggccaaggctgtgctcaagcatttcaacgtgcgtgtcacccacgcagacatcttcagccgctgccaggcctgtaactgtgaccagtac

SEQ ID NO: 685995 - DNA, 120 bp, Artificial Sequence
  ENSG00000187609_19 (sequence is synthesized)
ctaaaggtctccagggacatgatgaagcagctcatgtggctcagcagtcaccaggaggggcccaggagctcaggtgacgaggccacccagagccaggcggtgcaggagccaggcccagcc

SEQ ID NO: 685996 - DNA, 120 bp, Artificial Sequence
  ENSG00000187609_20 (sequence is synthesized)
ccagacgcagcccctgagggctgcacctatgaccgcccctgccgctggctgcagatggctgacctgcgggcggagacaccggacatgctggccgacggcacccggctgcagctggcaggg

SEQ ID NO: 685997 - DNA, 120 bp, Artificial Sequence
  ENSG00000187609_21 (sequence is synthesized)
gtcccggtgggtgtgctgaggacacctgggctgcggtgcttctactgctgcacgggctgtggaaaggtcttctgggacggctcccacctgggtcgtgttgccacccacttccgagacatg

SEQ ID NO: 685998 - DNA, 120 bp, Artificial Sequence
  ENSG00000187609_22 (sequence is synthesized)
ctggagagcgcccccagcccctgcgagccgagcccagcccccagcccggccagcagtcccttctgaggacagccagacaataaacatggaaagtgcccgactgctgggcccatggccgtg
